United States Patent Application Publication US 2024/0398993 A1 - sequence listing, part 9

SEQ ID NO: 26817 - protein, 540 aa, Homo sapiens
MNSTGHLQDAPNATSLHVPHSQEGNSTSLQEGLQDLIHTATLVTCTFLLAVIFCLGSYGNFIVFLSFFDPAFRKFRTNFDFMILNLSFCDLFICGVTAPMFTFVLFFSSASSIPDAFCFTFHLTSSGFIIMSLKTVAVIALHRLRMVLGKQPNRTASFPCTVLLTLLLWATSFTLATLATLKTSKSHLCLPMSSLIAGKGKAILSLYVVDFTFCVAVVSVSYIMIAQTLRKNAQVRKCPPVITVDASRPQPFMGVPVQGGGDPIQCAMPALYRNQNYNKLQHVQTRGYTKSPNQLVTPAASRLQLVSAINLSTAKDSKAVVTCVIIVLSVLVCCLPLGISLVQVVLSSNGSFILYQFELFGFTLIFFKSGLNPFIYSRNSAGLRRKVLWCLQYIGLGFFCCKQKTRLRAMGKGNLEVNRNKSSHHETNSAYMLSPKPQKKFVDQACGPSHSKESMVSPKISAGHQHCGQSSSTPINTRIEPYYSIYNSSPSQEESSPCNLQPVNSFGFANSYIAMHYHTTNDLVQEYDSTSAKQIPVPSV

SEQ ID NO: 26818 - protein, 349 aa, Homo sapiens
MASKKVCIVGSGNWGSAIAKIVGGNAAQLAQFDPRVTMWVFEEDIGGKKLTEIINTQHENVKYLPGHKLPPNVVAVPDVVQAAEDADILIFVVPHQFIGKICDQLKGHLKANATGISLIKGVDEGPNGLKLISEVIGERLGIPMSVLMGANIASEVADEKFCETTIGCKDPAQGQLLKELMQTPNFRITVVQEVDTVEICGALKNVVAVGAGFCDGLGFGDNTKAAVIRLGLMEMIAFAKLFCSGPVSSATFLESCGVADLITTCYGGRNRKVAEAFARTGKSIEQLEKELLNGQKLQGPETARELYSILQHKGLVDKFPLFMAVYKVCYEGQPVGEFIHCLQNHPEHM

SEQ ID NO: 26819 - protein, 326 aa, Homo sapiens
MASKKVCIVGSGNWGSAIAKIVGGNAAQLAQFDPRVTMWVFEEDIGGKKLTEIINTQHENVKYLPGHKLPPNVFIGKICDQLKGHLKANATGISLIKGVDEGPNGLKLISEVIGERLGIPMSVLMGANIASEVADEKFCETTIGCKDPAQGQLLKELMQTPNFRITVVQEVDTVEICGALKNVVAVGAGFCDGLGFGDNTKAAVIRLGLMEMIAFAKLFCSGPVSSATFLESCGVADLITTCYGGRNRKVAEAFARTGKSIEQLEKELLNGQKLQGPETARELYSILQHKGLVDKFPLFMAVYKVCYEGQPVGEFIHCLQNHPEHM

SEQ ID NO: 26820 - protein, 331 aa, Homo sapiens
MKTSRRGRALLAVALNLLALLFATTAFLTTHWCQGTQRVPKPGCGQGGRANCPNSGANATANGTAAPAAAAAAATASGNGPPGGALYSWETGDDRFLFRNFHTGIWYSCEEELSGLGEKCRSFIDLAPASEKGVLWLSVVSEVLYILLLVVGFSLMCLELFHSSNVIDGLKLNAFAAVFTVLSGLLGMVAHMMYTQVFQVTVSLGPEDWRPHSWDYGWSFCLAWGSFTCCMAASVTTLNSYTKTVIEFRHKRKVFEQGYREEPTFIDPEAIKYFRERMEKRDGSEEDFHLDCRHERYPARHQPHMADSWPRSSAQEAPELNRQCWVLGHWV

SEQ ID NO: 26821 - protein, 280 aa, Homo sapiens
MKTSRRGRALLAVALNLLALLFATTAFLTTHWCQGTQRVPKPGCGQGGRANCPNSGANATANGTAAPAAAAAAATASGNGPPGGALYSWETGDDRFLFRNFHTGIWYSCEEELSGLGEKCRSFIDLAPASEKGLLGMVAHMMYTQVFQVTVSLGPEDWRPHSWDYGWSFCLAWGSFTCCMAASVTTLNSYTKTVIEFRHKRKVFEQGYREEPTFIDPEAIKYFRERMEKRDGSEEDFHLDCRHERYPARHQPHMADSWPRSSAQEAPELNRQCWVLGHWV

SEQ ID NO: 26822 - protein, 194 aa, Homo sapiens
MCLELFHSSNVIDGLKLNAFAAVFTVLSGLLGMVAHMMYTQVFQVTVSLGPEDWRPHSWDYGWSFCLAWGSFTCCMAASVTTLNSYTKTVIEFRHKRKVFEQGYREEPTFIDPEAIKYFRERWQIEAQRGRATCPRSHSWMEKRDGSEEDFHLDCRHERYPARHQPHMADSWPRSSAQEAPELNRQCWVLGHWV

SEQ ID NO: 26823 - protein, 176 aa, Homo sapiens
MCLELFHSSNVIDGLKLNAFAAVFTVLSGLLGMVAHMMYTQVFQVTVSLGPEDWRPHSWDYGWSFCLAWGSFTCCMAASVTTLNSYTKTVIEFRHKRKVFEQGYREEPTFIDPEAIKYFRERMEKRDGSEEDFHLDCRHERYPARHQPHMADSWPRSSAQEAPELNRQCWVLGHWV

SEQ ID NO: 26824 - protein, 115 aa, Homo sapiens
MNAFLLSALCLLGAWAALAGGVTVQDGNFSFSLESVKKLKDLQEPQEPRVGKLRNFAPIPGEPVVPILCSNPNFPEELKPLCKEPNAQEILQRLEEIAEDPGTCEICAYAACTGC

SEQ ID NO: 26825 - protein, 208 aa, Homo sapiens
MKLLPSVVLKLFLAAVLSALVTGESLERLRRGLAAGTSNPDPPTVSTDQLLPLGGGRDRKVRDLQEADLDLLRVTLSSKPQALATPNKEEHGKRKKKGKGLGKKRDPCLRKYKDFCIHGECKYVKELRAPSCICHPGYHGERCHGLSLPVENRLYTYDHTTILAVVAVVLSSVCLLVIVGLLMFRYHRRGGYDVENEEKVKLGMTNSH

SEQ ID NO: 26826 - protein, 240 aa, Homo sapiens
MRTEAEAAGPPLEPGDFVQLPVPVIQQLYHWDCGLACSRMVLRYLGQLDDSEFERALQKLQLTRSIWTIDLAYLMHHFGVRHRFCTQTLGVDKGYKNQSFYRKHFDTEETRVNQLFAQAKACKVLVEKCTVSVKDIQAHLAQGHVAIVLVNSGVLHCDLCSSPVKYCCFTPSGHHCFCRTPDYQGHFIVLRGYNRATGCIFYNNPAYADPGMCSTSISNFEEARTSYGTDEDILFVYLDS

SEQ ID NO: 26827 - protein, 239 aa, Homo sapiens
MRTEAEAAGPPLEPGDFVQLPVPVIQQLYHWDCGLACSRMVLRYLGQLDDSEFERALQKLQLTRSIWTIDLAYLMHHFGVRHRFCTQTLGVDKGYKNQSFYRKHFDTEETRVNQLFAQAKACKVLVEKCTVSVKDIQAHLAQGHVAIVLVNSGVLHCDLCSSPVKYCCFTPSGHHCFCRTPDYQGHFIVLRGYNRATGCIFYNNPAYADRMCSTSISNFEEARTSYGTDEDILFVYLDS

SEQ ID NO: 26828 - protein, 295 aa, Homo sapiens
MTGPGGRRNDPWGRQRAREGAHTSKHPTPRTGWTARRRRGAWALRPGTAGGWAKGQDFPSQFHLLIPAPPGDFVQLPVPVIQQLYHWDCGLACSRMVLRYLGQLDDSEFERALQKLQLTRSIWTIDLAYLMHHFGVRHRFCTQTLGVDKGYKNQSFYRKHFDTEETRVNQLFAQAKACKVLVEKCTVSVKDIQAHLAQGHVAIVLVNSGVLHCDLCSSPVKYCCFTPSGHHCFCRTPDYQGHFIVLRGYNRATGCIFYNNPAYADRMCSTSISNFEEARTSYGTDEDILFVYLDS

SEQ ID NO: 26829 - protein, 663 aa, Homo sapiens
MLQMPKLNEIPPGRAGRREARGEGRWPGQTGPEAARLEWRAQGQAGGARAPWDSWGSSRLPTQPGPGWSRCPPSLLCALSFQKSTMESKDEVSDTDSGIILQSGPDSPVSPMKELTHAVHKQQRALEARLEACLEELRRLCLREAELTGTLPAEYPLKPGEKAPKVRRRIGAAYKLDDWALHREDPLSSLERQLALQLQITEAARRLCLEENLSRQARRQRKHSMLQEEKKLQELQRCLVERRRNSEPPPAAALPLGRELSASDDSSLSDGLLLEEEESQVPKPPPESPAPPSRPLPPQTLEGLQPTGPEAGSPERAPVQNSPWKETSLDHPYEKPRKSSEPWSESSSPATTPQDGPSASSLWLLEPASYHVVPIRGVPGQWQGRTSAPATPEIQGRRGQSQSLRVDSFRAGPEGRGRSAFPRRRPTHYTVTVPDSCFPATKPPLPHAACHSCSEDSGSDVSSISHPTSPGSSSPDISFLQPLSPPKTHRHRGAWVPAGSRELVAHHPKLLLPPGYFPAGRYVVVAESPLPPGEWELRRAAPGPAYEEEGTPLRYQRLVPSRSRIVRTPSLKDSPAGRGLSKAAVSEELKWWHERARLRSTRPHSLDRQGAFRVRSLPLGREGFGRALGPRAQVPTVCVLRRSPDGAPVQVFVPEKGEIISQV

SEQ ID NO: 26830 - protein, 578 aa, Homo sapiens
MESKDEVSDTDSGIILQSGPDSPVSPMKELTHAVHKQQRALEARLEACLEELRRLCLREAELTGTLPAEYPLKPGEKAPKVRRRIGAAYKLDDWALHREDPLSSLERQLALQLQITEAARRLCLEENLSRQARRQRKHSMLQEEKKLQELQRCLVERRRNSEPPPAAALPLGRELSASDDSSLSDGLLLEEEESQVPKPPPESPAPPSRPLPPQTLEGLQPTGPEAGSPERAPVQNSPWKETSLDHPYEKPRKSSEPWSESSSPATTPQDGPSASSLWLLEPASYHVVPIRGVPGQWQGRTSAPATPEIQGRRGQSQSLRVDSFRAGPEGRGRSAFPRRRPTHYTVTVPDSCFPATKPPLPHAACHSCSEDSGSDVSSISHPTSPGSSSPDISFLQPLSPPKTHRHRGAWVPAGSRELVAHHPKLLLPPGYFPAGRYVVVAESPLPPGEWELRRAAPGPAYEEEGTPLRYQRLVPSRSRIVRTPSLKDSPAGRGLSKAAVSEELKWWHERARLRSTRPHSLDRQGAFRVRSLPLGREGFGRALGPRAQVPTVCVLRRSPDGAPVQVFVPEKGEIISQV

SEQ ID NO: 26831 - protein, 213 aa, Homo sapiens [sequence omitted]

SEQ ID NO: 26832 - protein, 560 aa, Homo sapiens
MFARMSDLHVLLLMALVGKTACGFSLMSLLESLDPDWTPDQYDYSYEDYNQEENTSSTLTHAENPDWYYTEDQADPCQPNPCEHGGDCLVHGSTFTCSCLAPFSGNKCQKVQNTCKDNPCGRGQCLITQSPPYYRCVCKHPYTGPSCSQVVPVCRPNPCQNGATCSRHKRRSKFTCACPDQFKGKFCEIGSDDCYVGDGYSYRGKMNRTVNQHACLYWNSHLLLQENYNMFMEDAETHGIGEHNFCRNPDADEKPWCFIKVTNDKVKWEYCDVSACSAQDVAYPEESPTEPSTKLPGFDSCGKTEIAERKIKRIYGGFKSTAGKHPWQASLQSSLPLTISMPQGHFCGGALIHPCWVLTAAHCTDIKTRHLKVVLGDQDLKKEEFHEQSFRVEKIFKYSHYNERDEIPHNDIALLKLKPVDGHCALESKYVKTVCLPDGSFPSGSECHISGWGVTETGKGSRQLLDAKVKLIANTLCNSRQLYDHMIDDSMICAGNLQKPGQDTCQGDSGGPLTCEKDGTYYVYGIVSWGLECGKRPGVYTQVTKFLNWIKATIKSESGF

SEQ ID NO: 26833 - protein, 534 aa, Homo sapiens
MSLLESLDPDWTPDQYDYSYEDYNQEENTSSTLTHAENPDWYYTEDQADPCQPNPCEHGGDCLVHGSTFTCSCLAPFSGNKCQKVQNTCKDNPCGRGQCLITQSPPYYRCVCKHPYTGPSCSQVVPVCRPNPCQNGATCSRHKRRSKFTCACPDQFKGKFCEIGSDDCYVGDGYSYRGKMNRTVNQHACLYWNSHLLLQENYNMFMEDAETHGIGEHNFCRNPDADEKPWCFIKVTNDKVKWEYCDVSACSAQDVAYPEESPTEPSTKLPGFDSCGKTEIAERKIKRIYGGFKSTAGKHPWQASLQSSLPLTISMPQGHFCGGALIHPCWVLTAAHCTDIKTRHLKVVLGDQDLKKEEFHEQSFRVEKIFKYSHYNERDEIPHNDIALLKLKPVDGHCALESKYVKTVCLPDGSFPSGSECHISGWGVTETGKGSRQLLDAKVKLIANTLCNSRQLYDHMIDDSMICAGNLQKPGQDTCQGDSGGPLTCEKDGTYYVYGIVSWGLECGKRPGVYTQVTKFLNWIKATIKSESGF

SEQ ID NO: 26834 - protein, 141 aa, Homo sapiens
MLSAQERAQIAQVWDLIAGHEAQFGAELLLRLFTVYPSTKVYFPHLSACQDATQLLSHGQRMLAAVGAAVQHVDNLRAALSPLADLHALVLRVDPANFPLLIQCFHVVLASHLQDEFTVQMQAAWDKFLTGVAVVLTEKYR

SEQ ID NO: 26835 - protein, 638 aa, Homo sapiens
MNRQVCKKSFSGRSQGFSGRSAVVSGSSRMSCVARSGGAGGGACGFRSGAGSFGSRSLYNLGSNKSISISVAAGSSRAGGFGGGRSSCGFAGGYGGGFGGSYGGGFGGGRGVGSGFGGAGGFGGAGGFGGPGVFGGPGSFGGPGGFGPGGFPGGIQEVIVNQSLLQPLNVEIDPQIGQVKAQEREQIKTLNNKFASFIDKVRFLEQQNKVLETKWELLQQQTTGSGPSSLEPCFESYISFLCKQLDSLLGERGNLEGELKSMQDLVEDFKKKYEDEINKRTAAENEFVGLKKDVDAAFMNKVELQAKVDSLTDEVSFLRTLYEMELSQMQSHASDTSVVLSMDNNRCLDLGSIIAEVRAQYEEIAQRSKSEAEALYQTKLGELQTTAGRHGDDLRNTKSEIMELNRMIQRLRAEIENVKKQNANLQTAIAEAEQRGEMALKDANAKLQDLQTALQKAKDDLARLLRDYQELMNVKLALDVEIATYRKLLEGEECRMSGECQSAVCISVVSNVTSTSGSSGSSRGVFGGVSGSGSGGYKGGSSSSSSSGYGVSGGSGSGYGGVSSGSTGGRGSSGSYQSSSSGSRLGGAGSISVSHSGMGSSSGSIQTSGGSGYKSGGGGSTSIRFSQTTSSSQHSSTK

SEQ ID NO: 26836 - protein, 126 aa, Homo sapiens
MPEPTKSAPAPKKGSKKAVTKAQKKDGKKRKRSRKESYSVYVYKVLKQVHPDTGISSKAMGIMNSFVNDIFERIAGEASRLAHYNKRSTITSREIQTAVRLLLPGELAKHAVSEGTKAVTKYTSSK

SEQ ID NO: 26837 - protein, 669 aa, Homo sapiens
MWTLVGRGWGCARALAPRATGAALLVAPGPRSAPTLGAAPESWATDRLYSSAEFKEKLDMSRFPVENIRNFSIVAHVDHGKSTLADRLLELTGTIDKTKNNKQVLDKLQVERERGITVKAQTASLFYNCEGKQYLLNLIDTPGHVDFSYEVSRSLSACQGVLLVVDANEGIQAQTVANFFLAFEAQLSVIPVINKIDLKNADPERVENQIEKVFDIPSDECIKISAKLGTNVESVLQAIIERIPPPKVHRKNPLRALVFDSTFDQYRGVIANVALFDGVVSKGDKIVSAHTQKTYEVNEVGVLNPNEQPTHKLYAGQVGYLIAGMKDVTEAQIGDTLCLHKQPVEPLPGFKSAKPMVFAGMYPLDQSEYNNLKSAIEKLTLNDSSVTVHRDSSLALGAGWRLGFLGLLHMEVFNQRLEQEYNASVILTTPTVPYKAVLSSSKLIKEHREKEITIINPAQFPDKSKVTEYLEPVVLGTIITPDEYTGKIMMLCEARRAVQKNMIFIDQNRVMLKYLFPLNEIVVDFYDSLKSLSSGYASFDYEDAGYQTAELVKMDILLNGNTVEELVTVVHKDKAHSIGKAICERLKDSLPRQLFEIAIQAAIGSKIIARETVKAYRKNVLAKCYGGDITRKMKLLKRQAEGKKKLRKIGNVEVPKDAFIKVLKTQSSK

SEQ ID NO: 26838 - protein, 1211 aa, Homo sapiens
MATTATPATNQGWPEDFGFRLGGSGPCFVLEVAKGSSAHAGGLRPGDQILEVEGLAVGGLSRERLVRLARRCPRVPPSLGVLPAPDGGPGPGSGPAAPTTVLRAPRCGRGLALGRELLRLAGRKRPDAVHRERRRKAQEFSRKVDEILGDQPTAKEQVFAALKQFAAEQRVDDLVWTLTLALPREACGPLLDNLRIFIPKKHRARFDEVVSQGLLGKLCRARRAQGAQRLRRSRSEERPERLLVSTRASAPPRRPDEPPPRRASLLVGGLAGPGGARRTVRVYKGNKSFGFTLRGHGPVWIESVLPGSPADNAALKSGDRILFLNGLDMRNCSHDKVVSMLQGSGAMPTLVVEEGLVPFASDSDSLDSPNPSSALTSLQWVAEILPSSIRVQGRTFSQQLEHLLTPPERYGVCRALESFFQHRNIDTLIVDVYPVLDTPAKQVLWQFIYQLLTYEEQELCQEKIACFLGYTAMTAEPEPELDLESEPTPEPQPRSSLRASSMCRRSLRSQGLEAGLSCGPSECPEMPLPLIPGERQAGDGTSLPETPNPKMMSAVYAELESRLNSSFKGKMGTVSKSRASPPGPSPAVTTGPRTLSGVSWPSERLLPSPCYHPLCSGGLASPSSSESHPYASLDSSRAPSPQPGPGPICPDSPPSPDPTRPPSRRKLFTFSHPVRSRDTDRFLDVLSEQLGPRVTIVDDFLTPENDYEEMSFHDDQGSFVTNERSSASDCISSSEEGSSLTYSSISDHIPPPPLSPPPPPPLPFHDAKPSSRSSDGSRGPAQALAKPLTQLSHPVPPPPPPPLPPPVPCAPPMLSRGLGHRRSETSHMSVKRLRWEQVENSEGTIWGQLGEDSDYDKLSDMVKYLDLELHFGTQKPAKPVPGPEPFRKKEVVEILSHKKAYNTSILLAHLKLSPAELRQVLMSMEPRRLEPAHLAQLLLFAPDADEEQRYQAFREAPGRLSEPDQFVLQMLSVPEYKTRLRSLHFQATLQEKTEEIRGSLECLRQASLELKNSRKLAKILEFVLAMGNYLNDGQPKTNKTTGFKINFLTELNSTKTVDGKSTFLHILAKSLSQHFPELLGFAQDLPTVPLAAKVNQRALTSDLADLHGTISEIQDACQSISPSSEDKFAMVMSSFLETAQPALRALDGLQREAMEELGKALAFFGEDSKATTSEAFFGIFAEFMSKFERALSDLQAGEGLRSSGMVSPLAW

SEQ ID NO: 26839 - protein, 618 aa, Homo sapiens
MTQEYDNKRPVLVLQNEALYPQRRSYTSEDEAWKSFLENPLTAATKAMMSINGDEDSAAALGLLYDYYKVPRERRSSTAKPEVEHPEPDHSKRNSIPIVTEQPLISAGENRVQVLKNVPFNIVLPHGNQLGIDKRGHLTAPDTTVTVSIATMPTHSIKTETQPHGFAVGIPPAVYHPEPTERVVVFDRNLNTDQFSSGAQAPNAQRRTPDSTFSETFKEGVQEVFFPSDLSLRMPGMNSEDYVFDSVSGNNFEYTLEASKSLRQKPGDSTMTYLNKGQFYPITLKEVSSSEGIHHPISKVRSVIMVVFAEDKSREDQLRHWKYWHSRQHTAKQRCIDIADYKESFNTISNIEEIAYNAISFTWDINDEAKVFISVNCLSTDFSSQKGVKGLPLNIQVDTYSYNNRSNKPVHRAYCQIKVFCDKGAERKIRDEERKQSKRKVSDVKVPLLPSHKRMDITVFKPFIDLDTQPVLFIPDVHFANLQRGTHVLPIASEELEGEGSVLKRGPYGTEDDFAVPPSTKLARIEEPKRVLLYVRKESEEVFDALMLKTPSLKGLMEAISDKYDVPHDKIGKIFKKCKKGILVNMDDNIVKHYSNEDTFQLQIEEAGGSYKLTLTEI

SEQ ID NO: 26840 - protein, 429 aa, Homo sapiens
MASLWESPQQCIILSPLSGWWFSIGISILTSSALVLKPQMLKGELQTRPSQRPSRKAFRRNNFEYTLEASKSLRQKPGDSTMTYLNKGQFYPITLKEVSSSEGIHHPISKVRSVIMVVFAEDKSREDQLRHWKYWHSRQHTAKQRCIDIADYKESFNTISNIEEIAYNAISFTWDINDEAKVFISVNCLSTDFSSQKGVKGLPLNIQVDTYSYNNRSNKPVHRAYCQIKVFCDKGAERKIRDEERKQSKRKVSDVKVPLLPSHKRMDITVFKPFIDLDTQPVLFIPDVHFANLQRGTHVLPIASEELEGEGSVLKRGPYGTEDDFAVPPSTKLARIEEPKRVLLYVRKESEEVFDALMLKTPSLKGLMEAISDKYDVPHDKIGKIFKKCKKGILVNMDDNIVKHYSNEDTFQLQIEEAGGSYKLTLTEI

SEQ ID NO: 26841 - protein, 511 aa, Homo sapiens
MTQEYDNKRPVLVLQNEALYPQRRSYTSEDEAWKSFLENPLTAATKAMMSINGDEDSAAALGLLYDYYKVPRERRSSTAKPEVEHPEPDHSKRNSIPIVTEQPLISAGENRVQVLKNVPFNIVLPHGNQLGIDKRGHLTAPDTTVTVSIATMPTHSIKTETQPHGFAVGIPPAVYHPEPTERVVVFDRNLNTDQFSSGAQAPNAQRRTPDSTFSETFKEGVQEVFFPSDLSLRMPGMNSEDYVFDSVSGNNFEYTLEASKSLRQKPGDSTMTYLNKGQFYPITLKEVSSSEGIHHPISKVRSVIMVVFAEDKSREDQLRHWKYWHSRQHTAKQRCIDIADYKESFNTISNIEEIAYNAISFTWDINDEAKVFISVNCLSTDFSSQKGVKGLPLNIQVDTYSYNNRSNKPVHRAYCQIKVFCDKGAERKIRDEERKQSKRKGKCPDPSSQFLMLKCHCFPLTSEWISQFSNPSLISILSLSSSFLTCTLPTCSGALMSFPLPLKNWRVKALS

SEQ ID NO: 26842 - protein, 949 aa, Homo sapiens
MAQVAVSTLPVEEESSSETRMVVTFLVSALESMCKELAKSKAEVACIAVYETDVFVVGTERGCAFVNARTDFQKDFAKYCVAEGLCEVKPPCPVNGMQVHSGETEILRKAVEDYFCFCYGKALGTTVMVPVPYEKMLRDQSAVVVQGLPEGVAFQHPENYDLATLKWILENKAGISFIINRPFLGPESQLGGPGMVTDAERSIVSPSESCGPINVKTEPMEDSGISLKAEAVSVKKESEDPNYYQYNMQGSHPSSTSNEVIEMELPMEDSTPLVPSEEPNEDPEAEVKIEGNTNSSSVTNSAAGVEDLNIVQVTVPDNEKERLSSIEKIKQLREQVNDLFSRKFGEAIGVDFPVKVPYRKITFNPGCVVIDGMPPGVVFKAPGYLEISSMRRILEAAEFIKFTVIRPLPGLELSNVGKRKIDQEGRVFQEKWERAYFFVEVQNIPTCLICKQSMSVSKEYNLRRHYQTNHSKHYDQYMERMRDEKLHELKKGLRKYLLGSSDTECPEQKQVFANPSPTQKSPVQPVEDLAGNLWEKLREKIRSFVAYSIAIDEITDINNTTQLAIFIRGVDENFDVSEELLDTVPMTGTKSGNEIFSRVEKSLKNFCIDWSKLVSVASTGTPAMVDANNGLVTKLKSRVATFCKGAELKSICCIIHPESLCAQKLKMDHVMDVVVKSVNWICSRGLNHSEFTTLLYELDSQYGSLLYYTEIKWLSRGLVLKRFFESLEEIDSFMSSRGKPLPQLSSIDWIRDLAFLVDMTMHLNALNISLQGHSQIVTQMYDLIRAFLAKLCLWETHLTRNNLAHFPTLKLASRNESDGLNYIPKIAELQTEFQKRLSDFKLYESELTLFSSPFSTKIDSVHEELQMEVIDLQCNTVLKTKYDKVGIPEFYKYLWGSYPKYKHHCAKILSMFGSTYICEQLFSIMKLSKTKYCSQLKDSQWDSVLHIAT

SEQ ID NO: 26843 - protein, 181 aa, Homo sapiens
MAQVAVSTLPVEEESSSETRMVVTFLVSALESMCKELAKSKAEVACIAVYETDVFVVGTERGCAFVNARTDFQKDFAKYCVAEGLCEVKPPCPVNGMQVHSGETEILRKAVEDYFCFCYGKALGTTVMVPVPYEKMLRDQSAVVVQGLPEGVAFQHPENYDLATLKWILENKAGISFIINR

SEQ ID NO: 26844 - protein, 498 aa, Homo sapiens
MAQVAVSTLPVEEESSSETRMVVTFLVSALESMCKELAKSKAEVACIAVYETDVFVVGTERGCAFVNARTDFQKDFAKYCVAEGLCEVKPPCPVNGMQVHSGETEILRKAVEDYFCFCYGKALGTTVMVPVPYEKMLRDQSAVVVQGLPEGVAFQHPENYDLATLKWILENKAGISFIINRPFLGPESQLGGPGMVTDAERSIVSPSESCGPINVKTEPMEDSGISLKAEAVSVKKESEDPNYYQYNMQGSHPSSTSNEVIEMELPMEDSTPLVPSEEPNEDPEAEVKIEGNTNSSSVTNSAAGVEDLNIVQVTVPDNEKERLSSIEKIKQLREQVNDLFSRKFGEAIGVDFPVKVPYRKITFNPGCVVIDGMPPGVVFKAPGYLEISSMRRILEAAEFIKFTVIRPLPGLELSNGLLEAGAGGLLEAGSLRPAWATWQDPISTKNLKISWKQWLTPVAPATWQAEAGGSLELRSLRQQRTIIAILHSSLGDRTRPCL

SEQ ID NO: 26845 - protein, 108 aa, Homo sapiens
MAQVAVSTLPVEEESSSETRMVVTFLVSALESMCKELAKSKAEVACIAVYETDVFVVGTERGCAFVNARTDFQKDFAKYCRCFNFILCIPNLKRIAGKTSTVFSSKLS

SEQ ID NO: 26846 - protein, 256 aa, Homo sapiens
MAQVAVSTLPVEEESSSETRMVVTFLVSALESMCKELAKSKAEVACIAVYETDVFVVGTERGCAFVNARTDFQKDFAKYCVAEGLCEVKPPCPVNGMQVHSGETEILRKAVEDYFCFCYGKALGTTVMVPVPYEKMLRDQSAVVVQGLPEGVAFQHPENYDLATLKWILENKAGISFIINRPFLGPESQLGGPGMVTDAERSIVSPSESCGPINVKTEPMEDSGGYQDAFRIKYRPSVVAHACNPSNLGGRGRRIT

SEQ ID NO: 26847 - protein, 496 aa, Homo sapiens
MSVSKEYNLRRHYQTNHSKHYDQYMERMRDEKLHELKKGLRKYLLGSSDTECPEQKQVFANPSPTQKSPVQPVEDLAGNLWEKLREKIRSFVAYSIAIDEITDINNTTQLAIFIRGVDENFDVSEELLDTVPMTGTKSGNEIFSRVEKSLKNFCIDWSKLVSVASTGTPAMVDANNGLVTKLKSRVATFCKGAELKSICCIIHPESLCAQKLKMDHVMDVVVKSVNWICSRGLNHSEFTTLLYELDSQYGSLLYYTEIKWLSRGLVLKRFFESLEEIDSFMSSRGKPLPQLSSIDWIRDLAFLVDMTMHLNALNISLQGHSQIVTQMYDLIRAFLAKLCLWETHLTRNNLAHFPTLKLASRNESDGLNYIPKIAELQTEFQKRLSDFKLYESELTLFSSPFSTKIDSVHEELQMEVIDLQCNTVLKTKYDKVGIPEFYKYLWGSYPKYKHHCAKILSMFGSTYICEQLFSIMKLSKTKYCSQLKDSQWDSVLHIAT

SEQ ID NO: 26848 - protein, 187 aa, Homo sapiens
MVAATVAAAWLLLWAAACAQQEQDFYDFKAVNIRGKLVSLEKYRGSVSLVVNVASECGFTDQHYRALQQLQRDLGPHHFNVLAFPCNQFGQQEPDSNKEIESFARRTYSVSFPMFSKIAVTGTGAHPAFKYLAQTSGKEPTWNFWKYLVAPDGKVVGAWDPTVSVEEVRPQITALVRKLILLKREDL

SEQ ID NO: 26849 - protein, 334 aa, Homo sapiens
MGEAGAAEEACRHMGTKEEFVKVRKKDLERLTTEVMQIRDFLPRILNGEVLESFQKLKIVEKNLERKEQELEQLKMDCEHFKARLETVQADNIREKKEKLALRQQLNEAKQQLLQQAEYCTEMGAAACTLLWGVSSSEEVVKAILGGDKALKFFSITGQTMESFVKSLDGDVQELDSDESQFVFALAGIVTNVAAIACGREFLVNSSRVLLDTILQLLGDLKPGQCTKLKVLMLMSLYNVSINLKGLKYISESPGFIPLLWWLLSDPDAEVCLHVLRLVQSVVLEPEVFSKSASEFRSSLPLQRILAMSKSRNPRLQTAAQELLEDLRTLEHNV

SEQ ID NO: 26850 - protein, 259 aa, Homo sapiens
MDCEHFKARLETVQADNIREKKEKLALRQQLNEAKQQLLQQAEYCTEMGAAACTLLWGVSSSEEVVKAILGGDKALKFFSITGQTMESFVKSLDGDVQELDSDESQFVFALAGIVTNVAAIACGREFLVNSSRVLLDTILQLLGDLKPGQCTKLKVLMLMSLYNVSINLKGLKYISESPGFIPLLWWLLSDPDAEVCLHVLRLVQSVVLEPEVFSKSASEFRSSLPLQRILAMSKSRNPRLQTAAQELLEDLRTLEHNV

SEQ ID NO: 26851 - protein, 172 aa, Homo sapiens
MAGSVADSDAVVKLDDGHLNNSLSSPVQADVYFPRLIVPFCGHIKGGMRPGKKVLVMGIVDLNPESFAISLTCGDSEDPPADVAIELKAVFTDRQLLRNSCISGERGEEQSAIPYFPFIPDQPFRVEILCEHPRFRVFVDGHQLFDFYHRIQTLSAIDTIKINGDLQITKLG

SEQ ID NO: 26852 - protein, 386 aa, Homo sapiens
MGQREMWRLMSRFNAFKRTNTILHHLRMSKHTDAAEEVLLEKKGCTGVITLNRPKFLNALTLNMIRQIYPQLKKWEQDPETFLIIIKGAGGKAFCAGGDIRVISEAEKAKQKIAPVFFREEYMLNNAVGSCQKPYVALIHGITMGGGVGLSVHGQFRVATEKCLFAMPETAIGLFPDVGGGYFLPRLQGKLGYFLALTGFRLKGRDVYRAGIATHFVDSEKLAMLEEDLLALKSPSKENIASVLENYHTESKIDRDKSFILEEHMDKINSCFSANTVEEIIENLQQDGSSFALEQLKVINKMSPTSLKITLRQLMEGSSKTLQEVLTMEYRLSQACMRGHDFHEGVRAVLIDKDQSPKWKPADLKEVTEEDLNNHFKSLGSSDLKF

SEQ ID NO: 26853 - protein, 338 aa, Homo sapiens
MGQREMWRLMSRFNAFKRTNTILHHLRMSKHTDAAEEVLLEKKGCTGVITLNRPKFLNALTLNMIRQIYPQLKKWEQDPETFLIIIKGAGGKAFCAGGDIRVISEAEKAKQKIAPVFFREEYMLNNAVGSCQKPYVALIHGITMGGGVGLSVHGQFRVATEKCLFAMPETAIGLFPDVGGGYFLPRLQGKLGYFLALTGFRLKGRDVYRAGIATHFVDSEKLAMLEEDLLALKSPSKENIASVLENYHTESKIDRDKSFILEEHMDKINSCFSANTVEEIIENLQQDGSSFALEQLKVINKMSPTSLKITLRQLMEGSSKTLQEVLTMEYRLSQACMF

SEQ ID NO: 26854 - protein, 788 aa, Homo sapiens
MGSTDSKLNFRKAVIQLTTKTQPVEATDDAFWDQFWADTATSVQDVFALVPAAEIRAVREESPSNLATLCYKAVEKLVQGAESGCHSEKEKQIVLNCSRLLTRVLPYIFEDPDWRGFFWSTVPGAGRGGQGEEDDEHARPLAESLLLAIADLLFCPDFTVQSHRRSTVDSAEDVHSLDSCEYIWEAGVGFAHSPQPNYIHDMNRMELLKLLLTCFSEAMYLPPAPESGSTNPWVQFFCSTENRHALPLFTSLLNTVCAYDPVGYGIPYNHLLFSDYREPLVEEAAQVLIVTLDHDSASSASPTVDGTTTGTAMDDADPPGPENLFVNYLSRIHREEDFQFILKGIARLLSNPLLQTYLPNSTKKIQFHQELLVLFWKLCDFNKKFLFFVLKSSDVLDILVPILFFLNDARADQSRVGLMHIGVFILLLLSGERNFGVRLNKPYSIRVPMDIPVFTGTHADLLIVVFHKIITSGHQRLQPLFDCLLTIVVNVSPYLKSLSMVTANKLLHLLEAFSTTWFLFSAAQNHHLVFFLLEVFNNIIQYQFDGNSNLVYAIIRKRSIFHQLANLPTDPPTIHKALQRRRRTPEPLSRTGSQEGTSMEGSRPAAPAEPGTLKTSLVATPGIDKLTEKSQVSEDGTLRSLEPEPQQSLEDGSPAKGEPSQAWREQRRPSTSSASGQWSPTPEWVLSWKSKLPLQTIMRLLQVLVPQVEKICIDKGLTDESEILRFLQHGTLVGLLPVPHPILIRKYQANSGTAMWFRTYMWGVIYLRNVDPPVWYDTDVKLFEIQRV

SEQ ID NO: 26855 - protein, 787 aa, Homo sapiens
MGSTDSKLNFRKAVIQLTTKTQPVEATDDAFWDQFWADTATSVQDVFALVPAAEIRAVREESPSNLATLCYKAVEKLVQGAESGCHSEKEKQIVLNCSRLLTRVLPYIFEDPDWRGFFWSTVPGAGRGGGEEDDEHARPLAESLLLAIADLLFCPDFTVQSHRRSTVDSAEDVHSLDSCEYIWEAGVGFAHSPQPNYIHDMNRMELLKLLLTCFSEAMYLPPAPESGSTNPWVQFFCSTENRHALPLFTSLLNTVCAYDPVGYGIPYNHLLFSDYREPLVEEAAQVLIVTLDHDSASSASPTVDGTTTGTAMDDADPPGPENLFVNYLSRIHREEDFQFILKGIARLLSNPLLQTYLPNSTKKIQFHQELLVLFWKLCDFNKKFLFFVLKSSDVLDILVPILFFLNDARADQSRVGLMHIGVFILLLLSGERNFGVRLNKPYSIRVPMDIPVFTGTHADLLIVVFHKIITSGHQRLQPLFDCLLTIVVNVSPYLKSLSMVTANKLLHLLEAFSTTWFLFSAAQNHHLVFFLLEVFNNIIQYQFDGNSNLVYAIIRKRSIFHQLANLPTDPPTIHKALQRRRRTPEPLSRTGSQEGTSMEGSRPAAPAEPGTLKTSLVATPGIDKLTEKSQVSEDGTLRSLEPEPQQSLEDGSPAKGEPSQAWREQRRPSTSSASGQWSPTPEWVLSWKSKLPLQTIMRLLQVLVPQVEKICIDKGLTDESEILRFLQHGTLVGLLPVPHPILIRKYQANSGTAMWFRTYMWGVIYLRNVDPPVWYDTDVKLFEIQRV

SEQ ID NO: 26856 - protein, 560 aa, Homo sapiens
MGSTDSKLNFRKAVIQLTTKTQPVEATDDAYDPVGYGIPYNHLLFSDYREPLVEEAAQVLIVTLDHDSASSASPTVDGTTTGTAMDDADPPGPENLFVNYLSRIHREEDFQFILKGIARLLSNPLLQTYLPNSTKKIQFHQELLVLFWKLCDFNKKFLFFVLKSSDVLDILVPILFFLNDARADQSRVGLMHIGVFILLLLSGERNFGVRLNKPYSIRVPMDIPVFTGTHADLLIVVFHKIITSGHQRLQPLFDCLLTIVVNVSPYLKSLSMVTANKLLHLLEAFSTTWFLFSAAQNHHLVFFLLEVFNNIIQYQFDGNSNLVYAIIRKRSIFHQLANLPTDPPTIHKALQRRRRTPEPLSRTGSQEGTSMEGSRPAAPAEPGTLKTSLVATPGIDKLTEKSQVSEDGTLRSLEPEPQQSLEDGSPAKGEPSQAWREQRRPSTSSASGQWSPTPEWVLSWKSKLPLQTIMRLLQVLVPQVEKICIDKGLTDESEILRFLQHGTLVGLLPVPHPILIRKYQANSGTAMWFRTYMWGVIYLRNVDPPVWYDTDVKLFEIQRV

SEQ ID NO: 26857 - protein, 551 aa, Homo sapiens
MAAPALSWRLPLLILLLPLATSWASAAVNGTSQFTCFYNSRANISCVWSQDGALQDTSCQVHAWPDRRRWNQTCELLPVSQASWACNLILGAPDSQKLTTVDIVTLRVLCREGVRWRVMAIQDFKPFENLRLMAPISLQVVHVETHRCNISWEISQASHYFERHLEFEARTLSPGHTWEEAPLLTLKQKQEWICLETLTPDTQYEFQVRVKPLQGEFTTWSPWSQPLAFRTKPAALGKDTIPWLGHLLVGLSGAFGFIILVYLLINCRNTGPWLKKVLKCNTPDPSKFFSQLSSEHGGDVQKWLSSPFPSSSFSPGGLAPEISPLEVLERDKVTQLLLQQDKVPEPASLSSNHSLTSCFTNQGYFFFHLPDALEIEACQVYFTYDPYSEEDPDEGVAGAPTGSSPQPLQPLSGEDDAYCTFPSRDDLLLFSPSLLGGPSPPSTAPGGSGAGEERMPPSLQERVPRDWDPQPLGPPTPGVPDLVDFQPPPELVLREAGEEVPDAGPREGVSFPWSRPPGQGEFRALNARLPLNTDAYLSLQELQGQDPTHLV

SEQ ID NO: 26858 - protein, 271 aa, Homo sapiens
MAKVPDMFEDLKNCYSENEEDSSSIDHLSLNQKSFYHVSYGPLHEGCMDQSVSLSISETSKTSKLTFKESMVVVATNGKVLKKRRLSLSQSITDDDLEAIANDSEEEIIKPRSAPFSFLSNVKYNFMRIIKYEFILNDALNQSIIRANDQYLTAAALHNLDEAVKFDMGAYKSSKDDAKITVILRISKTQLYVTAQDEDQPVLLKEMPEIPKTITGSETNLLFFWETHGTKNYFTSVAHPNLFIATKQDYWVCLAGGPPSITDFQILENQA

SEQ ID NO: 26859 - protein, 923 aa, Homo sapiens
MDSIGSSGLRQGEETLSCSEEGLPGPSDSSELVQECLQQFKVTRAQLQQIQASLLGSMEQALRGQASPAPAVRMLPTYVGSTPHGTEQGDFVVLELGATGASLRVLWVTLTGIEGHRVEPRSQEFVIPQEVMLGAGQQLFDFAAHCLSEFLDAQPVNKQGLQLGFSFSFPCHQTGLDRSTLISWTKGFRCSGVEGQDVVQLLRDAIRRQGAYNIDVVAVVNDTVGTMMGCEPGVRPCEVGLVVDTGTNACYMEEARHVAVLDEDRGRVCVSVEWGSFSDDGALGPVLTTFDHTLDHESLNPGAQRFEKMIGGLYLGELVRLVLAHLARCGVLFGGCTSPALLSQGSILLEHVAEMEDPSTGAARVHAILQDLGLSPGASDVELVQHVCAAVCTRAAQLCAAALAAVLSCLQHSREQQTLQVAVATGGRVCERHPRFCSVLQGTVMLLAPECDVSLIPSVDGGGRGVAMVTAVAARLAAHRRLLEETLAPFRLNHDQLAAVQAQMRKAMAKGLRGEASSLRMLPTFVRATPDGSERGDFLALDLGGTNFRVLLVRVTTGVQITSEIYSIPETVAQGSGQQLFDHIVDCIVDFQQKQGLSGQSLPLGFTFSFPCRQLGLDQGILLNWTKGFKASDCEGQDVVSLLREAITRRQAVELNVVAIVNDTVGTMMSCGYEDPRCEIGLIVGTGTNACYMEELRNVAGVPGDSGRMCINMEWGAFGDDGSLAMLSTRFDASVDQASINPGKQRFEKMISGMYLGEIVRHILLHLTSLGVLFRGQQIQRLQTRDIFKTKFLSEIESDSLALRQVRAILEDLGLPLTSDDALMVLEVCQAVSQRAAQLCGAGVAAVVEKIRENRGLEELAVSVGVDGTLYKLHPRFSSLVAATVRELAPRCVVTFLQSEDGSGKGAALVTAVACRLAQLTRV

SEQ ID NO: 26860 - protein, 235 aa, Homo sapiens
MNSYFTNPSLSCHLAGGQDVLPNVALNSTAYDPVRHFSTYGAAVAQNRIYSTPFYSPQENVVFSSSRGPYDYGSNSFYQEKDMLSNCRQNTLGHNTQTSIAQDFSSEQGRTAPQDQKASIQIYPWMQRMNSHSGVGYGADRRRGRQIYSRYQTLELEKEFHFNRYLTRRRRIEIANALCLTERQIKIWFQNRRMKWKKESNLTSTLSGGGGGATADSLGGKEEKREETEEEKQKE

SEQ ID NO: 26861 - protein, 153 aa, Homo sapiens
MLSNCRQNTLGHNTQTSIAQDFSSEQGRTAPQDQKASIQIYPWMQRMNSHSGVGYGADRRRGRQIYSRYQTLELEKEFHFNRYLTRRRRIEIANALCLTERQIKIWFQNRRMKWKKESNLTSTLSGGGGGATADSLGGKEEKREETEEEKQKE

SEQ ID NO: 26862 - protein, 732 aa, Homo sapiens
MMWTWALWMLPSLCKFSLAALPAKPENISCVYYYRKNLTCTWSPGKETSYTQYTVKRTYAFGEKHDNCTTNSSTSENRASCSFFLPRITIPDNYTIEVEAENGDGVIKSHMTYWRLENIAKTEPPKIFRVKPVLGIKRMIQIEWIKPELAPVSSDLKYTLRFRTVNSTSWMEVNFAKNRKDKNQTYNLTGLQPFTEYVIALRCAVKESKFWSDWSQEKMGMTEEEAPCGLELWRVLKPAEADGRRPVRLLWKKARGAPVLEKTLGYNIWYYPESNTNLTETMNTTNQQLELHLGGESFWVSMISYNSLGKSPVATLRIPAIQEKSFQCIEVMQACVAEDQLVVKWQSSALDVNTWMIEWFPDVDSEPTTLSWESVSQATNWTIQQDKLKPFWCYNISVYPMLHDKVGEPYSIQAYAKEGVPSEGPETKVENIGVKTVTITWKEIPKSERKGIICNYTIFYQAEGGKGFSKTVNSSILQYGLESLKRKTSYIVQVMASTSAGGTNGTSINFKTLSFSVFEIILITSLIGGGLLILIILTVAYGLKKPNKLTHLCWPTVPNPAESSIATWHGDDFKDKLNLKESDDSVNTEDRILKPCSTPSDKLVIDKLVVNFGNVLQEIFTDEARTGQENNLGGEKNGYVTCPFRPDCPLGKSFEELPVSPEIPPRKSQYLRSRMPEGTRPEAKEQLLFSGQSLVPDHLCEEGAPNPYLKNSVTAREFLVSEKLPEHTKGEV

SEQ ID NO: 26863 - protein, 764 aa, Homo sapiens
MCIRQLKFFTTACVCECPQNILSPQPSCVNLGMMWTWALWMLPSLCKFSLAALPAKPENISCVYYYRKNLTCTWSPGKETSYTQYTVKRTYAFGEKHDNCTTNSSTSENRASCSFFLPRITIPDNYTIEVEAENGDGVIKSHMTYWRLENIAKTEPPKIFRVKPVLGIKRMIQIEWIKPELAPVSSDLKYTLRFRTVNSTSWMEVNFAKNRKDKNQTYNLTGLQPFTEYVIALRCAVKESKFWSDWSQEKMGMTEEEAPCGLELWRVLKPAEADGRRPVRLLWKKARGAPVLEKTLGYNIWYYPESNTNLTETMNTTNQQLELHLGGESFWVSMISYNSLGKSPVATLRIPAIQEKSFQCIEVMQACVAEDQLVVKWQSSALDVNTWMIEWFPDVDSEPTTLSWESVSQATNWTIQQDKLKPFWCYNISVYPMLHDKVGEPYSIQAYAKEGVPSEGPETKVENIGVKTVTITWKEIPKSERKGIICNYTIFYQAEGGKGFSKTVNSSILQYGLESLKRKTSYIVQVMASTSAGGTNGTSINFKTLSFSVFEIILITSLIGGGLLILIILTVAYGLKKPNKLTHLCWPTVPNPAESSIATWHGDDFKDKLNLKESDDSVNTEDRILKPCSTPSDKLVIDKLVVNFGNVLQEIFTDEARTGQENNLGGEKNGYVTCPFRPDCPLGKSFEELPVSPEIPPRKSQYLRSRMPEGTRPEAKEQLLFSGQSLVPDHLCEEGAPNPYLKNSVTAREFLVSEKLPEHTKGEV

SEQ ID NO: 26864 - protein, 662 aa, Homo sapiens
MKLSPQPSCVNLGMMWTWALWMLPSLCKFSLAALPAKPENISCVYYYRKNLTCTWSPGKETSYTQYTVKRTYAFGEKHDNCTTNSSTSENRASCSFFLPRITIPDNYTIEVEAENGDGVIKSHMTYWRLENIAKTEPPKIFRVKPVLGIKRMIQIEWIKPELAPVSSDLKYTLRFRTVNSTSWMEVNFAKNRKDKNQTYNLTGLQPFTEYVIALRCAVKESKFWSDWSQEKMGMTEEEAPCGLELWRVLKPAEADGRRPVRLLWKKARGAPVLEKTLGYNIWYYPESNTNLTETMNTTNQQLELHLGGESFWVSMISYNSLGKSPVATLRIPAIQEKSFQCIEVMQACVAEDQLVVKWQSSALDVNTWMIEWFPDVDSEPTTLSWESVSQATNWTIQQDKLKPFWCYNISVYPMLHDKVGEPYSIQAYAKEGVPSEGPETKVENIGVKTVTITWKEIPKSERKGIICNYTIFYQAEGGKGFSKTVNSSILQYGLESLKRKTSYIVQVMASTSAGGTNGTSINFKTLSFSVFEIILITSLIGGGLLILIILTVAYGLKKPNKLTHLCWPTVPNPAESSIATWHGDDFKDKLNLKESDDSVNTEDRILKPCSTPSDKLVIDKLVVNFGNVLQEIFTDEARTGQENNLGGEKNGTRILSSCPTSI

SEQ ID NO: 26865 - protein, 356 aa, Homo sapiens
MCIRQLKFFTTACVCECPQNILSPQPSCVNLGMMWTWALWMLPSLCKFSLAALPAKPENISCVYYYRKNLTCTWSPGKETSYTQYTVKRTYAFGEKHDNCTTNSSTSENRASCSFFLPRITIPDNYTIEVEAENGDGVIKSHMTYWRLENIAKTEPPKIFRVKPVLGIKRMIQIEWIKPELAPVSSDLKYTLRFRTVNSTSWMEVNFAKNRKDKNQTYNLTGLQPFTEYVIALRCAVKESKFWSDWSQEKMGMTEEEAPCGLELWRVLKPAEADGRRPVRLLWKKARGAPVLEKTLGYNIWYYPESNTNLTETMNTTNQQLELHLGGESFWVSMISYNSLGKSPVATLRIPAIQEK

SEQ ID NO: 26866 - protein, 681 aa, Homo sapiens
MCIRQLKFFTTACVCECPQNILSPQPSCVNLGMMWTWALWMLPSLCKFSLAALPAKPENISCVYYYRKNLTCTWSPGKETSYTQYTVKRTYAFGEKHDNCTTNSSTSENRASCSFFLPRITIPDNYTIEVEAENGDGVIKSHMTYWRLENIAKTEPPKIFRVKPVLGIKRMIQIEWIKPELAPVSSDLKYTLRFRTVNSTSWMEVNFAKNRKDKNQTYNLTGLQPFTEYVIALRCAVKESKFWSDWSQEKMGMTEEEAPCGLELWRVLKPAEADGRRPVRLLWKKARGAPVLEKTLGYNIWYYPESNTNLTETMNTTNQQLELHLGGESFWVSMISYNSLGKSPVATLRIPAIQEKSFQCIEVMQACVAEDQLVVKWQSSALDVNTWMIEWFPDVDSEPTTLSWESVSQATNWTIQQDKLKPFWCYNISVYPMLHDKVGEPYSIQAYAKEGVPSEGPETKVENIGVKTVTITWKEIPKSERKGIICNYTIFYQAEGGKGFSKTVNSSILQYGLESLKRKTSYIVQVMASTSAGGTNGTSINFKTLSFSVFEIILITSLIGGGLLILIILTVAYGLKKPNKLTHLCWPTVPNPAESSIATWHGDDFKDKLNLKESDDSVNTEDRILKPCSTPSDKLVIDKLVVNFGNVLQEIFTDEARTGQENNLGGEKNGTRILSSCPTSI

SEQ ID NO: 26867 - protein, 622 aa, Homo sapiens
MTYWRLENIAKTEPPKIFRVKPVLGIKRMIQIEWIKPELAPVSSDLKYTLRFRTVNSTSWMEVNFAKNRKDKNQTYNLTGLQPFTEYVIALRCAVKESKFWSDWSQEKMGMTEEEAPCGLELWRVLKPAEADGRRPVRLLWKKARGAPVLEKTLGYNIWYYPESNTNLTETMNTTNQQLELHLGGESFWVSMISYNSLGKSPVATLRIPAIQEKSFQCIEVMQACVAEDQLVVKWQSSALDVNTWMIEWFPDVDSEPTTLSWESVSQATNWTIQQDKLKPFWCYNISVYPMLHDKVGEPYSIQAYAKEGVPSEGPETKVENIGVKTVTITWKEIPKSERKGIICNYTIFYQAEGGKGFSKTVNSSILQYGLESLKRKTSYIVQVMASTSAGGTNGTSINFKTLSFSVFEIILITSLIGGGLLILIILTVAYGLKKPNKLTHLCWPTVPNPAESSIATWHGDDFKDKLNLKESDDSVNTEDRILKPCSTPSDKLVIDKLVVNFGNVLQEIFTDEARTGQENNLGGEKNGYVTCPFRPDCPLGKSFEELPVSPEIPPRKSQYLRSRMPEGTRPEAKEQLLFSGQSLVPDHLCEEGAPNPYLKNSVTAREFLVSEKLPEHTKGEV

SEQ ID NO: 26868 - protein, 509 aa, Homo sapiens
MKLSPQPSCVNLGMMWTWALWMLPSLCKFSLAALPAKPENISCVYYYRKNLTCTWSPGKETSYTQYTVKRTYAFGEKHDNCTTNSSTSENRASCSFFLPRITIPDNYTIEVEAENGDGVIKSHMTYWRLENIAKTEPPKIFRVKPVLGIKRMIQIEWIKPELAPVSSDLKYTLRFRTVNSTSWMEVNFAKNRKDKNQTYNLTGLQPFTEYVIALRCAVKESKFWSDWSQEKMGMTEEEAPCGLELWRVLKPAEADGRRPVRLLWKKARGAPVLEKTLGYNIWYYPESNTNLTETMNTTNQQLELHLGGESFWVSMISYNSLGKSPVATLRIPAIQEKSFQCIEVMQACVAEDQLVVKWQSSALDVNTWMIEWFPDVDSEPTTLSWESVSQATNWTIQQDKLKPFWCYNISVYPMLHDKVGEPYSIQAYAKEGVPSEGPETKVENIGVKTVTITWKEIPKSERKGIICNYTIFYQAEAKTVNSSILQYGLESLKRKTSYIVQVMASYSGG

SEQ ID NO: 26869 - protein, 582 aa, Homo sapiens
MCIRQLKFFTTACVCECPQNILSPQPSCVNLGMMWTWALWMLPSLCKFSLAALPAKPENISCVYYYRKNLTCTWSPGKETSYTQYTVKRTYAFGEKHDNCTTNSSTSENRASCSFFLPRITIPDNYTIEVEAENGDGVIKSHMTYWRLENIAKTEPPKIFRVKPVLGIKRMIQIEWIKPELAPVSSDLKYTLRFRTVNSTSWMEVNFAKNRKDKNQTYNLTGLQPFTEYVIALRCAVKESKFWSDWSQEKMGMTEEEAPCGLELWRVLKPAEADGRRPVRLLWKKARGAPVLEKTLGYNIWYYPESNTNLTETMNTTNQQLELHLGGESFWVSMISYNSLGKSPVATLRIPAIQEKSFQCIEVMQACVAEDQLVVKWQSSALDVNTWMIEWFPDVDSEPTTLSWESVSQATNWTIQQDKLKPFWCYNISVYPMLHDKVGEPYSIQAYAKEGVPSEGPETKVENIGVKTVTITWKEIPKSERKGIICNYTIFYQAEGGKGFCKHAHSEVEKNPKPQIDAMDRPVVGMAPPSHCDLQPGMNHLASLNLSENGAKSTHLLGFWGLNESEVTVPERRVLRKWKELL

SEQ ID NO: 26870 - protein, 560 aa, Homo sapiens
MKLSPQPSCVNLGMMWTWALWMLPSLCKFSLAALPAKPENISCVYYYRKNLTCTWSPGKETSYTQYTVKRTYAFGEKHDNCTTNSSTSENRASCSFFLPRITIPDNYTIEVEAENGDGVIKSHMTYWRLENIAKTEPPKIFRVKPVLGIKRMIQIEWIKPELAPVSSDLKYTLRFRTVNSTSWMEVNFAKNRKDKNQTYNLTGLQPFTEYVIALRCAVKESKFWSDWSQEKMGMTEEEAPCGLELWRVLKPAEADGRRPVRLLWKKARGAPVLEKTLGYNIWYYPESNTNLTETMNTTNQQLELHLGGESFWVSMISYNSLGKSPVATLRIPAIQEKSFQCIEVMQACVAEDQLVVKWQSSALDVNTWMIEWFPDVDSEPTTLSWESVSQATNWTIQQDKLKPFWCYNISVYPMLHDKVGEPYSIQAYAKEGVPSEGPETKVENIGVKTVTITWKEIPKSERKGIICNYTIFYQAEGGKGFSKTVNSSILQYGLESLKRKTSYIVQVMASTSAGGTNGTSINFKTLSFSVFEIILITSLIGGGLLILIILTVAYGLKKPN

SEQ ID NO: 26871 - protein, 611 aa, Homo sapiens
MKLSPQPSCVNLGMMWTWALWMLPSLCKFSLAALPAKPENISCVYYYRKNLTCTWSPGKETSYTQYTVKRTYAFGEKHDNCTTNSSTSENRASCSFFLPRITIPDNYTIEVEAENGDGVIKSHMTYWRLENIAKTEPPKIFRVKPVLGIKRMIQIEWIKPELAPVSSDLKYTLRFRTVNSTSWMEVNFAKNRKDKNQTYNLTGLQPFTEYVIALRCAVKESKFWSDWSQEKMGMTEEEAPCGLELWRVLKPAEADGRRPVRLLWKKARGAPVLEKTLGYNIWYYPESNTNLTETMNTTNQQLELHLGGESFWVSMISYNSLGKSPVATLRIPAIQEKSFQCIEVMQACVAEDQLVVKWQSSALDVNTWMIEWFPDVDSEPTTLSWESVSQATNWTIQQDKLKPFWCYNISVYPMLHDKVGEPYSIQAYAKEGVPSEGPETKVENIGVKTVTITWKEIPKSERKGIICNYTIFYQAEGGKGFSKTVNSSILQYGLESLKRKTSYIVQVMASTSAGGTNGTSINFKTLSFSVFEIILITSLIGGGLLILIILTVAYGLKKPNKLTHLCWPTVPNPAESSIATWHGDDFKDKLNLKESDDSVNTEDRIRARYQA

SEQ ID NO: 26872 - protein, 626 aa, Homo sapiens
MKLSPQPSCVNLGMMWTWALWMLPSLCKFSLAALPAKPENISCVYYYRKNLTCTWSPGKETSYTQYTVKRTYAFGEKHDNCTTNSSTSENRASCSFFLPRITIPDNYTIEVEAENGDGVIKSHMTYWRLENIAKTEPPKIFRVKPVLGIKRMIQIEWIKPELAPVSSDLKYTLRFRTVNSTSWMEVNFAKNRKDKNQTYNLTGLQPFTEYVIALRCAVKESKFWSDWSQEKMGMTEEEAPCGLELWRVLKPAEADGRRPVRLLWKKARGAPVLEKTLGYNIWYYPESNTNLTETMNTTNQQLELHLGGESFWVSMISYNSLGKSPVATLRIPAIQEKSFQCIEVMQACVAEDQLVVKWQSSALDVNTWMIEWFPDVDSEPTTLSWESVSQATNWTIQQDKLKPFWCYNISVYPMLHDKVGEPYSIQAYAKEGVPSEGPETKVENIGVKTVTITWKEIPKSERKGIICNYTIFYQAEGGKGFSKTVNSSILQYGLESLKRKTSYIVQVMASTSAGGTNGTSINFKTLSFSVFEIILITSLIGGGLLILIILTVAYGLKKPNKLTHLCWPTVPNPAESSIATWHGDDFKDKLNLKESDDSVNTEDRIKGSELGTKLKFKPLISLDCAF

SEQ ID NO: 26873 - protein, 745 aa, Homo sapiens
MKLSPQPSCVNLGMMWTWALWMLPSLCKFSLAALPAKPENISCVYYYRKNLTCTWSPGKETSYTQYTVKRTYAFGEKHDNCTTNSSTSENRASCSFFLPRITIPDNYTIEVEAENGDGVIKSHMTYWRLENIAKTEPPKIFRVKPVLGIKRMIQIEWIKPELAPVSSDLKYTLRFRTVNSTSWMEVNFAKNRKDKNQTYNLTGLQPFTEYVIALRCAVKESKFWSDWSQEKMGMTEEEAPCGLELWRVLKPAEADGRRPVRLLWKKARGAPVLEKTLGYNIWYYPESNTNLTETMNTTNQQLELHLGGESFWVSMISYNSLGKSPVATLRIPAIQEKSFQCIEVMQACVAEDQLVVKWQSSALDVNTWMIEWFPDVDSEPTTLSWESVSQATNWTIQQDKLKPFWCYNISVYPMLHDKVGEPYSIQAYAKEGVPSEGPETKVENIGVKTVTITWKEIPKSERKGIICNYTIFYQAEGGKGFSKTVNSSILQYGLESLKRKTSYIVQVMASTSAGGTNGTSINFKTLSFSVFEIILITSLIGGGLLILIILTVAYGLKKPNKLTHLCWPTVPNPAESSIATWHGDDFKDKLNLKESDDSVNTEDRILKPCSTPSDKLVIDKLVVNFGNVLQEIFTDEARTGQENNLGGEKNGYVTCPFRPDCPLGKSFEELPVSPEIPPRKSQYLRSRMPEGTRPEAKEQLLFSGQSLVPDHLCEEGAPNPYLKNSVTAREFLVSEKLPEHTKGEV

SEQ ID NO: 26874 - protein, 1043 aa, Homo sapiens
MELQKGKGAAAAAAASGAAGGGGGGAGAGAPGGGRLLLSTSLDAKDELEERLERCMSIVTSMTAGVSEREANDALNAYVCKGLPQHEEICLGLFTLILTEPAQAQKCYRDLALVSRDGMNIVLNKINQILMEKYLKLQDTCRTQLVWLVRELVKSGVLGADGVCMTFMKQIAGGGDVTAKNIWLAESVLDILTEQREWVLKSSILIAMAVYTYLRLIVDHHGTAQLQALRQKEVDFCISLLRERFMECLMIGRDLVRLLQNVARIPEFELLWKDIIHNPQALSPQFTGILQLLQSRTSRKFLACRLTPDMETKLLFMTSRVRFGQQKRYQDWFQRQYLSTPDSQSLRCDLIRYICGVVHPSNEVLSSDILPRWAIIGWLLTTCTSNVAASNAKLALFYDWLFFSPDKDSIMNIEPAILVMHHSMKPHPAITATLLDFMCRIIPNFYPPLEGHVRQGVFSSLNHIVEKRVLAHLAPLFDNPKLDKELRAMLREKFPEFCSSPSPPVEVKIEEPVSMEMDNHMSDKDESCYDNAEAAFSDDEEDLNSKGKKREFRFHPIKETVVEEPVDITPYLDQLDESLRDKVLQLQKGSDTEAQCEVMQEIVDQVLEEDFDSEQLSVLASCLQELFKAHFRGEVLPEEITEESLEESVGKPLYLIFRNLCQMQEDNSSFSLLLDLLSELYQKQPKIGYHLLYYLRASKAAAGKMNLYESFAQATQLGDLHTCLMMDMKACQEDDVRLLCHLTPSIYTEFPDETLRSGELLNMIVAVIDSAQLQELVCHVMMGNLVMFRKDSVLNILIQSLDWETFEQYCAWQLFLAHNIPLETIIPILQHLKYKEHPEALSCLLLQLRREKPSEEMVKMVLSRPCHPDDQFTTSILRHWCMKHDELLAEHIKSLLIKNNSLPRKRQSLRSSSSKLAQLTLEQILEHLDNLRLNLTNTKQNFFSQTPILQALQHVQASCDEAHKMKFSDLFSLAEEYEDSSTKPPKSRRKAALSSPRSRKNATQPPNAEEESGSSSASEEEDTKPKPTKRKRKGSSAVGSDSD

SEQ ID NO: 26875 - protein, 1042 aa, Homo sapiens
MELQKGKGAAAAAAASGAAGGGGGGAGAGAPGGGRLLLSTSLDAKDELEERLERCMSIVTSMTAGVSEREANDALNAYVCKGLPQHEEICLGLFTLILTEPAQAQKCYRDLALVSRDGMNIVLNKINQILMEKYLKLQDTCRTQLVWLVRELVKSGVLGADGVCMTFMKQIAGGDVTAKNIWLAESVLDILTEQREWVLKSSILIAMAVYTYLRLIVDHHGTAQLQALRQKEVDFCISLLRERFMECLMIGRDLVRLLQNVARIPEFELLWKDIIHNPQALSPQFTGILQLLQSRTSRKFLACRLTPDMETKLLFMTSRVRFGQQKRYQDWFQRQYLSTPDSQSLRCDLIRYICGVVHPSNEVLSSDILPRWAIIGWLLTTCTSNVAASNAKLALFYDWLFFSPDKDSIMNIEPAILVMHHSMKPHPAITATLLDFMCRIIPNFYPPLEGHVRQGVFSSLNHIVEKRVLAHLAPLFDNPKLDKELRAMLREKFPEFCSSPSPPVEVKIEEPVSMEMDNHMSDKDESCYDNAEAAFSDDEEDLNSKGKKREFRFHPIKETVVEEPVDITPYLDQLDESLRDKVLQLQKGSDTEAQCEVMQEIVDQVLEEDFDSEQLSVLASCLQELFKAHFRGEVLPEEITEESLEESVGKPLYLIFRNLCQMQEDNSSFSLLLDLLSELYQKQPKIGYHLLYYLRASKAAAGKMNLYESFAQATQLGDLHTCLMMDMKACQEDDVRLLCHLTPSIYTEFPDETLRSGELLNMIVAVIDSAQLQELVCHVMMGNLVMFRKDSVLNILIQSLDWETFEQYCAWQLFLAHNIPLETIIPILQHLKYKEHPEALSCLLLQLRREKPSEEMVKMVLSRPCHPDDQFTTSILRHWCMKHDELLAEHIKSLLIKNNSLPRKRQSLRSSSSKLAQLTLEQILEHLDNLRLNLTNTKQNFFSQTPILQALQHVQASCDEAHKMKFSDLFSLAEEYEDSSTKPPKSRRKAALSSPRSRKNATQPPNAEEESGSSSASEEEDTKPKPTKRKRKGSSAVGSDSD

SEQ ID NO: 26876 - protein, 902 aa, Homo sapiens
MAVYTYLRLIVDHHGTAQLQALRQKEVDFCISLLRERFMECLMIGRDLVRLLQNVARIPEFELLWKDIIHNPQALSPQFTGILQLLQSRTSRKFLACRLTPDMETKLLFMTSRVRFGQQKRYQDWFQRQYLSTPDSQSLRCDLIRYICGVVHPSNEVLSSDILPRWAIIGWLLTTCTSNVAASNAKLALFYDWLFFSPDKDSIMNIEPAILVMHHSMKPHPAITATLLDFMCRIIPNFYPPLEGHVRQGVFSSLNHIVEKRVLAHLAPLFDNPKLDKELRAMLREKFPEFCSSPSPPVEVKIEEPVSMEMDNHMSDKDESCYDNAEAAFSDDEEDLNSKGKKREFRFHPIKETVVEEPVDITPYLDQLDESLRDKVLQLQKGSDTEAQCEVMQEIVDQVLEEDFDSEQLSVLASCLQELFKAHFRGEVLPEEITEESLEESVGKPLYLIFRNLCQMQEDNSSFSLLLDLLSELYQKQPKIGYHLLYYLRASKAAAGKMNLYESFAQATQLGDLHTCLMMDMKACQEDDVRLLCHLTPSIYTEFPDETLRSGELLNMIVAVIDSAQLQELVCHVMMGNLVMFRKDSVLNILIQSLDWETFEQYCAWQLFLAHNIPLETIIPILQHLKYKEHPEALSCLLLQLRREKPSEEMVKMVLSRPCHPDDQFTTSILRHWCMKHDELLAEHIKSLLIKNNSLPRKRQSLRSSSSKLAQLTLEQILEHLDNLRLNLTNTKQNCMPSTLGVQCRRCCPGPDYAWSQAGGRGRTPGATTHTRDKTTCACCLISSQTSDCFSFPALPFLPLVFSQTPILQALQHVQASCDEAHKMKFSDLFSLAEEYEDSSTKPPKSRRKAALSSPRSRKNATQPPNAEEESGSSSASEEEDTKPKPTKRKRKGSSAVGSDSD

SEQ ID NO: 26877 - protein, 555 aa, Homo sapiens
MLREKFPEFCSSPSPPVEVKIEEPVSMEMDNHMSDKDESCYDNAEAAFSDDEEDLNSKGKKREFRFHPIKETVVEEPVDITPYLDQLDESLRDKVLQLQKGSDTEAQCEVMQEIVDQVLEEDFDSEQLSVLASCLQELFKAHFRGEVLPEEITEESLEESVGKPLYLIFRNLCQMQEDNSSFSLLLDLLSELYQKQPKIGYHLLYYLRASKAAAGKMNLYESFAQATQLGDLHTCLMMDMKACQEDDVRLLCHLTPSIYTEFPDETLRSGELLNMIVAVIDSAQLQELVCHVMMGNLVMFRKDSVLNILIQSLDWETFEQYCAWQLFLAHNIPLETIIPILQHLKYKEHPEALSCLLLQLRREKPSEEMVKMVLSRPCHPDDQFTTSILRHWCMKHDELLAEHIKSLLIKNNSLPRKRQSLRSSSSKLAQLTLEQILEHLDNLRLNLTNTKQNFFSQTPILQALQHVQASCDEAHKMKFSDLFSLAEEYEDSSTKPPKSRRKAALSSPRSRKNATQPPNAEEESGSSSASEEEDTKPKPTKRKRKGSSAVGSDSD

SEQ ID NO: 26878 - protein, 520 aa, Homo sapiens
MIARQQCVRGGPRGFSCGSAIVGGGKRGAFSSVSMSGGAGRCSSGGFGSRSLYNLRGNKSISMSVAGSRQGACFGGAGGFGTGGFGGGFGGSFSGKGGPGFPVCPAGGIQEVTINQSLLTPLHVEIDPEIQKVRTEEREQIKLLNNKFASFIDKVQFLEQQNKVLETKWNLLQQQTTTTSSKNLEPLFETYLSVLRKQLDTLGNDKGRLQSELKTMQDSVEDFKTKYEEEINKRTAAENDFVVLKKDVDAAYLNKVELEAKVDSLNDEINFLKVLYDAELSQMQTHVSDTSVVLSMDNNRNLDLDSIIAEVRAQYEEIAQRSKAEAEALYQTKVQQLQISVDQHGDNLKNTKSEIAELNRMIQRLRAEIENIKKQCQTLQVSVADAEQRGENALKDAHSKRVELEAALQQAKEELARMLREYQELMSVKLALDIEIATYRKLLEGEEYRMSGECQSAVSISVVSGSTSTGGISGGLGSGSGFGLSSGFGSGSGSGFGFGGSVSGSSSSKIISTTTLNKRR

SEQ ID NO: 26879 - protein, 683 aa, Homo sapiens
MSSGTMKFNGYLRVRIGEAVGLQPTRWSLRHSLFKKGHQLLDPYLTVSVDQVRVGQTSTKQKTNKPTYNEEFCANVTDGGHLELAVFHETPLGYDHFVANCTLQFQELLRTTGASDTFEGWVDLEPEGKVFVVITLTGSFTEATLQRDRIFKHFTRKRQRAMRRRVHQINGHKFMATYLRQPTYCSHCREFIWGVFGKQGYQCQVCTCVVHKRCHHLIVTACTCQNNINKVDSKIAEQRFGINIPHKFSIHNYKVPTFCDHCGSLLWGIMRQGLQCKICKMNVHIRCQANVAPNCGVNAVELAKTLAGMGLQPGNISPTSKLVSRSTLRRQGKESSKEGNGIGVNSSNRLGIDNFEFIRVLGKGSFGKVMLARVKETGDLYAVKVLKKDVILQDDDVECTMTEKRILSLARNHPFLTQLFCCFQTPDRLFFVMEFVNGGDLMFHIQKSRRFDEARARFYAAEIISALMFLHDKGIIYRDLKLDNVLLDHEGHCKLADFGMCKEGICNGVTTATFCGTPDYIAPEILQEMLYGPAVDWWAMGVLLYEMLCGHAPFEAENEDDLFEAILNDEVVYPTWLHEDATGILKSFMTKNPTMRLGSLTQGGEHAILRHPFFKEIDWAQLNHRQIEPPFRPRIKSREDVSNFDPDFIKEEPVLTPIDEGHLPMINQDEFRNFSYVSPELQP

SEQ ID NO: 26880 - protein, 522 aa, Homo sapiens
MRRRVHQINGHKFMATYLRQPTYCSHCREFIWGVFGKQGYQCQVCTCVVHKRCHHLIVTACTCQNNINKVDSKIAEQRFGINIPHKFSIHNYKVPTFCDHCGSLLWGIMRQGLQCKICKMNVHIRCQANVAPNCGVNAVELAKTLAGMGLQPGNISPTSKLVSRSTLRRQGKESSKEGNGIGVNSSNRLGIDNFEFIRVLGKGSFGKVMLARVKETGDLYAVKVLKKDVILQDDDVECTMTEKRILSLARNHPFLTQLFCCFQTPDRLFFVMEFVNGGDLMFHIQKSRRFDEARARFYAAEIISALMFLHDKGIIYRDLKLDNVLLDHEGHCKLADFGMCKEGICNGVTTATFCGTPDYIAPEILQEMLYGPAVDWWAMGVLLYEMLCGHAPFEAENEDDLFEAILNDEVVYPTWLHEDATGILKSFMTKNPTMRLGSLTQGGEHAILRHPFFKEIDWAQLNHRQIEPPFRPRIKSREDVSNFDPDFIKEEPVLTPIDEGHLPMINQDEFRNFSYVSPELQP

SEQ ID NO: 26881 - protein, 1052 aa, Homo sapiens
MDSSLLQAIEEIEKFFQHLSERHTEQAETPDAPEPQNCMPLTAHAEESQHESTQSKTMPPLGSTMMTSACTNIPGTVLTQDLTMHPLKALEDLSETYSMGQKVTSFDQVKHTAGSQMTDVTVTPKSSPTDCQKTTITASNMTISNESSQLNTPSSDQTLNESQIPALLGDQMKTLSDNQTLCGDQVTFSSDQTLTDGHTVTSGSDETLSGGQMTTSLDLYGGQMMTSIDNQTLCGEQMTTSSGNQAFYGRQMTTSTGNQTLCGEQMTTSTGNQALYGGQMTTSASNQTLCGEQMTTSTSNQTLCGEQVMTSTGNQALCGGQMTTSTGNQNLYGGQMMTSTGNQTLYWGQMMTSTGNQNLCGEQVMTSTGNQALCGGQMTTSTGNQNLYGGQMMTSTGNQTLYWGQMMTSTGNQNLCGEQVMTSTGNQALCGGQMTTSTGNQNLCGEQVMTSTSNQTLCGEQTTTSTSNQTLCGEQVTTSTGNQALYGGQMMTSTGNQTLYWGQMMTSTGNQNLCGEQMTTSTGNQALYGGQMTTSTSNQTLCGEQMTTPTSNQTLCGEQVTTSTGNQALYGGQITTSTSNQTLCGEQMTTSTSNQTLCGEQVTTSTGNQALYGGQMMTSTGNQALYGGQMTTSASNQTLCGEQMTTSTSNQTLCEEQVMTSTGNQALCGEQMTTSTGNQALYGGQMTTSTSNQTLCGEQTTTSTSNQTLCGEQVTTSTGNQALYGGQMMTSTGNQTLYWGQMMTSTGNQNLCGEQMTTSTGNQALYGGQMTTSTSNQTLCGEQMTTPTSNQTLCGEQVTTSTGNQALYRGQITTSTSNQTLCGEQMTTSTSNQTLCGEQVTTSTGNQALYGGQMMTSTGNQNLYGGQNMTSTDNQALYGGQMATYSGNQTLYGDQMLTLQVGNMTTLTDDHSLYGGYMMSHQFSSLPYPGFLCFSSSHLIQGQLPKQKTQSCQFWKNPEVSRPYVCTYEDCKMSYSKACHLRTHMRKHTGEKPYVCDVEGCTWKFARSDELNRHKKRHTGERPYLCSICSKNFARSDHLKQHAKVHNIRPGL

SEQ ID NO: 26882 - protein, 283 aa, Homo sapiens
MDVLPMCSIFQELQIVHETGYFSALPSLEEYWQQTCLELERYLQSEPCYVSASEIKFDSQEDLWTKIILAREKKEESELKISSSPPEDTLISPSFCYNLETNSLNSDVSSESSDSSEELSPTAKFTSDPIGEVLVSSGKLSSSVTSTPPSSPELSREPSQLWGCVPGELPSPGKVRSGTSGKPGDKGNGDASPDGRRRVHRCHFNGCRKVYTKSSHLKAHQRTHTGEKPYRCSWEGCEWRFARSDELTRHFRKHTGAKPFKCSHCDRCFSRSDHLALHMKRHL

SEQ ID NO: 26883 - protein, 281 aa, Homo sapiens
MDVLPMCSIFQELQIVHETGYFSALPSLEEYWQQTCLELERYLQSEPCYVSASEIKFDSQEDLWTKIILAREKKEESELKISSSPPEDTLISPSFCYNLETNSLNSDVSSESSDSSEELSPTAKFTSDPIGEVLVSSGKLSSSVTSTPPSSPELSREPSQLWGCVPGELPSPGKVRSGTSGKPGDKGNGDASPDGRRRVHRCHFNGCRKVYTKSSHLKAHQRTHTGQCPRGPRRAAAGGRHCIAPALEGAGPGCTGCGQGRQILTSSDVFHQSIRSFWSSE

SEQ ID NO: 26884 - protein, 237 aa, Homo sapiens
MDVLPMCSIFQELQIVHETGYFSALPSLEEYWQQTCLELERYLQSEPCYVSASEIKFDSQEDLWTKIILAREKKEESELKISSSPPEDTLISPSFCYNLETNSLNSDVSSESSDSSEELSPTAKFTSDPIGEVLVSSGKLSSSVTSTPPSSPELSREPSQLWGCVPGELPSPGKVRSGTSGKPGDKGNGDASPDGRRRVHRCHFNGCRKVYTKSSHLKAHQRTHTGVFPGLTTWPCT

SEQ ID NO: 26885 - protein, 762 aa, Homo sapiens
MGNGSVKPKHSKHPDGHSGNLTTDALRNKVTELERELRRKDAEIQEREYHLKELREQLSKQTVAIAELTEELQNKCIQLNKLQDVVHMQGGSPLQASPDKVPLEVHRKTSGLVSLHSRRGAKAGVSAEPTTRTYDLNKPPEFSFEKARVRKDSSEKKLITDALNKNQFLKRLDPQQIKDMVECMYGRNYQQGSYIIKQGEPGNHIFVLAEGRLEVFQGEKLLSSIPMWTTFGELAILYNCTRTASVKAITNVKTWALDREVFQNIMRRTAQARDEQYRNFLRSVSLLKNLPEDKLTKIIDCLEVEYYDKGDYIIREGEEGSTFFILAKGKVKVTQSTEGHDQPQLIKTLQKGEYFGEKALISDDVRSANIIAEENDVACLVIDRETFNQTVGTFEELQKYLEGYVANLNRDDEKRHAKRSMSNWKLSKALSLEMIQLKEKVARFSSSSPFQNLEIIATLGVGGFGRVELVKVKNENVAFAMKCIRKKHIVDTKQQEHVYSEKRILEELCSPFIVKLYRTFKDNKYVYMLLEACLGGELWSILRDRGSFDEPTSKFCVACVTEAFDYLHRLGIIYRDLKPENLILDAEGYLKLVDFGFAKKIGSGQKTWTFCGTPEYVAPEVILNKGHDFSVDFWSLGILVYELLTGNPPFSGVDQMMTYNLILKGIEKMDFPRKITRRPEDLIRRLCRQNPTERLGNLKNGINDIKKHRWLNGFNWEGLKARSLPSPLQRELKGPIDHSYFDKYPPEKGMPPDELSGWDKDF

SEQ ID NO: 26886 - protein, 733 aa, Homo sapiens
MGNGSVKPKHSKHPDGHSGNLTTDALRNKVTELERELRRKDAEIQEREYHLKELREQLSKQTVAIAELTEELQNKCIQLNKLQDVVHMQGGSPLQASPDKVPLEVHRKTSGLVSLHSRRGAKAGVSAEPTTRTYDLNKPPEFSFEKARVRKDSSEKKLITDALNKNQFLKRLDPQQIKDMVECMYGRNYQQGSYIIKQGEPGNHIFVLAEGRLEVFQGEKLLSSIPMWTTFGELAILYNCTRTASVKAITNVKTWALDREVFQNIMRRTAQARDEQYRNFLRSVSLLKNLPEDKLTKIIDCLEVEYYDKGDYIIREGEEGSTFFILAKGKVKVTQSTEGHDQPQLIKTLQKGEYFGEKALISDDVRSANIIAEENDVACLVIDRETFNQTVGTFEELQKYLEGYVANLNRDDEKRHAKRSMSNWKLSKALSLEMIQLKEKVKVKNENVAFAMKCIRKKHIVDTKQQEHVYSEKRILEELCSPFIVKLYRTFKDNKYVYMLLEACLGGELWSILRDRGSFDEPTSKFCVACVTEAFDYLHRLGIIYRDLKPENLILDAEGYLKLVDFGFAKKIGSGQKTWTFCGTPEYVAPEVILNKGHDFSVDFWSLGILVYELLTGNPPFSGVDQMMTYNLILKGIEKMDFPRKITRRPEDLIRRLCRQNPTERLGNLKNGINDIKKHRWLNGFNWEGLKARSLPSPLQRELKGPIDHSYFDKYPPEKGMPPDELSGWDKDF

SEQ ID NO: 26887 - protein, 462 aa, Homo sapiens
MGTQALQGFLFLLFLPLLQPRGASAGSLHSPGLSECFQVNGADYRGHQNRTGPRGAGRPCLFWDQTQQHSYSSASDPHGRWGLGAHNFCRNPDGDVQPWCYVAETEEGIYWRYCDIPSCHMPGYLGCFVDSGAPPALSGPSGTSTKLTVQVCLRFCRMKGYQLAGVEAGYACFCGSESDLARGRLAPATDCDQICFGHPGQLCGGDGRLGVYEVSVGSCQGNWTAPQGVIYSPDFPDEYGPDRNCSWALGPPGAALELTFRLFELADPRDRLELRDAASGSLLRAFDGARPPPSGPLRLGTAALLLTFRSDARGHAQGFALTYRGLQDAAEDPEAPEGSAQTPAAPLDGANVSCSPRPGAPPAAIGARVFSTVTAVSVLLLLLLGLLRPLRRRSCLLAPGKGPPALGASRGPRRSWAVWYQQPRGVALPCSPGDPQAEGSAAGYRPLSASSQSSLRSLISAL

SEQ ID NO: 26888 - protein, 424 aa, Homo sapiens
MGTQALQGFLFLLFLPLLQPRGASAGSLHSPGLSECFQVNGADYRGHQNRTGPRGAGRPCLFWDQTQQHSYSSASDPHGRWGLGAHNFCRNPDGDVQPWCYVAETEEGIYWRYCDIPSCHMPGYLGCFVDSGAPPALSGPSGTSTKLTVQVCLRFCRMKGYQLAGVEAGYACFCGSESDLARGRLAPATDCDQICFGHPGQLCGGDGRLGVYEVSVGSCQGNWTAPQGVIYSPDFPDEYGPDRNCSWALGPPGAALELTFRLFELADPRDRLELRDAASGSLLRAFDGARPPPSGPLRLGTAALLLTFRSDARGHAQGFALTYRGLQDAAEDPEAPEGSAQTPAAPLDGANVSCSPRPGAPPAAIGARVFSTVTAVSVLLLLLLGLLRPLRRRCGALGQGLRADRWWGAGAPEGNRARKELLGS

SEQ ID NO: 26889 - protein, 420 aa, Homo sapiens
MGTQALQGFLFLLFLPLLQPRGASAGSLHSPGLSECFQVNGADYRGHQNRTGPRGAGRPCLFWDQTQQHSYSSASDPHGRWGLGAHNFCRNPDGDVQPWCYVAETEEGIYWRYCDIPSCHMPGYLGCFVDSGAPPALSGPSGTSTKLTVQVCLRFCRMKGYQLAGVEAGYACFCGSESDLARGRLAPATDCDQICFGHPGQLCGGDGRLGVYEVSVGSCQGNWTAPQGVIYSPDFPDEYGPDRNCSWALGPPGAALELTFRLFELADPRDRLELRDAASGSLLRAFDGARPPPSGPLRLGTAALLLTFRSDARGHAQGFALTYRGLQDAAEDPEAPEGSAQTPAAPLDGANVSCSPRPGAPPAAIGGAVCWLREKGPRRWGLPGAPGEAGLCGTNSPEGWPCPAPPGTPRLRVLPRATGL

SEQ ID NO: 26890 - protein, 399 aa, Homo sapiens
MGTQALQGFLFLLFLPLLQPRGASAGSLHSPGLSECFQVNGADYRGHQNRTGPRGAGRPCLFWDQTQQHSYSSASDPHGRWGLGAHNFCRNPDGDVQPWCYVAETEEGIYWRYCDIPSCHMPGYLGCFVDSGAPPALSGPSGTSTKLTVQVCLRFCRMKGYQLAGVEAGYACFCGSESDLARGRLAPATDCDQICFGHPGQLCGGDGRLGVYEVSVGSCQGNWTAPQGVIYSPDFPDEYGPDRNCSWALGPPGAALELTFRLFELADPRDRLELRDAASGSLLRAFDGARPPPSGPLRLGTAALLLTFRSDARGHAQGFALTYRGLQDAAEDPEAPEGSAQTPAAPLDGANVSCSPRPGAPPAAIGGEAGARDGSESGSRPLAPILTAAVCPQPGSSRR

SEQ ID NO: 26891 - protein, 423 aa, Homo sapiens
MGTQALQGFLFLLFLPLLQPRGASAGSLHSPGLSECFQVNGADYRGHQNRTGPRGAGRPCLFWDQTQQHSYSSASDPHGRWGLGAHNFCRNPDGDVQPWCYVAETEEGIYWRYCDIPSCHMPGYLGCFVDSGAPPALSGPSGTSTKLTVQVCLRFCRMKGYQLCGGDGRLGVYEVSVGSCQGNWTAPQGVIYSPDFPDEYGPDRNCSWALGPPGAALELTFRLFELADPRDRLELRDAASGSLLRAFDGARPPPSGPLRLGTAALLLTFRSDARGHAQGFALTYRGLQDAAEDPEAPEGSAQTPAAPLDGANVSCSPRPGAPPAAIGARVFSTVTAVSVLLLLLLGLLRPLRRRSCLLAPGKGPPALGASRGPRRSWAVWYQQPRGVALPCSPGDPQAEGSAAGYRPLSASSQSSLRSLISAL

SEQ ID NO: 26892 - protein, 381 aa, Homo sapiens
MGTQALQGFLFLLFLPLLQPRGASAGSLHSPGLSECFQVNGADYRGHQNRTGPRGAGRPCLFWDQTQQHSYSSASDPHGRWGLGAHNFCRNPDGDVQPWCYVAETEEGIYWRYCDIPSCHMPGYLGCFVDSGAPPALSGPSGTSTKLTVQVCLRFCRMKGYQLCGGDGRLGVYEVSVGSCQGNWTAPQGVIYSPDFPDEYGPDRNCSWALGPPGAALELTFRLFELADPRDRLELRDAASGSLLRAFDGARPPPSGPLRLGTAALLLTFRSDARGHAQGFALTYRGLQDAAEDPEAPEGSAQTPAAPLDGANVSCSPRPGAPPAAIGGAVCWLREKGPRRWGLPGAPGEAGLCGTNSPEGWPCPAPPGTPRLRVLPRATGL

SEQ ID NO: 26893 - protein, 579 aa, Homo sapiens
MCDQQQIQCRLPLQQCCVKGPSFCSSQSPFAQSQVVVQAPCEMQIVDCPASCPVQVCQVSDQAPCQSQTTQVKCQSKTKQVKGQAQCQSKTTQVKGQAASQSQTSSVQSQAPCQSEVSYVQCEASQPVQTCFVECAPVCYTETCYVECPVQNYVPCPAPQPVQMYRGRPAVCQPQGRFSTQCQYQGSYSSCGPQFQSRATCNNYTPQFQLRPSYSSCFPQYRSRTSFSPCVPQCQTQGSYGSFTEQHRSRSTSRCLPPPRRLQLFPRSCSPPRRFEPCSSSYLPLRPSEGFPNYCTPPRRSEPIYNSRCPRRPISSCSQRRGPKCRIEISSPCCPRQVPPQRCPVEIPPIRRRSQSCGPQPSWGASCPELRPHVEPRPLPSFCPPRRLDQCPESPLQRCPPPAPRPRLRPEPCISLEPRPRPLPRQLSEPCLYPEPLPALRPTPRPVPLPRPGQCEIPEPRPCLQPCEHPEPCPRPEPIPLPAPCPSPEPCRETWRSPSPCWGPNPVPYPGDLGCHESSPHRLDTEAPYCGPSSYNQGQESGAGCGPGDVFPERRGQDGHGDQGNAFAGVKGEAKSAYF

SEQ ID NO: 26894 - protein, 237 aa, Homo sapiens
MLSAFQRLFRVLFVIETVSEYGVLIFIYGWPFLQTLAMLLIGTVSFHLWIRRNRERNSRSGKTRCRSKRSEQSMDMGTSALSKKPWWTLPQNFHAPMVFHMEEDQEELIFGHGDTYLRCIEVHSHTLIQLESWFTATGQTRVTVVGPHRARQWLLHMFCCVGSQDSYHHARGLEMLERVRSQPLTNDDLVTSISVPPYTGDLSLAPRISGTVCLSVPQPSPYQVIGCSGFHLSSLYP

SEQ ID NO: 26895 - protein, 164 aa, Homo sapiens
MDMGTSALSKKPWWTLPQNFHAPMVFHMEEDQEELIFGHGDTYLRCIEVHSHTLIQLESWFTATGQTRVTVVGPHRARQWLLHMFCCVGSQDSYHHARGLEMLERVRSQPLTNDDLVTSISVPPYTGDLSLAPRISGTVCLSVPQPSPYQVIGCSGFHLSSLYP

SEQ ID NO: 26896 - protein, 1196 aa, Homo sapiens
MPVRRGHVAPQNTFLGTIIRKFEGQNKKFIIANARVQNCAIIYCNDGFCEMTGFSRPDVMQKPCTCDFLHGPETKRHDIAQIAQALLGSEERKVEVTYYHKNGSTFICNTHIIPVKNQEGVAMMFIINFEYVTDNENAATPERVNPILPIKTVNRKFFGFKFPGLRVLTYRKQSLPQEDPDVVVIDSSKHSDDSVAMKHFKSPTKESCSPSEADDTKALIQPSKCSPLVNISGPLDHSSPKRQWDRLYPDMLQSSSQLSHSRSRESLCSIRRASSVHDIEGFGVHPKNIFRDRHASEDNGRNVKGPFNHIKSSLLGSTSDSNLNKYSTINKIPQLTLNFSEVKTEKKNSSPPSSDKTIIAPKVKDRTHNVTEKVTQVLSLGADVLPEYKLQTPRINKFTILHYSPFKAVWDWLILLLVIYTAIFTPYSAAFLLNDREEQKRRECGYSCSPLNVVDLIVDIMFIIDILINFRTTYVNQNEEVVSDPAKIAIHYFKGWFLIDMVAAIPFDLLIFGSGSDETTTLIGLLKTARLLRLVRVARKLDRYSEYGAAVLMLLMCIFALIAHWLACIWYAIGNVERPYLTDKIGWLDSLGQQIGKRYNDSDSSSGPSIKDKYVTALYFTFSSLTSVGFGNVSPNTNSEKIFSICVMLIGSLMYASIFGNVSAIIQRLYSGTARYHMQMLRVKEFIRFHQIPNPLRQRLEEYFQHAWTYTNGIDMNMVLKGFPECLQADICLHLNQTLLQNCKAFRGASKGCLRALAMKFKTTHAPPGDTLVHCGDVLTALYFLSRGSIEILKDDIVVAILGKNDIFGEMVHLYAKPGKSNADVRALTYCDLHKIQREDLLEVLDMYPEFSDHFLTNLELTFNLRHESAKADLLRSQSMNDSEGDNCKLRRRKLSFESEGEKENSTNDPEDSADTIRHYQSSKRHFEEKKSRSSSFISSIDDEQKPLFSGIVDSSPGIGKASGLDFEETVPTSGRMHIDKRSHSCKDITDMRSWERENAHPQPEDSSPSALQRAAWGISETESDLTYGEVEQRLDLLQEQLNRLESQMTTDIQTILQLLQKQTTVVPPAYSMVTAGSEYQRPIIQLMRTSQPEASIKTDRSFSPSSQCPEFLDLEKSKLKSKESLSSGVHLNTASEDNLTSLLKQDSDLSLELHLRQRKTYVHPIRHPSLPDSSLSTVGIVGLHRHVSDPGLPGK

SEQ ID NO: 26897 - protein, 732 aa, Homo sapiens
MPVRRGHVAPQNTFLGTIIRKFEGQNKKFIIANARVQNCAIIYCNDGFCEMTGFSRPDVMQKPCTCDFLHGPETKRHDIAQIAQALLGSEERKVEVTYYHKNGSTFICNTHIIPVKNQEGVAMMFIINFEYVTDNENAATPERVNPILPIKTVNRKFFGFKFPGLRVLTYRKQSLPQEDPDVVVIDSSKHSDDSVAMKHFKSPTKESCSPSEADDTKALIQPSKCSPLVNISGPLDHSSPKRQWDRLYPDMLQSSSQLSHSRSRESLCSIRRASSVHDIEGFGVHPKNIFRDRHASEGPFNHIKSSLLGSTSDSNLNKYSTINKIPQLTLNFSEVKTEKKNSSPPSSDKTIIAPKVKDRTHNVTEKVTQVLSLGADVLPEYKLQTPRINKFTILHYSPFKAVWDWLILLLVIYTAIFTPYSAAFLLNDREEQKRRECGYSCSPLNVVDLIVDIMFIIDILINFRTTYVNQNEEVVSDPAKIAIHYFKGWFLIDMVAAIPFDLLIFGSGSDETTTLIGLLKTARLLRLVRVARKLDRYSEYGAAVLMLLMCIFALIAHWLACIWYAIGNVERPYLTDKIGWLDSLGQQIGKRYNDSDSSSGPSIKDKYVTALYFTFSSLTSVGFGNVSPNTNSEKIFSICVMLIGSLMYASIFGNVSAIIQRLYSGTARYHMQMLRVKEFIRFHQIPNPLRQRLEEYFQHAWTYTNGIDMNMVCMSVFQNESAAGIIVIAKME

SEQ ID NO: 26898 - protein, 262 aa, Homo sapiens
MWFLVLCLALSLGGTGAAPPIQSRIVGGWECEQHSQPWQAALYHFSTFQCGGILVHRQWVLTAAHCISDNYQLWLGRHNLFDDENTAQFVHVSESFPHPGFNMSLLENHTRQADEDYSHDLMLLRLTEPADTITDAVKVVELPTEEPEVGSTCLASGWGSIEPENFSFPDDLQCVDLKILPNDECKKAHVQKVTDFMLCVGHLEGGKDTCVGDSGGPLMCDGVLQGVTSWGYVPCGTPNKPSVAVRVLSYVKWIEDTIAENS

SEQ ID NO: 26899 - protein, 216 aa, Homo sapiens
MLPCPIPFSPSRLLIPPFPSFPSNYQLWLGRHNLFDDENTAQFVHVSESFPHPGFNMSLLENHTRQADEDYSHDLMLLRLTEPADTITDAVKVVELPTEEPEVGSTCLASGWGSIEPENFSFPDDLQCVDLKILPNDECKKAHVQKVTDFMLCVGHLEGGKDTCVGDSGGPLMCDGVLQGVTSWGYVPCGTPNKPSVAVRVLSYVKWIEDTIAENS

SEQ ID NO: 26900 - protein, 1017 aa, Homo sapiens
MPVMKGLLAPQNTFLDTIATRFDGTHSNFLLANAQGTRGFPIVYCSDGFCELTGYGRTEVMQKTCSCRFLYGPETSEPALQRLHKALEGHQEHRAEICFYRKDGSAFWCLLDMMPIKNEMGEVVLFLFSFKDITQSGSPGLGPQGGRGDSNHENSLGRRGATWKFRSARRRSRTVLHRLTGHFGRRGQGGMKANNNVFEPKPSVPEYKVASVGGSRCLLLHYSVSKAIWDGLILLATFYVAVTVPYNVCFSGDDDTPITSRHTLVSDIAVEMLFILDIILNFRTTYVSQSGQVISAPRSIGLHYLATWFFIDLIAALPFDLLYIFNITVTSLVHLLKTVRLLRLLRLLQKLERYSQCSAVVLTLLMSVFALLAHWMACIWYVIGRREMEANDPLLWDIGWLHELGKRLEVPYVNGSVGGPSRRSAYIAALYFTLSSLTSVGFGNVCANTDAEKIFSICTMLIGALMHAVVFGNVTAIIQRMYSRRSLYHSRMKDLKDFIRVHRLPRPLKQRMLEYFQTTWAVNSGIDANELLRDFPDELRADIAMHLNREILQLPLFGAASRGCLRALSLHIKTSFCAPGEYLLRRGDALQAHYYVCSGSLEVLRDNMVLAILGKGDLIGADIPEPGQEPGLGADPNFVLKTSADVKALTYCGLQQLSSRGLAEVLRLYPEYGAAFRAGLPRDLTFNLRQGSDTSGLSRFSRSPRLSQPRSESLGSSSDKTLPSITEAESGAEPGGGPRPRRPLLLPNLSPARPRGSLVSLLGEELPPFSALVSSPSLSPSLSPALAGQGHSASPHGPPRCSAAWKPPQLLIPPLGTFGPPDLSPRIVDGIEDSGSTAEAPSFRFSRRPELPRPRSQAPPTGTRPSPELASEAEEVKEKVCRLNQEISRLNQEVSQLSRELRHIMGLLQARLGPPGHPAGSAWTPDPPCPQLRPPCLSPCASRPPPSLQDTTLAEVHCPASVGTMETGTALLDLRPSILPPYPSEPDPLGPSPVPEASPPTPSLLRHSFQSRSDTFH

SEQ ID NO: 26901 - protein, 586 aa, Homo sapiens
MAASGVEKSSKKKTEKKLAAREEAKLLAGFMGVMNNMRKQKTLCDVILMVQERKIPAHRVVLAAASHFFNLMFTTNMLESKSFEVELKDAEPDIIEQLVEFAYTARISVNSNNVQSLLDAANQYQIEPVKKMCVDFLKEQVDASNCLGISVLAECLDCPELKATADDFIHQHFTEVYKTDEFLQLDVKRVTHLLNQDTLTVRAEDQVYDAAVRWLKYDEPNRQPFMVDILAKVRFPLISKNFLSKTVQAEPLIQDNPECLKMVISGMRYHLLSPEDREELVDGTRPRRKKHDYRIALFGGSQPQSCRYFNPKDYSWTDIRCPFEKRRDAACVFWDNVVYILGGSQLFPIKRMDCYNVVKDSWYSKLGPPTPRDSLAACAAEGKIYTSGGSEVGNSALYLFECYDTRTESWHTKPSMLTQRCSHGMVEANGLIYVCGGSLGNNVSGRVLNSCEVYDPATETWTELCPMIEARKNHGLVFVKDKIFAVGGQNGLGGLDNVEYYDIKLNEWKMVSPMPWKGVTVKCAAVGSIVYVLAGFQGVGRLGHILEYNTETDKWVANSKVRAFPVTSCLICVVDTCGANEETLET

SEQ ID NO: 26902 - protein, 564 aa, Homo sapiens
MLGGTDCRTFLTSHINLKKTLCDVILMVQERKIPAHRVVLAAASHFFNLMFTTNMLESKSFEVELKDAEPDIIEQLVEFAYTARISVNSNNVQSLLDAANQYQIEPVKKMCVDFLKEQVDASNCLGISVLAECLDCPELKATADDFIHQHFTEVYKTDEFLQLDVKRVTHLLNQDTLTVRAEDQVYDAAVRWLKYDEPNRQPFMVDILAKVRFPLISKNFLSKTVQAEPLIQDNPECLKMVISGMRYHLLSPEDREELVDGTRPRRKKHDYRIALFGGSQPQSCRYFNPKDYSWTDIRCPFEKRRDAACVFWDNVVYILGGSQLFPIKRMDCYNVVKDSWYSKLGPPTPRDSLAACAAEGKIYTSGGSEVGNSALYLFECYDTRTESWHTKPSMLTQRCSHGMVEANGLIYVCGGSLGNNVSGRVLNSCEVYDPATETWTELCPMIEARKNHGLVFVKDKIFAVGGQNGLGGLDNVEYYDIKLNEWKMVSPMPWKGVTVKCAAVGSIVYVLAGFQGVGRLGHILEYNTETDKWVANSKVRAFPVTSCLICVVDTCGANEETLET

SEQ ID NO: 26903 - protein, 166 aa, Homo sapiens
MAASGVEKSSKKKTEKKLAAREEAKLLAGFMGVMNNMRKQKTLCDVILMVQERKIPAHRVVLAAASHFFNLMFTTNMLESKSFEVELKDAEPDIIEQLVEFAYTARISVNSNNVQSLLDAANQYQIEPVKKMCVDFLKEQVDASNCLGEAEKVDQSLPECGMLFTV

SEQ ID NO: 26904 - protein, 144 aa, Homo sapiens
MLGGTDCRTFLTSHINLKKTLCDVILMVQERKIPAHRVVLAAASHFFNLMFTTNMLESKSFEVELKDAEPDIIEQLVEFAYTARISVNSNNVQSLLDAANQYQIEPVKKMCVDFLKEQVDASNCLGEAEKVDQSLPECGMLFTV

SEQ ID NO: 26905 - protein, 538 aa, Homo sapiens
MVQERKIPAHRVVLAAASHFFNLMFTTNMLESKSFEVELKDAEPDIIEQLVEFAYTARISVNSNNVQSLLDAANQYQIEPVKKMCVDFLKEQVDASNCLGISVLAECLDCPELKATADDFIHQHFTEVYKTDEFLQLDVKRVTHLLNQDTLTVRAEDQVYDAAVRWLKYDEPNRQPFMVDILAKVRFPLISKNFLSKTVQAEPLIQDNPECLKMVISGMRYHLLSPEDREELVDGTRPRRKKHDYRIALFGGSQPQSCRYFNPKDYSWTDIRCPFEKRRDAACVFWDNVVYILGGSQLFPIKRMDCYNVVKDSWYSKLGPPTPRDSLAACAAEGKIYTSGGSEVGNSALYLFECYDTRTESWHTKPSMLTQRCSHGMVEANGLIYVCGGSLGNNVSGRVLNSCEVYDPATETWTELCPMIEARKNHGLVFVKDKIFAVGGQNGLGGLDNVEYYDIKLNEWKMVSPMPWKGVTVKCAAVGSIVYVLAGFQGVGRLGHILEYNTETDKWVANSKVRAFPVTSCLICVVDTCGANEETLET

SEQ ID NO: 26906 - protein, 476 aa, Homo sapiens [sequence omitted]

SEQ ID NO: 26907 - protein, 460 aa, Homo sapiens
MGRKEEDDCSSWKKQTTNIRKTFIFMEVLGSGAFSEVFLVKQRLTGKLFALKCIKKSPAFRDSSLENEIAVLKKIKHENIVTLEDIYESTTHYYLVMQLVSGGELFDRILERGVYTEKDASLVIQQVLSAVKYLHENGIVHRDLKPENLLYLTPEENSKIMITDFGLSKMEQNGIMSTACGTPGYVAPEVLAQKPYSKAVDCWSIGVITYILLCGYPPFYEETESKLFEKIKEGYYEFESPFWDDISESAKDFICHLLEKDPNERYTCEKALSHPWIDGNTALHRDIYPSVSLQIQKNFAKSKWRQAFNAAAVVHHMRKLHMNLHSPGVRPEVENRPPETQASETSRPSSPEITITEAPVLDHSVALPALTQLPCQHGRRPTAPGGRSLNCLVNGSLHISSSLVPMHQGSLAAGPCGCCSSCLNIGSKGKSSYCSEPTLLKKANKKQYVFLAKDGAPAWV

SEQ ID NO: 26908 - protein, 926 aa, Homo sapiens
MEESGMAHESAEDLFHFNVGGWHFSVPRSKLSQFPDSLLWKEASALTSSESQRLFIDRDGSTFRHVHYYLYTSKLSFSSCAELNLLYEQALGLQLMPLLQTLDNLKEGKHHLRVRPADLPVAERASLNYWRTWKCISKPSEFPIKSPAFTGLHDKAPLGLMDTPLLDTEEEVHYCFLPLDLVAKYPSLVTEDNLLWLAETVALIECECSEFRFIVNFLRSQKILLPDNFSNIDVLEAEVEILEIPALTEAVRWYRMNMGGCSPTTCSPLSPGKGARTASLESVKPLYTMALGLLVKYPDSALGQLRIESTLDGSRLYITGNGVLFQHVKNWLGTCRLPLTETISEVYELCAFLDKRDITYEPIKVALKTHLEPRTLAPMDVLNEWTAEITVYSPQQIIKVYVGSHWYATTLQTLLKYPELLSNPQRVYWITYGQTLLIHGDGQMFRHILNFLRLGKLFLPSEFKEWPLFCQEVEEYHIPSLSEALAQCEAYKSWTQEKESENEEAFSIRRLHVVTEGPGSLVEFSRDTKETTAYMPVDFEDCSDRTPWNKAKGNLVRSNQMDEAEQYTRPIQVSLCRNAKRAGNPSTYSHCRGLCTNPGHWGSHPESPPKKKCTTINLTQKSETKDPPATPMQKLISLVREWDMVNCKQWEFQPLTATRSSPLEEATLQLPLGSEAASQPSTSAAWKAHSTASEKDPGPQAGAGAGAKDKGPEPTFKPYLPPKRAGTLKDWSKQRTKERESPAPEQPLPEASEVDSLGVILKVTHPPVVGSDGFCMFFEDSIIYTTEMDNLRHTTPTASPQPQEVTFLSFSLSWEEMFYAQKCHCFLADIIMDSIRQKDPKAITAKVVSLANRLWTLHISPKQFVVDLLAITGFKDDRHTQERLYSWVELTLPFARKYGRCMDLLIQRGLSRSVSYSILGKYLQED

SEQ ID NO: 26909 - protein, 332 aa, Homo sapiens
MYRPRARAAPEGRVRGCAVPSTVLLLLAYLAYLALGTGVFWTLEGRAAQDSSRSFQRDKWELLQNFTCLDRPALDSLIRDVVQAYKNGASLLSNTTSMGRWELVGSFFFSVSTITTIGYGNLSPNTMAARLFCIFFALVGIPLNLVVLNRLGHLMQQGVNHWASRLGGTWQDPDKARWLAGSGALLSGLLLFLLLPPLLFSHMEGWSYTEGFYFAFITLSTVGFGDYVIGMNPSQRYPLWYKNMVSLWILFGMAWLALIIKLILSQLETPGRVCSCCHHSSKEDFKSQSWRQGPDREPESHSPQQGCYPEGPMGIIQHLEPSAHAAGCGKDS

SEQ ID NO: 26910 - protein, 271 aa, Homo sapiens
MYRPRARAAPEGRVRGCAVPSTVLLLLAYLAYLALGTGVFWTLEGRAAQDSSRSFQRDKWELLQNFTCLDRPALDSLIRDVVQAYKNGASLLSNTTSMGRWELVGSFFFSVSTITTIGYGNLSPNTMAARLFCIFFALVGIPLNLVVLNRLGHLMQQGVNHWASRLGGTWQDPDKARWLAGSGALLSGLLLFLLLPPLLFSHMEGWSYTEGFYFAFITLSTVGFGDYVIASCLISDTRKPNRDWQTLERTSKSSGGLLKYRFLAGHGGSHL

SEQ ID NO: 26911 - protein, 132 aa, Homo sapiens
MPRMILSNTTAVTPFLTKLWQETVQQGGNMSGLARRSPRSGDGKLEALYVLMVLGFFGFFTLGIMLSYIRSKKLEHSNDPFNVYIESNAWQEKDKAYVQARVLESYRSCYVVENHLAIEQPNTHLPETKPSP

SEQ ID NO: 26912 - protein, 136 aa, Homo sapiens
MARMAVLWRKMRDNFQSKEFREYVSSTHFWGPAFSWGLPLAAFKDMKASPEIISGRMTTALILYSAIFMRFAYRVQPRNLLLMACHCTNVMAQSVQASRYLLYYYGGGGAEAKARDPPATAAAATSPGSQPPKQAS

SEQ ID NO: 26913 - protein, 195 aa, Homo sapiens
MTDSVIYSMLELPTATQAQNDYGPQQKSSSSRPSCSCLVAIALGLLTAVLLSVLLYQWILCQGSNYSTCASCPSCPDRWMKYGNHCYYFSVEEKDWNSSLEFCLARDSHLLVITDNQEMSLLQVFLSEAFCWIGLRNNSGWRWEDGSPLNFSRISSNSFVQTCGAINKNGLQASSCEVPLHWVCKKCPFADQALF

SEQ ID NO: 26914 - protein, 189 aa, Homo sapiens
MTDSVIYSMLELPTATQAQNDYGPQQKSSSSRPSCSCLVAIALGLLTAVLLSVLLYQWILCQGSNYSTCASCPSCPDRWMKYGNHCYYFSVEEKDWNSSLEFCLARDSHLLVITDNQEMSLLQVFLSEAFCWIGLRNNSGWRWEDGSPLNFSRISSNSFVQTCGAINKNGLQASSCEVPLHWVCKKVRL

SEQ ID NO: 26915 - protein, 526 aa, Homo sapiens
MLMLLVRGTHYENLRSKVVLPTPLGGRSTETFVSEFPGPDTGIRWRRSDEALRVNVGGVRRQLSARALARFPGTRLGRLQAAASEEQARRLCDDYDEAAREFYFDRHPGFFLSLLHFYRTGHLHVLDELCVFAFGQEADYWGLGENALAACCRARYLERRLTQPHAWDEDSDTPSSVDPCPDEISDVQRELARYGAARCGRLRRRLWLTMENPGYSLPSKLFSCVSISVVLASIAAMCIHSLPEYQAREAAAAVAAVAAGRSPEGVRDDPVLRRLEYFCIAWFSFEVSSRLLLAPSTRNFFCHPLNLIDIVSVLPFYLTLLAGVALGDQGGKEFGHLGKVVQVFRLMRIFRVLKLARHSTGLRSLGATLKHSYREVGILLLYLAVGVSVFSGVAYTAEKEEDVGFNTIPACWWWGTVSMTTVGYGDVVPVTVAGKLAASGCILGGILVVALPITIIFNKFSHFYRRQKALEAAVRNSNHQEFEDLLSSIDGVSEASLETSRETSQEGQSADLESQAPSEPPHPQMY

SEQ ID NO: 26916 - protein, 932 aa, Homo sapiens
MPRHHAGGEEGGAAGLWVKSGAAAAAAGGGRLGSGMKDVESGRGRVLLNSAAARGDGLLLLGTRAATLGGGGGGLRESRRGKQGARMSLLGKPLSYTSSQSCRRNVKYRRVQNYLYNVLERPRGWAFIYHAFVFLLVFGCLILSVFSTIPEHTKLASSCLLILEFVMIVVFGLEFIIRIWSAGCCCRYRGWQGRLRFARKPFCVIDTIVLIASIAVVSAKTQGNIFATSALRSLRFLQILRMVRMDRRGGTWKLLGSVVYAHSKELITAWYIGFLVLIFSSFLVYLVEKDANKEFSTYADALWWGTITLTTIGYGDKTPLTWLGRLLSAGFALLGISFFALPAGILGSGFALKVQEQHRQKHFEKRRNPAANLIQCVWRSYAADEKSVSIATWKPHLKALHTCSPTKKEQGEASSSQKLSFKERVRMASPRGQSIKSRQASVGDRRSPSTDITAEGSPTKVQKSWSFNDRTRFRPSLRLKSSQPKPVIDADTALGTDDVYDEKGCQCDVSVEDLTPPLKTVIRAIRIMKFHVAKRKFKETLRPYDVKDVIEQYSAGHLDMLCRIKSLQTRVDQILGKGQITSDKKSREKITAEHETTDDLSMLGRVVKVEKQVQSIESKLDCLLDIYQQVLRKGSASALALASFQIPPFECEQTSDYQSPVDSKDLSGSAQNSGCLSRSTSANISRGLQFILTPNEFSAQTFYALSPTMHSQATQVPISQSDGSAVAATNTIANQINTAPKPAAPTTLQIPPPLPAIKHLPRPETLHPNPAGLQESISDVTTCLVASKENVQVAQSNLTKDRSMRKSFDMGGETLLSVCPMVPKDLGKSLSVQNLIRSTEELNIQLSGSESSGSRGSQDFYPKWRESKLFITDEEVGPEETETDTFDAAPQPAREAAFASDSLRTGRSRSSQSICKAGESTDALSLPHVKLK

SEQ ID NO: 26917 - protein, 923 aa, Homo sapiens
MPRHHAGGEEGGAAGLWVKSGAAAAAAGGGRLGSGMKDVESGRGRVLLNSAAARGDGLLLLGTRAATLGGGGGGLRESRRGKQGARMSLLGKPLSYTSSQSCRRNVKYRRVQNYLYNVLERPRGWAFIYHAFVFLLVFGCLILSVFSTIPEHTKLASSCLLILEFVMIVVFGLEFIIRIWSAGCCCRYRGWQGRLRFARKPFCVIDTIVLIASIAVVSAKTQGNIFATSALRSLRFLQILRMVRMDRRGGTWKLLGSVVYAHSKELITAWYIGFLVLIFSSFLVYLVEKDANKEFSTYADALWWGTITLTTIGYGDKTPLTWLGRLLSAGFALLGISFFALPAGILGSGFALKVQEQHRQKHFEKRRNPAANLIQCVWRSYAADEKSVSIATWKPHLKALHTCSPTNQKLSFKERVRMASPRGQSIKSRQASVGDRRSPSTDITAEGSPTKVQKSWSFNDRTRFRPSLRLKSSQPKPVIDADTALGTDDVYDEKGCQCDVSVEDLTPPLKTVIRAIRIMKFHVAKRKFKETLRPYDVKDVIEQYSAGHLDMLCRIKSLQTRVDQILGKGQITSDKKSREKITAEHETTDDLSMLGRVVKVEKQVQSIESKLDCLLDIYQQVLRKGSASALALASFQIPPFECEQTSDYQSPVDSKDLSGSAQNSGCLSRSTSANISRGLQFILTPNEFSAQTFYALSPTMHSQATQVPISQSDGSAVAATNTIANQINTAPKPAAPTTLQIPPPLPAIKHLPRPETLHPNPAGLQESISDVTTCLVASKENVQVAQSNLTKDRSMRKSFDMGGETLLSVCPMVPKDLGKSLSVQNLIRSTEELNIQLSGSESSGSRGSQDFYPKWRESKLFITDEEVGPEETETDTFDAAPQPAREAAFASDSLRTGRSRSSQSICKAGESTDALSLPHVKLK

SEQ ID NO: 26918 - protein, 942 aa, Homo sapiens
MPRHHAGGEEGGAAGLWVKSGAAAAAAGGGRLGSGMKDVESGRGRVLLNSAAARGDGLLLLGTRAATLGGGGGGLRESRRGKQGARMSLLGKPLSYTSSQSCRRNVKYRRVQNYLYNVLERPRGWAFIYHAFVFLLVFGCLILSVFSTIPEHTKLASSCLLILEFVMIVVFGLEFIIRIWSAGCCCRYRGWQGRLRFARKPFCVIDTIVLIASIAVVSAKTQGNIFATSALRSLRFLQILRMVRMDRRGGTWKLLGSVVYAHSKELITAWYIGFLVLIFSSFLVYLVEKDANKEFSTYADALWWGTITLTTIGYGDKTPLTWLGRLLSAGFALLGISFFALPAGILGSGFALKVQEQHRQKHFEKRRNPAANLIQCVWRSYAADEKSVSIATWKPHLKALHTCSPTNKFCSNKQKLFRMYTSRKQSQKLSFKERVRMASPRGQSIKSRQASVGDRRSPSTDITAEGSPTKVQKSWSFNDRTRFRPSLRLKSSQPKPVIDADTALGTDDVYDEKGCQCDVSVEDLTPPLKTVIRAIRIMKFHVAKRKFKETLRPYDVKDVIEQYSAGHLDMLCRIKSLQTRVDQILGKGQITSDKKSREKITAEHETTDDLSMLGRVVKVEKQVQSIESKLDCLLDIYQQVLRKGSASALALASFQIPPFECEQTSDYQSPVDSKDLSGSAQNSGCLSRSTSANISRGLQFILTPNEFSAQTFYALSPTMHSQATQVPISQSDGSAVAATNTIANQINTAPKPAAPTTLQIPPPLPAIKHLPRPETLHPNPAGLQESISDVTTCLVASKENVQVAQSNLTKDRSMRKSFDMGGETLLSVCPMVPKDLGKSLSVQNLIRSTEELNIQLSGSESSGSRGSQDFYPKWRESKLFITDEEVGPEETETDTFDAAPQPAREAAFASDSLRTGRSRSSQSICKAGESTDALSLPHVKLK

SEQ ID NO: 26919 - protein, 427 aa, Homo sapiens
MPRHHAGGEEGGAAGLWVKSGAAAAAAGGGRLGSGMKDVESGRGRVLLNSAAARGDGLLLLGTRAATLGGGGGGLRESRRGKQGARMSLLGKPLSYTSSQSCRRNVKYRRVQNYLYNVLERPRGWAFIYHAFVFLLVFGCLILSVFSTIPEHTKLASSCLLILEFVMIVVFGLEFIIRIWSAGCCCRYRGWQGRLRFARKPFCVIDTIVLIASIAVVSAKTQGNIFATSALRSLRFLQILRMVRMDRRGGTWKLLGSVVYAHSKELITAWYIGFLVLIFSSFLVYLVEKDANKEFSTYADALWWGTITLTTIGYGDKTPLTWLGRLLSAGFALLGISFFALPAGILGSGFALKVQEQHRQKHFEKRRNPAANLIQCVWRSYAADEKSVSIATWKPHLKALHTCSPTKKEQGEASSRFVISLLLHVCL

SEQ ID NO: 26920 - protein, 822 aa, Homo sapiens
MPRHHAGGEEGGAAGLWVKSGAAAAAAGGGRLGSGMKDVESGRGRVLLNSAAARGDGLLLLGTRAATLGGGGGGLRESRRGKQGARMSLLGKPLSYTSSQSCRRNVKYRRVQNYLYNVLERPRGWAFIYHAFVFLLVFGCLILSVFSTIPEHTKLASSCLLILEFVMIVVFGLEFIIRIWSAGCCCRYRGWQGRLRFARKPFCVIDTIVLIASIAVVSAKTQGNIFATSALRSLRFLQILRMVRMDRRGGTWKLLGSVVYAHSKELITAWYIGFLVLIFSSFLVYLVEKDANKEFSTYADALWWGTITLTTIGYGDKTPLTWLGRLLSAGFALLGISFFALPAGILGSGFALKVQEQHRQKHFEKRRNPAANLIQCVWRSYAADEKSVSIATWKPHLKALHTCSPTKKEQGEASSRIMKFHVAKRKFKETLRPYDVKDVIEQYSAGHLDMLCRIKSLQTRVDQILGKGQITSDKKSREKITAEHETTDDLSMLGRVVKVEKQVQSIESKLDCLLDIYQQVLRKGSASALALASFQIPPFECEQTSDYQSPVDSKDLSGSAQNSGCLSRSTSANISRGLQFILTPNEFSAQTFYALSPTMHSQATQVPISQSDGSAVAATNTIANQINTAPKPAAPTTLQIPPPLPAIKHLPRPETLHPNPAGLQESISDVTTCLVASKENVQVAQSNLTKDRSMRKSFDMGGETLLSVCPMVPKDLGKSLSVQNLIRSTEELNIQLSGSESSGSRGSQDFYPKWRESKLFITDEEVGPEETETDTFDAAPQPAREAAFASDSLRTGRSRSSQSICKAGESTDALSLPHVKLK

SEQ ID NO: 26921 - protein, 951 aa, Homo sapiens
MPRHHAGGEEGGAAGLWVKSGAAAAAAGGGRLGSGMKDVESGRGRVLLNSAAARGDGLLLLGTRAATLGGGGGGLRESRRGKQGARMSLLGKPLSYTSSQSCRRNVKYRRVQNYLYNVLERPRGWAFIYHAFVFLLVFGCLILSVFSTIPEHTKLASSCLLILEFVMIVVFGLEFIIRIWSAGCCCRYRGWQGRLRFARKPFCVIDTIVLIASIAVVSAKTQGNIFATSALRSLRFLQILRMVRMDRRGGTWKLLGSVVYAHSKELITAWYIGFLVLIFSSFLVYLVEKDANKEFSTYADALWWGTITLTTIGYGDKTPLTWLGRLLSAGFALLGISFFALPAGILGSGFALKVQEQHRQKHFEKRRNPAANLIQCVWRSYAADEKSVSIATWKPHLKALHTCSPTKKEQGEASSSKFCSNKQKLFRMYTSRKQSQKLSFKERVRMASPRGQSIKSRQASVGDRRSPSTDITAEGSPTKVQKSWSFNDRTRFRPSLRLKSSQPKPVIDADTALGTDDVYDEKGCQCDVSVEDLTPPLKTVIRAIRIMKFHVAKRKFKETLRPYDVKDVIEQYSAGHLDMLCRIKSLQTRVDQILGKGQITSDKKSREKITAEHETTDDLSMLGRVVKVEKQVQSIESKLDCLLDIYQQVLRKGSASALALASFQIPPFECEQTSDYQSPVDSKDLSGSAQNSGCLSRSTSANISRGLQFILTPNEFSAQTFYALSPTMHSQATQVPISQSDGSAVAATNTIANQINTAPKPAAPTTLQIPPPLPAIKHLPRPETLHPNPAGLQESISDVTTCLVASKENVQVAQSNLTKDRSMRKSFDMGGETLLSVCPMVPKDLGKSLSVQNLIRSTEELNIQLSGSESSGSRGSQDFYPKWRESKLFITDEEVGPEETETDTFDAAPQPAREAAFASDSLRTGRSRSSQSICKAGESTDALSLPHVKLK

SEQ ID NO: 26922 - protein, 933 aa, Homo sapiens
MPRHHAGGEEGGAAGLWVKSGAAAAAAGGGRLGSGMKDVESGRGRVLLNSAAARGDGLLLLGTRAATLGGGGGGLRESRRGKQGARMSLLGKPLSYTSSQSCRRNVKYRRVQNYLYNVLERPRGWAFIYHAFVFLLVFGCLILSVFSTIPEHTKLASSCLLILEFVMIVVFGLEFIIRIWSAGCCCRYRGWQGRLRFARKPFCVIDTIVLIASIAVVSAKTQGNIFATSALRSLRFLQILRMVRMDRRGGTWKLLGSVVYAHSKELITAWYIGFLVLIFSSFLVYLVEKDANKEFSTYADALWWGTITLTTIGYGDKTPLTWLGRLLSAGFALLGISFFALPAGILGSGFALKVQEQHRQKHFEKRRNPAANLIQCVWRSYAADEKSVSIATWKPHLKALHTCSPTKQNQQGESQSCQKLSFKERVRMASPRGQSIKSRQASVGDRRSPSTDITAEGSPTKVQKSWSFNDRTRFRPSLRLKSSQPKPVIDADTALGTDDVYDEKGCQCDVSVEDLTPPLKTVIRAIRIMKFHVAKRKFKETLRPYDVKDVIEQYSAGHLDMLCRIKSLQTRVDQILGKGQITSDKKSREKITAEHETTDDLSMLGRVVKVEKQVQSIESKLDCLLDIYQQVLRKGSASALALASFQIPPFECEQTSDYQSPVDSKDLSGSAQNSGCLSRSTSANISRGLQFILTPNEFSAQTFYALSPTMHSQATQVPISQSDGSAVAATNTIANQINTAPKPAAPTTLQIPPPLPAIKHLPRPETLHPNPAGLQESISDVTTCLVASKENVQVAQSNLTKDRSMRKSFDMGGETLLSVCPMVPKDLGKSLSVQNLIRSTEELNIQLSGSESSGSRGSQDFYPKWRESKLFITDEEVGPEETETDTFDAAPQPAREAAFASDSLRTGRSRSSQSICKAGESTDALSLPHVKLK

SEQ ID NO: 26923 - protein, 381 aa, Homo sapiens
MSRHEGVSCDACLKGNFRGRRYKCLICYDYDLCASCYESGATTTRHTTDHPMQCILTRVDFDLYYGGEAFSVEQPQSFTCPYCGKMGYTETSLQEHVTSEHAETSTEVICPICAALPGGDPNHVTDDFAAHLTLEHRAPRDLDESSGVRHVRRMFHPGRGLGGPRARRSNMHFTSSSTGGLSSSQSSYSPSNREAMDPIAELLSQLSGVRRSAGGQLNSSGPSASQLQQLQMQLQLERQHAQAARQQLETARNATRRTNTSSVTTTITQSTATTNIANTESSQQTLQNSQFLLTRLNDPKMSETERQSMESERADRSLFVQELLLSTLVREESSSSDEDDRGEMADFGAMGCVDIMPLDVALENLNLKESNKGNEPPPPPL

SEQ ID NO: 26924 - protein, 1352 aa, Homo sapiens
MAHTTKVNGSASGKAGDILSGDQDKEQKDPYFVETPYGYQLDLDFLKYVDDIQKGNTIKRLNIQKRRKPSVPCPEPRTTSGQQGIWTSTESLSSSNSDDNKQCPNFLIARSQVTSTPISKPPPPLETSLPFLTIPENRQLPPPSPQLPKHNLHVTKTLMETRRRLEQERATMQMTPGEFRRPRLASFGGMGTTSSLPSFVGSGNHNPAKHQLQNGYQGNGDYGSYAPAAPTTSSMGSSIRHSPLSSGISTPVTNVSPMHLQHIREQMAIALKRLKELEEQVRTIPVLQVKISVLQEEKRQLVSQLKNQRAASQINVCGVRKRSYSAGNASQLEQLSRARRSGGELYIDYEEEEMETVEQSTQRIKEFRQLTADMQALEQKIQDSSCEASSELRENGECRSVAVGAEENMNDIVVYHRGSRSCKDAAVGTLVEMRNCGVSVTEAMLGVMTEADKEIELQQQTIESLKEKIYRLEVQLRETTHDREMTKLKQELQAAGSRKKVDKATMAQPLVFSKVVEAVVQTRDQMVGSHMDLVDTCVGTSVETNSVGISCQPECKNKVVGPELPMNWWIVKERVEMHDRCAGRSVEMCDKSVSVEVSVCETGSNTEESVNDLTLLKTNLNLKEVRSIGCGDCSVDVTVCSPKECASRGVNTEAVSQVEAAVMAVPRTADQDTSTDLEQVHQFTNTETATLIESCTNTCLSTLDKQTSTQTVETRTVAVGEGRVKDINSSTKTRSIGVGTLLSGHSGFDRPSAVKTKESGVGQININDNYLVGLKMRTIACGPPQLTVGLTASRRSVGVGDDPVGESLENPQPQAPLGMMTGLDHYIERIQKLLAEQQTLLAENYSELAEAFGEPHSQMGSLNSQLISTLSSINSVMKSASTEELRNPDFQKTSLGKITGNYLGYTCKCGGLQSGSPLSSQTSQPEQEVGTSEGKPISSLDAFPTQEGTLSPVNLTDDQIAAGLYACTNNESTLKSIMKKKDGNKDSNGAKKNLQFVGINGGYETTSSDDSSSDESSSSESDDECDVIEYPLEEEEEEEDEDTRGMAEGHHAVNIEGLKSARVEDEMQVQECEPEKVEIRERYELSEKMLSACNLLKNTINDPKALTSKDMRFCLNTLQHEWFRVSSQKSAIPAMVGDYIAAFEAISPDVLRYVINLADGNGNTALHYSVSHSNFEIVKLLLDADVCNVDHQNKAGYTPIMLAALAAVEAEKDMRIVEELFGCGDVNAKASQAGQTALMLAVSHGRIDMVKGLLACGADVNIQDDEGSTALMCASEHGHVEIVKLLLAQPGCNGHLEDNDGSTALSIALEAGHKDIAVLLYAHVNFAKAQSPGTPRLGRKTSPGPTHRGSFD

SEQ ID NO: 26925 - protein, 1194 aa, Homo sapiens
METRRRLEQERATMQMTPGEFRRPRLASFGGMGTTSSLPSFVGSGNHNPAKHQLQNGYQGNGDYGSYAPAAPTTSSMGSSIRHSPLSSGISTPVTNVSPMHLQHIREQMAIALKRLKELEEQVRTIPVLQVKISVLQEEKRQLVSQLKNQRAASQINVCGVRKRSYSAGNASQLEQLSRARRSGGELYIDYEEEEMETVEQSTQRIKEFRQLTADMQALEQKIQDSSCEASSELRENGECRSVAVGAEENMNDIVVYHRGSRSCKDAAVGTLVEMRNCGVSVTEAMLGVMTEADKEIELQQQTIESLKEKIYRLEVQLRETTHDREMTKLKQELQAAGSRKKVDKATMAQPLVFSKVVEAVVQTRDQMVGSHMDLVDTCVGTSVETNSVGISCQPECKNKVVGPELPMNWWIVKERVEMHDRCAGRSVEMCDKSVSVEVSVCETGSNTEESVNDLTLLKTNLNLKEVRSIGCGDCSVDVTVCSPKECASRGVNTEAVSQVEAAVMAVPRTADQDTSTDLEQVHQFTNTETATLIESCTNTCLSTLDKQTSTQTVETRTVAVGEGRVKDINSSTKTRSIGVGTLLSGHSGFDRPSAVKTKESGVGQININDNYLVGLKMRTIACGPPQLTVGLTASRRSVGVGDDPVGESLENPQPQAPLGMMTGLDHYIERIQKLLAEQQTLLAENYSELAEAFGEPHSQMGSLNSQLISTLSSINSVMKSASTEELRNPDFQKTSLGKITGNYLGYTCKCGGLQSGSPLSSQTSQPEQEVGTSEGKPISSLDAFPTQEGTLSPVNLTDDQIAAGLYACTNNESTLKSIMKKKDGNKDSNGAKKNLQFVGINGGYETTSSDDSSSDESSSSESDDECDVIEYPLEEEEEEEDEDTRGMAEGHHAVNIEGLKSARVEDEMQVQECEPEKVEIRERYELSEKMLSACNLLKNTINDPKALTSKDMRFCLNTLQHEWFRVSSQKSAIPAMVGDYIAAFEAISPDVLRYVINLADGNGNTALHYSVSHSNFEIVKLLLDADVCNVDHQNKAGYTPIMLAALAAVEAEKDMRIVEELFGCGDVNAKASQAGQTALMLAVSHGRIDMVKGLLACGADVNIQDDEGSTALMCASEHGHVEIVKLLLAQPGCNGHLEDNDGSTALSIALEAGHKDIAVLLYAHVNFAKAQSPGTPRLGRKTSPGPTHRGSFD

SEQ ID NO: 26926 - protein, 1096 aa, Homo sapiens
MATQVEPLLPGGATLLQAEEHGGLVRKKPPPAPEGKGEPGPNDVRGGEPDGSARRPRPPCAKPHKEGTGQQERESPRPLQLPGAEGPAISDGEEGGGEPGAGGGAAGAAGAGRRDFVEAPPPKVNPWTKNALPPVLTTVNGQSPPEHSAPAKVVRAAVPKQRKGSKVGDFGDAINWPTPGEIAHKSVQPQSHKPQPTRKLPPKKDMKEQEKGEGSDSKESPKTKSDESGEEKNGDEDCQRGGQKKKGNKHKWVPLQIDMKPEVPREKLASRPTRPPEPRHIPANRGEIKGSESATYVPVAPPTPAWQPEIKPEPAWHDQDETSSVKSDGAGGARASFRGRGRGRGRGRGRGRGGTRTHFDYQFGYRKFDGVEGPRTPKYMNNITYYFDNVSSTELYSVDQELLKDYIKRQIEYYFSVDNLERDFFLRRKMDADGFLPITLIASFHRVQALTTDISLIFAALKDSKVVEIVDEKVRRREEPEKWPLPPIVDYSQTDFSQLLNCPEFVPRQHYQKETESAPGSPRAVTPVPTKTEEVSNLKTLPKGLSASLPDLDSENWIEVKKRPRPSPARPKKSEESRFSHLTSLPQQLPSQQLMSKDQDEQEELDFLFDEEMEQMDGRKNTFTAWSDEESDYEIDDRDVNKILIVTQTPHYMRRHPGGDRTGNHTSRAKMSAELAKVINDGLFYYEQDLWAEKFEPEYSQIKQEVENFKKVNMISREQFDTLTPEPPVDPNQEVPPGPPRFQQVPTDALANKLFGAPEPSTIARSLPTTVPESPNYRNTRTPRTPRTPQLKDSSQTSRFYPVVKEGRTLDAKMPRKRKTRHSSNPPLESHVGWVMDSREHRPRTASISSSPSEGTPTVGSYGCTPQSLPKFQHPSHELLKENGFTQHVYHKYRRRCLNERKRLGIGQSQEMNTLFRFWSFFLRDHFNKKMYEEFKQLALEDAKEGYRYGLECLFRYYSYGLEKKFRLDIFKDFQEETVKDYEAGQLYGLEKFWAFLKYSKAKNLDIDPKLQEYLGKFRRLEDFRVDPPMGEEGNHKRHSVVAGGGGGEGRKRCPSQSSSRPAAMISQPPTPPTGQPVREDAKWTSQHSNTQTLGK

SEQ ID NO: 26927 - protein, 1019 aa, Homo sapiens
MLWRVLLSKRPPFPHPELDFQEAPIPSCPGRLPGRKNSVALAAAPRKEPTGDREKPLPFPVLAPFSNPEHSAPAKVVRAAVPKQRKGSKVGDFGDAINWPTPGEIAHKSVQPQSHKPQPTRKLPPKKDMKEQEKGEGSDSKESPKTKSDESGEEKNGDEDCQRGGQKKKGNKHKWVPLQIDMKPEVPREKLASRPTRPPEPRHIPANRGEIKGSESATYVPVAPPTPAWQPEIKPEPAWHDQDETSSVKSDGAGGARASFRGRGRGRGRGRGRGRGGTRTHFDYQFGYRKFDGVEGPRTPKYMNNITYYFDNVSSTELYSVDQELLKDYIKRQIEYYFSVDNLERDFFLRRKMDADGFLPITLIASFHRVQALTTDISLIFAALKDSKVVEIVDEKVRRREEPEKWPLPPIVDYSQTDFSQLLNCPEFVPRQHYQKETESAPGSPRAVTPVPTKTEEVSNLKTLPKGLSASLPDLDSENWIEVKKRPRPSPARPKKSEESRFSHLTSLPQQLPSQQLMSKDQDEQEELDFLFDEEMEQMDGRKNTFTAWSDEESDYEIDDRDVNKILIVTQTPHYMRRHPGGDRTGNHTSRAKMSAELAKVINDGLFYYEQDLWAEKFEPEYSQIKQEVENFKKVNMISREQFDTLTPEPPVDPNQEVPPGPPRFQQVPTDALANKLFGAPEPSTIARSLPTTVPESPNYRNTRTPRTPRTPQLKDSSQTSRFYPVVKEGRTLDAKMPRKRKTRHSSNPPLESHVGWVMDSREHRPRTASISSSPSEGTPTVGSYGCTPQSLPKFQHPSHELLKENGFTQHVYHKYRRRCLNERKRLGIGQSQEMNTLFRFWSFFLRDHFNKKMYEEFKQLALEDAKEGYRYGLECLFRYYSYGLEKKFRLDIFKDFQEETVKDYEAGQLYGLEKFWAFLKYSKAKNLDIDPKLQEYLGKFRRLEDFRVDPPMGEEGNHKRHSVVAGGGGGEGRKRCPSQSSSRPAAMISQPPTPPTGQPVREDAKWTSQHSNTQTLGK

SEQ ID NO: 26928 - protein, 582 aa, Homo sapiens
METESGNQEKVMEEESTEKKKEVEKKKRSRVKQVLADIAKQVDFWFGDANLHKDRFLREQIEKSRDGYVDISLLVSFNKMKKLTTDGKLIARALRSSAVVELDLEGTRIRRKKPLGERPKDEDERTVYVELLPKNVNHSWIERVFGKCGNVVYISIPHYKSTGDPKGFAFVEFETKEQAAKAIEFLNNPPEEAPRKPGIFPKTVKNKPIPALRVVEEKKKKKKKKGRMKKEDNIQAKEENMDTSNTSISKMKRSRPTSEGSDIESTEPQKQCSKKKKKRDRVEASSLPEVRTGKRKRSSSEDAESLAPRSKVKKIIQKDIIKEASEASKENRDIEISTEEEKDTGDLKDSSLLKTKRKHKKKHKERHKMGEEVIPLRVLSKSEWMDLKKEYLALQKASMASLKKTISQIKSESEMETDSGVPQNTGMKNEKTANREECRTQEKVNATGPQFVSGVIVKIISTEPLPGRKQVRDTLAAISEVLYVDLLEGDTECHARFKTPEDAQAVINAYTEINKKHCWKLEILSGDHEQRYWQKILVDRQAKLNQPREKKRGTEKLITKAEKIRLAKTQQASKHIRFSEYD

SEQ ID NO: 26929 - protein, 214 aa, Homo sapiens
MGEEVIPLRVLSKSEWMDLKKEYLALQKASMASLKKTISQIKSESEMETDSGVPQNTGMKNEKTANREECRTQEKVNATGPQFVSGVIVKIISTEPLPGRKQVRDTLAAISEVLYVDLLEGDTECHARFKTPEDAQAVINAYTEINKKHCWKLEILSGDHEQRYWQKILVDRQAKLNQPREKKRGTEKLITKAEKIRLAKTQQASKHIRFSEYD

SEQ ID NO: 26930 - protein, 589 aa, Homo sapiens
MIPNIEGMETESGNQEKVMEEESTEKKKEVEKKKRSRVKQVLADIAKQVDFWFGDANLHKDRFLREQIEKSRDGYVDISLLVSFNKMKKLTTDGKLIARALRSSAVVELDLEGTRIRRKKPLGERPKDEDERTVYVELLPKNVNHSWIERVFGKCGNVVYISIPHYKSTGDPKGFAFVEFETKEQAAKAIEFLNNPPEEAPRKPGIFPKTVKNKPIPALRVVEEKKKKKKKKGRMKKEDNIQAKEENMDTSNTSISKMKRSRPTSEGSDIESTEPQKQCSKKKKKRDRVEASSLPEVRTGKRKRSSSEDAESLAPRSKVKKIIQKDIIKEASEASKENRDIEISTEEEKDTGDLKDSSLLKTKRKHKKKHKERHKMGEEVIPLRVLSKSEWMDLKKEYLALQKASMASLKKTISQIKSESEMETDSGVPQNTGMKNEKTANREECRTQEKVNATGPQFVSGVIVKIISTEPLPGRKQVRDTLAAISEVLYVDLLEGDTECHARFKTPEDAQAVINAYTEINKKHCWKLEILSGDHEQRYWQKILVDRQAKLNQPREKKRGTEKLITKAEKIRLAKTQQASKHIRFSEYD

SEQ ID NO: 26931 - protein, 268 aa, Homo sapiens
MFRMLNSSFEDDPFFSESILAHRENMRQMIRSFSEPFGRDLLSISDGRGRAHNRRGHNDGEDSLTHTDVSSFQTMDQMVSNMRNYMQKLERNFGQLSVDPNGHSFCSSSVMTYSKIGDEPPKVFQASTQTRRAPGGIKETRKAMRDSDSGLEKMAIGHHIHDRAHVIKKSKNKKTGDEEVNQEFINMNESDAHAFDEEWQSEVLKYKPGRHNLGNTRMRSVGHENPGSRELKRREKPQQSPAIEHGRRSNVLGDKLHIKGSSVKSNKK

SEQ ID NO: 26932 - protein, 200 aa, Homo sapiens
MRQMIRSFSEPFGRDLLSISDGRGRAHNRRGHNDGEDSLTHTDVSSFQTMDQMVSNMRNYMQKLERNFIKETRKAMRDSDSGLEKMAIGHHIHDRAHVIKKSKNKKTGDEEVNQEFINMNESDAHAFDEEWQSEVLKYKPGRHNLGNTRMRSVGHENPGSRELKRREKPQQSPAIEHGRRSNVLGDKLHIKGSSVKSNKK

SEQ ID NO: 26933 - protein, 299 aa, Homo sapiens
MLKEVLQREGKSYKSETLMYIKKARASENKLSESILAHRENMRQMIRSFSEPFGRDLLSISDGRGRAHNRRGHNDGEDSLTATSCSLVPFGDFGGMHTDVSSFQTMDQMVSNMRNYMQKLERNFGQLSVDPNGHSFCSSSVMTYSKIGDEPPKVFQASTQTRRAPGGIKETRKAMRDSDSGLEKMAIGHHIHDRAHVIKKSKNKKTGDEEVNQEFINMNESDAHAFDEEWQSEVLKYKPGRHNLGNTRMRSVGHENPGSRELKRREKPQQSPAIEHGRRSNVLGDKLHIKGSSVKSNKK

SEQ ID NO: 26934 - protein, 243 aa, Homo sapiens
MRQMIRSFSEPFGRDLLSISDGRGRAHNRRGHNDGEDSLTHTDVSSFQTMDQMVSNMRNYMQKLERNFGQLSVDPNGHSFCSSSVMTYSKIGDEPPKVFQASTQTRRAPGGIKETRKAMRDSDSGLEKMAIGHHIHDRAHVIKKSKNKKTGDEEVNQEFINMNESDAHAFDEEWQSEVLKYKPGRHNLGNTRMRSVGHENPGSRELKRREKPQQSPAIEHGRRSNVLGDKLHIKGSSVKSNKK

SEQ ID NO: 26935 - protein, 258 aa, Homo sapiens
MRQMIRSFSEPFGRDLLSISDGRGRAHNRRGHNDGEDSLTATSCSLVPFGDFGGMHTDVSSFQTMDQMVSNMRNYMQKLERNFGQLSVDPNGHSFCSSSVMTYSKIGDEPPKVFQASTQTRRAPGGIKETRKAMRDSDSGLEKMAIGHHIHDRAHVIKKSKNKKTGDEEVNQEFINMNESDAHAFDEEWQSEVLKYKPGRHNLGNTRMRSVGHENPGSRELKRREKPQQSPAIEHGRRSNVLGDKLHIKGSSVKSNKK

SEQ ID NO: 26936 - protein, 261 aa, Homo sapiens
MNPNCARCGKIVYPTEKVNCLDKFWHKACFHCETCKMTLNMKNYKGYEKKPYCNAHYPKQSFTMVADTPENLRLKQQSELQSQVRYKEEFEKNKGKGFSVVADTPELQRIKKTQDQISNIKYHEEFEKSRMGPSGGEGMEPERRDSQDGSSYRRPLEQQQPHHIPTSAPVYQQPQQQPVAQSYGGYKEPAAPVSIQRSAPGGGGKRYRAVYDYSAADEDEVSFQDGDTIVNVQQIDDGWMYGTVERTGDTGMLPANYVEAI

SEQ ID NO: 26937 - protein, 323 aa, Homo sapiens
MNPNCARCGKIVYPTEKVNCLDKFWHKACFHCETCKMTLNMKNYKGYEKKPYCNAHYPKQSFTMVADTPENLRLKQQSELQSQVRYKEEFEKNKGKGFSVVADTPELQRIKKTQDQISNIKYHEEFEKSRMGPSGGEGMEPERRDSQDGSSYRRPLEQQQPHHIPTSAPVYQQPQQQPVAQSYGGYKEPAAPVSIQRSAPICLQHIPRHRIRPGRDPSILQCLCFLKPATACDSYPSSSFFCQLKPSSATSAGSLLWQASPLIDFLVFSLDGTGMGLSGGGRGPWGRAGMGDLLACGPHLPLCSLPSHPPAQLLTYPHIPGLG

SEQ ID NO: 26938 - protein, 205 aa, Homo sapiens
MLPLRDLQDDTEHEELQGLREEALLQRVRYKEEFEKNKGKGFSVVADTPELQRIKKTQDQISNIKYHEEFEKSRMGPSGGEGMEPERRDSQDGSSYRRPLEQQQPHHIPTSAPVYQQPQQQPVAQSYGGYKEPAAPVSIQRSAPGGGGKRYRAVYDYSAADEDEVSFQDGDTIVNVQQIDDGWMYGTVERTGDTGMLPANYVEAI

SEQ ID NO: 26939 - protein, 198 aa, Homo sapiens
MFEGPRRYRRPRTRFLSKQLTALRELLEKTMHPSLATMGKLASKLQLDLSVVKIWFKNQRAKWKRQQRQQMQTRPSLGPANQTTSVKKEETPSAITTANIRPVSPGISDANDHDLREPSGIKNPGGASASARVSSWDSQSYDIEQICLGASNPPWASTLFEIDEFVKIYDLPGEDDTSSLNQYLFPVCLEYDQLQSSV

SEQ ID NO: 26940 - protein, 168 aa, Homo sapiens
MHPSLATMGKLASKLQLDLSVVKIWFKNQRAKWKRQQRQQMQTRPSLGPANQTTSVKKEETPSAITTANIRPVSPGISDANDHDLREPSGIKNPGGASASARVSSWDSQSYDIEQICLGASNPPWASTLFEIDEFVKIYDLPGEDDTSSLNQYLFPVCLEYDQLQSSV

SEQ ID NO: 26941 - protein, 559 aa, Homo sapiens
MAPTLQQAYRRRWWMACTAVLENLFFSAVLLGWGSLLIILKNEGFYSSTCPAESSTNTTQDEQRRWPGCDQQDEMLNLGFTIGSFVLSATTLPLGILMDRFGPRPVRLVGSACFTASCTLMALASRDVEALSPLIFLALSLNGFGGICLTFTSLTLPNMFGNLRSTLMALMIGSYASSAITFPGIKLIYDAGVAFVVIMFTWSGLACLIFLNCTLNWPIEAFPAPEEVNYTKKIKLSGLALDHKVTGDLFYTHVTTMGQRLSQKAPSLEDGSDAFMSPQDVRGTSENLPERSVPLRKSLCSPTFLWSLLTMGMTQLRIIFYMAAVNKMLEYLVTGGQEHETNEQQQKVAETVGFYSSVFGAMQLLCLLTCPLIGYIMDWRIKDCVDAPTQGTVLGDARDGVATKSIRPRYCKIQKLTNAISAFTLTNLLLVGFGITCLINNLHLQFVTFVLHTIVRGFFHSACGSLYAAVFPSNHFGTLTGLQSLISAVFALLQQPLFMAMVGPLKGEPFWVNLGLLLFSLLGFLLPSYLFYYRARLQQEYAANGMGPLKVLSGSEVTA

SEQ ID NO: 26942 - protein, 560 aa, Homo sapiens
MAPTLQQAYRRRWWMACTAVLENLFFSAVLLGWGSLLIILKNEGFYSSTCPAESSTNTTQDEQRRWPGCDQQDEMLNLGFTIGSFVLSATTLPLGILMDRFGPRPVRLVGSACFTASCTLMALASRDVEALSPLIFLALSLNGFGGICLTFTSLTLPNMFGNLRSTLMALMIGSYASSAITFPGIKLIYDAGVAFVVIMFTWSGLACLIFLNCTLNWPIEAFPAPEEVNYTKKIKLSGLALDHKVTGDLFYTHVTTMGQRLSQKAPSLEDGSDAFMSPQDVRGTSENLPERSVPLRKSLCSPTFLWSLLTMGMTQLRIIFYMAAVNKMLEYLVTGGQEHETNEQQQKVAETVGFYSSVFGAMQLLCLLTCPLIGYIMDWRIKDCVDAPTQGTVLGDARDGVATKSIRPRYCKIQKLTNAISAFTLTNLLLVGFGITCLINNLHLQFVTFVLHTIVRGFFHSACGSLYAAVFPSNHFGTLTGLQSLISAVFALLQQPLFMAMVGPLKGEPFWVRARVGVGGAGATLLGAGVGPCMWCHPSLISARGTSEVSNLQVSKLSAF

SEQ ID NO: 26943 - protein, 355 aa, Homo sapiens
MAFSGSQAPYLSPAVPFSGTIQGGLQDGLQITVNGTVLSSSGTRFAVNFQTGFSGNDIAFHFNPRFEDGGYVVCNTRQNGSWGPEERKTHMPFQKGMPFDLCFLVQSSDFKVMVNGILFVQYFHRVPFHRVDTISVNGSVQLSYISFQNPRTVPVQPAFSTVPFSQPVCFPPRPRGRRQKPPGVWPANPAPITQTVIHTVQSAPGQMFSTPAIPPMMYPHPAYPMPFITTILGGLYPSKSILLSGTVLPSAQRFHINLCSGNHIAFHLNPRFDENAVVRNTQIDNSWGSEERSLPRKMPFVRGQSFSVWILCEAHCLKVAVDGQHLFEYYHRLRNLPTINRLEVGGDIQLTHVQT

SEQ ID NO: 26944 - protein, 323 aa, Homo sapiens
MAFSGSQAPYLSPAVPFSGTIQGGLQDGLQITVNGTVLSSSGTRFAVNFQTGFSGNDIAFHFNPRFEDGGYVVCNTRQNGSWGPEERKTHMPFQKGMPFDLCFLVQSSDFKVMVNGILFVQYFHRVPFHRVDTISVNGSVQLSYISFQPPGVWPANPAPITQTVIHTVQSAPGQMFSTPAIPPMMYPHPAYPMPFITTILGGLYPSKSILLSGTVLPSAQRFHINLCSGNHIAFHLNPRFDENAVVRNTQIDNSWGSEERSLPRKMPFVRGQSFSVWILCEAHCLKVAVDGQHLFEYYHRLRNLPTINRLEVGGDIQLTHVQT

SEQ ID NO: 26945 - protein, 311 aa, Homo sapiens
MAFSGSQAPYLSPAVPFSGTIQGGLQDGLQITVNGTVLSSSGTRFAVNFQTGFSGNDIAFHFNPRFEDGGYVVCNTRQNGSWGPEERKTHMPFQKGMPFDLCFLVQSSDFKVMVNGILFVQYFHRVPFHRVDTISVNGSVQLSYISFQTQTVIHTVQSAPGQMFSTPAIPPMMYPHPAYPMPFITTILGGLYPSKSILLSGTVLPSAQRFHINLCSGNHIAFHLNPRFDENAVVRNTQIDNSWGSEERSLPRKMPFVRGQSFSVWILCEAHCLKVAVDGQHLFEYYHRLRNLPTINRLEVGGDIQLTHVQT

SEQ ID NO: 26946 - protein, 246 aa, Homo sapiens
MAFSGSQAPYLSPAVPFSGTIQGGLQDGLQITVNGTVLSSSGTRFAVNFQTGFSGNDIAFHFNPRFEDGGYVVCNTRQNGSWGPEERKTHMPFQKGMPFDLCFLVQSSDFKVMVNGILFVQYFHRVPFHRVDTISVNGSVQLSYISFQPPGVWPANPAPITQTVIHTVQSAPGQMFSTPAIPPMMYPHPAYPMPFITTILGGLYPSKSILLSGTVLPSAQRCGSCVKLTASRWPWMVSTCLNTTIA

SEQ ID NO: 26947 - protein, 234 aa, Homo sapiens
MAFSGSQAPYLSPAVPFSGTIQGGLQDGLQITVNGTVLSSSGTRFAVNFQTGFSGNDIAFHFNPRFEDGGYVVCNTRQNGSWGPEERKTHMPFQKGMPFDLCFLVQSSDFKVMVNGILFVQYFHRVPFHRVDTISVNGSVQLSYISFQTQTVIHTVQSAPGQMFSTPAIPPMMYPHPAYPMPFITTILGGLYPSKSILLSGTVLPSAQRCGSCVKLTASRWPWMVSTCLNTTIA

SEQ ID NO: 26948 - protein, 343 aa, Homo sapiens
MAFSGSQAPYLSPAVPFSGTIQGGLQDGLQITVNGTVLSSSGTRFAVNFQTGFSGNDIAFHFNPRFEDGGYVVCNTRQNGSWGPEERKTHMPFQKGMPFDLCFLVQSSDFKVMVNGILFVQYFHRVPFHRVDTISVNGSVQLSYISFQNPRTVPVQPAFSTVPFSQPVCFPPRPRGRRQKTQTVIHTVQSAPGQMFSTPAIPPMMYPHPAYPMPFITTILGGLYPSKSILLSGTVLPSAQRFHINLCSGNHIAFHLNPRFDENAVVRNTQIDNSWGSEERSLPRKMPFVRGQSFSVWILCEAHCLKVAVDGQHLFEYYHRLRNLPTINRLEVGGDIQLTHVQT

SEQ ID NO: 26949 - protein, 117 aa, Homo sapiens
MDMRVPAQLLGLLLLWLPDTRCDIQMTQSPSSLSASVGDRVTITCRASQGISNYLAWYQQKPGKVPKLLIYAASTLQSGVPSRFSGSGSGTDFTLTISSLQPEDVATYYCQKYNSAP

SEQ ID NO: 26950 - protein, 162 aa, Homo sapiens
MKPLLLAISLSLIAALQAHHLLASDEEIQDVSGTWYLKAMTVDRELPEMNLESVTPMTLTILEGGNLEAKATMLISGQCQEVKVILEKTDEPGKYTANRGKHVAYIIRSHMKDHYIFYCEGRDPENNLEALEDFEKAAGARGLSTESILIPRQSETCSPGSD

SEQ ID NO: 26951 - protein, 250 aa, Homo sapiens [sequence omitted]

SEQ ID NO: 26952 - protein, 481 aa, Homo sapiens
MGALARALPSILLALLLTSTPEALGANPGLVARITDKGLQYAAQEGLLALQSELLRITLPDFTGDLRIPHVGRGRYEFHSLNIHSCELLHSALRPVPGQGLSLSISDSSIRVQGRWKVRKSFFKLQGSFDVSVKGISISVNLLLGSESSGRPTVTASSCSSDIADVEVDMSGDLGWLLNLFHNQIESKFQKVLESRICEMIQKSVSSDLQPYLQTLPVTTEIDSFADIDYSLVEAPRATAQMLEVMFKGEIFHRNHRSPVTLLAAVMSLPEEHNKMVYFAISDYVFNTASLVYHEEGYLNFSITDDMIPPDSNIRLTTKSFRPFVPRLARLYPNMNLELQGSVPSAPLLNFSPGNLSVDPYMEIDAFVLLPSSSKEPVFRLSVATNVSATLTFNTSKITGFLKPGKVKVELKESKVGLFNAELLEALLNYYILNTFYPKFNDKLAEGFPLPLLKRVQLYDLGLQIHKDFLFLGANVQYMRV

SEQ ID NO: 26953 - protein, 686 aa, Homo sapiens
MIPGKYRSVSGRAANNVNCGLHLVIQTSSLPEKNKVEFKLNKDTSSFPGRLLQHDLERNYSSRQGDHINLVSSSLSSFPILQRSSEEKILYSDRLSLERQKLTVCPIINGEDHLRLLNFQHNFITRIQNISNLQKLISLDLYDNQIEEISGLSTLRCLRVLLLGKNRIKKISNLENLKSLDVLDLHGNQITKIENINHLCELRVLNLARNFLSHVDNLNGLDSLTELNLRHNQITFVRDVDNLPCLQHLFLSFNNISSFDSVSCLADSSSLSDITFDGNPIAQESWYKHTVLQNMMQLRQLDMKRITEEERRMASVLAKKEEEKKRESHKQSLLKEKKRLTINNVARQWDLQQQRVANIATNEDRKDSDSPQDPCQIDGSTLSAFPEETGPLDSGLNNALQGLSVIDTYLVEVDGDTLSLYGSGALESLDRNWSVQTAGMITTVSFTFIEFDEIVQVLPKLKIKFPNSLHLKFKETNLVMLQQFNALAQLRRIDQLTIDPQGNPVVNFTLWKYYVLFRLSHFSMQKINGTEVTQNDMIMAERLFGILAHVASSELPQYRLISILGDARKKQFRYLLESKGKKPGIINEENNDSKRLVGENTNRATLNYTTRDFYNEKLEEIKEKKKFCKTYIEDLVKEATEINMKNEALQKLWPQMFIELVRDAVIEIRNKNSYMKLCLQQITDQK

SEQ ID NO: 26954 - protein, 691 aa, Homo sapiens
MIPGKYRSVSGRAANNVNCGLHLVIQTSSLPEKNKVRFKKVEFKLNKDTSSFPGRLLQHDLERNYSSRQGDHINLVSSSLSSFPILQRSSEEKILYSDRLSLERQKLTVCPIINGEDHLRLLNFQHNFITRIQNISNLQKLISLDLYDNQIEEISGLSTLRCLRVLLLGKNRIKKISNLENLKSLDVLDLHGNQITKIENINHLCELRVLNLARNFLSHVDNLNGLDSLTELNLRHNQITFVRDVDNLPCLQHLFLSFNNISSFDSVSCLADSSSLSDITFDGNPIAQESWYKHTVLQNMMQLRQLDMKRITEEERRMASVLAKKEEEKKRESHKQSLLKEKKRLTINNVARQWDLQQQRVANIATNEDRKDSDSPQDPCQIDGSTLSAFPEETGPLDSGLNNALQGLSVIDTYLVEVDGDTLSLYGSGALESLDRNWSVQTAGMITTVSFTFIEFDEIVQVLPKLKIKFPNSLHLKFKETNLVMLQQFNALAQLRRIDQLTIDPQGNPVVNFTLWKYYVLFRLSHFSMQKINGTEVTQNDMIMAERLFGILAHVASSELPQYRLISILGDARKKQFRYLLESKGKKPGIINEENNDSKRLVGENTNRATLNYTTRDFYNEKLEEIKEKKKFCKTYIEDLVKEATEINMKNEALQKLWPQMFIELVRDAVIEIRNKNSYMKLCLQQITDQK

SEQ ID NO: 26955 - protein, 642 aa, Homo sapiens
MRSITQGACRFIWEDKGYISGDHINLVSSSLSSFPILQRSSEEKILYSDRLSLERQKLTVCPIINGEDHLRLLNFQHNFITRIQNISNLQKLISLDLYDNQIEEISGLSTLRCLRVLLLGKNRIKKISNLENLKSLDVLDLHGNQITKIENINHLCELRVLNLARNFLSHVDNLNGLDSLTELNLRHNQITFVRDVDNLPCLQHLFLSFNNISSFDSVSCLADSSSLSDITFDGNPIAQESWYKHTVLQNMMQLRQLDMKRITEEERRMASVLAKKEEEKKRESHKQSLLKEKKRLTINNVARQWDLQQQRVANIATNEDRKDSDSPQDPCQIDGSTLSAFPEETGPLDSGLNNALQGLSVIDTYLVEVDGDTLSLYGSGALESLDRNWSVQTAGMITTVSFTFIEFDEIVQVLPKLKIKFPNSLHLKFKETNLVMLQQFNALAQLRRIDQLTIDPQGNPVVNFTLWKYYVLFRLSHFSMQKINGTEVTQNDMIMAERLFGILAHVASSELPQYRLISILGDARKKQFRYLLESKGKKPGIINEENNDSKRLVGENTNRATLNYTTRDFYNEKLEEIKEKKKFCKTYIEDLVKEATEINMKNEALQKLWPQMFIELVRDAVIEIRNKNSYMKLCLQQITDQK

SEQ ID NO: 26956 - protein, 676 aa, Homo sapiens
MDCQAEVNCGLHLVIQTSSLPEKNKVEFKLNKDTSSFPGRLLQHDLERNYSSRQGDHINLVSSSLSSFPILQRSSEEKILYSDRLSLERQKLTVCPIINGEDHLRLLNFQHNFITRIQNISNLQKLISLDLYDNQIEEISGLSTLRCLRVLLLGKNRIKKISNLENLKSLDVLDLHGNQITKIENINHLCELRVLNLARNFLSHVDNLNGLDSLTELNLRHNQITFVRDVDNLPCLQHLFLSFNNISSFDSVSCLADSSSLSDITFDGNPIAQESWYKHTVLQNMMQLRQLDMKRITEEERRMASVLAKKEEEKKRESHKQSLLKEKKRLTINNVARQWDLQQQRVANIATNEDRKDSDSPQDPCQIDGSTLSAFPEETGPLDSGLNNALQGLSVIDTYLVEVDGDTLSLYGSGALESLDRNWSVQTAGMITTVSFTFIEFDEIVQVLPKLKIKFPNSLHLKFKETNLVMLQQFNALAQLRRIDQLTIDPQGNPVVNFTLWKYYVLFRLSHFSMQKINGTEVTQNDMIMAERLFGILAHVASSELPQYRLISILGDARKKQFRYLLESKGKKPGIINEENNDSKRLVGENTNRATLNYTTRDFYNEKLEEIKEKKKFCKTYIEDLVKEATEINMKNEALQKLWPQMFIELVRDAVIEIRNKNSYMKLCLQQITDQK

SEQ ID NO: 26957 - protein, 699 aa, Homo sapiens
MKQRFSALQLLKLLLLLQPPLPRALREALCPEPCNCVPDGALRCPGPTAGLTRLSLAYLPVKVIPSQAFRGLNEVIKIEISQIDSLERIEANAFDNLLNLSEILIQNTKNLRYIEPGAFINLPRLKYLSICNTGIRKFPDVTKVFSSESNFILEICDNLHITTIPGNAFQGMNNESVTLKLYGNGFEEVQSHAFNGTTLTSLELKENVHLEKMHNGAFRGATGPKTLDISSTKLQALPSYGLESIQRLIATSSYSLKKLPSRETFVNLLEATLTYPSHCCAFRNLPTKEQNFSHSISENFSKQCESTVRKVNNKTLYSSMLAESELSGWDYEYGFCLPKTPRCAPEPDAFNPCEDIMGYDFLRVLIWLINILAIMGNMTVLFVLLTSRYKLTVPRFLMCNLSFADFCMGLYLLLIASVDSQTKGQYYNHAIDWQTGSGCSTAGFFTVFASELSVYTLTVITLERWHTITYAIHLDQKLRLRHAILIMLGGWLFSSLIAMLPLVGVSNYMKVSICFPMDVETTLSQVYILTILILNVVAFFIICACYIKIYFAVRNPELMATNKDTKIAKKMAILIFTDFTCMAPISFFAISAAFKVPLITVTNSKVLLVLFYPINSCANPFLYAIFTKTFQRDFFLLLSKFGCCKRRAELYRRKDFSAYTSNCKNGFTGSNKPSQSTLKLSTLHCQGTALLDKTRYTEC

SEQ ID NO: 26958 - protein, 636 aa, Homo sapiens
MKQRFSALQLLKLLLLLQPPLPRALREALCPEPCNCVPDGALRCPGPTAGLTRLSLAYLPVKVIPSQAFRGLNEVIKIEISQIDSLERIEANAFDNLLNLSEILIQNTKNLRYIEPGAFINLPRLKYLSICNTGIRKFPDVTKVFSSESNFILEICDNLHITTIPGNAFQGMNNESVTLKLYGNGFEEVQSHAFNGTTLTSLELKENVHLEKMHNGAFRGATGPKTQNFSHSISENFSKQCESTVRKVNNKTLYSSMLAESELSGWDYEYGFCLPKTPRCAPEPDAFNPCEDIMGYDFLRVLIWLINILAIMGNMTVLFVLLTSRYKLTVPRFLMCNLSFADFCMGLYLLLIASVDSQTKGQYYNHAIDWQTGSGCSTAGFFTVFASELSVYTLTVITLERWHTITYAIHLDQKLRLRHAILIMLGGWLFSSLIAMLPLVGVSNYMKVSICFPMDVETTLSQVYILTILILNVVAFFIICACYIKIYFAVRNPELMATNKDTKIAKKMAILIFTDFTCMAPISFFAISAAFKVPLITVTNSKVLLVLFYPINSCANPFLYAIFTKTFQRDFFLLLSKFGCCKRRAELYRRKDFSAYTSNCKNGFTGSNKPSQSTLKLSTLHCQGTALLDKTRYTEC

SEQ ID NO: 26959 - protein, 664 aa, Homo sapiens
METPSQRRATRSGAQASSTPLSPTRITRLQEKEDLQELNDRLAVYIDRVRSLETENAGLRLRITESEEVVSREVSGIKAAYEAELGDARKTLDSVAKERARLQLELSKVREEFKELKARNTKKEGDLIAAQARLKDLEALLNSKEAALSTALSEKRTLEGELHDLRGQVAKLEAALGEAKKQLQDEMLRRVDAENRLQTMKEELDFQKNIYSEELRETKRRHETRLVEIDNGKQREFESRLADALQELRAQHEDQVEQYKKELEKTYSAKLDNARQSAERNSNLVGAAHEELQQSRIRIDSLSAQLSQLQKQLAAKEAKLRDLEDSLARERDTSRRLLAEKEREMAEMRARMQQQLDEYQELLDIKLALDMEIHAYRKLLEGEEERLRLSPSPTSQRSRGRASSHSSQTQGGGSVTKKRKLESTESRSSFSQHARTSGRVAVEEVDEEGKFVRLRNKSNEDQSMGNWQIKRQNGDDPLLTYRFPPKFTLKAGQVVTIWAAGAGATHSPPTDLVWKAQNTWGCGNSLRTALINSTGEEVAMRKLVRSVTVVEDDEDEDGDDLLHHHHGSHCSSSGDPAEYNLRSRTVLCGTCGQPADKASASGSGAQVGGPISSGSSASSVTVTRSYRSVGGSGGGSFGDNLVTRSYLLGNSSPRTQSPQNCSIM

SEQ ID NO: 26960 - protein, 572 aa, Homo sapiens
METPSQRRATRSGAQASSTPLSPTRITRLQEKEDLQELNDRLAVYIDRVRSLETENAGLRLRITESEEVVSREVSGIKAAYEAELGDARKTLDSVAKERARLQLELSKVREEFKELKARNTKKEGDLIAAQARLKDLEALLNSKEAALSTALSEKRTLEGELHDLRGQVAKLEAALGEAKKQLQDEMLRRVDAENRLQTMKEELDFQKNIYSEELRETKRRHETRLVEIDNGKQREFESRLADALQELRAQHEDQVEQYKKELEKTYSAKLDNARQSAERNSNLVGAAHEELQQSRIRIDSLSAQLSQLQKQLAAKEAKLRDLEDSLARERDTSRRLLAEKEREMAEMRARMQQQLDEYQELLDIKLALDMEIHAYRKLLEGEEERLRLSPSPTSQRSRGRASSHSSQTQGGGSVTKKRKLESTESRSSFSQHARTSGRVAVEEVDEEGKFVRLRNKSNEDQSMGNWQIKRQNGDDPLLTYRFPPKFTLKAGQVVTIWAAGAGATHSPPTDLVWKAQNTWGCGNSLRTALINSTGEEVAMRKLVRSVTVVEDDEDEDGDDLLHHHHVSGSRR

SEQ ID NO: 26961 - protein, 634 aa, Homo sapiens
METPSQRRATRSGAQASSTPLSPTRITRLQEKEDLQELNDRLAVYIDRVRSLETENAGLRLRITESEEVVSREVSGIKAAYEAELGDARKTLDSVAKERARLQLELSKVREEFKELKARNTKKEGDLIAAQARLKDLEALLNSKEAALSTALSEKRTLEGELHDLRGQVAKLEAALGEAKKQLQDEMLRRVDAENRLQTMKEELDFQKNIYSEELRETKRRHETRLVEIDNGKQREFESRLADALQELRAQHEDQVEQYKKELEKTYSAKLDNARQSAERNSNLVGAAHEELQQSRIRIDSLSAQLSQLQKQLAAKEAKLRDLEDSLARERDTSRRLLAEKEREMAEMRARMQQQLDEYQELLDIKLALDMEIHAYRKLLEGEEERLRLSPSPTSQRSRGRASSHSSQTQGGGSVTKKRKLESTESRSSFSQHARTSGRVAVEEVDEEGKFVRLRNKSNEDQSMGNWQIKRQNGDDPLLTYRFPPKFTLKAGQVVTIWAAGAGATHSPPTDLVWKAQNTWGCGNSLRTALINSTGEGSHCSSSGDPAEYNLRSRTVLCGTCGQPADKASASGSGAQVGGPISSGSSASSVTVTRSYRSVGGSGGGSFGDNLVTRSYLLGNSSPRTQSPQNCSIM

SEQ ID NO: 26962 - protein, 574 aa, Homo sapiens
MGNSEGCNTKKEGDLIAAQARLKDLEALLNSKEAALSTALSEKRTLEGELHDLRGQVAKLEAALGEAKKQLQDEMLRRVDAENRLQTMKEELDFQKNIYSEELRETKRRHETRLVEIDNGKQREFESRLADALQELRAQHEDQVEQYKKELEKTYSAKLDNARQSAERNSNLVGAAHEELQQSRIRIDSLSAQLSQLQKQLAAKEAKLRDLEDSLARERDTSRRLLAEKEREMAEMRARMQQQLDEYQELLDIKLALDMEIHAYRKLLEGEEERLRLSPSPTSQRSRGRASSHSSQTQGGGSVTKKRKLESTESRSSFSQHARTSGRVAVEEVDEEGKFVRLRNKSNEDQSMGNWQIKRQNGDDPLLTYRFPPKFTLKAGQVVTIWAAGAGATHSPPTDLVWKAQNTWGCGNSLRTALINSTGEEVAMRKLVRSVTVVEDDEDEDGDDLLHHHHGSHCSSSGDPAEYNLRSRTVLCGTCGQPADKASASGSGAQVGGPISSGSSASSVTVTRSYRSVGGSGGGSFGDNLVTRSYLLGNSSPRTQSPQNCSIIQEMGMRWEVEEGRRKVSLSCLP

SEQ ID NO: 26963 - protein, 565 aa, Homo sapiens
MDLEAWDPHLEPDAEAMVDGNTKKEGDLIAAQARLKDLEALLNSKEAALSTALSEKRTLEGELHDLRGQVAKLEAALGEAKKQLQDEMLRRVDAENRLQTMKEELDFQKNIYSEELRETKRRHETRLVEIDNGKQREFESRLADALQELRAQHEDQVEQYKKELEKTYSAKLDNARQSAERNSNLVGAAHEELQQSRIRIDSLSAQLSQLQKQLAAKEAKLRDLEDSLARERDTSRRLLAEKEREMAEMRARMQQQLDEYQELLDIKLALDMEIHAYRKLLEGEEERLRLSPSPTSQRSRGRASSHSSQTQGGGSVTKKRKLESTESRSSFSQHARTSGRVAVEEVDEEGKFVRLRNKSNEDQSMGNWQIKRQNGDDPLLTYRFPPKFTLKAGQVVTIWAAGAGATHSPPTDLVWKAQNTWGCGNSLRTALINSTGEEVAMRKLVRSVTVVEDDEDEDGDDLLHHHHGSHCSSSGDPAEYNLRSRTVLCGTCGQPADKASASGSGAQVGGPISSGSSASSVTVTRSYRSVGGSGGGSFGDNLVTRSYLLGNSSPRTQSPQNCSIM

SEQ ID NO: 26964 - protein, 614 aa, Homo sapiens
METPSQRRATRSGAQASSTPLSPTRITRLQEKEDLQELNDRLAVYIDRVRSLETENAGLRLRITESEEVVSREVSGIKAAYEAELGDARKTLDSVAKERARLQLELSKVREEFKELKARNTKKEGDLIAAQARLKDLEALLNSKEAALSTALSEKRTLEGELHDLRGQVAKLEAALGEAKKQLQDEMLRRVDAENRLQTMKEELDFQKNIYSEELRETKRRHETRLVEIDNGKQREFESRLADALQELRAQHEDQVEQYKKELEKTYSAKLDNARQSAERNSNLVGAAHEELQQSRIRIDSLSAQLSQLQKQLAAKEAKLRDLEDSLARERDTSRRLLAEKEREMAEMRARMQQQLDEYQELLDIKLALDMEIHAYRKLLEGEEERLRLSPSPTSQRSRGRASSHSSQTQGGGSVTKKRKLESTESRSSFSQHARTSGRVAVEEVDEEGKFVRLRNKSNEDQSMGNWQIKRQNGDDPLLTYRFPPKFTLKAGQVVTIWAAGAGATHSPPTDLVWKAQNTWGCGNSLRTALINSTGEEVAMRKLVRSVTVVEDDEDEDGDDLLHHHHGSHCSSSGDPAEYNLRSRTVLCGTCGQPADKASASGSGAQSPQNCSIM

SEQ ID NO: 26965 - protein, 810 aa, Homo sapiens
MIPVTELRYFADTQPAYRILKPWWDVFTDYISIVMLMIAVFGGTLQVTQDKMICLPCKWVTKDSCNDSFRGWAAPGPEPTYPNSTILPTPDTGPTGIKYDLDRHQYNYVDAVCYENRLHWFAKYFPYLVLLHTLIFLACSNFWFKFPRTSSKLEHFVSILLKCFDSPWTTRALSETVVEESDPKPAFSKMNGSMDKKSSTVSEDVEATVPMLQRTKSRIEQGIVDRSETGVLDKKEGEQAKALFEKVKKFRTHVEEGDIVYRLYMRQTIIKVIKFILIICYTVYYVHNIKFDVDCTVDIESLTGYRTYRCAHPLATLFKILASFYISLVIFYGLICMYTLWWMLRRSLKKYSFESIREESSYSDIPDVKNDFAFMLHLIDQYDPLYSKRFAVFLSEVSENKLRQLNLNNEWTLDKLRQRLTKNAQDKLELHLFMLSGIPDTVFDLVELEVLKLELIPDVTIPPSIAQLTGLKELWLYHTAAKIEAPALAFLRENLRALHIKFTDIKEIPLWIYSLKTLEELHLTGNLSAENNRYIVIDGLRELKRLKVLRLKSNLSKLPQVVTDVGVHLQKLSINNEGTKLIVLNSLKKMANLTELELIRCDLERIPHSIFSLHNLQEIDLKDNNLKTIEEIISFQHLHRLTCLKLWYNHIAYIPIQIGNLTNLERLYLNRNKIEKIPTQLFYCRKLRYLDLSHNNLTFLPADIGLLQNLQNLAITANRIETLPPELFQCRKLRALHLGNNVLQSLPSRVGELTNLTQIELRGNRLECLPVELGECPLLKRSGLVVEEDLFNTLPPEVKERLWRADKEQA

SEQ ID NO: 26966 - protein, 2061 aa, Homo sapiens
MLRVIVESASNIPKTKFGKPDPIVSVIFKDEKKKTKKVDNELNPVWNEILEFDLRGIPLDFSSSLGIIVKDFETIGQNKLIGTATVALKDLTGDQSRSLPYKLISLLNEKGQDTGATIDLVIGYDPPSAPHPNDLSGPSVPGMGGDGEEDEGDEDRLDNAVRGPGPKGPVGTVSEAQLARRLTKVKNSRRMLSNKPQDFQIRVRVIEGRQLSGNNIRPVVKVHVCGQTHRTRIKRGNNPFFDELFFYNVNMTPSELMDEIISIRVYNSHSLRADCLMGEFKIDVGFVYDEPGHAVMRKWLLLNDPEDTSSGSKGYMKVSMFVLGTGDEPPPERRDRDNDSDDVESNLLLPAGIALRWVTFLLKIYRAEDIPQMDDAFSQTVKEIFGGNADKKNLVDPFVEVSFAGKKVCTNIIEKNANPEWNQVVNLQIKFPSVCEKIKLTIYDWDRLTKNDVVGTTYLHLSKIAASGGEVEDFSSSGTGAASYTVNTGETEVGFVPTFGPCYLNLYGSPREYTGFPDPYDELNTGKGEGVAYRGRILVELATFLEKTPPDKKLEPISNDDLLVVEKYQRRRKYSLSAVFHSATMLQDVGEAIQFEVSIGNYGNKFDTTCKPLASTTQYSRAVFDGNYYYYLPWAHTKPVVTLTSYWEDISHRLDAVNTLLAMAERLQTNIEALKSGIQGKIPANQLAELWLKLIDEVIEDTRYTLPLTEGKANVTVLDTQIRKLRSRSLSQIHEAAVRMRSEATDVKSTLAEIEDWLDKLMQLTEEPQNSMPDIIIWMIRGEKRLAYARIPAHQVLYSTSGENASGKYCGKTQTIFLKYPQEKNNGPKVPVELRVNIWLGLSAVEKKFNSFAEGTFTVFAEMYENQALMFGKWGTSGLVGRHKFSDVTGKIKLKREFFLPPKGWEWEGEWIVDPERSLLTEADAGHTEFTDEVYQNESRYPGGDWKPAEDTYTDANGDKAASPSELTCPPGWEWEDDAWSYDINRAVDEKGWEYGITIPPDHKPKSWVAAEKMYHTHRRRRLVRKRKKDLTQTASSTARAMEELQDQEGWEYASLIGWKFHWKQRSSDTFRRRRWRRKMAPSETHGAAAIFKLEGALGADTTEDGDEKSLEKQKHSATTVFGANTPIVSCNFDRVYIYHLRCYVYQARNLLALDKDSFSDPYAHICFLHRSKTTEIIHSTLNPTWDQTIIFDEVEIYGEPQTVLQNPPKVIMELFDNDQVGKDEFLGRSIFSPVVKLNSEMDITPKLLWHPVMNGDKACGDVLVTAELILRGKDGSNLPILPPQRAPNLYMVPQGIRPVVQLTAIEILAWGLRNMKNFQMASITSPSLVVECGGERVESVVIKNLKKTPNFPSSVLFMKVFLPKEELYMPPLVIKVIDHRQFGRKPVVGQCTIERLDRFRCDPYAGKEDIVPQLKASLLSAPPCRDIVIEMEDTKPLLASKLTEKEEEIVDWWSKFYASSGEHEKCGQYIQKGYSKLKIYNCELENVAEFEGLTDFSDTFKLYRGKSDENEDPSVVGEFKGSFRIYPLPDDPSVPAPPRQFRELPDSVPQECTVRIYIVRGLELQPQDNNGLCDPYIKITLGKKVIEDRDHYIPNTLNPVFGRMYELSCYLPQEKDLKISVYDYDTFTRDEKVGETIIDLENRFLSRFGSHCGIPEEYCVSGVNTWRDQLRPTQLLQNVARFKGFPQPILSEDGSRIRYGGRDYSLDEFEANKILHQHLGAPEERLALHILRTQGLVPEHVETRTLHSTFQPNISQGKLQMWVDVFPKSLGPPGPPFNITPRKAKKYYLRVIIWNTKDVILDEKSITGEEMSDIYVKGWIPGNEENKQKTDVHYRSLDGEGNFNWRFVFPFDYLPAEQLCIVAKKEHFWSIDQTEFRIPPRLIIQIWDNDKFSLDDYLGFLELDLRHTIIPAKSPEKCRLDMIPDLKAMNPLKAKTASLFEQKSMKGWWPCYAEKDGARVMAGKVEMTLEILNEKEADERPAGKGRDEPNMNPKLDLPNRPETSFLWFTNPCKTMKFIVWRRFKWVIIGLLFLLILLLFVAVLLYSLPNYLSMKIVKPNV

SEQ ID NO: 26967 - protein, 2019 aa, Homo sapiens
MRPPKEGSGSNICCSAIFAVLQPPLVISRQTRSGMDLQQTPTDLQLKDLTGDQSRSLPYKLISLLNEKGQDTGATIDLVIGYDPPSAPHPNDLSGPSVPGMGGDGEEDEGDEDRLDNAVRGPGPKGPVGTVSEAQLARRLTKVKNSRRMLSNKPQDFQIRVRVIEGRQLSGNNIRPVVKVHVCGQTHRTRIKRGNNPFFDELFFYNVNMTPSELMDEIISIRVYNSHSLRADCLMGEFKIDVGFVYDEPGHAVMRKWLLLNDPEDTSSGSKGYMKVSMFVLGTGDEPPPERRDRDNDSDDVESNLLLPAGIALRWVTFLLKIYRAEDIPQMDDAFSQTVKEIFGGNADKKNLVDPFVEVSFAGKKVCTNIIEKNANPEWNQVVNLQIKFPSVCEKIKLTIYDWDRLTKNDVVGTTYLHLSKIAASGGEVEDFSSSGTGAASYTVNTGETEVGFVPTFGPCYLNLYGSPREYTGFPDPYDELNTGKGEGVAYRGRILVELATFLEKTPPDKKLEPISNDDLLVVEKYQRRRKYSLSAVFHSATMLQDVGEAIQFEVSIGNYGNKFDTTCKPLASTTQYSRAVFDGNYYYYLPWAHTKPVVTLTSYWEDISHRLDAVNTLLAMAERLQTNIEALKSGIQGKIPANQLAELWLKLIDEVIEDTRYTLPLTEGKANVTVLDTQIRKLRSRSLSQIHEAAVRMRSEATDVKSTLAEIEDWLDKLMQLTEEPQNSMPDIIIWMIRGEKRLAYARIPAHQVLYSTSGENASGKYCGKTQTIFLKYPQEKNNGPKVPVELRVNIWLGLSAVEKKFNSFAEGTFTVFAEMYENQALMFGKWGTSGLVGRHKFSDVTGKIKLKREFFLPPKGWEWEGEWIVDPERSLLTEADAGHTEFTDEVYQNESRYPGGDWKPAEDTYTDANGDKAASPSELTCPPGWEWEDDAWSYDINRAVDEKGWEYGITIPPDHKPKSWVAAEKMYHTHRRRRLVRKRKKDLTQTASSTARAMEELQDQEGWEYASLIGWKFHWKQRSSDTFRRRRWRRKMAPSETHGAAAIFKLEGALGADTTEDGDEKSLEKQKHSATTVFGANTPIVSCNFDRVYIYHLRCYVYQARNLLALDKDSFSDPYAHICFLHRSKTTEIIHSTLNPTWDQTIIFDEVEIYGEPQTVLQNPPKVIMELFDNDQVGKDEFLGRSIFSPVVKLNSEMDITPKLLWHPVMNGDKACGDVLVTAELILRGKDGSNLPILPPQRAPNLYMVPQGIRPVVQLTAIEILAWGLRNMKNFQMASITSPSLVVECGGERVESVVIKNLKKTPNFPSSVLFMKVFLPKEELYMPPLVIKVIDHRQFGRKPVVGQCTIERLDRFRCDPYAGKEDIVPQLKASLLSAPPCRDIVIEMEDTKPLLASKLTEKEEEIVDWWSKFYASSGEHEKCGQYIQKGYSKLKIYNCELENVAEFEGLTDFSDTFKLYRGKSDENEDPSVVGEFKGSFRIYPLPDDPSVPAPPRQFRELPDSVPQECTVRIYIVRGLELQPQDNNGLCDPYIKITLGKKVIEDRDHYIPNTLNPVFGRMYELSCYLPQEKDLKISVYDYDTFTRDEKVGETIIDLENRFLSRFGSHCGIPEEYCVSGVNTWRDQLRPTQLLQNVARFKGFPQPILSEDGSRIRYGGRDYSLDEFEANKILHQHLGAPEERLALHILRTQGLVPEHVETRTLHSTFQPNISQGKLQMWVDVFPKSLGPPGPPFNITPRKAKKYYLRVIIWNTKDVILDEKSITGEEMSDIYVKGWIPGNEENKQKTDVHYRSLDGEGNFNWRFVFPFDYLPAEQLCIVAKKEHFWSIDQTEFRIPPRLIIQIWDNDKFSLDDYLGFLELDLRHTIIPAKSPEKCRLDMIPDLKAMNPLKAKTASLFEQKSMKGWWPCYAEKDGARVMAGKVEMTLEILNEKEADERPAGKGRDEPNMNPKLDLPNRPETSFLWFTNPCKTMKFIVWRRFKWVIIGLLFLLILLLFVAVLLYSLPNYLSMKIVKPNV

SEQ ID NO: 26968 - protein, 2050 aa, Homo sapiens
MLRVIVESASNIPKTKFGKPDPIVSVIFKDEKKKTKKVDNELNPVWNEILEFDLRGIPLDFSSSLGIIVKDFETIGQNKLIGTATVALKDLTGDQSRSLPYKLISLLNEKGQDTGATIDLVIGYDPPSAPHPNDLSGPSVPGMGGDGEEDEGDEDRLDNAVRGPGPKGPVGTVSEAQLARRLTKVKNSRRMLSNKPQDFQIRVRVIEGRQLSGNNIRPVVKVHVCGQTHRTRIKRGNNPFFDELFFYNVNMTPSELMDEIISIRVYNSHSLRADCLMGEFKIDVGFVYDEPGHAVMRKWLLLNDPEDTSSGSKGYMKVSMFVLGTGDEPPPERRDRDNDSDDVESNLLLPAGIALRWVTFLLKIYRAEDIPQMDDAFSQTVKEIFGGNADKKNLVDPFVEVSFAGKKVCTNIIEKNANPEWNQVVNLQIKFPSVCEKIKLTIYDWDRLTKNDVVGTTYLHLSKIAASGGEVEDFSSSGTGAASYTVNTGETEVGFVPTFGPCYLNLYGSPREYTGFPDPYDELNTGKGEGVAYRGRILVELATFLEKTPPDKKLEPISNDDLLVVEKYQRRRKYSLSAVFHSATMLQDVGEAIQFEVSIGNYGNKFDTTCKPLASTTQYSRAVFDGNYYYYLPWAHTKPVVTLTSYWEDISHRLDAVNTLLAMAERLQTNIEALKSGIQGKIPANQLAELWLKLIDEVIEDTRYTLPLTEGKANVTVLDTQIRKLRSRSLSQIHEAAVRMRSEATDVKSTLAEIEDWLDKLMQLTEEPQNSMPDIIIWMIRGEKRLAYARIPAHQVLYSTSGENASGKYCGKTQTIFLKYPQEKNNGPKVPVELRVNIWLGLSAVEKKFNSFAEGTFTVFAEMYENQALMFGKWGTSGLVGRHKFSDVTGKIKLKREFFLPPKGWEWEGEWIVDPERSLLTEADAGHTEFTDEVYQNESRYPGGDWKPAEDTYTDANGDKAASPSELTCPPGWEWEDDAWSYDINRAVDEKGWEYGITIPPDHKPKSWVAAEKMYHTHRRRRLVRKRKKDLTQTASSTARAMEELQDQEGWEYASLIGWKFHWKQRSSDTFRRRRWRRKMAPSETHGAAAIFKLEGALGADTTEDGDEKSLEKQKHSATTVFGANTPIVSCNFDRVYIYHLRCYVYQARNLLALDKDSFSDPYAHICFLHRSKTTEIIHSTLNPTWDQTIIFDEVEIYGEPQTVLQNPPKVIMELFDNDQVGKDEFLGRSIFSPVVKLNSEMDITPKLLWHPVMNGDKACGDVLVTAELILRGKDGSNLPILPPQRAPNLYMVPQGIRPVVQLTAIEILAWGLRNMKNFQMASITSPSLVVECGGERVESVVIKNLKKTPNFPSSVLFMKVFLPKEELYMPPLVIKVIDHRQFGRKPVVGQCTIERLDRFRCDPYAGKEDIVPQLKASLLSAPPCRDIVIEMEDTKPLLASKCLSSMSTALSKMASPATVHLTEKEEEIVDWWSKFYASSGEHEKCGQYIQKGYSKLKIYNCELENVAEFEGLTDFSDTFKLYRGKSDENEDPSVVGEFKGSFRIYPLPDDPSVPAPPRQFRELPDSVPQECTVRIYIVRGLELQPQDNNGLCDPYIKITLGKKVIEDRDHYIPNTLNPVFGRMYELSCYLPQEKDLKISVYDYDTFTRDEKVGETIIDLENRFLSRFGSHCGIPEEYCVSGVNTWRDQLRPTQLLQNVARFKGFPQPILSEDGSRIRYGGRDYSLDEFEANKILHQHLGAPEERLALHILRTQGLVPEHVETRTLHSTFQPNISRYYLRVIIWNTKDVILDEKSITGEEMSDIYVKGWIPGNEENKQKTDVHYRSLDGEGNFNWRFVFPFDYLPAEQLCIVAKKEHFWSIDQTEFRIPPRLIIQIWDNDKFSLDDYLGFLELDLRHTIIPAKSPEKCRLDMIPDLKAMNPLKAKTASLFEQKSMKGWWPCYAEKDGARVMAGKVEMTLEILNEKEADERPAGKGRDEPNMNPKLDLPNRPETSFLWFTNPCKTMKFIVWRRFKWVIIGLLFLLILLLFVAVLLYSLPNYLSMKIVKPNV

SEQ ID NO: 26969 - protein, 160 aa, Homo sapiens
MLRVIVESASNIPKTKFGKPDPIVSVIFKDEKKKTKKVDNELNPVWNEILEFDLRGIPLDFSSSLGIIVKDFETIGQNKLIGTATVALKDLTGDQSRSLPYKLISLLNEKGQDTGATIDLVIGYDPPSAPHPNDLSGPSVPGMGGKLTLLKAQPPPGGGC

SEQ ID NO: 26970 - protein, 1577 aa, Homo sapiens
MLRVIVESASNIPKTKFGKPDPIVSVIFKDEKKKTKKVDNELNPVWNEILEFDLRGIPLDFSSSLGIIVKDFETIGQNKLIGTATVALKDLTGDQSRSLPYKLISLLNEKGQDTGATIDLVIGYDPPSAPHPNDLSGPSVPGMGGDGEEDEGDEDRLDNAVRGPGPKGPVGTVSEAQLARRLTKVKNSRRMLSNKPQDFQIRVRVIEGRQLSGNNIRPVVKVHVCGQTHRTRIKRGNNPFFDELFFYNVNMTPSELMDEIISIRVYNSHSLRADCLMGEFKIDVGFVYDEPGHAVMRKWLLLNDPEDTSSGSKGYMKVSMFVLGTGDEPPPERRDRDNDSDDVESNLLLPAGIALRWVTFLLKIYRAEDIPQMDDAFSQTVKEIFGGNADKKNLVDPFVEVSFAGKKVCTNIIEKNANPEWNQVVNLQIKFPSVCEKIKLTIYDWDRLTKNDVVGTTYLHLSKIAASGGEVEDFSSSGTGAASYTVNTGETEVGFVPTFGPCYLNLYGSPREYTGFPDPYDELNTGKGEGVAYRGRILVELATFLEKTPPDKKLEPISNDDLLVVEKYQRRRKYSLSAVFHSATMLQDVGEAIQFEVSIGNYGNKFDTTCKPLASTTQYSRAVFDGNYYYYLPWAHTKPVVTLTSYWEDISHRLDAVNTLLAMAERLQTNIEALKSGIQGKIPANQLAELWLKLIDEVIEDTRYTLPLTEGKANVTVLDTQIRKLRSRSLSQIHEAAVRMRSEATDVKSTLAEIEDWLDKLMQLTEEPQNSMPDIIIWMIRGEKRLAYARIPAHQVLYSTSGENASGKYCGKTQTIFLKYPQEKNNGPKVPVELRVNIWLGLSAVEKKFNSFAEGTFTVFAEMYENQALMFGKWGTSGLVGRHKFSDVTGKIKLKREFFLPPKGWEWEGEWIVDPERSLLTEADAGHTEFTDEVYQNESRYPGGDWKPAEDTYTDANGDKAASPSELTCPPGWEWEDDAWSYDINRAVDEKGWEYGITIPPDHKPKSWVAAEKMYHTHRRRRLVRKRKKDLTQTASSTARAMEELQDQEGWEYASLIGWKFHWKQRSSDTFRRRRWRRKMAPSETHGAAAIFKLEGALGADTTEDGDEKSLEKQKHSATTVFGANTPIVSCNFDRVYIYHLRCYVYQARNLLALDKDSFSDPYAHICFLHRSKTTEIIHSTLNPTWDQTIIFDEVEIYGEPQTVLQNPPKVIMELFDNDQVGKDEFEANKILHQHLGAPEERLALHILRTQGLVPEHVETRTLHSTFQPNISQGKLQMWVDVFPKSLGPPGPPFNITPRKAKKYYLRVIIWNTKDVILDEKSITGEEMSDIYVKGWIPGNEENKQKTDVHYRSLDGEGNFNWRFVFPFDYLPAEQLCIVAKKEHFWSIDQTEFRIPPRLIIQIWDNDKFSLDDYLGFLELDLRHTIIPAKSPEKCRLDMIPDLKAMNPLKAKTASLFEQKSMKGWWPCYAEKDGARVMAGKVEMTLEILNEKEADERPAGKGRDEPNMNPKLDLPNRPETSFLWFTNPCKTMKFIVWRRFKWVIIGLLFLLILLLFVAVLLYSLPNYLSMKIVKPNV

SEQ ID NO: 26971 - protein, 2048 aa, Homo sapiens
MLRVIVESASNIPKTKFGKPDPIVSVIFKDEKKKTKKVDNELNPVWNEILEFDLRGIPLDFSSSLGIIVKDFETIGQNKLIGTATVALKDLTGDQSRSLPYKLISLLNEKGQDTGATIDLVIGYDPPSAPHPNDLSGPSVPGMGGDGEEDEGDEDRLDNAVRGPGPKGPVGTVSEAQLARRLTKVKNSRRMLSNKPQDFQIRVRVIEGRQLSGNNIRPVVKVHVCGQTHRTRIKRGNNPFFDELFFYNVNMTPSELMDEIISIRVYNSHSLRADCLMGEFKIDVGFVYDEPGHAVMRKWLLLNDPEDTSSGSKGYMKVSMFVLGTGDEPPPERRDRDNDSDDVESNLLLPAGIALRWVTFLLKIYRAEDIPQMDDAFSQTVKEIFGGNADKKNLVDPFVEVSFAGKKVCTNIIEKNANPEWNQVVNLQIKFPSVCEKIKLTIYDWDRLTKNDVVGTTYLHLSKIAASGGEVEVNTGETEVGFVPTFGPCYLNLYGSPREYTGFPDPYDELNTGKGEGVAYRGRILVELATFLEKTPPDKKLEPISNDDLLVVEKYQRRRKYSLSAVFHSATMLQDVGEAIQFEVSIGNYGNKFDTTCKPLASTTQYSRAVFDGNYYYYLPWAHTKPVVTLTSYWEDISHRLDAVNTLLAMAERLQTNIEALKSGIQGKIPANQLAELWLKLIDEVIEDTRYTLPLTEGKANVTVLDTQIRKLRSRSLSQIHEAAVRMRSEATDVKSTLAEIEDWLDKLMQLTEEPQNSMPDIIIWMIRGEKRLAYARIPAHQVLYSTSGENASGKYCGKTQTIFLKYPQEKNNGPKVPVELRVNIWLGLSAVEKKFNSFAEGTFTVFAEMYENQALMFGKWGTSGLVGRHKFSDVTGKIKLKREFFLPPKGWEWEGEWIVDPERSLLTEADAGHTEFTDEVYQNESRYPGGDWKPAEDTYTDANGDKAASPSELTCPPGWEWEDDAWSYDINRAVDEKGWEYGITIPPDHKPKSWVAAEKMYHTHRRRRLVRKRKKDLTQTASSTARAMEELQDQEGWEYASLIGWKFHWKQRSSDTFRRRRWRRKMAPSETHGAAAIFKLEGALGADTTEDGDEKSLEKQKHSATTVFGANTPIVSCNFDRVYIYHLRCYVYQARNLLALDKDSFSDPYAHICFLHRSKTTEIIHSTLNPTWDQTIIFDEVEIYGEPQTVLQNPPKVIMELFDNDQVGKDEFLGRSIFSPVVKLNSEMDITPKLLWHPVMNGDKACGDVLVTAELILRGKDGSNLPILPPQRAPNLYMVPQGIRPVVQLTAIEILAWGLRNMKNFQMASITSPSLVVECGGERVESVVIKNLKKTPNFPSSVLFMKVFLPKEELYMPPLVIKVIDHRQFGRKPVVGQCTIERLDRFRCDPYAGKEDIVPQLKASLLSAPPCRDIVIEMEDTKPLLASKLTEKEEEIVDWWSKFYASSGEHEKCGQYIQKGYSKLKIYNCELENVAEFEGLTDFSDTFKLYRGKSDENEDPSVVGEFKGSFRIYPLPDDPSVPAPPRQFRELPDSVPQECTVRIYIVRGLELQPQDNNGLCDPYIKITLGKKVIEDRDHYIPNTLNPVFGRMYELSCYLPQEKDLKISVYDYDTFTRDEKVGETIIDLENRFLSRFGSHCGIPEEYCVSGVNTWRDQLRPTQLLQNVARFKGFPQPILSEDGSRIRYGGRDYSLDEFEANKILHQHLGAPEERLALHILRTQGLVPEHVETRTLHSTFQPNISQGKLQMWVDVFPKSLGPPGPPFNITPRKAKKYYLRVIIWNTKDVILDEKSITGEEMSDIYVKGWIPGNEENKQKTDVHYRSLDGEGNFNWRFVFPFDYLPAEQLCIVAKKEHFWSIDQTEFRIPPRLIIQIWDNDKFSLDDYLGFLELDLRHTIIPAKSPEKCRLDMIPDLKAMNPLKAKTASLFEQKSMKGWWPCYAEKDGARVMAGKVEMTLEILNEKEADERPAGKGRDEPNMNPKLDLPNRPETSFLWFTNPCKTMKFIVWRRFKWVIIGLLFLLILLLFVAVLLYSLPNYLSMKIVKPNV

SEQ ID NO: 26972 - protein, 445 aa, Homo sapiens
MLRVIVESASNIPKTKFGKPDPIVSVIFKDEKKKTKKVDNELNPVWNEILEFDLRGIPLDFSSSLGIIVKDFETIGQNKLIGTATVALKDLTGDQSRSLPYKLISLLNEKGQDTGATIDLVIGYDPPSAPHPNDLSGPSVPGMGGDGEEDEGDEDRLDNAVRGPGPKGPVGTVSEAQLARRLTKVKNSRRMLSNKPQDFQIRVRVIEGRQLSGNNIRPVVKVHVCGQTHRTRIKRGNNPFFDELFFYNVNMTPSELMDEIISIRVYNSHSLRADCLMGEFKIDVGFVYDEPGHAVMRKWLLLNDPEDTSSGSKGYMKVSMFVLGTGDEPPPERRDRDNDSDDVESNLLLPAGIALRWVTFLLKIYRAEDIPQMDDAFSQTVKEIFGGNADKKNLVDPFVEVSFAGKKVCTNIIEKNANPEWNQVVNLQIKFPSVCEKIKLTIYDW

SEQ ID NO: 26973 - protein, 419 aa, Homo sapiens
MIPPNSPPNRTDEKKKTKKVDNELNPVWNEILEFDLRGIPLDFSSSLGIIVKDFETIGQNKLIGTATVALKDLTGDQSRSLPYKLISLLNEKGQDTGATIDLVIGYDPPSAPHPNDLSGPSVPGMGGDGEEDEGDEDRLDNAVRGPGPKGPVGTVSEAQLARRLTKVKNSRRMLSNKPQDFQIRVRVIEGRQLSGNNIRPVVKVHVCGQTHRTRIKRGNNPFFDELFFYNVNMTPSELMDEIISIRVYNSHSLRADCLMGEFKIDVGFVYDEPGHAVMRKWLLLNDPEDTSSGSKGYMKVSMFVLGTGDEPPPERRDRDNDSDDVESNLLLPAGIALRWVTFLLKIYRAEDIPQMDDAFSQTVKEIFGGNADKKNLVDPFVEVSFAGKKVCTNIIEKNANPEWNQVVNLQIKFPSVCEK

SEQ ID NO: 26974 - protein, 1460 aa, Homo sapiens
MPAPGALILLAAVSASGCLASPAHPDGFALGRAPLAPPYAVVLISCSGLLAFIFLLLTCLCCKRGDVGFKEFENPEGEDCSGEYTPPAEETSSSQSLPDVYILPLAEVSLPMPAPQPSHSDMTTPLGLSRQHLSYLQEIGSGWFGKVILGEIFSDYTPAQVVVKELRASAGPLEQRKFISEAQPYRSLQHPNVLQCLGLCVETLPFLLIMEFCQLGDLKRYLRAQRPPEGLSPELPPRDLRTLQRMGLEIARGLAHLHSHNYVHSDLALRNCLLTSDLTVRIGDYGLAHSNYKEDYYLTPERLWIPLRWAAPELLGELHGTFMVVDQSRESNIWSLGVTLWELFEFGAQPYRHLSDEEVLAFVVRQQHVKLARPRLKLPYADYWYDILQSCWRPPAQRPSASDLQLQLTYLLSERPPRPPPPPPPPRDGPFPWPWPPAHSAPRPGTLSSPFPLLDGFPGADPDDVLTVTESSRGLNLECLWEKARRGAGRGGGAPAWQPASAPPAPHANPSNPFYEALSTPSVLPVISARSPSVSSEYYIRLEEHGSPPEPLFPNDWDPLDPGVPAPQAPQAPSEVPQLVSETWASPLFPAPRPFPAQSSASGSFLLSGWDPEGRGAGETLAGDPAEVLGERGTAPWVEEEEEEEEGSSPGEDSSSLGGGPSRRGPLPCPLCSREGACSCLPLERGDAVAGWGGHPALGCPHPPEDDSSLRAERGSLADLPMAPPASAPPEFLDPLMGAAAPQYPGRGPPPAPPPPPPPPRAPADPAASPDPPSAVASPGSGLSSPGPKPGDSGYETETPFSPEGAFPGGGAAEEEGVPRPRAPPEPPDPGAPRPPPDPGPLPLPGPREKPTFVVQVSTEQLLMSLREDVTRNLLGEKGATARETGPRKAGRGPGNREKVPGLNRDPTVLGNGKQAPSLSLPVNGVTVLENGDQRAPGIEEKAAENGALGSPEREEKVLENGELTPPRREEKALENGELRSPEAGEKVLVNGGLTPPKSEDKVSENGGLRFPRNTERPPETGPWRAPGPWEKTPESWGPAPTIGEPAPETSLERAPAPSAVVSSRNGGETAPGPLGPAPKNGTLEPGTERRAPETGGAPRAPGAGRLDLGSGGRAPVGTGTAPGGGPGSGVDAKAGWVDNTRPQPPPPPLPPPPEAQPRRLEPAPPRARPEVAPEGEPGAPDSRAGGDTALSGDGDPPKPERKGPEMPRLFLDLGPPQGNSEQIKARLSRLSLALPPLTLTPFPGPGPRRPPWEGADAGAAGGEAGGAGAPGPAEEDGEDEDEDEEEDEEAAAPGAAAGPRGPGRARAAPVPVVVSSADADAARPLRGLLKSPRGADEPEDSELERKRKMVSFHGDVTVYLFDQETPTNELSVQAPPEGDTDPSTPPAPPTPPHPATPGDGFPSNDSGFGGSFEWAEDFPLLPPPGPPLCFSRFSVSPALETPGPPARAPDARPAGPVEN

SEQ ID NO: 26975 - protein, 1083 aa, Homo sapiens
MACPALGLEALQPLQPEPPPEPAFSEAQKWIEQVTGRSFGDKDFRTGLENGILLCELLNAIKPGLVKKINRLPTPIAGLDNIILFLRGCKELGLKESQLFDPSDLQDTSNRVTVKSLDYSRKLKNVLVTIYWLGKAANSCTSYSGTTLNLKEFEGLLAQMRKDTDDIESPKRSIRDSGYIDCWDSERSDSLSPPRHGRDDSFDSLDSFGSRSRQTPSPDVVLRGSSDGRGSDSESDLPHRKLPDVKKDDMSARRTSHGEPKSAVPFNQYLPNKSNQTAYVPAPLRKKKAEREEYRKSWSTATSPLGGERPFRYGPRTPVSDDAESTSMFDMRCEEEAAVQPHSRARQEQLQLINNQLREEDDKWQDDLARWKSRRRSVSQDLIKKEEERKKMEKLLAGEDGTSERRKSIKTYREIVQEKERRERELHEAYKNARSQEEAEGILQQYIERFTISEAVLERLEMPKILERSHSTEPNLSSFLNDPNPMKYLRQQSLPPPKFTATVETTIARASVLDTSMSAGSGSPSKTVTPKAVPMLTPKPYSQPKNSQDVLKTFKVDGKVSVNGETVHREEEKERECPTVAPAHSLTKSQMFEGVARVHGSPLELKQDNGSIEINIKKPNSVPQELAATTEKTEPNSQEDKNDGGKSRKGNIELASSEPQHFTTTVTRCSPTVAFVEFPSSPQLKNDVSEEKDQKKPENEMSGKVELVLSQKVVKPKSPEPEATLTFPFLDKMPEANQLHLPNLNSQVDSPSSEKSPVMTPQFKFWAWDPEEERRRQEKWQQEQERLLQERYQKEQDKLKEEWEKAQKEVEEEERRYYEEERKIIEDTVVPFTVSSSSADQLSTSSSMTEGSGTMNKIDLGNCQDEKQDRRWKKSFQGDDSDLLLKTRESDRLEEKGSLTEGALAHSGNPVSKGVHEDHQLDTEAGAPHCGTNPQLAQDPSQNQQTSNPTHSSEDVKPKTLPLDKSINHQIESPSERRKKSPREHFQAGPFSPCSPTPPGQSPNRSISGKKLCSSCGLPLGKGAAMIIETLNLYFHIQCFRCGICKGQLGDAVSGTDVRIRNGLLNCNDCYMRSRSAGQPTTL

SEQ ID NO: 26976 - protein, 1057 aa, Homo sapiens
MACPALGLEALQPLQPEPPPEPAFSEAQKWIEQVTGRSFGDKDFRTGLENGILLCELLNAIKPGLVKKINRLPTPIAGLDNIILFLRGCKELGLKESQLFDPSDLQDTSNRVTVKSLDYSRKLKNVLVTIYWLGKAANSCTSYSGTTLNLKEFEGLLAQMRKDTDDIESPKRSIRDSGYIDCWDSERSDSLSPPRHGRDDSFDSLDSFGSRSRQTPSPDVVLRGSSDGRGSDSESDLPHRKLPDVKKDDMSARRTSHGEPKSAVPFNQYLPNKSNQTAYVPAPLRKKKAEREEYRKSWSTATSPLGGERPFRYGPRTPVSDDAESTSMFDMRCEEEAAVQPHSRARQEQLQLINNQLREEDDKWQDDLARWKSRRRSVSQDLIKKEEERKKMEKLLAGEDGTSERRKSIKTYREIVQEKERRERELHEAYKNARSQEEAEGILQQYIERFTISEAVLERLEMPKILERSHSTEPNLSSFLNDPNPMKYLRQQSLPPPKFTATVETTIARASVLDTSMSAGSGSPSKTVTPKAVPMLTPKPYSQPKNSQDVLKTFKVDGKVSVNGETVHREEEKERECPTVAPAHSLTKSQMFEGVARVHGSPLELKQDNGSIEINIKKPNSVPQELAATTEKTEPNSQEDKNDGGKSRKGNIELASSEPQHFTTTVTRCSPTVAFVEFPSSPQLKNDVSEEKDQKKPENEMSGKVELVLSQKVVKPKSPEPEATLTFPFLDKMPEANQLHLPNLNSQVDSPSSEKSPVMTPQFKFWAWDPEEERRRQEKWQQEQERLLQERYQKEQDKLKEEWEKAQKEVEEEERRYYEEERKIIEDTVVPFTVSSSSADQLSTSSSMTEGSGTMNKIDLGNCQDEKQDRRWKKSFQGDDSDLLLKTRESDRLEEKGSLTEGALAHSGNPVSKGVHEDHQLDTEAGAPHCGTNPQLAQDPSQNQQTSNPTHSSEDVKPKTLPLDKSINHQIESPSERRKSISGKKLCSSCGLPLGKGAAMIIETLNLYFHIQCFRCGICKGQLGDAVSGTDVRIRNGLLNCNDCYMRSRSAGQPTTL

SEQ ID NO: 26977 - protein, 1467 aa, Homo sapiens
MRKDTDDIESPKRSIRDSGYIDCWDSERSDSLSPPRHGRDDSFDSLDSFGSRSRQTPSPDVVLRGSSDGRGSDSESDLPHRKLPDVKKDDMSARRTSHGEPKSAVPFNQYLPNKSNQTAYVPAPLRKKKAEREEYRKSWSTATSPLGGERPFSFPETIEEEGSEVGSAGEDNPAGQMNPGWKPSDGGCELPDGSGKEHPSSDGAVVAPAPKSEEKDAAEIQKRERLEQAGIKVMPAAQRFASQKQLSEEKEAIRDIVLRKENSFLTHQHGNDSEAEGEVVCRLPDLEKDDFAARRARMNQTKPMVPLNQLLYGPYPKKGAEKSDGSKQLSKGISKKRSLEYKRNQGHTEEVKLIVTCNMRAQESEPVEGGLRKVPDLHKDDLAQQRIQGSLAPHREPPSFITLSNITEADLETWERLKVSEKARDGDVQHICASEPSPEIKAETAIRDDFANRKARASKKASSPRQKFVHFGPVTELDQQKWKRLSIGKAGPREDEEEVICHGSKIQMDSVSPVSAATSSLKGHQIFNRQNDCRTMNCGRGDYCRRASWLAPVPESQEEWVCSLGECPRGTEEVTSKQLPQDGKEETESAPRDSERLSKAERSEDSSQPLVCPLASECEASGTEEKLEKMTAPAWSGSGLKGQRKLDDSRKDDMMARRTGMSLRHTGSNPNQFLPVPFAKQQDVEESSKGLPMKDQRYGPRTPVSDDAESTSMFDMRCEEEAAVQPHSRARQEQLQLINNQLREEDDKWQDDLARWKSRRRSVSQDLIKKEEERKKMEKLLAGEDGTSERRKSIKTYREIVQEKERRERELHEAYKNARSQEEAEGILQQYIERFTISEAVLERLEMPKILERSHSTEPNLSSFLNDPNPMKYLRQQSLPPPKFTATVETTIARASVLDTSMSAGSGSPSKTVTPKAVPMLTPKPYSQPKNSQDVLKTFKVDGKVSVNGETVHREEEKERECPTVAPAHSLTKSQMFEGVARVHGSPLELKQDNGSIEINIKKPNSVPQELAATTEKTEPNSQEDKNDGGKSRKGNIELASSEPQHFTTTVTRCSPTVAFVEFPSSPQLKNDVSEEKDQKKPENEMSGKVELVLSQKVVKPKSPEPEATLTFPFLDKMPEANQLHLPNLNSQVDSPSSEKSPVMTPFKFWAWDPEEERRRQEKWQQEQERLLQERYQKEQDKLKEEWEKAQKEVEEEERRYYEEERKIIEDTVVPFTVSSSSADQLSTSSSMTEGSGTMNKIDLGNCQDEKQDRRWKKSFQGDDSDLLLKTRESDRLEEKGSLTEGALAHSGNPVSKGVHEDHQLDTEAGAPHCGTNPQLAQDPSQNQQTSNPTHSSEDVKPKTLPLDKSINHQIESPSERRKKSPREHFQAGPFSPCSPTPPGQSPNRSISGKKLCSSCGLPLGKGAAMIIETLNLYFHIQCFRCGICKGQLGDAVSGTDVRIRNGLLNCNDCYMRSRSAGQPTTL

SEQ ID NO: 26978 - protein, 1069 aa, Homo sapiens
MACPALGLEALQPLQPEPPPEPAFSEAQKWIEQVTGRSFGDKDFRTGLENGILLCELLNAIKPGLVKKINRLPTPIAGLDNIILFLRGCKELGLKESQLFDPSDLQDTSNRVTVKSLDYSRKLKNVLVTIYWLGKAANSCTSYSGTTLNLKEFEGLLAQMRKDTDDIESPKRSIRDSGYIDCWDSERSDSLSPPRHGRDDSFDSLDSFGSRSRQTPSPDVVLRGSSDGRGSDSESDLPHRKLPDVKKDDMSARRTSHGEPKSAVPFNQYLPNKSNQTAYVPAPLRKKKAEREEYRKSWSTATSPLGGERPFRSTSMFDMRCEEEAAVQPHSRARQEQLQLINNQLREEDDKWQDDLARWKSRRRSVSQDLIKKEEERKKMEKLLAGEDGTSERRKSIKTYREIVQEKERRERELHEAYKNARSQEEAEGILQQYIERFTISEAVLERLEMPKILERSHSTEPNLSSFLNDPNPMKYLRQQSLPPPKFTATVETTIARASVLDTSMSAGSGSPSKTVTPKAVPMLTPKPYSQPKNSQDVLKTFKVDGKVSVNGETVHREEEKERECPTVAPAHSLTKSQMFEGVARVHGSPLELKQDNGSIEINIKKPNSVPQELAATTEKTEPNSQEDKNDGGKSRKGNIELASSEPQHFTTTVTRCSPTVAFVEFPSSPQLKNDVSEEKDQKKPENEMSGKVELVLSQKVVKPKSPEPEATLTFPFLDKMPEANQLHLPNLNSQESPGTASVPLRVQNSWRRSQFFSQSVDSPSSEKSPVMTPFKFWAWDPEEERRRQEKWQQEQERLLQERYQKEQDKLKEEWEKAQKEVEEEERRYYEEERKIIEDTVVPFTVSSSSADQLSTSSSMTEGSGTMNKIDLGNCQDEKQDRRWKKSFQGDDSDLLLKTRESDRLEEKGSLTEGALAHSGNPVSKGVHEDHQLDTEAGAPHCGTNPQLAQDPSQNQQTSNPTHSSEDVKPKTLPLDKSINHQIESPSERRKSISGKKLCSSCGLPLGKGAAMIIETLNLYFHIQCFRCGICKGQLGDAVSGTDVRIRNGLLNCNDCYMRSRSAGQPTTL

SEQ ID NO: 26979 - protein, 910 aa, Homo sapiens
MRKDTDDIESPKRSIRDSGYIDCWDSERSDSLSPPRHGRDDSFDSLDSFGSRSRQTPSPDVVLRGSSDGRGSDSESDLPHRKLPDVKKDDMSARRTSHGEPKSAVPFNQYLPNKSNQTAYVPAPLRKKKAEREEYRKSWSTATSPLGGERPFRSTSMFDMRCEEEAAVQPHSRARQEQLQLINNQLREEDDKWQDDLARWKSRRRSVSQDLIKKEEERKKMEKLLAGEDGTSERRKSIKTYREIVQEKERRERELHEAYKNARSQEEAEGILQQYIERFTISEAVLERLEMPKILERSHSTEPNLSSFLNDPNPMKYLRQQSLPPPKFTATVETTIARASVLDTSMSAGSGSPSKTVTPKAVPMLTPKPYSQPKNSQDVLKTFKVDGKVSVNGETVHREEEKERECPTVAPAHSLTKSQMFEGVARVHGSPLELKQDNGSIEINIKKPNSVPQELAATTEKTEPNSQEDKNDGGKSRKGNIELASSEPQHFTTTVTRCSPTVAFVEFPSSPQLKNDVSEEKDQKKPENEMSGKVELVLSQKVVKPKSPEPEATLTFPFLDKMPEANQLHLPNLNSQESPGTASVPLRVQNSWRRSQFFSQSVDSPSSEKSPVMTPFKFWAWDPEEERRRQEKWQQEQERLLQERYQKEQDKLKEEWEKAQKEVEEEERRYYEEERKIIEDTVVPFTVSSSSADQLSTSSSMTEGSGTMNKIDLGNCQDEKQDRRWKKSFQGDDSDLLLKTRESDRLEEKGSLTEGALAHSGNPVSKGVHEDHQLDTEAGAPHCGTNPQLAQDPSQNQQTSNPTHSSEDVKPKTLPLDKSINHQIESPSERRKSISGKKLCSSCGLPLGKGAAMIIETLNLYFHIQCFRCGICKGQLGDAVSGTDVRIRNGLLNCNDCYMRSRSAGQPTTL

SEQ ID NO: 26980 - protein, 902 aa, Homo sapiens
MDSERQVKDTDDIESPKRSIRDSGYIDCWDSERSDSLSPPRHGRDDSFDSLDSFGSRSRQTPSPDVVLRGSSDGRGSDSESDLPHRKLPDVKKDDMSARRTSHGEPKSAVPFNQYLPNKSNQTAYVPAPLRKKKAEREEYRKSWSTATSPLGGERPFRYGPRTPVSDDAESTSMFDMRCEEEAAVQPHSRARQEQLQLINNQLREEDDKWQDDLARWKSRRRSVSQDLIKKEEERKKMEKLLAGEDGTSERRKSIKTYREIVQEKERRERELHEAYKNARSQEEAEGILQQYIERFTISEAVLERLEMPKILERSHSTEPNLSSFLNDPNPMKYLRQQSLPPPKFTATVETTIARASVLDTSMSAGSGSPSKTVTPKAVPMLTPKPYSQPKNSQDVLKTFKVDGKVSVNGETVHREEEKERECPTVAPAHSLTKSQMFEGVARVHGSPLELKQDNGSIEINIKKPNSVPQELAATTEKTEPNSQEDKNDGGKSRKGNIELASSEPQHFTTTVTRCSPTVAFVEFPSSPQLKNDVSEEKDQKKPENEMSGKVELVLSQKVVKPKSPEPEATLTFPFLDKMPEANQLHLPNLNSQVDSPSSEKSPVMTPFKFWAWDPEEERRRQEKWQQEQERLLQERYQKEQDKLKEEWEKAQKEVEEEERRYYEEERKIIEDTVVPFTVSSSSADQLSTSSSMTEGSGTMNKIDLGNCQDEKQDRRWKKSFQGDDSDLLLKTRESDRLEEKGSLTEGALAHSGNPVSKGVHEDHQLDTEAGAPHCGTNPQLAQDPSQNQQTSNPTHSSEDVKPKTLPLDKSINHQIESPSERRKSISGKKLCSSCGLPLGKGAAMIIETLNLYFHIQCFRCGICKGQLGDAVSGTDVRIRNGLLNCNDCYMRSRSAGQPTTL

SEQ ID NO: 26981 - protein, 138 aa, Homo sapiens
MRKDTDDIESPKRSIRDSGYIDCWDSERSDSLSPPRHGRDDSFDSLDSFGSRSRQTPSPDVVLRGSSDGRGSDSESDLPHRKLPDVKKDDMSARRTSHGEPKSAVPFNQYLPNKSNQTAYVPAPLRKKNADTMRRSVR

SEQ ID NO: 26982 - protein, 897 aa, Homo sapiens
MRKDTDDIESPKRSIRDSGYIDCWDSERSDSLSPPRHGRDDSFDSLDSFGSRSRQTPSPDVVLRGSSDGRGSDSESDLPHRKLPDVKKDDMSARRTSHGEPKSAVPFNQYLPNKSNQTAYVPAPLRKKKAEREEYRKSWSTATSPLGGERPFRYGPRTPVSDDAESTSMFDMRCEEEAAVQPHSRARQEQLQLINNQLREEDDKWQDDLARWKSRRRSVSQDLIKKEEERKKMEKLLAGEDGTSERRKSIKTYREIVQEKERRERELHEAYKNARSQEEAEGILQQYIERFTISEAVLERLEMPKILERSHSTEPNLSSFLNDPNPMKYLRQQSLPPPKFTATVETTIARASVLDTSMSAGSGSPSKTVTPKAVPMLTPKPYSQPKNSQDVLKTFKVDGKVSVNGETVHREEEKERECPTVAPAHSLTKSQMFEGVARVHGSPLELKQDNGSIEINIKKPNSVPQELAATTEKTEPNSQEDKNDGGKSRKGNIELASSEPQHFTTTVTRCSPTVAFVEFPSSPQLKNDVSEEKDQKKPENEMSGKVELVLSQKVVKPKSPEPEATLTFPFLDKMPEANQLHLPNLNSQVDSPSSEKSPVMTPFKFWAWDPEEERRRQEKWQQEQERLLQERYQKEQDKLKEEWEKAQKEVEEEERRYYEEERKIIEDTVVPFTVSSSSADQLSTSSSMTEGSGTMNKIDLGNCQDEKQDRRWKKSFQGDDSDLLLKTRESDRLEEKGSLTEGALAHSGNPVSKGVHEDHQLDTEAGAPHCGTNPQLAQDPSQNQQTSNPTHSSEDVKPKTLPLDKSINHQIESPSERRKSISGKKLCSSCGLPLGKGAAMIIETLNLYFHIQCFRCGICKGQLGDAVSGTDVRIRNGLLNCNDCYMRSRSAGQPTTL

SEQ ID NO: 26983 - protein, 890 aa, Homo sapiens
MDSERQVKDTDDIESPKRSIRDSGYIDCWDSERSDSLSPPRHGRDDSFDSLDSFGSRSRQTPSPDVVLRGSSDGRGSDSESDLPHRKLPDVKKDDMSARRTSHGEPKSAVPFNQYLPNKSNQTAYVPAPLRKKKAEREEYRKSWSTATSPLGGERPFRSTSMFDMRCEEEAAVQPHSRARQEQLQLINNQLREEDDKWQDDLARWKSRRRSVSQDLIKKEEERKKMEKLLAGEDGTSERRKSIKTYREIVQEKERRERELHEAYKNARSQEEAEGILQQYIERFTISEAVLERLEMPKILERSHSTEPNLSSFLNDPNPMKYLRQQSLPPPKFTATVETTIARASVLDTSMSAGSGSPSKTVTPKAVPMLTPKPYSQPKNSQDVLKTFKVDGKVSVNGETVHREEEKERECPTVAPAHSLTKSQMFEGVARVHGSPLELKQDNGSIEINIKKPNSVPQELAATTEKTEPNSQEDKNDGGKSRKGNIELASSEPQHFTTTVTRCSPTVAFVEFPSSPQLKNDVSEEKDQKKPENEMSGKVELVLSQKVVKPKSPEPEATLTFPFLDKMPEANQLHLPNLNSQVDSPSSEKSPVMTPFKFWAWDPEEERRRQEKWQQEQERLLQERYQKEQDKLKEEWEKAQKEVEEEERRYYEEERKIIEDTVVPFTVSSSSADQLSTSSSMTEGSGTMNKIDLGNCQDEKQDRRWKKSFQGDDSDLLLKTRESDRLEEKGSLTEGALAHSGNPVSKGVHEDHQLDTEAGAPHCGTNPQLAQDPSQNQQTSNPTHSSEDVKPKTLPLDKSINHQIESPSERRKSISGKKLCSSCGLPLGKGAAMIIETLNLYFHIQCFRCGICKGQLGDAVSGTDVRIRNGLLNCNDCYMRSRSAGQPTTL

SEQ ID NO: 26984 - protein, 1056 aa, Homo sapiens
MACPALGLEALQPLQPEPPPEPAFSEAQKWIEQVTGRSFGDKDFRTGLENGILLCELLNAIKPGLVKKINRLPTPIAGLDNIILFLRGCKELGLKESQLFDPSDLQDTSNRVTVKSLDYSRKLKNVLVTIYWLGKAANSCTSYSGTTLNLKEFEGLLAQMRKDTDDIESPKRSIRDSGYIDCWDSERSDSLSPPRHGRDDSFDSLDSFGSRSRQTPSPDVVLRGSSDGRGSDSESDLPHRKLPDVKKDDMSARRTSHGEPKSAVPFNQYLPNKSNQTAYVPAPLRKKKAEREEYRKSWSTATSPLGGERPFRYGPRTPVSDDAESTSMFDMRCEEEAAVQPHSRARQEQLQLINNQLREEDDKWQDDLARWKSRRRSVSQDLIKKEEERKKMEKLLAGEDGTSERRKSIKTYREIVQEKERRERELHEAYKNARSQEEAEGILQQYIERFTISEAVLERLEMPKILERSHSTEPNLSSFLNDPNPMKYLRQQSLPPPKFTATVETTIARASVLDTSMSAGSGSPSKTVTPKAVPMLTPKPYSQPKNSQDVLKTFKVDGKVSVNGETVHREEEKERECPTVAPAHSLTKSQMFEGVARVHGSPLELKQDNGSIEINIKKPNSVPQELAATTEKTEPNSQEDKNDGGKSRKGNIELASSEPQHFTTTVTRCSPTVAFVEFPSSPQLKNDVSEEKDQKKPENEMSGKVELVLSQKVVKPKSPEPEATLTFPFLDKMPEANQLHLPNLNSQVDSPSSEKSPVMTPFKFWAWDPEEERRRQEKWQQEQERLLQERYQKEQDKLKEEWEKAQKEVEEEERRYYEEERKIIEDTVVPFTVSSSSADQLSTSSSMTEGSGTMNKIDLGNCQDEKQDRRWKKSFQGDDSDLLLKTRESDRLEEKGSLTEGALAHSGNPVSKGVHEDHQLDTEAGAPHCGTNPQLAQDPSQNQQTSNPTHSSEDVKPKTLPLDKSINHQIESPSERRKSISGKKLCSSCGLPLGKGAAMIIETLNLYFHIQCFRCGICKGQLGDAVSGTDVRIRNGLLNCNDCYMRSRSAGQPTTL

SEQ ID NO: 26985 - protein, 676 aa, Homo sapiens
MDKYDDLGLEASKFIEDLNMYEASKDGLFRVDKGAGNNPEFEETRRVFATKMAKIHLQQQQQQLLQEETLPRGSRGPVNGGGRLGPQARWEVVGSKLTVDGAAKPPLAASTGAPGAVTTLAAGQPPYPPQEQRSRPYLHGTRHGSQDCGSRESLATSEMSAFHQPGPCEDPSCLTHGDYYDNLSLASPKWGDKPGVSPSIGLSVGSGWPSSPGSDPPLPKPCGDHPLNHRQLSLSSSRSSEGSLGGQNSGIGGRSSEKPTGLWSTASSQRVSPGLPSPNLENGAPAVGPVQPRTPSVSAPLALSCPRQGGLPRSNSGLGGEVSGVMSKPNVDPQPWFQDGPKSYLSSSAPSSSPAGLDGSQQGAVPGLGPKPGCTDLGTGPKLSPTSLVHPVMSTLPELSCKEGPLGWSSDGSLGSVLLDSPSSPRVRLPCQPLVPGPELRPSAAELKLEALTQRLEREMDAHPKADYFGACVKCSKGVFGAGQACQAMGNLYHDTCFTCAACSRKLRGKAFYFVNGKVFCEEDFLYSGFQQSADRCFLCGHLIMDMILQALGKSYHPGCFRCVICNECLDGVPFTVDSENKIYCVRDYHKVLAPKCAACGLPILPPEGSDETIRVVSMDRDYHVECYHCEDCGLELNDEDGHRCYPLEDHLFCHSCHVKRLEKRPSSTALHQHHF

SEQ ID NO: 26986 - protein, 893 aa, Homo sapiens
MATEEFIIRIPPYHYIHVLDQNSNVSRVEVGPKTYIRQDNERVLFAPMRMVTVPPRHYCTVANPVSRDAQGLVLFDVTGQVRLRHADLEIRLAQDPFPLYPGEVLEKDITPLQVVLPNTALHLKALLDFEDKDGDKVVAGDEWLFEGPGTYIPRKEVEVVEIIQATIIRQNQALRLRARKECWDRDGKERVTGEEWLVTTVGAYLPAVFEEVLDLVDAVILTEKTALHLRARRNFRDFRGVSRRTGEEWLVTVQDTEAHVPDVHEEVLGVVPITTLGPHNYCVILDPVGPDGKNQLGQKRVVKGEKSFFLQPGEQLEQGIQDVYVLSEQQGLLLRALQPLEEGEDEEKVSHQAGDHWLIRGPLEYVPSAKVEVVEERQAIPLDENEGIYVQDVKTGKVRAVIGSTYMLTQDEVLWEKELPPGVEELLNKGQDPLADRGEKDTAKSLQPLAPRNKTRVVSYRVPHNAAVQVYDYREKRARVVFGPELVSLGPEEQFTVLSLSAGRPKRPHARRALCLLLGPDFFTDVITIETADHARLQLQLAYNWHFEVNDRKDPQETAKLFSVPDFVGDACKAIASRVRGAVASVTFDDFHKNSARIIRTAVFGFETSEAKGPDGMALPRPRDQAVFPQNGLVVSSVDVQSVEPVDQRTRDALQRSVQLAIEITTNSQEAAAKHEAQRLEQEARGRLERQKILDQSEAEKARKELLELEALSMAVESTGTAKAEAESRAEAARIEGEGSVLQAKLKAQALAIETEAELQRVQKVRELELVYARAQLELEVSKAQQLAEVEVKKFKQMTEAIGPSTIRDLAVAGPEMQVKLLQSLGLKSTLITDGSTPINLFNTAFGLLGMGPEGQPLGRRVASGPSPGEGISPQSAQAPQAPGDNHVVPVLR

SEQ ID NO: 26987 - protein, 96 aa, Homo sapiens
MTSALENYINRTVAVITSDGRMIVGTLKGFDQTINLILDESHERVFSSSQGVEQVVLGLYIVRGDNVAVIGEIDEETDSALDLGNIRAEPLNSVAH

SEQ ID NO: 26988 - protein, 178 aa, Homo sapiens
MEHKDDDDDDVSFAKWMSSFWGHSWREEDQRGLRERHRLQATSHRKTSLPCPLPVLPRIPSSDCHPRRHSHEDQEFRCRSHVRDYRKYSEDGSFKEPLESKGRSHSKIEKFSESFERQLCFRTKRSASLGPESRKERNERECLRMEIKSRKKVEEERSSRKEEHGEAHMAPLFEKGPE

SEQ ID NO: 26989 - protein, 2346 aa, Homo sapiens
MSNGYRTLSQHLNDLKKENFSLKLRIYFLEERMQQKYEASREDIYKRNIELKVEVESLKRELQDKKQHLDKTWADVENLNSQNEAELRRQFEERQQETEHVYELLENKIQLLQEESRLAKNEAARMAALVEAEKECNLELSEKLKGVTKNWEDVPGDQVKPDQYTEALAQRDKRIEELNQSLAAQERLVEQLSREKQQLLHLLEEPTSMEVQPMTEELLKQQKLNSHETTITQQSVSDSHLAELQEKIQQTEATNKILQEKLNEMSYELKCAQESSQKQDGTIQNLKETLKSRERETEELYQVIEGQNDTMAKLREMLHQSQLGQLHSSEGTSPAQQQVALLDLQSALFCSQLEIQKLQRVVRQKERQLADAKQCVQFVEAAAHESEQQKEASWKHNQELRKALQQLQEELQNKSQQLRAWEAEKYNEIRTQEQNIQHLNHSLSHKEQLLQEFRELLQYRDNSDKTLEANEMLLEKLRQRIHDKAVALERAIDEKFSALEEKEKELRQLRLAVRERDHDLERLRDVLSSNEATMQSMESLLRAKGLEVEQLSTTCQNLQWLKEEMETKFSRWQKEQESIIQQLQTSLHDRNKEVEDLSATLLCKLGPGQSEIAEELCQRLQRKERMLQDLLSDRNKQVLEHEMEIQGLLQSVSTREQESQAAAEKLVQALMERNSELQALRQYLGGRDSLMSQAPISNQQAEVTPTGRLGKQTDQGSMQIPSRDDSTSLTAKEDVSIPRSTLGDLDTVAGLEKELSNAKEELELMAKKERESQMELSALQSMMAVQEEELQVQAADMESLTRNIQIKEDLIKDLQMQLVDPEDIPAMERLTQEVLLLREKVASVESQGQEISGNRRQQLLLMLEGLVDERSRLNEALQAERQLYSSLVKFHAHPESSERDRTLQVELEGAQVLRSRLEEVLGRSLERLNRLETLAAIGGAAAGDDTEDTSTEFTDSIEEEAAHHSHQQLVKVALEKSLATVETQNPSFSPPSPMGGDSNRCLQEEMLHLRAEFHQHLEEKRKAEEELKELKAQIEEAGFSSVSHIRNTMLSLCLENAELKEQMGEAMSDGWEIEEDKEKGEVMVETVVTKEGLSESSLQAEFRKLQGKLKNAHNIINLLKEQLVLSSKEGNSKLTPELLVHLTSTIERINTELVGSPGKHQHQEEGNVTVRPFPRPQSLDLGATFTVDAHQLDNQSQPRDPGPQSAFSLPGSTQHLRSQLSQCKQRYQDLQEKLLLSEATVFAQANELEKYRVMLTGESLVKQDSKQIQVDLQDLGYETCGRSENEAEREETTSPECEEHNSLKEMVLMEGLCSEQGRRGSTLASSSERKPLENQLGKQEEFRVYGKSENILVLRKDIKDLKAQLQNANKVIQNLKSRVRSLSVTSDYSSSLERPRKLRAVGTLEGSSPHSVPDEDEGWLSDGTGAFYSPGLQAKKDLESLIQRVSQLEAQLPKNGLEEKLAEELRSASWPGKYDSLIQDQARELSYLRQKIREGRGICYLITRHAKDTVKSFEDLLRSNDIDYYLGQSFREQLAQGSQLTERLTSKLSTKDHKSEKDQAGLEPLALRLSRELQEKEKVIEVLQAKLDARSLTPSSSHALSDSHRSPSSTSFLSDELEACSDMDIVSEYTHYEEKKASPSHSDSIHHSSHSAVLSSKPSSTSASQGAKAESNSNPISLPTPQNTPKEANQAHSGFHFHSIPKLASLPQAPLPSAPSSFLPFSPTGPLLLGCCETPVVSLAEAQQELQMLQKQLGESASTVPPASTATLLSNDLEADSSYYLNSAQPHSPPRGTIELGRILEPGYLGSSGKWDVMRPQKGSVSGDLSSGSSVYQLNSKPTGADLLEEHLGEIRNLRQRLEESICINDRLREQLEHRLTSTARGRGSTSNFYSQGLESIPQLCNENRVLREDNRRLQAQLSHVSREHSQETESLREALLSSRSHLQELEKELEHQKVERQQLLEDLREKQQEVLHFREERLSLQENDSRLQHKLVLLQQQCEEKQQLFESLQSELQIYEALYGNSKKGLKAYSLDACHQIPLSSDLSHLVAEVRALRGQLEQSIQGNNCLRLQLQQQLESGAGKASLSPSSINQNFPASTDPGNKQLLLQDSAVSPPVRDVGMNSPALVFPSSASSTPGSETPIINRANGLGLDTSPVMKTPPKLEGDATDGSFANKHGRHVIGHIDDYSALRQQIAEGKLLVKKIVSLVRSACSFPGLEAQGTEVLGSKGIHELRSSTSALHHALEESASLLTMFWRAALPSTHIPVLPGKVGESTERELLELRTKVSKQERLLQSTTEHLKNANQQKESMEQFIVSQLTRTHDVLKKARTNLEVKSLRALPCTPAL

SEQ ID NO: 26990 - protein, 1132 aa, Homo sapiens
MKEICRICARELCGNQRRWIFHTASKLNLQVLLSHVLGKDVPRDGKAEFACSKCAFMLDRIYRFDTVIARIEALSIERLQKLLLEKDRLKFCIASMYRKNNDDSGAEIKAGNGTVDMSVLPDARYSALLQEDFAYSGFECWVENEDQIQEPHSCHGSEGPGNRPRRCRGCAALRVADSDYEAICKVPRKVARSISCGPSSRWSTSICTEEPALSEVGPPDLASTKVPPDGESMEEETPGSSVESLDASVQASPPQQKDEETERSAKELGKCDCCSDDQAPQHGCNHKLELALSMIKGLDYKPIQSPRGSRLPIPVKSSLPGAKPGPSMTDGVSSGFLNRSLKPLYKTPVSYPLELSDLQELWDDLCEDYLPLRVQPMTEELLKQQKLNSHETTITQQSVSDSHLAELQEKIQQTEATNKILQEKLNEMSYELKCAQESSQKQDGTIQNLKETLKSRERETEELYQVIEGQNDTMAKLREMLHQSQLGQLHSSEGTSPAQQQVALLDLQSALFCSQLEIQKLQRVVRQKERQLADAKQCVQFVEAAAHESEQQKEASWKHNQELRKALQQLQEELQNKSQQLRAWEAEKYNEIRTQEQNIQHLNHSLSHKEQLLQEFRELLQYRDNSDKTLEANEMLLEKLRQRIHDKAVALERAIDEKFSALEEKEKELRQLRLAVRERDHDLERLRDVLSSNEATMQSMESLLRAKGLEVEQLSTTCQNLQWLKEEMETKFSRWQKEQESIIQQLQTSLHDRNKEVEDLSATLLCKLGPGQSEIAEELCQRLQRKERMLQDLLSDRNKQVLEHEMEIQGLLQSVSTREQESQAAAEKLVQALMERNSELQALRQYLGGRDSLMSQAPISNQQAEVTPTGRLGKQTDQGSMQIPSRDDSTSLTAKEDVSIPRSTLGDLDTVAGLEKELSNAKEELELMAKKERESQMELSALQSMMAVQEEELQVQAADMESLTRNIQIKEDLIKDLQMQLVDPEDIPAMERLTQEVLLLREKVASVESQGQEISGNRRQQLLLMLEGLVDERSRLNEALQAERQLYSSLVKFHAHPESSERDRTLQVELEGAQVLRSRLEEVLGRSLERLNRLETLAAIGGAAAGDDTEDTSTEFTDSIEEEAAHHSHQQL

SEQ ID NO: 26991 - protein, 2240 aa, Homo sapiens
MEQTWTRDYFAEDDGEMVPRTSHTAAFLSDTKDRGPPVQSQIWRSGEKVPFVQTYSLRAFEKPPQVQTQALRDFEKHLNDLKKENFSLKLRIYFLEERMQQKYEASREDIYKRNIELKVEVESLKRELQDKKQHLDKTWADVENLNSQNEAELRRQFEERQQETEHVYELLENKIQLLQEESRLAKNEAARMAALVEAEKECNLELSEKLKGVTKNWEDVPGDQVKPDQYTEALAQRDKRIEELNQSLAAQERLVEQLSREKQQLLHLLEEPTSMEVQPMTEELLKQQKLNSHETTITQQSVSDSHLAELQEKIQQTEATNKILQEKLNEMSYELKCAQESSQKQDGTIQNLKETLKSRERETEELYQVIEGQNDTMAKLREMLHQSQLGQLHSSEGTSPAQQQVALLDLQSALFCSQLEIQKLQRVVRQKERQLADAKQCVQFVEAAAHESEQQKEASWKHNQELRKALQQLQEELQNKSQQLRAWEAEKYNEIRTQEQNIQHLNHSLSHKEQLLQEFRELLQYRDNSDKTLEANEMLLEKLRQRIHDKAVALERAIDEKFSALEEKEKELRQLRLAVRERDHDLERLRDVLSSNEATMQSMESLLRAKGLEVEQLSTTCQNLQWLKEEMETKFSRWQKEQESIIQQLQTSLHDRNKEVEDLSATLLCKLGPGQSEIAEELCQRLQRKERMLQDLLSDRNKQVLEHEMEIQGLLQSVSTREQESQAAAEKLVQALMERNSELQALRQYLGGRDSLMSQAPISNQQAEVTPTGRLGKQTDQGSMQIPSRDDSTSLTAKEDVSIPRSTLGDLDTVAGLEKELSNAKEELELMAKKERESQMELSALQSMMAVQEEELQVQAADMESLTRNIQIKEDLIKDLQMQLVDPEDIPAMERLTQEVLLLREKVASVESQGQEISGNRRQQLLLMLEGLVDERSRLNEALQAERQLYSSLVKFHAHPESSERDRTLQVELEGAQVLRSRLEEVLGRSLERLNRLETLAAIGGAAAGDDTEDTSTEFTDSIEEEAAHHSHQQLVKVALEKSLATVETQNPSFSPPSPMGGDSNRCLQEEMLHLRAEFHQHLEEKRKAEEELKELKAQIEEAGFSSVSHIRNTMLSLCLENAELKEQMGEAMSDGWEIEEDKEKGELDNQSQPRDPGPQSAFSLPGSTQHLRSQLSQCKQRYQDLQEKLLLSEATVFAQANELEKYRVMLTGESLVKQDSKQIQVDLQDLGYETCGRSENEAEREETTSPECEEHNSLKEMVLMEGLCSEQGRRGSTLASSSERKPLENQLGKQEEFRVYGKSENILVLRKDIKDLKAQLQNANKVIQNLKSRVRSLSVTSDYSSSLERPRKLRAVGTLEGSSPHSVPDEDEGWLSDGTGAFYSPGLQAKKDLESLIQRVSQLEAQLPKNGLEEKLAEELRSASWPGKYDSLIQDQARELSYLRQKIREGRGICYLITRHAKDTVKSFEDLLRSNDIDYYLGQSFREQLAQGSQLTERLTSKLSTKDHKSEKDQAGLEPLALRLSRELQEKEKVIEVLQAKLDARSLTPSSSHALSDSHRSPSSTSFLSDELEACSDMDIVSEYTHYEEKKASPSHSDSIHHSSHSAVLSSKPSSTSASQGAKAESNSNPISLPTPQNTPKEANQAHSGASTVPPASTATLLSNDLEADSSYYLNSAQPHSPPRGTIELGRILEPGYLGSSGKWDVMRPQKGSVSGDLSSGSSVYQLNSKPTGADLLEEHLGEIRNLRQRLEESICINDRLREQLEHRLTSTARGRGSTSNFYSQGLESIPQLCNENRVLREDNRRLQAQLSHVSREHSQETESLREALLSSRSHLQELEKELEHQKVERQQLLEDLREKQQEVLHFREERLSLQENDSRLQHKLVLLQQQCEEKQQLFESLQSELQIYEALYGNSKKGLKAYSLDACHQIPLSSDLSHLVAEVRALRGQLEQSIQGNNCLRLQLQQQLESGAGKASLSPSSINQNFPASTDPGNKQLLLQDSAVSPPVRDVGMNSPALVFPSSASSTPGSETPIINRANGLGLDTSPVMKTPPKLEGDATDGSFANKHGRHVIGHIDDYSALRQQIAEGKLLVKKIVSLVRSACSFPGLEAQGTEVLGSKGIHELRSSTSALHHALEESASLLTMFWRAALPSTHIPVLPGKVGESTERELLELRTKVSKQERLLQSTTEHLKNANQQKESMEQFIVSQLTRTHDVLKKARTNLEVKSLRALPCTPAL

SEQ ID NO: 26992 - protein, 2362 aa, Homo sapiens
MSNGYRTLSQHLNDLKKENFSLKLRIYFLEERMQQKYEASREDIYKRNIELKVEVESLKRELQDKKQHLDKTWADVENLNSQNEAELRRQFEERQQETEHVYELLENKIQLLQEESRLAKNEAARMAALVEAEKECNLELSEKLKGVTKNWEDVPGDQVKPDQYTEALAQRDKRIEELNQSLAAQERLVEQLSREKQQLLHLLEEPTSMEVQPMTEELLKQQKLNSHETTITQQSVSDSHLAELQEKIQQTEATNKILQEKLNEMSYELKCAQESSQKQDGTIQNLKETLKSRERETEELYQVIEGQNDTMAKLREMLHQSQLGQLHSSEGTSPAQQQVALLDLQSALFCSQLEIQKLQRVVRQKERQLADAKQCVQFVEAAAHESEQQKEASWKHNQELRKALQQLQEELQNKSQQLRAWEAEKYNEIRTQEQNIQHLNHSLSHKEQLLQEFRELLQYRDNSDKTLEANEMLLEKLRQRIHDKAVALERAIDEKFSALEEKEKELRQLRLAVRERDHDLERLRDVLSSNEATMQSMESLLRAKGLEVEQLSTTCQNLQWLKEEMETKFSRWQKEQESIIQQLQTSLHDRNKEVEDLSATLLCKLGPGQSEIAEELCQRLQRKERMLQDLLSDRNKQVLEHEMEIQGLLQSVSTREQESQAAAEKLVQALMERNSELQALRQYLGGRDSLMSQAPISNQQAEVTPTGRLGKQTDQGSMQIPSRDDSTSLTAKEDVSIPRSTLGDLDTVAGLEKELSNAKEELELMAKKERESQMELSALQSMMAVQEEELQVQAADMESLTRNIQIKEDLIKDLQMQLVDPEDIPAMERLTQEVLLLREKVASVESQGQEISGNRRQQLLLMLEGLVDERSRLNEALQAERQLYSSLVKFHAHPESSERDRTLQVELEGAQVLRSRLEEVLGRSLERLNRLETLAAIGGAAAGDDTEDTSTEFTDSIEEEAAHHSHQQLVKVALEKSLATVETQNPSFSPPSPMGGDSNRCLQEEMLHLRAEFHQHLEEKRKAEEELKELKAQIEEAGFSSVSHIRNTMLSLCLENAELKEQMGEAMSDGWEIEEDKEKGEVMVETVVTKEGLSESSLQAEFRKLQGKLKNAHNIINLLKEQLVLSSKEGNSKLTPELLVHLTSTIERINTELVGSPGKHQHQEEGNVTVRPFPRPQSLDLGATFTVDAHQLDNQSQPRDPGPQSAFSLPGSTQHLRSQLSQCKQRYQDLQEKLLLSEATVFAQANELEKYRVMLTGESLVKQDSKQIQVDLQDLGYETCGRSENEAEREETTSPECEEHNSLKEMVLMEGLCSEQGRRGSTLASSSERKPLENQLGKQEEFRVYGKSENILVLRKDIKDLKAQLQNANKVIQNLKSRVRSLSVTSDYSSSLERPRKLRAVGTLEGSSPHSVPDEDEGWLSDGTGAFYSPGLQAKKDLESLIQRVSQLEAQLPKNGLEEKLAEELRSASWPGKYDSLIQDQARELSYLRQKIREGRGICYLITRHAKDTVKSFEDLLRSNDIDYYLGQSFREQLAQGSQLTERLTSKLSTKDHKSEKDQAGLEPLALRLSRELQEKEKVIEVLQAKLDARSLTPSSSHALSDSHRSPSSTSFLSDELEACSDMDIVSEYTHYEEKKASPSHSDSIHHSSHSAVLSSKPSSTSASQGAKAESNSNPISLPTPQNTPKEANQAHSGFHFHSIPKLASLPQAPLPSAPSSFLPFSPTGPLLLGCCETPVVSLAEAQQELQMLQKQLGESASTVPPASTATLLSNDLEADSSYYLNSAQPHSPPRGTIELGRILEPGYLGSSGKWDVMRPQKGSVSGDLSSGSSVYQLNSKPTGADLLEEHLGEIRNLRQRLEESICINDRLREQLEHRLTSTARGRGSTSNFYSQGLESIPQLCNENRVLREDNRRLQAQLSHVSREHSQETESLREALLSSRSHLQELEKELEHQKVERQQLLEDLREKQQEVLHFREERLSLQENDSRLQHKLVLLQQQCEEKQQLFESLQSELQIYEALYGNSKKGLKAYSLDACHQIPLSSDLSHLVAEVRALRGQLEQSIQGNNCLRLQLQQQLESGAGKASLSPSSINQNFPASTDPGNKQLLLQDSAVSPPVRDVGMNSPALVFPSSASSTPGSETPIINRANGLGLDTSPVMKTPPKLEGDATDGSFANKHGRHVIGHIDDYSALRQQIAEGKLLVKKIVSLVRSACSFPGLEAQGTEVLGSKGIHELRSSTSALHHALEESASLLTMFWRAALPSTHIPVLPGKVGESTERELLELRTKVSKQERLLQSTTEHLKNANQQKESMEQFIVSQLTRTHDVLKKARTNLEEPCKKRSHQKSLKQQERWACPPFVQLPIC

SEQ ID NO: 26993 - protein, 969 aa, Homo sapiens
MSNGYRTLSQHLNDLKKENFSLKLRIYFLEERMQQKYEASREDIYKRNIELKVEVESLKRELQDKKQHLDKTWADVENLNSQNEAELRRQFEERQQETEHVYELLENKIQLLQEESRLAKNEAARMAALVEAEKECNLELSEKLKGVTKNWEDVPGDQVKPDQYTEALAQRDKRIEELNQSLAAQERLVEQLSREKQQLLHLLEEPTSMEVQPMTEELLKQQKLNSHETTITQQSVSDSHLAELQEKIQQTEATNKILQEKLNEMSYELKCAQESSQKQDGTIQNLKETLKSRERETEELYQVIEGQNDTMAKLREMLHQSQLGQLHSSEGTSPAQQQVALLDLQSALFCSQLEIQKLQRVVRQKERQLADAKQCVQFVEAAAHESEQQKEASWKHNQELRKALQQLQEELQNKSQQLRAWEAEKYNEIRTQEQNIQHLNHSLSHKEQLLQEFRELLQYRDNSDKTLEANEMLLEKLRQRIHDKAVALERAIDEKFSALEEKEKELRQLRLAVRERDHDLERLRDVLSSNEATMQSMESLLRAKGLEVEQLSTTCQNLQWLKEEMETKFSRWQKEQESIIQQLQTSLHDRNKEVEDLSATLLCKLGPGQSEIAEELCQRLQRKERMLQDLLSDRNKQVLEHEMEIQGLLQSVSTREQESQAAAEKLVQALMERNSELQALRQYLGGRDSLMSQAPISNQQAEVTPTGRLGKQTDQGSMQIPSRDDSTSLTAKEDVSIPRSTLGDLDTVAGLEKELSNAKEELELMAKKERESQMELSALQSMMAVQEEELQVQAADMESLTRNIQIKEDLIKDLQMQLVDPEDIPAMERLTQEVLLLREKVASVESQGQEISGNRRQQLLLMLEGLVDERSRLNEALQAERQLYSSLVKFHAHPESSERDRTLQVELEGAQVLRSRLEEVLGRSLERLNRLETLAAIGGAAAGDDTEDTSTEFTDSIEEEAAHHSHQQL

SEQ ID NO: 26994 - protein, 988 aa, Homo sapiens
MSNGYRTLSQHLNDLKKENFSLKLRIYFLEERMQQKYEASREDIYKRNIELKVEVESLKRELQDKKQHLDKTWADVENLNSQNEAELRRQFEERQQETEHVYELLENKIQLLQEESRLAKNEAARMAALVEAEKECNLELSEKLKGVTKNWEDVPGDQVKPDQYTEALAQRDKRIEELNQSLAAQERLVEQLSREKQQLLHLLEEPTSMEVQPMTEELLKQQKLNSHETTITQQSVSDSHLAELQEKIQQTEATNKILQEKLNEMSYELKCAQESSQKQDGTIQNLKETLKSRERETEELYQVIEGQNDTMAKLREMLHQSQLGQLHSSEGTSPAQQQVALLDLQSALFCSQLEIQKLQRVVRQKERQLADAKQCVQFVEAAAHESEQQKEASWKHNQELRKALQQLQEELQNKSQQLRAWEAEKYNEIRTQEQNIQHLNHSLSHKEQLLQEFRELLQYRDNSDKTLEANEMLLEKLRQRIHDKAVALERAIDEKFSALEEKEKELRQLRLAVRERDHDLERLRDVLSSNEATMQSMESLLRAKGLEVEQLSTTCQNLQWLKEEMETKFSRWQKEQESIIQQLQTSLHDRNKEVEDLSATLLCKLGPGQSEIAEELCQRLQRKERMLQDLLSDRNKQVLEHEMEIQGLLQSVSTREQESQAAAEKLVQALMERNSELQALRQYLGGRDSLMSQAPISNQQAEVTPTGRLGKQTDQGSMQIPSRDDSTSLTAKEDVSIPRSTLGDLDTVAGLEKELSNAKEELELMAKKERESQMELSALQSMMAVQEEELQVQAADMESLTRNIQIKEDLIKDLQMQLVDPEDIPAMERLTQEVLLLREKVASVESQGQEISGNRRQQLLLMLEGLVDERSRLNEALQAERQLYSSLVKFHAHPESSERDRTLQVELEGAQVLRSRLEEVLGRSLERLNRLETLAAIGGAAAGDDTEDTSTEFTDSIEEEAAHHSHQQVSQCQGLGLPGWTAHSPSEV

SEQ ID NO: 26995 - protein, 310 aa, Homo sapiens
MKGTDSGSCCRRRCDFGCCCRASRRAHYTPYRSGDATRTPQSPRQTPSRERRRPEPAGSWAAAAEEEEAAAAATPWMRDYFAEDDGEMVPRTSHTAAFLSDTKDRGPPVQSQIWRSGEKVPFVQTYSLRAFEKPPQVQTQALRDFEKHLNDLKKENFSLKLRIYFLEERMQQKYEASREDIYKRNIELKVEVESLKRELQDKKQHLDKTWADVENLNSQNEAELRRQFEERQQETEHVYELLENKIQLLQEESRLAKNEAARMAALVEAEKECNLELSEKLKGVTKNWEDVPGDQVKPDQYTEALAQRDK

SEQ ID NO: 26996 - protein, 311 aa, Homo sapiens
MKGTDSGSCCRRRCDFGCCCRASRRAHYTPYRSGDATRTPQSPRQTPSRERRRPEPAGSWAAAAEEEEAAAAATPWMRDYFAEDDGEMVPRTSHTAAFLSDTKDRGPPVQSQIWRSGEKVPFVQTYSLRAFEKPPQVQTQALRDFEKHLNDLKKENFSLKLRIYFLEERMQQKYEASREDIYKRNIELKVEVESLKRELQDKKQHLDKTWADVENLNSQNEAELRRQFEERQQETEHVYELLENKIQLLQEESRLAKNEAARMAALVEAEKECNLELSEKLKGVTKNWEDVPGDQVKPDQYTEALAQRDKI

SEQ ID NO: 26997 - protein, 174 aa, Homo sapiens
MSNGYRTLSQHLNDLKKENFSLKLRIYFLEERMQQKYEASREDIYKRNIELKVEVESLKRELQDKKQHLDKTWADVENLNSQNEAELRRQFEERQQETEHVYELLENKIQLLQEESRLAKNEAARMAALVEAEKECNLELSEKLKGVTKNWEDVPGDQVKPDQYTEALAQRDKI

SEQ ID NO: 26998 - protein, 173 aa, Homo sapiens
MSNGYRTLSQHLNDLKKENFSLKLRIYFLEERMQQKYEASREDIYKRNIELKVEVESLKRELQDKKQHLDKTWADVENLNSQNEAELRRQFEERQQETEHVYELLENKIQLLQEESRLAKNEAARMAALVEAEKECNLELSEKLKGVTKNWEDVPGDQVKPDQYTEALAQRDK

SEQ ID NO: 26999 - protein, 240 aa, Homo sapiens
MEQTWTRDYFAEDDGEMVPRTSHTAAFLSDTKDRGPPVQSQIWRSGEKVPFVQTYSLRAFEKPPQVQTQALRDFEKHLNDLKKENFSLKLRIYFLEERMQQKYEASREDIYKRNIELKVEVESLKRELQDKKQHLDKTWADVENLNSQNEAELRRQFEERQQETEHVYELLENKIQLLQEESRLAKNEAARMAALVEAEKECNLELSEKLKGVTKNWEDVPGDQVKPDQYTEALAQRDKI

SEQ ID NO: 27000 - protein, 1116 aa, Homo sapiens
MKEICRICARELCGNQRRWIFHTASKLNLQVLLSHVLGKDVPRDGKAEFACSKCAFMLDRIYRFDTVIARIEALSIERLQKLLLEKDRLKFCIASMYRKNNDDSGAEIKAGNGTVDMSVLPDARYSALLQEDFAYSGFECWVENEDQIQEPHSCHGSEGPGNRPRRCRGCAALRVADSDYEAICKVPRKVARSISCGPSSRWSTSICTEEPALSEVGPPDLASTKVPPDGESMEEETPGSSVESLDASVQASPPQQKDEETERSAKELGKCDCCSDDQAPQHGCNHKLELALSMIKGLDYKPIQSPRGSRLPIPVKSSLPGAKPGPSMTDGVSSGFLNRSLKPLYKTPVSYPLELSDLQELWDDLCEDYLPLRVQPMTEELLKQQKLNSHETTITQQSVSDSHLAELQEKIQQTEATNKILQEKLNEMSYELKCAQESSQKQDGTIQNLKETLKSRERETEELYQVIEGQNDTMAKLREMLHQSQLGQLHSSEGTSPAQQQVALLDLQSALFCSQLEIQKLQRVVRQKERQLADAKQCVQFVEAAAHESEQQKEASWKHNQELRKALQQLQEELQNKSQQLRAWEAEKYNEIRTQEQNIQHLNHSLSHKEQLLQEFRELLQYRDNSDKTLEANEMLLEKLRQRIHDKAVALERAIDEKFSALEEKEKELRQLRLAVRERDHDLERLRDVLSSNEATMQSMESLLRAKGLEVEQLSTTCQNLQWLKEEMETKFSRWQKEQESIIQQLQTSLHDRNKEVEDLSATLLCKLGPGQSEIAEELCQRLQRKERMLQDLLSDRNKQVLEHEMEIQGLLQSVSTREQESQAAAEKLVQALMERNSELQALRQYLGGRDSLMSQAPISNQQAEVTPTGRLGKQTDQGSMQIPSRDDSTSLTAKEDVSIPRSTLGDLDTVAGLEKELSNAKEELELMAKKERESQMELSALQSMMAVQEEELQVQAADMESLTRNIQIKEDLIKDLQMQLVDPEDIPAMERLTQEVLLLREKVASVESQGQEISGNRRQQLLLMLEGLVDERSRLNEALQAERQLYSSLVKFHAHPESSERDRTLQVELEGAQVLRSRLEEVLGRSLERLNRLETLAAIGGGELESVRIHHKHAY

SEQ ID NO: 27001 - protein, 1136 aa, Homo sapiens
MAKMEVKTSLLDNMIGVGDMVLLEPLNEETFINNLKKRFDHSEIYTYIGSVVISVNPYRSLPIYSPEKVEEYRNRNFYELSPHIFALSDEAYRSLRDQDKDQCILITGESGAGKTEASKLVMSYVAAVCGKGAEVNQVKEQLLQSNPVLEAFGNAKTVRNDNSSRFGKYMDIEFDFKGDPLGGVISNYLLEKSRVVKQPRGERNFHVFYQLLSGASEELLNKLKLERDFSRYNYLSLDSAKVNGVDDAANFRTVRNAMQIVGFMDHEAESVLAVVAAVLKLGNIEFKPESRVNGLDESKIKDKNELKEICELTGIDQSVLERAFSFRTVEAKQEKVSTTLNVAQAYYARDALAKNLYSRLFSWLVNRINESIKAQTKVRKKVMGVLDIYGFEIFEDNSFEQFIINYCNEKLQQIFIELTLKEEQEEYIREDIEWTHIDYFNNAIICDLIENNTNGILAMLDEECLRPGTVTDETFLEKLNQVCATHQHFESRMSKCSRFLNDTSLPHSCFRIQHYAGKVLYQVEGFVDKNNDLLYRDLSQAMWKASHALIKSLFPEGNPAKINLKRPPTAGSQFKASVATLMKNLQTKNPNYIRCIKPNDKKAAHIFNEALVCHQIRYLGLLENVRVRRAGYAFRQAYEPCLERYKMLCKQTWPHWKGPARSGVEVLFNELEIPVEEYSFGRSKIFIRNPRTLFKLEDLRKQRLEDLATLIQKIYRGWKCRTHFLLMKKSQIVIAAWYRRYAQQKRYQQTKSSALVIQSYIRGWKARKILRELKHQKRCKEAVTTIAAYWHGTQARRELRRLKEEARNKHAIAVIWAYWLGSKARRELKRLKEEARRKHAVAVIWAYWLGLKVRREYRKFFRANAGKKIYEFTLQRIVQKYFLEMKNKMPSLSPIDKNWPSRPYLFLDSTHKELKRIFHLWRCKKYRDQFTDQQKLIYEEKLEASELFKDKKALYPSSVGQPFQGAYLEINKNPKYKKLKDAIEEKIIIAEVVNKINRANGKSTSRIFLLTNNNLLLADQKSGQIKSEVPLVDVTKVSMSSQNDGFFAVHLKEGSEAASKGDFLFSSDHLIEMATKLYRTTLSQTKQKLNIEISDEFLVQFRQDKVCVKFIQGNQKNGSVPTCKRKNNRLLEVAVP

SEQ ID NO: 27002 - protein, 1078 aa, Homo sapiens
MAKMEVKTSLLDNMIGVGDMVLLEPLNEETFINNLKKRFDHSEIYTYIGSVVISVNPYRSLPIYSPEKVEEYRNRNFYELSPHIFALSDEAYRSLRDQDKDQCILITGESGAGKTEASKLVMSYVAAVCGKGAEVNQVKEQLLQSNPVLEAFGNAKTVRNDNSSRFGKYMDIEFDFKGDPLGGVISNYLLEKSRVVKQPRGERNFHVFYQLLSGASEELLNKLKLERDFSRYNYLSLDSAKVNGVDDAANFRTVRNAMQIVGFMDHEAESVLAVVAAVLKLGNIEFKPESRVNGLDESKIKDKNELKEICELTGIDQSVLERAFSFRTVEAKQEKVSTTLNVAQAYYARDALAKNLYSRLFSWLVNRINESIKAQTKVRKKVMGVLDIYGFEIFEDNSFEQFIINYCNEKLQQIFIELTLKEEQEEYIREDIEWTHIDYFNNAIICDLIENNTNGILAMLDEECLRPGTVTDETFLEKLNQVCATHQHFESRMSKCSRFLNDTSLPHSCFRIQHYAGKVLYQVEGFVDKNNDLLYRDLSQAMWKASHALIKSLFPEGNPAKINLKRPPTAGSQFKASVATLMKNLQTKNPNYIRCIKPNDKKAAHIFNEALVCHQIRYLGLLENVRVRRAGYAFRQAYEPCLERYKMLCKQTWPHWKGPARSGVEVLFNELEIPVEEYSFGRSKIFIRNPRTLFKLEDLRKQRLEDLATLIQKIYRGWKCRTHFLLMKKSQIVIAAWYRRYAQQKRYQQTKSSALVIQSYIRGWKARKILRELKHQKRCKEAVTTIAAYWHGTQVRREYRKFFRANAGKKIYEFTLQRIVQKYFLEMKNKMPSLSPIDKNWPSRPYLFLDSTHKELKRIFHLWRCKKYRDQFTDQQKLIYEEKLEASELFKDKKALYPSSVGQPFQGAYLEINKNPKYKKLKDAIEEKIIIAEVVNKINRANGKSTSRIFLLTNNNLLLADQKSGQIKSEVPLVDVTKVSMSSQNDGFFAVHLKEGSEAASKGDFLFSSDHLIEMATKLYRTTLSQTKQKLNIEISDEFLVQFRQDKVCVKFIQGNQKNGSVPTCKRKNNRLLEVAVP

SEQ ID NO: 27003 - protein, 633 aa, Homo sapiens
MPLTPTVQGFQWTLRGPDVETSPFGAPRAASHGVGRHQELRDPTVPGPTSSATNVSMVVSAGPWSGEKAEMNILEINKKSRPQLAENKQQFRNLKQKCLVTQVAYFLANRQNNYDYEDCKDLIKSMLRDERLLTEEKLAEELGQAEELRQYKVLVHSQERELTQLREKLQEGRDASRSLNQHLQALLTPDEPDNSQGRDLREQLAEGCRLAQHLVQKLSPENDDDEDEDVKVEEAEKVQELYAPREVQKAEEKEVPEDSLEECAITCSNSHHPCESNQPYGNTRITFEEDQVDSTLIDSSSHDEWLDAVCIIPENESDHEQEEEKGPVSPRNLQESEEEEAPQESWDEGDWTLSIPPDMSASYQSDRSTFHSVEEQQVGLALDIGRHWCDQVKKEDQEATSPRLSRELLDEKEPEVLQDSLDRFYSTPFEYLELPDLCQPYRSDFYSLQEQHLGLALDLDRMKKDQEEEEDQGPPCPRLSRELPEVVEPEDLQDSLDRWYSTPFSYPELPDSCQPYGSCFYSLEEEHVGFSLDVDEIEKYQEGEEDQKPPCPRLNEVLMEAEEPEVLQDSLDRCYSTTSTYFQLHASFQQYRSAFYSFEEQDVSLALDVDNRFFTLTVIRHHLAFQMGVIFPH

SEQ ID NO: 27004 - protein, 577 aa, Homo sapiens
MVVSAGPWSGEKAEMNILEINKKSRPQLAENKQQFRNLKQKCLVTQVAYFLANRQNNYDYEDCKDLIKSMLRDERLLTEEKLAEELGQAEELRQYKVLVHSQERELTQLREKLQEGRDASRSLNQHLQALLTPDEPDNSQGRDLREQLAEGCRLAQHLVQKLSPENDDDEDEDVKVEEAEKVQELYAPREVQKAEEKEVPEDSLEECAITCSNSHHPCESNQPYGNTRITFEEDQVDSTLIDSSSHDEWLDAVCIIPENESDHEQEEEKGPVSPRNLQESEEEEAPQESWDEGDWTLSIPPDMSASYQSDRSTFHSVEEQQVGLALDIGRHWCDQVKKEDQEATSPRLSRELLDEKEPEVLQDSLDRFYSTPFEYLELPDLCQPYRSDFYSLQEQHLGLALDLDRMKKDQEEEEDQGPPCPRLSRELPEVVEPEDLQDSLDRWYSTPFSYPELPDSCQPYGSCFYSLEEEHVGFSLDVDEIEKYQEGEEDQKPPCPRLNEVLMEAEEPEVLQDSLDRCYSTTSTYFQLHASFQQYRSAFYSFEEQDVSLALDVDNRFFTLTVIRHHLAFQMGVIFPH

SEQ ID NO: 27005 - protein, 621 aa, Homo sapiens
MPLTPTVQGFQWTLRGPDVETSPFGAPRAASHGVGRHQELRDPTVPGPTSSATNVSMVVSAGPWSGEKAEMNILEINKKSRPQLAENKQQFRNLKQKCLVTQVAYFLANRQNNYDYEDCKDLIKSMLRDERLLTEEKLAEELGQAEELRQYKVLVHSQERELTQLREKLQEGRDASRSLNQHLQALLTPDEPDNSQGRDLREQLAEGCRLAQHLVQKLSPENDDDEDEDVKVEEAEKVQELYAPREVQKAEEKEVPEDSLEECAITCSNSHHPCESNQPYGNTRITFEEDQVDSTLIDSSSHDEWLDAVCIIPENESDHEQEEEKGPVSPRSSGRFCCLISVGYIFCHPCPAWLIRNLQESEEEEAPQESWDEGHWCDQVKKEDQEATSPRLSRELLDEKEPEVLQDSLDRFYSTPFEYLELPDLCQPYRSDFYSLQEQHLGLALDLDRMKKDQEEEEDQGPPCPRLSRELPEVVEPEDLQDSLDRWYSTPFSYPELPDSCQPYGSCFYSLEEEHVGFSLDVDEIEKYQEGEEDQKPPCPRLNEVLMEAEEPEVLQDSLDRCYSTTSTYFQLHASFQQYRSAFYSFEEQDVSLALDVDNRFFTLTVIRHHLAFQMGVIFPH

SEQ ID NO: 27006 - protein, 275 aa, Homo sapiens
MSASYQSDRSTFHSVEEQQVGLALDIGRHWCDQVKKEDQEATSPRLSRELLDEKEPEVLQDSLDRFYSTPFEYLELPDLCQPYRSDFYSLQEQHLGLALDLDRMKKDQEEEEDQGPPCPRLSRELPEVVEPEDLQDSLDRWYSTPFSYPELPDSCQPYGSCFYSLEEEHVGFSLDVDEIEKYQEGEEDQKPPCPRLNEVLMEAEEPEVLQDSLDRCYSTTSTYFQLHASFQQYRSAFYSFEEQDVSLALDVDNRFFTLTVIRHHLAFQMGVIFPH

SEQ ID NO: 27007 - protein, 563 aa, Homo sapiens
MPLTPTVQGFQWTLRGPDVETSPFGAPRAASHGVGRHQELRDPTDYEDCKDLIKSMLRDERLLTEEKLAEELGQAEELRQYKVLVHSQERELTQLREKLQEGRDASRSLNQHLQALLTPDEPDNSQGRDLREQLAEGCRLAQHLVQKLSPENDDDEDEDVKVEEAEKVQELYAPREVQKAEEKEVPEDSLEECAITCSNSHHPCESNQPYGNTRITFEEDQVDSTLIDSSSHDEWLDAVCIIPENESDHEQEEEKGPVSPRNLQESEEEEAPQESWDEGDWTLSIPPDMSASYQSDRSTFHSVEEQQVGLALDIGRHWCDQVKKEDQEATSPRLSRELLDEKEPEVLQDSLDRFYSTPFEYLELPDLCQPYRSDFYSLQEQHLGLALDLDRMKKDQEEEEDQGPPCPRLSRELPEVVEPEDLQDSLDRWYSTPFSYPELPDSCQPYGSCFYSLEEEHVGFSLDVDEIEKYQEGEEDQKPPCPRLNEVLMEAEEPEVLQDSLDRCYSTTSTYFQLHASFQQYRSAFYSFEEQDVSLALDVDNRFFTLTVIRHHLAFQMGVIFPH

SEQ ID NO: 27008 - protein, 306 aa, Homo sapiens
MPEAGFQATNAFTECKFTCTSGKCLYLGSLVCNQQNDCGDNSDEENCLLVTEHPPPGIFNSELEFAQIIIIVVVVTVMVVVIVCLLNHYKVSTRSFINRPNQSRRREDGLPQEGCLWPSDSAAPRLGASEIMHAPRSRDRFTAPSFIQRDRFSRFQPTYPYVQHEIDLPPTISLSDGEEPPPYQGPCTLQLRDPEQQMELNRESVRAPPNRTIFDSDLIDIAMYSGGPCPPSSNSGISASTCSSNGRMEGPPPTYSEVMGHHPGASFLHHQRSNAHRGSRLQFQQNNAESTIVPIKGKDRKPGNLV

SEQ ID NO: 27009 - protein, 288 aa, Homo sapiens
MPEAGFQATNAFTECKFTCTSGKCLYLGSLVCNQQNDCGDNSDEENCLLVTEHPPPGIFNSELEFAQIIIIVVVVTVMVVVIVCLLNHYKVSTRSFINRPNQSRRREDGLPQIMHAPRSRDRFTAPSFIQRDRFSRFQPTYPYVQHEIDLPPTISLSDGEEPPPYQGPCTLQLRDPEQQMELNRESVRAPPNRTIFDSDLIDIAMYSGGPCPPSSNSGISASTCSSNGRMEGPPPTYSEVMGHHPGASFLHHQRSNAHRGSRLQFQQNNAESTIVPIKGKDRKPGNLV

SEQ ID NO: 27010 - protein, 248 aa, Homo sapiens
MAAELEFAQIIIIVVVVTVMVVVIVCLLNHYKVSTRSFINRPNQSRRREDGLPQEGCLWPSDSAAPRLGASEIMHAPRSRDRFTAPSFIQRDRFSRFQPTYPYVQHEIDLPPTISLSDGEEPPPYQGPCTLQLRDPEQQMELNRESVRAPPNRTIFDSDLIDIAMYSGGPCPPSSNSGISASTCSSNGRMEGPPPTYSEVMGHHPGASFLHHQRSNAHRGSRLQFQQNNAESTIVPIKGKDRKPGNLV

SEQ ID NO: 27011 - protein, 230 aa, Homo sapiens
MAAELEFAQIIIIVVVVTVMVVVIVCLLNHYKVSTRSFINRPNQSRRREDGLPQIMHAPRSRDRFTAPSFIQRDRFSRFQPTYPYVQHEIDLPPTISLSDGEEPPPYQGPCTLQLRDPEQQMELNRESVRAPPNRTIFDSDLIDIAMYSGGPCPPSSNSGISASTCSSNGRMEGPPPTYSEVMGHHPGASFLHHQRSNAHRGSRLQFQQNNAESTIVPIKGKDRKPGNLV

SEQ ID NO: 27012 - protein, 229 aa, Homo sapiens
MVVVIVCLLNHYKVSTRSFINRPNQSRRREDGLPQEGCLWPSDSAAPRLGASEIMHAPRSRDRFTAPSFIQRDRFSRFQPTYPYVQHEIDLPPTISLSDGEEPPPYQGPCTLQLRDPEQQMELNRESVRAPPNRTIFDSDLIDIAMYSGGPCPPSSNSGISASTCSSNGRMEGPPPTYSEVMGHHPGASFLHHQRSNAHRGSRLQFQQNNAESTIVPIKGKDRKPGNLV

SEQ ID NO: 27013 - protein, 269 aa, Homo sapiens
MSSDHLNNSTLKEAQFKDLFLKKAELEFAQIIIIVVVVTVMVVVIVCLLNHYKVSTRSFINRPNQSRRREDGLPQEGCLWPSDSAAPRLGASEIMHAPRSRDRFTAPSFIQRDRFSRFQPTYPYVQHEIDLPPTISLSDGEEPPPYQGPCTLQLRDPEQQMELNRESVRAPPNRTIFDSDLIDIAMYSGGPCPPSSNSGISASTCSSNGRMEGPPPTYSEVMGHHPGASFLHHQRSNAHRGSRLQFQQNNAESTIVPIKGKDRKPGNLV

SEQ ID NO: 27014 - protein, 251 aa, Homo sapiens
MSSDHLNNSTLKEAQFKDLFLKKAELEFAQIIIIVVVVTVMVVVIVCLLNHYKVSTRSFINRPNQSRRREDGLPQIMHAPRSRDRFTAPSFIQRDRFSRFQPTYPYVQHEIDLPPTISLSDGEEPPPYQGPCTLQLRDPEQQMELNRESVRAPPNRTIFDSDLIDIAMYSGGPCPPSSNSGISASTCSSNGRMEGPPPTYSEVMGHHPGASFLHHQRSNAHRGSRLQFQQNNAESTIVPIKGKDRKPGNLV

SEQ ID NO: 27015 - protein, 208 aa, Homo sapiens
MRLDSHLECISSTQEGCLWPSDSAAPRLGASEIMHAPRSRDRFTAPSFIQRDRFSRFQPTYPYVQHEIDLPPTISLSDGEEPPPYQGPCTLQLRDPEQQMELNRESVRAPPNRTIFDSDLIDIAMYSGGPCPPSSNSGISASTCSSNGRMEGPPPTYSEVMGHHPGASFLHHQRSNAHRGSRLQFQQNNAESTIVPIKGKDRKPGNLV

SEQ ID NO: 27016 - protein, 326 aa, Homo sapiens
MNTSPGTVGSDPVILATAGYDHTVRFWQAHSGICTRTVQHQDSQVNALEVTPDRSMIAAAGYQHIRMYDLNSNNPNPIISYDGVNKNIASVGFHEDGRWMYTGGEDCTARIWDLRSRNLQCQRIFQVNAPINCVCLHPNQAELIVGDQSGAIHIWDLKTDHNEQLIPEPEVSITSAHIDPDASYMAAVNSTGNCYVWNLTGGIGDEVTQLIPKTKIPAHTRYALQCRFSPDSTLLATCSADQTCKIWRTSNFSLMTELSIKSGNPGESSRGWMWGCAFSGDSQYIVTASSDNLARLWCVETGEIKREYGGHQKAVVCLAFNDSVLG

SEQ ID NO: 27017 - protein, 260 aa, Homo sapiens
MYDLNSNNPNPIISYDGVNKNIASVGFHEDGRWMYTGGEDCTARIWDLRSRNLQCQRIFQVNAPINCVCLHPNQAELIVGDQSGAIHIWDLKTDHNEQLIPEPEVSITSAHIDPDASYMAAVNSTGNCYVWNLTGGIGDEVTQLIPKTKIPAHTRYALQCRFSPDSTLLATCSADQTCKIWRTSNFSLMTELSIKSGNPGESSRGWMWGCAFSGDSQYIVTASSDNLARLWCVETGEIKREYGGHQKAVVCLAFNDSVLG

SEQ ID NO: 27018 - protein, 217 aa, Homo sapiens
MEHAPWSPGASSRARAGHTMNTSPGTVGSDPVILATAGYDHTVRFWQAHSGICTRTVQHQDSQVNALEVTPDRSMIAAAGYQHIRMYDLNSNNPNPIISYDGVNKNIASVGFHEDGRWMYTGGEDCTARIWDLRSRNLQCQRIFQVNAPINCVCLHPNQAELIVGDQSGAIHIWDLKTDHNEQLIPEPEVSITSAHIDPDASYMAAVNSTAPRHLLG

SEQ ID NO: 27019 - protein, 325 aa, Homo sapiens
MNTSPGTVGSDPVILATAGYDHTVRFWQAHSGICTRTVQHQDSVNALEVTPDRSMIAAAGYQHIRMYDLNSNNPNPIISYDGVNKNIASVGFHEDGRWMYTGGEDCTARIWDLRSRNLQCQRIFQVNAPINCVCLHPNQAELIVGDQSGAIHIWDLKTDHNEQLIPEPEVSITSAHIDPDASYMAAVNSTGNCYVWNLTGGIGDEVTQLIPKTKIPAHTRYALQCRFSPDSTLLATCSADQTCKIWRTSNFSLMTELSIKSGNPGESSRGWMWGCAFSGDSQYIVTASSDNLARLWCVETGEIKREYGGHQKAVVCLAFNDSVLG

SEQ ID NO: 27020 - protein, 513 aa, Homo sapiens
MALRAPALLPLLLLLLPLRAAGCPAACRCYSATVECGALRLRVVPLGIPPGTQTLFLQDNNIARLEPGALAPLAALRRLYLHNNSLRALEAGAFRAQPRLLELALTSNRLRGLRSGAFVGLAQLRVLYLAGNQLARLLDFTFLHLPRLQELHLQENSIELLEDQALAGLSSLALLDLSRNQLGTISREALQPLASLQVLRLTENPWRCDCALHWLGAWIKEGGQRLLTSRDRKIMCAEPPRLALQSLLDVSHSSLICIPPSVHVQPLELTANLGEDLRVACQASGYPQPLVTWRKVPQPREGRPRAQAQLEGGLLGLGGHSASDTGSGMLFLSNITLAHAGKYECEASNAGGAARVPFRLLVNASRQQPQQPAQPPPPAARPAGSEPRPEAGSMAFRALGVATQTAIAAAIALLALTALLLVAMICRRRRRRKKARGPPGEGALFVNDYLDGPCTFAQLEELRDERGHEMFVINRSKPLFAEGPAEAPADCGPEQGAGPGLRVPPPVAYEIHC

SEQ ID NO: 27021 - protein, 364 aa, Homo sapiens
MAAISTSIPVISQPQFTAMNEPQCFYNESIAFFYNRSGKHLATEWNTVSKLVMGLGITVCIFIMLANLLVMVAIYVNRRFHFPIYYLMANLAAADFFAGLAYFYLMFNTGPNTRRLTVSTWLLRQGLIDTSLTASVANLLAIAIERHITVFRMQLHTRMSNRRVVVVIVVIWTMAIVMGAIPSVGWNCICDIENCSNMAPLYSDSYLVFWAIFNLVTFVVMVVLYAHIFGYVRQRTMRMSRHSSGPRRNRDTMMSLLKTVVIVLGAFIICWTPGLVLLLLDVCCPQCDVLAYEKFFLLLAEFNSAMNPIIYSYRDKEMSATFRQILCCQRSENPTGPTEGSDRSASSLNHTILAGVHSNDHSVV

SEQ ID NO: 27022 - protein, 365 aa, Homo sapiens
MLLLLIPAHSSVLENEFTAMNEPQCFYNESIAFFYNRSGKHLATEWNTVSKLVMGLGITVCIFIMLANLLVMVAIYVNRRFHFPIYYLMANLAAADFFAGLAYFYLMFNTGPNTRRLTVSTWLLRQGLIDTSLTASVANLLAIAIERHITVFRMQLHTRMSNRRVVVVIVVIWTMAIVMGAIPSVGWNCICDIENCSNMAPLYSDSYLVFWAIFNLVTFVVMVVLYAHIFGYVRQRTMRMSRHSSGPRRNRDTMMSLLKTVVIVLGAFIICWTPGLVLLLLDVCCPQCDVLAYEKFFLLLAEFNSAMNPIIYSYRDKEMSATFRQILCCQRSENPTGPTEGSDRSASSLNHTILAGVHSNDHSVV

SEQ ID NO: 27023 - protein, 890 aa, Homo sapiens
MNYVGQLAGQVFVTVKELYKGLNPATLSGCIDIIVIRQPNGNLQCSPFHVRFGKMGVLRSREKVVDIEINGESVDLHMKLGDNGEAFFVQETDNDQEVIPMHLATSPILSEGASRMECQLKRGSVDRMRGLDPSTPAQVIAPSETPSSSSVVKKRRKRRRKSQLDSLKRDDNMNTSEDEDMFPIEMSSDEAMELLESSRTLPNDIPPFQDDIPEENLSLAVIYPQSASYPNSDREWSPTPSPSGSRPSTPKSDSELVSKSTERTGQKNPEMLWLWGELPQAAKSSSPHKMKESSPLSSRKICDKSHFQAIHSESSDTFSDQSPTLVGGALLDQNKPQTEMQFVNEEDLETLGAAAPLLPMIEELKPPSASVVQTANKTDSPSRKRDKRSRHLGADGVYLDDLTDMDPEVAALYFPKNGDPSGLAKHASDNGARSANQSPQSVGSSGVDSGVESTSDGLRDLPSIAISLCGGLSDHREITKDAFLEQAVSYQQFVDNPAIIDDPNLVVKIGSKYYNWTTAAPLLLAMQAFQKPLPKATVESIMRDKMPKKGGRWWFSWRGRNTTIKEESKPEQCLAGKAHSTGEQPPQLSLATRVKHESSSSDEERAAAKPSNAGHLPLLPNVSYKKTLRLTSEQLKSLKLKNGPNDVVFSVTTQYQGTCRCEGTIYLWNWDDKVIISDIDGTITRSDTLGHILPTLGKDWTHQGIAKLYHKVSQNGYKFLYCSARAIGMADMTRGYLHWVNERGTVLPQGPLLLSPSSLFSALHREVIEKKPEKFKVQCLTDIKNLFFPNTEPFYAAFGNRPADVYSYKQVGVSLNRIFTVNPKGELVQEHAKTNISSYVRLCEVVDHVFPLLKRSHSSDFPCSDTFSNFTFWREPLPPFENQDIHSASA

SEQ ID NO: 27024 - protein, 896 aa, Homo sapiens
MSRVQTMNYVGQLAGQVFVTVKELYKGLNPATLSGCIDIIVIRQPNGNLQCSPFHVRFGKMGVLRSREKVVDIEINGESVDLHMKLGDNGEAFFVQETDNDQEVIPMHLATSPILSEGASRMECQLKRGSVDRMRGLDPSTPAQVIAPSETPSSSSVVKKRRKRRRKSQLDSLKRDDNMNTSEDEDMFPIEMSSDEAMELLESSRTLPNDIPPFQDDIPEENLSLAVIYPQSASYPNSDREWSPTPSPSGSRPSTPKSDSELVSKSTERTGQKNPEMLWLWGELPQAAKSSSPHKMKESSPLSSRKICDKSHFQAIHSESSDTFSDQSPTLVGGALLDQNKPQTEMQFVNEEDLETLGAAAPLLPMIEELKPPSASVVQTANKTDSPSRKRDKRSRHLGADGVYLDDLTDMDPEVAALYFPKNGDPSGLAKHASDNGARSANQSPQSVGSSGVDSGVESTSDGLRDLPSIAISLCGGLSDHREITKDAFLEQAVSYQQFVDNPAIIDDPNLVVKIGSKYYNWTTAAPLLLAMQAFQKPLPKATVESIMRDKMPKKGGRWWFSWRGRNTTIKEESKPEQCLAGKAHSTGEQPPQLSLATRVKHESSSSDEERAAAKPSNAGHLPLLPNVSYKKTLRLTSEQLKSLKLKNGPNDVVFSVTTQYQGTCRCEGTIYLWNWDDKVIISDIDGTITRSDTLGHILPTLGKDWTHQGIAKLYHKVSQNGYKFLYCSARAIGMADMTRGYLHWVNERGTVLPQGPLLLSPSSLFSALHREVIEKKPEKFKVQCLTDIKNLFFPNTEPFYAAFGNRPADVYSYKQVGVSLNRIFTVNPKGELVQEHAKTNISSYVRLCEVVDHVFPLLKRSHSSDFPCSDTFSNFTFWREPLPPFENQDIHSASA

SEQ ID NO: 27025 - protein, 926 aa, Homo sapiens
MNYVGQLAGQVFVTVKELYKGLNPATLSGCIDIIVIRQPNGNLQCSPFHVRFGKMGVLRSREKVVDIEINGESVDLHMKLGDNGEAFFVQETDNDQEVIPMHLATSPILSEGASRMECQLKRGSVDRMRGLDPSTPAQVIAPSETPSSSSVVKKRRKRRRKSQLDSLKRDDNMNTSEDEDMFPIEMSSDEAMELLESSRTLPNDIPPFQDDIPEENLSLAVIYPQSASYPNSDREWSPTPSSLVDCKRTAPHLAVAAEGGLSSSCPPQSSLFHPSESPSGSRPSTPKSDSELVSKSTERTGQKNPEMLWLWGELPQAAKSSSPHKMKESSPLSSRKICDKSHFQAIHSESSDTFSDQSPTLVGGALLDQNKPQTEMQFVNEEDLETLGAAAPLLPMIEELKPPSASVVQTANKTDSPSRKRDKRSRHLGADGVYLDDLTDMDPEVAALYFPKNGDPSGLAKHASDNGARSANQSPQSVGSSGVDSGVESTSDGLRDLPSIAISLCGGLSDHREITKDAFLEQAVSYQQFVDNPAIIDDPNLVVKIGSKYYNWTTAAPLLLAMQAFQKPLPKATVESIMRDKMPKKGGRWWFSWRGRNTTIKEESKPEQCLAGKAHSTGEQPPQLSLATRVKHESSSSDEERAAAKPSNAGHLPLLPNVSYKKTLRLTSEQLKSLKLKNGPNDVVFSVTTQYQGTCRCEGTIYLWNWDDKVIISDIDGTITRSDTLGHILPTLGKDWTHQGIAKLYHKVSQNGYKFLYCSARAIGMADMTRGYLHWVNERGTVLPQGPLLLSPSSLFSALHREVIEKKPEKFKVQCLTDIKNLFFPNTEPFYAAFGNRPADVYSYKQVGVSLNRIFTVNPKGELVQEHAKTNISSYVRLCEVVDHVFPLLKRSHSSDFPCSDTFSNFTFWREPLPPFENQDIHSASA

SEQ ID NO: 27026 - protein, 916 aa, Homo sapiens
MNYVGQLAGQVFVTVKELYKGLNPATLSGCIDIIVIRQPNGNLQCSPFHVRFGKMGVLRSREKVVDIEINGESVDLHMKLGDNGEAFFVQETDNDQEVIPMHLATSPILSEGASRMECQLKRGSVDRMRGLDPSTPAQVIAPSETPSSSSVVKKRRKRRRKSQLDSLKRDDNMNTSEDEDMFPIEMSSDEAMELLESSRTLPNDIPPFQDDIPEENLSLAVIYPQSASYPNSDREWSPTPSPSGSRPSTPKSDSELVSKSTERTGQKNPEMLWLWGELPQAAKSSSPHKMKESSPLSSRKICDKSHFQAIHSESSDTFSDQSPTLVGGALLDQNKPQTEMQFVNEEDLETLGAAAPLLPMIEELKPPSASVVQTANKTDSPSRKRDKRSRHLGADGVYLDDLTDMDPEVAALYFPKNGDPSGLAKHASDNGARSANQSPQSVGSSGVDSGVESTSDGLRDLPSIAISLCGGLSDHREITKDAFLEQAVSYQQFVDNPAIIDDPNLVVKIGSKYYNWTTAAPLLLAMQAFQKPLPKSSCLSYLHVILDAIRFCFSKIFNAQIATVESIMRDKMPKKGGRWWFSWRGRNTTIKEESKPEQCLAGKAHSTGEQPPQLSLATRVKHESSSSDEERAAAKPSNAGHLPLLPNVSYKKTLRLTSEQLKSLKLKNGPNDVVFSVTTQYQGTCRCEGTIYLWNWDDKVIISDIDGTITRSDTLGHILPTLGKDWTHQGIAKLYHKVSQNGYKFLYCSARAIGMADMTRGYLHWVNERGTVLPQGPLLLSPSSLFSALHREVIEKKPEKFKVQCLTDIKNLFFPNTEPFYAAFGNRPADVYSYKQVGVSLNRIFTVNPKGELVQEHAKTNISSYVRLCEVVDHVFPLLKRSHSSDFPCSDTFSNFTFWREPLPPFENQDIHSASA

SEQ ID NO: 27027 - protein, 932 aa, Homo sapiens
MSRVQTMNYVGQLAGQVFVTVKELYKGLNPATLSGCIDIIVIRQPNGNLQCSPFHVRFGKMGVLRSREKVVDIEINGESVDLHMKLGDNGEAFFVQETDNDQEVIPMHLATSPILSEGASRMECQLKRGSVDRMRGLDPSTPAQVIAPSETPSSSSVVKKRRKRRRKSQLDSLKRDDNMNTSEDEDMFPIEMSSDEAMELLESSRTLPNDIPPFQDDIPEENLSLAVIYPQSASYPNSDREWSPTPSSLVDCKRTAPHLAVAAEGGLSSSCPPQSSLFHPSESPSGSRPSTPKSDSELVSKSTERTGQKNPEMLWLWGELPQAAKSSSPHKMKESSPLSSRKICDKSHFQAIHSESSDTFSDQSPTLVGGALLDQNKPQTEMQFVNEEDLETLGAAAPLLPMIEELKPPSASVVQTANKTDSPSRKRDKRSRHLGADGVYLDDLTDMDPEVAALYFPKNGDPSGLAKHASDNGARSANQSPQSVGSSGVDSGVESTSDGLRDLPSIAISLCGGLSDHREITKDAFLEQAVSYQQFVDNPAIIDDPNLVVKIGSKYYNWTTAAPLLLAMQAFQKPLPKATVESIMRDKMPKKGGRWWFSWRGRNTTIKEESKPEQCLAGKAHSTGEQPPQLSLATRVKHESSSSDEERAAAKPSNAGHLPLLPNVSYKKTLRLTSEQLKSLKLKNGPNDVVFSVTTQYQGTCRCEGTIYLWNWDDKVIISDIDGTITRSDTLGHILPTLGKDWTHQGIAKLYHKVSQNGYKFLYCSARAIGMADMTRGYLHWVNERGTVLPQGPLLLSPSSLFSALHREVIEKKPEKFKVQCLTDIKNLFFPNTEPFYAAFGNRPADVYSYKQVGVSLNRIFTVNPKGELVQEHAKTNISSYVRLCEVVDHVFPLLKRSHSSDFPCSDTFSNFTFWREPLPPFENQDIHSASA

SEQ ID NO: 27028 - protein, 459 aa, Homo sapiens
MSRVQTMNYVGQLAGQVFVTVKELYKGLNPATLSGCIDIIVIRQPNGNLQCSPFHVRFGKMGVLRSREKVVDIEINGESVDLHMKLGDNGEAFFVQETDNDQEVIPMHLATSPILSEGASRMECQLKRGSVDRMRGLDPSTPAQVIAPSETPSSSSVVKKRRKRRRKSQLDSLKRDDNMNTSEDEDMFPIEMSSDEAMELLESSRTLPNDIPPFQDDIPEENLSLAVIYPQSASYPNSDREWSPTPSSLVDCKRTAPHLAVAAEGGLSSSCPPQSSLFHPSESPSGSRPSTPKSDSELVSKSTERTGQKNPEMLWLWGELPQAAKSSSPHKMKESSPLSSRKICDKSHFQAIHSESSDTFSDQSPTLVGGALLDQNKPQTEMQFVNEEDLETLGAAAPLLPMIEELKPPSASVVQTANKTDSPSRKRDKRSRHLGADGVYLDDLTDMDPEVAALYFPKK

SEQ ID NO: 27029 - protein, 975 aa, Homo sapiens
MGEQDGIRSSSWETSQGKSSPDSAWSWIPIMRDPGWIRNVWSSNINVQTMNYVGQLAGQVFVTVKELYKGLNPATLSGCIDIIVIRQPNGNLQCSPFHVRFGKMGVLRSREKVVDIEINGESVDLHMKLGDNGEAFFVQETDNDQEVIPMHLATSPILSEGASRMECQLKRGSVDRMRGLDPSTPAQVIAPSETPSSSSVVKKRRKRRRKSQLDSLKRDDNMNTSEDEDMFPIEMSSDEAMELLESSRTLPNDIPPFQDDIPEENLSLAVIYPQSASYPNSDREWSPTPSSLVDCKRTAPHLAVAAEGGLSSSCPPQSSLFHPSESPSGSRPSTPKSDSELVSKSTERTGQKNPEMLWLWGELPQAAKSSSPHKMKESSPLSSRKICDKSHFQAIHSESSDTFSDQSPTLVGGALLDQNKPQTEMQFVNEEDLETLGAAAPLLPMIEELKPPSASVVQTANKTDSPSRKRDKRSRHLGADGVYLDDLTDMDPEVAALYFPKNGDPSGLAKHASDNGARSANQSPQSVGSSGVDSGVESTSDGLRDLPSIAISLCGGLSDHREITKDAFLEQAVSYQQFVDNPAIIDDPNLVVKIGSKYYNWTTAAPLLLAMQAFQKPLPKATVESIMRDKMPKKGGRWWFSWRGRNTTIKEESKPEQCLAGKAHSTGEQPPQLSLATRVKHESSSSDEERAAAKPSNAGHLPLLPNVSYKKTLRLTSEQLKSLKLKNGPNDVVFSVTTQYQGTCRCEGTIYLWNWDDKVIISDIDGTITRSDTLGHILPTLGKDWTHQGIAKLYHKVSQNGYKFLYCSARAIGMADMTRGYLHWVNERGTVLPQGPLLLSPSSLFSALHREVIEKKPEKFKVQCLTDIKNLFFPNTEPFYAAFGNRPADVYSYKQVGVSLNRIFTVNPKGELVQEHAKTNISSYVRLCEVVDHVFPLLKRSHSSDFPCSDTFSNFTFWREPLPPFENQDIHSASA

SEQ ID NO: 27030 - protein, 499 aa, Homo sapiens
MDTSPLCFSILLVLCIFIQSSALGQSLKPEPFGRRAQAVETNKTLHEMKTRFLLFGETNQGCQIRINHPDTLQECGFNSSLPLVMIIHGWSVDGVLENWIWQMVAALKSQPAQPVNVGLVDWITLAHDHYTIAVRNTRLVGKEVAALLRWLEESVQLSRSHVHLIGYSLGAHVSGFAGSSIGGTHKIGRITGLDAAGPLFEGSAPSNRLSPDDANFVDAIHTFTREHMGLSVGIKQPIGHYDFYPNGGSFQPGCHFLELYRHIAQHGFNAITQTIKCSHERSVHLFIDSLLHAGTQSMAYPCGDMNSFSQGLCLSCKKGRCNTLGYHVRQEPRSKSKRLFLVTRAQSPFKVYHYQFKIQFINQTETPIQTTFTMSLLGTKEKMQKIPITLGKGIASNKTYSFLITLDVDIGELIMIKFKWENSAVWANVWDTVQTIIPWSTGPRHSGLVLKTIRVKAGETQQRMTFCSENTDDLLLRPTQEKIFVKCEIKSKTSKRKIR

SEQ ID NO: 27031 - protein, 841 aa, Homo sapiens
MVVSAGPWSSEKAEMNILEINEKLRPQLAENKQQFGNLKERCFVTQLAGFLANQQKKYNYEECKDLIKFMLRNERQFKEEKLAEQLKQAEELRQYKVLVHSQERELTQLREKLREGRDASRSLNEHLQALLTLDEPDKSQGQDLQEQLAEGCRLAQHLVQKLSPENDEDEDEDVQVEEAEKVQKSSAPREVQKTEESKVPEDSLEECAITCSNSHGPCDSNQPHKNIKITFEEDEVNSTLVVDRESSHDECQDALNILPVPGPTSSATNVSMVVSAGPLSSEKAEMNILEINEKLHPQLAEKKQQFRNLKERCFVTQLAGFLANQQKKYKYEECKDLIKSMLRNERQFKEEKLAEQLKQAEELRQYKVLVHAQERELTQLREKLREGRDASRSLNEHLQALLTPDEPDKSQGQDLQEQLAEGCRLAQHLVQKLSPENDNDDDEDVQVELAEKVQKSSAPREMQKAEEKEVPEDSQEECAITYSNSHGPYDSNQPHRKTKITFEEDKVDSTLIGSSSHVEWEDAVHIIPENESDDEEEEEKGPVSPRNLQESEEEEVPQESWDEGYSTLSIPPEMLASYQSYSSTFHSLEEQQVCMAVDIGRHRWDQVKKEDQEATGPRLSRELLDEKGPEVLQDSLDRCYSTPSGCLELTDSCQPYRSAFYVLEQQRVGLAVDMDEIEKYQEVEEDQDPSCPRLSRELLDEKEPEVLQDSLDRCYSTPSGYLELPDLGQPYSSAVYSLEEQYLGLALDVDRTKKDQEEEEDQGPPCPRLSRELLEVVEPEVLQDSLDRCYSTPSSCLEQPDSCQPYGSSFYALEEKHVGFSLDVGEIEKKGKGKKRRGRRS

SEQ ID NO: 27032 - protein, 766 aa, Homo sapiens
MFCNSTGRLPGQPAEEIQQYKVLVHSQERELTQLREKLREGRDASRSLNEHLQALLTLDEPDKSQGQDLQEQLAEGCRLAQHLVQKLSPENDEDEDEDVQVEEAEKVQKSSAPREVQKTEESKVPEDSLEECAITCSNSHGPCDSNQPHKNIKITFEEDEVNSTLVVDRESSHDECQDALNILPVPGPTSSATNVSMVVSAGPLSSEKAEMNILEINEKLHPQLAEKKQQFRNLKERCFVTQLAGFLANQQKKYKYEECKDLIKSMLRNERQFKEEKLAEQLKQAEELRQYKVLVHAQERELTQLREKLREGRDASRSLNEHLQALLTPDEPDKSQGQDLQEQLAEGCRLAQHLVQKLSPENDNDDDEDVQVELAEKVQKSSAPREMQKAEEKEVPEDSQEECAITYSNSHGPYDSNQPHRKTKITFEEDKVDSTLIGSSSHVEWEDAVHIIPENESDDEEEEEKGPVSPRNLQESEEEEVPQESWDEGYSTLSIPPEMLASYQSYSSTFHSLEEQQVCMAVDIGRHRWDQVKKEDQEATGPRLSRELLDEKGPEVLQDSLDRCYSTPSGCLELTDSCQPYRSAFYVLEQQRVGLAVDMDEIEKYQEVEEDQDPSCPRLSRELLDEKEPEVLQDSLDRCYSTPSGYLELPDLGQPYSSAVYSLEEQYLGLALDVDRTKKDQEEEEDQGPPCPRLSRELLEVVEPEVLQDSLDRCYSTPSSCLEQPDSCQPYGSSFYALEEKHVGFSLDVGEIEKKGKGKKRRGRRS

SEQ ID NO: 27033 - protein, 1185 aa, Homo sapiens
MCEVMPTINEGDRLGPPHGADADANFEQLMVNMLDEREKLLESLRESQETLAATQSRLQDAIHERDQLQRHLNSALPQEFATLTRELSMCREQLLEREEEISELKAERNNTRLLLEHLECLVSRHERSLRMTVVKRQAQSPSGVSSEVEVLKALKSLFEHHKALDEKVRERLRAALERVTTLEEQLAGAHQQVSALQQGAGVRDGAAEEEGTVELGPKRLWKEDTGRVEELQELLEKQNFELSQARERLVTLTTTVTELEEDLGTARRDLIKSEELSSKHQRDLREALAQKEDMEERITTLEKRYLAAQREATSIHDLNDKLENELANKESLHRQCEEKARHLQELLEVAEQKLQQTMRKAETLPEVEAELAQRIAALTKAEERHGNIEEHLRQLEGQLEEKNQELARTAVQVRQREKMNEDHNKRLSDTVDRLLSESNERLQLHLKERMAALEEKNTLIQELESSQRQIEEQHHHKGRLSEEIEKLRQEVDQLKGRGGPFVDGVHSRSHMGSAADVRFSLGTTTHAPPGVHRRYSALREESAKLALPLTVTLRSPTWMRMSQGVCCNLEYHSSGTLCGSSGPLPVPEMIQEEKESTELRAEEIETRVTSGSMEALNLKQLRKRGSIPTSLTALSLASASPPLSGRSTPKLTSRSAAQDLDRMGVMTLPSDLRKHRRKLLSPVSREENREDKATIKCETSPPSSPRTLRLEKLGHPALSQEEGKSALEDQGSNPSSSNSSQDSLHKGAKRKGIKSSIGRLFGKKEKGRLIQLSRDGATGHVLLTDSEFSMQEPMVPAKLGTQAEKDRRLKKKHQLLEDARRKGMPFAQWDGPTVVSWLELWVGMPAWYVAACRANVKSGAIMSALSDTEIQREIGISNALHRLKLRLAIQEMVSLTSPSAPPTSRTSSGNVWVTHEEMETLETSTKTDSEEGSWAQTLAYGDMNHEWIGNEWLPSLGLPQYRSYFMECLVDARMLDHLTKKDLRVHLKMVDSFHRTSLQYGIMCLKRLNYDRKELEKRREESQHEIKDVLVWTNDQVVHWVQSIGLRDYAGNLHESGVHGALLALDENFDHNTLALILQIPTQNTQARQVMEREFNNLLALGTDRKLDDGDDKVFRRAPSWRKRFRPREHHGRGGMLSASAETLPAGFRVSTLGTLQPPPAPPKKIMPEAHSHYLYGHMLSAFRD

SEQ ID NO: 27034 - protein, 701 aa, Homo sapiens
MGSAADVRFSLGTTTHAPPGVHRRYSALREESAKDWETSPLPGMLAPAAGPAFDSDPEISDVDEDEPGGLVGSADVVSPSGHSDAQTLAMMLQEQLDAINEEIRMIQEEKESTELRAEEIETRVTSGSMEALNLKQLRKRGSIPTSLTALSLASASPPLSGRSTPKLTSRSAAQDLDRMGVMTLPSDLRKHRRKLLSPVSREENREDKATIKCETSPPSSPRTLRLEKLGHPALSQEEGKSALEDQGSNPSSSNSSQDSLHKGAKRKGIKSSIGRLFGKKEKGRLIQLSRDGATGHVLLTDSEFSMQEPMVPAKLGTQAEKDRRLKKKHQLLEDARRKGMPFAQWDGPTVVSWLELWVGMPAWYVAACRANVKSGAIMSALSDTEIQREIGISNALHRLKLRLAIQEMVSLTSPSAPPTSRTSSGNVWVTHEEMETLETSTKTDSEEGSWAQTLAYGDMNHEWIGNEWLPSLGLPQYRSYFMECLVDARMLDHLTKKDLRVHLKMVDSFHRTSLQYGIMCLKRLNYDRKELEKRREESQHEIKDVLVWTNDQVVHWVQSIGLRDYAGNLHESGVHGALLALDENFDHNTLALILQIPTQNTQARQVMEREFNNLLALGTDRKLDDGDDKVFRRAPSWRKRFRPREHHGRGGMLSASAETLPAGFRVSTLGTLQPPPAPPKKIMPEAHSHYLYGHMLSAFRD

SEQ ID NO: 27035 - protein, 692 aa, Homo sapiens
MGSAADVRFSLGTTTHAPPGVHRRYSALREESAKDWETSPLPGMLAPAAGPAFDSDPEISDVDEDEPGGLVGSADVVSPSGHSDAQTLAMMLQEQLDAINEEIRMIQEEKESTELRAEEIETRVTSGSMEALNLKQLRKRGSIPTSLTALSLASASPPLSGRSTPKLTSRSAAQDLDRMGVMTLPSDLRKHRRKLLSPVSREENREDKATIKCETSPPSSPRTLRLEKLGHPALSQEEGKSALEDQGSNPSSSNSSQDSLHKGAKRKGIKSSIGRLFGKKEKGRLIQLSRDGATGHVLLTDSEFSMQEPMVPAKLGTQAEKDRRLKKKHQLLEDARRKGMPFAQWDGPTVVSWLELWVGMPAWYVAACRANVKSGAIMSALSDTEIQREIGISNALHRLKLRLAIQEMVSLTSPSAPPTSRTSSGNVWVTHEEMETLETSTKTTLAYGDMNHEWIGNEWLPSLGLPQYRSYFMECLVDARMLDHLTKKDLRVHLKMVDSFHRTSLQYGIMCLKRLNYDRKELEKRREESQHEIKDVLVWTNDQVVHWVQSIGLRDYAGNLHESGVHGALLALDENFDHNTLALILQIPTQNTQARQVMEREFNNLLALGTDRKLDDGDDKVFRRAPSWRKRFRPREHHGRGGMLSASAETLPAGFRVSTLGTLQPPPAPPKKIMPEAHSHYLYGHMLSAFRD

SEQ ID NO: 27036 - protein, 1006 aa, Homo sapiens
MAEQESLEFGKADFVLMDTVSMPEFMANLRLRFEKGRIYTFIGEVVVSVNPYKLLNIYGRDTIEQYKGRELYERPPHLFAIADAAYKAMKRRSKDTCIVISGESGAGKTEASKYIMQYIAAITNPSQRAEVERVKNMLLKSNCVLEAFGNAKTNRNDNSSRFGKYMDINFDFKGDPIGGHINNYLLEKSRVIVQQPGERSFHSFYQLLQGGSEQMLRSLHLQKSLSSYNYIHVGAQLKSSINDAAEFRVVADAMKVIGFKPEEIQTVYKILAAILHLGNLKFVVDGDTPLIENGKVVSIIAELLSTKTDMVEKALLYRTVATGRDIIDKQHTEQEASYGRDAFAKAIYERLFCWIVTRINDIIEVKNYDTTIHGKNTVIGVLDIYGFEIFDNNSFEQFCINYCNEKLQQLFIQLVLKQEQEEYQREGIPWKHIDYFNNQIIVDLVEQQHKGIIAILDDACMNVGKVTDEMFLEALNSKLGKHAHFSSRKLCASDKILEFDRDFRIRHYAGDVVYSVIGFIDKNKDTLFQDFKRLMYNSSNPVLKNMWPEGKLSITEVTKRPLTAATLFKNSMIALVDNLASKEPYYVRCIKPNDKKSPQIFDDERCRHQVEYLGLLENVRVRRAGFAFRQTYEKFLHRYKMISEFTWPNHDLPSDKEAVKKLIERCGFQDDVAYGKTKIFIRTPRTLFTLEELRAQMLIRIVLFLQKVWRGTLARMRYKRTKAALTIIRYYRRYKVKSYIHEVARRFHGVKTMRDYGKHVKWPSPPKVLRRFEEALQTIFNRWRASQLIKSIPASDLPQVRAKVAAVEMLKGQRADLGLQRAWEGNYLASKPDTPQTSGTFVPVANELKRKDKYMNVLFSCHVRKVNRFSKVEDRAIFVTDRHLYKMDPTKQYKVMKTIPLYNLTGLSVSNGKDQLVVFHTKDNKDLIVCLFSKQPTHESRIGELVGVLVNHFKSEKRHLQVNVTNPVQCSLHGKKCTVSVETRLNQPQPDFTKNRSGFILSVPGN

SEQ ID NO: 27037 - protein, 264 aa, Homo sapiens
MLSHNTMMKQRKQQATAIMKEVHGNDVDGMDLGKKVSIPRDIMLEELSHLSNRGARLFKMRQRRSDKYTFENFQYQSRAQINHSIAMQNGKVDGSNLEGGSQQAPLTPPNTPDPRSPPNPDNIAPGYSGPLKEIPPEKFNTTAVPKYYQSPWEQAISNDPELLEALYPKLFKPEGKAELPDYRSFNRVATPFGGFEKASRMVKFKVPDFELLLLTDPRFMSFVNPLSGRRSFNRTPKGWISENIPIVITTEPTDDTTVPESEDL

SEQ ID NO: 27038 - protein, 5207 aa, Homo sapiens
MFRLSRELLDEKGPEVLQDSLDRCYSTPSGCLELTDSCQPYRSAFYVLEQQRIGLAVDMDEIEKYQEVEEDQDPSCPRLSRELLDEKEPEVLQDSLDRCYSTPSGYLELPDLGQPYSSAVYSLEEQYLGLALDVDRTKKDQEEEEDQGPPCPRLSRELLEVVEPEVLQDSLDRCYSTPSSCLEQPDSCQPYGSSFYALEEKHVGFSLDVGEIEKKGKGKKRRGRRSKKERRRGRKEGEEDQNPPCPRLSRELLDEKGPEVLQDSLDRCYSTPSGCLELTDSCQPYRSAFYVLEQQRVGLAVDMDEIEKYQEVEEDQDPSCPRLSRELLDEKEPEVLQDSLDRCYSTPSGYLELPDLGQPYSSAVYSLEEQYLGLALDVDRTKKDQEEEEDQGPPCPRLSRELLEVVEPEVLQDSLDRCYSTPSSCLEQPDSCQPYGSSFYALEEKHVGFSLDVGEIEKKGKGKKRRGRRSKKERRRGRKEGEEDQNPPCPRLSRELLDEKGPEVLQDSLDRSYSTPSGCLELTDSCQPYRSAFYVLEQQRVGLAVDMDEIEKYQEVEEDQDPSCPRLSRELLDEKEPEVLQDSLDRCYSTPSGYLELPDLGQPYSSAVYSLEEQYLGLALDVDRTKKDQEEEEDQGPPCPRLSRELLEVVEPEVLQDSLDRCYSTPSSCLEQPDSCQPYGSSFYALEEKHVGFSLDVGEIEKKGKGKKRRGRRSKKERRRGRKEGEEDQNPPCPRLSRELLDEKGPEVLQDSLDRCYSTPSGCLELTDSCQPYRSAFYVLEQQRVGLAVDMDEIEKYQEVEEDQDPSCPRLSRELLDEKEPEVLQDSLDRCYSTPSGYLELPDLGQPYSSAVYSLEEQYLGLALDVDRTKKDQEEEEDQGPPCPRLSRELLEVVEPEVLQDSLDRCYSTPSSCLEQPDSCQPYGSSFYALEEKHVGFSLDVGEIEKKGKGKKRRGRRSKKERRRGRKEGEEDQNPPCPRLSRELLDEKGPEVLQDSLDRSYSTPSGCLELTDSCQPYRSAFYVLEQQRVGLAVDMDEIEKYQEVEEDQDPSCPRLSRELLDEKEPEVLQDSLDRCYSTPSGYLELPDLGQPYSSAVYSLEEQYLGLALDVDRTKKDQEEEEDQGPPCPRLSRELLEVVEPEVLQDSLDRCYSTPSSCLEQPDSCQPYGSSFYALEEKHVGFSLDVGEIEKKGKGKKRRGRRSKKERRRGRKEGEEDQNPPCPRLSRELLDEKGPEVLQDSLDRSYSTPSGCLELTDSCQPYRSAFYVLEQQRVGLAVDMDEIEKYQEVEEDQDPSCPRLSRELLDEKEPEVLQDSLDRCYSTPSGYLELPDLGQPYSSAVYSLEEQYLGLALDVDRTKKDQEEEEDQGPPCPRLSRELLEVVEPEVLQDSLDRCYSTPSSCLEQPDSCQPYGSSFYALEEKHVGFSLDVGEIEKKGKGKKRRGRRSKKERRRGRKEGEEDQTPPCPRLSRELLDEKGPEVLQDSLDRSYSTPSGCLELTDSCQPYRSAFYVLEQQRVGLAVDMDEIEKYQEVEEDQDPSCPRLSRELLDEKEPEVLQDSLDRCYSTPSGYLELPDLGQPYSSAVYSLEEQYLGLALDVDRTKKDQEEEEDQGPPCPRLSRELLEVVEPEVLQDSLDRCYSTPSSCLEQPDSCQPYGSSFYALEEKHVGFSLDVGEIEKKGKGKKRRGRRSKKERRRGRKEGEEDQNPPCPRLSRELLDEKGPEVLQDSLDRSYSTPSGCLELTDSCQPYRSAFYVLEQQRVGLAVDMDEIEKYQEVEEDQDPSCPRLSRELLDEKEPEVLQDSLDRCYSTPSGYLELPDLGQPYSSAVYSLEEQYLGLALDVDRTKKDQEEEEDQGPPCPRLSRELLEVVEPEVLQDSLDRCYSTPSSCLEQPDSCQPYGSSFYALEEKHVGFSLDVGEIEKKGKGKKRRGRRSKKERRRGRKEGEEDQNPPCPRLSRELLDEKGPEVLQDSLDRCYSTPSGCLELTDSCQPYRSAFYVLEQQRVGLAVDMDEIEKYQEVEEDQDPSCPRLSRELLDEKEPEVLQDSLDRCYSTPSGYLELPDLGQPYSSAVYSLEEQYLGLALDVDRTKKDQEEEEDQGPPCPRLSRELLEVVEPEVLQDSLDRCYSTPSSCLEQPDSCQPYGSSFYALEEKHVGFSLDVGEIEKKGKGKKRRGRRSKKERRRGRKEGEEDQNPPCPRLSRELLDEKGPEVLQDSLDRCYSTPSGCLELTDSCQPYRSAFYVLEQQRVGLAVDMDEIEKYQEVEEDQDPSCPRLSRELLDEKEPEVLQDSLDRCYSTPSGYLELPDLGQPYSSAVYSLEEQYLGLALDVDRTKKDQEEEEDQGPPCPRLSRELLEVVEPEVLQDSLDRCYSTPSSCLEQPDSCQPYGSSFYALEEKHVGFSLDVGEIEKKGKGKKRRGRRSKKERRRGRKEGEEDQNPPCPRLSRELLDEKGPEVLQDSLDRCYSTPSGCLELTDSCQPYRSAFYVLEQQRVGLAVDMDEIEKYQEVEEDQDPSCPRLSRELLDEKEPEVLQDSLDRCYSTPSGYLELPDLGQPYSSAVYSLEEQYLGLALDVDRTKKDQEEEEDQGPPCPRLSRELLEVVEPEVLQDSLDRCYSTPSSCLEQPDSCQPYGSSFYALEEKHVGFSLDVGEIEKKGKGKKRRGRRSKKERRRGRKEGEEDQNPPCPRLSRELLDEKGPEVLQDSLDRSYSTPSGCLELTDSCQPYRSAFYVLEQQRVGLAVDMDEIEKYQEVEEDQDPSCPRLSRELLDEKEPEVLQDSLDRCYSTPSGYLELPDLGQPYSSAVYSLEEQYLGLALDVDRTKKDQEEEEDQGPPCPRLSRELLEVVEPEVLQDSLDRCYSTPSSCLEQPDSCQPYGSSFYALEEKHVGFSLDVGEIEKKGKGKKRRGRRSKKERRRGRKEGEEDQNPPCPRLSRELLDEKGPEVLQDSLDRSYSTPSGCLELTDSCQPYRSAFYVLEQQRVGLAVDMDEIEKYQEVEEDQDPSCPRLSRELLDEKEPEVLQDSLDRCYSTPSGYLELPDLGQPYSSAVYSLEEQYLGLALDVDRTKKDQEEEEDQGPPCPRLSRELLEVVEPEVLQDSLDRCYSTPSSCLEQPDSCQPYGSSFYALEEKHVGFSLDVGEIEKKGKGKKRRGRRSKKERRRGRKEGEEDQNPPCPRLSRELLDEKGPEVLQDSLDRSYSTPSGCLELTDSCQPYRSAFYVLEQQRVGLAVDMDEIEKYQEVEEDQDPSCPRLSRELLDEKEPEVLQDSLDRCYSTPSGYLELPDLGQPYSSAVYSLEEQYLGLALDVDRTKKDQEEEEDQGPPCPRLSRELLEVVEPEVLQDSLDRCYSTPSSCLEQPDSCQPYGSSFYALEEKHVGFSLDVGEIEKKGKGKKRRGRRSKKERRRGRKEGEEDQNPPCPRLSRELLDEKGPEVLQDSLDRSYSTPSGCLELTDSCQPYRSAFYVLEQQRVGLAVDMDEIEKYQEVEEDQDPSCPRLSRELLDEKEPEVLQDSLDRCYSTPSGYLELPDLGQPYSSAVYSLEEQYLGLALDVDRTKKDQEEEEDQGPPCPRLSRELLEVVEPEVLQDSLDRCYSTPSSCLEQPDSCQPYGSSFYALEEKHVGFSLDVGEIEKKGKGKKRRGRRSKKERRRGRKEGEEDQNPPCPRLSRELLDEKGPEVLQDSLDRCYSTPSGCLELTDSCQPYRSAFYVLEQQRVGLAVDMDEIEKYQEVEEDQDPSCPRLSRELLDEKEPEVLQDSLDRCYSTPSGYLELPDLGQPYSSAVYSLEEQYLGLALDVDRTKKDQEEEEDQGPPCPRLSRELLEVVEPEVLQDSLDRCYSTPSSCLEQPDSCQPYGSSFYALEEKHVGFSLDVGEIEKKGKGKKRRGRRSKKERRRGRKEGEEDQNPPCPRLSRELLDEKGPEVLQDSLDRCYSTPSGCLELTDSCQPYRSAFYVLEQQRVGLAVDMDEIEKYQEVEEDQDPSCPRLSRELLDEKEPEVLQDSLDRCYSTPSGYLELPDLGQPYSSAVYSLEEQYLGLALDVDRTKKDQEEEEDQGPPCPRLSRELLEVVEPEVLQDSLDRCYSTPSSCLEQPDSCQPYGSSFYALEEKHVGFSLDVGEIEKKGKGKKRRGRRSKKERRRGRKEGEEDQTPPCPRLSRELLDEKGPEVLQDSLDRCYSTPSGCLELTDSCQPYRSAFYVLEQQRVGLAVDMDEIEKYQEVEEDQDPSCPRLSRELLDEKEPEVLQDSLDRCYSTPSGYLELPDLGQPYSSAVYSLEEQYLGLALDVDRTKKDQEEEEDQGPPCPRLSRELLEVVEPEVLQDSLDRCYSTPSSCLEQPDSCQPYGSSFYALEEKHVGFSLDVGEIEKKGKGKKRRGRRSKKERRRGRKEGEEDQNPPCPRLSRELLDEKEPEVLQDSLDRCYSTPSGYLELPDLGQPYSSAVYSLEEQYLGLALDVDRTKKDQEEEEDQGPPCPRLSRELLEVVEPEVLQDSLDRCYSTPSSCLEQPDSCQPYGSSFYALEEKHVGFSLDVGEIEKKGKGKKRRGRRSKKERRRGRKEGEEDQNPPCPRLSRELLDEKEPEVLQDSLDRCYSTPSGYLELPDLGQPYSSAVYSLEEQYLGLALDVDRTKKDQEEEEDQGPPCPRLSRELLEVVEPEVLQDSLDRCYSTPSSCLELTDSCQPYRSAFYVLEQQRVGLAVDMDEIEKYQEVEEDQDPSCPRLSRELLDEKEPEVLQDSLDRCYSTPSGYLELPDLGQPYSSAVYSLEEQYLGLALDVDRTKKDQEEEEDQGPPCPRLSRELLEVVEPEVLQDSLDRCYSTPSSCLEQPDSCQPYGSSFYALEEKHVGFSLDVGEIEKKGKGKKRRGRRSKKERRRGRKEGEEDQNPPCPRLSRELLDEKGPEVLQDSLDRCYSTPSGCLELTDSCQPYRSAFYVLEQQRVGLAVDMDEIEKYQEVEEDQDPSCPRLSRELLDEKEPEVLQDSLDRCYSTPSGYLELPDLGQPYSSAVYSLEEQYLGLALDVDRTKKDQEEEEDQGPPCPRLSRELLEVVEPEVLQDSLDRCYSTPSSCLEQPDSCQPYGSSFYALEEKHVGFSLDVGEIEKKGKGKKRRGRRSKKKRRRGRKEGEEDQNPPCPRLNGVLMEVEEPEVLQDSLDGCYSTPSMYFELPDSFQHYRSVFYSFEEQHISFALYVDNRFFTLTVTSLHLVFQMGVIFPQ

SEQ ID NO: 27039 - protein, 902 aa, Homo sapiens [sequence omitted]

SEQ ID NO: 27040 - protein, 251 aa, Homo sapiens
MIPKEQKGPVMAAMGDLTEPVPTLDLGKKLSVPQDLMMEELSLRNNRGSLLFQKRQRRVQKFTFELAASQRAMLAGSARRKVTGTAESGTVANANGPEGPNYRSELHIFPASPGASLGGPEGAHPAAAPAGCVPSPSALAPGYAEPLKGVPPEKFNHTAISKGYRCPWQEFVSYRDYQSDGRSHTPSPNDYRNFNKTPVPFGGPLVGGTFPRPGTPFIPEPLSGLELLRLRPSFNRVAQGWVRNLPESEEL

SEQ ID NO: 27041 - protein, 205 aa, Homo sapiens
MIPKEQKGPVMAAMGDLTEPVPTLDLGKKLSVPQDLMMEELSLRNNRGSLLFQKRQRRVQKFTFELAASQRAMLAGSARRKVTGTAESGTVANANGPEGPNYRSELHIFPASPGASLGGPEGAHPAAAPAGCVPSPSALAPGYAEPLKGVPPEKFNHTAISKGYRCPWQEFVSYRDYQSDGRSHTPSFNRVAQGWVRNLPESEEL

SEQ ID NO: 27042 - protein, 87 aa, Homo sapiens
MLREVGPGVYGGWGGESPLWPFLAVPTLDLGKKLSVPQDLMMEELSLRNNRGSLLFQKRQRRVQKFTFELAASQRAVSKPPLCSWGK

SEQ ID NO: 27043 - protein, 248 aa, Homo sapiens
MAPGAPSSSPSPILAVLLFSSLVLSPAQAIVVYTDREVHGAVGSRVTLHCSFWSSEWVSDDISFTWRYQPEGGRDAISIFHYAKGQPYIDEVGTFKERIQWVGDPRWKDGSIVIHNLDYSDNGTFTCDVKNPPDIVGKTSQVTLYVFEKVPTRYGVVLGAVIGGVLGVVLLLLLLFYVVRYCWLRRQAALQRRLSAMEKGKLHKPGKDASKRGRQTPVLYAMLDHSRSTKAVSEKKAKGLGESRKDKK

SEQ ID NO: 27044 - protein, 311 aa, Homo sapiens
MAPGAPSSSPSPILAVLLFSSLVLSPAQAIVVYTDREVHGAVGSRVTLHCSFWSSEWVSDDISFTWRYQPEGGRDAISIFHYAKGQPYIDEVGTFKERIQWVGDPRWKDGSIVIHNLDYSDNGTFTCDVKNPPDIVGKTSQVTLYVFEKVPTRYGVVLGAVIGGVLGVVLLLLLLFYVVRYCWLRRQAALQRRLSAMEKGKLHKPGKDASKRGRQTPVLYAMLDHSRSTKAVSEKKAKGLGESRKDKKRLAGRAGDRGLGVESAKGPKVMVIEMELRKDEQSPELRPAVKSPSRTSLKNALKNMMGLNSDK

SEQ ID NO: 27045 - protein, 398 aa, Homo sapiens
MMWLLLTTTCLICGTLNAGGFLDLENEVNPEVWMNTSEIIIYNGYPSEEYEVTTEDGYILLVNRIPYGRTHARSTGPRPVVYMQHALFADNAYWLENYANGSLGFLLADAGYDVWMGNSRGNTWSRRHKTLSETDEKFWAFSFDEMAKYDLPGVIDFIVNKTGQEKLYFIGHSLGTTIGFVAFSTMPELAQRIKMNFALGPTISFKYPTGIFTRFFLLPNSIIKAVFGTKGFFLEDKKTKIASTKICNNKILWLICSEFMSLWAGSNKKNMNQSRMDVYMSHAPTGSSVHNILHIKQLYHSDEFRAYDWGNDADNMKHYNQSHPPIYDLTAMKVPTAIWAGGHDVLVTPQDVARILPQIKSLHYFKLLPDWNHFDFVWGLDAPQRMYSEIIALMKAYS

SEQ ID NO: 27046 - protein, 390 aa, Homo sapiens
MMQSATVPAEGAVKGLPEMLGVPMQQIPQCAGCNQHILDKFILKVLDRHWHSSCLKCADCQMQLADRCFSRAGSVYCKEDFFKRFGTKCTACQQGIPPTQVVRKAQDFVYHLHCFACIICNRQLATGDEFYLMEDGRLVCKEDYETAKQNDDSEAGAKRPRTTITAKQLETLKNAYKNSPKPARHVREQLSSETGLDMRVVQVWFQNRRAKEKRLKKDAGRHRWGQFYKSVKRSRGSSKQEKESSAEDCGVSDSELSFREDQILSELGHTNRIYGNVGDVTGGQLMNGSFSMDGTGQSYQDLRDGSPYGIPQSPSSISSLPSHAPLLNGLDYTVDSNLGIIAHAGQGVSQTLRAMAGGPTSDISTGSSVGYPDFPTSPGSWLDEMDHPPF

SEQ ID NO: 27047 - protein, 422 aa, Homo sapiens
MSVGAMKKGVGRAVGLGGGSGCQATEEDPLPNCGACAPGQGGRRWRLPQPAWVEGSSARLWEQATGTGWMDLEASLLPTGPNASNTSDGPDNLTSAGSPPRTGSISYINIIMPSVFGTICLLGIIGNSTVIFAVVKKSKLHWCNNVPDIFIINLSVVDLLFLLGMPFMIHQLMGNGVWHFGETMCTLITAMDANSQFTSTYILTAMAIDRYLATVHPISSTKFRKPSVATLVICLLWALSFISITPVWLYARLIPFPGGAVGCGIRLPNPDTDLYWFTLYQFFLAFALPFVVITAAYVRILQRMTSSVAPASQRSIRLRTKRVTRTAIAICLVFFVCWAPYYVLQLTQLSISRPTLTFVYLYNAAISLGYANSCLNPFVYIVLCETFRKRLVLSVKPAAQGQLRAVSNAQTADEERTESKGT

SEQ ID NO: 27048 - protein, 863 aa, Homo sapiens
MALPRCTWPNYVWRAVMACLVHRGLGAPLTLCMLGCLLQAGHVLSQKLDDVDPLVATNFGKIRGIKKELNNEILGPVIQFLGVPYAAPPTGERRFQPPEPPSPWSDIRNATQFAPVCPQNIIDGRLPEVMLPVWFTNNLDVVSSYVQDQSEDCLYLNIYVPTEDVKRISKECARKPGKKICRKGGPLTKKQTDDLGDNDGAEDEDIRDSGGPKPVMVYIHGGSYMEGTGNLYDGSVLASYGNVIVITVNYRLGVLGFLSTGDQAAKGNYGLLDLIQALRWTSENIGFFGGDPLRITVFGSGAGGSCVNLLTLSHYSEGNRWSNSTKGLFQRAIAQSGTALSSWAVSFQPAKYARMLATKVGCNVSDTVELVECLQKKPYKELVDQDIQPARYHIAFGPVIDGDVIPDDPQILMEQGEFLNYDIMLGVNQGEGLKFVENIVDSDDGISASDFDFAVSNFVDNLYGYPEGKDVLRETIKFMYTDWADRHNPETRRKTLLALFTDHQWVAPAVATADLHSNFGSPTYFYAFYHHCQTDQVPAWADAAHGDEVPYVLGIPMIGPTELFPCNFSKNDVMLSAVVMTYWTNFAKTGDPNQPVPQDTKFIHTKPNRFEEVAWTRYSQKDQLYLHIGLKPRVKEHYRANKVNLWLELVPHLHNLNDISQYTSTTTKVPSTDITFRPTRKNSVPVTSAFPTAKQDDPKQQPSPFSVDQRDYSTELSVTIAVGASLLFLNILAFAALYYKKDKRRHDVHRRCSPQRTTTNDLTHAQEEEIMSLQMKHTDLDHECESIHPHEVVLRTACPPDYTLAMRRSPDDVPLMTPNTITMIPNTIPGIQPLHTFNTFTGGQNNTLPHPHPHPHSHSTTRV

SEQ ID NO: 27049 - protein, 823 aa, Homo sapiens
MALPRCTWPNYVWRAVMACLVHRGLGAPLTLCMLGCLLQAGHVLSQKLDDVDPLVATNFGKIRGIKKELNNEILGPVIQFLGVPYAAPPTGERRFQPPEPPSPWSDIRNATQFAPVCPQNIIDGRLPEVMLPVWFTNNLDVVSSYVQDQSEDCLYLNIYVPTEDDIRDSGGPKPVMVYIHGGSYMEGTGNLYDGSVLASYGNVIVITVNYRLGVLGFLSTGDQAAKGNYGLLDLIQALRWTSENIGFFGGDPLRITVFGSGAGGSCVNLLTLSHYSEGNRWSNSTKGLFQRAIAQSGTALSSWAVSFQPAKYARMLATKVGCNVSDTVELVECLQKKPYKELVDQDIQPARYHIAFGPVIDGDVIPDDPQILMEQGEFLNYDIMLGVNQGEGLKFVENIVDSDDGISASDFDFAVSNFVDNLYGYPEGKDVLRETIKFMYTDWADRHNPETRRKTLLALFTDHQWVAPAVATADLHSNFGSPTYFYAFYHHCQTDQVPAWADAAHGDEVPYVLGIPMIGPTELFPCNFSKNDVMLSAVVMTYWTNFAKTGDPNQPVPQDTKFIHTKPNRFEEVAWTRYSQKDQLYLHIGLKPRVKEHYRANKVNLWLELVPHLHNLNDISQYTSTTTKVPSTDITFRPTRKNSVPVTSAFPTAKQDDPKQQPSPFSVDQRDYSTELSVTIAVGASLLFLNILAFAALYYKKDKRRHDVHRRCSPQRTTTNDLTHAQEEEIMSLQMKHTDLDHECESIHPHEVVLRTACPPDYTLAMRRSPDDVPLMTPNTITMIPNTIPGIQPLHTFNTFTGGQNNTLPHPHPHPHSHSTTRV

SEQ ID NO: 27050 - protein, 878 aa, Homo sapiens
MDLDKPSVWGSLKQRTRPLLINLSKKKVKKNPSKPPDLRARHHLDRRLSLSVPDLLEAEALAPEGRPYSGPQSSYTSVPSSLSTAGIFPKSSSSSLKQSEEELDWSQEEASHLHVVETDSEEAYASPAERRRVSSNGIFDLQKTSLGGDAPEEPEKLCGSSDLNASMTSQHFEEQSVPGEASDGLSNLPSPFAYLLTIHLKEGRNLVVRDRCGTSDPYVKFKLNGKTLYKSKVIYKNLNPVWDEIVVLPIQSLDQKLRVKVYDRDLTTSDFMGSAFVILSDLELNRTTEHILKLEDPNSLEDDMGVIVLNLNLVVKQGDFKRHRWSNRKRLSASKSSLIRNLRLSESLKKNQLWNGIISITLLEGKNVSGGSMTEMFVQLKLGDQRYKSKTLCKSANPQWQEQFDFHYFSDRMGILDIEVWGKDNKKHEERLGTCKVDISALPLKQANCLELPLDSCLGALLMLVTLTPCAGVSVSDLCVCPLADLSERKQITQRYCLQNSLKDVKDVGILQVKVLKAADLLAADFSGKSDPFCLLELGNDRLQTHTVYKNLNPEWNKVFTFPIKDIHDVLEVTVFDEDGDKPPDFLGKVAIPLLSIRDGQPNCYVLKNKDLEQAFKGVIYLEMDLIYNPVKASIRTFTPREKRFVEDSRKLSKKILSRDVDRVKRITMAIWNTMQFLKSCFQWESTLRSTIAFAVFLITVWNFELYMIPLALLLIFVYNFIRPVKGKVSSIQDSQESTDIDDEEDEDDKESEKKGLIERIYMVQDIVSTVQNVLEEIASFGERIKNTFNWTVPFLSSLACLILAAATIILYFIPLRYIILIWGINKFTKKLRNPYSIDNNELLDFLSRVPSDVQKVQYAELKLCSSHSPLRKKRSAL

SEQ ID NO: 27051 - protein, 823 aa, Homo sapiens
MDLDKPSVWGSLKQRTRPLLINLSKKKVKKNPSKPPDLRARHHLDRRLSLSVPDLLEAEALAPEGRPYSGPQSSYTSVPSSLSTAGIFPKSSSSSLKQSEEELDWSQEEASHLHVVETDSEEAYASPAERRRVSSNGIFDLQKTSLGGDAPEEPEKLCGSSDLNASMTSQHFEEQSVPGEASDGLSNLPSPFAYLLTIHLKEGRNLVVRDRCGTSDPYVKFKLNGKTLYKSKVIYKNLNPVWDEIVVLPIQSLDQKLRVKVYDRDLTTSDFMGSAFVILSDLELNRTTEHILKLEDPNSLEDDMGVIVLNLNLVVKQGDFKRHRWSNRKRLSASKSSLIRNLRLSESLKKNQLWNGIISITLLEGKNVSGGSMTEMFVQLKLGDQRYKSKTLCKSANPQWQEQFDFHYFSDRMGILDIEVWGKDNKKHEERLGTCKVDISALPLKQANCLELPLDSCLGALLMLVTLTPCAGVSVSDLCVCPLADLSERKQITQRYCLQNSLKDVKDVGILQVKVLKAADLLAADFSGKSDPFCLLELGNDRLQTHTVYKNLNPEWNKVFTFPIKDIHDVLEVTVFDEDGDKPPDFLGKVAIPLLSIRDGQPNCYVLKNKDLEQAFKGVIYLEMDLIYNPVKASIRTFTPREKRFVEDSRKLSKKILSRDVDRVKRITMAIWNTMQFLKSCFQWESTLRSTIAFAESEKKGLIERIYMVQDIVSTVQNVLEEIASFGERIKNTFNWTVPFLSSLACLILAAATIILYFIPLRYIILIWGINKFTKKLRNPYSIDNNELLDFLSRVPSDVQKVQYAELKLCSSHSPLRKKRSAL

SEQ ID NO: 27052 - protein, 466 aa, Homo sapiens
MGILDIEVWGKDNKKHEERLGTCKVDISALPLKQANCLELPLDSCLGALLMLVTLTPCAGVSVSDLCVCPLADLSERKQITQRYCLQNSLKDVKDVGILQVKVLKAADLLAADFSGKSDPFCLLELGNDRLQTHTVYKNLNPEWNKVFTFPIKDIHDVLEVTVFDEDGDKPPDFLGKVAIPLLSIRDGQPNCYVLKNKDLEQAFKGVIYLEMDLIYNPVKASIRTFTPREKRFVEDSRKLSKKILSRDVDRVKRITMAIWNTMQFLKSCFQWESTLRSTIAFAVFLITVWNFELYMIPLALLLIFVYNFIRPVKGKVSSIQDSQESTDIDDEEDEDDKESEKKGLIERIYMVQDIVSTVQNVLEEIASFGERIKNTFNWTVPFLSSLACLILAAATIILYFIPLRYIILIWGINKFTKKLRNPYSIDNNELLDFLSRVPSDVQKVQYAELKLCSSHSPLRKKRSAL

SEQ ID NO: 27053 - protein, 306 aa, Homo sapiens
MGILDIEVWGKDNKKHEERLGTCKVDISALPLKQANCLELPLDSCLGALLMLVTLTPCAGVSVSDLCVCPLADLSERKQITQRYCLQNSLKDVKDVGILQVKVLKAADLLAADFSGKSDPFCLLELGNDRLQTHTVYKNLNPEWNKVFTFPIKDIHDVLEVTVFDEDGDKPPDFLGKVAIPLLSIRDGQPNCYVLKNKDLEQAFKGVIYLEMDLIYNPVKASIRTFTPREKRFVEDSRKLSKKILSRDVDRVKRITMAIWNTMQFLKSCFQWESTLRSTIAFAHRKEEPPLSMKCTLFSGDIGPSL

SEQ ID NO: 27054 - protein, 199 aa, Homo sapiens
MDLDKPSVWGSLKQRTRPLLINLSKKKVKKNPSKPPDLRARHHLDRRLSLSVPDLLEAEALAPEGRPYSGPQSSYTSVPSSLSTAGIFPKSSSSSLKQSEEELDWSQEEASHLHVVETDSEEAYASPAERRRVSSNGIFDLQKTSLGGDAPEEPEKLCGSSDLNASMTSQHFEEQSDSQKFEMTQKFNWAHVIHIQKQT

SEQ ID NO: 27055 - protein, 148 aa, Homo sapiens
MKAAGILTLIGCLVTGAESKIYTRCKLAKIFSRAGLDNYWGFSLGNWICMAYYESGYNTTAQTVLDDGSIDYGIFQINSFAWCRRGKLKENNHCHVACSALITDDLTDAIICARKIVKETQGMNYWQGWKKHCEGRDLSEWKKGCEVS

SEQ ID NO: 27056 - protein, 194 aa, Homo sapiens
MQDAPLSCLSPTKWSSVSSADSTEKSASGAGTRNLPFQFCLRQALRMKAAGILTLIGCLVTGAESKIYTRCKLAKIFSRAGLDNYWGFSLGNWICMAYYESGYNTTAQTVLDDGSIDYGIFQINSFAWCRRGKLKENNHCHVACSALITDDLTDAIICARKIVKETQGMNYWQGWKKHCEGRDLSEWKKGCEVS

SEQ ID NO: 27057 - protein, 966 aa, Homo sapiens
MANFQEHLSCSSSPHLPFSESKTFNGLQDELTAMGNHPSPKLLEDQQEKGMVRTELIESVHSPVTTTVLTSVSEDSRDQFENSVLQLREHDESETAVSQGNSNTVDGESTSGTEDIKIQFSRSGSGSGGFLEGLFGCLRPVWNIIGKAYSTDYKLQQQDTWEVPFEEISELQWLGSGAQGAVFLGKFRAEEVAIKKVREQNETDIKHLRKLKHPNIIAFKGVCTQAPCYCIIMEYCAHGQLYEVLRAGRKITPRLLVDWSTGIASGMNYLHLHKIIHRDLKSPNVLVTHTDAVKISDFGTSKELSDKSTKMSFAGTVAWMAPEVIRNEPVSEKVDIWSFGVVLWELLTGEIPYKDVDSSAIIWGVGSNSLHLPVPSTCPDGFKILMKQTWQSKPRNRPSFRQTLMHLDIASADVLATPQETYFKSQAEWREEVKKHFEKIKSEGTCIHRLDEELIRRRREELRHALDIREHYERKLERANNLYMELSAIMLQLEMREKELIKREQAVEKKYPGTYKRHPVRPIIHPNAMEKLMKRKGVPHKSGMQTKRPDLLRSEGIPTTEVAPTASPLSGSPKMSTSSSKSRYRSKPRHRRGNSRGSHSDFAAILKNQPAQENSPHPTYLHQAQSQYPSLHHHNSLQQQYQQPPPAMSQSHHPRLNMHGQDIATCANNLRYFGPAAALRSPLSNHAQRQLPGSSPDLISTAMAADCWRSSEPDKGQAGPWGCCQADAYDPCLQCRPEQYGSLDIPSAEPVGRSPDLSKSPAHNPLLENAQSSEKTEENEFSGCRSESSLGTSHLGTPPALPRKTRPLQKSGDDSSEEEEGEVDSEVEFPRRQRPHRCISSCQSYSTFSSENFSVSDGEEGNTSDHSNSPDELADKLEDRLAEKLDDLLSQTPEIPIDISSHSDGLSDKECAVRRVKTQMSLGKLCVEERGYENPMQFEESDCDSSDGECSDATVRTNKHYSSATW

SEQ ID NO: 27058 - protein, 160 aa, Homo sapiens
MANFQEHLSCSSSPHLPFSESKTFNGLQDELTAMGNHPSPKLLEDQQEKGMVRTELIESVHSPVTTTVLTSVSEDSRDQFENSVLQLREHDESETAVSQGNSNTVDGESTSGTEDIKIQFSRSGSGSGGFLEGLFGCLRPVWNIIGKAYSTDYKLQQQVF

SEQ ID NO: 27059 - protein, 822 aa, Homo sapiens
MSYVECKCLQLENKNTWEVPFEEISELQWLGSGAQGAVFLGKFRAEEVAIKKVREQNETDIKHLRKLKHPNIIAFKGVCTQAPCYCIIMEYCAHGQLYEVLRAGRKITPRLLVDWSTGIASGMNYLHLHKIIHRDLKSPNVLVTHTDAVKISDFGTSKELSDKSTKMSFAGTVAWMAPEVIRNEPVSEKVDIWSFGVVLWELLTGEIPYKDVDSSAIIWGVGSNSLHLPVPSTCPDGFKILMKQTWQSKPRNRPSFRQTLMHLDIASADVLATPQETYFKSQAEWREEVKKHFEKIKSEGTCIHRLDEELIRRRREELRHALDIREHYERKLERANNLYMELSAIMLQLEMREKELIKREQAVEKKYPGTYKRHPVRPIIHPNAMEKLMKRKGVPHKSGMQTKRPDLLRSEGIPTTEVAPTASPLSGSPKMSTSSSKSRYRSKPRHRRGNSRGSHSDFAAILKNQPAQENSPHPTYLHQAQSQYPSLHHHNSLQQQYQQPPPAMSQSHHPRLNMHGQDIATCANNLRYFGPAAALRSPLSNHAQRQLPGSSPDLISTAMAADCWRSSEPDKGQAGPWGCCQADAYDPCLQCRPEQYGSLDIPSAEPVGRSPDLSKSPAHNPLLENAQSSEKTEENEFSGCRSESSLGTSHLGTPPALPRKTRPLQKSGDDSSEEEEGEVDSEVEFPRRQRPHRCISSCQSYSTFSSENFSVSDGEEGNTSDHSNSPDELADKLEDRLAEKLDDLLSQTPEIPIDISSHSDGLSDKECAVRRVKTQMSLGKLCVEERGYENPMQFEESDCDSSDGECSDATVRTNKHYSSATW

SEQ ID NO: 27060 - protein, 759 aa, Homo sapiens
MYCGIQILALWERGVCTQAPCYCIIMEYCAHGQLYEVLRAGRKITPRLLVDWSTGIASGMNYLHLHKIIHRDLKSPNVLVTHTDAVKISDFGTSKELSDKSTKMSFAGTVAWMAPEVIRNEPVSEKVDIWSFGVVLWELLTGEIPYKDVDSSAIIWGVGSNSLHLPVPSTCPDGFKILMKQTWQSKPRNRPSFRQTLMHLDIASADVLATPQETYFKSQAEWREEVKKHFEKIKSEGTCIHRLDEELIRRRREELRHALDIREHYERKLERANNLYMELSAIMLQLEMREKELIKREQAVEKKYPGTYKRHPVRPIIHPNAMEKLMKRKGVPHKSGMQTKRPDLLRSEGIPTTEVAPTASPLSGSPKMSTSSSKSRYRSKPRHRRGNSRGSHSDFAAILKNQPAQENSPHPTYLHQAQSQYPSLHHHNSLQQQYQQPPPAMSQSHHPRLNMHGQDIATCANNLRYFGPAAALRSPLSNHAQRQLPGSSPDLISTAMAADCWRSSEPDKGQAGPWGCCQADAYDPCLQCRPEQYGSLDIPSAEPVGRSPDLSKSPAHNPLLENAQSSEKTEENEFSGCRSESSLGTSHLGTPPALPRKTRPLQKSGDDSSEEEEGEVDSEVEFPRRQRPHRCISSCQSYSTFSSENFSVSDGEEGNTSDHSNSPDELADKLEDRLAEKLDDLLSQTPEIPIDISSHSDGLSDKECAVRRVKTQMSLGKLCVEERGYENPMQFEESDCDSSDGECSDATVRTNKHYSSATW

SEQ ID NO: 27061 - protein, 128 aa, Homo sapiens
MANFQEHLSCSSSPHLPFSESKTFNGLQDELTAMGNHPSPKLLEDQQEKGMVRTELIESVHSPVTTTVLTSVSEDSRDQFENSVLQLREHDESETAVSQGNSNTVDGESTSGTEDIKIQFSRYLGSAI

SEQ ID NO: 27062 - protein, 859 aa, Homo sapiens
MACLHETRTPSPSFGGFVSTLSEASMRKLDPDTSDCTPEKDLTPTHVLQLHEQDAGGPGGAAGSPESRASRVRADEVRLQCQSGSGFLEGLFGCLRPVWTMIGKAYSTEHKQQQEDLWEVPFEEILDLQWVGSGAQGAVFLGRFHGEEVAVKKVRDLKETDIKHLRKLKHPNIITFKGVCTQAPCYCILMEFCAQGQLYEVLRAGRPVTPSLLVDWSMGIAGGMNYLHLHKIIHRDLKSPNMLITYDDVVKISDFGTSKELSDKSTKMSFAGTVAWMAPEVIRNEPVSEKVDIWSFGVVLWELLTGEIPYKDVDSSAIIWGVGSNSLHLPVPSSCPDGFKILLRQCWNSKPRNRPSFRQILLHLDIASADVLSTPQETYFKSQAEWREEVKLHFEKIKSEGTCLHRLEEELVMRRREELRHALDIREHYERKLERANNLYMELNALMLQLELKERELLRREQALERRCPGLLKPHPSRGLLHGNTMEKLIKKRNVPQKLSPHSKRPDILKTESLLPKLDAALSGVGLPGCPKGPPSPGRSRRGKTRHRKASAKGSCGDLPGLRTAVPPHEPGGPGSPGGLGGGPSAWEACPPALRGLHHDLLLRKMSSSSPDLLSAALGSRGRGATGGAGDPGSPPPARGDTPPSEGSAPGSTSPDSPGGAKGEPPPPVGPGEGVGLLGTGREGTSGRGGSRAGSQHLTPAALLYRAAVTRSQKRGISSEEEEGEVDSEVELTSSQRWPQSLNMRQSLSTFSSENPSDGEEGTASEPSPSGTPEVGSTNTDERPDERSDDMCSQGSEIPLDPPPSEVIPGPEPSSLPIPHQELLRERGPPNSEDSDCDSTELDNSNSVDALRPPASLPP

SEQ ID NO: 27063 - protein, 892 aa, Homo sapiens
MACLHETRTPSPSFGGFVSTLSEASMRKLDPDTSDCTPEKDLTPTQCVLRDVVPLGGQGGGGPSPSPGGEPPPEPFANSVLQLHEQDAGGPGGAAGSPESRASRVRADEVRLQCQSGSGFLEGLFGCLRPVWTMIGKAYSTEHKQQQEDLWEVPFEEILDLQWVGSGAQGAVFLGRFHGEEVAVKKVRDLKETDIKHLRKLKHPNIITFKGVCTQAPCYCILMEFCAQGQLYEVLRAGRPVTPSLLVDWSMGIAGGMNYLHLHKIIHRDLKSPNMLITYDDVVKISDFGTSKELSDKSTKMSFAGTVAWMAPEVIRNEPVSEKVDIWSFGVVLWELLTGEIPYKDVDSSAIIWGVGSNSLHLPVPSSCPDGFKILLRQCWNSKPRNRPSFRQILLHLDIASADVLSTPQETYFKSQAEWREEVKLHFEKIKSEGTCLHRLEEELVMRRREELRHALDIREHYERKLERANNLYMELNALMLQLELKERELLRREQALERRCPGLLKPHPSRGLLHGNTMEKLIKKRNVPQKLSPHSKRPDILKTESLLPKLDAALSGVGLPGCPKGPPSPGRSRRGKTRHRKASAKGSCGDLPGLRTAVPPHEPGGPGSPGGLGGGPSAWEACPPALRGLHHDLLLRKMSSSSPDLLSAALGSRGRGATGGAGDPGSPPPARGDTPPSEGSAPGSTSPDSPGGAKGEPPPPVGPGEGVGLLGTGREGTSGRGGSRAGSQHLTPAALLYRAAVTRSQKRGISSEEEEGEVDSEVELTSSQRWPQSLNMRQSLSTFSSENPSDGEEGTASEPSPSGTPEVGSTNTDERPDERSDDMCSQGSEIPLDPPPSEVIPGPEPSSLPIPHQELLRERGPPNSEDSDCDSTELDNSNSVDALRPPASLPP

SEQ ID NO: 27064 - protein, 520 aa, Homo sapiens
MRNKKILKEDELLSETQQAAFHQIAMEPFEINVPKPKRRNGVNFSLAVVVIYLILLTAGAGLLVVQVLNLQARLRVLEMYFLNDTLAAEDSPSFSLLQSAHPGEHLAQGASRLQVLQAQLTWVRVSHEHLLQRVDNFTQNPGMFRIKGEQGAPGLQGHKGAMGMPGAPGPPGPPAEKGAKGAMGRDGATGPSGPQGPPGVKGEAGLQGPQGAPGKQGATGTPGPQGEKGSKGDGGLIGPKGETGTKGEKGDLGLPGSKGDRGMKGDAGVMGPPGAQGSKGDFGRPGPPGLAGFPGAKGDQGQPGLQGVPGPPGAVGHPGAKGEPGSAGSPGRAGLPGSPGSPGATGLKGSKGDTGLQGQQGRKGESGVPGPAGVKGEQGSPGLAGPKGAPGQAGQKGDQGVKGSSGEQGVKGEKGERGENSVSVRIVGSSNRGRAEVYYSGTWGTICDDEWQNSDAIVFCRMLGYSKGRALYKVGAGTGQIWLDNVQCRGTESTLWSCTKNSWGHHDCSHEEDAGVECSV

SEQ ID NO: 27065 - protein, 442 aa, Homo sapiens
MYFLNDTLAAEDSPSFSLLQSAHPGEHLAQGASRLQVLQAQLTWVRVSHEHLLQRVDNFTQNPGMFRIKGEQGAPGLQGHKGAMGMPGAPGPPGPPAEKGAKGAMGRDGATGPSGPQGPPGVKGEAGLQGPQGAPGKQGATGTPGPQGEKGSKGDGGLIGPKGETGTKGEKGDLGLPGSKGDRGMKGDAGVMGPPGAQGSKGDFGRPGPPGLAGFPGAKGDQGQPGLQGVPGPPGAVGHPGAKGEPGSAGSPGRAGLPGSPGSPGATGLKGSKGDTGLQGQQGRKGESGVPGPAGVKGEQGSPGLAGPKGAPGQAGQKGDQGVKGSSGEQGVKGEKGERGENSVSVRIVGSSNRGRAEVYYSGTWGTICDDEWQNSDAIVFCRMLGYSKGRALYKVGAGTGQIWLDNVQCRGTESTLWSCTKNSWGHHDCSHEEDAGVECSV

SEQ ID NO: 27066 - protein, 335 aa, Homo sapiens
MGASSSSALARLGLPARPWPRWLGVAALGLAAVALGTVAWRRAWPRRRRRLQQVGTVAKLWIYPVKSCKGVPVSEAECTAMGLRSGNLRDRFWLVIKEDGHMVTARQEPRLVLISIIYENNCLIFRAPDMDQLVLPSKQPSSNKLHNCRIFGLDIKGRDCGNEAAKWFTNFLKTEAYRLVQFETNMKGRTSRKLLPTLDQNFQVAYPDYCPLLIMTDASLVDLNTRMEKKMKMENFRPNIVVTGCDAFEEDTWDELLIGSVEVKKVMACPRCILTTVDPDTGVIDRKQPLDTLKSYRLCDPSERELYKLSPLFGIYYSVEKIGSLRVGDPVYRMV

SEQ ID NO: 27067 - protein, 257 aa, Homo sapiens
MGASSSSALARLGLPARPWPRWLGVAALGLAAVALGTVAWRRAWPRRRRRLQQVGTVAKLWIYPVKSCKGVPVSEAECTAMGLRSGNLRDRFWLVIKEDGHMVTARQEPRLVLISIIYENNCLIFRAPDMDQLVLPSKQPSSNKLHNCRIFGLDIKGRDCGNEAAKWFTNFLKTEAYRLVQFETNMKGRTSRKLLPTLDQNFQVAYPDYCPLLIMTDASLVDLNTRMEKKMKMENFRPNIVVTGCDAFEEASATRRD

SEQ ID NO: 27068 - protein, 1512 aa, Homo sapiens
MAAAAGNRASSSGFPGARATSPEAGGGGGALKASSAPAAAAGLLREAGSGGRERADWRRRQLRKVRSVELDQLPEQPLFLAASPPASSTSPSPEPADAAGSGTGFQPVAVPPPHGAASRGGAHLTESVAAPDSGASSPAAAEPGEKRAPAAEPSPAAAPAGREMENKETLKGLHKMDDRPEERMIREKLKATCMPAWKHEWLERRNRRGPVVVKPIPVKGDGSEMNHLAAESPGEVQASAASPASKGRRSPSPGNSPSGRTVKSESPGVRRKRVSPVPFQSGRITPPRRAPSPDGFSPYSPEETNRRVNKVMRARLYLLQQIGPNSFLIGGDSPDNKYRVFIGPQNCSCARGTFCIHLLFVMLRVFQLEPSDPMLWRKTLKNFEVESLFQKYHSRRSSRIKAPSRNTIQKFVSRMSNSHTLSSSSTSTSSSENSIKDEEEQMCPICLLGMLDEESLTVCEDGCRNKLHHHCMSIWAEECRRNREPLICPLCRSKWRSHDFYSHELSSPVDSPSSLRAAQQQTVQQQPLAGSRRNQESNFNLTHYGTQQIPPAYKDLAEPWIQVFGMELVGCLFSRNWNVREMALRRLSHDVSGALLLANGESTGNSGGSSGSSPSGGATSGSSQTSISGDVVEACCSVLSMVCADPVYKVYVAALKTLRAMLVYTPCHSLAERIKLQRLLQPVVDTILVKCADANSRTSQLSISTLLELCKGQAGELAVGREILKAGSIGIGGVDYVLNCILGNQTESNNWQELLGRLCLIDRLLLEFPAEFYPHIVSTDVSQAEPVEIRYKKLLSLLTFALQSIDNSHSMVGKLSRRIYLSSARMVTTVPHVFSKLLEMLSVSSSTHFTRMRRRLMAIADEVEIAEAIQLGVEDTLDGQQDSFLQASVPNNYLETTENSSPECTVHLEKTGKGLCATKLSASSEDISERLASISVGPSSSTTTTTTTTEQPKPMVQTKGRPHSQCLNSSPLSHHSQLMFPALSTPSSSTPSVPAGTATDVSKHRLQGFIPCRIPSASPQTQRKFSLQFHRNCPENKDSDKLSPVFTQSRPLPSSNIHRPKPSRPTPGNTSKQGDPSKNSMTLDLNSSSKCDDSFGCSSNSSNAVIPSDETVFTPVEEKCRLDVNTELNSSIEDLLEASMPSSDTTVTFKSEVAVLSPEKAENDDTYKDDVNHNQKCKEKMEAEEEEALAIAMAMSASQDALPIVPQLQVENGEDIIIIQQDTPETLPGHTKAKQPYREDTEWLKGQQIGLGAFSSCYQAQDVGTGTLMAVKQVTYVRNTSSEQEEVVEALREEIRMMSHLNHPNIIRMLGATCEKSNYNLFIEWMAGGSVAHLLSKYGAFKESVVINYTEQLLRGLSYLHENQIIHRDVKGANLLIDSTGQRLRIADFGAAARLASKGTGAGEFQGQLLGTIAFMAPEVLRGQQYGRSCDVWSVGCAIIEMACAKPPWNAEKHSNHLALIFKIASATTAPSIPSHLSPGLRDVALRCLELQPQDRPPSRELLKHPVFRTTW

SEQ ID NO: 27069 - protein, 911 aa, Homo sapiens
MAAAAASAPQQLSDEELFSQLRRYGLSPGPVTESTRPVYLKKLKKLREEEQQQHRSGGRGNKTRNSNNNNTAAATVAAAGPAAAAAAGMGVRPVSGDLSYLRTPGGLCRISASGPESLLGGPGGASAAPAAGSKVLLGFSSDESDVEASPRDQAGGGGRKDRASLQYRGLKAPPAPLAASEVTNSNSAERRKPHSWWGARRPAGPELQTPPGKDGAVEDEEGEGEDGEERDPETEEPLWASRTVNGSRLVPYSCRENYSDSEEEDDDDVASSRQVLKDDSLSRHRPRRTHSKPLPPLTAKSAGGRLETSVQGGGGLAMNDRAAAAGSLDRSRNLEEAAAAEQGGGCDQVDSSPVPRYRVNAKKLTPLLPPPLTDMDSTLDSSTGSLLKTNNHIGGGAFSVDSPRIYSNSLPPSAAVAASSSLRINHANHTGSNHTYLKNTYNKPKLSEPEEELLQQFKREEVSPTGSFSAHYLSMFLLTAACLFFLILGLTYLGMRGTGVSEDGELSIENPFGETFGKIQESEKTLMMNTLYKLHDRLAQLAGDHECGSSSQRTLSVQEAAAYLKDLGPEYEGIFNTSLQWILENGKDVGIRCVGFGPEEELTNITDVQFLQSTRPLMSFWCRFRRAFVTVTHRLLLLCLGVVMVCVVLRYMKYRWTKEEEETRQMYDMVVKIIDVLRSHNEACQENKDLQPYMPIPHVRDSLIQPHDRKKMKKVWDRAVDFLAANESRVRTETRRIGGADFLVWRWIQPSASCDKILVIPSKVWQGQAFHLDRRNSPPNSLTPCLKIRNMFDPVMEIGDQWHLAIQEAILEKCSDNDGIVHIAVDKNSREGCVYVKCLSPEYAGKAFKALHGSWFDGKLVTVKYLRLDRYHHRFPQALTSNTPLKPSNKHMNSMSHLRLRTGLTNSQGSS

SEQ ID NO: 27070 - protein, 346 aa, Homo sapiens
MKFSPAHYLLPLLPALVLSTRQDYEELEKQLKEVFKERSTILRQLTKTSRELDGIKVNLQSLKNDEQSAKTDVQKLLELGQKQREEMKSLQEALQNQLKETSEKAEKHQATINFLKTEVERKSKMIRDLQNENKSLKNKLLSGNKLCGIHAEESKKIQAQLKELRYGKKDLLFKAQQLTDLEQKLAVAKNELEKAALDRESQMKAMKETVQLCLTSVFRDQPPPPLSLITSNPTRMLLPPRNIASKLPDAAAKSKPQQSASGNNESSQVESTKEGNPSTTACDSQDEGRPCSMKHKESPPSNATAETEPIPQKLQMPPCSECEVKKAPEKPLTSFEGMAAREEKIL

SEQ ID NO: 27071 - protein, 159 aa, Homo sapiens
MKFSPAHYLLPLLPALVLSTRQDYEELEKQLKEVFKERSTILRQLTKTSRELDGIKVNLQSLKNDEQSAKTDVQKLLELGQKQREEMKSLQEALQNQLKETSEKAEKHQATINFLKTEVERKSKMIRDLQNEDSRKRPRDLQWKIVSMRTMSIYLLMYL

SEQ ID NO: 27072 - protein, 136 aa, Homo sapiens
MKFSPAHYLLPLLPALVLSTRQDYEELEKQLKEVFKERSTILRQLTKTSRELDGIKVNLQSLKNDEQSAKTDVQKLLELGQKQREEMKSLQEALQNQLKETSEKAEKHQATINFLKTEVERKSKMIRDLQNEVIQI

SEQ ID NO: 27073 - protein, 260 aa, Homo sapiens
MKSLQEALQNQLKETSEKAEKHQATINFLKTEVERKSKMIRDLQNENKSLKNKLLSGNKLCGIHAEESKKIQAQLKELRYGKKDLLFKAQQLTDLEQKLAVAKNELEKAALDRESQMKAMKETVQLCLTSVFRDQPPPPLSLITSNPTRMLLPPRNIASKLPDAAAKSKPQQSASGNNESSQVESTKEGNPSTTACDSQDEGRPCSMKHKESPPSNATAETEPIPQKLQMPPCSECEVKKAPEKPLTSFEGMAAREEKIL

SEQ ID NO: 27074 - protein, 117 aa, Homo sapiens
MASFPLLLTLLTHCAGSWAQSVLTQPPSASGTPGQRVTISCSGSSSNIGSNTVNWYQQLPGTAPKLLIYSNNQRPSGVPDRFSGSKSGTSASLAISGLQSEDEADYYCAAWDDSLNG

SEQ ID NO: 27075 - protein, 117 aa, Homo sapiens
MAGFPLLLTLLTHCAGSWAQSVLTQPPSASGTPGQRVTISCSGSSSNIGSNYVYWYQQLPGTAPKLLIYSNNQRPSGVPDRFSGSKSGTSASLAISGLRSEDEADYYCAAWDDSLSG

SEQ ID NO: 27076 - protein, 1374 aa, Homo sapiens
MSTEADEGITFSVPPFAPSGFCTIPEGGICRRGGAAAVGEGEEHQLPPPPPGSFWNVESAAAPGIGCPAATSSSSATRGRGSSVGGGSRRTTVAYVINEASQGQLVVAESEALQSLREACETVGATLETLHFGKLDFGETTVLDRFYNADIAVVEMSDAFRQPSLFYHLGVRESFSMANNIILYCDTNSDSLQSLKEIICQKNTMCTGNYTFVPYMITPHNKVYCCDSSFMKGLTELMQPNFELLLGPICLPLVDRFIQLLKVAQASSSQYFRESILNDIRKARNLYTGKELAAELARIRQRVDNIEVLTADIVINLLLSYRDIQDYDSIVKLVETLEKLPTFDLASHHHVKFHYAFALNRRNLPGDRAKALDIMIPMVQSEGQVASDMYCLVGRIYKDMFLDSNFTDTESRDHGASWFKKAFESEPTLQSGINYAVLLLAAGHQFESSFELRKVGVKLSSLLGKKGNLEKLQSYWEVGFFLGASVLANDHMRVIQASEKLFKLKTPAWYLKSIVETILIYKHFVKLTTEQPVAKQELVDFWMDFLVEATKTDVTVVRFPVLILEPTKIYQPSYLSINNEVEEKTISIWHVLPDDKKGIHEWNFSASSVRGVSISKFEERCCFLYVLHNSDDFQIYFCTELHCKKFFEMVNTITEEKGRSTEEGDCESDLLEYDYEYDENGDRVVLGKGTYGIVYAGRDLSNQVRIAIKEIPERDSRYSQPLHEEIALHKHLKHKNIVQYLGSFSENGFIKIFMEQVPGGSLSALLRSKWGPLKDNEQTIGFYTKQILEGLKYLHDNQIVHRDIKGDNVLINTYSGVLKISDFGTSKRLAGINPCTETFTGTLQYMAPEIIDKGPRGYGKAADIWSLGCTIIEMATGKPPFYELGEPQAAMFKVGMFKVHPEIPESMSAEAKAFILKCFEPDPDKRACANDLLVDEFLKVSSKKKKTQPKLSALSAGSNEYLRSISLPVPVLVEDTSSSSEYGSVSPDTELKVDPFSFKTRAKSCGERDVKGIRTLFLGIPDENFEDHSAPPSPEEKDSGFFMLRKDSERRATLHRILTEDQDKIVRNLMESLAQGAEEPKLKWEHITTLIASLREFVRSTDRKIIATTLSKLKLELDFDSHGISQVQVVLFGFQDAVNKVLRNHNIKPHWMFALDSIIRKAVQTAITILVPELRPHFSLASESDTADQEDLDVEDDHEEQPSNQTVRRPQAVIEDAVATSGVSTLSSTVSHDSQSAHRSLNVQLGRMKIETNRLLEELVRKEKELQALLHRAIEEKDQEIKHLKLKSQPIEIPELPVFHLNSSGTNTEDSELTDWLRVNGADEDTISRFLAEDYTLLDVLYYVTRDDLKCLRLRGGMLCTLWKAIIDFRNKQT

SEQ ID NO: 27077 - protein, 621 aa, Homo sapiens
MEQVPGGSLSALLRSKWGPLKDNEQTIGFYTKQILEGLKYLHDNQIVHRDIKGDNVLINTYSGVLKISDFGTSKRLAGINPCTETFTGTLQYMAPEIIDKGPRGYGKAADIWSLGCTIIEMATGKPPFYELGEPQAAMFKVGMFKVHPEIPESMSAEAKAFILKCFEPDPDKRACANDLLVDEFLKVSSKKKKTQPKLSALSAGSNEYLRSISLPVPVLVEDTSSSSEYGSVSPDTELKVDPFSFKTRAKSCGERDVKGIRTLFLGIPDENFEDHSAPPSPEEKDSGFFMLRKDSERRATLHRILTEDQDKIVRNLMESLAQGAEEPKLKWEHITTLIASLREFVRSTDRKIIATTLSKLKLELDFDSHGISQVQVVLFGFQDAVNKVLRNHNIKPHWMFALDSIIRKAVQTAITILVPELRPHFSLASESDTADQEDLDVEDDHEEQPSNQTVRRPQAVIEDAVATSGVSTLSSTVSHDSQSAHRSLNVQLGRMKIETNRLLEELVRKEKELQALLHRAIEEKDQEIKHLKLKSQPIEIPELPVFHLNSSGTNTEDSELTDWLRVNGADEDTISRFLAEDYTLLDVLYYVTRDDLKCLRLRGGMLCTLWKAIIDFRNKQT

SEQ ID NO: 27078 - protein, 58 aa, Homo sapiens
MVNLLQIVRDHWVHVLVPMGFVIGCYLDRKSDERLTAFRNKSMLFKRELQPSEEVTWK

SEQ ID NO: 27079 - protein, 105 aa, Homo sapiens
MICWRHPSAPCGRGEWQVPRSQLPLARVEFPVALGLGVAVGAEAAAIMVNLLQIVRDHWVHVLVPMGFVIGCYLDRKSDERLTAFRNKSMLFKRELQPSEEVTWK

SEQ ID NO: 27080 - protein, 564 aa, Homo sapiens
MGNWVVNHWFSVLFLVVWLGLNVFLFVDAFLKYEKADKYYYTRKILGSTLACARASALCLNFNSTLILLPVCRNLLSFLRGTCSFCSRTLRKQLDHNLTFHKLVAYMICLHTAIHIIAHLFNFDCYSRSRQATDGSLASILSSLSHDEKKGGSWLNPIQSRNTTVEYVTFTSIAGLTGVIMTIALILMVTSATEFIRRSYFEVFWYTHHLFIFYILGLGIHGIGGIVRGQTEESMNESHPRKCAESFEMWDDRDSHCRRPKFEGHPPESWKWILAPVILYICERILRFYRSQQKVVITKVVMHPSKVLELQMNKRGFSMEVGQYIFVNCPSISLLEWHPFTLTSAPEEDFFSIHIRAAGDWTENLIRAFEQQYSPIPRIEVDGPFGTASEDVFQYEVAVLVGAGIGVTPFASILKSIWYKFQCADHNLKTKKIYFYWICRETGAFSWFNNLLTSLEQEMEELGKVGFLNYRLFLTGWDSNIVGHAALNFDKATDIVTGLKQKTSFGRPMWDNEFSTIATSHPKSVVGVFLCGPRTLAKSLRKCCHRYSSLDPRKVQFYFNKENF

SEQ ID NO: 27081 - protein, 190 aa, Homo sapiens
MGNWVVNHWFSVLFLVVWLGLNVFLFVDAFLKYEKADKYYYTRKILGSTLACARASALCLNFNSTLILLPVCRNLLSFLRGTCSFCSRTLRKQLDHNLTFHKLVAYMICLHTAIHIIAHLFNFDCYSRSRQATDGSLASILSSLSHDEKKGGSWLNPIHPHITPTVYMFTVTFDMVLSSVNSNLLFLLIK

SEQ ID NO: 27082 - protein, 515 aa, Homo sapiens
MGNWVVNHWFSVLFLVVWLGLNVFLFVDAFLKYEKADKYYYTRKILGSTLACARASALCLNFNSTLILLPVCRNLLSFLRGTCSFCSRTLRKQLDHNLTFHKLVAYMICLHTAIHIIAHLFNFDCYSRSRQATDGSLASILSSLSHDEKKGGSWLNPIQSRNTTVEYVTFTSIAGLTGVIMTIALILMVTSATEFIRRSYFEVFWYTHHLFIFYILGLGIHGIGGIVRGQTEESMNESHPRKCAESFEMWDDRDSHCRRPKFEGHPPESWKWILAPVILYICERILRFYRSQQKVVITKVVMHPSKVLELQMNKRGFSMEVGQYIFVNCPSISLLEWHPFTLTSAPEEDFFSIHIRAAGDWTENLIRAFEQQYSPIPRIEVDGPFGTASEDVFQYEVAVLVGAGIGVTPFASILKSIWYKFQCADHNLKTKKVGHAALNFDKATDIVTGLKQKTSFGRPMWDNEFSTIATSHPKSVVGVFLCGPRTLAKSLRKCCHRYSSLDPRKVQFYFNKENF

SEQ ID NO: 27083 - protein, 444 aa, Homo sapiens
MAGGMKVAVSPAVGPGPWGSGVGGGGTVRLLLILSGCLVYGTAETDVNVVMLQESQVCEKRASQQFCYTNVLIPKWHDIWTRIQIRVNSSRLVRVTQVENEEKLKELEQFSIWNFFSSFLKEKLNDTYVNVGLYSTKTCLKVEIIEKDTKYSVIVIRRFDPKLFLVFLLGLMLFFCGDLLSRSQIFYYSTGMTVGIVASLLIIIFILSKFMPKKSPIYVILVGGWSFSLYLIQLVFKNLQEIWRCYWQYLLSYVLTVGFMSFAVCYKYGPLENERSINLLTWTLQLMGLCFMYSGIQIPHIALAIIIIALCTKNLEHPIQWLYITCRKVCKGAEKPVPPRLLTEEEYRIQGEVETRKALEELREFCNSPDCSAWKTVSRIQSPKRFADFVEGSSHLTPNEVSVHEQEYGLGSIIAQDEIYEEASSEEEDSYSRCPAITQNNFLT

SEQ ID NO: 27084 - protein, 371 aa, Homo sapiens
MAGGMKVAVSPAVGPGPWGSGVGGGGTVRLLLILSGCLVYGTAETDVNVVMLQESQVCEKRASQQFCYTNVLIPKWHDIWTRIQIRVNSSRLVRVTQVENEEKLKELEQSQIFYYSTGMTVGIVASLLIIIFILSKFMPKKSPIYVILVGGWSFSLYLIQLVFKNLQEIWRCYWQYLLSYVLTVGFMSFAVCYKYGPLENERSINLLTWTLQLMGLCFMYSGIQIPHIALAIIIIALCTKNLEHPIQWLYITCRKVCKGAEKPVPPRLLTEEEYRIQGEVETRKALEELREFCNSPDCSAWKTVSRIQSPKRFADFVEGSSHLTPNEVSVHEQEYGLGSIIAQDEIYEEASSEEEDSYSRCPAITQNNFLT

SEQ ID NO: 27085 - protein, 415 aa, Homo sapiens
MTGERPSTALPDRRWGPRILGFWGGCRVWVFAAIFLLLSLAASWSKAENDFGLVQPLVTMEQLLWVSGRQIGSVDTFRIPLITATPRGTLLAFAEARKMSSSDEGAKFIALRRSMDQGSTWSPTAFIVNDGDVPDGLNLGAVVSDVETGVVFLFYSLCAHKAGCQVASTMLVWSKDDGVSWSTPRNLSLDIGTEVFAPGPGSGIQKQREPRKGRLIVCGHGTLERDGVFCLLSDDHGASWRYGSGVSGIPYGQPKQENDFNPDECQPYELPDGSVVINARNQNNYHCHCRIVLRSYDACDTLRPRDVTFDPELVDPVVAAGAVVTSSGIVFFSNPAHPEFRVNLTLRWSFSNGTSWRKETVQLWPGPSGYSSLATLEGSMDGEEQAPQLYVLYEKGRNHYTESISVAKISVYGTL

SEQ ID NO: 27086 - protein, 578 aa, Homo sapiens
MAVSWRSWLANEGVKHLCLFIWLSMNVLLFWKTFLLYNQGPEYHYLHQMLGLGLCLSRASASVLNLNCSLILLPMCRTLLAYLRGSQKVPSRRTRRLLDKSRTFHITCGVTICIFSGVHVAAHLVNALNFSVNYSEDFVELNAARYRDEDPRKLLFTTVPGLTGVCMVVVLFLMITASTYAIRVSNYDIFWYTHNLFFVFYMLLTLHVSGGLLKYQTNLDTHPPGCISLNRTSSQNISLPEYFSEHFHEPFPEGFSKPAEFTQHKFVKICMEEPRFQANFPQTWLWISGPLCLYCAERLYRYIRSNKPVTIISVMSHPSDVMEIRMVKENFKARPGQYITLHCPSVSALENHPFTLTMCPTETKATFGVHLKIVGDWTERFRDLLLPPSSQDSEILPFIQSRNYPKLYIDGPFGSPFEESLNYEVSLCVAGGIGVTPFASILNTLLDDWKPYKLRRLYFIWVCRDIQSFRWFADLLCMLHNKFWQENRPDYVNIQLYLSQTDGIQKIIGEKYHALNSRLFIGRPRWKLLFDEIAKYNRGKTVGVFCCGPNSLSKTLHKLSNQNNSYGTRFEYNKESFS

SEQ ID NO: 27087 - protein, 504 aa, Homo sapiens
MCRTLLAYLRGSQKVPSRRTRRLLDKSRTFHITCGVTICIFSGVHVAAHLVNALNFSVNYSEDFVELNAARYRDEDPRKLLFTTVPGLTGVCMVVVLFLMITASTYAIRVSNYDIFWYTHNLFFVFYMLLTLHVSGGLLKYQTNLDTHPPGCISLNRTSSQNISLPEYFSEHFHEPFPEGFSKPAEFTQHKFVKICMEEPRFQANFPQTWLWISGPLCLYCAERLYRYIRSNKPVTIISVMSHPSDVMEIRMVKENFKARPGQYITLHCPSVSALENHPFTLTMCPTETKATFGVHLKIVGDWTERFRDLLLPPSSQDSEILPFIQSRNYPKLYIDGPFGSPFEESLNYEVSLCVAGGIGVTPFASILNTLLDDWKPYKLRRLYFIWVCRDIQSFRWFADLLCMLHNKFWQENRPDYVNIQLYLSQTDGIQKIIGEKYHALNSRLFIGRPRWKLLFDEIAKYNRGKTVGVFCCGPNSLSKTLHKLSNQNNSYGTRFEYNKESFS

SEQ ID NO: 27088 - protein, 231 aa, Homo sapiens
MAVSWRSWLANEGVKHLCLFIWLSMNVLLFWKTFLLYNQGPEYHYLHQMLGCPTETKATFGVHLKIVGDWTERFRDLLLPPSSQDSEILPFIQSRNYPKDDWKPYKLRRLYFIWVCRDIQSFRWFADLLCMLHNKFWQENRPDYVNIQLYLSQTDGIQKIIGEKYHALNSRLFIGRPRWKLLFDEIAKYNRGKTVGVFCCGPNSLSKTLHKLSNQNNSYGTRFEYNKESFS

SEQ ID NO: 27089 - protein, 271 aa, Homo sapiens
MAVSWRSWLANEGVKHLCLFIWLSMNVLLFWKTFLLYNQGPEYHYLHQMLGCPTETKATFGVHLKIVGDWTERFRDLLLPPSSQDSEILPFIQSRNYPKLYIDGPFGSPFEESLNYEVSLCVAGGIGVTPFASILNTLLDDWKPYKLRRLYFIWVCRDIQSFRWFADLLCMLHNKFWQENRPDYVNIQLYLSQTDGIQKIIGEKYHALNSRLFIGRPRWKLLFDEIAKYNRGKTVGVFCCGPNSLSKTLHKLSNQNNSYGTRFEYNKESFS

SEQ ID NO: 27090 - protein, 224 aa, Homo sapiens
MAVSWRSWLANEGVKHLCLFIWLSMNVLLFWKTFLLYNQGPEYHYLHQMLGLGLCLSRASASVLNLNCSLILLPMCRTLLAYLRGSQKVPSRRTRRLLDKSRTFHITCGVTICIFSGVHVAAHLVNALNFSVNYSEDFVELNAARYRDEDPRKLLFTTVPGLTGVCMVVVLFLMITASTYAIRVSNYDIFWYTHNLFFVFYMLLTLHVSGVQLKPKQHLGFILK

SEQ ID NO: 27091 - protein, 538 aa, Homo sapiens
MAVSWRSWLANEGVKHLCLFIWLSMNVLLFWKTFLLYNQGPEYHYLHQMLGLGLCLSRASASVLNLNCSLILLPMCRTLLAYLRGSQKVPSRRTRRLLDKSRTFHITCGVTICIFSGVHVAAHLVNALNFSVNYSEDFVELNAARYRDEDPRKLLFTTVPGLTGVCMVVVLFLMITASTYAIRVSNYDIFWYTHNLFFVFYMLLTLHVSGGLLKYQTNLDTHPPGCISLNRTSSQNISLPEYFSEHFHEPFPEGFSKPAEFTQHKFVKICMEEPRFQANFPQTWLWISGPLCLYCAERLYRYIRSNKPVTIISVMSHPSDVMEIRMVKENFKARPGQYITLHCPSVSALENHPFTLTMCPTETKATFGVHLKIVGDWTERFRDLLLPPSSQDSEILPFIQSRNYPKDDWKPYKLRRLYFIWVCRDIQSFRWFADLLCMLHNKFWQENRPDYVNIQLYLSQTDGIQKIIGEKYHALNSRLFIGRPRWKLLFDEIAKYNRGKTVGVFCCGPNSLSKTLHKLSNQNNSYGTRFEYNKESFS

SEQ ID NO: 27092 - protein, 54 aa, Homo sapiens
MAVSWRSWLANEGVKHLCLFIWLSMNVLLFWKTFLLYNQGPEYHYLHQMLGELS

SEQ ID NO: 27093 - protein, 554 aa, Homo sapiens
MNVLLFWKTFLLYNQGPEYHYLHQMLGLGLCLSRASASVLNLNCSLILLPMCRTLLAYLRGSQKVPSRRTRRLLDKSRTFHITCGVTICIFSGVHVAAHLVNALNFSVNYSEDFVELNAARYRDEDPRKLLFTTVPGLTGVCMVVVLFLMITASTYAIRVSNYDIFWYTHNLFFVFYMLLTLHVSGGLLKYQTNLDTHPPGCISLNRTSSQNISLPEYFSEHFHEPFPEGFSKPAEFTQHKFVKICMEEPRFQANFPQTWLWISGPLCLYCAERLYRYIRSNKPVTIISVMSHPSDVMEIRMVKENFKARPGQYITLHCPSVSALENHPFTLTMCPTETKATFGVHLKIVGDWTERFRDLLLPPSSQDSEILPFIQSRNYPKLYIDGPFGSPFEESLNYEVSLCVAGGIGVTPFASILNTLLDDWKPYKLRRLYFIWVCRDIQSFRWFADLLCMLHNKFWQENRPDYVNIQLYLSQTDGIQKIIGEKYHALNSRLFIGRPRWKLLFDEIAKYNRGKTVGVFCCGPNSLSKTLHKLSNQNNSYGTRFEYNKESFS

SEQ ID NO: 27094 - protein, 514 aa, Homo sapiens
MNVLLFWKTFLLYNQGPEYHYLHQMLGLGLCLSRASASVLNLNCSLILLPMCRTLLAYLRGSQKVPSRRTRRLLDKSRTFHITCGVTICIFSGVHVAAHLVNALNFSVNYSEDFVELNAARYRDEDPRKLLFTTVPGLTGVCMVVVLFLMITASTYAIRVSNYDIFWYTHNLFFVFYMLLTLHVSGGLLKYQTNLDTHPPGCISLNRTSSQNISLPEYFSEHFHEPFPEGFSKPAEFTQHKFVKICMEEPRFQANFPQTWLWISGPLCLYCAERLYRYIRSNKPVTIISVMSHPSDVMEIRMVKENFKARPGQYITLHCPSVSALENHPFTLTMCPTETKATFGVHLKIVGDWTERFRDLLLPPSSQDSEILPFIQSRNYPKDDWKPYKLRRLYFIWVCRDIQSFRWFADLLCMLHNKFWQENRPDYVNIQLYLSQTDGIQKIIGEKYHALNSRLFIGRPRWKLLFDEIAKYNRGKTVGVFCCGPNSLSKTLHKLSNQNNSYGTRFEYNKESFS

SEQ ID NO: 27095 - protein, 428 aa, Homo sapiens
MEEVTTCSFNSPLFRQEDDRGITYRIPALLYIPPTHTFLAFAEKRSTRRDEDALHLVLRRGLRIGQLVQWGPLKPLMEATLPGHRTMNPCPVWEQKSGCVFLFFICVRGHVTERQQIVSGRNAARLCFIYSQDAGCSWSEVRDLTEEVIGSELKHWATFAVGPGHGIQLQSGRLVIPAYTYYIPSWFFCFQLPCKTRPHSLMIYSDDLGVTWHHGRLIRPMVTVECEVAEVTGRAGHPVLYCSARTPNRCRAEALSTDHGEGFQRLALSRQLCEPPHGCQGSVVSFRPLEIPHRCQDSSSKDAPTIQQSSPGSSLRLEEEAGTPSESWLLYSHPTSRKQRVDLGIYLNQTPLEAACWSRPWILHCGPCGYSDLAALEEEGLFGCLFECGTKQECEQIAFRLFTHREILSHLQGDCTSPGRNPSQFKSN

SEQ ID NO: 27096 - protein, 461 aa, Homo sapiens
MRPADLPPRPMEESPASSSAPTETEEPGSSAEVMEEVTTCSFNSPLFRQEDDRGITYRIPALLYIPPTHTFLAFAEKRSTRRDEDALHLVLRRGLRIGQLVQWGPLKPLMEATLPGHRTMNPCPVWEQKSGCVFLFFICVRGHVTERQQIVSGRNAARLCFIYSQDAGCSWSEVRDLTEEVIGSELKHWATFAVGPGHGIQLQSGRLVIPAYTYYIPSWFFCFQLPCKTRPHSLMIYSDDLGVTWHHGRLIRPMVTVECEVAEVTGRAGHPVLYCSARTPNRCRAEALSTDHGEGFQRLALSRQLCEPPHGCQGSVVSFRPLEIPHRCQDSSSKDAPTIQQSSPGSSLRLEEEAGTPSESWLLYSHPTSRKQRVDLGIYLNQTPLEAACWSRPWILHCGPCGYSDLAALEEEGLFGCLFECGTKQECEQIAFRLFTHREILSHLQGDCTSPGRNPSQFKSN

SEQ ID NO: 27097 - protein, 765 aa, Homo sapiens
MNTSGDPAQTGPEGCRGTMSAEEDARWLRWVTQQFKTIAGEDGEISLQEFKAALHVKESFFAERFFALFDSDRSGTITLQELQEALTLLIHGSPMDKLKFLFQVYDIDVCARQGASAGTEWGAGAGPHWASSPLGTGSGSIDPDELRTVLQSCLRESAISLPDEKLDQLTLALFESADADGNGAITFEELRDELQRFPGVMENLTISAAHWLTAPAPRPRPRRPRQLTRAYWHNHRSQLFCLATYAGLHVLLFGLAASAHRDLGASVMVAKGCGQCLNFDCSFIAVLMLRRCLTWLRATWLAQVLPLDQNIQFHQLMGYVVVGLSLVHTVAHTVNFVLQAQAEASPFQFWELLLTTRPGIGWVHGSASPTGVALLLLLLLMFICSSSCIRRSGHFEVFYWTHLSYLLVWLLLIFHGPNFWKWLLVPGILFFLEKAIGLAVSRMAAVCIMEVNLLPSKVTHLLIKRPPFFHYRPGDYLYLNIPTIARYEWHPFTISSAPEQKDTIWLHIRSQGQWTNRLYESFKASDPLGRGSKRLSRSVTMRKSQRSSKGSEILLEKHKFCNIKCYIDGPYGTPTRRIFASEHAVLIGAGIGITPFASILQSIMYRHQKRKHTCPSCQHSWIEGVQDNMKLHKVDFIWINRDQRSFEWFVSLLTKLEMDQAEEAQYGRFLELHMYMTSALGKNDMKAIGLQMALDLLANKEKKDSITGLQTRTQPGRPDWSKVFQKVAAEKKGKVQVFFCGSPALAKVLKGHCEKFGFRFFQENF

SEQ ID NO: 27098 - protein, 737 aa, Homo sapiens
MNTSGDPAQTGPEGCRGTMSAEEDARWLRWVTQQFKTIAGEDGEISLQEFKAALHVKESFFAERFFALFDSDRSGTITLQELQEALTLLIHGSPMDKLKFLFQVYDIDGSGSIDPDELRTVLQSCLRESAISLPDEKLDQLTLALFESADADGNGAITFEELRDELQRFPGVMENLTISAAHWLTAPAPRPRPRRPRQLTRAYWHNHRSQLFCLATYAGLHVLLFGLAASAHRDLGASVMVAKGCGQCLNFDCSFIAVLMLRRCLTWLRATWLAQVLPLDQNIQFHQLMGYVVVGLSLVHTVAHTVNFVLQAQAEASPFQFWELLLTTRPGIGWVHGSASPTGVALLLLLLLMFICSSSCIRRSGHFEVFYWTHLSYLLVWLLLIFHGPNFWKWLLVPGILFFLEKAIGLAVSRMAAVCIMEVNLLPSKVTHLLIKRPPFFHYRPGDYLYLNIPTIARYEWHPFTISSAPEQKDTIWLHIRSQGQWTNRLYESFKASDPLGRGSKRLSRSVTMRKSQRSSKGSEILLEKHKFCNIKCYIDGPYGTPTRRIFASEHAVLIGAGIGITPFASILQSIMYRHQKRKHTCPSCQHSWIEGVQDNMKLHKVDFIWINRDQRSFEWFVSLLTKLEMDQAEEAQYGRFLELHMYMTSALGKNDMKAIGLQMALDLLANKEKKDSITGLQTRTQPGRPDWSKVFQKVAAEKKGKVQVFFCGSPALAKVLKGHCEKFGFRFFQENF

SEQ ID NO: 27099 - protein, 719 aa, Homo sapiens
MSAEEDARWLRWVTQQFKTIAGEDGEISLQEFKAALHVKESFFAERFFALFDSDRSGTITLQELQEALTLLIHGSPMDKLKFLFQVYDIDGSGSIDPDELRTVLQSCLRESAISLPDEKLDQLTLALFESADADGNGAITFEELRDELQRFPGVMENLTISAAHWLTAPAPRPRPRRPRQLTRAYWHNHRSQLFCLATYAGLHVLLFGLAASAHRDLGASVMVAKGCGQCLNFDCSFIAVLMLRRCLTWLRATWLAQVLPLDQNIQFHQLMGYVVVGLSLVHTVAHTVNFVLQAQAEASPFQFWELLLTTRPGIGWVHGSASPTGVALLLLLLLMFICSSSCIRRSGHFEVFYWTHLSYLLVWLLLIFHGPNFWKWLLVPGILFFLEKAIGLAVSRMAAVCIMEVNLLPSKVTHLLIKRPPFFHYRPGDYLYLNIPTIARYEWHPFTISSAPEQKDTIWLHIRSQGQWTNRLYESFKASDPLGRGSKRLSRSVTMRKSQRSSKGSEILLEKHKFCNIKCYIDGPYGTPTRRIFASEHAVLIGAGIGITPFASILQSIMYRHQKRKHTCPSCQHSWIEGVQDNMKLHKVDFIWINRDQRSFEWFVSLLTKLEMDQAEEAQYGRFLELHMYMTSALGKNDMKAIGLQMALDLLANKEKKDSITGLQTRTQPGRPDWSKVFQKVAAEKKGKVQVFFCGSPALAKVLKGHCEKFGFRFFQENF

SEQ ID NO: 27100 - protein, 747 aa, Homo sapiens
MSAEEDARWLRWVTQQFKTIAGEDGEISLQEFKAALHVKESFFAERFFALFDSDRSGTITLQELQEALTLLIHGSPMDKLKFLFQVYDIDVCARQGASAGTEWGAGAGPHWASSPLGTGSGSIDPDELRTVLQSCLRESAISLPDEKLDQLTLALFESADADGNGAITFEELRDELQRFPGVMENLTISAAHWLTAPAPRPRPRRPRQLTRAYWHNHRSQLFCLATYAGLHVLLFGLAASAHRDLGASVMVAKGCGQCLNFDCSFIAVLMLRRCLTWLRATWLAQVLPLDQNIQFHQLMGYVVVGLSLVHTVAHTVNFVLQAQAEASPFQFWELLLTTRPGIGWVHGSASPTGVALLLLLLLMFICSSSCIRRSGHFEVFYWTHLSYLLVWLLLIFHGPNFWKWLLVPGILFFLEKAIGLAVSRMAAVCIMEVNLLPSKVTHLLIKRPPFFHYRPGDYLYLNIPTIARYEWHPFTISSAPEQKDTIWLHIRSQGQWTNRLYESFKASDPLGRGSKRLSRSVTMRKSQRSSKGSEILLEKHKFCNIKCYIDGPYGTPTRRIFASEHAVLIGAGIGITPFASILQSIMYRHQKRKHTCPSCQHSWIEGVQDNMKLHKVDFIWINRDQRSFEWFVSLLTKLEMDQAEEAQYGRFLELHMYMTSALGKNDMKAIGLQMALDLLANKEKKDSITGLQTRTQPGRPDWSKVFQKVAAEKKGKVQVFFCGSPALAKVLKGHCEKFGFRFFQENF

SEQ ID NO: 27101 - protein, 565 aa, Homo sapiens
MENLTISAAHWLTAPAPRPRPRRPRQLTRAYWHNHRSQLFCLATYAGLHVLLFGLAASAHRDLGASVMVAKGCGQCLNFDCSFIAVLMLRRCLTWLRATWLAQVLPLDQNIQFHQLMGYVVVGLSLVHTVAHTVNFVLQAQAEASPFQFWELLLTTRPGIGWVHGSASPTGVALLLLLLLMFICSSSCIRRSGHFEVFYWTHLSYLLVWLLLIFHGPNFWKWLLVPGILFFLEKAIGLAVSRMAAVCIMEVNLLPSKVTHLLIKRPPFFHYRPGDYLYLNIPTIARYEWHPFTISSAPEQKDTIWLHIRSQGQWTNRLYESFKASDPLGRGSKRLSRSVTMRKSQRSSKGSEILLEKHKFCNIKCYIDGPYGTPTRRIFASEHAVLIGAGIGITPFASILQSIMYRHQKRKHTCPSCQHSWIEGVQDNMKLHKVDFIWINRDQRSFEWFVSLLTKLEMDQAEEAQYGRFLELHMYMTSALGKNDMKAIGLQMALDLLANKEKKDSITGLQTRTQPGRPDWSKVFQKVAAEKKGKVQVFFCGSPALAKVLKGHCEKFGFRFFQENF

SEQ ID NO: 27102 - protein, 730 aa, Homo sapiens
MAFVCAGLSDTMSAEEDARWLRWVTQQFKTIAGEDGEISLQEFKAALHVKESFFAERFFALFDSDRSGTITLQELQEALTLLIHGSPMDKLKFLFQVYDIDGSGSIDPDELRTVLQSCLRESAISLPDEKLDQLTLALFESADADGNGAITFEELRDELQRFPGVMENLTISAAHWLTAPAPRPRPRRPRQLTRAYWHNHRSQLFCLATYAGLHVLLFGLAASAHRDLGASVMVAKGCGQCLNFDCSFIAVLMLRRCLTWLRATWLAQVLPLDQNIQFHQLMGYVVVGLSLVHTVAHTVNFVLQAQAEASPFQFWELLLTTRPGIGWVHGSASPTGVALLLLLLLMFICSSSCIRRSGHFEVFYWTHLSYLLVWLLLIFHGPNFWKWLLVPGILFFLEKAIGLAVSRMAAVCIMEVNLLPSKVTHLLIKRPPFFHYRPGDYLYLNIPTIARYEWHPFTISSAPEQKDTIWLHIRSQGQWTNRLYESFKASDPLGRGSKRLSRSVTMRKSQRSSKGSEILLEKHKFCNIKCYIDGPYGTPTRRIFASEHAVLIGAGIGITPFASILQSIMYRHQKRKHTCPSCQHSWIEGVQDNMKLHKVDFIWINRDQRSFEWFVSLLTKLEMDQAEEAQYGRFLELHMYMTSALGKNDMKAIGLQMALDLLANKEKKDSITGLQTRTQPGRPDWSKVFQKVAAEKKGKVQVFFCGSPALAKVLKGHCEKFGFRFFQENF

SEQ ID NO: 27103 - protein, 484 aa, Homo sapiens
MGVPRTPSRTVLFERERTGLTYRVPSLLPVPPGPTLLAFVEQRLSPDDSHAHRLVLRRGTLAGGSVRWGALHVLGTAALAEHRSMNPCPVHDAGTGTVFLFFIAVLGHTPEAVQIATGRNAARLCCVASRDAGLSWGSARDLTEEAIGGAVQDWATFAVGPGHGVQLPSGRLLVPAYTYRVDRRECFGKICRTSPHSFAFYSDDHGRTWRCGGLVPNLRSGECQLAAVDGGQAGSFLYCNARSPLGSRVQALSTDEGTSFLPAERVASLPETAWGCQGSIVGFPAPAPNRPRDDSWSVGPGSPLQPPLLGPGVHEPPEEAAVDPRGGQVPGGPFSRLQPRGDGPRQPGPRPGVSGDVGSWTLALPMPFAAPPQSPTWLLYSHPVGRRARLHMGIRLSQSPLDPRSWTEPWVIYEGPSGYSDLASIGPAPEGGLVFACLYESGARTSYDEISFCTFSLREVLENVPASPKPPNLGDKPRGCCWPS

SEQ ID NO: 27104 - protein, 496 aa, Homo sapiens
MMSSAAFPRWLSMGVPRTPSRTVLFERERTGLTYRVPSLLPVPPGPTLLAFVEQRLSPDDSHAHRLVLRRGTLAGGSVRWGALHVLGTAALAEHRSMNPCPVHDAGTGTVFLFFIAVLGHTPEAVQIATGRNAARLCCVASRDAGLSWGSARDLTEEAIGGAVQDWATFAVGPGHGVQLPSGRLLVPAYTYRVDRRECFGKICRTSPHSFAFYSDDHGRTWRCGGLVPNLRSGECQLAAVDGGQAGSFLYCNARSPLGSRVQALSTDEGTSFLPAERVASLPETAWGCQGSIVGFPAPAPNRPRDDSWSVGPGSPLQPPLLGPGVHEPPEEAAVDPRGGQVPGGPFSRLQPRGDGPRQPGPRPGVSGDVGSWTLALPMPFAAPPQSPTWLLYSHPVGRRARLHMGIRLSQSPLDPRSWTEPWVIYEGPSGYSDLASIGPAPEGGLVFACLYESGARTSYDEISFCTFSLREVLENVPASPKPPNLGDKPRGCCWPS

SEQ ID NO: 27105 - protein, 497 aa, Homo sapiens
MMSSAAFPRWLQSMGVPRTPSRTVLFERERTGLTYRVPSLLPVPPGPTLLAFVEQRLSPDDSHAHRLVLRRGTLAGGSVRWGALHVLGTAALAEHRSMNPCPVHDAGTGTVFLFFIAVLGHTPEAVQIATGRNAARLCCVASRDAGLSWGSARDLTEEAIGGAVQDWATFAVGPGHGVQLPSGRLLVPAYTYRVDRRECFGKICRTSPHSFAFYSDDHGRTWRCGGLVPNLRSGECQLAAVDGGQAGSFLYCNARSPLGSRVQALSTDEGTSFLPAERVASLPETAWGCQGSIVGFPAPAPNRPRDDSWSVGPGSPLQPPLLGPGVHEPPEEAAVDPRGGQVPGGPFSRLQPRGDGPRQPGPRPGVSGDVGSWTLALPMPFAAPPQSPTWLLYSHPVGRRARLHMGIRLSQSPLDPRSWTEPWVIYEGPSGYSDLASIGPAPEGGLVFACLYESGARTSYDEISFCTFSLREVLENVPASPKPPNLGDKPRGCCWPS

SEQ ID NO: 27106 - protein, 476 aa, Homo sapiens
MASLGDLVRAWHLGAQAVDRGDWARALHLFSGVPAPPARLCFNAGCVHLLAGDPEAALRAFDQAVTKDTCMAVGFFQRGVANFQLARFQEALSDFWLALEQLRGHAAIDYTQLGLRFKLQAWEVLHNVASAQCQLGLWTEAASSLREAMSKWPEGSLNGLDSALDQVQRRGSLPPRQVPRGEVFRPHRWHLKHLEPVDFLGKAKVVASAIPDDQGWGVRPQQPQGPGANHDARSLIMDSPRAGTHQGPLDAETEVGADRCTSTAYQEQRPQVEQVGKQAPLSPGLPAMGGPGPGPCEDPAGAGGAGAGGSEPLVTVTVQCAFTVALRARRGADLSSLRALLGQALPHQAQLGQLSYLAPGEDGHWVPIPEEESLQRAWQDAAACPRGLQLQCRGAGGRPVLYQVVAQHSYSAQGPEDLGFRQGDTVDVLCEVDQAWLEGHCDGRIGIFPKCFVVPAGPRMSGAPGRLPRSQQGDQP

SEQ ID NO: 27107 - protein, 483 aa, Homo sapiens
MASLGDLVRAWHLGAQAVDRGDWARALHLFSGVPAPPARLCFNAGCVHLLAGDPEAALRAFDQAVTKDTCMAVGFFQRGVANFQLARFQEALSDFWLALEQLRGHAAIDYTQLGLRFKLQAWEVLHNVASAQCQLGLWTEAASSLREAMSKWPEGSLNGLDSALDQVQRRGSLPPRQVPRGEVFRPHRWHLKHLEPVDFLGKAKVVASAIPDDQGWGVRPQQPQGPGANHDARSLIMDSPRAGTHQGPLDAETEVGADRCTSTAYQEQRPQVEQVGKQAPLSPGLPAMGGPGPGPCEDPAGAGGAGAGGSEPLVTVTVQCAFTVALRARRGADLSSLRALLGQALPHQAQLGQLSYLAPGEDGHWVPIPEEESLQRAWQDAAACPRGLQLQCRGAGGRPVLYQVVAQHSYSAQGPEDLGFRQGDTVDVLCEEPDVPLAVDQAWLEGHCDGRIGIFPKCFVVPAGPRMSGAPGRLPRSQQGDQP

SEQ ID NO: 27108 - protein, 427 aa, Homo sapiens
MASLGDLVRAWHLGAQAVDRGDWARALHLFSGVPAPPARLCFNAGCVHLLAGDPEAALRAFDQAVTKDTCMAVGFFQRGVANFQLARFQEALSDFWLALEQLRGHAAIDYTQLGLRFKLQAWEVLHNVASAQCQLGLWTEAASSLREAMSKWPEGSLNGLDSALDQVQGPGANHDARSLIMDSPRAGTHQGPLDAETEVGADRCTSTAYQEQRPQVEQVGKQAPLSPGLPAMGGPGPGPCEDPAGAGGAGAGGSEPLVTVTVQCAFTVALRARRGADLSSLRALLGQALPHQAQLGQLSYLAPGEDGHWVPIPEEESLQRAWQDAAACPRGLQLQCRGAGGRPVLYQVVAQHSYSAQGPEDLGFRQGDTVDVLCEEPDVPLAVDQAWLEGHCDGRIGIFPKCFVVPAGPRMSGAPGRLPRSQQGDQP

SEQ ID NO: 27109 - protein, 172 aa, Homo sapiens
MVGPAPRRRLRPLAALALVLALAPGLPTARAGQTPRPAERGPPVRLFTEEELARYGGEEEDQPIYLAVKGVVFDVTSGKEFYGRGAPYNALTGKDSTRGVAKMSLDPADLTHDTTGLTAKELEALDEVFTKVYKAKYPIVGYTARRILNEDGSPNLDFKPEDQPHFDIKDEF

SEQ ID NO: 27110 - protein, 410 aa, Homo sapiens
MAFLGLFSLLVLQSMATGATFPEEAIADLSVNMYNRLRATGEDENILFSPLSIALAMGMMELGAQGSTQKEIRHSMGYDSLKNGEEFSFLKEFSNMVTAKESQYVMKIANSLFVQNGFHVNEEFLQMMKKYFNAAVNHVDFSQNVAVANYINKWVENNTNNLVKDLVSPRDFDAATYLALINAVYFKGNWKSQFRPENTRTFSFTKDDESEVQIPMMYQQGEFYYGEFSDGSNEAGGIYQVLEIPYEGDEISMMLVLSRQEVPLATLEPLVKAQLVEEWANSVKKQKVEVYLPRFTVEQEIDLKDVLKALGITEIFIKDANLTGLSDNKEIFLSKAIHKSFLEVNEEGSEAAAVSGMIAISRMAVLYPQVIVDHPFFFLIRNRRTGTILFMGRVMHPETMNTSGHDFEEL

SEQ ID NO: 27111 - protein, 241 aa, Homo sapiens
MSMLFYTLITAFLIGIQAEPHSESNVPAGHTIPQAHWTKLQHSLDTALRRARSAPAAAIAARVAGQTRNITVDPRLFKKRRLRSPRVLFSTQPPREAADTQDLDFEVGGAAPFNRTHRSKRSSSHPIFHRGEFSVCDSVSVWVGDKTTATDIKGKEVMVLGEVNINNSVFKQYFFETKCRDPNPVDSGCRGIDSKHWNSYCTTTHTFVKALTMDGKQAAWRFIRIDTACVCVLSRKAVRRA

SEQ ID NO: 27112 - protein, 376 aa, Homo sapiens
MAGPRYPVSVQGAALVQIKRLQTFAFSVRWSDGSDTFVRRSWDEFRQLKKTLKETFPVEAGLLRRSDRVLPKLLGQASLDAPLLGRVGRTSRGLARLQLLETYSRRLLATAERVARSPTITGFFAPQPLDLEPALPPGSRVILPTPEEQPLSRAAGRLSIHSLEAQSLRCLQPFCTQDTRDRPFQAQAQESLDVLLRHPSGWWLVENEDRQTAWFPAPYLEEAAPGQGREGGPSLGSSGPQFCASRAYESSRADELSVPAGARVRVLETSDRGWWLCRYGDRAGLLPAVLLRPEGLGALLSGTGFRGGDDPAGEARGFPEPSQATAPPPTVPTRPSPGAIQSRCCTVTRRALERRPRRQGRPRGCVDSVPHPTTEQ

SEQ ID NO: 27113 - protein, 375 aa, Homo sapiens
MAGPRYPVSVQGAALVQIKRLQTFAFSVRWSDGSDTFVRRSWDEFRQLKTLKETFPVEAGLLRRSDRVLPKLLGQASLDAPLLGRVGRTSRGLARLQLLETYSRRLLATAERVARSPTITGFFAPQPLDLEPALPPGSRVILPTPEEQPLSRAAGRLSIHSLEAQSLRCLQPFCTQDTRDRPFQAQAQESLDVLLRHPSGWWLVENEDRQTAWFPAPYLEEAAPGQGREGGPSLGSSGPQFCASRAYESSRADELSVPAGARVRVLETSDRGWWLCRYGDRAGLLPAVLLRPEGLGALLSGTGFRGGDDPAGEARGFPEPSQATAPPPTVPTRPSPGAIQSRCCTVTRRALERRPRRQGRPRGCVDSVPHPTTEQ

SEQ ID NO: 27114 - protein, 371 aa, Homo sapiens
MAGPRYPVSVQGAALVQIKRLQTFAFSVRWSDGSDTFVRRSWDEFRQLKKTLKETFPVEAGLLRRSDRVLPKLLDAPLLGRVGRTSRGLARLQLLETYSRRLLATAERVARSPTITGFFAPQPLDLEPALPPGSRVILPTPEEQPLSRAAGRLSIHSLEAQSLRCLQPFCTQDTRDRPFQAQAQESLDVLLRHPSGWWLVENEDRQTAWFPAPYLEEAAPGQGREGGPSLGSSGPQFCASRAYESSRADELSVPAGARVRVLETSDRGWWLCRYGDRAGLLPAVLLRPEGLGALLSGTGFRGGDDPAGEARGFPEPSQATAPPPTVPTRPSPGAIQSRCCTVTRRALERRPRRQGRPRGCVDSVPHPTTEQ

SEQ ID NO: 27115 - protein, 370 aa, Homo sapiens
MAGPRYPVSVQGAALVQIKRLQTFAFSVRWSDGSDTFVRRSWDEFRQLKTLKETFPVEAGLLRRSDRVLPKLLDAPLLGRVGRTSRGLARLQLLETYSRRLLATAERVARSPTITGFFAPQPLDLEPALPPGSRVILPTPEEQPLSRAAGRLSIHSLEAQSLRCLQPFCTQDTRDRPFQAQAQESLDVLLRHPSGWWLVENEDRQTAWFPAPYLEEAAPGQGREGGPSLGSSGPQFCASRAYESSRADELSVPAGARVRVLETSDRGWWLCRYGDRAGLLPAVLLRPEGLGALLSGTGFRGGDDPAGEARGFPEPSQATAPPPTVPTRPSPGAIQSRCCTVTRRALERRPRRQGRPRGCVDSVPHPTTEQ

SEQ ID NO: 27116 - protein, 170 aa, Homo sapiens
MMAGMKIQLVCMLLLAFSSWSLCSDSEEEMKALEADFLTNMHTSKISKAHVPSWKMTLLNVCSLVNNLNSPAEETGEVHEEELVARRKLPTALDGFSLEAMLTIYQLHKICHSRAFQHWELIQEDILDTGNDKNGKEEVIKRKIPYILKRQLYENKPRRPYILKRDSYYY

SEQ ID NO: 27117 - protein, 1461 aa, Homo sapiens
MAAERGARRLLSTPSFWLYCLLLLGRRAPGAAAARSGSAPQSPGASIRTFTPFYFLVEPVDTLSVRGSSVILNCSAYSEPSPKIEWKKDGTFLNLVSDDRRQLLPDGSLFISNVVHSKHNKPDEGYYQCVATVESLGTIISRTAKLIVAGLPRFTSQPEPSSVYAGNNAILNCEVNADLVPFVRWEQNRQPLLLDDRVIKLPSGMLVISNATEGDGGLYRCVVESGGPPKYSDEVELKVLPDPEVISDLVFLKQPSPLVRVIGQDVVLPCVASGLPTPTIKWMKNEEALDTESSERLVLLAGGSLEISDVTEDDAGTYFCIADNGNETIEAQAELTVQAQPEFLKQPTNIYAHESMDIVFECEVTGKPTPTVKWVKNGDMVIPSDYFKIVKEHNLQVLGLVKSDEGFYQCIAENDVGNAQAGAQLIILEHAPATTGPLPSAPRDVVASLVSTRFIKLTWRTPASDPHGDNLTYSVFYTKEGIARERVENTSHPGEMQVTIQNLMPATVYIFRVMAQNKHGSGESSAPLRVETQPEVQLPGPAPNLRAYAASPTSITVTWETPVSGNGEIQNYKLYYMEKGTDKEQDVDVSSHSYTINGLKKYTEYSFRVVAYNKHGPGVSTPDVAVRTLSDVPSAAPQNLSLEVRNSKSIMIHWQPPAPATQNGQITGYKIRYRKASRKSDVTETLVSGTQLSQLIEGLDRGTEYNFRVAALTINGTGPATDWLSAETFESDLDETRVPEVPSSLHVRPLVTSIVVSWTPPENQNIVVRGYAIGYGIGSPHAQTIKVDYKQRYYTIENLDPSSHYVITLKAFNNVGEGIPLYESAVTRPHTDTSEVDLFVINAPYTPVPDPTPMMPPVGVQASILSHDTIRITWADNSLPKHQKITDSRYYTVRWKTNIPANTKYKNANATTLSYLVTGLKPNTLYEFSVMVTKGRRSSTWSMTAHGTTFELVPTSPPKDVTVVSKEGKPKTIIVNWQPPSEANGKITGYIIYYSTDVNAEIHDWVIEPVVGNRLTHQIQELTLDTPYYFKIQARNSKGMGPMSEAVQFRTPKADSSDKMPNDQASGSGGKGSRLPDLGSDYKPPMSGSNSPHGSPTSPLDSNMLLVIIVSVGVITIVVVVIIAVFCTRRTTSHQKKKRAACKSVNGSHKYKGNSKDVKPPDLWIHHERLELKPIDKSPDPNPIMTDTPIPRNSQDITPVDNSMDSNIHQRRNSYRGHESEDSMSTLAGRRGMRPKMMMPFDSQPPQPVISAHPIHSLDNPHHHFHSSSLASPARSHLYHPGSPWPIGTSMSLSDRANSTESVRNTPSTDTMPASSSQTCCTDHQDPEGATSSSYLASSQEEDSGQSLPTAHVRPSHPLKSFAVPAIPPPGPPTYDPALPSTPLLSQQALNHHIHSVKTASIGTLGRSRPPMPVVVPSAPEVQETTRMLEDSESSYEPDELTKEMAHLEGLMKDLNAITTA

SEQ ID NO: 27118 - protein, 1408 aa, Homo sapiens
MAAERGARRLLSTPSFWLYCLLLLGRRAPGAAAARSGSAPQSPGASIRTFTPFYFLVEPVDTLSVRGSSVILNCSAYSEPSPKIEWKKDGTFLNLVSDDRRQLLPDGSLFISNVVHSKHNKPDEGYYQCVATVESLGTIISRTAKLIVAGLPRFTSQPEPSSVYAGNNAILNCEVNADLVPFVRWEQNRQPLLLDDRVIKLPSGMLVISNATEGDGGLYRCVVESGGPPKYSDEVELKVLPDPEVISDLVFLKQPSPLVRVIGQDVVLPCVASGLPTPTIKWMKNEEALDTESSERLVLLAGGSLEISDVTEDDAGTYFCIADNGNETIEAQAELTVQAQPEFLKQPTNIYAHESMDIVFECEVTGKPTPTVKWVKNGDMVIPSDYFKIVKEHNLQVLGLVKSDEGFYQCIAENDVGNAQAGAQLIILEHAPATTGPLPSAPRDVVASLVSTRFIKLTWRTPASDPHGDNLTYSVFYTKEGIARERVENTSHPGEMQVTIQNLMPATVYIFRVMAQNKHGSGESSAPLRVETQPEVQLPGPAPNLRAYAASPTSITVTWETPVSGNGEIQNYKLYYMEKGTDKEQDVDVSSHSYTINGLKKYTEYSFRVVAYNKHGPGVSTPDVAVRTLSDVPSAAPQNLSLEVRNSKSIMIHWQPPAPATQNGQITGYKIRYRKASRKSDVTETLVSGTQLSQLIEGLDRGTEYNFRVAALTINGTGPATDWLSAETFESDLDETRVPEVPSSLHVRPLVTSIVVSWTPPENQNIVVRGYAIGYGIGSPHAQTIKVDYKQRYYTIENLDPSSHYVITLKAFNNVGEGIPLYESAVTRPHTDTSEVDLFVINAPYTPVPDPTPMMPPVGVQASILSHDTIRITWADNSLPKHQKITDSRYYTVRWKTNIPANTKYKNANATTLSYLVTGLKPNTLYEFSVMVTKGRRSSTWSMTAHGTTFELVPTSPPKDVTVVSKEGKPKTIIVNWQPPSEANGKITGYIIYYSTDVNAEIHDWVIEPVVGNRLTHQIQELTLDTPYYFKIQARNSKGMGPMSEAVQFRTPKADSSDKMPNDQASGSGGKGSRLPDLGSDYKPPMSGSNSPHGSPTSPLDSNMLLVIIVSVGVITIVVVVIIAVFCTRRTTSHQKKKRAACKSVNGSHKYKGNSKDVKPPDLWIHHERLELKPIDKSPDPNPIMTDTPIPRNSQDITPVDNSMDSNIHQRRNSYRGHESEDSMSTLAGRRGMRPKMMMPFDSQPPQESVRNTPSTDTMPASSSQTCCTDHQDPEGATSSSYLASSQEEDSGQSLPTAHVRPSHPLKSFAVPAIPPPGPPTYDPALPSTPLLSQQALNHHIHSVKTASIGTLGRSRPPMPVVVPSAPEVQETTRMLEDSESSYEPDELTKEMAHLEGLMKDLNAITTA

SEQ ID NO: 27119 - protein, 1408 aa, Homo sapiens
MAAERGARRLLSTPSFWLYCLLLLGRRAPGAAAARSGSAPQSPGASIRTFTPFYFLVEPVDTLSVRGSSVILNCSAYSEPSPKIEWKKDGTFLNLVSDDRRQLLPDGSLFISNVVHSKHNKPDEGYYQCVATVESLGTIISRTAKLIVAGLPRFTSQPEPSSVYAGNNAILNCEVNADLVPFVRWEQNRQPLLLDDRVIKLPSGMLVISNATEGDGGLYRCVVESGGPPKYSDEVELKVLPDPEVISDLVFLKQPSPLVRVIGQDVVLPCVASGLPTPTIKWMKNEEALDTESSERLVLLAGGSLEISDVTEDDAGTYFCIADNGNETIEAQAELTVQAQPEFLKQPTNIYAHESMDIVFECEVTGKPTPTVKWVKNGDMVIPSDYFKIVKEHNLQVLGLVKSDEGFYQCIAENDVGNAQAGAQLIILEHAPATTGPLPSAPRDVVASLVSTRFIKLTWRTPASDPHGDNLTYSVFYTKEGIARERVENTSHPGEMQVTIQNLMPATVYIFRVMAQNKHGSGESSAPLRVETQPEVQLPGPAPNLRAYAASPTSITVTWETPVSGNGEIQNYKLYYMEKGTDKEQDVDVSSHSYTINGLKKYTEYSFRVVAYNKHGPGVSTPDVAVRTLSDVPSAAPQNLSLEVRNSKSIMIHWQPPAPATQNGQITGYKIRYRKASRKSDVTETLVSGTQLSQLIEGLDRGTEYNFRVAALTINGTGPATDWLSAETFESDLDETRVPEVPSSLHVRPLVTSIVVSWTPPENQNIVVRGYAIGYGIGSPHAQTIKVDYKQRYYTIENLDPSSHYVITLKAFNNVGEGIPLYESAVTRPHTDTSEVDLFVINAPYTPVPDPTPMMPPVGVQASILSHDTIRITWADNSLPKHQKITDSRYYTVRWKTNIPANTKYKNANATTLSYLVTGLKPNTLYEFSVMVTKGRRSSTWSMTAHGTTFELVPTSPPKDVTVVSKEGKPKTIIVNWQPPSEANGKITGYIIYYSTDVNAEIHDWVIEPVVGNRLTHQIQELTLDTPYYFKIQARNSKGMGPMSEAVQFRTPKADSSDKMPNDQASGSGGKGSRLPDLGSDYKPPMSGSNSPHGSPTSPLDSNMLLVIIVSVGVITIVVVVIIAVFCTRRTTSHQKKKRAACKSVNGSHKYKGNSKDVKPPDLWIHHERLELKPIDKSPDPNPIMTDTPIPRNSQDITPVDNSMDSNIHQRRNSYRGHESEDSMSTLAGRRGMRPKMMMPFDSQPPQQSVRNTPSTDTMPASSSQTCCTDHQDPEGATSSSYLASSQEEDSGQSLPTAHVRPSHPLKSFAVPAIPPPGPPTYDPALPSTPLLSQQALNHHIHSVKTASIGTLGRSRPPMPVVVPSAPEVQETTRMLEDSESSYEPDELTKEMAHLEGLMKDLNAITTA

SEQ ID NO: 27120 - protein, 1450 aa, Homo sapiens
MAAERGARRLLSTPSFWLYCLLLLGRRAPGAAAARSGSAPQSPGASIRTFTPFYFLVEPVDTLSVRGSSVILNCSAYSEPSPKIEWKKDGTFLNLVSDDRRQLLPDGSLFISNVVHSKHNKPDEGYYQCVATVESLGTIISRTAKLIVAGLPRFTSQPEPSSVYAGNNAILNCEVNADLVPFVRWEQNRQPLLLDDRVIKLPSGMLVISNATEGDGGLYRCVVESGGPPKYSDEVELKVLPDPEVISDLVFLKQPSPLVRVIGQDVVLPCVASGLPTPTIKWMKNEEALDTESSERLVLLAGGSLEISDVTEDDAGTYFCIADNGNETIEAQAELTVQAQPEFLKQPTNIYAHESMDIVFECEVTGKPTPTVKWVKNGDMVIPSDYFKIVKEHNLQVLGLVKSDEGFYQCIAENDVGNAQAGAQLIILEHAPATTGPLPSAPRDVVASLVSTRFIKLTWRTPASDPHGDNLTYSVFYTKEGIARERVENTSHPGEMQVTIQNLMPATVYIFRVMAQNKHGSGESSAPLRVETQPEVQLPGPAPNLRAYAASPTSITVTWETPVSGNGEIQNYKLYYMEKGTDKEQDVDVSSHSYTINGLKKYTEYSFRVVAYNKHGPGVSTPDVAVRTLSDVPSAAPQNLSLEVRNSKSIMIHWQPPAPATQNGQITGYKIRYRKASRKSDVTETLVSGTQLSQLIEGLDRGTEYNFRVAALTINGTGPATDWLSAETFESDLDETRVPEVPSSLHVRPLVTSIVVSWTPPENQNIVVRGYAIGYGIGSPHAQTIKVDYKQRYYTIENLDPSSHYVITLKAFNNVGEGIPLYESAVTRPHTDTSEVDLFVINAPYTPVPDPTPMMPPVGVQASILSHDTIRITWADNSLPKHQKITDSRYYTVRWKTNIPANTKYKNANATTLSYLVTGLKPNTLYEFSVMVTKGRRSSTWSMTAHGTTFELVPTSPPKDVTVVSKEGKPKTIIVNWQPPSEANGKITGYIIYYSTDVNAEIHDWVIEPVVGNRLTHQIQELTLDTPYYFKIQARNSKGMGPMSEAVQFRTPKASGSGGKGSRLPDLGSDYKPPMSGSNSPHGSPTSPLDSNMLLVIIVSVGVITIVVVVIIAVFCTRRTTSHQKKKRAACKSVNGSHKYKGNSKDVKPPDLWIHHERLELKPIDKSPDPNPIMTDTPIPRNSQDITPVDNSMDSNIHQRRNSYRGHESEDSMSTLAGRRGMRPKMMMPFDSQPPQPVISAHPIHSLDNPHHHFHSSSLASPARSHLYHPGSPWPIGTSMSLSDRANSTESVRNTPSTDTMPASSSQTCCTDHQDPEGATSSSYLASSQEEDSGQSLPTAHVRPSHPLKSFAVPAIPPPGPPTYDPALPSTPLLSQQALNHHIHSVKTASIGTLGRSRPPMPVVVPSAPEVQETTRMLEDSESSYEPDELTKEMAHLEGLMKDLNAITTA

SEQ ID NO: 27121 - protein, 1516 aa, Homo sapiens
MDNQQDKAIVASANGENTLINGVKENDSEDQDVAMKSFAALEAAAPIQPTPVAQKETLMYPRGLLPLPSKKPCMQSPPSPLGLIEAPEHAANSASVNAISLTSGIAKGLNTWSLPNECEKAPFAIMEPAGMSALNGDCLMQPSRTCLGCFMESKDAVDPEPGISLKVGDLNRDYETCAVSDIGIQCINAGENMKYGEQLLSDQLLGFPLHKSRAGDRRETEKPDIDLEDPAQKSYYEALLLDKCNTEEALLANSNQDWGYFETFISESKIELLDLCSKNELSVNLFSEEDVDNYMFDDDESTLGSDVCSLKIRYESFQDNVRDKTTLLMQEDAQFNFFPSVFTTCPKRESKSGALKQSSDFSQFKVPDVSIIWGEEDKNLDKKKGKEEGQEDKGVEKKDGKDNGEKPALNKPCSGTEVEQLKNPKQGHLANSLETSGSFSDDSSFIEISYDAMGEIKDCSRYMARDTNSGSSSSQQNYGLRAKRKVRYSEDYLYDVDSLEGEKVNERKEWLPVGSKEEDDDEWCPKKRRKVTRKEPPVIIKYIIINRFKGEKNMLVKLGKVDASETTVNLSENQLNKYAKLAPLKGFWQKKKKQRNTNTDSIKTPFSQKQSFEPGSFEVSFLPPARKRKSKLGNRHRIQRIPSIEISASSKQISLCNDQRHASNHKEDGGLKGTLKSAPLGAPSCANGSHLNDITGPDSVKVKAQDTEFKGPERKVLNKIKFKSEARLKSKKVKAAGQESKPIVQMSPLLENQSSKANLKNEVIPGTSNSSRLSEFHEAKAAKSSTFLPTTCSSEMPLSSANVTTNIPVIPGGYLQTLLDASDLSNNTSISYFSHHSPEQNEGSLTQTEKSFVPLQPTQDCVLTSSSDSELQQSSHNFKMESSNYRNVWPNKATSGTQEFMAEVSREIAPTQSSEFGASQVVSMENNLTPTTYNPICLNSGGSNCNKVLYDSMQDTQLPSDDSYQLCHFNNGEICFPFQQGPVNMDDGRLFSFDSMAPLSVSSSNYCSLSLKSCEKDGDDDITDDFLAHCSPKLVIQQSIDEIAPLKESTDLLDISNFTPDKFRHSSLSEMSPPDTPSLSPQITRCESMKTLGTLKGFQEGVPGPLDSVEKIKWDCSTLSRQVQMEDGFTLNNHQFQFHMFNDEDSVSLLQKNPCLSTFNDPSGQISTNNKVSKSRKKSSPSKSGAMNQSSSQKNTRKKSLKGNNKGIEKPPGKNSRQVPKSTKKGKYMAAINGEKMQIGIGRGGSQTNTISSTGKTLAECIQHGGPMASMKMPSQKGLSGDWALGKESSPGWSDMSMGTNTNSLLDDDQREFQEPSYILSNIASGMADVQRFMMASIEPLWEPMEHHGDPNIFYSPESNSLKLKTLKILAGTPQESKKKINSGSQGATKNHRSIKGVSKSNGKTAIGDPGRANMPGYNEDSRSTFFDKKYSNMSTLGNNGPTHKKLYRHKSSSKALRDEKCKGKHMEREQVHKDESGTASFEKLRDSDYNLLKAETTFWVLPVFEEETRIFQKDI

SEQ ID NO: 27122 - protein, 75 aa, Homo sapiens
MNPSEMQRKGPPRRWCLQVYPTAPKRQRPSRTGHDDDGGFVEKKRGKCGEKQERSNCYCVCVERSRHRRLHFVMC

SEQ ID NO: 27123 - protein, 244 aa, Homo sapiens
MAAPSDGFKPRERSGGEQAQDWDALPPKRPRLGAGNKIGGRRLIVVLEGASLETVKVGKTYELLNCDKHKSILLKNGRDPGEARPDITHQSLLMLMDSPLNRAGLLQVYIHTQKNVLIEVNPQTRIPRTFDRFCGLMVQLLHKLSVRAADGPQKLLKVIKNPVSDHFPVGCMKVGTSFSIPVVSDVRELVPSSDPIVFVVGAFAHGKVSVEYTEKMVSISNYPLSAALTCAKLTTAFEEVWGVI

SEQ ID NO: 27124 - protein, 1504 aa, Homo sapiens
MATARTFGPEREAEPAKEARVVGSELVDTYTVYIIQVTDGSHEWTVKHRYSDFHDLHEKLVAERKIDKNLLPPKKIIGKNSRSLVEKREKDLEVYLQKLLAAFPGVTPRVLAHFLHFHFYEINGITAALAEELFEKGEQLLGAGEVFAIGPLQLYAVTEQLQQGKPTCASGDAKTDLGHILDFTCRLKYLKVSGTEGPFGTSNIQEQLLPFDLSIFKSLHQVEISHCDAKHIRGLVASKPTLATLSVRFSATSMKEVLVPEASEFDEWEPEGTTLEGPVTAVIPTWQALTTLDLSHNSVSEIDESVKLIPKIEFLDLSHNGLLVVDNLQHLYNLVHLDLSYNKLSSLEGLHTKLGNIKTLNLAGNLLESLSGLHKLYSLVNLDLRDNRIEQMEEVRSIGSLPCLEHVSLLNNPLSIIPDYRTKVLAQFGERASEVCLDDTVTTEKELDTVEVLKAIQKAKEVKSKLSNPEKKGGEDSRLSAAPCIRPSSSPPTVAPASASLPQPILSNQGIMFVQEEALASSLSSTDSLTPEHQPIAQGCSDSLESIPAGQAASDDLRDVPGAVGGASPEHAEPEVQVVPGSGQIIFLPFTCIGYTATNQDFIQRLSTLIRQAIERQLPAWIEAANQREEGQGEQGEEEDEEEEEEEDVAENRYFEMGPPDVEEEEGGGQGEEEEEEEEDEEAEEERLALEWALGADEDFLLEHIRILKVLWCFLIHVQGSIRQFAACLVLTDFGIAVFEIPHQESRGSSQHILSSLRFVFCFPHGDLTEFGFLMPELCLVLKVRHSENTLFIISDAANLHEFHADLRSCFAPQHMAMLCSPILYGSHTSLQEFLRQLLTFYKVAGGCQERSQGCFPVYLVYSDKRMVQTAAGDYSGNIEWASCTLCSAVRRSCCAPSEAVKSAAIPYWLLLTPQHLNVIKADFNPMPNRGTHNCRNRNSFKLSRVPLSTVLLDPTRSCTQPRGAFADGHVLELLVGYRFVTAIFVLPHEKFHFLRVYNQLRASLQDLKTVVIAKTPGTGGSPQGSFADGQPAERRASNDQRPQEVPAEALAPAPAEVPAPAPAAASASGPAKTPAPAEASTSALVPEETPVEAPAPPPAEAPAQYPSEHLIQATSEENQIPSHLPACPSLRHVASLRGSAIIELFHSSIAEVENEELRHLMWSSVVFYQTPGLEVTACVLLSTKAVYFVLHDGLRRYFSEPLQDFWHQKNTDYNNSPFHISQCFVLKLSDLQSVNVGLFDQHFRLTGSTPMQVVTCLTRDSYLTHCFLQHLMVVLSSLERTPSPEPVDKDFYSEFGNKTTGKMENYELIHSSRVKFTYPSEEEIGDLTFTVAQKMAEPEKAPALSILLYVQAFQVGMPPPGCCRGPLRPKTLLLTSSEIFLLDEDCVHYPLPEFAKEPPQRDRYRLDDGRRVRDLDRVLMGYQTYPQALTLVFDDVQGHDLMGSVTLDHFGEVPGGPARASQGREVQWQVFVPSAESREKLISLLARQWEALCGRELPVELTG

SEQ ID NO: 27125 - protein, 993 aa, Homo sapiens
MFVQEEALASSLSSTDSLTPEHQPIAQGCSDSLESIPAGQAASDDLRDVPGAVGGASPEHAEPEVQVVPGSGQIIFLPFTCIGYTATNQDFIQRLSTLIRQAIERQLPAWIEAANQREEGQGEQGEEEDEEEEEEEDVAENRYFEMGPPDVEEEEGGGQGEEEEEEEEDEEAEEERLALEWALGADEDFLLEHIRILKVLWCFLIHVQGSIRQFAACLVLTDFGIAVFEIPHQESRGSSQHILSSLRFVFCFPHGDLTEFGFLMPELCLVLKVRHSENTLFIISDAANLHEFHADLRSCFAPQHMAMLCSPILYGSHTSLQEFLRQLLTFYKVAGGCQERSQGCFPVYLVYSDKRMVQTAAGDYSGNIEWASCTLCSAVRRSCCAPSEAVKSAAIPYWLLLTPQHLNVIKADFNPMPNRGTHNCRNRNSFKLSRVPLSTVLLDPTRSCTQPRGAFADGHVLELLVGYRFVTAIFVLPHEKFHFLRVYNQLRASLQDLKTVVIAKTPGTGGSPQGSFADGQPAERRASNDQRPQEVPAEALAPAPAEVPAPAPAAASASGPAKTPAPAEASTSALVPEETPVEAPAPPPAEAPAQYPSEHLIQATSEENQIPSHLPACPSLRHVASLRGSAIIELFHSSIAEVENEELRHLMWSSVVFYQTPGLEVTACVLLSTKAVYFVLHDGLRRYFSEPLQDFWHQKNTDYNNSPFHISQCFVLKLSDLQSVNVGLFDQHFRLTGSTPMQVVTCLTRDSYLTHCFLQHLMVVLSSLERTPSPEPVDKDFYSEFGNKTTGKMENYELIHSSRVKFTYPSEEEIGDLTFTVAQKMAEPEKAPALSILLYVQAFQVGMPPPGCCRGPLRPKTLLLTSSEIFLLDEDCVHYPLPEFAKEPPQRDRYRLDDGRRVRDLDRVLMGYQTYPQALTLVFDDVQGHDLMGSVTLDHFGEVPGGPARASQGREVQWQVFVPSAESREKLISLLARQWEALCGRELPVELTG

SEQ ID NO: 27126 - protein, 583 aa, Homo sapiens
MATARTFGPEREAEPAKEARVVGSELVDTYTVYIIQVTDGSHEWTVKHRYSDFHDLHEKLVAERKIDKNLLPPKKIIGKNSRSLVEKREKDLEVYLQKLLAAFPGVTPRVLAHFLHFHFYEINGITAALAEELFEKGEQLLGAGEVFAIGPLQLYAVTEQLQQGKPTCASGDAKTDLGHILDFTCRLKYLKVSGTEGPFGTSNIQEQLLPFDLSIFKSLHQVEISHCDAKHIRGLVASKPTLATLSVRFSATSMKEVLVPEASEFDEWEPEGTTLEGPVTAVIPTWQALTTLDLSHNSVSEIDESVKLIPKIEFLDLSHNGLLVVDNLQHLYNLVHLDLSYNKLSSLEGLHTKLGNIKTLNLAGNLLESLSGLHKLYSLVNLDLRDNRIEQMEEVRSIGSLPCLEHVSLLNNPLSIIPDYRTKVLAQFGERASEVCLDDTVTTEKELDTVEVLKAIQKAKEVKSKLSNPEKKGGEDSRLSAAPCIRPSSSPPTVAPASASLPQPILSNQGNRVCTLLLVEPHSPAWAPWLGWGWGRGASTCFQQGTQGGGQCLLQAGPRGGTHGRGAWPDASCCLLGEDSQLL

SEQ ID NO: 27127 - protein, 515 aa, Homo sapiens
MATARTFGPEREAEPAKEARVVGSELVDTYTVYIIQVTDGSHEWTVKHRYSDFHDLHEKLVAERKIDKNLLPPKKIIGKNSRSLVEKREKDLEVYLQKLLAAFPGVTPRVLAHFLHFHFYEINGITAALAEELFEKGEQLLGAGEVFAIGPLQLYAVTEQLQQGKPTCASGDAKTDLGHILDFTCRLKYLKVSGTEGPFGTSNIQEQLLPFDLSIFKSLHQVEISHCDAKHIRGLVASKPTLATLSVRFSATSMKEVLVPEASEFDEWEPEGTTLEGPVTAVIPTWQALTTLDLSHNSVSEIDESVKLIPKIEFLDLSHNGLLVVDNLQHLYNLVHLDLSYNKLSSLEGLHTKLGNIKTLNLAGNLLESLSGLHKLYSLVNLDLRDNRIEQMEEVRSIGSLPCLEHVSLLNNPLSIIPDYRTKVLAQFGERASEVCLDDTVTTEKELDTVEVLKAIQKAKEVKSKLSNPEKKGGEDSRLSAAPCIRPSSSPPTVAPASASLPQPILSNQGILGDE

SEQ ID NO: 27128 - protein, 391 aa, Homo sapiens
MADIDNKEQSELDQDLDDVEEVEEEETGEETKLKARQLTVQMMQNPQILAALQERLDGLVETPTGYIESLPRVVKRRVNALKNLQVKCAQIEAKFYEEVHDLERKYAVLYQPLFDKRFEIINAIYEPTEEECEWKPDEEDEISEELKEKAKIEDEKKDEEKEDPKGIPEFWLTVFKNVDLLSDMVQEHDEPILKHLKDIKVKFSDAGQPMSFVLEFHFEPNEYFTNEVLTKTYRMRSEPDDSDPFSFDGPEIMGCTGCQIDWKKGKNVTLKTIKKKQKHKGRGTVRTVTKTVSNDSFFNFFAPPEVPESGDLDDDAEAILAADFEIGHFLRERIIPRSVLYFTGEAIEDDDDDYDEEGEEADEEGEEEGDEENDPDYDPKKDQNPAECKQQ

SEQ ID NO: 27129 - protein, 368 aa, Homo sapiens
MADIDNKEQSELDQDLDDVEEVEEEETGEETKLKARQLTVQMMQNPQILAALQERLDGLVETPTGYIESLPRVVKRRVNALKNLQVKCAQIEAKFYEEVHDLERKYAVLYQPLFDKRFEIINAIYEPTEEECEWKPDEEDEISEELKEKAKIEDEKKDEEKEDPKGIPEFWLTVFKNVDLLSDMVQEHDEPILKHLKDIKVKFSDAGQPMSFVLEFHFEPNEYFTNEVLTKTYRMRSEPDDSDPFSFDGPEIMGCTGCQIDWKKGKNVTLKTIKKKQKHKGRGTVRTVTKTVSNDSFFNFFAPPEVPESGDLDDDAEAILAADFEIGHFLRERIIPRSVLYFTGEAIEDDDDDYDEEGEEADEVMFTK

SEQ ID NO: 27130 - protein, 323 aa, Homo sapiens
MMQNPQILAALQERLDGLVETPTGYIESLPRVVKRRVNALKNLQVKCAQIEAKFYEEVHDLERKYAVLYQPLFDKEELKEKAKIEDEKKDEEKEDPKGIPEFWLTVFKNVDLLSDMVQEHDEPILKHLKDIKVKFSDAGQPMSFVLEFHFEPNEYFTNEVLTKTYRMRSEPDDSDPFSFDGPEIMGCTGCQIDWKKGKNVTLKTIKKKQKHKGRGTVRTVTKTVSNDSFFNFFAPPEVPESGDLDDDAEAILAADFEIGHFLRERIIPRSVLYFTGEAIEDDDDDYDEEGEEADEEGEEEGDEENDPDYDPKKDQNPAECKQQ

SEQ ID NO: 27131 - protein, 675 aa, Homo sapiens
MNDISQKAEILLSSSKPVPKTYVPKLGKGDVKDKFEAMQRAREERNQRRSRDEKQRRKEQYIREREWNRRKQEIKEMLASDDEEDVSSKVEKAYVPKLTGTVKGRFAEMEKQRQEEQRKRTEEERKRRIEQDMLEKRKIQRELAKRAEQIEDINNTGTESASEEGDDSLLITVVPVKSYKTSGKMKKNFEDLEKEREEKERIKYEEDKRIRYEEQRPSLKEAKCLSLVMDDEIESEAKKESLSPGKLKLTFEELERQRQENRKKQAEEEARKRLEEEKRAFEEARRQMVNEDEENQDTAKIFKGYRPGKLKLSFEEMERQRREDEKRKAEEEARRRIEEEKKAFAEARRNMVVDDDSPEMYKTISQEFLTPGKLEINFEELLKQKMEEEKRRTEEERKHKLEMEKQEFEQLRQEMGEEEEENETFGLSREYEELIKLKRSGSIQAKNLKSKFEKIGQLSEKEIQKKIEEERARRRAIDLEIKEREAENFHEEDDVDVRPARKSEAPFTHKVNMKARFEQMAKAREEEEQRRIEEQKLLRMQFEQREIDAALQKKREEEEEEEGSIMNGSTAEDEEQTRSGAPWFKKPLKNTSVVDSEPVRFTVKVTGEPKPEITWWFEGEILQDGEDYQYIERGETYCLYLPETFPEDGGEYMCKAVNNKGSAASTCILTIESKN

SEQ ID NO: 27132 - protein, 662 aa, Homo sapiens
MNDISQKAEILLSSSKPVPKTYVPKLGKGDVKDKFEAMQRAREERNQRRSRDEKQRRKEQYIREREWNRRKQEIKEMLASDDEEDVSSKVEKAYVPKLTGTVKGRFAEMEKQRQEEQRKRTEEERKRRIEQDMLEKRKIQRELAKRAEQEGDDSLLITVVPVKSYKTSGKMKKNFEDLEKEREEKERIKYEEDKRIRYEEQRPSLKEAKCLSLVMDDEIESEAKKESLSPGKLKLTFEELERQRQENRKKQAEEEARKRLEEEKRAFEEARRQMVNEDEENQDTAKIFKGYRPGKLKLSFEEMERQRREDEKRKAEEEARRRIEEEKKAFAEARRNMVVDDDSPEMYKTISQEFLTPGKLEINFEELLKQKMEEEKRRTEEERKHKLEMEKQEFEQLRQEMGEEEEENETFGLSREYEELIKLKRSGSIQAKNLKSKFEKIGQLSEKEIQKKIEEERARRRAIDLEIKEREAENFHEEDDVDVRPARKSEAPFTHKVNMKARFEQMAKAREEEEQRRIEEQKLLRMQFEQREIDAALQKKREEEEEEEGSIMNGSTAEDEEQTRSGAPWFKKPLKNTSVVDSEPVRFTVKVTGEPKPEITWWFEGEILQDGEDYQYIERGETYCLYLPETFPEDGGEYMCKAVNNKGSAASTCILTIETDDY

SEQ ID NO: 27133 - protein, 613 aa, Homo sapiens
MNDISQKAEILLSSSKPVPKTYVPKLGKGDVKDKFEAMQRAREERNQRRSRDEKQRRKEQYIREREWNRRKQEIKEMLASDDEEDVSSKVEKAYVPKLTGTVKGRFAEMEKQRQEEQRKRTEEERKRRIEQDMLEKRKIQRELAKRAEQIEDINNTGTESASEEGDDSLLITVVPVKSYKTSGKMKKNFEDLEKEREEKERIKYEEDKRIRYEEQRPSLKEAKCLSLVMDDEIESEAKIFKGYRPGKLKLSFEEMERQRREDEKRKAEEEARRRIEEEKKAFAEARRNMVVDDDSPEMYKTISQEFLTPGKLEINFEELLKQKMEEEKRRTEEERKHKLEMEKQEFEQLRQEMGEEEEENETFGLSREYEELIKLKRSGSIQAKNLKSKFEKIGQLSEKEIQKKIEEERARRRAIDLEIKEREAENFHEEDDVDVRPARKSEAPFTHKVNMKARFEQMAKAREEEEQRRIEEQKLLRMQFEQREIDAALQKKREEEEEEEGSIMNGSTAEDEEQTRSGAPWFKKPLKNTSVVDSEPVRFTVKVTGEPKPEITWWFEGEILQDGEDYQYIERGETYCLYLPETFPEDGGEYMCKAVNNKGSAASTCILTIESKN

SEQ ID NO: 27134 - protein, 611 aa, Homo sapiens
MNDISQKAEIKEMLASDDEEDVSSKVEKAYVPKLTGTVKGRFAEMEKQRQEEQRKRTEEERKRRIEQDMLEKRKIQRELAKRAEQIEDINNTGTESASEEGDDSLLITVVPVKSYKTSGKMKKNFEDLEKEREEKERIKYEEDKRIRYEEQRPSLKEAKCLSLVMDDEIESEAKKESLSPGKLKLTFEELERQRQENRKKQAEEEARKRLEEEKRAFEEARRQMVNEDEENQDTAKIFKGYRPGKLKLSFEEMERQRREDEKRKAEEEARRRIEEEKKAFAEARRNMVVDDDSPEMYKTISQEFLTPGKLEINFEELLKQKMEEEKRRTEEERKHKLEMEKQEFEQLRQEMGEEEEENETFGLSREYEELIKLKRSGSIQAKNLKSKFEKIGQLSEKEIQKKIEEERARRRAIDLEIKEREAENFHEEDDVDVRPARKSEAPFTHKVNMKARFEQMAKAREEEEQRRIEEQKLLRMQFEQREIDAALQKKREEEEEEEGSIMNGSTAEDEEQTRSGAPWFKKPLKNTSVVDSEPVRFTVKVTGEPKPEITWWFEGEILQDGEDYQYIERGETYCLYLPETFPEDGGEYMCKAVNNKGSAASTCILTIESKN

SEQ ID NO: 27135 - protein, 654 aa, Homo sapiens [sequence omitted]

SEQ ID NO: 27136 - protein, 636 aa, Homo sapiens
MAAAALGSSSGSASPAVAELCQNTPETFLEASKLLLTYADNILRNPNDEKYRSIRIGNTAFSTRLLPVRGAVECLFEMGFEEGETHLIFPKKASVEQLQKIRDLIAIERSSRLDGSNKSHKVKSSQQPAASTQLPTTPSSNPSGLNQHTRNRQGQSSDPPSASTVAADSAILEVLQSNIQHVLVYENPALQEKALACIPVQELKRKSQEKLSRARKLDKGINISDEDFLLLELLHWFKEEFFHWVNNVLCSKCGGQTRSRDRSLLPSDDELKWGAKEVEDHYCDACQFSNRFPRYNNPEKLLETRCGRCGEWANCFTLCCRAVGFEARYVWDYTELQRTLSLKLTTLKEIGKTFLRISKRQKLIQVVDVTWRYSCKHEEVIARRTKVKEALLRDTINGLNKQRQLFLSENRRKELLQRIIVELVEFISPKTPKPGELGGRISGSVAWRVARGEMGLQRKETLFIPCENEKISKQLHLCYNIVKDRYVRVSNNNQTISGWENGVWKMESIFRKVETDWHMVYLARKEGSSFAYISWKFECGSVGLKVDSISIRTSSQTFQTGTVEWKLRSDTAQVELTGDNSLHSYADFSGATEVILEAELSRGDGDVAWQHTQLFRQSLNDHEENCLEIIIKFSDL

SEQ ID NO: 27137 - protein, 558 aa, Homo sapiens
MAAAALGSSSGSASPAVAELCQNTPETFLEASKLLLTYADNILRNPNDEKYRSIRIGNTAFSTRLLPVRGAVECLFEMGFEEGETHLIFPKKASVEQLQKIRDLIAIERSSRLDGSNKSHKVKSSQQPAASTQLPTTPSSNPSGLNQHTRNRQGQSSDPPSASTVAADSAILEVLQSNIQHVLVYENPALQEKALACIPVQELKRKSQEKLSRARKLDKGINISDEDFLLLELLHWFKEEFFHWVNNVLCSKCGGQTRSRDRSLLPSDDELKWGAKEVEDHYCDACQFSNRFPRYNNPEKLLETRCGRCGEWANCFTLCCRAVGFEARYVWDYTDHVWTEVYSPSQQRWLHCDACEDVCDKPLLYEIGWGKKLSYVIAFSKDEVVDVTWRYSCKHEEVIARRTKVKEALLRDTINGLNKQRQLFLSENRRKELLQRIIVELVEFISPKTPKPGELGGRISGSVAWRVARGEMGLQRKETLFIPCENEKISKQLHLCYNIVKDRYVRVSNNNQTISGWENGVWKMESIFRKVETDWHMITVFTPMLIFLVPLKLFWKQN

SEQ ID NO: 27138 - protein, 131 aa, Homo sapiens
MESIFRKVETDWHMVYLARKEGSSFAYISWKFECGSVGLKVDSISIRTSSQTFQTGTVEWKLRSDTAQVELTGDNSLHSYADFSGATEVILEAELSRGDGDVAWQHTQLFRQSLNDHEENCLEIIIKFSDL

SEQ ID NO: 27139 - protein, 612 aa, Homo sapiens
MRNPNDEKYRSIRIGNTAFSTRLLPVRGAVECLFEMGFEEGETHLIFPKKASVEQLQKIRDLIAIERSSRLDGSNKSHKVKSSQQPAASTQLPTTPSSNPSGLNQHTRNRQGQSSDPPSASTVAADSAILEVLQSNIQHVLVYENPALQEKALACIPVQELKRKSQEKLSRARKLDKGINISDEDFLLLELLHWFKEEFFHWVNNVLCSKCGGQTRSRDRSLLPSDDELKWGAKEVEDHYCDACQFSNRFPRYNNPEKLLETRCGRCGEWANCFTLCCRAVGFEARYVWDYTDHVWTEVYSPSQQRWLHCDACEDVCDKPLLYEIGWGKKLSYVIAFSKDEVVDVTWRYSCKHEEVIARRTKVKEALLRDTINGLNKQRQLFLSENRRKELLQRIIVELVEFISPKTPKPGELGGRISGSVAWRVARGEMGLQRKETLFIPCENEKISKQLHLCYNIVKDRYVRVSNNNQTISGWENGVWKMESIFRKVETDWHMVYLARKEGSSFAYISWKFECGSVGLKVDSISIRTSSQTFQTGTVEWKLRSDTAQVELTGDNSLHSYADFSGATEVILEAELSRGDGDVAWQHTQLFRQSLNDHEENCLEIIIKFSDL

SEQ ID NO: 27140 - protein, 460 aa, Homo sapiens
MAESENRKELSESSQEEAGNQIMVEGLGEHLERGEDAAAGLGDDGKCGEEAAAGLGEEGENGEDTAAGSGEDGKKGGDTDEDSEADRPKGLIGYVLDTDFVESLPVKVKYRVLALKKLQTRAANLESKFLREFHDIERKFAEMYQPLLEKRRQIINAIYEPTEEECEYKSDSEDCDDEEMCHEEMYGNEEGMVHEYVDEDDGYEDYYYDYAVEEEEEEEEEDDIEATGEENKEEEDPKGIPDFWLTVLKNVDTLTPLIKKYDEPILKLLTDIKVKLSDPGEPLSFTLEFHFKPNEYFKNELLTKTYVLKSKLAYYDPHPYRGTAIEYSTGCEIDWNEGKNVTLKTIKKKQKHRIWGTIRTVTEDFPKDSFFNFFSPHGITSNGRDGNDDFLLGHNLRTYIIPRSVLFFSGDALESQQEGVVREVNDAIYDKIIYDNWMAAIEEVKACCKNLEALVEDIDR

SEQ ID NO: 27141 - protein, 318 aa, Homo sapiens
MYQPLLEKRRQIINAIYEPTEEECEYKSDSEDCDDEEMCHEEMYGNEEGMVHEYVDEDDGYEDYYYDYAVEEEEEEEEEDDIEATGEENKEEEDPKGIPDFWLTVLKNVDTLTPLIKKYDEPILKLLTDIKVKLSDPGEPLSFTLEFHFKPNEYFKNELLTKTYVLKSKLAYYDPHPYRGTAIEYSTGCEIDWNEGKNVTLKTIKKKQKHRIWGTIRTVTEDFPKDSFFNFFSPHGITSNGRDGNDDFLLGHNLRTYIIPRSVLFFSGDALESQQEGVVREVNDAIYDKIIYDNWMAAIEEVKACCKNLEALVEDIDR

SEQ ID NO: 27142 - protein, 237 aa, Homo sapiens
MPARLETCISDLDCASSSGSDLSGFLTDEEDCARLQQAASASGPPAPARRGAPNISRASEVPGAQDDEQERRRRRGRTRVRSEALLHSLRRSRRVKANDRERNRMHNLNAALDALRSVLPSFPDDTKLTKIETLRFAYNYIWALAETLRLADQGLPGGGARERLLPPQCVPCLPGPPSPASDAESWGSGAAAASPLSDPSSPAASEDFTYRPGDPVFSFPSLPKDLLHTTPCFIPYH

SEQ ID NO: 27143 - protein, 506 aa, Homo sapiens
MAEADFKMVSEPVAHGVAEEEMASSTSDSGEESDSSSSSSSTSDSSSSSSTSGSSSGSGSSSSSSGSTSSRSRLYRKKRVPEPSRRARRAPLGTNFVDRLPQAVRNRVQALRNIQDECDKVDTLFLKAIHDLERKYAELNKPLYDRRFQIINAEYEPTEEECEWNSEDEEFSSDEEVQDNTPSEMPPLEGEEEENPKENPEVKAEEKEVPKEIPEVKDEEKEVPKEIPEVKAEEKADSKDCMEATPEVKEDPKEVPQVKADDKEQPKATEAKARAAVRETHKRVPEERLQDSVDLKRARKGKPKREDPKGIPDYWLIVLKNVDKLGPMIQKYDEPILKFLSDVSLKFSKPGQPVSYTFEFHFLPNPYFRNEVLVKTYIIKAKPDHNDPFFSWGWEIEDCKGCKIDWRRGKDVTVTTTQSRTTATGEIEIQPRVVPNASFFNFFSPPEIPMIGKLEPREDAILDEDFEIGQILHDNVILKSIYYYTGEVNGTYYQFGKHYGNKKYRK

SEQ ID NO: 27144 - protein, 327 aa, Homo sapiens
MLGFITRPPHRFLSLLCPGLRIPQLSVLCAQPRPRAMAISSSSCELPLVAVCQVTSTPDKQQNFKTCAELVREAARLGACLAFLPEAFDFIARDPAETLHLSEPLGGKLLEEYTQLARECGLWLSLGGFHERGQDWEQTQKIYNCHVLLNSKGAVVATYRKTHLCDVEIPGQGPMCESNSTMPGPSLESPVSTPAGKIGLAVCYDMRFPELSLALAQAGAEILTYPSAFGSITGPAHWEVLLRARAIETQCYVVAAAQCGRHHEKRASYGHSMVVDPWGTVVARCSEGPGLCLARIDLNYLRQLRRHLPVFQHRRPDLYGNLGHPLS

SEQ ID NO: 27145 - protein, 291 aa, Homo sapiens
MAISSSSCELPLVAVCQVTSTPDKQQNFKTCAELVREAARLGACLAFLPEAFDFIARDPAETLHLSEPLGGKLLEEYTQLARECGLWLSLGGFHERGQDWEQTQKIYNCHVLLNSKGAVVATYRKTHLCDVEIPGQGPMCESNSTMPGPSLESPVSTPAGKIGLAVCYDMRFPELSLALAQAGAEILTYPSAFGSITGPAHWEVLLRARAIETQCYVVAAAQCGRHHEKRASYGHSMVVDPWGTVVARCSEGPGLCLARIDLNYLRQLRRHLPVFQHRRPDLYGNLGHPLS

SEQ ID NO: 27146 - protein, 367 aa, Homo sapiens
MVLAISSCWASSPGLLTDSCPFCVLDSGYLNSQYFVLSPGRTYSLSRRPRPRAMAISSSSCELPLVAVCQVTSTPDKQQNFKTCAELVREAARLGACLAFLPEAFDFIARDPAETLHLSEPLGGKLLEEYTQLARECGLWLSLGGFHERGQDWEQTQKIYNCHVLLNSKGAVVATYRKTHLCDVEIPGQGPMCESNSTMPGPSLESPVSTPAGKIGLAVCYDMRFPELSLALAQAGAEILTYPSAFGSITGPAHWEVLLRARAIETQCYVVAAAQCGRHHEKRASYGHSMVVDPWGTVVARCSEGPGLCLARIDLNYLRQLRRHLPVFQHRRPDLYGNLGHPLSDLTSVSLDLPLPPPPCHYELVLM

SEQ ID NO: 27147 - protein, 312 aa, Homo sapiens
MTFGLRKRLSEERGFSLMPRAMAISSSSCELPLVAVCQVTSTPDKQQNFKTCAELVREAARLGACLAFLPEAFDFIARDPAETLHLSEPLGGKLLEEYTQLARECGLWLSLGGFHERGQDWEQTQKIYNCHVLLNSKGAVVATYRKTHLCDVEIPGQGPMCESNSTMPGPSLESPVSTPAGKIGLAVCYDMRFPELSLALAQAGAEILTYPSAFGSITGPAHWEVLLRARAIETQCYVVAAAQCGRHHEKRASYGHSMVVDPWGTVVARCSEGPGLCLARIDLNYLRQLRRHLPVFQHRRPDLYGNLGHPLS

SEQ ID NO: 27148 - protein, 243 aa, Homo sapiens
MLGFITRPPHRFLSLLCPGLRIPQLSVLCAQPRPRAMAISSSSCELPLVAVCQVTSTPDKQQNFKTCAELVREAARLGACLAFLPEAFDFIARDPAETLHLSEPLGGKLLEEYTQLARECGLWLSLGGFHERGQDWEQTQKIYNCHVLLNSKGAVVATYRKTHLCDVEIPGQGPMCESNSTMPGPSLESPVSTPAGKIGLAVCYDMRFPELSLALAQAGAEILTYPSAFGSITGPAHWEPVSS

SEQ ID NO: 27149 - protein, 272 aa, Homo sapiens
MFVKSETLELKEEEDVLVLLGSASPALAALTPLSSSADEEEEEEPGASGGARRQRGAEAGQGARGGVAAGAEGCRPARLLGLVHDCKRRPSRARAVSRGAKTAETVQRIKKTRRLKANNRERNRMHNLNAALDALREVLPTFPEDAKLTKIETLRFAHNYIWALTETLRLADHCGGGGGGLPGALFSEAVLLSPGGASAALSSSGDSPSPASTWSCTNSPAPSSSVSSNSTSPYSCTLSPASPAGSDMDYWQPPPPDKHRYAPHLPIARDCI

SEQ ID NO: 27150 - protein, 214 aa, Homo sapiens
MTPQPSGAPTVQVTRETERSFPRASEDEVTCPTSAPPSPTRTRGNCAEAEEGGCRGAPRKLRARRGGRSRPKSELALSKQRRSRRKKANDRERNRMHNLNSALDALRGVLPTFPDDAKLTKIETLRFAHNYIWALTQTLRIADHSLYALEPPAPHCGELGSPGGSPGDWGSLYSPVSQAGSLSPAASLEERPGLLGATFSACLSPGSLAFSDFL

SEQ ID NO: 27151 - protein, 2839 aa, Homo sapiens
MAAHRPVEWVQAVVSRFDEQLPIKTGQQNTHTKVSTEHNKECLINISKYKFSLVISGLTTILKNVNNMRIFGEAAEKNLYLSQLIILDTLEKCLAGQPKDTMRLDETMLVKQLLPEICHFLHTCREGNQHAAELRNSASGVLFSLSCNNFNAVFSRISTRLQELTVCSEDNVDVHDIELLQYINVDCAKLKRLLKETAFKFKALKKVAQLAVINSLEKAFWNWVENYPDEFTKLYQIPQTDMAECAEKLFDLVDGFAESTKRKAAVWPLQIILLILCPEIIQDISKDVVDENNMNKKLFLDSLRKALAGHGGSRQLTESAAIACVKLCKASTYINWEDNSVIFLLVQSMVVDLKNLLFNPSKPFSRGSQPADVDLMIDCLVSCFRISPHNNQHFKICLAQNSPSTFHYVLVNSLHRIITNSALDWWPKIDAVYCHSVELRNMFGETLHKAVQGCGAHPAIRMAPSLTFKEKVTSLKFKEKPTDLETRSYKYLLLSMVKLIHADPKLLLCNPRKQGPETQGSTAELITGLVQLVPQSHMPEIAQEAMEALLVLHQLDSIDLWNPDAPVETFWEISSQMLFYICKKLTSHQMLSSTEILKWLREILICRNKFLLKNKQADRSSCHFLLFYGVGCDIPSSGNTSQMSMDHEELLRTPGASLRKGKGNSSMDSAAGCSGTPPICRQAQTKLEVALYMFLWNPDTEAVLVAMSCFRHLCEEADIRCGVDEVSVHNLLPNYNTFMEFASVSNMMSTGRAALQKRVMALLRRIEHPTAGNTEAWEDTHAKWEQATKLILNYPKAKMEDGQAAESLHKTIVKRRMSHVSGGGSIDLSDTDSLQEWINMTGFLCALGGVCLQQRSNSGLATYSPPMGPVSERKGSMISVMSSEGNADTPVSKFMDRLLSLMVCNHEKVGLQIRTNVKDLVGLELSPALYPMLFNKLKNTISKFFDSQGQVLLTDTNTQFVEQTIAIMKNLLDNHTEGSSEHLGQASIETMMLNLVRYVRVLGNMVHAIQIKTKLCQLVEVMMARRDDLSFCQEMKFRNKMVEYLTDWVMGTSNQAADDDVKCLTRDLDQASMEAVVSLLAGLPLQPEEGDGVELMEAKSQLFLKYFTLFMNLLNDCSEVEDESAQTGGRKRGMSRRLASLRHCTVLAMSNLLNANVDSGLMHSIGLGYHKDLQTRATFMEVLTKILQQGTEFDTLAETVLADRFERLVELVTMMGDQGELPIAMALANVVPCSQWDELARVLVTLFDSRHLLYQLLWNMFSKEVELADSMQTLFRGNSLASKIMTFCFKVYGATYLQKLLDPLLRIVITSSDWQHVSFEVDPTRLEPSESLEENQRNLLQMTEKFFHAIISSSSEFPPQLRSVCHCLYQATCHSLLNKATVKEKKENKKSVVSQRFPQNSIGAVGSAMFLRFINPAIVSPYEAGILDKKPPPRIERGLKLMSKILQSIANHVLFTKEEHMRPFNDFVKSNFDAARRFFLDIASDCPTSDAVNHSLSFISDGNVLALHRLLWNNQEKIGQYLSSNRDHKAVGRRPFDKMATLLAYLGPPEHKPVADTHWSSLNLTSSKFEEFMTRHQVHEKEEFKALKTLSIFYQAGTSKAGNPIFYYVARRFKTGQINGDLLIYHVLLTLKPYYAKPYEIVVDLTHTGPSNRFKTDFLSKWFVVFPGFAYDNVSAVYIYNCNSWVREYTKYHERLLTGLKGSKRLVFIDCPGKLAEHIEHEQQKLPAATLALEEDLKVFHNALKLAHKDTKVSIKVGSTAVQVTSAERTKVLGQSVFLNDIYYASEIEEICLVDENQFTLTIANQGTPLTFMHQECEAIVQSIIHIRTRWELSQPDSIPQHTKIRPKDVPGTLLNIALLNLGSSDPSLRSAAYNLLCALTCTFNLKIEGQLLETSGLCIPANNTLFIVSISKTLAANEPHLTLEFLEECISGFSKSSIELKHLCLEYMTPWLSNLVRFCKHNDDAKRQRVTAILDKLITMTINEKQMYPSIQAKIWGSLGQITDLLDVVLDSFIKTSATGGLGSIKAEVMADTAVALASGNVKLVSSKVIGRMCKIIDKTCLSPTPTLEQHLMWDDIAILARYMLMLSFNNSLDVAAHLPYLFHVVTFLVATGPLSLRASTHGLVINIIHSLCTCSQLHFSEETKQVLRLSLTEFSLPKFYLLFGISKVKSAAVIAFRSSYRDRSFSPGSYERETFALTSLETVTEALLEIMEACMRDIPTCKWLDQWTELAQRFAFQYNPSLQPRALVVFGCISKRVSHGQIKQIIRILSKALESCLKGPDTYNSQVLIEATVIALTKLQPLLNKDSPLHKALFWVAVAVLQLDEVNLYSAGTALLEQNLHTLDSLRIFNDKSPEEVFMAIRNPLEWHCKQMDHFVGLNFNSNFNFALVGHLLKGYRHPSPAIVARTVRILHTLLTLVNKHRNCDKFEVNTQSVAYLAALLTVSEEVRSRCSLKHRKSLLLTDISMENVPMDTYPIHHGDPSYRTLKETQPWSSPKGSEGYLAATYPTVGQTSPRARKSMSLDMGQPSQANTKKLLGTRKSFDHLISDTKAPKRQEMESGITTPPKMRRVAETDYEMETQRISSSQQHPHLRKVSVSESNVLLDEEVLTDPKIQALLLTVLATLVKYTTDEFDQRILYEYLAEASVVFPKVFPVVHNLLDSKINTLLSLCQDPNLLNPIHGIVQSVVYHEESPPQYQTSYLQSFGFNGLWRFAGPFSKQTQIPDYAELIVKFLDALIDTYLPGIDEETSEESLLTPTSPYPPALQSQLSITANLNLSNSMTSLATSQHSPGIDKENVELSPTTGHCNSGRTRHGSASQVQKQRSAGSFKRNSIKKIV

SEQ ID NO: 27152 - protein, 2818 aa, Homo sapiens
MAAHRPVEWVQAVVSRFDEQLPIKTGQQNTHTKVSTEHNKECLINISKYKFSLVISGLTTILKNVNNMRIFGEAAEKNLYLSQLIILDTLEKCLAGQPKDTMRLDETMLVKQLLPEICHFLHTCREGNQHAAELRNSASGVLFSLSCNNFNAVFSRISTRLQELTVCSEDNVDVHDIELLQYINVDCAKLKRLLKETAFKFKALKKVAQLAVINSLEKAFWNWVENYPDEFTKLYQIPQTDMAECAEKLFDLVDGFAESTKRKAAVWPLQIILLILCPEIIQDISKDVVDENNMNKKLFLDSLRKALAGHGGSRQLTESAAIACVKLCKASTYINWEDNSVIFLLVQSMVVDLKNLLFNPSKPFSRGSQPADVDLMIDCLVSCFRISPHNNQHFKICLAQNSPSTFHYVLVNSLHRIITNSALDWWPKIDAVYCHSVELRNMFGETLHKAVQGCGAHPAIRMAPSLTFKEKVTSLKFKEKPTDLETRSYKYLLLSMVKLIHADPKLLLCNPRKQGPETQGSTAELITGLVQLVPQSHMPEIAQEAMEALLVLHQLDSIDLWNPDAPVETFWEISSQMLFYICKKLTSHQMLSSTEILKWLREILICRNKFLLKNKQADRSSCHFLLFYGVGCDIPSSGNTSQMSMDHEELLRTPGASLRKGKGNSSMDSAAGCSGTPPICRQAQTKLEVALYMFLWNPDTEAVLVAMSCFRHLCEEADIRCGVDEVSVHNLLPNYNTFMEFASVSNMMSTGRAALQKRVMALLRRIEHPTAGNTEAWEDTHAKWEQATKLILNYPKAKMEDGQAAESLHKTIVKRRMSHVSGGGSIDLSDTDSLQEWINMTGFLCALGGVCLQQRSNSGLATYSPPMGPVSERKGSMISVMSSEGNADTPVSKFMDRLLSLMVCNHEKVGLQIRTNVKDLVGLELSPALYPMLFNKLKNTISKFFDSQGQVLLTDTNTQFVEQTIAIMKNLLDNHTEGSSEHLGQASIETMMLNLVRYVRVLGNMVHAIQIKTKLCQLVEVMMARRDDLSFCQEMKFRNKMVEYLTDWVMGTSNQAADDDVKCLTRDLDQASMEAVVSLLAGLPLQPEEGDGVELMEAKSQLFLKYFTLFMNLLNDCSEVEDESAQTGGRKRGMSRRLASLRHCTVLAMSNLLNANVDSGLMHSIGLGYHKDLQTRATFMEVLTKILQQGTEFDTLAETVLADRFERLVELVTMMGDQGELPIAMALANVVPCSQWDELARVLVTLFDSRHLLYQLLWNMFSKEVELADSMQTLFRGNSLASKIMTFCFKVYGATYLQKLLDPLLRIVITSSDWQHVSFEVDPTRLEPSESLEENQRNLLQMTEKFFHAIISSSSEFPPQLRSVCHCLYQVVSQRFPQNSIGAVGSAMFLRFINPAIVSPYEAGILDKKPPPRIERGLKLMSKILQSIANHVLFTKEEHMRPFNDFVKSNFDAARRFFLDIASDCPTSDAVNHSLSFISDGNVLALHRLLWNNQEKIGQYLSSNRDHKAVGRRPFDKMATLLAYLGPPEHKPVADTHWSSLNLTSSKFEEFMTRHQVHEKEEFKALKTLSIFYQAGTSKAGNPIFYYVARRFKTGQINGDLLIYHVLLTLKPYYAKPYEIVVDLTHTGPSNRFKTDFLSKWFVVFPGFAYDNVSAVYIYNCNSWVREYTKYHERLLTGLKGSKRLVFIDCPGKLAEHIEHEQQKLPAATLALEEDLKVFHNALKLAHKDTKVSIKVGSTAVQVTSAERTKVLGQSVFLNDIYYASEIEEICLVDENQFTLTIANQGTPLTFMHQECEAIVQSIIHIRTRWELSQPDSIPQHTKIRPKDVPGTLLNIALLNLGSSDPSLRSAAYNLLCALTCTFNLKIEGQLLETSGLCIPANNTLFIVSISKTLAANEPHLTLEFLEECISGFSKSSIELKHLCLEYMTPWLSNLVRFCKHNDDAKRQRVTAILDKLITMTINEKQMYPSIQAKIWGSLGQITDLLDVVLDSFIKTSATGGLGSIKAEVMADTAVALASGNVKLVSSKVIGRMCKIIDKTCLSPTPTLEQHLMWDDIAILARYMLMLSFNNSLDVAAHLPYLFHVVTFLVATGPLSLRASTHGLVINIIHSLCTCSQLHFSEETKQVLRLSLTEFSLPKFYLLFGISKVKSAAVIAFRSSYRDRSFSPGSYERETFALTSLETVTEALLEIMEACMRDIPTCKWLDQWTELAQRFAFQYNPSLQPRALVVFGCISKRVSHGQIKQIIRILSKALESCLKGPDTYNSQVLIEATVIALTKLQPLLNKDSPLHKALFWVAVAVLQLDEVNLYSAGTALLEQNLHTLDSLRIFNDKSPEEVFMAIRNPLEWHCKQMDHFVGLNFNSNFNFALVGHLLKGYRHPSPAIVARTVRILHTLLTLVNKHRNCDKFEVNTQSVAYLAALLTVSEEVRSRCSLKHRKSLLLTDISMENVPMDTYPIHHGDPSYRTLKETQPWSSPKGSEGYLAATYPTVGQTSPRARKSMSLDMGQPSQANTKKLLGTRKSFDHLISDTKAPKRQEMESGITTPPKMRRVAETDYEMETQRISSSQQHPHLRKVSVSESNVLLDEEVLTDPKIQALLLTVLATLVKYTTDEFDQRILYEYLAEASVVFPKVFPVVHNLLDSKINTLLSLCQDPNLLNPIHGIVQSVVYHEESPPQYQTSYLQSFGFNGLWRFAGPFSKQTQIPDYAELIVKFLDALIDTYLPGIDEETSEESLLTPTSPYPPALQSQLSITANLNLSNSMTSLATSQHSPGIDKENVELSPTTGHCNSGRTRHGSASQVQKQRSAGSFKRNSIKKIV

SEQ ID NO: 27153 - protein, 551 aa, Homo sapiens
MAAHRPVEWVQAVVSRFDEQLPIKTGQQNTHTKVSTEHNKECLINISKYKFSLVISGLTTILKNVNNMRIFGEAAEKNLYLSQLIILDTLEKCLAGQPKDTMRLDETMLVKQLLPEICHFLHTCREGNQHAAELRNSASGVLFSLSCNNFNAVFSRISTRLQELTVCSEDNVDVHDIELLQYINVDCAKLKRLLKETAFKFKALKKVAQLAVINSLEKAFWNWVENYPDEFTKLYQIPQTDMAECAEKLFDLVDGFAESTKRKAAVWPLQIILLILCPEIIQDISKDVVDENNMNKKLFLDSLRKALAGHGGSRQLTESAAIACVKLCKASTYINWEDNSVIFLLVQSMVVDLKNLLFNPSKPFSRGSQPADVDLMIDCLVSCFRISPHNNQHFKICLAQNSPSTFHYVLVNSLHRIITNSALDWWPKIDAVYCHSVELRNMFGETLHKAVQGCGAHPAIRMAPSLTFKEKVTSLKFKEKPTDLETRSYKYLLLSMVKLIHADPKLLLCNPRKQGPETQGSTAELITGLVQLVPQSHMPEIAQEAMEVRGK

SEQ ID NO: 27154 - protein, 1598 aa, Homo sapiens
MAAHRPVEWVQAVVSRFDEQLPIKTGQQNTHTKVSTEHNKECLINISKYKFSLVISGLTTILKNVNNMRIFGEAAEKNLYLSQLIILDTLEKCLAGQPKDTMRLDETMLVKQLLPEICHFLHTCREGNQHAAELRNSASGVLFSLSCNNFNAVFSRISTRLQELTVCSEDNVDVHDIELLQYINVDCAKLKRLLKETAFKFKALKKVAQLAVINSLEKAFWNWVENYPDEFTKLYQIPQTDMAECAEKLFDLVDGFAESTKRKAAVWPLQIILLILCPEIIQDISKDVVDENNMNKKLFLDSLRKALAGHGGSRQLTESAAIACVKLCKASTYINWEDNSVIFLLVQSMVVDLKNLLFNPSKPFSRGSQPADVDLMIDCLVSCFRISPHNNQHFKICLAQNSPSTFHYVLVNSLHRIITNSALDWWPKIDAVYCHSVELRNMFGETLHKAVQGCGAHPAIRMAPSLTFKEKVTSLKFKEKPTDLETRSYKYLLLSMVKLIHADPKLLLCNPRKQGPETQGSTAELITGLVQLVPQSHMPEIAQEAMEALLVLHQLDSIDLWNPDAPVETFWEISSQMLFYICKKLTSHQMLSSTEILKWLREILICRNKFLLKNKQADRSSCHFLLFYGVGCDIPSSGNTSQMSMDHEELLRTPGASLRKGKGNSSMDSAAGCSGTPPICRQAQTKLEVALYMFLWNPDTEAVLVAMSCFRHLCEEADIRCGVDEVSVHNLLPNYNTFMEFASVSNMMSTGRAALQKRVMALLRRIEHPTAGNTEAWEDTHAKWEQATKLILNYPKAKMEDGQAAESLHKTIVKRRMSHVSGGGSIDLSDTDSLQEWINMTGFLCALGGVCLQQRSNSGLATYSPPMGPVSERKGSMISVMSSEGNADTPVSKFMDRLLSLMVCNHEKVGLQIRTNVKDLVGLELSPALYPMLFNKLKNTISKFFDSQGQVLLTDTNTQFVEQTIAIMKNLLDNHTEGSSEHLGQASIETMMLNLVRYVRVLGNMVHAIQIKTKLCQLVEVMMARRDDLSFCQEMKFRNKMVEYLTDWVMGTSNQAADDDVKCLTRDLDQASMEAVVSLLAGLPLQPEEGDGVELMEAKSQLFLKYFTLFMNLLNDCSEVEDESAQTGGRKRGMSRRLASLRHCTVLAMSNLLNANVDSGLMHSIGLGYHKDLQTRATFMEVLTKILQQGTEFDTLAETVLADRFERLVELVTMMGDQGELPIAMALANVVPCSQWDELARVLVTLFDSRHLLYQLLWNMFSKEVELADSMQTLFRGNSLASKIMTFCFKVYGATYLQKLLDPLLRIVITSSDWQHVSFEVDPTRLEPSESLEENQRNLLQMTEKFFHAIISSSSEFPPQLRSVCHCLYQATCHSLLNKATVKEKKENKKSVVSQRFPQNSIGAVGSAMFLRFINPAIVSPYEAGILDKKPPPRIERGLKLMSKILQSIANHVLFTKEEHMRPFNDFVKSNFDAARRFFLDIASDCPTSDAVNHSLSFISDGNVLALHRLLWNNQEKIGQYLSSNRDHKAVGRRPFDKMATLLAYLGPPEHKPVADTHWSSLNLTSSKFEEFMTRHQVHEKEEFKALKTLTPPPEPET

SEQ ID NO: 27155 - protein, 593 aa, Homo sapiens
MAAHRPVEWVQAVVSRFDEQLPIKTGQQNTHTKVSTEHNKECLINISKYKFSLVISGLTTILKNVNNMRIFGEAAEKNLYLSQLIILDTLEKCLAGQPKDTMRLDETMLVKQLLPEICHFLHTCREGNQHAAELRNSASGVLFSLSCNNFNAVFSRISTRLQELTVCSEDNVDVHDIELLQYINVDCAKLKRLLKETAFKFKALKKVAQLAVINSLEKAFWNWVENYPDEFTKLYQIPQTDMAECAEKLFDLVDGFAESTKRKAAVWPLQIILLILCPEIIQDISKDVVDENNMNKKLFLDSLRKALAGHGGSRQLTESAAIACVKLCKASTYINWEDNSVIFLLVQSMVVDLKNLLFNPSKPFSRGSQPADVDLMIDCLVSCFRISPHNNQHFKICLAQNSPSTFHYVLVNSLHRIITNSALDWWPKIDAVYCHSVELRNMFGETLHKAVQGCGAHPAIRMAPSLTFKEKVTSLKFKEKPTDLETRSYKYLLLSMVKLIHADPKLLLCNPRKQGPETQGSTAELITGLVQLVPQSHMPEIAQEAMEALLVLHQLDSIDLWNPDAPVETFWEIRYMYFYFLNSTFKFYFVFLS

SEQ ID NO: 27156 - protein, 2836 aa, Homo sapiens
MAAHRPVEWVQAVVSRFDEQLPIKTGQQNTHTKVSTEHNKECLINISKYKFSLVISGLTTILKNVNNMRIFGEAAEKNLYLSQLIILDTLEKCLAGQPKDTMRLDETMLVKQLLPEICHFLHTCREGNQHAAELRNSASGVLFSLSCNNFNAVFSRISTRLQELTVCSEDNVDVHDIELLQYINVDCAKLKRLLKETAFKFKALKKVAQLAVINSLEKAFWNWVENYPDEFTKLYQIPQTDMAECAEKLFDLVDGFAESTKRKAAVWPLQIILLILCPEIIQDISKDVVDENNMNKKLFLDSLRKALAGHGGSRQLTESAAIACVKLCKASTYINWEDNSVIFLLVQSMVVDLKNLLFNPSKPFSRGSQPADVDLMIDCLVSCFRISPHNNQHFKICLAQNSPSTFHYVLVNSLHRIITNSALDWWPKIDAVYCHSVELRNMFGETLHKAVQGCGAHPAIRMAPSLTFKEKVTSLKFKEKPTDLETRSYKYLLLSMVKLIHADPKLLLCNPRKQGPETQGSTAELITGLVQLVPQSHMPEIAQEAMEALLVLHQLDSIDLWNPDAPVETFWEISSQMLFYICKKLTSHQMLSSTEILKWLREILICRNKFLLKNKQADRSSCHFLLFYGVGCDIPSSGNTSQMSMDHEELLRTPGASLRKGKGNSSMDSAAGCSGTPPICRQAQTKLEVALYMFLWNPDTEAVLVAMSCFRHLCEEADIRCGVDEVSVHNLLPNYNTFMEFASVSNMMSTGRAALQKRVMALLRRIEHPTAGNTEAWEDTHAKWEQATKLILNYPKAKMEDGQAAESLHKTIVKRRMSHVSGGGSIDLSDTDSLQEWINMTGFLCALGGVCLQQRSNSGLATYSPPMGPVSERKGSMISVMSSEGNADTPVSKFMDRLLSLMVCNHEKVGLQIRTNVKDLVGLELSPALYPMLFNKLKNTISKFFDSQGQVLLTDTNTQFVEQTIAIMKNLLDNHTEGSSEHLGQASIETMMLNLVRYVRVLGNMVHAIQIKTKLCQLVEVMMARRDDLSFCQEMKFRNKMVEYLTDWVMGTSNQAADDDVKCLTRDLDQASMEAVVSLLAGLPLQPEEGDGVELMEAKSQLFLKYFTLFMNLLNDCSEVEDESAQTGGRKRGMSRRLASLRHCTVLAMSNLLNANVDSGLMHSIGLGYHKDLQTRATFMEVLTKILQQGTEFDTLAETVLADRFERLVELVTMMGDQGELPIAMALANVVPCSQWDELARVLVTLFDSRHLLYQLLWNMFSKEVELADSMQTLFRGNSLASKIMTFCFKVYGATYLQKLLDPLLRIVITSSDWQHVSFEVDPTRLEPSESLEENQRNLLQMTEKFFHAIISSSSEFPPQLRSVCHCLYQVVSQRFPQNSIGAVGSAMFLRFINPAIVSPYEAGILDKKPPPRIERGLKLMSKILQSIANHVLFTKEEHMRPFNDFVKSNFDAARRFFLDIASDCPTSDAVNHSLSFISDGNVLALHRLLWNNQEKIGQYLSSNRDHKAVGRRPFDKMATLLAYLGPPEHKPVADTHWSSLNLTSSKFEEFMTRHQVHEKEEFKALKTLSIFYQAGTSKAGNPIFYYVARRFKTGQINGDLLIYHVLLTLKPYYAKPYEIVVDLTHTGPSNRFKTDFLSKWFVVFPGFAYDNVSAVYIYNCNSWVREYTKYHERLLTGLKGSKRLVFIDCPGKLAEHIEHEQQKLPAATLALEEDLKVFHNALKLAHKDTKVSIKVGSTAVQVTSAERTKVLGQSVFLNDIYYASEIEEICLVDENQFTLTIANQGTPLTFMHQECEAIVQSIIHIRTRWELSQPDSIPQHTKIRPKDVPGTLLNIALLNLGSSDPSLRSAAYNLLCALTCTFNLKIEGQLLETSGLCIPANNTLFIVSISKTLAANEPHLTLEFLEECISGFSKSSIELKHLCLEYMTPWLSNLVRFCKHNDDAKRQRVTAILDKLITMTINEKQMYPSIQAKIWGSLGQITDLLDVVLDSFIKTSATGGLGSIKAEVMADTAVALASGNVKLVSSKVIGRMCKIIDKTCLSPTPTLEQHLMWDDIAILARYMLMLSFNNSLDVAAHLPYLFHVVTFLVATGPLSLRASTHGLVINIIHSLCTCSQLHFSEETKQVLRLSLTEFSLPKFYLLFGISKVKSAAVIAFRSSYRDRSFSPGSYERETFALTSLETVTEALLEIMEACMRDIPTCKWLDQWTELAQRFAFQYNPSLQPRALVVFGCISKRVSHGQIKQIIRILSKALESCLKGPDTYNSQVLIEATVIALTKLQPLLNKDSPLHKALFWVAVAVLQLDEVNLYSAGTALLEQNLHTLDSLRIFNDKSPEEVFMAIRNPLEWHCKQMDHFVGLNFNSNFNFALVGHLLKGYRHPSPAIVARTVRILHTLLTLVNKHRNCDKFEVNTQSVAYLAALLTVSEEVRSRCSLKHRKSLLLTDISMENVPMDTYPIHHGDPSYRTLKETQPWSSPKGSEGYLAATYPTVGQTSPRARKSMSLDMGQPSQANTKKLLGTRKSFDHLISDTKAPKRQEMESGITTPPKMRRVAETDYEMETQRISSSQQHPHLRKVSVSESNVLLDEEVLTDPKIQALLLTVLATLVKYTTDEFDQRILYEYLAEASVVFPKVFPVVHNLLDSKINTLLSLCQDPNLLNPIHGIVQSVVYHEESPPQYQTSYLQSFGFNGLWRFAGPFSKQTQIPDYAELIVKFLDALIDTYLPGIDEETSEESLLTPTSPYPPALQSQLSITANLNLSNSMTSLATSQHSPASLPCSNSAVFMQLFPHQGIDKENVELSPTTGHCNSGRTRHGSASQVQKQRSAGSFKRNSIKKIV

SEQ ID NO: 27157 - protein, 375 aa, Homo sapiens
MADHSFSDGVPSDSVEAAKNASNTEKLTDQVMQNPRVLAALQERLDNVPHTPSSYIETLPKAVKRRINALKQLQVRCAHIEAKFYEEVHDLERKYAALYQPLFDKRREFITGDVEPTDAESEWHSENEEEEKLAGDMKSKVVVTEKAAATAEEPDPKGIPEFWFTIFRNVDMLSELVQEYDEPILKHLQDIKVKFSDPGQPMSFVLEFHFEPNDYFTNSVLTKTYKMKSEPDKADPFSFEGPEIVDCDGCTIDWKKGKNVTVKTIKKKQKHKGRGTVRTITKQVPNESFFNFFNPLKASGDGESLDEDSEFTLASDFEIGHFFRERIVPRAVLYFTGEAIEDDDNFEEGEEGEEEELEGDEEGEDEDDAEINPKV

SEQ ID NO: 27158 - protein, 386 aa, Homo sapiens
MADHSFSDGVPSDSVEAAKNASNTEKLTDQVMQNPRVLAALQERLDNVPHTPSSYIETLPKAVKRRINALKQLQVRCAHIEAKFYEEVHDLERKYAALYQPLFDKRREFITGDVEPTDAESEWHSENEEEEKLAGDMKSKVVVTEKAAATAEEPDPKGIPEFWFTIFRNVDMLSELVQEYDEPILKHLQDIKVKFSDPGQPMSFVLEFHFEPNDYFTNSVLTKTYKMKSEPDKADPFSFEGPEIVDCDGCTIDWKKGKNVTVKTIKKKQKHKGRGTVRTITKQVPNESFFNFFNPLKASGDGESLDEDSEFTLASDFEIGHFFRERIVPRAVLYFTGEAIEDDDNFEEGEEGEEEELEGDEEGEDEDDAEINPKKEPSQPAECKQQ

SEQ ID NO: 27159 - protein, 182 aa, Homo sapiens
MADSENQGPAEPSQAAAAAEAAAEEVMAEGGAQGGDCDSAAGDPDSAAGQMAEEPQTPAENAPKPKNDFIESLPNSVKCRVLALKKLQKRCDKIEAKFDKEFQALEKKYNDIYKPLLAKIQELTGEMEGCAWTLEGEEEEEEEYEDDEEEGEDEEEEEAAAEAAAGAKHDDAHAEMPDDAKK

SEQ ID NO: 27160 - protein, 419 aa, Homo sapiens
MAEPVGKRGRWSGGSGAGRGGRGGWGGRGRRPRAQRSPSRGTLDVVSVDLVTDSDEEILEVATARGAADEVEVEPPEPPGPVASRDNSNSDSEGEDRRPAGPPREPVRRRRRLVLDPGEAPLVPVYSGKVKSSLRLIPDDLSLLKLYPPGDEEEAELADSSGLYHEGSPSPGSPWKTKLRTKDKEEKKKTEFLDLDNSPLSPPSPRTKSRTHTRALKKLSEVNKRLQDLRSCLSPKPPQGQEQQGQEDEVVLVEGPTLPETPRLFPLKIRCRADLVRLPLRMSEPLQSVVDHMATHLGVSPSRILLLFGETELSPTATPRTLKLGVADIIDCVVLTSSPEATETSQQLQLRVQGKEKHQTLEVSLSRDSPLKTLMSHYEEAMGLSGRKLSFFFDGTKLSGRELPADLGMESGDLIEVWG

SEQ ID NO: 27161 - protein, 138 aa, Homo sapiens
MSEPLQSVVDHMATHLGVSPSRILLLFGETELSPTATPRTLKLGVADIIDCVVLTSSPEATETSQQLQLRVQGKEKHQTLEVSLSRDSPLKTLMSHYEEAMGLSGRKLSFFFDGTKLSGRELPADLGMESGDLIEVWG

SEQ ID NO: 27162 - protein, 127 aa, Homo sapiens
MATHLGVSPSRILLLFGETELSPTATPRTLKLGVADIIDCVVLTSSPEATETSQQLQLRVQGKEKHQTLEVSLSRDSPLKTLMSHYEEAMGLSGRKLSFFFDGTKLSGRELPADLGMESGDLIEVWG

SEQ ID NO: 27163 - protein, 291 aa, Homo sapiens
MAVTLSLLLGGRVCAAVTRCGFATRGVAGPGPIGREPDPDSDWEPEERELQEVESTLKRQKQAIRFQKIRRQMEAPGAPPRTLTWEAMEQIRYLHEEFPESWSVPRLAEGFDVSTDVIRRVLKSKFLPTLEQKLKQDQKVLKKAGLAHSLQHLRGSGNTSKLLPAGHSVSGSLLMPGHEASSKDPNHSTALKVIESDTHRTNTPRRRKGRNKEIQDLEESFVPVAAPLGHPRELQKYSSDSESPRGTGSGALPSGQKLEELKAEEPDNFSSKVVQRGREFFDSNGNFLYRI

SEQ ID NO: 27164 - protein, 64 aa, Homo sapiens
MAVTLSLLLGGRVCAAVTRCGFATRGVAGPGPIGREPDPDSDWEPEERELQEVERYRLLPGPSA

SEQ ID NO: 27165 - protein, 107 aa, Homo sapiens
MMEGLGEHSTAGEMGPLLGAVAATASPQSLMEYSSDADFIESLPLVVKYRVYTLKKLQAKCAVLEAKYLREFHSVERKFATIYGPLLEKRRQITNALYEPTKEECER

SEQ ID NO: 27166 - protein, 276 aa, Homo sapiens
MTSFRLALIQLQISSIKSDNVTRACSFIREAATQGAKIVSLPECFNSPYGAKYFPEYAEKIPGESTQKLSEVAKECSIYLIGGSIPEEDAGKLYNTCAVFGPDGTLLAKYRKIHLFDIDVPGKITFQESKTLSPGDSFSTFDTPYCRVGLGICYDMRFAELAQIYAQRGCQLLVYPGAFNLTTGPAHWELLQRSRAVDNQVYVATASPARDDKASYVAWGHSTVVNPWGEVLAKAGTEEAIVYSDIDLKKLAEIRQQIPVFRQKRSDLYAVEMKKP

SEQ ID NO: 27167 - protein, 75 aa, Homo sapiens
MNPSEMQRKGPPRRWCLQVYPTAPKRQRPSRTGHDDDGGFVEKKRGKCGEKQERSDCYCVCVERSRHRRLHFVMC

SEQ ID NO: 27168 - protein, 772 aa, Homo sapiens
MLSLKKYLTEGLLQFTILLSLIGVRVDVDTYLTSQLPPLREIILGPSSAYTQTQFHNLRNTLDGYGIHPKSIDLDNYFTARRLLSQVRALDRFQVPTTEVNAWLVHRDPEGSVSGSQPNSGLALESSSGLQDVTGPDNGVRESETEQGFGEDLEDLGAVAPPVSGDLTKEDIDLIDILWRQDIDLGAGREVFDYSHRQKEQDVEKELRDGGEQDTWAGEGAEALARNLLVDGETGESFPAQVPSGEDQTALSLEECLRLLEATCPFGENAEFPADISSITEAVPSESEPPALQNNLLSPLLTGTESPFDLEQQWQDLMSIMEMQAMEVNTSASEILYSAPPGDPLSTNYSLAPNTPINQNVSLHQASLGGCSQDFLLFSPEVESLPVASSSTLLPLAPSNSTSLNSTFGSTNLTGLFFPPQLNGTANDTAGPELPDPLGGLLDEAMLDEISLMDLAIEEGFNPVQASQLEEEFDSDSGLSLDSSHSPSSLSSSEGSSSSSSSSSSSSSSASSSASSSFSEEGAVGYSSDSETLDLEEAEGAVGYQPEYSKFCRMSYQDPAQLSCLPYLEHVGHNHTYNMAPSALDSADLPPPSALKKGSKEKQADFLDKQMSRDEHRARAMKIPFTNDKIINLPVEEFNELLSKYQLSEAQLSLIRDIRRRGKNKMAAQNCRKRKLDTILNLERDVEDLQRDKARLLREKVEFLRSLRQMKQKVQSLYQEVFGRLRDENGRPYSPSQYALQYAGDGSVLLIPRTMADQQARRQERKPKDRRK

SEQ ID NO: 27169 - protein, 742 aa, Homo sapiens
MLSLKKYLTEGLLQFTILLSLIGVRVDVDTYLTSQLPPLREIILGPSSAYTQTQFHNLRNTLDGYGIHPKSIDLDNYFTARRLLSQVRALDRFQVPTTEVNAWLVHRDPEGSVSGSQPNSGLALESSSGLQDVTGPDNGVRESETEQGFGEDLEDLGAVAPPVSGDLTKEDIDLIDILWRQDIDLGAGREVFDYSHRQKEQDVEKELRDGGEQDTWAGEGAEALARNLLVDGETGESFPAQFPADISSITEAVPSESEPPALQNNLLSPLLTGTESPFDLEQQWQDLMSIMEMQAMEVNTSASEILYSAPPGDPLSTNYSLAPNTPINQNVSLHQASLGGCSQDFLLFSPEVESLPVASSSTLLPLAPSNSTSLNSTFGSTNLTGLFFPPQLNGTANDTAGPELPDPLGGLLDEAMLDEISLMDLAIEEGFNPVQASQLEEEFDSDSGLSLDSSHSPSSLSSSEGSSSSSSSSSSSSSSASSSASSSFSEEGAVGYSSDSETLDLEEAEGAVGYQPEYSKFCRMSYQDPAQLSCLPYLEHVGHNHTYNMAPSALDSADLPPPSALKKGSKEKQADFLDKQMSRDEHRARAMKIPFTNDKIINLPVEEFNELLSKYQLSEAQLSLIRDIRRRGKNKMAAQNCRKRKLDTILNLERDVEDLQRDKARLLREKVEFLRSLRQMKQKVQSLYQEVFGRLRDENGRPYSPSQYALQYAGDGSVLLIPRTMADQQARRQERKPKDRRK

SEQ ID NO: 27170 - protein, 406 aa, Homo sapiens
MDGSHSAALKLQQLPPTSSSSAVSEASFSYKENLIGALLAIFGHLVVSIALNLQKYCHIRLAGSKDPRAYFKTKTWWLGLFLMLLGELGVFASYAFAPLSLIVPLSAVSVIASAIIGIIFIKEKWKPKDFLRRYVLSFVGCGLAVVGTYLLVTFAPNSHEKMTGENVTRHLVSWPFLLYMLVEIILFCLLLYFYKEKNANNIVVILLLVALLGSMTVVTVKAVAGMLVLSIQGNLQLDYPIFYVMFVCMVATAVYQAAFLSQASQMYDSSLIASVGYILSTTIAITAGAIFYLDFIGEDVLHICMFALGCLIAFLGVFLITRNRKKPIPFEPYISMDAMPGMQNMHDKGMTVQPELKASFSYGALENNDNISEIYAPATLPVMQEEHGSRSASGVPYRVLEHTKKE

SEQ ID NO: 27171 - protein, 324 aa, Homo sapiens
MLLGELGVFASYAFAPLSLIVPLSAVSVIASAIIGIIFIKEKWKPKDFLRRYVLSFVGCGLAVVGTYLLVTFAPNSHEKMTGENVTRHLVSWPFLLYMLVEIILFCLLLYFYKEKNANNIVVILLLVALLGSMTVVTVKAVAGMLVLSIQGNLQLDYPIFYVMFVCMVATAVYQAAFLSQASQMYDSSLIASVGYILSTTIAITAGAIFYLDFIGEDVLHICMFALGCLIAFLGVFLITRNRKKPIPFEPYISMDAMPGMQNMHDKGMTVQPELKASFSYGALENNDNISEIYAPATLPVMQEEHGSRSASGVPYRVLEHTKKE

SEQ ID NO: 27172 - protein, 226 aa, Homo sapiens
MDGSHSAALKLQQLPPTSSSSAVSEASFSYKENLIGALLAIFGHLVVSIALNLQKYCHIRLAGSKDPRAYFKTKTWWLGLFLMLLGELGVFASYAFAPLSLIVPLSAVSVIASAIIGIIFIKEKWKPKDFLRRYVLSFVGCGLAVVGTYLLVTFAPNSHEKMTGENVTRHLVSWPFLLYMLVEIILFCLLLYFYKEKNANNIVVILLLVALLVLLCHPGWSAVVQS

SEQ ID NO: 27173 - protein, 125 aa, Homo sapiens
MNSLEQAEDLKAFERRLTEYIHCLQPATGRWRMLLIVVSVCTATGAWNWLIDPETQKVSFFTSLWNHPFFTISCITLIGLFFAGIHKRVVAPSIIAARCRTVLAEYNMSCDDTGKLILKPRPHVQ

SEQ ID NO: 27174 - protein, 142 aa, Homo sapiens
MNSLEQAEAPRVVSLIPAVVSGNCQDLKAFERRLTEYIHCLQPATGRWRMLLIVVSVCTATGAWNWLIDPETQKVSFFTSLWNHPFFTISCITLIGLFFAGIHKRVVAPSIIAARCRTVLAEYNMSCDDTGKLILKPRPHVQ

SEQ ID NO: 27175 - protein, 47 aa, Homo sapiens
MNSLEQAEDLKAFERRLTEYIHCLQPATGRWRSVLLHIIMESPIFHH

SEQ ID NO: 27176 - protein, 694 aa, Homo sapiens
MKHLKRWWSAGGGLLHLTLLLSLAGLRVDLDLYLLLPPPTLLQDELLFLGGPASSAYALSPFSASGGWGRAGHLHPKGRELDPAAPPEGQLLREVRALGVPFVPRTSVDAWLVHSVAAGSADEAHGLLGAAAASSTGGAGASVDGGSQAVQGGGGDPRAARSGPLDAGEEEKAPAEPTAQVPDAGGCASEENGVLREKHEAVDHSSQHEENEERVSAQKENSLQQNDDDENKIAEKPDWEAEKTTESRNERHLNGTDTSFSLEDLFQLLSSQPENSLEGISLGDIPLPGSISDGMNSSAHYHVNFSQAISQDVNLHEAILLCPNNTFRRDPTARTSQSQEPFLQLNSHTTNPEQTLPGTNLTGFLSPVDNHMRNLTSQDLLYDLDINIFDEINLMSLATEDNFDPIDVSQLFDEPDSDSGLSLDSSHNNTSVIKSNSSHSVCDEGAIGYCTDHESSSHHDLEGAVGGYYPEPSKLCHLDQSDSDFHGDLTFQHVFHNHTYHLQPTAPESTSEPFPWPGKSQKIRSRYLEDTDRNLSRDEQRAKALHIPFSVDEIVGMPVDSFNSMLSRYYLTDLQVSLIRDIRRRGKNKVAAQNCRKRKLDIILNLEDDVCNLQAKKETLKREQAQCNKAINIMKQKLHDLYHDIFSRLRDDQGRPVNPNHYALQCTHDGSILIVPKELVASGHKKETQKGKRK

SEQ ID NO: 27177 - protein, 128 aa, Homo sapiens
MTEADVNPKAYPLADAHLTKKLLDLVQQSCNYKQLRKGANEATKTLNRGISEFIVMAADAEPLEIILHLPLLCEDKNVPYVFVRSKQALGRACGVSRPVIACSVTIKEGSQLKQQIQSIQQSIERLLV

SEQ ID NO: 27178 - protein, 1156 aa, Homo sapiens
MGNLLSKFRPGCRRRPLPGPGRGAPAPLSRDASPPGRAHSVPTPRPFRGLFRRNARRRPSAASIFVAPKRPCPLPRAAAAPLGVLPAVGWGLAIRKTPMLPARNPPRFGHPSSVRIPPPSRMFTLLLPSPREPAVKARKPIPATLLEETEVWAQEGPRRVKKDEDPVQIEGEDDEKRTPLSSGEASSTSRSQGTQGDVASFRCSPGPLEGNVYHKFSENSMSEKAQASPASSCLEGPAMPSTHSQAGCARHLGKPDPDATAPPEPAVGCSLLQQKLAAEVLNEEPPPSSLGLPIPLMSGKRMPDEKPFCIPPRSAAPPRAARNRPCKRKMSIPLLLPLPPSLPLLWDRGELPPPAKLPCLSVEGDLHTLEKSPEYKRNSRILEDKTETMTNSSITQPAPSFSQPVQTTDSLPLTTYTSQVSAPLPIPDLADLATGPLILPIPPLSTTPKMDEKIAFTIPNSPLALPADLVPILGDQSNEKGGSYNSVVGAAPLTSDPPTPPSSTPSFKPPVTRESPISMCVDSPPPLSFLTLLPVPSTGTSVITSKPMNSTSVISTVTTNASAHLTSQTAVDPEVVNMDTTAPSQVVIFTSSLSSRVSSLPNSQIHCSAEQRHPGKTSVYTSPLPFIFHNTTPSFNQLFGKEATPQPKFEAPDGQPQKASLPSACVFLSLPIIPPPDTSTLVNSASTASSSKPPIETNAMHTTPPSKAVILQSASVSKKYLPFYLGLPGSGNTQPSGNTASVQGSTSLPAQSVRAPATASNHPLNPGATPQPKFGAPDGPQQKTSLPSAHDFLSLPIMVPPDTSTLVSSASAASLSKPAIDTSDMNTTPPSKTVILQSTFVSRKEEYIRFYMGLPGSGNTLHSDSIASAQVSTSFPAQADRRPTTTSSHPLNTGSISHSTLGATDGQQKSDSSFILGNPATPAPVIGLTSPSVQPLSGSIIPPGFAELTSPYTALGTPVNAEPVEGHNASAFPNGTAKTSGFRIATGMPGTGDSTLLVGNTIPGPQVIMGPGTPMDGGSIGFSMSAPGPSSTSGELNIGQGQSGTPSTTSVFPFGQAAWDPTGHSMAAAPQGASNIPVFGYTSAAAYIPGLDPPTQNSCSGMGGDGTRSIVGGPCVPAFQQCILQHTWTERKFYTSSTHYYGQETYVRRHVCFQLP

SEQ ID NO: 27179 - protein, 590 aa, Homo sapiens
MAAPYPGSGGGSEVKCVGGRGASVPWDFLPGLMVKAPSGPCLQAQRKEKSRNAARSRRGKENLEFFELAKLLPLPGAISSQLDKASIVRLSVTYLRLRRFAALGAPPWGLRAAGPPAGLAPGRRGPAALVSEVFEQHLGGHILQSLDGFVFALNQEGKFLYISETVSIYLGLSQVEMTGSSVFDYIHPGDHSEVLEQLGLRTPTPGPPTPPSVSSSSSSSSSLADTPEIEASLTKVPPSSLVQERSFFVRMKSTLTKRGLHVKASGYKVIHVTGRLRAHALGLVALGHTLPPAPLAELPLHGHMIVFRLSLGLTILACESRVSDHMDLGPSELVGRSCYQFVHGQDATRIRQSHVDLLDKGQVMTGYYRWLQRAGGFVWLQSVATVAGSGKSPGEHHVLWVSHVLSQAEGGQTPLDAFQLPASVACEEASSPGPEPTEPEPPTEGKQAAPAENEAPQTQGKRIKVEPGPRETKGSEDSGDEDPSSHPATPRPEFTSVIRAGVLKQDPVRPWGLAPPGDPPPTLLHAGFLPPVVRGLCTPGTIRYGPAELGLVYPHLQRLGPGPALPEAFYPPLGLPYPGPAGTRLPRKGD

SEQ ID NO: 27180 - protein, 234 aa, Homo sapiens
MTGSSVFDYIHPGDHSEVLEQLGLRTPTPGPPTPPSVSSSSSSSSSLADTPEIEASLTKVPPSSLVQERSFFVRMKSTLTKRGLHVKASGYKVIHVTGRLRAHALGLVALGHTLPPAPLAELPLHGHMIVFRLSLGLTILACESRVSDHMDLGPSELVGRSCYQFVHGQDATRIRQSHVDSCRGLRVAAVCGHSGWEREEPRGAPCALGQPRAQPSRGWPNSFGCLPASSQRGL

SEQ ID NO: 27181 - protein, 953 aa, Homo sapiens
MEEQGHSEMEIIPSESHPHIQLLKSNRELLVTHIRNTQCLVDNLLKNDYFSAEDAEIVCACPTQPDKVRKILDLVQSKGEEVSEFFLYLLQQLADAYVDLRPWLLEIGFSPSLLTQSKVVVNTDPVSRYTQQLRHHLGRDSKFVLCYAQKEELLLEEIYMDTIMELVGFSNESLGSLNSLACLLDHTTGILNEQGETIFILGDAGVGKSMLLQRLQSLWATGRLDAGVKFFFHFRCRMFSCFKESDRLCLQDLLFKHYCYPERDPEEVFAFLLRFPHVALFTFDGLDELHSDLDLSRVPDSSCPWEPAHPLVLLANLLSGKLLKGASKLLTARTGIEVPRQFLRKKVLLRGFSPSHLRAYARRMFPERALQDRLLSQLEANPNLCSLCSVPLFCWIIFRCFQHFRAAFEGSPQLPDCTMTLTDVFLLVTEVHLNRMQPSSLVQRNTRSPVETLHAGRDTLCSLGQVAHRGMEKSLFVFTQEEVQASGLQERDMQLGFLRALPELGPGGDQQSYEFFHLTLQAFFTAFFLVLDDRVGTQELLRFFQEWMPPAGAATTSCYPPFLPFQCLQGSGPAREDLFKNKDHFQFTNLFLCGLLSKAKQKLLRHLVPAAALRRKRKALWAHLFSSLRGYLKSLPRVQVESFNQVQAMPTFIWMLRCIYETQSQKVGQLAARGICANYLKLTYCNACSADCSALSFVLHHFPKRLALDLDNNNLNDYGVRELQPCFSRLTVLRLSVNQITDGGVKVLSEELTKYKIVTYLGLYNNQITDVGARYVTKILDECKGLTHLKLGKNKITSEGGKYLALAVKNSKSISEVGMWGNQVGDEGAKAFAEALRNHPSLTTLSLASNGISTEGGKSLARALQQNTSLEILWLTQNELNDEVAESLAEMLKVNQTLKHLWLIQNQITAKGTAQLADALQSNTGITEICLNGNLIKPEEAKVYEDEKRIICF

SEQ ID NO: 27182 - protein, 249 aa, Homo sapiens
MEEQGHSEMEIIPSESHPHIQLLKSNRELLVTHIRNTQCLVDNLLKNDYFSAEDAEIVCACPTQPDKVRKILDLVQSKGEEVSEFFLYLLQQLADAYVDLRPWLLEIGFSPSLLTQSKVVVNTDPVSRYTQQLRHHLGRDSKFVLCYAQKEELLLEEIYMDTIMELVGFSNESLGSLNSLACLLDHTTGILNEQAASRKVTGCVCRTCSSSTTATQSGTPRRCLPSCCASPTWPSSPSMAWTSCTRTWT

SEQ ID NO: 27183 - protein, 802 aa, Homo sapiens
MYRSTKGASKARRDQINAEIRNLKELLPLAEADKVRLSYLHIMSLACIYTRKGVFFAGGTPLAGPTGLLSAQELEDIVAALPGFLLVFTAEGKLLYLSESVSEHLGHSMVDLVAQGDSIYDIIDPADHLTVRQQLTLPSALDTDRLFRCRFNTSKSLRRQSAGNKLVLIRGRFHAHPPGAYWAGNPVFTAFCAPLEPRPRPGPGPGPGPASLFLAMFQSRHAKDLALLDISESVLIYLGFERSELLCKSWYGLLHPEDLAHASAQHYRLLAESGDIQAEMVVRLQAKTGGWAWIYCLLYSEGPEGPITANNYPISDMEAWSLRQQLNSEDTQAAYVLGTPTMLPSFPENILSQEECSSTNPLFTAALGAPRSTSFPSAPELSVVSASEELPRPSKELDFSYLTFPSGPEPSLQAELSKDLVCTPPYTPHQPGGCAFLFSLHEPFQTHLPTPSSTLQEQLTPSTATFSDQLTPSSATFPDPLTSPLQGQLTETSVRSYEDQLTPCTSTFPDQLLPSTATFPEPLGSPAHEQLTPPSTAFQAHLDSPSQTFPEQLSPNPTKTYFAQEGCSFLYEKLPPSPSSPGNGDCTLLALAQLRGPLSVDVPLVPEGLLTPEASPVKQSFFHYSEKEQNEIDRLIQQISQLAQGMDRPFSAEAGTGGLEPLGGLEPLDSNLSLSGAGPPVLSLDLKPWKCQELDFLADPDNMFLEETPVEDIFMDLSTPDPSEEWGSGDPEAEGPGGAPSPCNNLSPEDHSFLEDLATYETAFETGVSAFPYDGFTDELHQLQSQVQDSFHEDGSGGEPTF

SEQ ID NO: 27184 - protein, 234 aa, Homo sapiens
MYRSTKGASKARRDQINAEIRNLKELLPLAEADKVRLSYLHIMSLACIYTRKGVFFAGGTPLAGPTGLLSAQELEDIVAALPGFLLVFTAEGKLLYLSESVSEHLGHSMVDLVAQGDSIYDIIDPADHLTVRQQLTLPSALDTDRLFRCRFNTSKSLRRQSAGNKLVLIRGRFHAHPPGAYWAGNPVFTAFCAPLEPRPRPGPGPGPGPASLFLAMFQSRHAKDLALLDISESG

SEQ ID NO: 27185 - protein, 1464 aa, Homo sapiens [sequence omitted]

SEQ ID NO: 27186 - protein, 1281 aa, Homo sapiens
MGRVGYWTLLVLPALLVWRGPAPSAAAEKGPPALNIAVMLGHSHDVTERELRTLWGPEQAAGLPLDVNVVALLMNRTDPKSLITHVCDLMSGARIHGLVFGDDTDQEAVAQMLDFISSHTFVPILGIHGGASMIMADKDPTSTFFQFGASIQQQATVMLKIMQDYDWHVFSLVTTIFPGYREFISFVKTTVDNSFVGWDMQNVITLDTSFEDAKTQVQLKKIHSSVILLYCSKDEAVLILSEARSLGLTGYDFFWIVPSLVSGNTELIPKEFPSGLISVSYDDWDYSLEARVRDGIGILTTAASSMLEKFSYIPEAKASCYGQMERPEVPMHTLHPFMVNVTWDGKDLSFTEEGYQVHPRLVVIVLNKDREWEKVGKWENHTLSLRHAVWPRYKSFSDCEPDDNHLSIVTLEEAPFVIVEDIDPLTETCVRNTVPCRKFVKINNSTNEGMNVKKCCKGFCIDILKKLSRTVKFTYDLYLVTNGKHGKKVNNVWNGMIGEVVYQRAVMAVGSLTINEERSEVVDFSVPFVETGISVMVSRSNGTVSPSAFLEPFSASVWVMMFVMLLIVSAIAVFVFEYFSPVGYNRNLAKGKAPHGPSFTIGKAIWLLWGLVFNNSVPVQNPKGTTSKIMVSVWAFFAVIFLASYTANLAAFMIQEEFVDQVTGLSDKKFQRPHDYSPPFRFGTVPNGSTERNIRNNYPYMHQYMTKFNQKGVEDALVSLKTGKLDAFIYDAAVLNYKAGRDEGCKLVTIGSGYIFATTGYGIALQKGSPWKRQIDLALLQFVGDGEMEELETLWLTGICHNEKNEVMSSQLDIDNMAGVFYMLAAAMALSLITFIWEHLFYWKLRFCFTGVCSDRPGLLFSISRGIYSCIHGVHIEEKKKSPDFNLTGSQSNMLKLLRSAKNISSMSNMNSSRMDSPKRAADFIQRGSLIMDMVSDKGNLMYSDNRSFQGKESIFGDNMNELQTFVANRQKDNLNNYVFQGQHPLTLNESNPNTVEVAVSTESKANSRPRQLWKKSVDSIRQDSLSQNPVSQRDEATAENRTHSLKSPRYLPEEMAHSDISETSNRATCHREPDNSKNHKTKDNFKRSVASKYPKDCSEVERTYLKTKSSSPRDKIYTIDGEKEPGFHLDPPQFVENVTLPENVDFPDPYQDPSENFRKGDSTLPMNRNPLHNEEGLSNNDQYKLYSKHFTLKDKGSPHSETSERYRQNSTHCRSCLSNMPTYSGHFTMRSPFKCDACLRMGNLYDIDEDQMLQETGMTNAWLLGDAPRTLTNTRCHPRR

SEQ ID NO: 27187 - protein, 925 aa, Homo sapiens; identical to SEQ ID NO: 257

SEQ ID NO: 27188 - protein, 921 aa, Homo sapiens
MNAPERQPQPDGGDAPGHEPGGSPQDELDFSILFDYEYLNPNEEEPNAHKVASPPSGPAYPDDVLDYGLKPYSPLASLSGEPPGRFGEPDRVGPQKFLSAAKPAGASGLSPRIEITPSHELIQAVGPLRMRDAGLLVEQPPLAGVAASPRFTLPVPGFEGYREPLCLSPASSGSSASFISDTFSPYTSPCVSPNNGGPDDLCPQFQNIPAHYSPRTSPIMSPRTSLAEDSCLGRHSPVPRPASRSSSPGAKRRHSCAEALVALPPGASPQRSRSPSPQPSSHVAPQDHGSPAGYPPVAGSAVIMDALNSLATDSPCGIPPKMWKTSPDPSPVSAAPSKAGLPRHIYPAVEFLGPCEQGERRNSAPESILLVPPTWPKPLVPAIPICSIPVTASLPPLEWPLSSQSGSYELRIEVQPKPHHRAHYETEGSRGAVKAPTGGHPVVQLHGYMENKPLGLQIFIGTADERILKPHAFYQVHRITGKTVTTTSYEKIVGNTKVLEIPLEPKNNMRATIDCAGILKLRNADIELRKGETDIGRKNTRVRLVFRVHIPESSGRIVSLQTASNPIECSQRSAHELPMVERQDTDSCLVYGGQQMILTGQNFTSESKVVFTEKTTDGQQIWEMEATVDKDKSQPNMLFVEIPEYRNKHIRTPVKVNFYVINGKRKRSQPQHFTYHPVPAIKTEPTDEYDPTLICSPTHGGLGSQPYYPQHPMVAESPSCLVATMAPCQQFRTGLSSPDARYQQQNPAAVLYQRSKSLSPSLLGYQQPALMAAPLSLADAHRSVLVHAGSQGQSSALLHPSPTNQQASPVIHYSPTNQQLRCGSHQEFQHIMYCENFAPGTTRPGPPPVSQGQRLSPGSYPTVIQQQNATSQRAAKNGPPVSDQKEVLPAGVTIKQEQNLDQTYLDDELIDTHLSWIQNIL

SEQ ID NO: 27189 - protein, 901 aa, Homo sapiens
MQREAAFRLGHCHPLRIMGSVDQEEPNAHKVASPPSGPAYPDDVLDYGLKPYSPLASLSGEPPGRFGEPDRVGPQKFLSAAKPAGASGLSPRIEITPSHELIQAVGPLRMRDAGLLVEQPPLAGVAASPRFTLPVPGFEGYREPLCLSPASSGSSASFISDTFSPYTSPCVSPNNGGPDDLCPQFQNIPAHYSPRTSPIMSPRTSLAEDSCLGRHSPVPRPASRSSSPGAKRRHSCAEALVALPPGASPQRSRSPSPQPSSHVAPQDHGSPAGYPPVAGSAVIMDALNSLATDSPCGIPPKMWKTSPDPSPVSAAPSKAGLPRHIYPAVEFLGPCEQGERRNSAPESILLVPPTWPKPLVPAIPICSIPVTASLPPLEWPLSSQSGSYELRIEVQPKPHHRAHYETEGSRGAVKAPTGGHPVVQLHGYMENKPLGLQIFIGTADERILKPHAFYQVHRITGKTVTTTSYEKIVGNTKVLEIPLEPKNNMRATIDCAGILKLRNADIELRKGETDIGRKNTRVRLVFRVHIPESSGRIVSLQTASNPIECSQRSAHELPMVERQDTDSCLVYGGQQMILTGQNFTSESKVVFTEKTTDGQQIWEMEATVDKDKSQPNMLFVEIPEYRNKHIRTPVKVNFYVINGKRKRSQPQHFTYHPVPAIKTEPTDEYDPTLICSPTHGGLGSQPYYPQHPMVAESPSCLVATMAPCQQFRTGLSSPDARYQQQNPAAVLYQRSKSLSPSLLGYQQPALMAAPLSLADAHRSVLVHAGSQGQSSALLHPSPTNQQASPVIHYSPTNQQLRCGSHQEFQHIMYCENFAPGTTRPGPPPVSQGQRLSPGSYPTVIQQQNATSQRAAKNGPPVSDQKEVLPAGVTIKQEQNLDQTYLDDELIDTHLSWIQNIL

SEQ ID NO: 27190 - protein, 905 aa, Homo sapiens
MQREAAFRLGHCHPLRIMGSVDQEEPNAHKVASPPSGPAYPDDVLDYGLKPYSPLASLSGEPPGRFGEPDRVGPQKFLSAAKPAGASGLSPRIEITPSHELIQAVGPLRMRDAGLLVEQPPLAGVAASPRFTLPVPGFEGYREPLCLSPASSGSSASFISDTFSPYTSPCVSPNNGGPDDLCPQFQNIPAHYSPRTSPIMSPRTSLAEDSCLGRHSPVPRPASRSSSPGAKRRHSCAEALVALPPGASPQRSRSPSPQPSSHVAPQDHGSPAGYPPVAGSAVIMDALNSLATDSPCGIPPKMWKTSPDPSPVSAAPSKAGLPRHIYPAVEFLGPCEQGERRNSAPESILLVPPTWPKPLVPAIPICSIPVTASLPPLEWPLSSQSGSYELRIEVQPKPHHRAHYETEGSRGAVKAPTGGHPVVQLHGYMENKPLGLQIFIGTADERILKPHAFYQVHRITGKTVTTTSYEKIVGNTKVLEIPLEPKNNMRATIDCAGILKLRNADIELRKGETDIGRKNTRVRLVFRVHIPESSGRIVSLQTASNPIECSQRSAHELPMVERQDTDSCLVYGGQQMILTGQNFTSESKVVFTEKTTDGQQIWEMEATVDKDKSQPNMLFVEIPEYRNKHIRTPVKVNFYVINGKRKRSQPQHFTYHPVPAIKTEPTDEYDPTLICSPTHGGLGSQPYYPQHPMVAESPSCLVATMAPCQQFRTGLSSPDARYQQQNPAAVLYQRSKSLSPSLLGYQQPALMAAPLSLADAHRSVLVHAGSQGQSSALLHPSPTNQQASPVIHYSPTNQQLRCGSHQEFQHIMYCENFAPGTTRPGPPPVSQGQRLSPGSYPTVIQQQNATSQRAAKNGPPVSDQKEVLPAGVTIKQEQNLDQTYLDDVNEIIRKEFSGPPARNQT

SEQ ID NO: 27191 - protein, 702 aa, Homo sapiens
MSPRTSLAEDSCLGRHSPVPRPASRSSSPGAKRRHSCAEALVALPPGASPQRSRSPSPQPSSHVAPQDHGSPAGYPPVAGSAVIMDALNSLATDSPCGIPPKMWKTSPDPSPVSAAPSKAGLPRHIYPAVEFLGPCEQGERRNSAPESILLVPPTWPKPLVPAIPICSIPVTASLPPLEWPLSSQSGSYELRIEVQPKPHHRAHYETEGSRGAVKAPTGGHPVVQLHGYMENKPLGLQIFIGTADERILKPHAFYQVHRITGKTVTTTSYEKIVGNTKVLEIPLEPKNNMRATIDCAGILKLRNADIELRKGETDIGRKNTRVRLVFRVHIPESSGRIVSLQTASNPIECSQRSAHELPMVERQDTDSCLVYGGQQMILTGQNFTSESKVVFTEKTTDGQQIWEMEATVDKDKSQPNMLFVEIPEYRNKHIRTPVKVNFYVINGKRKRSQPQHFTYHPVPAIKTEPTDEYDPTLICSPTHGGLGSQPYYPQHPMVAESPSCLVATMAPCQQFRTGLSSPDARYQQQNPAAVLYQRSKSLSPSLLGYQQPALMAAPLSLADAHRSVLVHAGSQGQSSALLHPSPTNQQASPVIHYSPTNQQLRCGSHQEFQHIMYCENFAPGTTRPGPPPVSQGQRLSPGSYPTVIQQQNATSQRAAKNGPPVSDQKEVLPAGVTIKQEQNLDQTYLDDELIDTHLSWIQNIL

SEQ ID NO: 27192 - protein, 1075 aa, Homo sapiens; identical to SEQ ID NO: 261

SEQ ID NO: 27193 - protein, 1068 aa, Homo sapiens
MTTANCGAHDELDFKLVFGEDGAPAPPPPGSRPADLEPDDCASIYIFNVDPPPSTLTTPLCLPHHGLPSHSSVLSPSFQLQSHKNYEGTCEIPESKYSPLGGPKPFECPSIQITSISPNCHQELDAHEDDLQINDPEREFLERPSRDHLYLPLEPSYRESSLSPSPASSISSRSWFSDASSCESLSHIYDDVDSELNEAAARFTLGSPLTSPGGSPGGCPGEETWHQQYGLGHSLSPRQSPCHSPRSSVTDENWLSPRPASGPSSRPTSPCGKRRHSSAEVCYAGSLSPHHSPVPSPGHSPRGSVTEDTWLNASVHGGSGLGPAVFPFQYCVETDIPLKTRKTSEDQAAILPGKLELCSDDQGSLSPARETSIDDGLGSQYPLKKDSCGDQFLSVPSPFTWSKPKPGHTPIFRTSSLPPLDWPLPAHFGQCELKIEVQPKTHHRAHYETEGSRGAVKASTGGHPVVKLLGYNEKPINLQMFIGTADDRYLRPHAFYQVHRITGKTVATASQEIIIASTKVLEIPLLPENNMSASIDCAGILKLRNSDIELRKGETDIGRKNTRVRLVFRVHIPQPSGKVLSLQIASIPVECSQRSAQELPHIEKYSINSCSVNGGHEMVVTGSNFLPESKIIFLEKGQDGRPQWEVEGKIIREKCQGAHIVLEVPPYHNPAVTAAVQVHFYLCNGKRKKSQSQRFTYTPVLMKQEHREEIDLSSVPSLPVPHPAQTQRPSSDSGCSHDSVLSGQRSLICSIPQTYASMVTSSHLPQLQCRDESVSKEQHMIPSPIVHQPFQVTPTPPVGSSYQPMQTNVVYNGPTCLPINAASSQEFDSVLFQQDATLSGLVNLGCQPLSSIPFHSSNSGSTGHLLAHTPHSVHTLPHLQSMGYHCSNTGQRSLSSPVADQITGQPSSQLQPITYGPSHSGSATTASPAASHPLASSPLSGPPSPQLQPMPYQSPSSGTASSPSPATRMHSGQHSTQAQSTGQGGLSAPSSLICHSLCDPASFPPDGATVSIKPEPEDREPNFATIGLQDITLDDDQFISDLEHQPSGSAEKWPNHSVLSCPAPFWRI

SEQ ID NO: 27194 - protein, 1065 aa, Homo sapiens
MTTANCGAHDELDFKLVFGEDGAPAPPPPGSRPADLEPDDCASIYIFNVDPPPSTLTTPLCLPHHGLPSHSSVLSPSFQLQSHKNYEGTCEIPESKYSPLGGPKPFECPSIQITSISPNCHQELDAHEDDLQINDPEREFLERPSRDHLYLPLEPSYRESSLSPSPASSISSRSWFSDASSCESLSHIYDDVDSELNEAAARFTLGSPLTSPGGSPGGCPGEETWHQQYGLGHSLSPRQSPCHSPRSSVTDENWLSPRPASGPSSRPTSPCGKRRHSSAEVCYAGSLSPHHSPVPSPGHSPRGSVTEDTWLNASVHGGSGLGPAVFPFQYCVETDIPLKTRKTSEDQAAILPGKLELCSDDQGSLSPARETSIDDGLGSQYPLKKDSCGDQFLSVPSPFTWSKPKPGHTPIFRTSSLPPLDWPLPAHFGQCELKIEVQPKTHHRAHYETEGSRGAVKASTGGHPVVKLLGYNEKPINLQMFIGTADDRYLRPHAFYQVHRITGKTVATASQEIIIASTKVLEIPLLPENNMSASIDCAGILKLRNSDIELRKGETDIGRKNTRVRLVFRVHIPQPSGKVLSLQIASIPVECSQRSAQELPHIEKYSINSCSVNGGHEMVVTGSNFLPESKIIFLEKGQDGRPQWEVEGKIIREKCQGAHIVLEVPPYHNPAVTAAVQVHFYLCNGKRKKSQSQRFTYTPVLMKQEHREEIDLSSVPSLPVPHPAQTQRPSSDSGCSHDSVLSGQRSLICSIPQTYASMVTSSHLPQLQCRDESVSKEQHMIPSPIVHQPFQVTPTPPVGSSYQPMQTNVVYNGPTCLPINAASSQEFDSVLFQQDATLSGLVNLGCQPLSSIPFHSSNSGSTGHLLAHTPHSVHTLPHLQSMGYHCSNTGQRSLSSPVADQITGQPSSQLQPITYGPSHSGSATTASPAASHPLASSPLSGPPSPQLQPMPYQSPSSGTASSPSPATRMHSGQHSTQAQSTGQGGLSAPSSLICHSLCDPASFPPDGATVSIKPEPEDREPNFATIGLQDITLDDDLFTSNNFDLLQLRPTFWPVPAGRYLRNLE

SEQ ID NO: 27195 - protein, 1045 aa, Homo sapiens
MTTANCGAHDELDFKLVFGEDGAPAPPPPGSRPADLEPDDCASIYIFNVDPPPSTLTTPLCLPHHGLPSHSSVLSPSFQLQSHKNYEGTCEIPESKYSPLGGPKPFECPSIQITSISPNCHQELDAHEDDLQINDPEREFLERPSRDHLYLPLEPSYRESSLSPSPASSISSRSWFSDASSCESLSHIYDDVDSELNEAAARFTLGSPLTSPGGSPGGCPGEETWHQQYGLGHSLSPRQSPCHSPRSSVTDENWLSPRPASGPSSRPTSPCGKRRHSSAEVCYAGSLSPHHSPVPSPGHSPRGSVTEDTWLNASVHGGSGLGPAVFPFQYCVETDIPLKTRKTSEDQAAILPGKLELCSDDQGSLSPARETSIDDGLGSQYPLKKDSCGDQFLSVPSPFTWSKPKPGHTPIFRTSSLPPLDWPLPAHFGQCELKIEVQPKTHHRAHYETEGSRGAVKASTGGHPVVKLLGYNEKPINLQMFIGTADDRYLRPHAFYQVHRITGKTVATASQEIIIASTKVLEIPLLPENNMSASIDCAGILKLRNSDIELRKGETDIGRKNTRVRLVFRVHIPQPSGKVLSLQIASIPVECSQRSAQELPHIEKYSINSCSVNGGHEMVVTGSNFLPESKIIFLEKGQDGRPQWEVEGKIIREKCQGAHIVLEVPPYHNPAVTAAVQVHFYLCNGKRKKSQSQRFTYTPVLMKQEHREEIDLSSVPSLPVPHPAQTQRPSSDSGCSHDSVLSGQRSLICSIPQTYASMVTSSHLPQLQCRDESVSKEQHMIPSPIVHQPFQVTPTPPVGSSYQPMQTNVVYNGPTCLPINAASSQEFDSVLFQQDATLSGLVNLGCQPLSSIPFHSSNSGSTGHLLAHTPHSVHTLPHLQSMGYHCSNTGQRSLSSPVADQITGQPSSQLQPITYGPSHSGSATTASPAASHPLASSPLSGPPSPQLQPMPYQSPSSGTASSPSPATRMHSGQHSTQAQSTGQGGLSAPSSLICHSLCDPASFPPDGATVSIKPEPEDREPNFATIGLQDITLDDGKFISDMFLK

SEQ ID NO: 27196 - protein, 708 aa, Homo sapiens
MTTANCGAHDELDFKLVFGEDGAPAPPPPGSRPADLEPDDCASIYIFNVDPPPSTLTTPLCLPHHGLPSHSSVLSPSFQLQSHKNYEGTCEIPESKYSPLGGPKPFECPSIQITSISPNCHQELDAHEDDLQINDPEREFLERPSRDHLYLPLEPSYRESSLSPSPASSISSRSWFSDASSCESLSHIYDDVDSELNEAAARFTLGSPLTSPGGSPGGCPGEETWHQQYGLGHSLSPRQSPCHSPRSSVTDENWLSPRPASGPSSRPTSPCGKRRHSSAEVCYAGSLSPHHSPVPSPGHSPRGSVTEDTWLNASVHGGSGLGPAVFPFQYCVETDIPLKTRKTSEDQAAILPGKLELCSDDQGSLSPARETSIDDGLGSQYPLKKDSCGDQFLSVPSPFTWSKPKPGHTPIFRTSSLPPLDWPLPAHFGQCELKIEVQPKTHHRAHYETEGSRGAVKASTGGHPVVKLLGYNEKPINLQMFIGTADDRYLRPHAFYQVHRITGKTVATASQEIIIASTKVLEIPLLPENNMSASIDCAGILKLRNSDIELRKGETDIGRKNTRVRLVFRVHIPQPSGKVLSLQIASIPVECSQRSAQELPHIEKYSINSCSVNGGHEMVVTGSNFLPESKIIFLEKGQDGRPQWEVEGKIIREKCQGAHIVLEVPPYHNPAVTAAVQVHFYLCNGKRKKSQSQRFTYTPGTRSHDGLL

SEQ ID NO: 27197 - protein, 739 aa, Homo sapiens
MTTANCGAHDELDFKLVFGEDGAPAPPPPGSRPADLEPDDCASIYIFNVDPPPSTLTTPLCLPHHGLPSHSSVLSPSFQLQSHKNYEGTCEIPESKYSPLGGPKPFECPSIQITSISPNCHQELDAHEDDLQINDPEREFLERPSRDHLYLPLEPSYRESSLSPSPASSISSRSWFSDASSCESLSHIYDDVDSELNEAAARFTLGSPLTSPGGSPGGCPGEETWHQQYGLGHSLSPRQSPCHSPRSSVTDENWLSPRPASGPSSRPTSPCGKRRHSSAEVCYAGSLSPHHSPVPSPGHSPRGSVTEDTWLNASVHGGSGLGPAVFPFQYCVETDIPLKTRKTSEDQAAILPGKLELCSDDQGSLSPARETSIDDGLGSQYPLKKDSCGDQFLSVPSPFTWSKPKPGHTPIFRTSSLPPLDWPLPAHFGQCELKIEVQPKTHHRAHYETEGSRGAVKASTGGHPVVKLLGYNEKPINLQMFIGTADDRYLRPHAFYQVHRITGKTVATASQEIIIASTKVLEIPLLPENNMSASIDCAGILKLRNSDIELRKGETDIGRKNTRVRLVFRVHIPQPSGKVLSLQIASIPVECSQRSAQELPHIEKYSINSCSVNGGHEMVVTGSNFLPESKIIFLEKGQDGRPQWEVEGKIIREKCQGAHIVLEVPPYHNPAVTAAVQVHFYLCNGKRKKSQSQRFTYTPVLMKQEHREEIDLSSVPTLPQTSRQTLLGSQPPSASPPTV

SEQ ID NO: 27198 - protein, 1484 aa, Homo sapiens [sequence omitted]

SEQ ID NO: 27199 - protein, 328 aa, Homo sapiens
MDNASFSEPWPANASGPDPALSCSNASTLAPLPAPLAVAVPVVYAVICAVGLAGNSAVLYVLLRAPRMKTVTNLFILNLAIADELFTLVLPINIADFLLRQWPFGELMCKLIVAIDQYNTFSSLYFLTVMSADRYLVVLATAESRRVAGRTYSAARAVSLAVWGIVTLVVLPFAVFARLDDEQGRRQCVLVFPQPEAFWWRASRLYTLVLGFAIPVSTICVLYTTLLCRLHAMRLDSHAKALERAKKRVTFLVVAILAVCLLCWTPYHLSTVVALTTDLPQTPLVIAISYFITSLSYANSCLNPFLYAFLDASFRRNLRQLITCRAAA

SEQ ID NO: 27200 - protein, 1024 aa, Homo sapiens
MNFIKDNSRALIQRMGMTVIKQITDDLFVWNVLNREEVNIICCEKVEQDAARGIIHMILKKGSESCNLFLKSLKEWNYPLFQDLNGQSLFHQTSEGDLDDLAQDLKDLYHTPSFLNFYPLGEDIDIIFNLKSTFTEPVLWRKDQHHHRVEQLTLNGLLQALQSPCIIEGESGKGKSTLLQRIAMLWGSGKCKALTKFKFVFFLRLSRAQGGLFETLCDQLLDIPGTIRKQTFMAMLLKLRQRVLFLLDGYNEFKPQNCPEIEALIKENHRFKNMVIVTTTTECLRHIRQFGALTAEVGDMTEDSAQALIREVLIKELAEGLLLQIQKSRCLRNLMKTPLFVVITCAIQMGESEFHSHTQTTLFHTFYDLLIQKNKHKHKGVAASDFIRSLDHCGDLALEGVFSHKFDFELQDVSSVNEDVLLTTGLLCKYTAQRFKPKYKFFHKSFQEYTAGRRLSSLLTSHEPEEVTKGNGYLQKMVSISDITSTYSSLLRYTCGSSVEATRAVMKHLAAVYQHGCLLGLSIAKRPLWRQESLQSVKNTTEQEILKAININSFVECGIHLYQESTSKSALSQEFEAFFQGKSLYINSGNIPDYLFDFFEHLPNCASALDFIKLDFYGGAMASWEKAAEDTGGIHMEEAPETYIPSRAVSLFFNWKQEFRTLEVTLRDFSKLNKQDIRYLGKIFSSATSLRLQIKRCAGVAGSLSLVLSTCKNIYSLMVEASPLTIEDERHITSVTNLKTLSIHDLQNQRLPGGLTDSLGNLKNLTKLIMDNIKMNEEDAIKLAEGLKNLKKMCLFHLTHLSDIGEGMDYIVKSLSSEPCDLEEIQLVSCCLSANAVKILAQNLHNLVKLSILDLSENYLEKDGNEALHELIDRMNVLEQLTALMLPWGCDVQGSLSSLLKHLEEVPQLVKLGLKNWRLTDTEIRILGAFFGKNPLKNFQQLNLAGNRVSSDGWLAFMGVFENLKQLVFFDFSTKEFLPDPALVRKLSQVLSKLTFLQEARLVGWQFDDDDLSVITGAFKLVTA

SEQ ID NO: 27201 - protein, 359 aa, Homo sapiens
MNFIKDNSRALIQRMGMTVIKQITDDLFVWNVLNREEVNIICCEKVEQDAARGIIHMILKKGSESCNLFLKSLKEWNYPLFQDLNGQSGLTDSLGNLKNLTKLIMDNIKMNEEDAIKLAEGLKNLKKMCLFHLTHLSDIGEGMDYIVKSLSSEPCDLEEIQLVSCCLSANAVKILAQNLHNLVKLSILDLSENYLEKDGNEALHELIDRMNVLEQLTALMLPWGCDVQGSLSSLLKHLEEVPQLVKLGLKNWRLTDTEIRILGAFFGKNPLKNFQQLNLAGNRVSSDGWLAFMGVFENLKQLVFFDFSTKEFLPDPALVRKLSQVLSKLTFLQEARLVGWQFDDDDLSVITGAFKLVTA

SEQ ID NO: 27202 - protein, 156 aa, Homo sapiens
MNFIKDNSRALIQRMGMTVIKQITDDLFVWNVLNREEVNIICCEKVEQDAARGIIHMILKKGSESCNLFLKSLKEWNYPLFQDLNGQSLFHQTSEGDLDDLAQDLKDLYHTPSFLNFYPLGEDIDIIFNLKSTFTEPVLWRKDQHHHRVEQLTLVL

SEQ ID NO: 27203 - protein, 92 aa, Homo sapiens
MNFIKDNSRALIQRMGMTVIKQITDDLFVWNVLNREEVNIICCEKVEQDAARGIIHMILKKGSESCNLFLKSLKEWNYPLFQDLNGQSLLTA

SEQ ID NO: 27204 - protein, 270 aa, Homo sapiens
MENQPVRWRALPGLPRPPGLPAAPWLLLGVLLLPGTLRLAGGQSVTHTGLPIMASLANTAISFSCRITYPYTPQFKVFTVSYFHEDLQGQRSPKKPTNCHPGLGTENQSHTLDCQVTLVLPGASATGTYYCSVHWPHSTVRGSGTFILVRDAGYREPPQSPQKLLLFGFTGLLSVLSVVGTALLLWNKKRMRGPGKDPTRKCPDPRSASSPKQHPSESVYTALQRRETEVYACIENEDGSSPTAKQSPLSQERPHRFEDDGELNLVYENL

SEQ ID NO: 27205 - protein, 333 aa, Homo sapiens
MQAAGHPEPLDSRGSFSLPTMGANVSQDNGTGHNATFSEPLPFLYVLLPAVYSGICAVGLTGNTAVILVILRAPKMKTVTNVFILNLAVADGLFTLVLPVNIAEHLLQYWPFGELLCKLVLAVDHYNIFSSIYFLAVMSVDRYLVVLATVRSRHMPWRTYRGAKVASLCVWLGVTVLVLPFFSFAGVYSNELQVPSCGLSFPWPEQVWFKASRVYTLVLGFVLPVCTICVLYTDLLRRLRAVRLRSGAKALGKARRKVTVLVLVVLAVCLLCWTPFHLASVVALTTDLPQTPLVISMSYVITSLSYANSCLNPFLYAFLDDNFRKNFRSILRC

SEQ ID NO: 27206 - protein, 347 aa, Homo sapiens
MHAHCLPFLLHAWWALLQAGAATVATALLRTRGQPSSPSPLAYMLSLYRDPLPRADIIRSLQAEDVAVDGQNWTFAFDFSFLSQQEDLAWAELRLQLSSPVDLPTEGSLAIEIFHQPKPDTEQASDSCLERFQMDLFTVTLSQVTFSLGSMVLEVTRPLSKWLKHPGALEKQMSRVAGECWPRPPTPPATNVLLMLYSNLSQEQRQLGGSTLLWEAESSWRAQEGQLSWEWGKRHRRHHLPDRSQLCRKVKFQVDFNLIGWGSWIIYPKQYNAYRCEGECPNPVGEEFHPTNHAYIQSLLKRYQPHRVPSTCCAPVKTKPLSMLYVDNGRVLLDHHKDMIVEECGCL

SEQ ID NO: 27207 - protein, 125 aa, Homo sapiens
MARSATLAAAALALCLLLAPPGLAWYKPAAGHSSYSVGRAAGLLSGLRRSPYARRSQPYRGAEPPGGAGASPELQLHPRLRSLAVCVQDVAPNLQRCERLPDGRGTYQCKANVFLSLRAADCLAA

SEQ ID NO: 27208 - protein, 301 aa, Homo sapiens
MTRHGKNCTAGAVYTYHEKKKDTAASGYGTQNIRLSRDAVKDFDCCCLSLQPCHDPVVTPDGYLYEREAILEYILHQKKEIARQMKAYEKQRGTRREEQKELQRAASQDHVRGFLEKESAIVSRPLNPFTAKALSGTSPDDVQPGPSVGPPSKDKDKVLPSFWIPSLTPEAKATKLEKPSRTVTCPMSGKPLRMSDLTPVHFTPLDSSVDRVGLITRSERYVCAVTRDSLSNATPCAVLRPSGAVVTLECVEKLIRKDMVDPVTGDKLTDRDIIVLQRGGTGFAGSGVKLQAEKSRPVMQA

SEQ ID NO: 27209 - protein, 1347 aa, Homo sapiens
MARQPPPPWVHAAFLLCLLSLGGAIEIPMDPSIQNELTQPPTITKQSAKDHIVDPRDNILIECEAKGNPAPSFHWTRNSRFFNIAKDPRVSMRRRSGTLVIDFRSGGRPEEYEGEYQCFARNKFGTALSNRIRLQVSKSPLWPKENLDPVVVQEGAPLTLQCNPPPGLPSPVIFWMSSSMEPITQDKRVSQGHNGDLYFSNVMLQDMQTDYSCNARFHFTHTIQQKNPFTLKVLTTRGVAERTPSFMYPQGTASSQMVLRGMDLLLECIASGVPTPDIAWYKKGGDLPSDKAKFENFNKALRITNVSEEDSGEYFCLASNKMGSIRHTISVRVKAAPYWLDEPKNLILAPGEDGRLVCRANGNPKPTVQWMVNGEPLQSAPPNPNREVAGDTIIFRDTQISSRAVYQCNTSNEHGYLLANAFVSVLDVPPRMLSPRNQLIRVILYNRTRLDCPFFGSPIPTLRWFKNGQGSNLDGGNYHVYENGSLEIKMIRKEDQGIYTCVATNILGKAENQVRLEVKDPTRIYRMPEDQVARRGTTVQLECRVKHDPSLKLTVSWLKDDEPLYIGNRMKKEDDSLTIFGVAERDQGSYTCVASTELDQDLAKAYLTVLADQATPTNRLAALPKGRPDRPRDLELTDLAERSVRLTWIPGDANNSPITDYVVQFEEDQFQPGVWHDHSKYPGSVNSAVLRLSPYVNYQFRVIAINEVGSSHPSLPSERYRTSGAPPESNPGDVKGEGTRKNNMEITWTPMNATSAFGPNLRYIVKWRRRETREAWNNVTVWGSRYVVGQTPVYVPYEIRVQAENDFGKGPEPESVIGYSGEDYPRAAPTEVKVRVMNSTAISLQWNRVYSDTVQGQLREYRAYYWRESSLLKNLWVSQKRQQASFPGDRLRGVVSRLFPYSNYKLEMVVVNGRGDGPRSETKEFTTPEGVPSAPRRFRVRQPNLETINLEWDHPEHPNGIMIGYTLKYVAFNGTKVGKQIVENFSPNQTKFTVQRTDPVSRYRFTLSARTQVGSGEAVTEESPAPPNEATPTAAPPTLPPTTVGATGAVSSTDATAIAATTEATTVPIIPTVAPTTIATTTTVATTTTTTAAATTTTESPPTTTSGTKIHESAPDEQSIWNVTVLPNSKWANITWKHNFGPGTDFVVEYIDSNHTKKTVPVKAQAQPIQLTDLYPGMTYTLRVYSRDNEGISSTVITFMTSTAYTNNQADIATQGWFIGLMCAIALLVLILLIVCFIKRSRGGKYPVREKKDVPLGPEDPKEEDGSFDYSDEDNKPLQGSQTSLDGTIKQQESDDSLVDYGEGGEGQFNEDGSFIGQYTVKKDKEETEGNESSEATSPVNAIYSLA

SEQ ID NO: 27210 - protein, 619 aa, Homo sapiens
MARQPPPPWVHAAFLLCLLSLGGAIEIPMDPSIQNELTQPPTITKQSAKDHIVDPRDNILIECEAKGNPAPSFHWTRNSRFFNIAKDPRVSMRRRSGTLVIDFRSGGRPEEYEGEYQCFARNKFGTALSNRIRLQVSKSPLWPKENLDPVVVQEGAPLTLQCNPPPGLPSPVIFWMSSSMEPITQDKRVSQGHNGDLYFSNVMLQDMQTDYSCNARFHFTHTIQQKNPFTLKVLTTRGVAERTPSFMYPQGTASSQMVLRGMDLLLECIASGVPTPDIAWYKKGGDLPSDKAKFENFNKALRITNVSEEDSGEYFCLASNKMGSIRHTISVRVKAAPYWLDEPKNLILAPGEDGRLVCRANGNPKPTVQWMVNGEPLQSAPPNPNREVAGDTIIFRDTQISSRAVYQCNTSNEHGYLLANAFVSVLDVPPRMLSPRNQLIRVILYNRTRLDCPFFGSPIPTLRWFKNGQGSNLDGGNYHVYENGSLEIKMIRKEDQGIYTCVATNILGKAENQVRLEVKDPTRIYRMPEDQVARRGTTVQLECRVKHDPSLKLTVSWLKDDEPLYIGNRMKKEDDSLTIFGVAERDQGSYTCVASTELDQDLAKAYLTVLGNCPCSPWH

SEQ ID NO: 27211 - protein, 1169 aa, Homo sapiens
MARQPPPPWVHAAFLLCLLSLGGAIEIPMDLTQPPTITKQSAKDHIVDPRDNILIECEAKGNPAPSFHWTRNSRFFNIAKDPRVSMRRRSGTLVIDFRSGGRPEEYEGEYQCFARNKFGTALSNRIRLQVSKSPLWPKENLDPVVVQEGAPLTLQCNPPPGLPSPVIFWMSSSMEPITQDKRVSQGHNGDLYFSNVMLQDMQTDYSCNARFHFTHTIQQKNPFTLKVLTNHPYNDSSLRNHPDMYSARGVAERTPSFMYPQGTASSQMVLRGMDLLLECIASGVPTPDIAWYKKGGDLPSDKAKFENFNKALRITNVSEEDSGEYFCLASNKMGSIRHTISVRVKAAPYWLDEPKNLILAPGEDGRLVCRANGNPKPTVQWMVNGEPLQSAPPNPNREVAGDTIIFRDTQISSRAVYQCNTSNEHGYLLANAFVSVLDVPPRMLSPRNQLIRVILYNRTRLDCPFFGSPIPTLRWFKNGQGSNLDGGNYHVYENGSLEIKMIRKEDQGIYTCVATNILGKAENQVRLEVKDPTRIYRMPEDQVARRGTTVQLECRVKHDPSLKLTVSWLKDDEPLYIGNRMKKEDDSLTIFGVAERDQGSYTCVASTELDQDLAKAYLTVLGRPDRPRDLELTDLAERSVRLTWIPGDANNSPITDYVVQFEEDQFQPGVWHDHSKYPGSVNSAVLRLSPYVNYQFRVIAINEVGSSHPSLPSERYRTSGAPPESNPGDVKGEGTRKNNMEITWTPMNATSAFGPNLRYIVKWRRRETREAWNNVTVWGSRYVVGQTPVYVPYEIRVQAENDFGKGPEPESVIGYSGEDYPRAAPTEVKVRVMNSTAISLQWNRVYSDTVQGQLREYRAYYWRESSLLKNLWVSQKRQQASFPGDRLRGVVSRLFPYSNYKLEMVVVNGRGDGPRSETKEFTTPEGVPSAPRRFRVRQPNLETINLEWDHPEHPNGIMIGYTLKYVAFNGTKVGKQIVENFSPNQTKFTVQRTDPVSRYRFTLSARTQVGSGEAVTEESPAPPNEAYTNNQADIATQGWFIGLMCAIALLVLILLIVCFIKRSRGGKYPVREKKDVPLGPEDPKEEDGSFDYSDEDNKPLQGSQTSLDGTIKQQESDDSLVDYGEGGEGQFNEDGSFIGQYTVKKDKEETEGNESSEATSPVNAIYSLA

SEQ ID NO: 27212 - protein, 1066 aa, Homo sapiens
MARQPPPPWVHAAFLLCLLSLGGAIEIPMDPSIQNELTQPPTITKQSAKDHIVDPRDNILIECEAKGNPAPSFHWTRNSRFFNIAKDPRVSMRRRSGTLVIDFRSGGRPEEYEGEYQCFARNKFGTALSNRIRLQVSKSPLWPKENLDPVVVQEGAPLTLQCNPPPGLPSPVIFWMSSSMEPITQDKRVSQGHNGDLYFSNVMLQDMQTDYSCNARFHFTHTIQQKNPFTLKVLTTRGVAERTPSFMYPQGTASSQMVLRGMDLLLECIASGVPTPDIAWYKKGGDLPSDKAKFENFNKALRITNVSEEDSGEYFCLASNKMGSIRHTISVRVKAAPYWLDEPKNLILAPGEDGRLVCRANGNPKPTVQWMVNGEPLQSAPPNPNREVAGDTIIFRDTQISSRAVYQCNTSNEHGYLLANAFVSVLDVPPRMLSPRNQLIRVILYNRTRLDCPFFGSPIPTLRWFKNGQGSNLDGGNYHVYENGSLEIKMIRKEDQGIYTCVATNILGKAENQVRLEVKDPTRIYRMPEDQVARRGTTVQLECRVKHDPSLKLTVSWLKDDEPLYIGNRMKKEDDSLTIFGVAERDQGSYTCVASTELDQDLAKAYLTVLADQATPTNRLAALPKGRPDRPRDLELTDLAERSVRLTWIPGDANNSPITDYVVQFEEDQFQPGVWHDHSKYPGSVNSAVLRLSPYVNYQFRVIAINEVGSSHPSLPSERYRTSGAPPESNPGDVKGEGTRKNNMEITWTPMNATSAFGPNLRYIVKWRRRETREAWNNVTVWGSRYVVGQTPVYVPYEIRVQAENDFGKGPEPESVIGYSGEDLPSAPRRFRVRQPNLETINLEWDHPEHPNGIMIGYTLKYVAFNGTKVGKQIVENFSPNQTKFTVQRTDPVSRYRFTLSARTQVGSGEAVTEESPAPPNEAYTNNQADIATQGWFIGLMCAIALLVLILLIVCFIKRSRGGKYPVREKKDVPLGPEDPKEEDGSFDYSDEDNKPLQGSQTSLDGTIKQQESDDSLVDYGEGGEGQFNEDGSFIGQYTVKKDKEETEGNESSEATSPVNAIYSLA

SEQ ID NO: 27213 - protein, 1332 aa, Homo sapiens
MARQPPPPWVHAAFLLCLLSLGGAIEIPMDPSIQNELTQPPTITKQSAKDHIVDPRDNILIECEAKGNPAPSFHWTRNSRFFNIAKDPRVSMRRRSGTLVIDFRSGGRPEEYEGEYQCFARNKFGTALSNRIRLQVSKSPLWPKENLDPVVVQEGAPLTLQCNPPPGLPSPVIFWMSSSMEPITQDKRVSQGHNGDLYFSNVMLQDMQTDYSCNARFHFTHTIQQKNPFTLKVLTTRGVAERTPSFMYPQGTASSQMVLRGMDLLLECIASGVPTPDIAWYKKGGDLPSDKAKFENFNKALRITNVSEEDSGEYFCLASNKMGSIRHTISVRVKAAPYWLDEPKNLILAPGEDGRLVCRANGNPKPTVQWMVNGEPLQSAPPNPNREVAGDTIIFRDTQISSRAVYQCNTSNEHGYLLANAFVSVLDVPPRMLSPRNQLIRVILYNRTRLDCPFFGSPIPTLRWFKNGQGSNLDGGNYHVYENGSLEIKMIRKEDQGIYTCVATNILGKAENQVRLEVKDPTRIYRMPEDQVARRGTTVQLECRVKHDPSLKLTVSWLKDDEPLYIGNRMKKEDDSLTIFGVAERDQGSYTCVASTELDQDLAKAYLTVLGRPDRPRDLELTDLAERSVRLTWIPGDANNSPITDYVVQFEEDQFQPGVWHDHSKYPGSVNSAVLRLSPYVNYQFRVIAINEVGSSHPSLPSERYRTSGAPPESNPGDVKGEGTRKNNMEITWTPMNATSAFGPNLRYIVKWRRRETREAWNNVTVWGSRYVVGQTPVYVPYEIRVQAENDFGKGPEPESVIGYSGEDYPRAAPTEVKVRVMNSTAISLQWNRVYSDTVQGQLREYRAYYWRESSLLKNLWVSQKRQQASFPGDRLRGVVSRLFPYSNYKLEMVVVNGRGDGPRSETKEFTTPEGVPSAPRRFRVRQPNLETINLEWDHPEHPNGIMIGYTLKYVAFNGTKVGKQIVENFSPNQTKFTVQRTDPVSRYRFTLSARTQVGSGEAVTEESPAPPNEGRCMAAAPGVKGPSVGATGAVSSTDATAIAATTEATTVPIIPTVAPTTIATTTTVATTTTTTAAATTTTESPPTTTSGTKIHESAPDEQSIWNVTVLPNSKWANITWKHNFGPGTDFVVEYIDSNHTKKTVPVKAQAQPIQLTDLYPGMTYTLRVYSRDNEGISSTVITFMTSTAYTNNQADIATQGWFIGLMCAIALLVLILLIVCFIKRSRGGKYPVREKKDVPLGPEDPKEEDGSFDYSDEDNKPLQGSQTSLDGTIKQQESDDSLVDYGEGGEGQFNEDGSFIGQYTVKKDKEETEGNESSEATSPVNAIYSLA

SEQ ID NO: 27214 - protein, 1224 aa, Homo sapiens
MARQPPPPWVHAAFLLCLLSLGGAIEIPMDPSIQNELTQPPTITKQSAKDHIVDPRDNILIECEAKGNPAPSFHWTRNSRFFNIAKDPRVSMRRRSGTLVIDFRSGGRPEEYEGEYQCFARNKFGTALSNRIRLQVSKSPLWPKENLDPVVVQEGAPLTLQCNPPPGLPSPVIFWMSSSMEPITQDKRVSQGHNGDLYFSNVMLQDMQTDYSCNARFHFTHTIQQKNPFTLKVLTTRGVAERTPSFMYPQGTASSQMVLRGMDLLLECIASGVPTPDIAWYKKGGDLPSDKAKFENFNKALRITNVSEEDSGEYFCLASNKMGSIRHTISVRVKAAPYWLDEPKNLILAPGEDGRLVCRANGNPKPTVQWMVNGEPLQSAPPNPNREVAGDTIIFRDTQISSRAVYQCNTSNEHGYLLANAFVSVLDVPPRMLSPRNQLIRVILYNRTRLDCPFFGSPIPTLRWFKNGQGSNLDGGNYHVYENGSLEIKMIRKEDQGIYTCVATNILGKAENQVRLEVKDPTRIYRMPEDQVARRGTTVQLECRVKHDPSLKLTVSWLKDDEPLYIGNRMKKEDDSLTIFGVAERDQGSYTCVASTELDQDLAKAYLTVLADQATPTNRLAALPKGRPDRPRDLELTDLAERSVRLTWIPGDANNSPITDYVVQFEEDQFQPGVWHDHSKYPGSVNSAVLRLSPYVNYQFRVIAINEVGSSHPSLPSERYRTSGAPPESNPGDVKGEGTRKNNMEITWTPMNATSAFGPNLRYIVKWRRRETREAWNNVTVWGSRYVVGQTPVYVPYEIRVQAENDFGKGPEPESVIGYSGEDYPRAAPTEVKVRVMNSTAISLQWNRVYSDTVQGQLREYRAYYWRESSLLKNLWVSQKRQQASFPGDRLRGVVSRLFPYSNYKLEMVVVNGRGDGPRSETKEFTTPEGVPSAPRRFRVRQPNLETINLEWDHPEHPNGIMIGYTLKYVAFNGTKVGKQIVENFSPNQTKFTVQRTDPVSRYRFTLSARTQVGSGEAVTEESPAPPNEGNHTKKTVPVKAQAQPIQLTDLYPGMTYTLRVYSRDNEGISSTVITFMTSTAYTNNQADIATQGWFIGLMCAIALLVLILLIVCFIKRSRGGKYPVREKKDVPLGPEDPKEEDGSFDYSDEDNKPLQGSQTSLDGTIKQQESDDSLVDYGEGGEGQFNEDGSFIGQYTVKKDKEETEGNESSEATSPVNAIYSLA

SEQ ID NO: 27215 - protein, 1257 aa, Homo sapiens
MARQPPPPWVHAAFLLCLLSLGGAIEIPMDPSIQNELTQPPTITKQSAKDHIVDPRDNILIECEAKGNPAPSFHWTRNSRFFNIAKDPRVSMRRRSGTLVIDFRSGGRPEEYEGEYQCFARNKFGTALSNRIRLQVSKSPLWPKENLDPVVVQEGAPLTLQCNPPPGLPSPVIFWMSSSMEPITQDKRVSQGHNGDLYFSNVMLQDMQTDYSCNARFHFTHTIQQKNPFTLKVLTTRGVAERTPSFMYPQGTASSQMVLRGMDLLLECIASGVPTPDIAWYKKGGDLPSDKAKFENFNKALRITNVSEEDSGEYFCLASNKMGSIRHTISVRVKAAPYWLDEPKNLILAPGEDGRLVCRANGNPKPTVQWMVNGEPLQSAPPNPNREVAGDTIIFRDTQISSRAVYQCNTSNEHGYLLANAFVSVLDVPPRMLSPRNQLIRVILYNRTRLDCPFFGSPIPTLRWFKNGQGSNLDGGNYHVYENGSLEIKMIRKEDQGIYTCVATNILGKAENQVRLEVKDPTRIYRMPEDQVARRGTTVQLECRVKHDPSLKLTVSWLKDDEPLYIGNRMKKEDDSLTIFGVAERDQGSYTCVASTELDQDLAKAYLTVLADQATPTNRLAALPKGRPDRPRDLELTDLAERSVRLTWIPGDANNSPITDYVVQFEEDQFQPGVWHDHSKYPGSVNSAVLRLSPYVNYQFRVIAINEVGSSHPSLPSERYRTSGAPPESNPGDVKGEGTRKNNMEITWTPMNATSAFGPNLRYIVKWRRRETREAWNNVTVWGSRYVVGQTPVYVPYEIRVQAENDFGKGPEPESVIGYSGEDYPRAAPTEVKVRVMNSTAISLQWNRVYSDTVQGQLREYRAYYWRESSLLKNLWVSQKRQQASFPGDRLRGVVSRLFPYSNYKLEMVVVNGRGDGPRSETKEFTTPEGVPSAPRRFRVRQPNLETINLEWDHPEHPNGIMIGYTLKYVAFNGTKVGKQIVENFSPNQTKFTVQRTDPVSRYRFTLSARTQVGSGEAVTEESPAPPNEATPTAAPPTLPPTTVGATGAVSSTDATAIAATTEATTVPIIPTVAPTTIATTTTVATTTTTTAAATTTTESPPTTTSGTKIHESAYTNNQADIATQGWFIGLMCAIALLVLILLIVCFIKRSRGGKYPVREKKDVPLGPEDPKEEDGSFDYSDEDNKPLQGSQTSLDGTIKQQESDDSLVDYGEGGEGQFNEDGSFIGQYTVKKDKEETEGNESSEATSPVNAIYSLA

SEQ ID NO: 27216 - protein, 1174 aa, Homo sapiens
MARQPPPPWVHAAFLLCLLSLGGAIEIPMDLTQPPTITKQSAKDHIVDPRDNILIECEAKGNPAPSFHWTRNSRFFNIAKDPRVSMRRRSGTLVIDFRSGGRPEEYEGEYQCFARNKFGTALSNRIRLQVSKSPLWPKENLDPVVVQEGAPLTLQCNPPPGLPSPVIFWMSSSMEPITQDKRVSQGHNGDLYFSNVMLQDMQTDYSCNARFHFTHTIQQKNPFTLKVLTNHPYNDSSLRNHPDMYSARGVAERTPSFMYPQGTASSQMVLRGMDLLLECIASGVPTPDIAWYKKGGDLPSDKAKFENFNKALRITNVSEEDSGEYFCLASNKMGSIRHTISVRVKAAPYWLDEPKNLILAPGEDGRLVCRANGNPKPTVQWMVNGEPLQSAPPNPNREVAGDTIIFRDTQISSRAVYQCNTSNEHGYLLANAFVSVLDVPPRMLSPRNQLIRVILYNRTRLDCPFFGSPIPTLRWFKNGQGSNLDGGNYHVYENGSLEIKMIRKEDQGIYTCVATNILGKAENQVRLEVKDPTRIYRMPEDQVARRGTTVQLECRVKHDPSLKLTVSWLKDDEPLYIGNRMKKEDDSLTIFGVAERDQGSYTCVASTELDQDLAKAYLTVLGRPDRPRDLELTDLAERSVRLTWIPGDANNSPITDYVVQFEEDQFQPGVWHDHSKYPGSVNSAVLRLSPYVNYQFRVIAINEVGSSHPSLPSERYRTSGAPPESNPGDVKGEGTRKNNMEITWTPMNATSAFGPNLRYIVKWRRRETREAWNNVTVWGSRYVVGQTPVYVPYEIRVQAENDFGKGPEPESVIGYSGEDYPRAAPTEVKVRVMNSTAISLQWNRVYSDTVQGQLREYRAYYWRESSLLKNLWVSQKRQQASFPGDRLRGVVSRLFPYSNYKLEMVVVNGRGDGPRSETKEFTTPEGVPSAPRRFRVRQPNLETINLEWDHPEHPNGIMIGYTLKYVAFNGTKVGKQIVENFSPNQTKFTVQRTDPVSRYRFTLSARTQVGSGEAVTEESPAPPNEATPTAAYTNNQADIATQGWFIGLMCAIALLVLILLIVCFIKRSRGGKYPVREKKDVPLGPEDPKEEDGSFDYSDEDNKPLQGSQTSLDGTIKQQESDDSLVDYGEGGEGQFNEDGSFIGQYTVKKDKEETEGNESSEATSPVNAIYSLA

SEQ ID NO: 27217 - protein, 1240 aa, Homo sapiens
MARQPPPPWVHAAFLLCLLSLGGAIEIPMDPSIQNELTQPPTITKQSAKDHIVDPRDNILIECEAKGNPAPSFHWTRNSRFFNIAKDPRVSMRRRSGTLVIDFRSGGRPEEYEGEYQCFARNKFGTALSNRIRLQVSKSPLWPKENLDPVVVQEGAPLTLQCNPPPGLPSPVIFWMSSSMEPITQDKRVSQGHNGDLYFSNVMLQDMQTDYSCNARFHFTHTIQQKNPFTLKVLTTRGVAERTPSFMYPQGTASSQMVLRGMDLLLECIASGVPTPDIAWYKKGGDLPSDKAKFENFNKALRITNVSEEDSGEYFCLASNKMGSIRHTISVRVKAAPYWLDEPKNLILAPGEDGRLVCRANGNPKPTVQWMVNGEPLQSAPPNPNREVAGDTIIFRDTQISSRAVYQCNTSNEHGYLLANAFVSVLDVPPRMLSPRNQLIRVILYNRTRLDCPFFGSPIPTLRWFKNGQGSNLDGGNYHVYENGSLEIKMIRKEDQGIYTCVATNILGKAENQVRLEVKDPTRIYRMPEDQVARRGTTVQLECRVKHDPSLKLTVSWLKDDEPLYIGNRMKKEDDSLTIFGVAERDQGSYTCVASTELDQDLAKAYLTVLADQATPTNRLAALPKGRPDRPRDLELTDLAERSVRLTWIPGDANNSPITDYVVQFEEDQFQPGVWHDHSKYPGSVNSAVLRLSPYVNYQFRVIAINEVGSSHPSLPSERYRTSGAPPESNPGDVKGEGTRKNNMEITWTPMNATSAFGPNLRYIVKWRRRETREAWNNVTVWGSRYVVGQTPVYVPYEIRVQAENDFGKGPEPESVIGYSGEDLPSAPRRFRVRQPNLETINLEWDHPEHPNGIMIGYTLKYVAFNGTKVGKQIVENFSPNQTKFTVQRTDPVSRYRFTLSARTQVGSGEAVTEESPAPPNEATPTAAPPTLPPTTVGATGAVSSTDATAIAATTEATTVPIIPTVAPTTIATTTTVATTTTTTAAATTTTESPPTTTSGTKIHESAPDEQSIWNVTVLPNSKWANITWKHNFGPGTDFVVEYIDSNHTKKTVPVKAQAQPIQLTDLYPGMTYTLRVYSRDNEGISSTVITFMTSTAYTNNQADIATQGWFIGLMCAIALLVLILLIVCFIKRSRGGKYPVREKKDVPLGPEDPKEEDGSFDYSDEDNKPLQGSQTSLDGTIKQQESDDSLVDYGEGGEGQFNEDGSFIGQYTVKKDKEETEGNESSEATSPVNAIYSLA

SEQ ID NO: 27218 - protein, 1157 aa, Homo sapiens
MARQPPPPWVHAAFLLCLLSLGGAIEIPMDLTQPPTITKQSAKDHIVDPRDNILIECEAKGNPAPSFHWTRNSRFFNIAKDPRVSMRRRSGTLVIDFRSGGRPEEYEGEYQCFARNKFGTALSNRIRLQVSKSPLWPKENLDPVVVQEGAPLTLQCNPPPGLPSPVIFWMSSSMEPITQDKRVSQGHNGDLYFSNVMLQDMQTDYSCNARFHFTHTIQQKNPFTLKVLTTRGVAERTPSFMYPQGTASSQMVLRGMDLLLECIASGVPTPDIAWYKKGGDLPSDKAKFENFNKALRITNVSEEDSGEYFCLASNKMGSIRHTISVRVKAAPYWLDEPKNLILAPGEDGRLVCRANGNPKPTVQWMVNGEPLQSAPPNPNREVAGDTIIFRDTQISSRAVYQCNTSNEHGYLLANAFVSVLDVPPRMLSPRNQLIRVILYNRTRLDCPFFGSPIPTLRWFKNGQGSNLDGGNYHVYENGSLEIKMIRKEDQGIYTCVATNILGKAENQVRLEVKDPTRIYRMPEDQVARRGTTVQLECRVKHDPSLKLTVSWLKDDEPLYIGNRMKKEDDSLTIFGVAERDQGSYTCVASTELDQDLAKAYLTVLGRPDRPRDLELTDLAERSVRLTWIPGDANNSPITDYVVQFEEDQFQPGVWHDHSKYPGSVNSAVLRLSPYVNYQFRVIAINEVGSSHPSLPSERYRTSGAPPESNPGDVKGEGTRKNNMEITWTPMNATSAFGPNLRYIVKWRRRETREAWNNVTVWGSRYVVGQTPVYVPYEIRVQAENDFGKGPEPESVIGYSGEDYPRAAPTEVKVRVMNSTAISLQWNRVYSDTVQGQLREYRAYYWRESSLLKNLWVSQKRQQASFPGDRLRGVVSRLFPYSNYKLEMVVVNGRGDGPRSETKEFTTPEGVPSAPRRFRVRQPNLETINLEWDHPEHPNGIMIGYTLKYVAFNGTKVGKQIVENFSPNQTKFTVQRTDPVSRYRFTLSARTQVGSGEAVTEESPAPPNEATPTAAYTNNQADIATQGWFIGLMCAIALLVLILLIVCFIKRSRGGKYPVREKKDVPLGPEDPKEEDGSFDYSDEDNKPLQGSQTSLDGTIKQQESDDSLVDYGEGGEGQFNEDGSFIGQYTVKKDKEETEGNESSEATSPVNAIYSLA

SEQ ID NO: 27219 - protein, 1189 aa, Homo sapiens
MARQPPPPWVHAAFLLCLLSLGGAIEIPMDLTQPPTITKQSAKDHIVDPRDNILIECEAKGNPAPSFHWTRNSRFFNIAKDPRVSMRRRSGTLVIDFRSGGRPEEYEGEYQCFARNKFGTALSNRIRLQVSKSPLWPKENLDPVVVQEGAPLTLQCNPPPGLPSPVIFWMSSSMEPITQDKRVSQGHNGDLYFSNVMLQDMQTDYSCNARFHFTHTIQQKNPFTLKVLTNHPYNDSSLRNHPDMYSARGVAERTPSFMYPQGTASSQMVLRGMDLLLECIASGVPTPDIAWYKKGGDLPSDKAKFENFNKALRITNVSEEDSGEYFCLASNKMGSIRHTISVRVKAAPYWLDEPKNLILAPGEDGRLVCRANGNPKPTVQWMVNGEPLQSAPPNPNREVAGDTIIFRDTQISSRAVYQCNTSNEHGYLLANAFVSVLDVPPRMLSPRNQLIRVILYNRTRLDCPFFGSPIPTLRWFKNGQGSNLDGGNYHVYENGSLEIKMIRKEDQGIYTCVATNILGKAENQVRLEVKDPTRIYRMPEDQVARRGTTVQLECRVKHDPSLKLTVSWLKDDEPLYIGNRMKKEDDSLTIFGVAERDQGSYTCVASTELDQDLAKAYLTVLADQATPTNRLAALPKGRPDRPRDLELTDLAERSVRLTWIPGDANNSPITDYVVQFEEDQFQPGVWHDHSKYPGSVNSAVLRLSPYVNYQFRVIAINEVGSSHPSLPSERYRTSGAPPESNPGDVKGEGTRKNNMEITWTPMNATSAFGPNLRYIVKWRRRETREAWNNVTVWGSRYVVGQTPVYVPYEIRVQAENDFGKGPEPESVIGYSGEDYPRAAPTEVKVRVMNSTAISLQWNRVYSDTVQGQLREYRAYYWRESSLLKNLWVSQKRQQASFPGDRLRGVVSRLFPYSNYKLEMVVVNGRGDGPRSETKEFTTPEGVPSAPRRFRVRQPNLETINLEWDHPEHPNGIMIGYTLKYVAFNGTKVGKQIVENFSPNQTKFTVQRTDPVSRYRFTLSARTQVGSGEAVTEESPAPPNEATPTAAYTNNQADIATQGWFIGLMCAIALLVLILLIVCFIKRSRGGKYPVREKKDVPLGPEDPKEEDGSFDYSDEDNKPLQGSQTSLDGTIKQQESDDSLVDYGEGGEGQFNEDGSFIGQYTVKKDKEETEGNESSEATSPVNAIYSLA

SEQ ID NO: 27220 - protein, 1071 aa, Homo sapiens
MARQPPPPWVHAAFLLCLLSLGGAIEIPMDPSIQNELTQPPTITKQSAKDHIVDPRDNILIECEAKGNPAPSFHWTRNSRFFNIAKDPRVSMRRRSGTLVIDFRSGGRPEEYEGEYQCFARNKFGTALSNRIRLQVSKSPLWPKENLDPVVVQEGAPLTLQCNPPPGLPSPVIFWMSSSMEPITQDKRVSQGHNGDLYFSNVMLQDMQTDYSCNARFHFTHTIQQKNPFTLKVLTTRGVAERTPSFMYPQGTASSQMVLRGMDLLLECIASGVPTPDIAWYKKGGDLPSDKAKFENFNKALRITNVSEEDSGEYFCLASNKMGSIRHTISVRVKAAPYWLDEPKNLILAPGEDGRLVCRANGNPKPTVQWMVNGEPLQSAPPNPNREVAGDTIIFRDTQISSRAVYQCNTSNEHGYLLANAFVSVLDVPPRMLSPRNQLIRVILYNRTRLDCPFFGSPIPTLRWFKNGQGSNLDGGNYHVYENGSLEIKMIRKEDQGIYTCVATNILGKAENQVRLEVKDPTRIYRMPEDQVARRGTTVQLECRVKHDPSLKLTVSWLKDDEPLYIGNRMKKEDDSLTIFGVAERDQGSYTCVASTELDQDLAKAYLTVLADQATPTNRLAALPKGRPDRPRDLELTDLAERSVRLTWIPGDANNSPITDYVVQFEEDQFQPGVWHDHSKYPGSVNSAVLRLSPYVNYQFRVIAINEVGSSHPSLPSERYRTSGAPPESNPGDVKGEGTRKNNMEITWTPMNATSAFGPNLRYIVKWRRRETREAWNNVTVWGSRYVVGQTPVYVPYEIRVQAENDFGKGPEPESVIGYSGEDLPSAPRRFRVRQPNLETINLEWDHPEHPNGIMIGYTLKYVAFNGTKVGKQIVENFSPNQTKFTVQRTDPVSRYRFTLSARTQVGSGEAVTEESPAPPNEATPTAAYTNNQADIATQGWFIGLMCAIALLVLILLIVCFIKRSRGGKYPVREKKDVPLGPEDPKEEDGSFDYSDEDNKPLQGSQTSLDGTIKQQESDDSLVDYGEGGEGQFNEDGSFIGQYTVKKDKEETEGNESSEATSPVNAIYSLA

SEQ ID NO: 27221 - protein, 1268 aa, Homo sapiens
MARQPPPPWVHAAFLLCLLSLGGAIEIPMDPSIQNELTQPPTITKQSAKDHIVDPRDNILIECEAKGNPAPSFHWTRNSRFFNIAKDPRVSMRRRSGTLVIDFRSGGRPEEYEGEYQCFARNKFGTALSNRIRLQVSKSPLWPKENLDPVVVQEGAPLTLQCNPPPGLPSPVIFWMSSSMEPITQDKRVSQGHNGDLYFSNVMLQDMQTDYSCNARFHFTHTIQQKNPFTLKVLTTRGVAERTPSFMYPQGTASSQMVLRGMDLLLECIASGVPTPDIAWYKKGGDLPSDKAKFENFNKALRITNVSEEDSGEYFCLASNKMGSIRHTISVRVKAAPYWLDEPKNLILAPGEDGRLVCRANGNPKPTVQWMVNGEPLQSAPPNPNREVAGDTIIFRDTQISSRAVYQCNTSNEHGYLLANAFVSVLDVPPRMLSPRNQLIRVILYNRTRLDCPFFGSPIPTLRWFKNGQGSNLDGGNYHVYENGSLEIKMIRKEDQGIYTCVATNILGKAENQVRLEVKDPTRIYRMPEDQVARRGTTVQLECRVKHDPSLKLTVSWLKDDEPLYIGNRMKKEDDSLTIFGVAERDQGSYTCVASTELDQDLAKAYLTVLADQATPTNRLAALPKGRPDRPRDLELTDLAERSVRLTWIPGDANNSPITDYVVQFEEDQFQPGVWHDHSKYPGSVNSAVLRLSPYVNYQFRVIAINEVGSSHPSLPSERYRTSGAPPESNPGDVKGEGTRKNNMEITWTPMNATSAFGPNLRYIVKWRRRETREAWNNVTVWGSRYVVGQTPVYVPYEIRVQAENDFGKGPEPESVIGYSGEDYPRAAPTEVKVRVMNSTAISLQWNRVYSDTVQGQLREYRAYYWRESSLLKNLWVSQKRQQASFPGDRLRGVVSRLFPYSNYKLEMVVVNGRGDGPRSETKEFTTPEGVPSAPRRFRVRQPNLETINLEWDHPEHPNGIMIGYTLKYVAFNGTKVGKQIVENFSPNQTKFTVQRTDPVSRYRFTLSARTQVGSGEAVTEESPAPPNEATPTAAPDEQSIWNVTVLPNSKWANITWKHNFGPGTDFVVEYIDSNHTKKTVPVKAQAQPIQLTDLYPGMTYTLRVYSRDNEGISSTVITFMTSTAYTNNQADIATQGWFIGLMCAIALLVLILLIVCFIKRSRGGKYPVREKKDVPLGPEDPKEEDGSFDYSDEDNKPLQGSQTSLDGTIKQQESDDSLVDYGEGGEGQFNEDGSFIGQYTVKKDKEETEGNESSEATSPVNAIYSLA

SEQ ID NO: 27222 - protein, 1233 aa, Homo sapiens
MGGALGPALLLTSLFGAWAGLGPGQGEQGMTVAVVFSSSGPPQAQFRARLTPQSFLDLPLEIQPLTVGVNTTNPSSLLTQICGLLGAAHVHGIVFEDNVDTEAVAQILDFISSQTHVPILSISGGSAVVLTPKEPGSAFLQLGVSLEQQLQVLFKVLEEYDWSAFAVITSLHPGHALFLEGVRAVADASHVSWRLLDVVTLELGPGGPRARTQRLLRQLDAPVFVAYCSREEAEVLFAEAAQAGLVGPGHVWLVPNLALGSTDAPPATFPVGLISVVTESWRLSLRQKVRDGVAILALGAHSYWRQHGTLPAPAGDCRVHPGPVSPAREAFYRHLLNVTWEGRDFSFSPGGYLVQPTMVVIALNRHRLWEMVGRWEHGVLYMKYPVWPRYSASLQPVVDSRHLTVATLEERPFVIVESPDPGTGGCVPNTVPCRRQSNHTFSSGDVAPYTKLCCKGFCIDILKKLARVVKFSYDLYLVTNGKHGKRVRGVWNGMIGEVYYKRADMAIGSLTINEERSEIVDFSVPFVETGISVMVARSNGTVSPSAFLEPYSPAVWVMMFVMCLTVVAITVFMFEYFSPVSYNQNLTRGKKSGGPAFTIGKSVWLLWALVFNNSVPIENPRGTTSKIMVLVWAFFAVIFLASYTANLAAFMIQEQYIDTVSGLSDKKFQRPQDQYPPFRFGTVPNGSTERNIRSNYRDMHTHMVKFNQRSVEDALTSLKMGKLDAFIYDAAVLNYMAGKDEGCKLVTIGSGKVFATTGYGIAMQKDSHWKRAIDLALLQFLGDGETQKLETVWLSGICQNEKNEVMSSKLDIDNMAGVFYMLLVAMGLALLVFAWEHLVYWKLRHSVPNSSQLDFLLAFSRGIYSCFSGVQSLASPPRQASPDLTASSAQASVLKMLQAARDMVTTAGVSSSLDRATRTIENWGGGRRAPPPSPCPTPRSGPSPCLPTPDPPPEPSPTGWGPPDGGRAALVRRAPQPPGRPPTPGPPLSDVSRVSRRPAWEARWPVRTGHCGRHLSASERPLSPARCHYSSFPRADRSGRPFLPLFPELEDLPLLGPEQLARREALLHAAWARGSRPRHASLPSSVAEAFARPSSLPAGCTGPACARPDGHSACRRLAQAQSMCLPIYREACQEGEQAGAPAWQHRQHVCLHAHAHLPFCWGAVCPHLPPCASHGSWLSGAWGPLGHRGRTLGLGTGYRDSGGLDEISRVARGTQGFPGPCTWRRISSLESEV

SEQ ID NO: 27223 - protein, 1866 aa, Homo sapiens
MDPVGLQLGNKNLWSCLVRLLTKDPEWLNAKMKFFLPNTDLDSRNETLDPEQRVILQLNKLHVQGSDTWQSFIHCVCMQLEVPLDLEVLLLSTFGYDDGFTSQLGAEGKSQPESQLHHGLKRPHQSCGSSPRRKQCKKQQLELAKKYLQLLRTSAQQRYRSQIPGSGQPHAFHQVYVPPILRRATASLDTPEGAIMGDVKVEDGADVSISDLFNTRVNKGPRVTVLLGKAGMGKTTLAHRLCQKWAEGHLNCFQALFLFEFRQLNLITRFLTPSELLFDLYLSPESDHDTVFQYLEKNADQVLLIFDGLDEALQPMGPDGPGPVLTLFSHLCNGTLLPGCRVMATSRPGKLPACLPAEAAMVHMLGFDGPRVEEYVNHFFSAQPSREGALVELQTNGRLRSLCAVPALCQVACLCLHHLLPDHAPGQSVALLPNMTQLYMQMVLALSPPGHLPTSSLLDLGEVALRGLETGKVIFYAKDIAPPLIAFGATHSLLTSFCVCTGPGHQQTGYAFTHLSLQEFLAALHLMASPKVNKDTLTQYVTLHSRWVQRTKARLGLSDHLPTFLAGLASCTCRPFLSHLAQGNEDCVGAKQAAVVQVLKKLATRKLTGPKVVELCHCVDETQEPELASLTAQSLPYQLPFHNFPLTCTDLATLTNILEHREAPIHLDFDGCPLEPHCPEALVGCGQIENLSFKSRKCGDAFAEALSRSLPTMGRLQMLGLAGSKITARGISHLVKALPLCPQLKEVSFRDNQLSDQVVLNIVEVLPHLPRLRKLDLSSNSICVSTLLCLARVAVTCPTVRMLQAREADLIFLLSPPTETTAELQRAPDLQESDGQRKGAQSRSLTLRLQKCQLQVHDAEALIALLQEGPHLEEVDLSGNQLEDEGCRLMAEAASQLHIARKLDLSNNGLSVAGVHCVLRAVSACWTLAELHISLQHKTVIFMFAQEPEEQKGPQERAAFLDSLMLQMPSELPLSSRRMRLTHCGLQEKHLEQLCKALGGSCHLGHLHLDFSGNALGDEGAARLAQLLPGLGALQSLNLSENGLSLDAVLGLVRCFSTLQWLFRLDISFESQHILLRGDKTSRDMWATGSLPDFPAAAKFLGFRQRCIPRSLCLSECPLEPPSLTRLCATLKDCPGPLELQLSCEFLSDQSLETLLDCLPQLPQLSLLQLSQTGLSPKSPFLLANTLSLCPRVKKVDLRSLHHATLHFRSNEEEEGVCCGRFTGCSLSQEHVESLCWLLSKCKDLSQVDLSANLLGDSGLRCLLECLPQVPISGLLDLSHNSISQESALYLLETLPSCPRVREASVNLGSEQSFRIHFSREDQAGKTLRLSECSFRPEHVSRLATGLSKSLQLTELTLTQCCLGQKQLAILLSLVGRPAGLFSLRVQEPWADRARVLSLLEVCAQASGSVTEISISETQQQLCVQLEFPRQEENPEAVALRLAHCDLGAHHSLLVGQLMETCARLQQLSLSQVNLCEDDDASSLLLQSLLLSLSELKTFRLTSSCVSTEGLAHLASGLGHCHHLEELDLSNNQFDEEGTKALMRALEGKWMLKRLDLSHLLLNSSTLALLTHRLSQMTCLQSLRLNRNSIGDVGCCHLSEALRAATSLEELDLSHNQIGDAGVQHLATILPGLPELRKIDLSGNSISSAGGVQLAESLVLCRRLEELMLGCNALGDPTALGLAQELPQHLRVLHLPFSHLGPGGALSLAQALDGSPHLEEISLAENNLAGGVLRFCMELPLLRQIDLVSCKIDNQTAKLLTSSFTSCPALEVILLSWNLLGDEAAAELAQVLPQMGRLKRVDLEKNQITALGAWLLAEGLAQGSSIQVIRLWNNPIPCDMAQHLKSQEPRLDFAFFDNQPQAPWGT

SEQ ID NO: 27224 - protein, 1329 aa, Homo sapiens
MDPVGLQLGNKNLWSCLVRLLTKDPEWLNAKMKFFLPNTDLDSRNETLDPEQRVILQLNKLHVQGSDTWQSFIHCVCMQLEVPLDLEVLLLSTFGYDDGFTSQLGAEGKSQPESQLHHGLKRPHQSCGSSPRRKQCKKQQLELAKKYLQLLRTSAQQRYRSQIPGSGQPHAFHQVYVPPILRRATASLDTPEGAIMGDVKVEDGADVSISDLFNTRVNKGPRVTVLLGKAGMGKTTLAHRLCQKWAEGHLNCFQALFLFEFRQLNLITRFLTPSELLFDLYLSPESDHDTVFQYLEKNADQVLLIFDGLDEALQPMGPDGPGPVLTLFSHLCNGTLLPGCRVMATSRPGKLPACLPAEAAMVHMLGFDGPRVEEYVNHFFSAQPSREGALVELQTNGRLRSLCAVPALCQVACLCLHHLLPDHAPGQSVALLPNMTQLYMQMVLALSPPGHLPTSSLLDLGEVALRGLETGKVIFYAKDIAPPLIAFGATHSLLTSFCVCTGPGHQQTGYAFTHLSLQEFLAALHLMASPKVNKDTLTQYVTLHSRWVQRTKARLGLSDHLPTFLAGLASCTCRPFLSHLAQGNEDCVGAKQAAVVQVLKKLATRKLTGPKVVELCHCVDETQEPELASLTAQSLPYQLPFHNFPLTCTDLATLTNILEHREAPIHLDFDGCPLEPHCPEALVGCGQIENLSFKSRKCGDAFAEALSRSLPTMGRLQMLGLAGSKITARGISHLVKALPLCPQLKEVSFRDNQLSDQVVLNIVEVLPHLPRLRKLDLSSNSICVSTLLCLARVAVTCPTVRMLQAREADLIFLLSPPTETTAELQRAPDLQESDGQRKGAQSRSLTLRLQKCQLQVHDAEALIALLQEGPHLEEVDLSGNQLEDEGCRLMAEAASQLHIARKLDLSNNGLSVAGVHCVLRAVSACWTLAELHISLQHKTVIFMFAQEPEEQKGPQERAAFLDSLMLQMPSELPLSSRRMRLTHCGLQEKHLEQLCKALGGSCHLGHLHLDFSGNALGDEGAARLAQLLPGLGALQSLNLSENGLSLDAVLGLVRCFSTLQWLFRLDISFESQHILLRGDKTSRDMWATGSLPDFPAAAKFLGFRQRCIPRSLCLSECPLEPPSLTRLCATLKDCPGPLELQLSCEFLSDQSLETLLDCLPQLPQLSLLQLSQTGLSPKSPFLLANTLSLCPRVKKVDLRSLHHATLHFRSNEEEEGVCCGRFTGCSLSQEHVESLCWLLSKCKDLSQVDLSANLLGDSGLRCLLECLPQVPISGLLDLSHNSISQESALYLLETLPSCPRVREASVKCLGSWHVWAPCFPRPFSLQPGL

SEQ ID NO: 27225 - protein, 720 aa, Homo sapiens
MDPVGLQLGNKNLWSCLVRLLTKDPEWLNAKMKFFLPNTDLDSRNETLDPEQRVILQLNKLHVQGSDTWQSFIHCVCMQLEVPLDLEVLLLSTFGYDDGFTSQLGAEGKSQPESQLHHGLKRPHQSCGSSPRRKQCKKQQLELAKKYLQLLRTSAQQRYRSQIPGSGQPHAFHQVYVPPILRRATASLDTPEGAIMGDVKVEDGADVSISDLFNTRVNKGPRVTVLLGKAGMGKTTLAHRLCQKWAEGHLNCFQALFLFEFRQLNLITRFLTPSELLFDLYLSPESDHDTVFQYLEKNADQVLLIFDGLDEALQPMGPDGPGPVLTLFSHLCNGTLLPGCRVMATSRPGKLPACLPAEAAMVHMLGFDGPRVEEYVNHFFSAQPSREGALVELQTNGRLRSLCAVPALCQVACLCLHHLLPDHAPGQSVALLPNMTQLYMQMVLALSPPGHLPTSSLLDLGEVALRGLETGKVIFYAKDIAPPLIAFGATHSLLTSFCVCTGPGHQQTGYAFTHLSLQEFLAALHLMASPKVNKDTLTQYVTLHSRWVQRTKARLGLSDHLPTFLAGLASCTCRPFLSHLAQGNEDCVGAKQAAVVQVLKKLATRKLTGPKVVELCHCVDETQEPELASLTAQSLPYQLPFHNFPLTCTDLATLTNILEHREAPIHLDFDGCPLEPHCPEALVGCGQIENLSFKSRKCGDAFAEALSRSLPTMGRLQMLG

SEQ ID NO: 27226 - protein, 1837 aa, Homo sapiens
MDPVGLQLGNKNLWSCLVRLLTKDPEWLNAKMKFFLPNTDLDSRNETLDPEQRVILQLNKLHVQGSDTWQSFIHCVCMQLEVPLDLEVLLLSTFGYDDGFTSQLGAEGKSQPESQLHHGLKRPHQSCGSSPRRKQCKKQQLELAKKYLQLLRTSAQQRYRSQIPGSGQPHAFHQVYVPPILRRATASLDTPEGAIMGDVKVEDGADVSISDLFNTRVNKGPRVTVLLGKAGMGKTTLAHRLCQKWAEGHLNCFQALFLFEFRQLNLITRFLTPSELLFDLYLSPESDHDTVFQYLEKNADQVLLIFDGLDEALQPMGPDGPGPVLTLFSHLCNGTLLPGCRVMATSRPGKLPACLPAEAAMVHMLGFDGPRVEEYVNHFFSAQPSREGALVELQTNGRLRSLCAVPALCQVACLCLHHLLPDHAPGQSVALLPNMTQLYMQMVLALSPPGHLPTSSLLDLGEVALRGLETGKVIFYAKDIAPPLIAFGATHSLLTSFCVCTGPGHQQTGYAFTHLSLQEFLAALHLMASPKVNKDTLTQYVTLHSRWVQRTKARLGLSDHLPTFLAGLASCTCRPFLSHLAQGNEDCVGAKQAAVVQVLKKLATRKLTGPKVVELCHCVDETQEPELASLTAQSLPYQLPFHNFPLTCTDLATLTNILEHREAPIHLDFDGCPLEPHCPEALVGCGQIENLSFKSRKCGDAFAEALSRSLPTMGRLQMLGLAGSKITARGISHLVKALPLCPQLKEVSFRDNQLSDQVVLNIVEVLPHLPRLRKLDLSSNSICVSTLLCLARVAVTCPTVRMLQAREADLIFLLSPPTETTAELQRAPDLQESDGQRKGAQSRSLTLRLQKCQLQVHDAEALIALLQEGPHLEEVDLSGNQLEDEGCRLMAEAASQLHIARKLDLSNNGLSVAGVHCVLRAVSACWTLAELHISLQHKTVIFMFAQEPEEQKGPQERAAFLDSLMLQMPSELPLSSRRMRLTHCGLQEKHLEQLCKALGGSCHLGHLHLDFSGNALGDEGAARLAQLLPGLGALQSLNLSENGLSLDAVLGLVRCFSTLQWLFRLDISFESQHILLRGDKTSRDMWATGSLPDFPAAAKFLGFRQRCIPRSLCLSECPLEPPSLTRLCATLKDCPGPLELQLSCEFLSDQSLETLLDCLPQLPQLSLLQLSQTGLSPKSPFLLANTLSLCPRVKKVDLRSLHHATLHFRSNEEEEGVCCGLSANLLGDSGLRCLLECLPQVPISGLLDLSHNSISQESALYLLETLPSCPRVREASVNLGSEQSFRIHFSREDQAGKTLRLSECSFRPEHVSRLATGLSKSLQLTELTLTQCCLGQKQLAILLSLVGRPAGLFSLRVQEPWADRARVLSLLEVCAQASGSVTEISISETQQQLCVQLEFPRQEENPEAVALRLAHCDLGAHHSLLVGQLMETCARLQQLSLSQVNLCEDDDASSLLLQSLLLSLSELKTFRLTSSCVSTEGLAHLASGLGHCHHLEELDLSNNQFDEEGTKALMRALEGKWMLKRLDLSHLLLNSSTLALLTHRLSQMTCLQSLRLNRNSIGDVGCCHLSEALRAATSLEELDLSHNQIGDAGVQHLATILPGLPELRKIDLSGNSISSAGGVQLAESLVLCRRLEELMLGCNALGDPTALGLAQELPQHLRVLHLPFSHLGPGGALSLAQALDGSPHLEEISLAENNLAGGVLRFCMELPLLRQIDLVSCKIDNQTAKLLTSSFTSCPALEVILLSWNLLGDEAAAELAQVLPQMGRLKRVDLEKNQITALGAWLLAEGLAQGSSIQVIRLWNNPIPCDMAQHLKSQEPRLDFAFFDNQPQAPWGT

SEQ ID NO: 27227 - protein, 1356 aa, Homo sapiens
MDPVGLQLGNKNLWSCLVRLLTKDPEWLNAKMKFFLPNTDLDSRNETLDPEQRVILQLNKLHVQGSDTWQSFIHCVCMQLEVPLDLEVLLLSTFGYDDGFTSQLGAEGKSQPESQLHHGLKRPHQSCGSSPRRKQCKKQQLELAKKYLQLLRTSAQQRYRSQIPGSGQPHAFHQVYVPPILRRATASLDTPEGAIMGDVKVEDGADVSISDLFNTRVNKGPRVTVLLGKAGMGKTTLAHRLCQKWAEGHLNCFQALFLFEFRQLNLITRFLTPSELLFDLYLSPESDHDTVFQYLEKNADQVLLIFDGLDEALQPMGPDGPGPVLTLFSHLCNGTLLPGCRVMATSRPGKLPACLPAEAAMVHMLGFDGPRVEEYVNHFFSAQPSREGALVELQTNGRLRSLCAVPALCQVACLCLHHLLPDHAPGQSVALLPNMTQLYMQMVLALSPPGHLPTSSLLDLGEVALRGLETGKVIFYAKDIAPPLIAFGATHSLLTSFCVCTGPGHQQTGYAFTHLSLQEFLAALHLMASPKVNKDTLTQYVTLHSRWVQRTKARLGLSDHLPTFLAGLASCTCRPFLSHLAQGNEDCVGAKQAAVVQVLKKLATRKLTGPKVVELCHCVDETQEPELASLTAQSLPYQLPFHNFPLTCTDLATLTNILEHREAPIHLDFDGCPLEPHCPEALVGCGQIENLSFKSRKCGDAFAEALSRSLPTMGRLQMLGLAGSKITARGISHLVKALPLCPQLKEVSFRDNQLSDQVVLNIVEVLPHLPRLRKLDLSSNSICVSTLLCLARVAVTCPTVRMLQAREADLIFLLSPPTETTAELQRAPDLQESDGQRKGAQSRSLTLRLQKCQLQVHDAEALIALLQEGPHLEEVDLSGNQLEDEGCRLMAEAASQLHIARKLDLSNNGLSVAGVHCVLRAVSACWTLAELHISLQHKTVIFMFAQEPEEQKGPQERAAFLDSLMLQMPSELPLSSRRMRLTHCGLQEKHLEQLCKALGGSCHLGHLHLDFSGNALGDEGAARLAQLLPGLGALQSLNLSENGLSLDAVLGLVRCFSTLQWLFRLDISFESQHILLRGDKTSRDMWATGSLPDFPAAAKFLGFRQRCIPRSLCLSECPLEPPSLTRLCATLKDCPGPLELQLSCEFLSDQSLETLLDCLPQLPQLSLLQLSQTGLSPKSPFLLANTLSLCPRVKKVDLRSLHHATLHFRSNEEEEGVCCGLSANLLGDSGLRCLLECLPQVPISGLLDLSHNSISQESALYLLETLPSCPRVREASVNLGSEQSFRIHFSREDQAGKTLRLSECSFRPEHVSRLATGLSKSLQLTELTLTQCCLGQKQLAILLSLVGRPAGLFSLS

SEQ ID NO: 27228 - protein, 1551 aa, Homo sapiens
MDPVGLQLGNKNLWSCLVRLLTKDPEWLNAKMKFFLPNTDLDSRNETLDPEQRVILQLNKLHVQGSDTWQSFIHCVCMQLEVPLDLEVLLLSTFGYDDGFTSQLGAEGKSQPESQLHHGLKRPHQSCGSSPRRKQCKKQQLELAKKYLQLLRTSAQQRYRSQIPGSGQPHAFHQVYVPPILRRATASLDTPEGAIMGDVKVEDGADVSISDLFNTRVNKGPRVTVLLGKAGMGKTTLAHRLCQKWAEGHLNCFQALFLFEFRQLNLITRFLTPSELLFDLYLSPESDHDTVFQYLEKNADQVLLIFDGLDEALQPMGPDGPGPVLTLFSHLCNGTLLPGCRVMATSRPGKLPACLPAEAAMVHMLGFDGPRVEEYVNHFFSAQPSREGALVELQTNGRLRSLCAVPALCQVACLCLHHLLPDHAPGQSVALLPNMTQLYMQMVLALSPPGHLPTSSLLDLGEVALRGLETGKVIFYAKDIAPPLIAFGATHSLLTSFCVCTGPGHQQTGYAFTHLSLQEFLAALHLMASPKVNKDTLTQYVTLHSRWVQRTKARLGLSDHLPTFLAGLASCTCRPFLSHLAQGNEDCVGAKQAAVVQVLKKLATRKLTGPKVVELCHCVDETQEPELASLTAQSLPYQLPFHNFPLTCTDLATLTNILEHREAPIHLDFDGCPLEPHCPEALVGCGQIENLSFKSRKCGDAFAEALSRSLPTMGRLQMLGLAGSKITARGISHLVKALPLCPQLKEVSFRDNQLSDQVVLNIVEVLPHLPRLRKLDLSSNSICVSTLLCLARVAVTCPTVRMLQAREADLIFLLSPPTETTAELQRAPDLQESDGQRKGAQSRSLTLRLQKCQLQVHDAEALIALLQEGPHLEEVDLSGNQLEDEGCRLMAEAASQLHIARKLDLSNNGLSVAGVHCVLRAVSACWTLAELHISLQHKTVIFMFAQEPEEQKGPQERAAFLDSLMLQMPSELPLSSRRMRLTHCGLQEKHLEQLCKALGGSCHLGHLHLDFSGNALGDEGAARLAQLLPGLGALQSLNLSENGLSLDAVLGLVRCFSTLQWLFRLDISFESQHILLRGDKTSRDMWATGSLPDFPAAAKFLGFRQRCIPRSLCLSECPLEPPSLTRLCATLKDCPGPLELQLSCEFLSDQSLETLLDCLPQLPQLSLLQLSQTGLSPKSPFLLANTLSLCPRVKKVDLRSLHHATLHFRSNEEEEGVCCGRFTGCSLSQEHVESLCWLLSKCKDLSQVDLSANLLGDSGLRCLLECLPQVPISGLLDLSHNSISQESALYLLETLPSCPRVREASVNLGSEQSFRIHFSREDQAGKTLRLSECSFRPEHVSRLATGLSKSLQLTELTLTQCCLGQKQLAILLSLVGRPAGLFSLRVQEPWADRARVLSLLEVCAQASGSVTEISISETQQQLCVQLEFPRQEENPEAVALRLAHCDLGAHHSLLVGQLMETCARLQQLSLSQVNLCEDDDASSLLLQSLLLSLSELKTFRIQSSQDPGRLLPDLLPFDPHQADLQLCEHRGPRPPGIWSGPLPPLGGAGLV

SEQ ID NO: 27229 - protein, 1336 aa, Homo sapiens
MRGAGGPRGPRGPAKMLLLLALACASPFPEEAPGPGGAGGPGGGLGGARPLNVALVFSGPAYAAEAARLGPAVAAAVRSPGLDVRPVALVLNGSDPRSLVLQLCDLLSGLRVHGVVFEDDSRAPAVAPILDFLSAQTSLPIVAVHGGAALVLTPKEKGSTFLQLGSSTEQQLQVIFEVLEEYDWTSFVAVTTRAPGHRAFLSYIEVLTDGSLVGWEHRGALTLDPGAGEAVLSAQLRSVSAQIRLLFCAREEAEPVFRAAEEAGLTGSGYVWFMVGPQLAGGGGSGAPGEPPLLPGGAPLPAGLFAVRSAGWRDDLARRVAAGVAVVARGAQALLRDYGFLPELGHDCRAQNRTHRGESLHRYFMNITWDNRDYSFNEDGFLVNPSLVVISLTRDRTWEVVGSWEQQTLRLKYPLWSRYGRFLQPVDDTQHLTVATLEERPFVIVEPADPISGTCIRDSVPCRSQLNRTHSPPPDAPRPEKRCCKGFCIDILKRLAHTIGFSYDLYLVTNGKHGKKIDGVWNGMIGEVFYQRADMAIGSLTINEERSEIVDFSVPFVETGISVMVARSNGTVSPSAFLEPYSPAVWVMMFVMCLTVVAVTVFIFEYLSPVGYNRSLATGKRPGGSTFTIGKSIWLLWALVFNNSVPVENPRGTTSKIMVLVWAFFAVIFLASYTANLAAFMIQEEYVDTVSGLSDRKFQRPQEQYPPLKFGTVPNGSTEKNIRSNYPDMHSYMVRYNQPRVEEALTQLKAGKLDAFIYDAAVLNYMARKDEGCKLVTIGSGKVFATTGYGIALHKGSRWKRPIDLALLQFLGDDEIEMLERLWLSGICHNDKIEVMSSKLDIDNMAGVFYMLLVAMGLSLLVFAWEHLVYWRLRHCLGPTHRMDFLLAFSRGMYSCCSAEAAPPPAKPPPPPQPLPSPAYPAPRPAPGPAPFVPRERASVDRWRRTKGAGPPGGAGLADGFHRYYGPIEPQGLGLGLGEARAAPRGAAGRPLSPPAAQPPQKPPPSYFAIVRDKEPAEPPAGAFPGFPSPPAPPAAAATAVGPPLCRLAFEDESPPAPARWPRSDPESQPLLGPGAGGAGGTGGAGGGAPAAPPPCRAAPPPCPYLDLEPSPSDSEDSESLGGASLGGLEPWWFADFPYPYAERLGPPPGRYWSVDKLGGWRAGSWDYLPPRSGPAAWHCRHCASLELLPPPRHLSCSHDGLDGGWWAPPPPPWAAGPLPRRRARCGCPRSHPHRPRASHRTPAAAAPHHHRHRRAAGGWDLPPPAPTSRSLEDLSSCPRAAPARRLTGPSRHARRCPHAAHWGPPLPTASHRRHRGGDLGTRRGSAHFSSLESEV

SEQ ID NO: 27230 - protein, 1531 aa, Homo sapiens; identical to SEQ ID NO: 258

SEQ ID NO: 27231 - protein, 1455 aa, Homo sapiens
MGGACSSFTTSSSPTIYSTSVTDSKAMQVESCSSAVGVSNRGVSEKQLTSNTVQQHPSTPKRHTVLYISPPPEDLLDNSRMSCQDEGCGLESEQSCSMWMEDSPSNFSNMSTSSYNDNTEVPRKSRKRNPKQRPGVKRRDCEESNMDIFDADSAKAPHYVLSQLTTDNKGNSKAGNGTLENQKGTGVKKSPMLCGQYPVKSEGKELKIVVQPETQHRARYLTEGSRGSVKDRTQQGFPTVKLEGHNEPVVLQVFVGNDSGRVKPHGFYQACRVTGRNTTPCKEVDIEGTTVIEVGLDPSNNMTLAVDCVGILKLRNADVEARIGIAGSKKKSTRARLVFRVNIMRKDGSTLTLQTPSSPILCTQPAGVPEILKKSLHSCSVKGEEEVFLIGKNFLKGTKVIFQENVSDENSWKSEAEIDMELFHQNHLIVKVPPYHDQHITLPVSVGIYVVTNAGRSHDVQPFTYTPDPAAAGALNVNVKKEISSPARPCSFEEAMKAMKTTGCNLDKVNIIPNALMTPLIPSSMIKSEDVTPMEVTAEKRSSTIFKTTKSVGSTQQTLENISNIAGNGSFSSPSSSHLPSENEKQQQIQPKAYNPETLTTIQTQDISQPGTFPAVSASSQLPNSDALLQQATQFQTRETQSREILQSDGTVVNLSQLTEASQQQQQSPLQEQAQTLQQQISSNIFPSPNSVSQLQNTIQQLQAGSFTGSTASGSSGSVDLVQQVLEAQQQLSSVLFSAPDGNENVQEQLSADIFQQVSQIQSGVSPGMFSSTEPTVHTRPDNLLPGRAESVHPQSENTLSNQQQQQQQQQQVMESSAAMVMEMQQSICQAAAQIQSELFPSTASANGNLQQSPVYQQTSHMMSALSTNEDMQMQCELFSSPPAVSGNETSTTTTQQVATPGTTMFQTSSSGDGEETGTQAKQIQNSVFQTMVQMQHSGDNQPQVNLFSSTKSMMSVQNSGTQQQGNGLFQQGNEMMSLQSGNFLQQSSHSQAQLFHPQNPIADAQNLSQETQGSLFHSPNPIVHSQTSTTSSEQMQPPMFHSQSTIAVLQGSSVPQDQQSTNIFLSQSPMNNLQTNTVAQEAFFAAPNSISPLQSTSNSEQQAAFQQQAPISHIQTPMLSQEQAQPPQQGLFQPQVALGSLPPNPMPQSQQGTMFQSQHSIVAMQSNSPSQEQQQQQQQQQQQQQQQQQSILFSNQNTMATMASPKQPPPNMIFNPNQNPMANQEQQNQSIFHQQSNMAPMNQEQQPMQFQSQSTVSSLQNPGPTQSESSQTPLFHSSPQIQLVQGSPSSQEQQVTLFLSPASMSALQTSINQQDMQQSPLYSPQNNMPGIQGATSSPQPQATLFHNTAGGTMNQLQNSPGSSQQTSGMFLFGIQNNCSQLLTSGPATLPDQLMAISQPGQPQNEGQPPVTTLLSQQMPENSPLASSINTNQNIEKIDLLVSLQNQGNNLTGSF

SEQ ID NO: 27232 - protein, 99 aa, Homo sapiens
MPSDFISLLSADLDLESPKSLYSRDSLKLHPSQNFHRAGLLEESVYDLLPKELQLPPSRETSVASMSQTSGGEAGSPPPAVVAAGFASEAGSVCIKNDL

SEQ ID NO: 27233 - protein, 1548 aa, Homo sapiens
MPSDFISLLSADLDLESPKSLYSRDSLKLHPSQNFHRAGLLEESVYDLLPKELQLPPSRETSVASMSQTSGGEAGSPPPAVVAADASSAPSSSSMGGACSSFTTSSSPTIYSTSVTDSKAMQVESCSSAVGVSNRGVSEKQLTSNTVQQHPSTPKRHTVLYISPPPEDLLDNSRMSCQDEGCGLESEQSCSMWMEDSPSNFSNMSTSSYNDNTEVPRKSRKRNPKQRPGVKRRDCEESNMDIFDADSAKAPHYVLSQLTTDNKGNSKAGNGTLENQKGTGVKKSPMLCGQYPVKSEGKELKIVVQPETQHRARYLTEGSRGSVKDRTQQGFPTVKLEGHNEPVVLQVFVGNDSGRVKPHGFYQACRVTGRNTTPCKEVDIEGTTVIEVGLDPSNNMTLAVDCVGILKLRNADVEARIGIAGSKKKSTRARLVFRVNIMRKDGSTLTLQTPSSPILCTQPAGVPEILKKSLHSCSVKGEEEVFLIGKNFLKGTKVIFQENVSDENSWKSEAEIDMELFHQNHLIVKVPPYHDQHITLPVSVGIYVVTNAGRSHDVQPFTYTPDPAAGALNVNVKKEISSPARPCSFEEAMKAMKTTGCNLDKVNIIPNALMTPLIPSSMIKSEDVTPMEVTAEKRSSTIFKTTKSVGSTQQTLENISNIAGNGSFSSPSSSHLPSENEKQQQIQPKAYNPETLTTIQTQDISQPGTFPAVSASSQLPNSDALLQQATQFQTRETQSREILQSDGTVVNLSQLTEASQQQQQSPLQEQAQTLQQQISSNIFPSPNSVSQLQNTIQQLQAGSFTGSTASGSSGSVDLVQQVLEAQQQLSSVLFSAPDGNENVQEQLSADIFQQVSQIQSGVSPGMFSSTEPTVHTRPDNLLPGRAESVHPQSENTLSNQQQQQQQQQQVMESSAAMVMEMQQSICQAAAQIQSELFPSTASANGNLQQSPVYQQTSHMMSALSTNEDMQMQCELFSSPPAVSGNETSTTTTQQVATPGTTMFQTSSSGDGEETGTQAKQIQNSVFQTMVQMQHSGDNQPQVNLFSSTKSMMSVQNSGTQQQGNGLFQQGNEMMSLQSGNFLQQSSHSQAQLFHPQNPIADAQNLSQETQGSLFHSPNPIVHSQTSTTSSEQMQPPMFHSQSTIAVLQGSSVPQDQQSTNIFLSQSPMNNLQTNTVAQEAFFAAPNSISPLQSTSNSEQQAAFQQQAPISHIQTPMLSQEQAQPPQQGLFQPQVALGSLPPNPMPQSQQGTMFQSQHSIVAMQSNSPSQEQQQQQQQQQQQQQQQQQSILFSNQNTMATMASPKQPPPNMIFNPNQNPMANQEQQNQSIFHQQSNMAPMNQEQQPMQFQSQSTVSSLQNPGPTQSESSQTPLFHSSPQIQLVQGSPSSQEQQVTLFLSPASMSALQTSINQQDMQQSPLYSPQNNMPGIQGATSSPQPQATLFHNTAGGTMNQLQNSPGSSQQTSGMFLFGIQNNCSQLLTSGPATLPDQLMAISQPGQPQNEGQPPVTTLLSQQMPENSPLASSINTNQNIEKIDLLVSLQNQGNNLTGSF

SEQ ID NO: 27234 - protein, 1549 aa, Homo sapiens
MPSDFISLLSADLDLESPKSLYSRDSLKLHPSQNFHRAGLLEESVYDLLPKELQLPPSRETSVASMSQTSGGEAGSPPPAVVAADASSAPSSSSMGGACSSFTTSSSPTIYSTSVTDSKAMQVESCSSAVGVSNRGVSEKQLTSNTVQQHPSTPKRHTVLYISPPPEDLLDNSRMSCQDEGCGLESEQSCSMWMEDSPSNFSNMSTSSYNDNTEVPRKSRKRNPKQRPGVKRRDCEESNMDIFDADSAKAPHYVLSQLTTDNKGNSKAGNGTLENQKGTGVKKSPMLCGQYPVKSEGKELKIVVQPETQHRARYLTEGSRGSVKDRTQQGFPTVKLEGHNEPVVLQVFVGNDSGRVKPHGFYQACRVTGRNTTPCKEVDIEGTTVIEVGLDPSNNMTLAVDCVGILKLRNADVEARIGIAGSKKKSTRARLVFRVNIMRKDGSTLTLQTPSSPILCTQPAGVPEILKKSLHSCSVKGEEEVFLIGKNFLKGTKVIFQENVSDENSWKSEAEIDMELFHQNHLIVKVPPYHDQHITLPVSVGIYVVTNAGRSHDVQPFTYTPDPAAAGALNVNVKKEISSPARPCSFEEAMKAMKTTGCNLDKVNIIPNALMTPLIPSSMIKSEDVTPMEVTAEKRSSTIFKTTKSVGSTQQTLENISNIAGNGSFSSPSSSHLPSENEKQQQIQPKAYNPETLTTIQTQDISQPGTFPAVSASSQLPNSDALLQQATQFQTRETQSREILQSDGTVVNLSQLTEASQQQQQSPLQEQAQTLQQQISSNIFPSPNSVSQLQNTIQQLQAGSFTGSTASGSSGSVDLVQQVLEAQQQLSSVLFSAPDGNENVQEQLSADIFQQVSQIQSGVSPGMFSSTEPTVHTRPDNLLPGRAESVHPQSENTLSNQQQQQQQQQQVMESSAAMVMEMQQSICQAAAQIQSELFPSTASANGNLQQSPVYQQTSHMMSALSTNEDMQMQCELFSSPPAVSGNETSTTTTQQVATPGTTMFQTSSSGDGEETGTQAKQIQNSVFQTMVQMQHSGDNQPQVNLFSSTKSMMSVQNSGTQQQGNGLFQQGNEMMSLQSGNFLQQSSHSQAQLFHPQNPIADAQNLSQETQGSLFHSPNPIVHSQTSTTSSEQMQPPMFHSQSTIAVLQGSSVPQDQQSTNIFLSQSPMNNLQTNTVAQEAFFAAPNSISPLQSTSNSEQQAAFQQQAPISHIQTPMLSQEQAQPPQQGLFQPQVALGSLPPNPMPQSQQGTMFQSQHSIVAMQSNSPSQEQQQQQQQQQQQQQQQQQSILFSNQNTMATMASPKQPPPNMIFNPNQNPMANQEQQNQSIFHQQSNMAPMNQEQQPMQFQSQSTVSSLQNPGPTQSESSQTPLFHSSPQIQLVQGSPSSQEQQVTLFLSPASMSALQTSINQQDMQQSPLYSPQNNMPGIQGATSSPQPQATLFHNTAGGTMNQLQNSPGSSQQTSGMFLFGIQNNCSQLLTSGPATLPDQLMAISQPGQPQNEGQPPVTTLLSQQMPENSPLASSINTNQNIEKIDLLVSLQNQGNNLTGSF

SEQ ID NO: 27235 - protein, 83 aa, Homo sapiens
MSFFQLLMKRKELIPLVVFMTVAAGGASSFAVYSLWKTDVILDRKKNPEPWETVDPTVPQKLITINQQWKPIEELQNVQRVTK

SEQ ID NO: 27236 - protein, 179 aa, Homo sapiens
MPRVVCWHTLKSLNGYKNLSSGAETREGLRSSSPVDLPLRPRKQATAAGQRKLLSLQLLLCACTSVTDLTYWGPAGHGATAPHRSLLAIHLHLVPASSAAMKATGPHNAQTQVNPQGHAPSAEDPTGTWTVSGPCKDHPHPFLSQSNPPTRISSALPLKTDSALEQTPQQLPSLHLSQG

SEQ ID NO: 27237 - protein, 79 aa, Homo sapiens
MKATGPHNAQTQVNPQGHAPSAEDPTGTWTVSGPCKDHPHPFLSQSNPPTRISSALPLKTDSALEQTPQQLPSLHLSQG

SEQ ID NO: 27238 - protein, 892 aa, Homo sapiens
MDQPEAPCSSTGPRLAVARELLLAALEELSQEQLKRFRHKLRDVGPDGRSIPWGRLERADAVDLAEQLAQFYGPEPALEVARKTLKRADARDVAAQLQERRLQRLGLGSGTLLSVSEYKKKYREHVLQLHARVKERNARSVKITKRFTKLLIAPESAAPEEAMGPAEEPEPGRARRSDTHTFNRLFRRDEEGRRPLTVVLQGPAGIGKTMAAKKILYDWAAGKLYQGQVDFAFFMPCGELLERPGTRSLADLILDQCPDRGAPVPQMLAQPQRLLFILDGADELPALGGPEAAPCTDPFEAASGARVLGGLLSKALLPTALLLVTTRAAAPGRLQGRLCSPQCAEVRGFSDKDKKKYFYKYFRDERRAERAYRFVKENETLFALCFVPFVCWIVCTVLRQQLELGRDLSRTSKTTTSVYLLFITSVLSSAPVADGPRLQGDLRNLCRLAREGVLGRRAQFAEKELEQLELRGSKVQTLFLSKKELPGVLETEVTYQFIDQSFQEFLAALSYLLEDGGVPRTAAGGVGTLLRGDAQPHSHLVLTTRFLFGLLSAERMRDIERHFGCMVSERVKQEALRWVQGQGQGCPGVAPEVTEGAKGLEDTEEPEEEEEGEEPNYPLELLYCLYETQEDAFVRQALCRFPELALQRVRFCRMDVAVLSYCVRCCPAGQALRLISCRLVAAQEKKKKSLGKRLQASLGGGSSSQGTTKQLPASLLHPLFQAMTDPLCHLSSLTLSHCKLPDAVCRDLSEALRAAPALTELGLLHNRLSEAGLRMLSEGLAWPQCRVQTVRVQLPDPQRGLQYLVGMLRQSPALTTLDLSGCQLPAPMVTYLCAVLQHQGCGLQTLSLASVELSEQSLQELQAVKRAKPDLVITHPALDGHPQPPKELISTF

SEQ ID NO: 27239 - protein, 891 aa, Homo sapiens
MDQPEAPCSSTGPRLAVARELLLAALEELSQEQLKRFRHKLRDVGPDGRSIPWGRLERADAVDLAEQLAQFYGPEPALEVARKTLKRADARDVAAQLQERRLQRLGLGSGTLLSVSEYKKKYREHVLQLHARVKERNARSVKITKRFTKLLIAPESAAPEEAMGPAEEPEPGRARRSDTHTFNRLFRRDEEGRRPLTVVLQGPAGIGKTMAAKKILYDWAAGKLYQGQVDFAFFMPCGELLERPGTRSLADLILDQCPDRGAPVPQMLAQPQRLLFILDGADELPALGGPEAAPCTDPFEAASGARVLGGLLSKALLPTALLLVTTRAAAPGRLQGRLCSPQCAEVRGFSDKDKKKYFYKYFRDERRAERAYRFVKENETLFALCFVPFVCWIVCTVLRQQLELGRDLSRTSKTTTSVYLLFITSVLSSAPVADGPRLQGDLRNLCRLAREGVLGRRAQFAEKELEQLELRGSKVQTLFLSKKELPGVLETEVTYQFIDQSFQEFLAALSYLLEDGGVPRTAAGGVGTLLRGDAQPHSHLVLTTRFLFGLLSAERMRDIERHFGCMVSERVKQEALRWVQGQGQGCPGVAPEVTEGAKGLEDTEEPEEEEEGEEPNYPLELLYCLYETQEDAFVRQALCRFPELALQRVRFCRMDVAVLSYCVRCCPAGQALRLISCRLVAAQEKKKKSLGKRLQASLGGGSSQGTTKQLPASLLHPLFQAMTDPLCHLSSLTLSHCKLPDAVCRDLSEALRAAPALTELGLLHNRLSEAGLRMLSEGLAWPQCRVQTVRVQLPDPQRGLQYLVGMLRQSPALTTLDLSGCQLPAPMVTYLCAVLQHQGCGLQTLSLASVELSEQSLQELQAVKRAKPDLVITHPALDGHPQPPKELISTF

SEQ ID NO: 27240 - protein, 307 aa, Homo sapiens
MEADKDDTQQILKEHSPDEFIKDEQNKGLIDEITKKNIQLKKEIQKLETELQEATKEFQIKEDIPETKMKFLSVETPENDSQLSNISCSFQVSSKVPYEIQKGQALITFEKEEVAQNVVSMSKHHVQIKDVNLEVTAKPVPLNSGVRFQVYVEVSKMKINVTEIPDTLREDQMRDKLELSFSKSRNGGGEVDRVDYDRQSGSAVITFVEIGVADKILKKKEYPLYINQTCHRVTVSPYTEIHLKKYQIFSGTSKRTVLLTGMEGIQMDEEIVEDLINIHFQRAKNGGGEVDVVKCSLGQPHIAYFEE

SEQ ID NO: 27241 - protein, 1026 aa, Homo sapiens
MMSFGGADALLGAPFAPLHGGGSLHYALARKGGAGGTRSAAGSSSGFHSWTRTSVSSVSASPSRFRGAGAASSTDSLDTLSNGPEGCMVAVATSRSEKEQLQALNDRFAGYIDKVRQLEAHNRSLEGEAAALRQQQAGRSAMGELYEREVREMRGAVLRLGAARGQLRLEQEHLLEDIAHVRQRLDDEARQREEAEAAARALARFAQEAEAARVDLQKKAQALQEECGYLRRHHQEEVGELLGQIQGSGAAQAQMQAETRDALKCDVTSALREIRAQLEGHAVQSTLQSEEWFRVRLDRLSEAAKVNTDAMRSAQEEITEYRRQLQARTTELEALKSTKDSLERQRSELEDRHQADIASYQEAIQQLDAELRNTKWEMAAQLREYQDLLNVKMALDIEIAAYRKLLEGEECRIGFGPIPFSLPEGLPKIPSVSTHIKVKSEEKIKVVEKSEKETVIVEEQTEETQVTEEVTEEEEKEAKEEEGKEEEGGEEEEAEGGEEETKSPPAEEAASPEKEAKSPVKEEAKSPAEAKSPEKEEAKSPAEVKSPEKAKSPAKEEAKSPPEAKSPEKEEAKSPAEVKSPEKAKSPAKEEAKSPAEAKSPEKAKSPVKEEAKSPAEAKSPVKEEAKSPAEVKSPEKAKSPTKEEAKSPEKAKSPEKAKSPEKEEAKSPEKAKSPVKAEAKSPEKAKSPVKAEAKSPEKAKSPVKEEAKSPEKAKSPVKEEAKSPEKAKSPVKEEAKTPEKAKSPVKEEAKSPEKAKSPEKAKTLDVKSPEAKTPAKEEARSPADKFPEKAKSPVKEEVKSPEKAKSPLKEDAKAPEKEIPKKEEVKSPVKEEEKPQEVKVKEPPKKAEEEKAPATPKTEEKKDSKKEEAPKKEAPKPKVEEKKEPAVEKPKESKVEAKKEEAEDKKKVPTPEKEAPAKVEVKEDAKPKEKTEVAKKEPDDAKAKEPSKPAEKKEAAPEKKDTKEEKAKKPEEKPKTEAKAKEDDKTLSKEPSKPKAEKAEKSSSTDQKDSKPPEKATEDKAAKGK

SEQ ID NO: 27242 - protein, 963 aa, Homo sapiens
MMSFGGADALLGAPFAPLHGGGSLHYALARKGGAGGTRSAAGSSSGFHSWTRTSVSSVSASPSRFRGAGAASSTDSLDTLSNGPEGCMVAVATSRSEKEQLQALNDRFAGYIDKVRQLEAHNRSLEGEAAALRQQQAGRSAMGELYEREVREMRGAVLRLGAARGQLRLEQEHLLEDIAHVRQRLDDEARQREEAEAAARALARFAQEAEAARVDLQKKAQALQEECGYLRRHHQEEVGELLGQIQGSGAAQAQMQAETRDALKCDVTSALREIRAQLEGHAVQSTLQSEEWFRVRLDRLSEAAKVNTDAMRSAQEEITEYRRQLQARTTELEALKSTKDSLERQRSELEDRHQADIASYQEAIQQLDAELRNTKWEMAAQLREYQDLLNVKMALDIEIAAYRKLLEGEECRIGFGPIPFSLPEGLPKIPSVSTHIKVKSEEKIKVVEKSEKETVIVEEQTEETQVTEEVTEEEEKEAKEEEGKEEEGGEEEEAEGGEEETKSPPAEEAASPEKEAKSPVKEEAKSPAEAKSPEKEEAKSPAEVKSPEKAKSPAKEEAKSPPEAKSPEKEEAKSPAEVKSPEKAKSPAKEEAKSPAEAKSPEKAKSPVKEEAKSPAEAKSPVKEEAKSPAEVKSPEKAKSPTKEEAKSPEKAKSPEKAKSPEKEEAKSPEKAKSPVKAEAKSPEKAKSPVKAEAKSPEKAKSPVKEEAKSPEKAKSPVKEEAKSPEKAKSPVKEEAKTPEKAKSPVKEEAKAPEKEIPKKEEVKSPVKEEEKPQEVKVKEPPKKAEEEKAPATPKTEEKKDSKKEEAPKKEAPKPKVEEKKEPAVEKPKESKVEAKKEEAEDKKKVPTPEKEAPAKVEVKEDAKPKEKTEVAKKEPDDAKAKEPSKPAEKKEAAPEKKDTKEEKAKKPEEKPKTEAKAKEDDKTLSKEPSKPKAEKAEKSSSTDQKDSKPPEKATEDKAAKGK

SEQ ID NO: 27243 - protein, 201 aa, Homo sapiens
MKVHMLVGVLVMVGFTVGKVPVPDIRTCHFCLVEDPSVGCISGSEKCTISSSSLCMVITIYYDVKVRFIVRGCGQYISYRCQEKRNTYFAEYWYQAQCCQYDYCNSWSSPQLQSSLPEPHDRPLALPLSDSQIQWFYQALNLSLPLPNFHAGTEPDGLDPMVTLSLNLGLSFAELRRMYLFLNSSGLLVLPQAGLLTPHPS

SEQ ID NO: 27244 - protein, 146 aa, Homo sapiens
MVITIYYDVKVRFIVRGCGQYISYRCQEKRNTYFAEYWYQAQCCQYDYCNSWSSPQLQSSLPEPHDRPLALPLSDSQIQWFYQALNLSLPLPNFHAGTEPDGLDPMVTLSLNLGLSFAELRRMYLFLNSSGLLVLPQAGLLTPHPS

SEQ ID NO: 27245 - protein, 125 aa, Homo sapiens
MKALMLLTLSVLLCWVSADIRCHSCYKVPVLGCVDRQSCRLEPGQQCLTTHAYLGKMWVFSNLRCGTPEEPCQEAFNQTNRKLGLTYNTTCCNKDNCNSAGPRPTPALGLVFLTSLAGLGLWLLH

SEQ ID NO: 27246 - protein, 975 aa, Homo sapiens
MRWGHHLPRASWGSGFRRALQRPDDRIPFLIHWSWPLQGERPFGPPRAFIRHHGSSVDSAPPPGRHGRLFPSASATEAIQRHRRNLAEWFSRLPREERQFGPTFALDTVHVDPVIRESTPDELLRPPAELALEHQPPQAGLPPLALSQLFNPDACGRRVQTVVLYGTVGTGKSTLVRKMVLDWCYGRLPAFELLIPFSCEDLSSLGPAPASLCQLVAQRYTPLKEVLPLMAAAGSHLLFVLHGLEHLNLDFRLAGTGLCSDPEEPQEPAAIIVNLLRKYMLPQASILVTTRPSAIGRIPSKYVGRYGEICGFSDTNLQKLYFQLRLNQPYCGYAVGGSGVSATPAQRDHLVQMLSRNLEGHHQIAAACFLPSYCWLVCATLHFLHAPTPAGQTLTSIYTSFLRLNFSGETLDSTDPSNLSLMAYAARTMGKLAYEGVSSRKTYFSEEDVCGCLEAGIRTEEEFQLLHIFRRDALRFFLAPCVEPGRAGTFVFTVPAMQEYLAALYIVLGLRKTTLQKVGKEVAELVGRVGEDVSLVLGIMAKLLPLRALPLLFNLIKVVPRVFGRMVGKSREAVAQAMVLEMFREEDYYNDDVLDQMGASILGVEGPRRHPDEPPEDEVFELFPMFMGGLLSAHNRAVLAQLGCPIKNLDALENAQAIKKKLGKLGRQVLPPSELLDHLFFHYEFQNQRFSAEVLSSLRQLNLAGVRMTPVKCTVVAAVLGSGRHALDEVNLASCQLDPAGLRTLLPVFLRARKLGLQLNSLGPEACKDLRDLLLHDQCQITTLRLSNNPLTAAGVAVLMEGLAGNTSVTHLSLLHTGLGDEGLELLAAQLDRNRQLQELNVAYNGAGDTAALALARAAREHPSLELLHLYFNELSSEGRQVLRDLGGAAEGGARVVVSLTEGTAVSEYWSVILSEVQRNLNSWDRARVQRHLELLLRDLEDSRGATLNPWRKAQLLRVEGEVRALLEQLGSSGS

SEQ ID NO: 27247 - protein, 921 aa, Homo sapiens
MRWGHHLPRASWGSGFRRALQRPDDRIPFLIHWSWPLQGERPFGPPRAFIRHHGSSVDSAPPPGRHGRLFPSASATEAIQRHRRNLAEWFSRLPREERQFGPTFALDTVHVDPVIRESTPDELLRPPAELALEHQPPQAGLPPLALSQLFNPDACGRRVQTVVLYGTVGTGKSTLVRKMVLDWCYGRLPAFELLIPFSCEDLSSLGPAPASLCQLVAQRYTPLKEVLPLMAAAGSHLLFVLHGLEHLNLDFRLAGTGLCSDPEEPQEPAAIIVNLLRKYMLPQASILVTTRPSAIGRIPSKYVGRYGEICGFSDTNLQKLYFQLRLNQPYCGYAVGGSGVSATPAQRDHLVQMLSRNLEGHHQIAAACFLPSYCWLVCATLHFLHAPTPAGQTLTSIYTSFLRLNFSGETLDSTDPSNLSLMAYAARTMGKLAYEGVSSRKTYFSEEDVCGCLEAGIRTEEEFQLLHIFRRDALRFFLAPCVEPGRAGTFVFTVPAMQEYLAALYIVLGLRKTTLQKVGKEVAELVGRVGEDVSLVLGIMAKLLPLRALPLLFNLIKVVPRVFGRMVGKSREAVAQAMVLEMFREEDYYNDDVLDQMGASILGVEGPRRHPDEPPEDEVFELFPMFMGGLLSAHNRAVLAQLGCPIKNLDALENAQAIKKKLGKLGRQVLPPSELLDHLFFHYEFQNQRFSAEVLSSLRQLNLAGVRMTPVKCTVVAAVLGSGRHALDEVNLASCQLDPAGLRTLLPVFLRARKLGLQLNSLGPEACKDLRDLLLHDQCQITTLRLSNNPLTAAGVAVLMEGLAGNTSVTHLSLLHTGLGDEGLELLAAQLDRNRQLQELNVAYNGAGDTAALALARAAREHPSLELLQGVAIQMCWKLPLLPYAHLWTPRMPSHWCFLLILMPPLPQWYDGLVAPRGRCT

SEQ ID NO: 27248 - protein, 151 aa, Homo sapiens
MRFLAATFLLLALSTAAQAEPVQFKDCGSVDGVIKEVNVSPCPTQPCQLSKGQSYSVNVTFTSNIQSKSSKAVVHGILMGVPVPFPIPEPDGCKSGINCPIQKDKTYSYLNKLPVKSEYPSIKLVVEWQLQDDKNQSLFCWEIPVQIVSHL

SEQ ID NO: 27249 - protein, 125 aa, Homo sapiens
MRFLAATFLLLALSTAAQAEPVQFKDCGSVDGVIKEVNVSPCPTQPCQLSKGQSYSVNVTFTSNIQSKSSKAVVHGILMGVPVPFPIPEPDGCKSGINCPIQKDKTYSYLNKLPVKSEYPSVSHL

SEQ ID NO: 27250 - protein, 307 aa, Homo sapiens
MTETTKTHVILLACGSFNPITKGHIQMFERARDYLHKTGRFIVIGGIVSPVHDSYGKQGLVSSRHRLIMCQLAVQNSDWIRVDPWECYQDTWQTTCSVLEHHRDLMKRVTGCILSNVNTPSMTPVIGQPQNETPQPIYQNSNVATKPTAAKILGKVGESLSRICCVRPPVERFTFVDENANLGTVMRYEEIELRILLLCGSDLLESFCIPGLWNEADMEVIVGDFGIVVVPRDAADTDRIMNHSSILRKYKNNIMVVKDDINHPMSVVSSTKSRLALQHGDGHVVDYLSQPVIDYILKSQLYINASG

SEQ ID NO: 27251 - protein, 302 aa, Homo sapiens
MEIQELEEIQACQGLWEVFVTLSERARDYLHKTGRFIVIGGIVSPVHDSYGKQGLVSSRHRLIMCQLAVQNSDWIRVDPWECYQDTWQTTCSVLEHHRDLMKRVTGCILSNVNTPSMTPVIGQPQNETPQPIYQNSNVATKPTAAKILGKVGESLSRICCVRPPVERFTFVDENANLGTVMRYEEIELRILLLCGSDLLESFCIPGLWNEADMEVIVGDFGIVVVPRDAADTDRIMNHSSILRKYKNNIMVVKDDINHPMSVVSSTKSRLALQHGDGHVVDYLSQPVIDYILKSQLYINASG

SEQ ID NO: 27252 - protein, 509 aa, Homo sapiens
MYSPLCLTQDEFHPFIEALLPHVRAFAYTWFNLQARKRKYFKKHEKRMSKEEERAVKDELLSEKPEVKQKWASRLLAKLRKDIRPEYREDFVLTVTGKKPPCCVLSNPDQKGKMRRIDCLRQADKVWRLDLVMVILFKGIPLESTDGERLVKSPQCSNPGLCVQPHHIGVSVKELDLYLAYFVHAADSSQSESPSQPSDADIKDQPENGHLGFQDSFVTSGVFSVTELVRVSQTPIAAGTGPNFSLSDLESSSYYSMSPGAMRRSLPSTSSTSSTKRLKSVEDEMDSPGEEPFYTGQGRSPGSGSQSSGWHEVEPGMPSPTTLKKSEKSGFSSPSPSQTSSLGTAFTQHHRPVITGPRASPHATPSTLHFPTSPIIQQPGPYFSHPAIRYHPQETLKEFVQLVCPDAGQQAGQVGFLNPNGSSQGKVHNPFLPTPMLPPPPPPPMARPVPLPVPDTKPPTTSTEGGAASPTSPTYSTPSTSPANRFVSVGPRDPSFVNIPQQTQSWYLG

SEQ ID NO: 27253 - protein, 498 aa, Homo sapiens
MYSPLCLTQDEFHPFIEALLPHVRAFAYTWFNLQARKRKYFKKHEKRMSKEEERAVKDELLSEKPEVKQKWASRLLAKLRKDIRPEYREDFVLTVTGKKPPCCVLSNPDQKGKMRRIDCLRQADKVWRLDLVMVILFKGIPLESTDGERLVKSPQCSNPGLCVQPHHIGVSVKELDLYLAYFVHAADSSQSESPSQPSDADIKDQPENGHLGFQDSFVTSGVFSVTELVRVSQTPIAAGTGPNFSLSDLESSSYYSMSPGAMRRSLPSTSSTSSTKRLKSVEDEMDSPGEEPFYTGQGRSPGSGSQSSGWHEVEPGMPSPTTLKKSEKSGFSSPSPSQTSSLGTAFTQHHRPVITGPRASPHATPSTLHFPTSPIIQQPGPYFSHPAIRYHPQETLKEFVQLVCPDAGQQAGQVGFLNPNGSSQGKVHNPFLPTPMLPPPPPPPMARPVPLPVPDTKPPTTSTEGGAASPTSPILVPGIKVAASHHPPDRPPDPFSTL

SEQ ID NO: 27254 - protein, 501 aa, Homo sapiens
MDEFHPFIEALLPHVRAFAYTWFNLQARKRKYFKKHEKRMSKEEERAVKDELLSEKPEVKQKWASRLLAKLRKDIRPEYREDFVLTVTGKKPPCCVLSNPDQKGKMRRIDCLRQADKVWRLDLVMVILFKGIPLESTDGERLVKSPQCSNPGLCVQPHHIGVSVKELDLYLAYFVHAADSSQSESPSQPSDADIKDQPENGHLGFQDSFVTSGVFSVTELVRVSQTPIAAGTGPNFSLSDLESSSYYSMSPGAMRRSLPSTSSTSSTKRLKSVEDEMDSPGEEPFYTGQGRSPGSGSQSSGWHEVEPGMPSPTTLKKSEKSGFSSPSPSQTSSLGTAFTQHHRPVITGPRASPHATPSTLHFPTSPIIQQPGPYFSHPAIRYHPQETLKEFVQLVCPDAGQQAGQVGFLNPNGSSQGKVHNPFLPTPMLPPPPPPPMARPVPLPVPDTKPPTTSTEGGAASPTSPTYSTPSTSPANRFVSVGPRDPSFVNIPQQTQSWYLG

SEQ ID NO: 27255 - protein, 554 aa, Homo sapiens
MQMCRPASSSVLYVPTRWPGGCGATWQSCPSPPPRRTRIPQRPAVMYSPLCLTQDEFHPFIEALLPHVRAFAYTWFNLQARKRKYFKKHEKRMSKEEERAVKDELLSEKPEVKQKWASRLLAKLRKDIRPEYREDFVLTVTGKKPPCCVLSNPDQKGKMRRIDCLRQADKVWRLDLVMVILFKGIPLESTDGERLVKSPQCSNPGLCVQPHHIGVSVKELDLYLAYFVHAADSSQSESPSQPSDADIKDQPENGHLGFQDSFVTSGVFSVTELVRVSQTPIAAGTGPNFSLSDLESSSYYSMSPGAMRRSLPSTSSTSSTKRLKSVEDEMDSPGEEPFYTGQGRSPGSGSQSSGWHEVEPGMPSPTTLKKSEKSGFSSPSPSQTSSLGTAFTQHHRPVITGPRASPHATPSTLHFPTSPIIQQPGPYFSHPAIRYHPQETLKEFVQLVCPDAGQQAGQVGFLNPNGSSQGKVHNPFLPTPMLPPPPPPPMARPVPLPVPDTKPPTTSTEGGAASPTSPTYSTPSTSPANRFVSVGPRDPSFVNIPQQTQSWYLG

SEQ ID NO: 27256 - protein, 543 aa, Homo sapiens
MAKGEGAESGSAAGLLPTSILQSTERPAQVKKEPKKKKQQLSVCNKLCYALGGAPYQVTGCALGFFLQIYLLDVAQKDEEVVFCFSSFQVGPFSASIILFVGRAWDAITDPLVGLCISKSPWTCLGRLMPWIIFSTPLAVIAYFLIWFVPDFPHGQTYWYLLFYCLFETMVTCFHVPYSALTMFISTEQTERDSATAYRMTVEVLGTVLGTAIQGQIVGQADTPCFQDLNSSTVASQSANHTHGTTSHRETQKAYLLAAGVIVCIYIICAVILILGVREQREPYEAQQSEPIAYFRGLRLVMSHGPYIKLITGFLFTSLAFMLVEGNFVLFCTYTLGFRNEFQNLLLAIMLSATLTIPIWQWFLTRFGKKTAVYVGISSAVPFLILVALMESNLIITYAVAVAAGISVAAAFLLPWSMLPDVIDDFHLKQPHFHGTEPIFFSFYVFFTKFASGVSLGISTLSLDFAGYQTRGCSQPERVKFTLNMLVTMAPIVLILLGLLLFKMYPIDEERRRQNKKALQALRDEASSSGCSETDSTELASIL

SEQ ID NO: 27257 - protein, 530 aa, Homo sapiens
MAKGEGAESGSAAGLLPTSILQSTERPAQVKKEPKKKKQQLSVCNKLCYALGGAPYQVTGCALGFFLQIYLLDVAQVGPFSASIILFVGRAWDAITDPLVGLCISKSPWTCLGRLMPWIIFSTPLAVIAYFLIWFVPDFPHGQTYWYLLFYCLFETMVTCFHVPYSALTMFISTEQTERDSATAYRMTVEVLGTVLGTAIQGQIVGQADTPCFQDLNSSTVASQSANHTHGTTSHRETQKAYLLAAGVIVCIYIICAVILILGVREQREPYEAQQSEPIAYFRGLRLVMSHGPYIKLITGFLFTSLAFMLVEGNFVLFCTYTLGFRNEFQNLLLAIMLSATLTIPIWQWFLTRFGKKTAVYVGISSAVPFLILVALMESNLIITYAVAVAAGISVAAAFLLPWSMLPDVIDDFHLKQPHFHGTEPIFFSFYVFFTKFASGVSLGISTLSLDFAGYQTRGCSQPERVKFTLNMLVTMAPIVLILLGLLLFKMYPIDEERRRQNKKALQALRDEASSSGCSETDSTELASIL

SEQ ID NO: 27258 - protein, 458 aa, Homo sapiens
MWLRWALSLPPSSCLWAEPGMPSQTPWWASASANPPGPAWVALCPGSSSPRPWPSLPTSSSGSCPTSHTARPIGTCFSIASLKQWSRVSMFPTRLSPCSSATEQTERDSATAYRMTVEVLGTVLGTAIQGQIVGQADTPCFQDLNSSTVASQSANHTHGTTSHRETQKAYLLAAGVIVCIYIICAVILILGVREQREPYEAQQSEPIAYFRGLRLVMSHGPYIKLITGFLFTSLAFMLVEGNFVLFCTYTLGFRNEFQNLLLAIMLSATLTIPIWQWFLTRFGKKTAVYVGISSAVPFLILVALMESNLIITYAVAVAAGISVAAAFLLPWSMLPDVIDDFHLKQPHFHGTEPIFFSFYVFFTKFASGVSLGISTLSLDFAGYQTRGCSQPERVKFTLNMLVTMAPIVLILLGLLLFKMYPIDEERRRQNKKALQALRDEASSSGCSETDSTELASIL

SEQ ID NO: 27259 - protein, 252 aa, Homo sapiens
MKSRIPVVLLACGSFNPITNMHLRMFEVARDHLHQTGMYQVIQGIISPVNDTYGKKDLAASHHRVAMARLALQTSDWIRVDPWESEQAQWMETVKVLRHHHSKLLRSPPQMEGPDHGKALFSTPAAVPELKLLCGADVLKTFQTPNLWKDAHIQEIVEKFGLVCVGRVGHDPKGYIAESPILRMHQHNIHLAKEPVQNEISATYIRRALGQGQSVKYLIPDAVITYIKDHGLYTKGSTWKGKSTQSTEGKTS

SEQ ID NO: 27260 - protein, 215 aa, Homo sapiens
MYQVIQGIISPVNDTYGKKDLAASHHRVAMARLALQTSDWIRVDPWESEQAQWMETVKVLRHHHSKLLRSPPQMEGPDHGKALFSTPAAVPELKLLCGADVLKTFQTPNLWKDAHIQEIVEKFGLVCVGRVGHDPKGYIAESPILRMHQHNIHLAKEPVQNEISATYIRRALGQGQSVKYLIPDAVITYIKDHGLYTKGSTWKGKSTQSTEGKTS

SEQ ID NO: 27261 - protein, 163 aa, Homo sapiens
MKSRIPVVLLACGSFNPITNMHLRMFEVARDHLHQTAVPELKLLCGADVLKTFQTPNLWKDAHIQEIVEKFGLVCVGRVGHDPKGYIAESPILRMHQHNIHLAKEPVQNEISATYIRRALGQGQSVKYLIPDAVITYIKDHGLYTKGSTWKGKSTQSTEGKTS

SEQ ID NO: 27262 - protein, 420 aa, Homo sapiens
MMYSPICLTQDEFHPFIEALLPHVRAIAYTWFNLQARKRKYFKKHEKRMSKDEERAVKDELLSEKPEIKQKWASRLLAKLRKDIRQEYREDFVLTVTGKKHPCCVLSNPDQKGKIRRIDCLRQADKVWRLDLVMVILFKGIPLESTDGERLMKSPHCTNPALCVQPHHITVSVKELDLFLAYYVQEQDSGQSGSPSHNDPAKNPPGYLEDSFVKSGVFNVSELVRVSRTPITQGTGVNFPIGEIPSQPYYHDMNSGVNLQRSLSSPPSSKRPKTISIDENMEPSPTGDFYPSPSSPAAGSRTWHERDQDMSSPTTMKKPEKPLFSSASPQDSSPRLSTFPQHHHPGIPGVAHSVISTRTPPPPSPLPFPTQAILPPAPSSYFSHPTIRYPPHLNPQDTLKNYVPSYDPSSPQTSQSWYLG

SEQ ID NO: 27263 - protein, 188 aa, Homo sapiens
MMYSPICLTQDEFHPFIEALLPHVRAIAYTWFNLQARKRKYFKKHEKRMSKDEERAVKDELLSEKPEIKQKWASRLLAKLRKDIRQEYREDFVLTVTGKKHPCCVLSNPDQKGKIRRIDCLRQADKVWRLDLVMVILFKGIPLESTDGERLMKSPHCTNPALCVQPHHITVSVKELDLFLAYYVQEAR

SEQ ID NO: 27264 - protein, 471 aa, Homo sapiens
MERIPVSVDFWVVCCAVLKCNPGIPMERIPVSVDFWVVCCAVLKCNPGIPKRMSTLCFGFSDEFHPFIEALLPHVRAIAYTWFNLQARKRKYFKKHEKRMSKDEERAVKDELLSEKPEIKQKWASRLLAKLRKDIRQEYREDFVLTVTGKKHPCCVLSNPDQKGKIRRIDCLRQADKVWRLDLVMVILFKGIPLESTDGERLMKSPHCTNPALCVQPHHITVSVKELDLFLAYYVQEQDSGQSGSPSHNDPAKNPPGYLEDSFVKSGVFNVSELVRVSRTPITQGTGVNFPIGEIPSQPYYHDMNSGVNLQRSLSSPPSSKRPKTISIDENMEPSPTGDFYPSPSSPAAGSRTWHERDQDMSSPTTMKKPEKPLFSSASPQDSSPRLSTFPQHHHPGIPGVAHSVISTRTPPPPSPLPFPTQAILPPAPSSYFSHPTIRYPPHLNPQDTLKNYVPSYDPSSPQTSQSWYLG

SEQ ID NO: 27265 - protein, 494 aa, Homo sapiens
MMYSPICLTQDEFHPFIEALLPHVRAIAYTWFNLQARKRKYFKKHEKRMSKDEERAVKDELLSEKPEIKQKWASRLLAKLRKDIRQEYREDFVLTVTGKKHPCCVLSNPDQKGKIRRIDCLRQADKVWRLDLVMVILFKGIPLESTDGERLMKSPHCTNPALCVQPHHITVSVKELDLFLAYYVQEQDSGQSGSPSHNDPAKNPPGYLEDSFVKSGVFNVSELVRVSRTPITQGTGVNFPIGEIPSQPYYHDMNSGVNLQRSLSSPPSSKRPKTISIDENMEPSPTGDFYPSPSSPAAGSRTWHERDQDMSSPTTMKKPEKPLFSSASPQDSSPRLSTFPQHHHPGIPGVAHSVISTRTPPPPSPLPFPTQAILPPAPSSYFSHPTIRYPPHLNPQDTLKNYVPSYDPSSPQTSQPNGSGQVVGKVPGHFTPVLAPSPHPSAVRPVTLSMTDTKPITTSTEAYTASGTSQANRYVGLSPRDPSFLHQQQSWYLG

SEQ ID NO: 27266 - protein, 309 aa, Homo sapiens
MNSGVNLQRSLSSPPSSKRPKTISIDENMEPSPTGDFYPSPSSPAAGSRTWHERDQDMSSPTTMKKPEKPLFSSASPQDSSPRLSTFPQHHHPGIPGVAHSVISTRTPPPPSPLPFPTQAILPPAPSSYFSHPTIRYPPHLNPQDTLKNYVPSYDPSSPQTSQPNGSGQVVGKVPGHFTPVLAPSPHPSAVRPVTLSMTDTKPITTSTEAYTASGTSQANRYVGLSPRDPSFLHQQQLRICDWTMNQNGRHLYPSTSEDTLGITWQSPGTWASLVPFQVSNRTPILPANVQNYGLNIIGEPFLQAETSN

SEQ ID NO: 27267 - protein, 674 aa, Homo sapiens
MATAVSRPCAGRSRDILWRVLGWRIVASIVWSVLFLPICTTVFIIFSRIDLFHPIQWLSDSFSDLYSSYVIFYFLLLSVVIIIISIFNVEFYAVVPSIPCSRLALIGKIIHPQQLMHSFIHAAMGMVMAWCAAVITQGQYSFLVVPCTGTNSFGSPAAQTCLNEYHLFFLLTGAFMGYSYSLLYFVNNMNYLPFPIIQQYKFLRFRRSLLLLVKHSCVESLFLVRNFCILYYFLGYIPKAWISTAMNLHIDEQVHRPLDTVSGLLNLSLLYHVWLCGVFLLTTWYVSWILFKIYATEAHVFPVQPPFAEGSDECLPKVLNSNPPPIIKYLALQDLMLLSQYSPSRRQEVFSLSQPGGHPHNWTAISRECLNLLNGMTQKLILYQEAAATNGRVSSSYPVEPKKLNSPEETAFQTPKSSQMPRPSVPPLVKTSLFSSKLSTPDVVSPFGTPFGSSVMNRMAGIFDVNTCYGSPQSPQLIRRGPRLWTSASDQQMTEFSNPSPSTSISAEGKTMRQPSVIYSWIQNKREQIKNFLSKRVLIMYFFSKHPEASIQAVFSDAQMHIWALEGLSHLVAASFTEDRFGVVQTTLPAILNTLLTLQEAVDKYFKLPHASSKPPRISGSLVDTSYKTLRFAFRASLKTAIYRITTTFGEHLNAVQASAEHQKRLQQFLEFKE

SEQ ID NO: 27268 - protein, 673 aa, Homo sapiens
MATAVSRPCAGRSRDILWRVLGWRIVASIVWSVLFLPICTTVFIIFSRIDLFHPIQWLSDSFSDLYSSYVIFYFLLLSVVIIIISIFNVEFYVVPSIPCSRLALIGKIIHPQQLMHSFIHAAMGMVMAWCAAVITQGQYSFLVVPCTGTNSFGSPAAQTCLNEYHLFFLLTGAFMGYSYSLLYFVNNMNYLPFPIIQQYKFLRFRRSLLLLVKHSCVESLFLVRNFCILYYFLGYIPKAWISTAMNLHIDEQVHRPLDTVSGLLNLSLLYHVWLCGVFLLTTWYVSWILFKIYATEAHVFPVQPPFAEGSDECLPKVLNSNPPPIIKYLALQDLMLLSQYSPSRRQEVFSLSQPGGHPHNWTAISRECLNLLNGMTQKLILYQEAAATNGRVSSSYPVEPKKLNSPEETAFQTPKSSQMPRPSVPPLVKTSLFSSKLSTPDVVSPFGTPFGSSVMNRMAGIFDVNTCYGSPQSPQLIRRGPRLWTSASDQQMTEFSNPSPSTSISAEGKTMRQPSVIYSWIQNKREQIKNFLSKRVLIMYFFSKHPEASIQAVFSDAQMHIWALEGLSHLVAASFTEDRFGVVQTTLPAILNTLLTLQEAVDKYFKLPHASSKPPRISGSLVDTSYKTLRFAFRASLKTAIYRITTTFGEHLNAVQASAEHQKRLQQFLEFKE

SEQ ID NO: 27269 - protein, 557 aa, Homo sapiens
MATAVSRPCAGRSRDILWRVLGWRIVASIVWSVLFLPICTTVFIIFSRIDLFHPIQWLSDSFSDLYSSYVIFYFLLLSVVIIIISIFNVEFYAVVPSIPCSRLALIGKIIHPQQLMHSFIHAAMGMVMAWCAAVITQGQYSFLVVPCTGTNSFGSPAAQTCLNEYHLFFLLTGAFMGYSYSLLYFVNNMNYLPFPIIQQYKFLRFRRSLLLLVKHSCVESLFLVRNFCILYYFLGYIPKAWISTAMNLHIDEQVHRPLDTVSGLLNLSLLYHVWLCGVFLLTTWYVSWILFKIYATEAHVFPVQPPFAEGSDECLPKVLNSNPPPIIKYLALQDLMLLSQYSPSRRQEVFSLSQPGGHPHNWTAISRECLNLLNGMTEFSNPSPSTSISAEGKTMRQPSVIYSWIQNKREQIKNFLSKRVLIMYFFSKHPEASIQAVFSDAQMHIWALEGLSHLVAASFTEDRFGVVQTTLPAILNTLLTLQEAVDKYFKLPHASSKPPRISGSLVDTSYKTLRFAFRASLKTAIYRITTTFGEHLNAVQASAEHQKRLQQFLEFKE

SEQ ID NO: 27270 - protein, 542 aa, Homo sapiens
MATAVSRPCAGRSRDILWRVLGWRIVASIVWSVLFLPICTTVFIIFSRIDLFHPIQWLSDSFSDLYSSYVIFYFLLLSVVIIIISIFNVEFYAVVPSIPCSRLALIGKIIHPQQLMHSFIHAAMGMVMAWCAAVITQGQYSFLVVPCTGTNSFGSPAAQTCLNEYHLFFLLTGAFMGYSYSLLYFVNNMNYLPFPIIQQYKFLRFRRSLLLLVKHSCVESLFLVRNFCILYYFLGYIPKAWISTAMNLHIDEQVHRPLDTVSGLLNLSLLYHVWLCGVFLLTTWYVSWILFKIYATEAHVFPVQPPFAEGSDECLPKVLNSNPPPIIKYLALQDLMLLSQYSPSRRQEVFSLSQPGGHPHNWTAISRECLNLLNGMTQKLILYQEAAATNGRVSSSYPVEPKKLNSPEETAFQTPKSSQMPRPSVPPLVKTSLFSSKLSTPDVVSPFGTPFGSSVMNRMAGIFDVNTCYGSPQSPQLIRRGPRLWTSASDQQMTEFSNPSPSTSISAEAPRGLHSGCFFRCPNAYLGIRRSVALSSSIIYRG

SEQ ID NO: 27271 - protein, 634 aa, Homo sapiens
MATAVSRPCAGRSRDILWRVLGWRIVASIVWSVLFLPICTTVFIIFSRIDLFHPIQWLSDSFSDLYSSYVIFYFLLLSVVIIIISIFNVEFYAVITQGQYSFLVVPCTGTNSFGSPAAQTCLNEYHLFFLLTGAFMGYSYSLLYFVNNMNYLPFPIIQQYKFLRFRRSLLLLVKHSCVESLFLVRNFCILYYFLGYIPKAWISTAMNLHIDEQVHRPLDTVSGLLNLSLLYHVWLCGVFLLTTWYVSWILFKIYATEAHVFPVQPPFAEGSDECLPKVLNSNPPPIIKYLALQDLMLLSQYSPSRRQEVFSLSQPGGHPHNWTAISRECLNLLNGMTQKLILYQEAAATNGRVSSSYPVEPKKLNSPEETAFQTPKSSQMPRPSVPPLVKTSLFSSKLSTPDVVSPFGTPFGSSVMNRMAGIFDVNTCYGSPQSPQLIRRGPRLWTSASDQQMTEFSNPSPSTSISAEGKTMRQPSVIYSWIQNKREQIKNFLSKRVLIMYFFSKHPEASIQAVFSDAQMHIWALEGLSHLVAASFTEDRFGVVQTTLPAILNTLLTLQEAVDKYFKLPHASSKPPRISGSLVDTSYKTLRFAFRASLKTAIYRITTTFGEHLNAVQASAEHQKRLQQFLEFKE

SEQ ID NO: 27272 - protein, 559 aa, Homo sapiens
MHSFIHAAMGMVMAWCAAVITQGQYSFLVVPCTGTNSFGSPAAQTCLNEYHLFFLLTGAFMGYSYSLLYFVNNMNYLPFPIIQQYKFLRFRRSLLLLVKHSCVESLFLVRNFCILYYFLGYIPKAWISTAMNLHIDEQVHRPLDTVSGLLNLSLLYHVWLCGVFLLTTWYVSWILFKIYATEAHVFPVQPPFAEGSDECLPKVLNSNPPPIIKYLALQDLMLLSQYSPSRRQEVFSLSQPGGHPHNWTAISRECLNLLNGMTQKLILYQEAAATNGRVSSSYPVEPKKLNSPEETAFQTPKSSQMPRPSVPPLVKTSLFSSKLSTPDVVSPFGTPFGSSVMNRMAGIFDVNTCYGSPQSPQLIRRGPRLWTSASDQQMTEFSNPSPSTSISAEGKTMRQPSVIYSWIQNKREQIKNFLSKRVLIMYFFSKHPEASIQAVFSDAQMHIWALEGLSHLVAASFTEDRFGVVQTTLPAILNTLLTLQEAVDKYFKLPHASSKPPRISGSLVDTSYKTLRFAFRASLKTAIYRITTTFGEHLNAVQASAEHQKRLQQFLEFKE

SEQ ID NO: 27273 - protein, 131 aa, Homo sapiens
MKIFLPVLLAALLGVERASSLMCFSCLNQKSNLYCLKPTICSDQDNYCVTVSASAGIGNLVTFGHSLSKTCSPACPIPEGVNVGVASMGISCCQSFLCNFSAADGGLRASVTLLGAGLLLSLLPALLRFGP

SEQ ID NO: 27274 - protein, 431 aa, Homo sapiens
MFFGGEGSLTYTLVIICFLTLRLSASQNCLKKSLEDVVIDIQSSLSKGIRGNEPVYTSTQEDCINSCCSTKNISGDKACNLMIFDTRKTARQPNCYLFFCPNEEACPLKPAKGLMSYRIITDFPSLTRNLPSQELPQEDSLLHGQFSQAVTPLAHHHTDYSKPTDISWRDTLSQKFGSSDHLEKLFKMDEASAQLLAYKEKGHSQSSQFSSDQEIAHLLPENVSALPATVAVASPHTTSATPKPATLLPTNASVTPSGTSQPQLATTAPPVTTVTSQPPTTLISTVFTRAAATLQAMATTAVLTTTFQAPTDSKGSLETIPFTEISNLTLNTGNVYNPTALSMSNVESSTMNKTASWEGREASPGSSSQGSVPENQYGLPFEKWLLIGSLLFGVLFLVIGLVLLGRILSESLRRKRYSRLDYLINGIYVDI

SEQ ID NO: 27275 - protein, 397 aa, Homo sapiens
MFFGGEGSLTYTLGIRGNEPVYTSTQEDCINSCCSTKNISGDKACNLMIFDTRKTARQPNCYLFFCPNEEACPLKPAKGLMSYRIITDFPSLTRNLPSQELPQEDSLLHGQFSQAVTPLAHHHTDYSKPTDISWRDTLSQKFGSSDHLEKLFKMDEASAQLLAYKEKGHSQSSQFSSDQEIAHLLPENVSALPATVAVASPHTTSATPKPATLLPTNASVTPSGTSQPQLATTAPPVTTVTSQPPTTLISTVFTRAAATLQAMATTAVLTTTFQAPTDSKGSLETIPFTEISNLTLNTGNVYNPTALSMSNVESSTMNKTASWEGREASPGSSSQGSVPENQYGLPFEKWLLIGSLLFGVLFLVIGLVLLGRILSESLRRKRYSRLDYLINGIYVDI

SEQ ID NO: 27276 - protein, 508 aa, Homo sapiens
MYSSPLCLTQDEFHPFIEALLPHVRAFAYTWFNLQARKRKYFKKHEKRMSKDEERAVKDELLGEKPEVKQKWASRLLAKLRKDIRPECREDFVLSITGKKAPGCVLSNPDQKGKMRRIDCLRQADKVWRLDLVMVILFKGIPLESTDGERLVKAAQCGHPVLCVQPHHIGVAVKELDLYLAYFVRERDAEQSGSPRTGMGSDQEDSKPITLDTTDFQESFVTSGVFSVTELIQVSRTPVVTGTGPNFSLGELQGHLAYDLNPASTGLRRTLPSTSSSGSKRHKSGSMEEDVDTSPGGDYYTSPSSPTSSSRNWTEDMEGGISSPVKKTEMDKSPFNSPSPQDSPRLSSFTQHHRPVIAVHSGIARSPHPSSALHFPTTSILPQTASTYFPHTAIRYPPHLNPQDPLKDLVSLACDPASQQPGPLNGSGQLKMPSHCLSAQMLAPPPPGLPRLALPPATKPATTSEGGATSPTSPSYSPPDTSPANRSFVGLGPRDPAGIYQAQSWYLG

SEQ ID NO: 27277 - protein, 499 aa, Homo sapiens
MDEFHPFIEALLPHVRAFAYTWFNLQARKRKYFKKHEKRMSKDEERAVKDELLGEKPEVKQKWASRLLAKLRKDIRPECREDFVLSITGKKAPGCVLSNPDQKGKMRRIDCLRQADKVWRLDLVMVILFKGIPLESTDGERLVKAAQCGHPVLCVQPHHIGVAVKELDLYLAYFVRERDAEQSGSPRTGMGSDQEDSKPITLDTTDFQESFVTSGVFSVTELIQVSRTPVVTGTGPNFSLGELQGHLAYDLNPASTGLRRTLPSTSSSGSKRHKSGSMEEDVDTSPGGDYYTSPSSPTSSSRNWTEDMEGGISSPVKKTEMDKSPFNSPSPQDSPRLSSFTQHHRPVIAVHSGIARSPHPSSALHFPTTSILPQTASTYFPHTAIRYPPHLNPQDPLKDLVSLACDPASQQPGPLNGSGQLKMPSHCLSAQMLAPPPPGLPRLALPPATKPATTSEGGATSPTSPSYSPPDTSPANRSFVGLGPRDPAGIYQAQSWYLG

SEQ ID NO: 27278 - protein, 430 aa, Homo sapiens
MDEFHPFIEALLPHVRAFAYTWFNLQARKRKYFKKHEKRMSKDEERAVKDELLGEKPEVKQKWASRLLAKLRKDIRPECREDFVLSITGKKAPGCVLSNPDQKGKMRRIDCLRQADKVWRLDLVMVILFKGIPLESTDGERLVKAAQCGHPVLCVQPHHIGVAVKELDLYLAYFVRERDAEQSGSPRTGMGSDQEDSKPITLDTTDFQESFVTSGVFSVTELIQVSRTPVVTGTGPNFSLGELQGHLAYDLNPASTGLRRTLPSTSSSGSKRHKSGSMEEDVDTSPGGDYYTSPSSPTSSSRNWTEDMEGGISSPVKKTEMDKSPFNSPSPQDSPRLSSFTQHHRPVIAVHSGIARSPHPSSALHFPTTSILPQTASTYFPHTAIRYPPHLNPQDPLKDLVSLACDPASQQPGPPTLRPTRPLQTVPLWD

SEQ ID NO: 27279 - protein, 406 aa, Homo sapiens
MDEFHPFIEALLPHVRAFAYTWFNLQARKRKYFKKHEKRMSKDEERAVKDELLGEKPEVKQKWASRLLAKLRKDIRPECREDFVLSITGKKAPGCVLSNPDQKGKMRRIDCLRQADKVWRLDLVMVILFKGIPLESTDGERLVKAAQCGHPVLCVQPHHIGVAVKELDLYLAYFVRERDTTDFQESFVTSGVFSVTELIQVSRTPVVTGTGPNFSLGELQGHLAYDLNPASTGLRRTLPSTSSSGSKRHKSGSMEEDVDTSPGGDYYTSPSSPTSSSRNWTEDMEGGISSPVKKTEMDKSPFNSPSPQDSPRLSSFTQHHRPVIAVHSGIARSPHPSSALHFPTTSILPQTASTYFPHTAIRYPPHLNPQDPLKDLVSLACDPASQQPGPPTLRPTRPLQTVPLWD

SEQ ID NO: 27280 - protein, 428 aa, Homo sapiens
MYSSPLCLTQDEFHPFIEALLPHVRAFAYTWFNLQARKRKYFKKHEKRMSKDEERAVKDELLGEKPEVKQKWASRLLAKLRKDIRPECREDFVLSITGKKAPGCVLSNPDQKGKMRRIDCLRQADKVWRLDLVMVILFKGIPLESTDGERLVKAAQCGHPVLCVQPHHIGVAVKELDLYLAYFVRERDAEQSGSPRTGMGSDQEDSKPITLDTTDFQESFVTSGVFSVTELIQVSRTPVVTGTGPNFSLGELQGHLAYDLNPASTGLRRTLPSTSSSGSKRHKSGSMEEDVDTSPGGDYYTSPSSPTSSSRNWTEDMEGGISSPVKKTEMDKSPFNSPSPQDSPRLSSFTQHHRPVIAVHSGIARSPHPSSALHFPTTSILPQTASTYFPHTAIRYPPHLNPQDPLKDLVSLACDPASQQPGPSWYLG

SEQ ID NO: 27281 - protein, 439 aa, Homo sapiens
MYSSPLCLTQDEFHPFIEALLPHVRAFAYTWFNLQARKRKYFKKHEKRMSKDEERAVKDELLGEKPEVKQKWASRLLAKLRKDIRPECREDFVLSITGKKAPGCVLSNPDQKGKMRRIDCLRQADKVWRLDLVMVILFKGIPLESTDGERLVKAAQCGHPVLCVQPHHIGVAVKELDLYLAYFVRERDAEQSGSPRTGMGSDQEDSKPITLDTTDFQESFVTSGVFSVTELIQVSRTPVVTGTGPNFSLGELQGHLAYDLNPASTGLRRTLPSTSSSGSKRHKSGSMEEDVDTSPGGDYYTSPSSPTSSSRNWTEDMEGGISSPVKKTEMDKSPFNSPSPQDSPRLSSFTQHHRPVIAVHSGIARSPHPSSALHFPTTSILPQTASTYFPHTAIRYPPHLNPQDPLKDLVSLACDPASQQPGPPTLRPTRPLQTVPLWD

SEQ ID NO: 27282 - protein, 1359 aa, Homo sapiens
MAEAGLRGWLLWALLLRLAQSEPYTTIHQPGYCAFYDECGKNPELSGSLMTLSNVSCLSNTPARKITGDHLILLQKICPRLYTGPNTQACCSAKQLVSLEASLSITKALLTRCPACSDNFVNLHCHNTCSPNQSLFINVTRVAQLGAGQLPAVVAYEAFYQHSFAEQSYDSCSRVRVPAAATLAVGTMCGVYGSALCNAQRWLNFQGDTGNGLAPLDITFHLLEPGQAVGSGIQPLNEGVARCNESQGDDVATCSCQDCAASCPAIARPQALDSTFYLGQMPGSLVLIIILCSVFAVVTILLVGFRVAPARDKSKMVDPKKGTSLSDKLSFSTHTLLGQFFQGWGTWVASWPLTILVLSVIPVVALAAGLVFTELTTDPVELWSAPNSQARSEKAFHDQHFGPFFRTNQVILTAPNRSSYRYDSLLLGPKNFSGILDLDLLLELLELQERLRHLQVWSPEAQRNISLQDICYAPLNPDNTSLYDCCINSLLQYFQNNRTLLLLTANQTLMGQTSQVDWKDHFLYCANAPLTFKDGTALALSCMADYGAPVFPFLAIGGYKGKDYSEAEALIMTFSLNNYPAGDPRLAQAKLWEEAFLEEMRAFQRRMAGMFQVTFMAERSLEDEINRTTAEDLPIFATSYIVIFLYISLALGSYSSWSRVMVDSKATLGLGGVAVVLGAVMAAMGFFSYLGIRSSLVILQVVPFLVLSVGADNIFIFVLEYQRLPRRPGEPREVHIGRALGRVAPSMLLCSLSEAICFFLGALTPMPAVRTFALTSGLAVILDFLLQMSAFVALLSLDSKRQEASRLDVCCCVKPQELPPPGQGEGLLLGFFQKAYAPFLLHWITRGVVLLLFLALFGVSLYSMCHISVGLDQELALPKDSYLLDYFLFLNRYFEVGAPVYFVTTLGYNFSSEAGMNAICSSAGCNNFSFTQKIQYATEFPEQSYLAIPASSWVDDFIDWLTPSSCCRLYISGPNKDKFCPSTVNSLNCLKNCMSITMGSVRPSVEQFHKYLPWFLNDRPNIKCPKGGLAAYSTSVNLTSDGQVLDTVAILSPRLEYSGTISAHCNLYLLDSTSRFMAYHKPLKNSQDYTEALRAARELAANITADLRKVPGTDPAFEVFPYTITNVFYEQYLTILPEGLFMLSLCLVPTFAVSCLLLGLDLRSGLLNLLSIVMILVDTVGFMALWGISYNAVSLINLVSAVGMSVEFVSHITRSFAISTKPTWLERAKEATISMGSAVFAGVAMTNLPGILVLGLAKAQLIQIFFFRLNLLITLLGLLHGLVFLPVILSYVGPDVNPALALEQKRAEEAVAAVMVASCPNHPSRVSTADNIYVNHSFEGSIKGAGAISNFLPNNGRQF

SEQ ID NO: 27283 - protein, 1332 aa, Homo sapiens
MAEAGLRGWLLWALLLRLAQSEPYTTIHQPGYCAFYDECGKNPELSGSLMTLSNVSCLSNTPARKITGDHLILLQKICPRLYTGPNTQACCSAKQLVSLEASLSITKALLTRCPACSDNFVNLHCHNTCSPNQSLFINVTRVAQLGAGQLPAVVAYEAFYQHSFAEQSYDSCSRVRVPAAATLAVGTMCGVYGSALCNAQRWLNFQGDTGNGLAPLDITFHLLEPGQAVGSGIQPLNEGVARCNESQGDDVATCSCQDCAASCPAIARPQALDSTFYLGQMPGSLVLIIILCSVFAVVTILLVGFRVAPARDKSKMVDPKKGTSLSDKLSFSTHTLLGQFFQGWGTWVASWPLTILVLSVIPVVALAAGLVFTELTTDPVELWSAPNSQARSEKAFHDQHFGPFFRTNQVILTAPNRSSYRYDSLLLGPKNFSGILDLDLLLELLELQERLRHLQVWSPEAQRNISLQDICYAPLNPDNTSLYDCCINSLLQYFQNNRTLLLLTANQTLMGQTSQVDWKDHFLYCANAPLTFKDGTALALSCMADYGAPVFPFLAIGGYKGKDYSEAEALIMTFSLNNYPAGDPRLAQAKLWEEAFLEEMRAFQRRMAGMFQVTFMAERSLEDEINRTTAEDLPIFATSYIVIFLYISLALGSYSSWSRVMVDSKATLGLGGVAVVLGAVMAAMGFFSYLGIRSSLVILQVVPFLVLSVGADNIFIFVLEYQRLPRRPGEPREVHIGRALGRVAPSMLLCSLSEAICFFLGALTPMPAVRTFALTSGLAVILDFLLQMSAFVALLSLDSKRQEASRLDVCCCVKPQELPPPGQGEGLLLGFFQKAYAPFLLHWITRGVVLLLFLALFGVSLYSMCHISVGLDQELALPKDSYLLDYFLFLNRYFEVGAPVYFVTTLGYNFSSEAGMNAICSSAGCNNFSFTQKIQYATEFPEQSYLAIPASSWVDDFIDWLTPSSCCRLYISGPNKDKFCPSTVNSLNCLKNCMSITMGSVRPSVEQFHKYLPWFLNDRPNIKCPKGGLAAYSTSVNLTSDGQVLTSRFMAYHKPLKNSQDYTEALRAARELAANITADLRKVPGTDPAFEVFPYTITNVFYEQYLTILPEGLFMLSLCLVPTFAVSCLLLGLDLRSGLLNLLSIVMILVDTVGFMALWGISYNAVSLINLVSAVGMSVEFVSHITRSFAISTKPTWLERAKEATISMGSAVFAGVAMTNLPGILVLGLAKAQLIQIFFFRLNLLITLLGLLHGLVFLPVILSYVGPDVNPALALEQKRAEEAVAAVMVASCPNHPSRVSTADNIYVNHSFEGSIKGAGAISNFLPNNGRQF

SEQ ID NO: 27284 - protein, 724 aa, Homo sapiens
MAEAGLRGWLLWALLLRLAQSEPYTTIHQPGYCAFYDECGKNPELSGSLMTLSNVSCLSNTPARKITGDHLILLQKICPRLYTGPNTQACCSAKQLVSLEASLSITKALLTRCPACSDNFVNLHCHNTCSPNQSLFINVTRVAQLGAGQLPAVVAYEAFYQHSFAEQSYDSCSRVRVPAAATLAVGTMCGVYGSALCNAQRWLNFQGDTGNGLAPLDITFHLLEPGQAVGSGIQPLNEGVARCNESQGDDVATCSCQDCAASCPAIARPQALDSTFYLGQMPGSLVLIIILCSVFAVVTILLVGFRVAPARDKSKMVDPKKGTSLSDKLSFSTHTLLGQFFQGWGTWVASWPLTILVLSVIPVVALAAGLVFTELTTDPVELWSAPNSQARSEKAFHDQHFGPFFRTNQVILTAPNRSSYRYDSLLLGPKNFSGILDLDLLLELLELQERLRHLQVWSPEAQRNISLQDICYAPLNPDNTSLYDCCINSLLQYFQNNRTLLLLTANQTLMGQTSQVDWKDHFLYCANAPLTFKDGTALALSCMADYGAPVFPFLAIGGYKGKDYSEAEALIMTFSLNNYPAGDPRLAQAKLWEEAFLEEMRAFQRRMAGMFQVTFMAERSLEDEINRTTAEDLPIFATSYIVIFLYISLALGSYSSWSRVMVDSKATLGLGGVAVVLGAVMAAMGFFSYLGIRSSLVILQVVPFLVLSVGADNIFIFVLEYQGP

SEQ ID NO: 27285 - protein, 1286 aa, Homo sapiens
MAEAGLRGWLLWALLLRLAQSEPYTTIHQPGYCAFYDECGKNPELSGSLMTLSNVSCLSNTPARKITGDHLILLQKICPRLYTGPNTQACCSAKQLVSLEASLSITKALLTRCPACSDNFVNLHCHNTCSPNQSLFINVTRVAQLGAGQLPAVVAYEAFYQHSFAEQSYDSCSRVRVPAAATLAVGTMCGVYGSALCNAQRWLNFQGDTGNGLAPLDITFHLLEPGQAVGSGIQPLNEGVARCNESQGDDVATCSCQDCAASCPAIARPQALDSTFYLGQMPGSLVLIIILCSVFAVVTILLVGFRVAPARDKSKMVDPKKGTSLSDKLSFSTHTLLGQFFQGWGTWVASWPLTILVLSVIPVVALAAGLVFTELTTDPVELWSAPNSQARSEKAFHDQHFGPFFRTNQVILTAPNRSSYRYDSLLLGPKNFSGILDLDLLLELLELQERLRHLQVWSPEAQRNISLQDICYAPLNPDNTSLYDCCINSLLQYFQNNRTLLLLTANQTLMGQTSQVDWKDHFLYCANAPLTFKDGTALALSCMADYGAPVFPFLAIGGYKGKDYSEAEALIMTFSLNNYPAGDPRLAQAKLWEEAFLEEMRAFQRRMAGMFQVTFMAERSLEDEINRTTAEDLPIFATSYIVIFLYISLALGSYSSWSRVMVDSKATLGLGGVAVVLGAVMAAMGFFSYLGIRSSLVILQVVPFLVLSVGADNIFIFVLEYQRLPRRPGEPREVHIGRALGRVAPSMLLCSLSEAICFFLGALTPMPAVRTFALTSGLAVILDFLLQMSAFVALLSLDSKRQEASRLDVCCCVKPQELPPPGQGEGLLLGFFQKAYAPFLLHWITRGVVVGAPVYFVTTLGYNFSSEAGMNAICSSAGCNNFSFTQKIQYATEFPEQSYLAIPASSWVDDFIDWLTPSSCCRLYISGPNKDKFCPSTVNSLNCLKNCMSITMGSVRPSVEQFHKYLPWFLNDRPNIKCPKGGLAAYSTSVNLTSDGQVLTSRFMAYHKPLKNSQDYTEALRAARELAANITADLRKVPGTDPAFEVFPYTITNVFYEQYLTILPEGLFMLSLCLVPTFAVSCLLLGLDLRSGLLNLLSIVMILVDTVGFMALWGISYNAVSLINLVSAVGMSVEFVSHITRSFAISTKPTWLERAKEATISMGSAVFAGVAMTNLPGILVLGLAKAQLIQIFFFRLNLLITLLGLLHGLVFLPVILSYVGPDVNPALALEQKRAEEAVAAVMVASCPNHPSRVSTADNIYVNHSFEGSIKGAGAISNFLPNNGRQF

SEQ ID NO: 27286 - protein, 462 aa, Homo sapiens
MQLRKMQTVKKEQASLDASSNVDKMMVLNSALTEVSEDSTTGEELLLSEGSVGKNKSSACRRKREFIPDEKKDAMYWEKRRKNNEAAKRSREKRRLNDLVLENKLIALGEENATLKAELLSLKLKFGLISSTAYAQEIQKLSNSTAVYFQDYQTSKSNVSSFVDEHEPSMVSSSCISVIKHSPQSSLSDVSEVSSVEHTQESSVQGSCRSPENKFQIIKQEPMELESYTREPRDDRGSYTASIYQNYMGNSFSGYSHSPPLLQVNRSSSNSPRTSETDDGVVGKSSDGEDEQQVPKGPIHSPVELKHVHATVVKVPEVNSSALPHKLRIKAKAMQIKVEAFDNEFEATQKLSSPIDMTSKRHFELEKHSAPSMVHSSLTPFSVQVTNIQDWSLKSEHWHQKELSGKTQNSFKTGVVEMKDSGYKVSDPENLYLKQGIANLSAEVVSLKRLIATQPISASDSG

SEQ ID NO: 27287 - protein, 289 aa, Homo sapiens
MDVGFSGLPDVSQSHSKTLWGARGRGPSIRRQREFMPEEKKDTVYWEKRRKNNEAAKRSREKRRLNDAAIEGRLAALMEENALLKGELKALKLRFGLLPLTGGPRALPLQALLLEAPWTGDPRPGAEALSSLSGSHSCLLRPRSLDAGIPGCRGCLLAPRWTGLATSPRSPQESASPTLNRIDMALQTALPPALFSCHLLEGHVGSRPELRPCWGLWSPVPSGCRASGPSDVLLTPTADPMGLSPGVTCPAPGNSPEGLGQPSLPHKLRIKSRASGRVPRGWEGGQAPL

SEQ ID NO: 27288 - protein, 299 aa, Homo sapiens
MVDKKLVVVFGGTGAQGGSVARTLLEDGTFKVRVVTRNPRKKAAKELRLQGAEVVQGDQDDQVIMELALNGAYATFIVTNYWESCSQEQEVKQGKLLADLARRLGLHYVVYSGLENIKKLTAGRLAAAHFDGKGEVEEYFRDIGVPMTSVRLPCYFENLLSHFLPQKAPDGKSYLLSLPTGDVPMDGMSVSDLGPVVLSLLKMPEKYVGQNIGLSTCRHTAEEYAALLTKHTRKVVHDAKMTPEDYEKLGFPGARDLANMFRFYALRPDRDIELTLRLNPKALTLDQWLEQHKGDFNLL

SEQ ID NO: 27289 - protein, 221 aa, Homo sapiens
MALALAALAAVEPACGSRYQQLQNEEESGEPEQAAGDAPPPYSSISAESAAYFDYKDESGFPKPPSYNVATTLPSYDEAERTKAEATIPLVPGRDEDFVGRDDFDDADQLRIGNDGIFMLTFFMAFLFNWIGFFLSFCLTTSAAGRYGAISGFGLSLIKWILIVRFSTYFPGYFDGQYWLWWVFLVLGFLLFLRGFINYAKVRKMPETFSNLPRTRVLFIY

SEQ ID NO: 27290 - protein, 153 aa, Homo sapiens
MALALAALAAVEPACGSRYQQLQNEEESGEPEQAAGDAPPPYSSISAESAAYFDYKDESGFPKPPSYNVATTLPSCFYDISHLIFFIFYLRNMKKKYTKMVKLLHKSAPAQSDSCKCPFICCVCISRISIGSRSGYQYIMHRSVGCLKAKQEN

SEQ ID NO: 27291 - protein, 642 aa, Homo sapiens
MKRSSVSSGGAGRLSMQELRSQDVNKQGLYTPQTKEKPTFGKLSINKPTSERKVSLFGKRTSGHGSRNSQLGIFSSSEKIKDPRPLNDKAFIQQCIRQLCEFLTENGYAHNVSMKSLQAPSVKDFLKIFTFLYGFLCPSYELPDTKFEEEVPRIFKDLGYPFALSKSSMYTVGAPHTWPHIVAALVWLIDCIKIHTAMKESSPLFDDGQPWGEETEDGIMHNKLFLDYTIKCYESFMSGADSFDEMNAELQSKLKDLFNVDAFKLESLEAKNRALNEQIARLEQEREKEPNRLESLRKLKASLQGDVQKYQAYMSNLESHSAILDQKLNGLNEEIARVELECETIKQENTRLQNIIDNQKYSVADIERINHERNELQQTINKLTKDLEAEQQKLWNEELKYARGKEAIETQLAEYHKLARKLKLIPKGAENSKGYDFEIKFNPEAGANCLVKYRAQVYVPLKELLNETEEEINKALNKKMGLEDTLEQLNAMITESKRSVRTLKEEVQKLDDLYQQKIKEAEEEDEKCASELESLEKHKHLLESTVNQGLSEAMNELDAVQREYQLVVQTTTEERRKVGNNLQRLLEMVATHVGSVEKHLEEQIAKVDREYEECMSEDLSENIKEIRDKYEKKATLIKSSEE

SEQ ID NO: 27292 - protein, 153 aa, Homo sapiens
MKHLRPQFPLILAIYCFCMLQIPSSGFPQPLADPSDGLDIVQLEQLAYCLSQWAPLSRQPKDNQDIYKRFLFHYSRTQEATHPVKTGFPPVHPLMHLAAKLANRRMKRILQRGSGTAAVDFTKKDHTATWGRPFFLFRPRNGRNIEDEAQIQW

SEQ ID NO: 27293 - protein, 336 aa, Homo sapiens
MARRRSQRVCASGPSMLNSARGAPELLRGTATNAEVSAAAAGATGSEELPPGDRGCRNGGGRGPAATTSSTGVAVGAEHGEDSLSRKPDPEPGRMDHHQPGTGRYQVLLNEEDNSESSAIEQPPTSNPAPQIVQAASSAPALETDSSPPPYSSITVEVPTTSDTEVYGEFYPVPPPYSVATSLPTYDEAEKAKAAAMAAAAAETSQRIQEEECPPRDDFSDADQLRVGNDGIFMLAFFMAFIFNWLGFCLSFCITNTIAGRYGAICGFGLSLIKWILIVRFSDYFTGYFNGQYWLWWIFLVLGLLLFFRGFVNYLKVRNMSESMAAAHRTRYFFLL

SEQ ID NO: 27294 - protein, 135 aa, Homo sapiens
MRSSSLPGARSPRRNGSGQSRHRLPPGRLRTGSRAPTAEARPHVARSPPTPGTGARGGGRRGWGGSRAAPQRGSCASANAQKQLRQTAATYMLTARGGSRSAERKGDLQRTFRQVGQTMPMVPPLDFTMNAASVE

SEQ ID NO: 27295 - protein, 150 aa, Homo sapiens
MRFMAGPAGSQSLGPLCFHSSPQALYTVLLIVLVMMSLVFGKFVPVNWEPPQPLPFPKYLRCYRCLLETKELGCLLGSDICLTPAGSSCITLHKKNSSGSDVMVSDCRSKEQMSDCSNTRTSPVSGFWIFSQYCFLDFCNDPQNRGLYTP

SEQ ID NO: 27296 - protein, 148 aa, Homo sapiens
MQTFPVAGALDPAILDTSSPQALYTVLLIVLVMMSLVFGKFVPVNWEPPQPLPFPKYLRCYRCLLETKELGCLLGSDICLTPAGSSCITLHKKNSSGSDVMVSDCRSKEQMSDCSNTRTSPVSGFWIFSQYCFLDFCNDPQNRGLYTP

SEQ ID NO: 27297 - protein, 229 aa, Homo sapiens
MISRDADLPSCWGAGPCYTGHKVGALRRDTVICCCRHGDYSTPCLFTPGKPSRNPSPWKRTLWTLSAPWAGPAGWTGEEQNATKTGLITRRPRPLRRRPHPAPASPLPEIIRGNIPRMLGKFVPVNWEPPQPLPFPKYLRCYRCLLETKELGCLLGSDICLTPAGSSCITLHKKNSSGSDVMVSDCRSKEQMSDCSNTRTSPVSGFWIFSQYCFLDFCNDPQNRGLYTP

SEQ ID NO: 27298 - protein, 206 aa, Homo sapiens
MARGGWRRLRRLLSAGQLLFQGRALLVTNTLGCGALMAAGDGVRQSWEIRARPGQVFDPRRSASMFAVGCSMGPFLHYWYLSLDRLFPASGLRGFPNVLKKVLVDQLVASPLLGVWYFLGLGCLEGQTVGESCQELREKFWEFYKADWCVWPAAQFVNFLFVPPQFRVTYINGLTLGWDTYLSYLKYRSPVPLTPPGCVALDTRAD

SEQ ID NO: 27299 - protein, 181 aa, Homo sapiens
MARGGWRRLRRLLSAGQLLFQGRALLVTNTLGCGALMAAGDGVRQSWEIRARPGQVFDPRRSASMFAVGCSMGPFLHYWYLSLDRLFPASGLRGFPNVLKKVLVDQLVASPLLGVWEFYKADWCVWPAAQFVNFLFVPPQFRVTYINGLTLGWDTYLSYLKYRSPVPLTPPGCVALDTRAD

SEQ ID NO: 27300 - protein, 752 aa, Homo sapiens
MSSRTVLAPGNDRNSDTHGTLGSGRSSDKGPSWSSRSLGARCRNSIASCPEEQPHVGNYRLLRTIGKGNFAKVKLARHILTGREVAIKIIDKTQLNPSSLQKLFREVRIMKGLNHPNIVKLFEVIETEKTLYLVMEYASAGEVFDYLVSHGRMKEKEARAKFRQIVSAVHYCHQKNIVHRDLKAENLLLDAEANIKIADFGFSNEFTLGSKLDTFCGSPPYAAPELFQGKKYDGPEVDIWSLGVILYTLVSGSLPFDGHNLKELRERVLRGKYRVPFYMSTDCESILRRFLVLNPAKRCTLEQIMKDKWINIGYEGEELKPYTEPEEDFGDTKRIEVMVGMGYTREEIKESLTSQKYNEVTATYLLLGRKTEEGGDRGAPGLALARVRAPSDTTNGTSSSKGTSHSKGQRSSSSTYHRQRRHSDFCGPSPAPLHPKRSPTSTGEAELKEERLPGRKASCSTAGSGSRGLPPSSPMVSSAHNPNKAEIPERRKDSTSTPNNLPPSMMTRRNTYVCTERPGAERPSLLPNGKENSSGTPRVPPASPSSHSLAPPSGERSRLARGSTIRSTFHGGQVRDRRAGGGGGGGVQNGPPASPTLAHEAAPLPAGRPRPTTNLFTKLTSKLTRRVADEPERIGGPEVTSCHLPWDQTETAPRLLRFPWSVKLTSSRPPEALMAALRQATAAARCRCRQPQPFLLACLHGGAGGPEPLSHFEVEVCQLPRPGLRGVLFRRVAGTALAFRTLVTRISNDLEL

SEQ ID NO: 27301 - protein, 688 aa, Homo sapiens
MSSRTVLAPGNDRNSDTHGTLGSGRSSDKGPSWSSRSLGARCRNSIASCPEEQPHVGNYRLLRTIGKGNFAKVKLARHILTGREVAIKIIDKTQLNPSSLQKLFREVRIMKGLNHPNIVKLFEVIETEKTLYLVMEYASAGEVFDYLVSHGRMKEKEARAKFRQIVSAVHYCHQKNIVHRDLKAENLLLDAEANIKIADFGFSNEFTLGSKLDTFCGSPPYAAPELFQGKKYDGPEVDIWSLGVILYTLVSGSLPFDGHNLKELRERVLRGKYRVPFYMSTDCESILRRFLVLNPAKRCTLEQIMKDKWINIGYEGEELKPYTEPEEDFGDTKRIEVMVGMGYTREEIKESLTSQKYNEVTATYLLLGRKTEEGGDRGAPGLALARVRAPSDTTNGTSSSKGTSHSKGQRSSSSTYHRQRRHSDFCGPSPAPLHPKRSPTSTGEAELKEERLPGRKASCSTAGSGSRGLPPSSPMVSSAHNPNKAEIPERRKDSTSTPNNLPPSMMTRRNTYVCTERPGAERPSLLPNGKENSSGTPRVPPASPSSHSLAPPSGERSRLARGSTIRSTFHGGQVRDRRAGGGGGGGVQNGPPASPTLAHEAAPLPAGRPRPTTNLFTKLTSKLTRRVTLDPSKRQNSNRCVSGASLPQGSKIRSQTNLRESGDLRSQVAIYLGIKRKPPPGCSDSPGV

SEQ ID NO: 27302 - protein, 502 aa, Homo sapiens
MYSPYCLTQDEFHPFIEALLPHVRAFSYTWFNLQARKRKYFKKHEKRMSKDEERAVKDELLGEKPEIKQKWASRLLAKLRKDIRPEFREDFVLTITGKKPPCCVLSNPDQKGKIRRIDCLRQADKVWRLDLVMVILFKGIPLESTDGERLYKSPQCSNPGLCVQPHHIGVTIKELDLYLAYFVHTPESGQSDSSNQQGDADIKPLPNGHLSFQDCFVTSGVWNVTELVRVSQTPVATASGPNFSLADLESPSYYNINQVTLGRRSITSPPSTSTTKRPKSIDDSEMESPVDDVFYPGTGRSPAAGSSQSSGWPNDVDAGPASLKKSGKLDFCSALSSQGSSPRMAFTHHPLPVLAGVRPGSPRATASALHFPSTSIIQQSSPYFTHPTIRYHHHHGQDSLKEFVQFVCSDGSGQATGQPNGSGQGKVPGSFLLPPPPPVARPVPLPMPDSKSTSTAPDGAALTPPSPSFATTGASSANRFVSIGPRDGNFLNIPQQSQSWFL

SEQ ID NO: 27303 - protein, 460 aa, Homo sapiens
MYSPYCLTQDEFHPFIEALLPHVRAFSYTWFNLQARKRKYFKKHEKRMSKDEERAVKDELLGEKPEIKQKWASRLLAKLRKDIRPEFREDFVLTITGKKPPCCVLSNPDQKGKIRRIDCLRQADKVWRLDLVMVILFKGIPLESTDGERLYKSPQCSNPGLCVQPHHIGVTIKELDLYLAYFVHTPESGQSDSSNQQGDADIKPLPNGHLSFQDCFVTSGVWNVTELVRVSQTPVATASGPNFSLADLESPSYYNINQVTLGRRSITSPPSTSTTKRPKSIDDSEMESPVDDVFYPGTGRSPAAGSSQSSGWPNDVDGSPRATASALHFPSTSIIQQSSPYFTHPTIRYHHHHGQDSLKEFVQFVCSDGSGQATGQPNGSGQGKVPGSFLLPPPPPVARPVPLPMPDSKSTSTAPDGAALTPPSPSFATTGASSANRFVSIGPRDGNFLNIPQQSQSWFL

SEQ ID NO: 27304 - protein, 441 aa, Homo sapiens
MYSPYCLTQDEFHPFIEALLPHVRAFSYTWFNLQARKRKYFKKHEKRMSKDEERAVKDELLGEKPEIKQKWASRLLAKLRKDIRPEFREDFVLTITGKKPPCCVLSNPDQKGKIRRIDCLRQADKVWRLDLVMVILFKGIPLESTDGERLYKSPQCSNPGLCVQPHHIGVTIKELDLYLAYFVHTPESGQSDSSNQQGDADIKPLPNGHLSFQDCFVTSGVWNVTELVRVSQTPVATASGPNFSLADLESPSYYNINQVTLGRRSITSPPSTSTTKRPKSIDDSEMESPVDDVFYPGTGRSPAAGSSQSSGWPNDVDAGPASLKKSGKLDFCSALSSQGSSPRMAFTHHPLPVLAGVRPGSPRATASALHFPSTSIIQQSSPYFTHPTIRYHHHHGQDSLKEFVQFVCSDGSGQATGQHSQRQAPPLPTGLSASDPGTATF

SEQ ID NO: 27305 - protein, 494 aa, Homo sapiens
MDEFHPFIEALLPHVRAFSYTWFNLQARKRKYFKKHEKRMSKDEERAVKDELLGEKPEIKQKWASRLLAKLRKDIRPEFREDFVLTITGKKPPCCVLSNPDQKGKIRRIDCLRQADKVWRLDLVMVILFKGIPLESTDGERLYKSPQCSNPGLCVQPHHIGVTIKELDLYLAYFVHTPESGQSDSSNQQGDADIKPLPNGHLSFQDCFVTSGVWNVTELVRVSQTPVATASGPNFSLADLESPSYYNINQVTLGRRSITSPPSTSTTKRPKSIDDSEMESPVDDVFYPGTGRSPAAGSSQSSGWPNDVDAGPASLKKSGKLDFCSALSSQGSSPRMAFTHHPLPVLAGVRPGSPRATASALHFPSTSIIQQSSPYFTHPTIRYHHHHGQDSLKEFVQFVCSDGSGQATGQPNGSGQGKVPGSFLLPPPPPVARPVPLPMPDSKSTSTAPDGAALTPPSPSFATTGASSANRFVSIGPRDGNFLNIPQQSQSWFL

SEQ ID NO: 27306 - protein, 440 aa, Homo sapiens
MLPACRLQDEFHPFIEALLPHVRAFSYTWFNLQARKRKYFKKHEKRMSKDEERAVKDELLGEKPEIKQKWASRLLAKLRKDIRPEFREDFVLTITGKKPPCCVLSNPDQKGKIRRIDCLRQADKVWRLDLVMVILFKGIPLESTDGERLYKSPQCSNPGLCVQPHHIGVTIKELDLYLAYFVHTPESGQSDSSNQQGDADIKPLPNGHLSFQDCFVTSGVWNVTELVRVSQTPVATASGPNFSLADLESPSYYNINQVTLGRRSITSPPSTSTTKRPKSIDDSEMESPVDDVFYPGTGRSPAAGSSQSSGWPNDVDAGPASLKKSGKLDFCSALSSQGSSPRMAFTHHPLPVLAGVRPGSPRATASALHFPSTSIIQQSSPYFTHPTIRYHHHHGQDSLKEFVQFVCSDGSGQATGQHSQRQAPPLPTGLSASDPGTATF

SEQ ID NO: 27307 - protein, 433 aa, Homo sapiens
MDEFHPFIEALLPHVRAFSYTWFNLQARKRKYFKKHEKRMSKDEERAVKDELLGEKPEIKQKWASRLLAKLRKDIRPEFREDFVLTITGKKPPCCVLSNPDQKGKIRRIDCLRQADKVWRLDLVMVILFKGIPLESTDGERLYKSPQCSNPGLCVQPHHIGVTIKELDLYLAYFVHTPESGQSDSSNQQGDADIKPLPNGHLSFQDCFVTSGVWNVTELVRVSQTPVATASGPNFSLADLESPSYYNINQVTLGRRSITSPPSTSTTKRPKSIDDSEMESPVDDVFYPGTGRSPAAGSSQSSGWPNDVDAGPASLKKSGKLDFCSALSSQGSSPRMAFTHHPLPVLAGVRPGSPRATASALHFPSTSIIQQSSPYFTHPTIRYHHHHGQDSLKEFVQFVCSDGSGQATGQHSQRQAPPLPTGLSASDPGTATF

SEQ ID NO: 27308 - protein, 325 aa, Homo sapiens
MATPLPPPSPRHLRLLRLLLSGLVLGAALRGAAAGHPDVAACPGSLDCALKRRARCPPGAHACGPCLQPFQEDQQGLCVPRMRRPPGGGRPQPRLEDEIDFLAQELARKESGHSTPPLPKDRQRLPEPATLGFSARGQGLELGLPSTPGTPTPTPHTSLGSPVSSDPVHMSPLEPRGGQGDGLALVLILAFCVAGAAALSVASLCWCRLQREIRLTQKADYATAKAPGSPAAPRISPGDQRLAQSAEMYHYQHQRQQMLCLERHKEPPKELDTASSDEENEDGDFTVYECPGLAPTGEMEVRNPLFDHAALSAPLPAPSSPPALP

SEQ ID NO: 27309 - protein, 125 aa, Homo sapiens
MLRPKALTQVLSQANTGGVQSTLLLNNEGSLLAYSGYGDTDARVTAAIASNIWAAYDRNGNQAFNEDNLKFILMDCMEGRVAITRVANLLLCMYAKETVGFGMLKAKAQALVQYLEEPLTQVAAS

SEQ ID NO: 27310 - protein, 150 aa, Homo sapiens
MLRPKALTQVLSQANTGGVQSTLLLNNEGSLLAYSGYGDTDARVTAAIASNIWAAYDRNGNQAFNEDNLKFILMDCMEGRVAITRVANLLLCMYAKETVGFGMLKAKAVCGTDLCSPSAGPGFGAVPGGAPHPSGGILTALVEAGVRKEK

SEQ ID NO: 27311 - protein, 95 aa, Homo sapiens
MLRPKALTQVLSQANTGGVQSTLLLNNEGSLLAYSGYGDTDARVTAAIASNIWAAYDRNGNQAFNEDNLKFILMDCMAQALVQYLEEPLTQVAAS

SEQ ID NO: 27312 - protein, 610 aa, Homo sapiens
MIASQFLSALTLVLLIKESGAWSYNTSTEAMTYDEASAYCQQRYTHLVAIQNKEEIEYLNSILSYSPSYYWIGIRKVNNVWVWVGTQKPLTEEAKNWAPGEPNNRQKDEDCVEIYIKREKDVGMWNDERCSKKKLALCYTAACTNTSCSGHGECVETINNYTCKCDPGFSGLKCEQIVNCTALESPEHGSLVCSHPLGNFSYNSSCSISCDRGYLPSSMETMQCMSSGEWSAPIPACNVVECDAVTNPANGFVECFQNPGSFPWNTTCTFDCEEGFELMGAQSLQCTSSGNWDNEKPTCKAVTCRAVRQPQNGSVRCSHSPAGEFTFKSSCNFTCEEGFMLQGPAQVECTTQGQWTQQIPVCEAFQCTALSNPERGYMNCLPSASGSFRYGSSCEFSCEQGFVLKGSKRLQCGPTGEWDNEKPTCEAVRCDAVHQPPKGLVRCAHSPIGEFTYKSSCAFSCEEGFELHGSTQLECTSQGQWTEEVPSCQVVKCSSLAVPGKINMSCSGEPVFGTVCKFACPEGWTLNGSAARTCGATGHWSGLLPTCEAPTESNIPLVAGLSAAGLSLLTLAPFLLWLRKCLRKAKKFVPASSCQSLESDGSYQKPSYIL

SEQ ID NO: 27313 - protein, 478 aa, Homo sapiens
MSPPLLKLGAVLSTMAMISNWMSQTLPSLVGLNTTRLSTPDTLTQISPKEGWQVYSSAQDPDGRCICTVVAPEQNLCSRDAKSRQLRQLLEKVQNMSQSIEVLNLRTQRDFQYVLKMETQMKGLKAKFRQIEDDRKTLMTKHFQELKEKMDELLPLIPVLEQYKTDAKLITQFKEEIRNLSAVLTGIQEEIGAYDYEELHQRVLSLETRLRDCMKKLTCGKLMKITGPVTVKTSGTRFGAWMTDPLASEKNNRVWYMDSYTNNKIVREYKSIADFVSGAESRTYNLPFKWAGTNHVVYNGSLYFNKYQSNIIIKYSFDMGRVLAQRSLEYAGFHNVYPYTWGGFSDIDLMADEIGLWAVYATNQNAGNIVISQLNQDTLEVMKSWSTGYPKRSAGESFMICGTLYVTNSHLTGAKVYYSYSTKTSTYEYTDIPFHNQYFHISMLDYNARDRALYAWNNGHQVLFNVTLFHIIKTEDDT

SEQ ID NO: 27314 - protein, 235 aa, Homo sapiens
MSPPLLKLGAVLSTMAMISNWMSQTLPSLVGLNTTRLSTPDTLTQISPKEGWQVYSSAQDPDGRCICTVVAPEQNLCSRDAKSRQLRQLLEKVQNMSQSIEVLNLRTQRDFQYVLKMETQMKGLKAKFRQIEDDRKTLMTKHFQELKEKMDELLPLIPVLEQYKTDAKLITQFKEEIRNLSAVLTGIQEEIGAYDYEELHQRVLSLETRLRDCMKKLIDLKKRKEEEKRQQKGEA

SEQ ID NO: 27315 - protein, 458 aa, Homo sapiens
MQATSNLLNLLLLSLFAGLDPSKTQISPKEGWQVYSSAQDPDGRCICTVVAPEQNLCSRDAKSRQLRQLLEKVQNMSQSIEVLNLRTQRDFQYVLKMETQMKGLKAKFRQIEDDRKTLMTKHFQELKEKMDELLPLIPVLEQYKTDAKLITQFKEEIRNLSAVLTGIQEEIGAYDYEELHQRVLSLETRLRDCMKKLTCGKLMKITGPVTVKTSGTRFGAWMTDPLASEKNNRVWYMDSYTNNKIVREYKSIADFVSGAESRTYNLPFKWAGTNHVVYNGSLYFNKYQSNIIIKYSFDMGRVLAQRSLEYAGFHNVYPYTWGGFSDIDLMADEIGLWAVYATNQNAGNIVISQLNQDTLEVMKSWSTGYPKRSAGESFMICGTLYVTNSHLTGAKVYYSYSTKTSTYEYTDIPFHNQYFHISMLDYNARDRALYAWNNGHQVLFNVTLFHIIKTEDDT

SEQ ID NO: 27316 - protein, 215 aa, Homo sapiens
MQATSNLLNLLLLSLFAGLDPSKTQISPKEGWQVYSSAQDPDGRCICTVVAPEQNLCSRDAKSRQLRQLLEKVQNMSQSIEVLNLRTQRDFQYVLKMETQMKGLKAKFRQIEDDRKTLMTKHFQELKEKMDELLPLIPVLEQYKTDAKLITQFKEEIRNLSAVLTGIQEEIGAYDYEELHQRVLSLETRLRDCMKKLIDLKKRKEEEKRQQKGEA

SEQ ID NO: 27317 - protein, 383 aa, Homo sapiens
MSQSIEVLNLRTQRDFQYVLKMETQMKGLKAKFRQIEDDRKTLMTKHFQELKEKMDELLPLIPVLEQYKTDAKLITQFKEEIRNLSAVLTGIQEEIGAYDYEELHQRVLSLETRLRDCMKKLTCGKLMKITGPVTVKTSGTRFGAWMTDPLASEKNNRVWYMDSYTNNKIVREYKSIADFVSGAESRTYNLPFKWAGTNHVVYNGSLYFNKYQSNIIIKYSFDMGRVLAQRSLEYAGFHNVYPYTWGGFSDIDLMADEIGLWAVYATNQNAGNIVISQLNQDTLEVMKSWSTGYPKRSAGESFMICGTLYVTNSHLTGAKVYYSYSTKTSTYEYTDIPFHNQYFHISMLDYNARDRALYAWNNGHQVLFNVTLFHIIKTEDDT

SEQ ID NO: 27318 - protein, 140 aa, Homo sapiens
MSQSIEVLNLRTQRDFQYVLKMETQMKGLKAKFRQIEDDRKTLMTKHFQELKEKMDELLPLIPVLEQYKTDAKLITQFKEEIRNLSAVLTGIQEEIGAYDYEELHQRVLSLETRLRDCMKKLIDLKKRKEEEKRQQKGEA

SEQ ID NO: 27319 - protein, 415 aa, Homo sapiens
MSGMEKLQNASWIYQQKLEDPFQKHLNSTEEYLAFLCGPRRSHFFLPVSVVYVPIFVVGVIGNVLVCLVILQHQAMKTPTNYYLFSLAVSDLLVLLLGMPLEVYEMWRNYPFLFGPVGCYFKTALFETVCFASILSITTVSVERYVAILHPFRAKLQSTRRRALRILGIVWGFSVLFSLPNTSIHGIKFHYFPNGSLVPGSATCTVIKPMWIYNFIIQVTSFLFYLLPMTVISVLYYLMALRLKKDKSLEADEGNANIQRPCRKSVNKMLFVLVLVFAICWAPFHIDRLFFSFVEEWSESLAAVFNLVHVVSGVFFYLSSAVNPIIYNLLSRRFQAAFQNVISSFHKQWHSQHDPQLPPAQRNIFLTECHFVELTEDIGPQFPCQSSMHNSHLPAALSSEQMSRTNYQSFHFNKT

SEQ ID NO: 27320 - protein, 2321 aa, Homo sapiens
MGPGARGRRRRRRPMSPPPPPPPVRALPLLLLLAGPGAAAPPCLDGSPCANGGRCTQLPSREAACLCPPGWVGERCQLEDPCHSGPCAGRGVCQSSVVAGTARFSCRCPRGFRGPDCSLPDPCLSSPCAHGARCSVGPDGRFLCSCPPGYQGRSCRSDVDECRVGEPCRHGGTCLNTPGSFRCQCPAGYTGPLCENPAVPCAPSPCRNGGTCRQSGDLTYDCACLPGFEGQNCEVNVDDCPGHRCLNGGTCVDGVNTYNCQCPPEWTGQFCTEDVDECQLQPNACHNGGTCFNTLGGHSCVCVNGWTGESCSQNIDDCATAVCFHGATCHDRVASFYCACPMGKTGLLCHLDDACVSNPCHEDAICDTNPVNGRAICTCPPGFTGGACDQDVDECSIGANPCEHLGRCVNTQGSFLCQCGRGYTGPRCETDVNECLSGPCRNQATCLDRIGQFTCICMAGFTGTYCEVDIDECQSSPCVNGGVCKDRVNGFSCTCPSGFSGSTCQLDVDECASTPCRNGAKCVDQPDGYECRCAEGFEGTLCDRNVDDCSPDPCHHGRCVDGIASFSCACAPGYTGTRCESQVDECRSQPCRHGGKCLDLVDKYLCRCPSGTTGVNCEVNIDDCASNPCTFGVCRDGINRYDCVCQPGFTGPLCNVEINECASSPCGEGGSCVDGENGFRCLCPPGSLPPLCLPPSHPCAHEPCSHGICYDAPGGFRCVCEPGWSGPRCSQSLARDACESQPCRAGGTCSSDGMGFHCTCPPGVQGRQCELLSPCTPNPCEHGGRCESAPGQLPVCSCPQGWQGPRCQQDVDECAGPAPCGPHGICTNLAGSFSCTCHGGYTGPSCDQDINDCDPNPCLNGGSCQDGVGSFSCSCLPGFAGPRCARDVDECLSNPCGPGTCTDHVASFTCTCPPGYGGFHCEQDLPDCSPSSCFNGGTCVDGVNSFSCLCRPGYTGAHCQHEADPCLSRPCLHGGVCSAAHPGFRCTCLESFTGPQCQTLVDWCSRQPCQNGGRCVQTGAYCLCPPGWSGRLCDIRSLPCREAAAQIGVRLEQLCQAGGQCVDEDSSHYCVCPEGRTGSHCEQEVDPCLAQPCQHGGTCRGYMGGYMCECLPGYNGDNCEDDVDECASQPCQHGGSCIDLVARYLCSCPPGTLGVLCEINEDDCGPGPPLDSGPRCLHNGTCVDLVGGFRCTCPPGYTGLRCEADINECRSGACHAAHTRDCLQDPGGGFRCLCHAGFSGPRCQTVLSPCESQPCQHGGQCRPSPGPGGGLTFTCHCAQPFWGPRCERVARSCRELQCPVGVPCQQTPRGPRCACPPGLSGPSCRSFPGSPPGASNASCAAAPCLHGGSCRPAPLAPFFRCACAQGWTGPRCEAPAAAPEVSEEPRCPRAACQAKRGDQRCDRECNSPGCGWDGGDCSLSVGDPWRQCEALQCWRLFNNSRCDPACSSPACLYDNFDCHAGGRERTCNPVYEKYCADHFADGRCDQGCNTEECGWDGLDCASEVPALLARGVLVLTVLLPPEELLRSSADFLQRLSAILRTSLRFRLDAHGQAMVFPYHRPSPGSEPRARRELAPEVIGSVVMLEIDNRLCLQSPENDHCFPDAQSAADYLGALSAVERLDFPYPLRDVRGEPLEPPEPSVPLLPLLVAGAVLLLVILVLGVMVARRKREHSTLWFPEGFSLHKDVASGHKGRREPVGQDALGMKNMAKGESLMGEVATDWMDTECPEAKRLKVEEPGMGAEEAVDCRQWTQHHLVAADIRVAPAMALTPPQGDADADGMDVNVRGPDGFTPLMLASFCGGALEPMPTEEDEADDTSASIISDLICQGAQLGARTDRTGETALHLAARYARADAAKRLLDAGADTNAQDHSGRTPLHTAVTADAQGVFQILIRNRSTDLDARMADGSTALILAARLAVEGMVEELIASHADVNAVDELGKSALHWAAAVNNVEATLALLKNGANKDMQDSKEETPLFLAAREGSYEAAKLLLDHFANREITDHLDRLPRDVAQERLHQDIVRLLDQPSGPRSPPGPHGLGPLLCPPGAFLPGLKAAQSGSKKSRRPPGKAGLGPQGPRGRGKKLTLACPGPLADSSVTLSPVDSLDSPRPFGGPPASPGGFPLEGPYAAATATAVSLAQLGGPGRAGLGRQPPGGCVLSLGLLNPVAVPLDWARLPPPAPPGPSFLLPLAPGPQLLNPGTPVSPQERPPPYLAVPGHGEEYPAAGAHSSPPKARFLRVPSEHPYLTPSPESPEHWASPSPPSLSDWSESTPSPATATGAMATTTGALPAQPLPLSVPSSLAQAQTQLGPQPEVTPKRQVLA

SEQ ID NO: 27321 - protein, 356 aa, Homo sapiens
MTKSYSESGLMGEPQPQGPPSWTDECLSSQDEEHEADKKEDDLETMNAEEDSLRNGGEEEDEDEDLEEEEEEEEEDDDQKPKRRGPKKKKMTKARLERFKLRRMKANARERNRMHGLNAALDNLRKVVPCYSKTQKLSKIETLRLAKNYIWALSEILRSGKSPDLVSFVQTLCKGLSQPTTNLVAGCLQLNPRTFLPEQNQDMPPHLPTASASFPVHPYSYQSPGLPSPPYGTMDSSHVFHVKPPPHAYSAALEPFFESPLTDCTSPSFDGPLSPPLSINGNFSFKHEPSAEFEKNYAFTMHYPAATLAGAQSHGSIFSGTAAPRCEIPIDNIMSFDSHSHHERVMSAQLNAIFHD

SEQ ID NO: 27322 - protein, 81 aa, Homo sapiens
MAAVAAASAELLIIGWYIFRVLLQVFLECCIYWVGFAFRNPPGTQPIARSEVFRYSLQKLAYTVSRTGRQVLGERRQRAPN

SEQ ID NO: 27323 - protein, 54 aa, Homo sapiens
MAAVAAASAELLIIGWYIFRVLLQVFRYSLQKLAYTVSRTGRQVLGERRQRAPN

SEQ ID NO: 27324 - protein, 2003 aa, Homo sapiens
MQPPSLLLLLLLLLLLCVSVVRPRGLLCGSFPEPCANGGTCLSLSLGQGTCQCAPGFLGETCQFPDPCQNAQLCQNGGSCQALLPAPLGLPSSPSPLTPSFLCTCLPGFTGERCQAKLEDPCPPSFCSKRGRCHIQASGRPQCSCMPGWTGEQCQLRDFCSANPCVNGGVCLATYPQIQCHCPPGFEGHACERDVNECFQDPGPCPKGTSCHNTLGSFQCLCPVGQEGPRCELRAGPCPPRGCSNGGTCQLMPEKDSTFHLCLCPPGFIGPDCEVNPDNCVSHQCQNGGTCQDGLDTYTCLCPETWTGWDCSEDVDECETQGPPHCRNGGTCQNSAGSFHCVCVSGWGGTSCEENLDDCIAATCAPGSTCIDRVGSFSCLCPPGRTGLLCHLEDMCLSQPCHGDAQCSTNPLTGSTLCLCQPGYSGPTCHQDLDECLMAQQGPSPCEHGGSCLNTPGSFNCLCPPGYTGSRCEADHNECLSQPCHPGSTCLDLLATFHCLCPPGLEGQLCEVETNECASAPCLNHADCHDLLNGFQCICLPGFSGTRCEEDIDECRSSPCANGGQCQDQPGAFHCKCLPGFEGPRCQTEVDECLSDPCPVGASCLDLPGAFFCLCPSGFTGQLCEVPLCAPNLCQPKQICKDQKDKANCLCPDGSPGCAPPEDNCTCHHGHCQRSSCVCDVGWTGPECEAELGGCISAPCAHGGTCYPQPSGYNCTCPTGYTGPTCSEEMTACHSGPCLNGGSCNPSPGGYYCTCPPSHTGPQCQTSTDYCVSAPCFNGGTCVNRPGTFSCLCAMGFQGPRCEGKLRPSCADSPCRNRATCQDSPQGPRCLCPTGYTGGSCQTLMDLCAQKPCPRNSHCLQTGPSFHCLCLQGWTGPLCNLPLSSCQKAALSQGIDVSSLCHNGGLCVDSGPSYFCHCPPGFQGSLCQDHVNPCESRPCQNGATCMAQPSGYLCQCAPGYDGQNCSKELDACQSQPCHNHGTCTPKPGGFHCACPPGFVGLRCEGDVDECLDQPCHPTGTAACHSLANAFYCQCLPGHTGQWCEVEIDPCHSQPCFHGGTCEATAGSPLGFICHCPKGFEGPTCSHRAPSCGFHHCHHGGLCLPSPKPGFPPRCACLSGYGGPDCLTPPAPKGCGPPSPCLYNGSCSETTGLGGPGFRCSCPHSSPGPRCQKPGAKGCEGRSGDGACDAGCSGPGGNWDGGDCSLGVPDPWKGCPSHSRCWLLFRDGQCHPQCDSEECLFDGYDCETPPACTPAYDQYCHDHFHNGHCEKGCNTAECGWDGGDCRPEDGDPEWGPSLALLVVLSPPALDQQLFALARVLSLTLRVGLWVRKDRDGRDMVYPYPGARAEEKLGGTRDPTYQERAAPQTQPLGKETDSLSAGFVVVMGVDLSRCGPDHPASRCPWDPGLLLRFLAAMAAVGALEPLLPGPLLAVHPHAGTAPPANQLPWPVLCSPVAGVILLALGALLVLQLIRRRRREHGALWLPPGFTRRPRTQSAPHRRRPPLGEDSIGLKALKPKAEVDEDGVVMCSGPEEGEEVGQAEETGPPSTCQLWSLSGGCGALPQAAMLTPPQESEMEAPDLDTRGPDGVTPLMSAVCCGEVQSGTFQGAWLGCPEPWEPLLDGGACPQAHTVGTGETPLHLAARFSRPTAARRLLEAGANPNQPDRAGRTPLHAAVAADAREVCQLLLRSRQTAVDARTEDGTTPLMLAARLAVEDLVEELIAAQADVGARDKWGKTALHWAAAVNNARAARSLLQAGADKDAQDNREQTPLFLAAREGAVEVAQLLLGLGAARELRDQAGLAPADVAHQRNHWDLLTLLEGAGPPEARHKATPGREAGPFPRARTVSVSVPPHGGGALPRCRTLSAGAGPRGGGACLQARTWSVDLAARGGGAYSHCRSLSGVGAGGGPTPRGRRFSAGMRGPRPNPAIMRGRYGVAAGRGGRVSTDDWPCDWVALGACGSASNIPIPPPCLTPSPERGSPQLDCGPPALQEMPINQGGEGKK

SEQ ID NO: 27325 - protein, 589 aa, Homo sapiens
MAAVGALEPLLPGPLLAVHPHAGTAPPANQLPWPVLCSPVAGVILLALGALLVLQLIRRRRREHGALWLPPGFTRRPRTQSAPHRRRPPLGEDSIGLKALKPKAEVDEDGVVMCSGPEEGEEVGQAEETGPPSTCQLWSLSGGCGALPQAAMLTPPQESEMEAPDLDTRGPDGVTPLMSAVCCGEVQSGTFQGAWLGCPEPWEPLLDGGACPQAHTVGTGETPLHLAARFSRPTAARRLLEAGANPNQPDRAGRTPLHAAVAADAREVCQLLLRSRQTAVDARTEDGTTPLMLAARLAVEDLVEELIAAQADVGARDKWGKTALHWAAAVNNARAARSLLQAGADKDAQDNREQTPLFLAAREGAVEVAQLLLGLGAARELRDQAGLAPADVAHQRNHWDLLTLLEGAGPPEARHKATPGREAGPFPRARTVSVSVPPHGGGALPRCRTLSAGAGPRGGGACLQARTWSVDLAARGGGAYSHCRSLSGVGAGGGPTPRGRRFSAGMRGPRPNPAIMRGRYGVAAGRGGRVSTDDWPCDWVALGACGSASNIPIPPPCLTPSPERGSPQLDCGPPALQEMPINQGGEGKK

SEQ ID NO: 27326 - protein, 377 aa, Homo sapiens
MQPPSLLLLLLLLLLLCVSVVRPRGLLCGSFPEPCANGGTCLSLSLGQGTCQCAPGFLGETCQFPDPCQNAQLCQNGGSCQALLPAPLGLPSSPSPLTPSFLCTCLPGFTGERCQAKLEDPCPPSFCSKRGRCHIQASGRPQCSCMPGWTGEQCQLRDFCSANPCVNGGVCLATYPQIQCHCPPGFEGHACERDVNECFQDPGPCPKGTSCHNTLGSFQCLCPVGQEGPRCELRAGPCPPRGCSNGGTCQLMPEKDSTFHLCLCPPGFIGPDCEVNPDNCVSHQCQNGGTCQDGLDTYTCLCPETWTGWDCSEDVDECETQGPPHCRNGGTCQNSAGSFHCVCVSGWGGTSCEENLDDCIAATCAPGSTCIDRVGSF

SEQ ID NO: 27327 - protein, 382 aa, Homo sapiens
MLTRLFSEPGLLSDVPKFASWGDGEDDEPRSDKGDAPPPPPPAPGPGAPGPARAAKPVPLRGEEGTEATLAEVKEEGELGGEEEEEEEEEEGLDEAEGERPKKRGPKKRKMTKARLERSKLRRQKANARERNRMHDLNAALDNLRKVVPCYSKTQKLSKIETLRLAKNYIWALSEILRSGKRPDLVSYVQTLCKGLSQPTTNLVAGCLQLNSRNFLTEQGADGAGRFHGSGGPFAMHPYPYPCSRLAGAQCQAAGGLGGGAAHALRTHGYCAAYETLYAAAGGGGASPDYNSSEYEGPLSPPLCLNGNFSLKQDSSPDHEKSYHYSMHYSALPGSRPTGHGLVFGSSAVRGGVHSENLLSYDMHLHHDRGPMYEELNAFFHN

SEQ ID NO: 27328 - protein, 331 aa, Homo sapiens
MSKTFVKSKEMGELVNTPSWMDKGLGSQNEVKEEESRPGTYGMLSSLTEEHDSIEEEEEEEEDGEKPKRRGPKKKKMTKARLERFRARRVKANARERTRMHGLNDALDNLRRVMPCYSKTQKLSKIETLRLARNYIWALSEVLETGQTPEGKGFVEMLCKGLSQPTSNLVAGCLQLGPQSVLLEKHEDKSPICDSAISVHNFNYQSPGLPSPPYGHMETHLLHLKPQVFKSLGESSFGSHLPDCSTPPYEGPLTPPLSISGNFSLKQDGSPDLEKSYSFMPHYPSSSLSSGHVHSTPFQAGTPRYDVPIDMSYDSYPHHGIGTQLNTVFTE

SEQ ID NO: 27329 - protein, 337 aa, Homo sapiens
MLTLPFDESVVMPESQMCRKFSRECEDQKQIKKPESFSKQIVLRGKSIKRAPGEETEKEEEEEDREEEDENGLPRRRGLRKKKTTKLRLERVKFRRQEANARERNRMHGLNDALDNLRKVVPCYSKTQKLSKIETLRLAKNYIWALSEILRIGKRPDLLTFVQNLCKGLSQPTTNLVAGCLQLNARSFLMGQGGEAAHHTRSPYSTFYPPYHSPELTTPPGHGTLDNSKSMKPYNYCSAYESFYESTSPECASPQFEGPLSPPPINYNGIFSLKQEETLDYGKNYNYGMHYCAVPPRGPLGQGAMFRLPTDSHFPYDLHLRSQSLTMQDELNAVFHN

SEQ ID NO: 27330 - protein, 264 aa, Homo sapiens
MESGFTSKDTYLSHFNPRDYLEKYYKFGSRHSAESQILKHLLKNLFKIFCLDGVKGDLLIDIGSGPTIYQLLSACESFKEIVVTDYSDQNLQELEKWLKKEPEAFDWSPVVTYVCDLEGNRVKGPEKEEKLRQAVKQVLKCDVTQSQPLGAVPLPPADCVLSTLCLDAACPDLPTYCRALRNLGSLLKPGGFLVIMDALKSSYYMIGEQKFSSLPLGREAVEAAVKEAGYTIEWFEVISQSYSSTMANNEGLFSLVARKLSRPL

SEQ ID NO: 27331 - protein, 390 aa, Homo sapiens
MPSKSLSNLSVTTGANESGSVPEGWERDFLPASDGTTTELVIRCVIPSLYLLIITVGLLGNIMLVKIFITNSAMRSVPNIFISNLAAGDLLLLLTCVPVDASRYFFDEWMFGKVGCKLIPVIQLTSVGVSVFTLTALSADRYRAIVNPMDMQTSGALLRTCVKAMGIWVVSVLLAVPEAVFSEVARISSLDNSSFTACIPYPQTDELHPKIHSVLIFLVYFLIPLAIISIYYYHIAKTLIKSAHNLPGEYNEHTKKQMETRKRLAKIVLVFVGCFIFCWFPNHILYMYRSFNYNEIDPSLGHMIVTLVARVLSFGNSCVNPFALYLLSESFRRHFNSQLCCGRKSYQERGTSYLLSSSAVRMTSLKSNAKNMVTNSVLLNGHSMKQEMAL

SEQ ID NO: 27332 - protein, 121 aa, Homo sapiens
MARRAGGARMFGSLLLFALLAAGVAPLSWDLPEPRSRASKIRVHSRGNLWATGHFMGKKSLEPSSPSPLGTAPHTSLRDQRLQLSHDLLGILLLKKALGVSLSRPAPQIQYRRLLVQILQK

SEQ ID NO: 27333 - protein, 154 aa, Homo sapiens
MARRAGGARMFGSLLLFALLAAGVAPLSWDLPEPRSRASKIRVHSRGNLWATGHFMGKKSLEPSSPSPLGTAPHTSLRDQRLQLSHDLLGILLLKKALGVSLSRPAPQIQEAAGTNTAEMTPIMGQTQQRGLDCAHPGKVLNGTLLMAPSGCKS

SEQ ID NO: 27334 - protein, 677 aa, Homo sapiens
MGDSHVDTSSTVSEAVAEEVSLFSMTDMILFSLIVGLLTYWFLFRKKKEEVPEFTKIQTLTSSVRESSFVEKMKKTGRNIIVFYGSQTGTAEEFANRLSKDAHRYGMRGMSADPEEYDLADLSSLPEIDNALVVFCMATYGEGDPTDNAQDFYDWLQETDVDLSGVKFAVFGLGNKTYEHFNAMGKYVDKRLEQLGAQRIFELGLGDDDGNLEEDFITWREQFWPAVCEHFGVEATGEESSIRQYELVVHTDIDAAKVYMGEMGRLKSYENQKPPFDAKNPFLAAVTTNRKLNQGTERHLMHLELDISDSKIRYESGDHVAVYPANDSALVNQLGKILGADLDVVMSLNNLDEESNKKHPFPCPTSYRTALTYYLDITNPPRTNVLYELAQYASEPSEQELLRKMASSSGEGKELYLSWVVEARRHILAILQDCPSLRPPIDHLCELLPRLQARYYSIASSSKVHPNSVHICAVVVEYETKAGRINKGVATNWLRAKEPAGENGGRALVPMFVRKSQFRLPFKATTPVIMVGPGTGVAPFIGFIQERAWLRQQGKEVGETLLYYGCRRSDEDYLYREELAQFHRDGALTQLNVAFSREQSHKVYVQHLLKQDREHLWKLIEGGAHIYVCGDARNMARDVQNTFYDIVAELGAMEHAQAVDYIKKLMTKGRYSLDVWS

SEQ ID NO: 27335 - protein, 347 aa, Homo sapiens
MVTRAGAGTAVAGAVVVALLSAALALYGPPLDAVLERAFSLRKAHSIKDMENTLQLVRNIIPPLSSTKHKGQDGRIGVVGGCQEYTGAPYFAAISALKVGADLSHVFCASAAAPVIKAYSPELIVHPVLDSPNAVHEVEKWLPRLHALVVGPGLGRDDALLRNVQGILEVSKARDIPVVIDADGLWLVAQQPALIHGYRKAVLTPNHVEFSRLYDAVLRGPMDSDDSHGSVLRLSQALGNVTVVQKGERDILSNGQQVLVCSQEGSSRRCGGQGDLLSGSLGVLVHWALLAGPQKTNGSSPLLVAAFGACSLTRQCNHQAFQKHGRSTTTSDMIAEVGAAFSKLFET

SEQ ID NO: 27336 - protein, 390 aa, Homo sapiens
MVTRAGAGTAVAGAVVVALLSAALALYGPPLDAVLERAFSLRKAHSIKDMENTLQLVRNIIPPLSSTKHKGQDGRIGVVGGCQEYTGAPYFAAISALKVGADLSHVFCASAAAPVIKAYSPELIVHPVLDSPNAVHEVEKWLPRLHALVVGPGLGRDDALLRNVQGILEVSKARDIPVVIDADGLWLVAQQPALIHGYRKAVLTPNHVEFSRLYDAVLRGPMDSDDSHGSVLRLSQALGNVTVVQKGERDILSNGQQVLVCSQEGSSRRCGGQGDLLSGSLGVLVHWALLAGPQKTNGGISDLKLTIWGPEIETGVKTRAQGSCGPRTTTPTSPHLLLSPSPQVQPSPGGRVWRLLSHQAVQPPSLPEARSLHHHLRHDRRGGGRLQQAL

SEQ ID NO: 27337 - protein, 126 aa, Homo sapiens
MDSDDSHGSVLRLSQALGNVTVVQKGERDILSNGQQVLVCSQEGSSRRCGGQGDLLSGSLGVLVHWALLAGPQKTNGSSPLLVAAFGACSLTRQCNHQAFQKHGRSTTTSDMIAEVGAAFSKLFET

SEQ ID NO: 27338 - protein, 237 aa, Homo sapiens
MLPDGPGSSLWGNPGLQTSDSPNAVHEVEKWLPRLHALVVGPGLGRDDALLRNVQGILEVSKARDIPVVIDADGLWLVAQQPALIHGYRKAVLTPNHVEFSRLYDAVLRGPMDSDDSHGSVLRLSQALGNVTVVQKGERDILSNGQQVLVCSQEGSSRRCGGQGDLLSGSLGVLVHWALLAGPQKTNGSSPLLVAAFGACSLTRQCNHQAFQKHGRSTTTSDMIAEVGAAFSKLFET

SEQ ID NO: 27339 - protein, 1115 aa, Homo sapiens
MRRLSLWWLLSRVCLLLPPPCALVLAGVPSSSSHPQPCQILKRIGHAVRVGAVHLQPWTTAPRAASRAPDDSRAGAQRDEPEPGTRRSPAPSPGARWLGSTLHGRGPPGSRKPGEGARAEALWPRDALLFAVDNLNRVEGLLPYNLSLEVVMAIEAGLGDLPLLPFSSPSSPWSSDPFSFLQSVCHTVVVQGVSALLAFPQSQGEMMELDLVSLVLHIPVISIVRHEFPRESQNPLHLQLSLENSLSSDADVTVSILTMNNWYNFSLLLCQEDWNITDFLLLTQNNSKFHLGSIINITANLPSTQDLLSFLQIQLESIKNSTPTVVMFGCDMESIRRIFEITTQFGVMPPELRWVLGDSQNVEELRTEGLPLGLIAHGKTTQSVFEHYVQDAMELVARAVATATMIQPELALIPSTMNCMEVETTNLTSGQYLSRFLANTTFRGLSGSIRVKGSTIVSSENNFFIWNLQHDPMGKPMWTRLGSWQGGKIVMDYGIWPEQAQRHKTHFQHPSKLHLRVVTLIEHPFVFTREVDDEGLCPAGQLCLDPMTNDSSTLDSLFSSLHSSNDTVPIKFKKCCYGYCIDLLEKIAEDMNFDFDLYIVGDGKYGAWKNGHWTGLVGDLLRGTAHMAVTSFSINTARSQVIDFTSPFFSTSLGILVRTRDTAAPIGAFMWPLHWTMWLGIFVALHITAVFLTLYEWKSPFGLTPKGRNRSKVFSFSSALNICYALLFGRTVAIKPPKCWTGRFLMNLWAIFCMFCLSTYTANLAAVMVGEKIYEELSGIHDPKLHHPSQGFRFGTVRESSAEDYVRQSFPEMHEYMRRYNVPATPDGVEYLKNDPEKLDAFIMDKALLDYEVSIDADCKLLTVGKPFAIEGYGIGLPPNSPLTANISELISQYKSHGFMDMLHDKWYRVVPCGKRSFAVTETLQMGIKHFSGLFVLLCIGFGLSILTTIGEHIVYRLLLPRIKNKSKLQYWLHTSQRLHRAINTSFIEEKQQHFKTKRVEKRSNVGPRQLTVWNTSNLSHDNRRKYIFSDEEGQNQLGIRIHQDIPLPPRRRELPALRTTNGKADSLNVSRNSVMQELSELEKQIQVIRQELQLAVSRKTELEEYQRTSRTCES

SEQ ID NO: 27340 - protein, 1043 aa, Homo sapiens
MEFVRALWLGLALALGPGSAGGHPQPCGVLARLGGSVRLGALLPRAPLARARARAALARAALAPRLPHNLSLELVVAAPPARDPASLTRGLCQALVPPGVAALLAFPEARPELLQLHFLAAATETPVLSLLRREARAPLGAPNPFHLQLHWASPLETLLDVLVAVLQAHAWEDVGLALCRTQDPGGLVALWTSRAGRPPQLVLDLSRRDTGDAGLRARLAPMAAPVGGEAPVPAAVLLGCDIARARRVLEAVPPGPHWLLGTPLPPKALPTAGLPPGLLALGEVARPPLEAAIHDIVQLVARALGSAAQVQPKRALLPAPVNCGDLQPAGPESPGRFLARFLANTSFQGRTGPVWVTGSSQVHMSRHFKVWSLRRDPRGAPAWATVGSWRDGQLDLEPGGASARPPPPQGAQVWPKLRVVTLLEHPFVFARDPDEDGQCPAGQLCLDPGTNDSATLDALFAALANGSAPRALRKCCYGYCIDLLERLAEDTPFDFELYLVGDGKYGALRDGRWTGLVGDLLAGRAHMAVTSFSINSARSQVVDFTSPFFSTSLGIMVRARDTASPIGAFMWPLHWSTWLGVFAALHLTALFLTVYEWRSPYGLTPRGRNRSTVFSYSSALNLCYAILFRRTVSSKTPKCPTGRLLMNLWAIFCLLVLSSYTANLAAVMVGDKTFEELSGIHDPKLHHPAQGFRFGTVWESSAEAYIKKSFPDMHAHMRRHSAPTTPRGVAMLTSDPPKLNAFIMDKSLLDYEVSIDADCKLLTVGKPFAIEGYGIGLPQNSPLTSNLSEFISRYKSSGFIDLLHDKWYKMVPCGKRVFAVTETLQMSIYHFAGLFVLLCLGLGSALLSSLGEHAFFRLALPRIRKGSRLQYWLHTSQKIHRALNTEPPEGSKEETAEAEPSGPEVEQQQQQQDQPTAPEGWKRARRAVDKERRVRFLLEPAVVVAPEADAEAEAAPREGPVWLCSYGRPPAARPTGAPQPGELQELERRIEVARERLRQALVRRGQLLAQLGDSARHRPRRLLQARAAPAEAPPHSGRPGSQE

SEQ ID NO: 27341 - protein, 190 aa, Homo sapiens [sequence omitted]

SEQ ID NO: 27342 - protein, 172 aa, Homo sapiens
MATITEKEVQQWYKGFIKDCPSGQLDAAGFQKIYKQFFPFGDPTKFATFVFNVFDENKDGRIEFSEFIQALSVTSRGTLDEKLRWAFKLYDLDNDGYITRNEMLDIVDAIYQMVGNTVELPEEENTPEKRVDRIFAMMDKNADGKLTLQEFQEGSKADPSIVQALSLYDGLV

SEQ ID NO: 27343 - protein, 1621 aa, Homo sapiens
MEGCMGEESFQMWELNRRLEAYLARVKALEEQNELLSAELGGLRAQSADTSWRAHADDELAALRALVDQRWREKHAAEVARDNLAEELEGVAGRCQQLRLARERTTEEVARNRRAVEAEKCARAWLSSQVAELERELEALRVAHEEERVGLNAQAACAPRCPAPPRGPPAPAPEVEELARRLGEAWRGAVRGYQERVAHMETSLGQARERLGRAVQGAREGRLELQQLQAERGGLLERRAALEQRLEGRWQERLRATEKFQLAVEALEQEKQGLQSQIAQVLEGRQQLAHLKMSLSLEVATYRTLLEAENSRLQTPGGGSKTSLSFQDPKLELQFPRTPEGRRLGSLLPVLSPTSLPSPLPATLETPVPAFLKNQEFLQARTPTLASTPIPPTPQAPSPAVDAEIRAQDAPLSLLQTQGGRKQAPEPLRAEARVAIPASVLPGPEEPGGQRQEASTGQSPEDHASLAPPLSPDHSSLEAKDGESGGSRVFSICRGEGEGQIWGLVEKETAIEGKVVSSLQQEIWEEEDLNRKEIQDSQVPLEKETLKSLGEEIQESLKTLENQSHETLERENQECPRSLEEDLETLKSLEKENKELLKDVEVVRPLEKEAVGQLKPTGKEDTQTLQSLQKENQELMKSLEGNLETFLFPGTENQELVSSLQENLESLTALEKENQEPLRSPEVGDEEALRPLTKENQEPLRSLEDENKEAFRSLEKENQEPLKTLEEEDQSIVRPLETENHKSLRSLEEQDQETLRTLEKETQQRRRSLGEQDQMTLRPPEKVDLEPLKSLDQEIARPLENENQEFLKSLKEESVEAVKSLETEILESLKSAGQENLETLKSPETQAPLWTPEEINQGAMNPLEKEIQEPLESVEVNQETFRLLEEENQESLRSLGAWNLENLRSPEEVDKESQRNLEEEENLGKGEYQESLRSLEEEGQELPQSADVQRWEDTVEKDQELAQESPPGMAGVENEDEAELNLREQDGFTGKEEVVEQGELNATEEVWIPGEGHPESPEPKEQRGLVEGASVKGGAEGLQDPEGQSQQVGAPGLQAPQGLPEAIEPLVEDDVAPGGDQASPEVMLGSEPAMGESAAGAEPGPGQGVGGLGDPGHLTREEVMEPPLEEESLEAKRVQGLEGPRKDLEEAGGLGTEFSELPGKSRDPWEPPREGREESEAEAPRGAEEAFPAETLGHTGSDAPSPWPLGSEEAEEDVPPVLVSPSPTYTPILEDAPGPQPQAEGSQEASWGVQGRAEALGKVESEQEELGSGEIPEGPQEEGEESREESEEDELGETLPDSTPLGFYLRSPTSPRWDPTGEQRPPPQGETGKEGWDPAVLASEGLEAPPSEKEEGEEGEEECGRDSDLSEEFEDLGTEAPFLPGVPGEVAEPLGQVPQLLLDPAAWDRDGESDGFADEEESGEEGEEDQEEGREPGAGRWGPGSSVGSLQALSSSQRGEFLESDSVSVSVPWDDSLRGAVAGAPKTALETESQDSAEPSGSEEESDPVSLEREDKVPGPLEIPSGMEDAGPGADIIGVNGQGPNLEGKSQHVNGGVMNGLEQSEEVGQGMPLVSEGDRGSPFQEEEGSALKTSWAGAPVHLGQGQFLKFTQREGDRESWSSGED

SEQ ID NO: 27344 - protein, 604 aa, Homo sapiens
MMRAVWEALAALAAVACLVGAVRGGPGLSMFAGQAAQPDPCSDENGHPRRCIPDFVNAAFGKDVRVSSTCGRPPARYCVVSERGEERLRSCHLCNASDPKKAHPPAFLTDLNNPHNLTCWQSENYLQFPHNVTLTLSLGKKFEVTYVSLQFCSPRPESMAIYKSMDYGRTWVPFQFYSTQCRKMYNRPHRAPITKQNEQEAVCTDSHTDMRPLSGGLIAFSTLDGRPSAHDFDNSPVLQDWVTATDIRVAFSRLHTFGDENEDDSELARDSYFYAVSDLQVGGRCKCNGHAARCVRDRDDSLVCDCRHNTAGPECDRCKPFHYDRPWQRATAREANECVACNCNLHARRCRFNMELYKLSGRKSGGVCLNCRHNTAGRHCHYCKEGYYRDMGKPITHRKACKACDCHPVGAAGKTCNQTTGQCPCKDGVTGITCNRCAKGYQQSRSPIAPCIKIPVAPPTTAASSVEEPEDCDSYCKASKGKLKINMKKYCKKDYAVQIHILKADKAGDWWKFTVNIISVYKQGTSRIRRGDQSLWIRSRDIACKCPKIKPLKKYLLLGNAEDSPDQSGIVADKSSLVIQWRDTWARRLRKFQQREKKGKCKKA

SEQ ID NO: 27345 - protein, 304 aa, Homo sapiens
MSSTLPALLCVGLCLSQRISAQQQTLPKPFIWAEPHFMVPKEKQVTICCQGNYGAVEYQLHFEGSLFAVDRPKPPERINKVKFYIPDMNSRMAGQYSCIYRVGELWSEPSNLLDLVVTEMYDTPTLSVHPGPEVISGEKVTFYCRLDTATSMFLLLKEGRSSHVQRGYGKVQAEFPLGPVTTAHRGTYRCFGSYNNHAWSFPSEPVKLLVTGDIENTSLAPEDPTFPADTWGTYLLTTETGLQKDHALWDHTAQNLLRMGLAFLVLVALVWFLVEDWLSRKRTRERASRASTWEGRRRLNTQTL

SEQ ID NO: 27346 - protein, 287 aa, Homo sapiens
MSSTLPALLCVGLCLSQRISAQQQTLPKPFIWAEPHFMVPKEKQVTICCQGNYGAVEYQLHFEGSLFAVDRPKPPERINKVKFYIPDMNSRMAGQYSCIYRVGELWSEPSNLLDLVVTEMYDTPTLSVHPGPEVISGEKVTFYCRLDTATSMFLLLKEGRSSHVQRGYGKVQAEFPLGPVTTAHRGTYRCFGSYNNHAWSFPSEPVKLLVTGDIENTSLAPEDPTFPDHALWDHTAQNLLRMGLAFLVLVALVWFLVEDWLSRKRTRERASRASTWEGRRRLNTQTL

SEQ ID NO: 27347 - protein, 209 aa, Homo sapiens
MSSTLPALLCVGLCLSQRISAQQQMYDTPTLSVHPGPEVISGEKVTFYCRLDTATSMFLLLKEGRSSHVQRGYGKVQAEFPLGPVTTAHRGTYRCFGSYNNHAWSFPSEPVKLLVTGDIENTSLAPEDPTFPADTWGTYLLTTETGLQKDHALWDHTAQNLLRMGLAFLVLVALVWFLVEDWLSRKRTRERASRASTWEGRRRLNTQTL

SEQ ID NO: 27348 - protein, 192 aa, Homo sapiens
MSSTLPALLCVGLCLSQRISAQQQMYDTPTLSVHPGPEVISGEKVTFYCRLDTATSMFLLLKEGRSSHVQRGYGKVQAEFPLGPVTTAHRGTYRCFGSYNNHAWSFPSEPVKLLVTGDIENTSLAPEDPTFPDHALWDHTAQNLLRMGLAFLVLVALVWFLVEDWLSRKRTRERASRASTWEGRRRLNTQTL

SEQ ID NO: 27349 - protein, 197 aa, Homo sapiens
MSSTLPALLCVEMYDTPTLSVHPGPEVISGEKVTFYCRLDTATSMFLLLKEGRSSHVQRGYGKVQAEFPLGPVTTAHRGTYRCFGSYNNHAWSFPSEPVKLLVTGDIENTSLAPEDPTFPADTWGTYLLTTETGLQKDHALWDHTAQNLLRMGLAFLVLVALVWFLVEDWLSRKRTRERASRASTWEGRRRLNTQTL

SEQ ID NO: 27350 - protein, 303 aa, Homo sapiens
MSSTLPALLCVGLCLSQRISAQQQTLPKPFIWAEPHFMVPKEKQVTICCQGNYGAVEYQLHFEGSLFAVDRPKPPERINKVKFYIPDMNSRMAGQYSCIYRVGELWSEPSNLLDLVVTEMYDTPTLSVHPGPEVISGEKVTFYCRLDTATSMFLLLKEGRSSHVQRGYGKVQAEFPLGPVTTAHRGTYRCFGSYNNHAWSFPSEPVKLLVTGDIENTSLAPEDPTFPDTWGTYLLTTETGLQKDHALWDHTAQNLLRMGLAFLVLVALVWFLVEDWLSRKRTRERASRASTWEGRRRLNTQTL

SEQ ID NO: 27351 - protein, 276 aa, Homo sapiens
MAWRALHPLLLLLLLFPGSQAQSKAQVLQSVAGQTLTVRCQYPPTGSLYEKKGWCKEASALVCIRLVTSSKPRTMAWTSRFTIWDDPDAGFFTVTMTDLREEDSGHYWCRIYRPSDNSVSKSVRFYLVVSPASASTQTSWTPRDLVSSQTQTQSCVPPTAGARQAPESPSTIPVPSQPQNSTLRPGPAAPIALVPVFCGLLVAKSLVLSALLVWWGDIWWKTMMELRSLDTQKATCHLQQVTDLPWTSVSSPVEREILYHTVARTKISDDDDEHTL

SEQ ID NO: 27352 - protein, 270 aa, Homo sapiens
MAWRALHPLLLLLLLFPGSQAQSKAQVLQSVAGQTLTVRCQYPPTGSLYEKKGWCKEASALVCIRLVTSSKPRTMAWTSRFTIWDDPDAGFFTVTMTDLREEDSGHYWCRIYRPSDNSVSKSVRFYLVVSPASASTQTSWTPRDLVSSQTQTQSCVPPTAGARQAPESPSTIPVPSHPSSPLPVPLPSRPQNSTLRPGPAAPIALVPVFCGLLVAKSLVLSALLVWWVLRNRHMQHQGRSLLHPAQPRPQAHRHFPLSHRAPGGTYGGKP

SEQ ID NO: 27353 - protein, 258 aa, Homo sapiens
MAWRALHPLLLLLLLFPGSQAQSKAQVLQSVAGQTLTVRCQYPPTGSLYEKKGWCKEASALVCIRLVTSSKPRTMAWTSRFTIWDDPDAGFFTVTMTDLREEDSGHYWCRIYRPSDNSVSKSVRFYLVVSPASASTQTSWTPRDLVSSQTQTQSCVPPTAGARQAPESPSTIPVPSQPQNSTLRPGPAAPIALVPVFCGLLVAKSLVLSALLVWWVLRNRHMQHQGRSLLHPAQPRPQAHRHFPLSHRAPGGTYGGKP

SEQ ID NO: 27354 - protein, 580 aa, Homo sapiens
MPGWPWGLLLTAGTLFAALSPGPPAPADPCHDEGGAPRGCVPGLVNAALGREVLASSTCGRPATRACDASDPRRAHSPALLTSPGGTASPLCWRSESLPRAPLNVTLTVPLGKAFELVFVSLRFCSAPPASVALLKSQDHGRSWAPLGFFSSHCDLDYGRLPAPANGPAGPGPEALCFPAPLAQPDGSGLLAFSMQDSSPPGLDLDSSPVLQDWVTATDVRVVLTRPSTAGDPRDMEAVVPYSYAATDLQVGGRCKCNGHASRCLLDTQGHLICDCRHGTEGPDCGRCKPFYCDRPWQRATARESHACLACSCNGHARRCRFNMELYRLSGRRSGGVCLNCRHNTAGRHCHYCREGFYRDPGRALSDRRACRACDCHPVGAAGKTCNQTTGQCPCKDGVTGLTCNRCAPGFQQSRSPVAPCVKTPIPGPTEDSSPVQPQDCDSHCKPARGSYRISLKKFCKKDYAVQVAVGARGEARGAWTRFPVAVLAVFRSGEERARRGSSALWVPAGDAACGCPRLLPGRRYLLLGGGPGAAAGGAGGRGPGLIAARGSLVLPWRDAWTRRLRRLQRRERRGRCSAA

SEQ ID NO: 27355 - protein, 201 aa, Homo sapiens
MAWMLLLILIMVHPGSCALWVSQPPEIRTLEGSSAFLPCSFNASQGRLAIGSVTWFRDEVVPGKEVRNGTPEFRGRLAPLASSRFLHDHQAELHIRDVRGHDASIYVCRVEVLGLGVGTGNGTRLVVEKEHPQLGAGTVLLLRAGFYAVSFLSVAVGSTVYYQGKCLTWKGPRRQLPAVVPAPLPPPCGSSAHLLPPVPGG

SEQ ID NO: 27356 - protein, 190 aa, Homo sapiens
MAWMLLLILIMVHPGSCALWVSQPPEIRTLEGSSAFLPCSFNASQGRLAIGSVTWFRDEVVPGKEVRNGTPEFRGRLAPLASSRFLHDHQAELHIRDVRGHDASIYVCRVEVLGLGVGTGNGTRLVVEKEHPQLGAGTVLLLRAGFYAVSFLSVAVGSTVYYQGKCHCHMGTHCHSSDGPRGVIPEPRCP

SEQ ID NO: 27357 - protein, 177 aa, Homo sapiens
MAWMLLLILIMVHPGSCALWVSQPPEIRTLEGSSAFLPCSFNASQGRLAIGSVTWFRDEVVPGKEVRNGTPEFRGRLAPLASSRFLHDHQAELHIRDVRGHDASIYVCRVEVLGLGVGTGNGTRLVVEKEHPQLGAGTVLLLRAGFYAVSFLSVAVGSTVYYQGKYAKSTLSGFPQL

SEQ ID NO: 27358 - protein, 176 aa, Homo sapiens
MAWMLLLILIMVHPGSCALWVSQPPEIRTLEGSSAFLPCSFNASQGRLAIGSVTWFRDEVVPGKEAELHIRDVRGHDASIYVCRVEVLGLGVGTGNGTRLVVEKEHPQLGAGTVLLLRAGFYAVSFLSVAVGSTVYYQGKCLTWKGPRRQLPAVVPAPLPPPCGSSAHLLPPVPGG

SEQ ID NO: 27359 - protein, 165 aa, Homo sapiens
MAWMLLLILIMVHPGSCALWVSQPPEIRTLEGSSAFLPCSFNASQGRLAIGSVTWFRDEVVPGKEAELHIRDVRGHDASIYVCRVEVLGLGVGTGNGTRLVVEKEHPQLGAGTVLLLRAGFYAVSFLSVAVGSTVYYQGKCHCHMGTHCHSSDGPRGVIPEPRCP

SEQ ID NO: 27360 - protein, 152 aa, Homo sapiens
MAWMLLLILIMVHPGSCALWVSQPPEIRTLEGSSAFLPCSFNASQGRLAIGSVTWFRDEVVPGKEAELHIRDVRGHDASIYVCRVEVLGLGVGTGNGTRLVVEKEHPQLGAGTVLLLRAGFYAVSFLSVAVGSTVYYQGKYAKSTLSGFPQL

SEQ ID NO: 27361 - protein, 628 aa, Homo sapiens
MGSCARLLLLWGCTVVAAGLSGVAGVSSRCEKACNPRMGNLALGRKLWADTTCGQNATELYCFYSENTDLTCRQPKCDKCNAAYPHLAHLPSAMADSSFRFPRTWWQSAEDVHREKIQLDLEAEFYFTHLIVMFKSPRPAAMVLDRSQDFGKTWKPYKYFATNCSATFGLEDDVVKKGAICTSKYSSPFPCTGGEVIFKALSPPYDTENPYSAKVQEQLKITNLRVQLLKRQSCPCQRNDLNEEPQHFTHYAIYDFIVKGSCFCNGHADQCIPVHGFRPVKAPGTFHMVHGKCMCKHNTAGSHCQHCAPLYNDRPWEAADGKTGAPNECRTCKCNGHADTCHFDVNVWEASGNRSGGVCDDCQHNTEGQYCQRCKPGFYRDLRRPFSAPDACKPCSCHPVGSAVLPANSVTFCDPSNGDCPCKPGVAGRRCDRCMVGYWGFGDYGCRPCDCAGSCDPITGDCISSHTDIDWYHEVPDFRPVHNKSEPAWEWEDAQGFSALLHSGKCECKEQTLGNAKAFCGMKYSYVLKIKILSAHDKGTHVEVNVKIKKVLKSTKLKIFRGKRTLYPESWTDRGCTCPILNPGLEYLVAGHEDIRTGKLIVNMKSFVQHWKPSLGRKVMDILKRECK

SEQ ID NO: 27362 - protein, 605 aa, Homo sapiens
MGSCARLLLLWGCTVVAAGLSGVAGVSSRCEKACNPRMGNLALGRKLWADTTCGQNATELYCFYSENTDLTCRQPKCDKCNAAYPHLAHLPSAMADSSFRFPRTWWQSAEDVHREKIQLDLEAEFYFTHLIVMFKSPRPAAMVLDRSQDFGKTWKPYKYFATNCSATFGLEDDVVKKGAICTSKYSSPFPCTGGEVIFKALSPPYDTENPYSAKVQEQLKITNLRVQLLKRQSCPCQRNDLNEEPQHFTHYAIYDFIVKGSCFCNGHADQCIPVHGFRPVKAPGTFHMVHGKCMCKHNTAGSHCQHCAPLYNDRPWEAADGKTGAPNECRTCKCNGHADTCHFDVNVWEASGNRSGGVCDDCQHNTEGQYCQRCKPGFYRDLRRPFSAPDACKPCSCHPVGSAVLPANSVTFCDPSNGDCPCKPGVAGRRCDRCMVGYWGFGDYGCRPCDCAGSCDPITGDCISSHTDIDWYHEVPDFRPVHNKSEPAWEWEDAQGFSALLHSVLKIKILSAHDKGTHVEVNVKIKKVLKSTKLKIFRGKRTLYPESWTDRGCTCPILNPGLEYLVAGHEDIRTGKLIVNMKSFVQHWKPSLGRKVMDILKRECK

SEQ ID NO: 27363 - protein, 591 aa, Homo sapiens
MGNLALGRKLWADTTCGQNATELYCFYSENTDLTCRQPKCDKCNAAYPHLAHLPSAMADSSFRFPRTWWQSAEDVHREKIQLDLEAEFYFTHLIVMFKSPRPAAMVLDRSQDFGKTWKPYKYFATNCSATFGLEDDVVKKGAICTSKYSSPFPCTGGEVIFKALSPPYDTENPYSAKVQEQLKITNLRVQLLKRQSCPCQRNDLNEEPQHFTHYAIYDFIVKGSCFCNGHADQCIPVHGFRPVKAPGTFHMVHGKCMCKHNTAGSHCQHCAPLYNDRPWEAADGKTGAPNECRTCKCNGHADTCHFDVNVWEASGNRSGGVCDDCQHNTEGQYCQRCKPGFYRDLRRPFSAPDACKPCSCHPVGSAVLPANSVTFCDPSNGDCPCKPGVAGRRCDRCMVGYWGFGDYGCRPCDCAGSCDPITGDCISSHTDIDWYHEVPDFRPVHNKSEPAWEWEDAQGFSALLHSGKCECKEQTLGNAKAFCGMKYSYVLKIKILSAHDKGTHVEVNVKIKKVLKSTKLKIFRGKRTLYPESWTDRGCTCPILNPGLEYLVAGHEDIRTGKLIVNMKSFVQHWKPSLGRKVMDILKRECK

SEQ ID NO: 27364 - protein, 109 aa, Homo sapiens
MQHPPCEPGNCLSLKEKKITEGSGGVCWGGETDASNPAPALTACCAAEREANVEQGLAGRLLLCNYERRVVRRCKIAGRGRAPLGTRPLDVSSFKLKEEGRPPCLKINK

SEQ ID NO: 27365 - protein, 489 aa, Homo sapiens
MPVTFALLLLLGQATADPCYDPQGRPQFCLPPVTQLAAVAASCPQACALSPGNHLGARETCNGSLTLALGGPFLLTSVSLRFCTPGPPALILSAAWASGGPWRLLWHRPAWPGALGGPERVTFHSTPGPKATVAASHLRVEFGGQAGLAAAGLRGRCQCHGHAARCAARARPPRCHCRHHTTGPGCESCRPSHRDWPWRPATPRHPHPCLPCSCNQHARRCRFNSELFRLSGGRSGGVCERCRHHTAGRHCHYCQPGFWRDPSQPIFSRRACRACQCHPIGATGGTCNQTSGQCTCKLGVTGLTCNRCGPGYQQSRSPRMPCQRIPEATTTLATTPGAYSSDPQCQNYCNMSDTRVHMSLRRYCQQDHVLRAQVLASEAAGPAWQRLAVRVLAVYKQRAQPVRRGDQDAWVPRADLTCGCLRLQPGTDYLLLGSAVGDPDPTRLILDRHGLALPWRPRWARPLKRLQQEERAGGCRGVRAPTPSPRPEH

SEQ ID NO: 27366 - protein, 350 aa, Homo sapiens
MPVTFALLLLLGQATADPCYDPQGRPQFCLPPVTQLAAVAASCPQACALSPGNHLGARETCNGSLTLALGGPFLLTSVSLRFCTPGPPALILSAAWASGGPWRLLWHRPAWPGALGGPERVTFHSTPGPKATVAASHLRVEFGGQAGLAAAGLRGRCQCHGHAARCAARARPPRCHCRHHTTGPGCESCRPSHRDWPWRPATPRHPHPCLPCSCNQHARRCRFNSELFRLSGGRSGGVCERCRHHTAGRHCHYCQPGFWRDPSQPIFSRRACRACQCHPIGATGGTCNQTSGQCTCKLGVTGLTCNRCGPGYQQSRSPRMPCQRIPEATTTLATTPGAYSSGKTVWHGGP

SEQ ID NO: 27367 - protein, 875 aa, Homo sapiens
MTLARFVLALMLGALPEVVGFDSVLNDSLHHSHRHSPPAGPHYPYYLPTQQRPPRTRPPPPLPRFPRPPRALPAQRPHALQAGHTPRPHPWGCPAGEPWVSVTDFGAPCLRWAEVPPFLERSPPASWAQLRGQRHNFCRSPDGAGRPWCFYGDARGKVDWGYCDCRHGSVRLRGGKNEFEGTVEVYASGVWGTVCSSHWDDSDASVICHQLQLGGKGIAKQTPFSGLGLIPIYWSNVRCRGDEENILLCEKDIWQGGVCPQKMAAAVTCSFSHGPTFPIIRLAGGSSVHEGRVELYHAGQWGTVCDDQWDDADAEVICRQLGLSGIAKAWHQAYFGEGSGPVMLDEVRCTGNELSIEQCPKSSWGEHNCGHKEDAGVSCTPLTDGVIRLAGGKGSHEGRLEVYYRGQWGTVCDDGWTELNTYVVCRQLGFKYGKQASANHFEESTGPIWLDDVSCSGKETRFLQCSRRQWGRHDCSHREDVSIACYPGGEGHRLSLGFPVRLMDGENKKEGRVEVFINGQWGTICDDGWTDKDAAVICRQLGYKGPARARTMAYFGEGKGPIHVDNVKCTGNERSLADCIKQDIGRHNCRHSEDAGVICDYFGKKASGNSNKESLSSVCGLRLLHRRQKRIIGGKNSLRGGWPWQVSLRLKSSHGDGRLLCGATLLSSCWVLTAAHCFKRYGNSTRSYAVRVGDYHTLVPEEFEEEIGVQQIVIHREYRPDRSDYDIALVRLQGPEEQCARFSSHVLPACLPLWRERPQKTASNCYITGWGDTGRAYSRTLQQAAIPLLPKRFCEERYKGRFTGRMLCAGNLHEHKRVDSCQGDSGGPLMCERPGESWVVYGVTSWGYGCGVKDSPGVYTKVSAFVPWIKSVTKL

SEQ ID NO: 27368 - protein, 555 aa, Homo sapiens
MGNTVHRTLPDPSPPARLLATRPCCGPGPERRPVLGEAPRFHAQAKGKNVRLDGHSRRATRRNSFCNGVTFTQRPIRLYEQVRLRLVAVRPGWSGALRFGFTAHDPSLMSAQDIPKYACPDLVTRPGYWAKALPENLALRDTVLAYWADRHGRVFYSVNDGEPVLFHCGVAVGGPLWALIDVYGITDEVQLLESAFADTLTPARLSQARFSACLPPSSHDAANFDNNELENNQVVAKLGHLALGRAPGPPPADAAAAAIPCGPRERPRPASSPALLEADLRFHATRGPDVSLSADRKVACAPRPDGGRTLVFSERPLRPGESLFVEVGRPGLAAPGALAFGITSCDPGVLRPNELPADPDALLDRKEYWVVARAGPVPSGGDALSFTLRPGGDVLLGINGRPRGRLLCVDTTQALWAFFAVRGGVAGQLRLLGTLQSSPATTTPSGSLSGSQDDSDSDMTFSVNQSSSASESSLVTAPSSPLSPPVSPVFSPPEPAGIKNGECTVCFDGEVDTVIYTCGHMCLCHSCGLRLKRQARACCPICRRPIKDVIKIYRP

SEQ ID NO: 27369 - protein, 373 aa, Homo sapiens
MGNTVHRTLPESAFADTLTPARLSQARFSACLPPSSHDAANFDNNELENNQVVAKLGHLALGRAPGPPPADAAAAAIPCGPRERPRPASSPALLEADLRFHATRGPDVSLSADRKVACAPRPDGGRTLVFSERPLRPGESLFVEVGRPGLAAPGALAFGITSCDPGVLRPNELPADPDALLDRKEYWVVARAGPVPSGGDALSFTLRPGGDVLLGINGRPRGRLLCVDTTQALWAFFAVRGGVAGQLRLLGTLQSSPATTTPSGSLSGSQDDSDSDMTFSVNQSSSASESSLVTAPSSPLSPPVSPVFSPPEPAGIKNGECTVCFDGEVDTVIYTCGHMCLCHSCGLRLKRQARACCPICRRPIKDVIKIYRP

SEQ ID NO: 27370 - protein, 315 aa, Homo sapiens
MGNTVHRTLPDPSPPARLLATRPCCGPGPERRPVLGEAPRFHAQAKGKNVRLDGHSRRATRRNSFCNGVTFTQRPIRLYEQVRLRLVAVRPGWSGALRFGFTAHDPSLMSAQDIPKYACPDLVTRPGYWAKALPENLALRDTVLAYWADRHGRVFYSVNDGEPVLFHCGVAVGGPLWALIDVYGITDEVQLLGTLQSSPATTTPSGSLSGSQDDSDSDMTFSVNQSSSASESSLVTAPSSPLSPPVSPVFSPPEPAGIKNGECTVCFDGEVDTVIYTCGHMCLCHSCGLRLKRQARACCPICRRPIKDVIKIYRP

SEQ ID NO: 27371 - protein, 125 aa, Homo sapiens
MAGPSLACCLLGLLALTSACYIQNCPLGGKRAAPDLDVRKCLPCGPGGKGRCFGPNICCAEELGCFVGTAEALRCQEENYLPSPCQSGQKACGSGGRCAVLGLCCSPDGCHADPACDAEATFSQR

SEQ ID NO: 27372 - protein, 344 aa, Homo sapiens
MKMKLFQTICRQLRSSKFSVESAALVAFSTSSYSCGRKKKVNPYEEVDQEKYSNLVQSVLSSRGVAQTPGSVEEDALLCGPVSKHKLPNQGEDRRVPQNWFPIFNPERSDKPNASDPSVPLKIPLQRNVIPSVTRVLQQTMTKQQVFLLERWKQRMILELGEDGFKEYTSNVFLQGKRFHEALESILSPQETLKERDENLLKSGYIESVQHILKDVSGVRALESAVQHETLNYIGLLDCVAEYQGKLCVIDWKTSEKPKPFIQSTFDNPLQVVAYMGAMNHDTNYSFQVQCGLIVVAYKDGSPAHPHFMDAELCSQYWTKWLLRLEEYTEKKKNQNIQKPEYSE

SEQ ID NO: 27373 - protein, 118 aa, Homo sapiens
MVARVWSLMRFLIKGSVAGGAVYLVYDQELLGPSDKSQAALQKAGEVVPPAMYQFSQYVCQQTGLQIPQLPAPPKIYFPIRDSWNAGIMTVMSALSVAPSKAREYSKEGWEYVKARTK

SEQ ID NO: 27374 - protein, 474 aa, Homo sapiens
MELGGHWDMNSAPRLVSETAERKQEQKTGTEAEAADSGAVGARRFLLCLYLVGFLDLFGVSMVVPLLSLHVKSLGASPTVAGIVGSSYGILQLFSSTLVGCWSDVVGRRSSLLACILLSALGYLLLGAATNVFLFVLARVPAGIFKHTLSISRALLSDVVPEKERPLVIGHFNTASGVGFILGPVVGGYLTELEDGFYLTAFICFLVFILNAGLVWFFPWREAKPGSTEKGLPLRKTHVLLGRSHDTVQEAATSRRARASKKTAQPWVEVVLALRNMKNLLFSEMWDIFLVRLLMAMAVMLYYSNFVLALEERFGVRPKVTGYLISYSSMLGAVAGLALGPILRLYKHNSQALLLHSSILTCTLLLLYSLAPTMGAVVLSSTLLSFSTAIGRTCITDLQLTVGGAQASGTLIGVGQSVTAVGRIIAPLLSGVAQEVSPCGPPSLGAVLALVAIFIMSLNKRHSSGDGNSKLKSE

SEQ ID NO: 27375 - protein, 461 aa, Homo sapiens
MPPSGPRGTLLLLPLLLLLLLRAVLAVPLERGAPNKEETPATESPDTGLYYHRYLQEVIDVLETDGHFREKLQAANAEDIKSGKLSRELDFVSHHVRTKLDELKRQEVSRLRMLLKAKMDAEQDPNVQVDHLNLLKQFEHLDPQNQHTFEARDLELLIQTATRDLAQYDAAHHEEFKRYEMLKEHERRRYLESLGEEQRKEAERKLEEQQRRHREHPKVNVPGSQAQLKEVWEELDGLDPNRFNPKTFFILHDINSDGVLDEQELEALFTKELEKVYDPKNEEDDMREMEEERLRMREHVMKNVDTNQDRLVTLEEFLASTQRKEFGDTGEGWETVEMHPAYTEEELRRFEEELAAREAELNAKAQRLSQETEALGRSQGRLEAQKRELQQAVLHMEQRKQQQQQQQGHKAPAAHPEGQLKFHPDTDDVPVPAPAGDQKEVDTSEKKLLERLPEVEVPQHL

SEQ ID NO: 27376 - protein, 721 aa, Homo sapiens
MAEKFESLMNIHGFDLGSRYMDLKPLGCGGNGLVFSAVDNDCDKRVAIKKIVLTDPQSVKHALREIKIIRRLDHDNIVKVFEILGPSGSQLTDDVGSLTELNSVYIVQEYMETDLANVLEQGPLLEEHARLFMYQLLRGLKYIHSANVLHRDLKPANLFINTEDLVLKIGDFGLARIMDPHYSHKGHLSEGLVTKWYRSPRLLLSPNNYTKAIDMWAAGCIFAEMLTGKTLFAGAHELEQMQLILESIPVVHEEDRQELLSVIPVYIRNDMTEPHKPLTQLLPGISREALDFLEQILTFSPMDRLTAEEALSHPYMSIYSFPMDEPISSHPFHIEDEVDDILLMDETHSHIYNWERYHDCQFSEHDWPVHNNFDIDEVQLDPRALSDVTDEEEVQVDPRKYLDGDREKYLEDPAFDTNYSTEPCWQYSDHHENKYCDLECSHTCNYKTRSSSYLDNLVWRESEVNHYYEPKLIIDLSNWKEQSKEKSDKKGKSKCERNGLVKAQIALEEASQQLAGKEREKNQGFDFDSFIAGTIQLSSQHEPTDVVDKLNDLNSSVSQLELKSLISKSVSQEKQEKGMANLAQLEALYQSSWDSQFVSGGEDCFFINQFCEVRKDEQVEKENTYTSYLDKFFSRKEDTEMLETEPVEDGKLGERGHEEGFLNNSGEFLFNKQLESIGIPQFHSPVGSPLKSIQATLTPSAMKSSPQIPHQTYSSILKHLN

SEQ ID NO: 27377 - protein, 2090 aa, Homo sapiens
MGDEMDAMIPEREMKDFQFRALKKVRIFDSPEELPKERSSLLAVSNKYGLVFAGGASGLQIFPTKNLLIQNKPGDDPNKIVDKVQGLLVPMKFPIHHLALSCDNLTLSACMMSSEYGSIIAFFDVRTFSNEAKQQKRPFAYHKLLKDAGGMVIDMKWNPTVPSMVAVCLADGSIAVLQVTETVKVCATLPSTVAVTSVCWSPKGKQLAVGKQNGTVVQYLPTLQEKKVIPCPPFYESDHPVRVLDVLWIGTYVFAIVYAAADGTLETSPDVVMALLPKKEEKHPEIFVNFMEPCYGSCTERQHHYYLSYIEEWDLVLAASAASTEVSILARQSDQINWESWLLEDSSRAELPVTDKSDDSLPMGVVVDYTNQVEITISDEKTLPPAPVLMLLSTDGVLCPFYMINQNPGVKSLIKTPERLSLEGERQPKSPGSTPTTPTSSQAPQKLDASAAAAPASLPPSSPAAPIATFSLLPAGGAPTVFSFGSSSLKSSATVTGEPPSYSSGSDSSKAAPGPGPSTFSFVPPSKASLAPTPAASPVAPSAASFSFGSSGFKPTLESTPVPSVSAPNIAMKPSFPPSTSAVKVNLSEKFTAAATSTPVSSSQSAPPMSPFSSASKPAASGPLSHPTPLSAPPSSVPLKSSVLPSPSGRSAQGSSSPVPSMVQKSPRITPPAAKPGSPQAKSLQPAVAEKQGHQWKDSDPVMAGIGEEIAHFQKELEELKARTSKACFQVGTSEEMKMLRTESDDLHTFLLEIKETTESLHGDISSLKTTLLEGFAGVEEAREQNERNRDSGYLHLLYKRPLDPKSEAQLQEIRRLHQYVKFAVQDVNDVLDLEWDQHLEQKKKQRHLLVPERETLFNTLANNREIINQQRKRLNHLVDSLQQLRLYKQTSLWSLSSAVPSQSSIHSFDSDLESLCNALLKTTIESHTKSLPKVPAKLSPMKQAQLRNFLAKRKTPPVRSTAPASLSRSAFLSQRYYEDLDEVSSTSSVSQSLESEDARTSCKDDEAVVQAPRHAPVVRTPSIQPSLLPHAAPFAKSHLVHGSSPGVMGTSVATSASKIIPQGADSTMLATKTVKHGAPSPSHPISAPQAAAAAALRRQMASQAPAVNTLTESTLKNVPQVVNVQELKNNPATPSTAMGSSVPYSTAKTPHPVLTPVAANQAKQGSLINSLKPSGPTPASGQLSSGDKASGTAKIETAVTSTPSASGQFSKPFSFSPSGTGFNFGIITPTPSSNFTAAQGATPSTKESSQPDAFSSGGGSKPSYEAIPESSPPSGITSASNTTPGEPAASSSRPVAPSGTALSTTSSKLETPPSKLGELLFPSSLAGETLGSFSGLRVGQADDSTKPTNKASSTSLTSTQPTKTSGVPSGFNFTAPPVLGKHTEPPVTSSATTTSVAPPAATSTSSTAVFGSLPVTSAGSSGVISFGGTSLSAGKTSFSFGSQQTNSTVPPSAPPPTTAATPLPTSFPTLSFGSLLSSATTPSLPMSAGRSTEEATSSALPEKPGDSEVSASAASLLEEQQSAQLPQAPPQTSDSVKKEPVLAQPAVSNSGTAASSTSLVALSAEATPATTGVPDARTEAVPPASSFSVPGQTAVTAAAISSAGPVAVETSSTPIASSTTSIVAPGPSAEAAAFGTVTSGSSVFAQPPAASSSSAFNQLTNNTATAPSATPVFGQVAASTAPSLFGQQTGSTASTAAATPQVSSSGFSSPAFGTTAPGVFGQTTFGQASVFGQSASSAASVFSFSQPGFSSVPAFGQPASSTPTSTSGSVFGAASSTSSSSSFSFGQSSPNTGGGLFGQSNAPAFGQSPGFGQGGSVFGGTSAATTTAATSGFSFCQASGFGSSNTGSVFGQAASTGGIVFGQQSSSSSGSVFGSGNTGRGGGFFSGLGGKPSQDAANKNPFSSASGGFGSTATSNTSNLFGNSGAKTFGGFASSSFGEQKPTGTFSSGGGSVASQGFGFSSPNKTGGFGAAPVFGSPPTFGGSPGFGGVPAFGSAPAFTSPLGSTGGKVFGEGTAAASAGGFGFGSSSNTTSFGTLASQNAPTFGSLSQQTSGFGTQSSGFSGFGSGTGGFSFGSNNSSVQGFGGWRS

SEQ ID NO: 27378 - protein, 2079 aa, Homo sapiens
MGDEMDAMIPEREMKDFQFRALKKVRIFDSPEELPKERSSLLAVSNKYGLVFAGGASGLQIFPTKNLLIQNKPGDDPNKIVDKVQGLLVPMKFPIHHLALSCDNLTLSACMMSSEYGSIIAFFDVRTFSNEAKQQKRPFAYHKLLKDAGGMVIDMKWNPTVPSMVAVCLADGSIAVLQVTETVKVCATLPSTVAVTSVCWSPKGKQLAVGKQNGTVVQYLPTLQEKKVIPCPPFYESDHPVRVLDVLWIGTYVFAIVYAAADGTLETSPDVVMALLPKKEEKHPEIFVNFMEPCYGSCTERQHHYYLSYIEEWDLVLAASAASTEVSILARQSDQINWESWLLEDSSRAELPVTDKSDDSLPMGVVVDYTNQVEITISDEKTLPPAPVLMLLSTDGVLCPFYMINQNPGVKSLIKTPERLSLEGERQPKSPGSTPTTPTSSQAPQKLDASAAAAPASLPPSSPAAPIATFSLLPAGGAPTVFSFGSSSLKSSATVTGEPPSYSSGSDSSKAAPGPGPSTFSFVPPSKASLAPTPAASPVAPSAASFSFGSSGFKPTLESTPVPSVSAPNIAMKPSFPPSTSAVKVNLSENSSQSAPPMSPFSSASKPAASGPLSHPTPLSAPPSSVPLKSSVLPSPSGRSAQGSSSPVPSMVQKSPRITPPAAKPGSPQAKSLQPAVAEKQGHQWKDSDPVMAGIGEEIAHFQKELEELKARTSKACFQVGTSEEMKMLRTESDDLHTFLLEIKETTESLHGDISSLKTTLLEGFAGVEEAREQNERNRDSGYLHLLYKRPLDPKSEAQLQEIRRLHQYVKFAVQDVNDVLDLEWDQHLEQKKKQRHLLVPERETLFNTLANNREIINQQRKRLNHLVDSLQQLRLYKQTSLWSLSSAVPSQSSIHSFDSDLESLCNALLKTTIESHTKSLPKVPAKLSPMKQAQLRNFLAKRKTPPVRSTAPASLSRSAFLSQRYYEDLDEVSSTSSVSQSLESEDARTSCKDDEAVVQAPRHAPVVRTPSIQPSLLPHAAPFAKSHLVHGSSPGVMGTSVATSASKIIPQGADSTMLATKTVKHGAPSPSHPISAPQAAAAAALRRQMASQAPAVNTLTESTLKNVPQVVNVQELKNNPATPSTAMGSSVPYSTAKTPHPVLTPVAANQAKQGSLINSLKPSGPTPASGQLSSGDKASGTAKIETAVTSTPSASGQFSKPFSFSPSGTGFNFGIITPTPSSNFTAAQGATPSTKESSQPDAFSSGGGSKPSYEAIPESSPPSGITSASNTTPGEPAASSSRPVAPSGTALSTTSSKLETPPSKLGELLFPSSLAGETLGSFSGLRVGQADDSTKPTNKASSTSLTSTQPTKTSGVPSGFNFTAPPVLGKHTEPPVTSSATTTSVAPPAATSTSSTAVFGSLPVTSAGSSGVISFGGTSLSAGKTSFSFGSQQTNSTVPPSAPPPTTAATPLPTSFPTLSFGSLLSSATTPSLPMSAGRSTEEATSSALPEKPGDSEVSASAASLLEEQQSAQLPQAPPQTSDSVKKEPVLAQPAVSNSGTAASSTSLVALSAEATPATTGVPDARTEAVPPASSFSVPGQTAVTAAAISSAGPVAVETSSTPIASSTTSIVAPGPSAEAAAFGTVTSGSSVFAQPPAASSSSAFNQLTNNTATAPSATPVFGQVAASTAPSLFGQQTGSTASTAAATPQVSSSGFSSPAFGTTAPGVFGQTTFGQASVFGQSASSAASVFSFSQPGFSSVPAFGQPASSTPTSTSGSVFGAASSTSSSSSFSFGQSSPNTGGGLFGQSNAPAFGQSPGFGQGGSVFGGTSAATTTAATSGFSFCQASGFGSSNTGSVFGQAASTGGIVFGQQSSSSSGSVFGSGNTGRGGGFFSGLGGKPSQDAANKNPFSSASGGFGSTATSNTSNLFGNSGAKTFGGFASSSFGEQKPTGTFSSGGGSVASQGFGFSSPNKTGGFGAAPVFGSPPTFGGSPGFGGVPAFGSAPAFTSPLGSTGGKVFGEGTAAASAGGFGFGSSSNTTSFGTLASQNAPTFGSLSQQTSGFGTQSSGFSGFGSGTGGFSFGSNNSSVQGFGGWRS

SEQ ID NO: 27379 - protein, 2091 aa, Homo sapiens
MGDEMDAMIPEREMKDFQFRALKKVRIFDSPEELPKERSSLLAVSNKYGLVFAGGASGLQIFPTKNLLIQNKPGDDPNKIVDKVQGLLVPMKFPIHHLALSCDNLTLSACMMSSEYGSIIAFFDVRTFSNEAKQQKRPFAYHKLLKDAGGMVIDMKWNPTVPSMVAVCLADGSIAVLQVTETVKVCATLPSTVAVTSVCWSPKGKQLAVGKQNGTVVQYLPTLQEKKVIPCPPFYESDHPVRVLDVLWIGTYVFAIVYAAADGTLETSPDVVMALLPKKEEKHPEIFVNFMEPCYGSCTERQHHYYLSYIEEWDLVLAASAASTEVSILARQSDQINWESWLLEDSSRAELPVTDKSDDSLPMGVVVDYTNQVEITISDEKTLPPAPVLMLLSTDGVLCPFYMINQNPGVKSLIKTPERLSLEGERQPKSPGSTPTTPTSSQAPQKLDASAAAAPASLPPSSPAAPIATFSLLPAGGAPTVFSFGSSSLKSSATVTGEPPSYSSGSDSSKAAPGPGPSTFSFVPPSKASLAPTPAASPVAPSAASFSFGSSGFKPTLESTPVPSVSAPNIAMKPSFPPSTSAVKVNLSEKFTAAATSTPVSSSQSAPPMSPFSSASKPAASGPLSHPTPLSAPPSSVPLKSSVLPSPSAGRSAQGSSSPVPSMVQKSPRITPPAAKPGSPQAKSLQPAVAEKQGHQWKDSDPVMAGIGEEIAHFQKELEELKARTSKACFQVGTSEEMKMLRTESDDLHTFLLEIKETTESLHGDISSLKTTLLEGFAGVEEAREQNERNRDSGYLHLLYKRPLDPKSEAQLQEIRRLHQYVKFAVQDVNDVLDLEWDQHLEQKKKQRHLLVPERETLFNTLANNREIINQQRKRLNHLVDSLQQLRLYKQTSLWSLSSAVPSQSSIHSFDSDLESLCNALLKTTIESHTKSLPKVPAKLSPMKQAQLRNFLAKRKTPPVRSTAPASLSRSAFLSQRYYEDLDEVSSTSSVSQSLESEDARTSCKDDEAVVQAPRHAPVVRTPSIQPSLLPHAAPFAKSHLVHGSSPGVMGTSVATSASKIIPQGADSTMLATKTVKHGAPSPSHPISAPQAAAAAALRRQMASQAPAVNTLTESTLKNVPQVVNVQELKNNPATPSTAMGSSVPYSTAKTPHPVLTPVAANQAKQGSLINSLKPSGPTPASGQLSSGDKASGTAKIETAVTSTPSASGQFSKPFSFSPSGTGFNFGIITPTPSSNFTAAQGATPSTKESSQPDAFSSGGGSKPSYEAIPESSPPSGITSASNTTPGEPAASSSRPVAPSGTALSTTSSKLETPPSKLGELLFPSSLAGETLGSFSGLRVGQADDSTKPTNKASSTSLTSTQPTKTSGVPSGFNFTAPPVLGKHTEPPVTSSATTTSVAPPAATSTSSTAVFGSLPVTSAGSSGVISFGGTSLSAGKTSFSFGSQQTNSTVPPSAPPPTTAATPLPTSFPTLSFGSLLSSATTPSLPMSAGRSTEEATSSALPEKPGDSEVSASAASLLEEQQSAQLPQAPPQTSDSVKKEPVLAQPAVSNSGTAASSTSLVALSAEATPATTGVPDARTEAVPPASSFSVPGQTAVTAAAISSAGPVAVETSSTPIASSTTSIVAPGPSAEAAAFGTVTSGSSVFAQPPAASSSSAFNQLTNNTATAPSATPVFGQVAASTAPSLFGQQTGSTASTAAATPQVSSSGFSSPAFGTTAPGVFGQTTFGQASVFGQSASSAASVFSFSQPGFSSVPAFGQPASSTPTSTSGSVFGAASSTSSSSSFSFGQSSPNTGGGLFGQSNAPAFGQSPGFGQGGSVFGGTSAATTTAATSGFSFCQASGFGSSNTGSVFGQAASTGGIVFGQQSSSSSGSVFGSGNTGRGGGFFSGLGGKPSQDAANKNPFSSASGGFGSTATSNTSNLFGNSGAKTFGGFASSSFGEQKPTGTFSSGGGSVASQGFGFSSPNKTGGFGAAPVFGSPPTFGGSPGFGGVPAFGSAPAFTSPLGSTGGKVFGEGTAAASAGGFGFGSSSNTTSFGTLASQNAPTFGSLSQQTSGFGTQSSGFSGFGSGTGGFSFGSNNSSVQGFGGWRS

SEQ ID NO: 27380 - protein, 2080 aa, Homo sapiens
MGDEMDAMIPEREMKDFQFRALKKVRIFDSPEELPKERSSLLAVSNKYGLVFAGGASGLQIFPTKNLLIQNKPGDDPNKIVDKVQGLLVPMKFPIHHLALSCDNLTLSACMMSSEYGSIIAFFDVRTFSNEAKQQKRPFAYHKLLKDAGGMVIDMKWNPTVPSMVAVCLADGSIAVLQVTETVKVCATLPSTVAVTSVCWSPKGKQLAVGKQNGTVVQYLPTLQEKKVIPCPPFYESDHPVRVLDVLWIGTYVFAIVYAAADGTLETSPDVVMALLPKKEEKHPEIFVNFMEPCYGSCTERQHHYYLSYIEEWDLVLAASAASTEVSILARQSDQINWESWLLEDSSRAELPVTDKSDDSLPMGVVVDYTNQVEITISDEKTLPPAPVLMLLSTDGVLCPFYMINQNPGVKSLIKTPERLSLEGERQPKSPGSTPTTPTSSQAPQKLDASAAAAPASLPPSSPAAPIATFSLLPAGGAPTVFSFGSSSLKSSATVTGEPPSYSSGSDSSKAAPGPGPSTFSFVPPSKASLAPTPAASPVAPSAASFSFGSSGFKPTLESTPVPSVSAPNIAMKPSFPPSTSAVKVNLSENSSQSAPPMSPFSSASKPAASGPLSHPTPLSAPPSSVPLKSSVLPSPSAGRSAQGSSSPVPSMVQKSPRITPPAAKPGSPQAKSLQPAVAEKQGHQWKDSDPVMAGIGEEIAHFQKELEELKARTSKACFQVGTSEEMKMLRTESDDLHTFLLEIKETTESLHGDISSLKTTLLEGFAGVEEAREQNERNRDSGYLHLLYKRPLDPKSEAQLQEIRRLHQYVKFAVQDVNDVLDLEWDQHLEQKKKQRHLLVPERETLFNTLANNREIINQQRKRLNHLVDSLQQLRLYKQTSLWSLSSAVPSQSSIHSFDSDLESLCNALLKTTIESHTKSLPKVPAKLSPMKQAQLRNFLAKRKTPPVRSTAPASLSRSAFLSQRYYEDLDEVSSTSSVSQSLESEDARTSCKDDEAVVQAPRHAPVVRTPSIQPSLLPHAAPFAKSHLVHGSSPGVMGTSVATSASKIIPQGADSTMLATKTVKHGAPSPSHPISAPQAAAAAALRRQMASQAPAVNTLTESTLKNVPQVVNVQELKNNPATPSTAMGSSVPYSTAKTPHPVLTPVAANQAKQGSLINSLKPSGPTPASGQLSSGDKASGTAKIETAVTSTPSASGQFSKPFSFSPSGTGFNFGIITPTPSSNFTAAQGATPSTKESSQPDAFSSGGGSKPSYEAIPESSPPSGITSASNTTPGEPAASSSRPVAPSGTALSTTSSKLETPPSKLGELLFPSSLAGETLGSFSGLRVGQADDSTKPTNKASSTSLTSTQPTKTSGVPSGFNFTAPPVLGKHTEPPVTSSATTTSVAPPAATSTSSTAVFGSLPVTSAGSSGVISFGGTSLSAGKTSFSFGSQQTNSTVPPSAPPPTTAATPLPTSFPTLSFGSLLSSATTPSLPMSAGRSTEEATSSALPEKPGDSEVSASAASLLEEQQSAQLPQAPPQTSDSVKKEPVLAQPAVSNSGTAASSTSLVALSAEATPATTGVPDARTEAVPPASSFSVPGQTAVTAAAISSAGPVAVETSSTPIASSTTSIVAPGPSAEAAAFGTVTSGSSVFAQPPAASSSSAFNQLTNNTATAPSATPVFGQVAASTAPSLFGQQTGSTASTAAATPQVSSSGFSSPAFGTTAPGVFGQTTFGQASVFGQSASSAASVFSFSQPGFSSVPAFGQPASSTPTSTSGSVFGAASSTSSSSSFSFGQSSPNTGGGLFGQSNAPAFGQSPGFGQGGSVFGGTSAATTTAATSGFSFCQASGFGSSNTGSVFGQAASTGGIVFGQQSSSSSGSVFGSGNTGRGGGFFSGLGGKPSQDAANKNPFSSASGGFGSTATSNTSNLFGNSGAKTFGGFASSSFGEQKPTGTFSSGGGSVASQGFGFSSPNKTGGFGAAPVFGSPPTFGGSPGFGGVPAFGSAPAFTSPLGSTGGKVFGEGTAAASAGGFGFGSSSNTTSFGTLASQNAPTFGSLSQQTSGFGTQSSGFSGFGSGTGGFSFGSNNSSVQGFGGWRS

SEQ ID NO: 27381 - protein, 2093 aa, Homo sapiens
MGDEMDAMIPEREMKDFQFRALKKVRIFDSPEELPKERSSLLAVSNKYGLVFAGGASGLQIFPTKNLLIQNKPGDDPNKIVDKVQGLLVPMKFPIHHLALSCDNLTLSACMMSSEYGSIIAFFDVRTFSNEAKQQKRPFAYHKLLKDAGGMVIDMKWNPTVPSMVAVCLADGSIAVLQVTETVKVCATLPSTVAVTSVCWSPKGKQLAVGKQNGTVVQYLPTLQEKKVIPCPPFYESDHPVRVLDVLWIGTYVFAIVYAAADGTLETSPDVVMALLPKKEEKHPEIFVNFMEPCYGSCTERQHHYYLSYIEEWDLVLAASAASTEVSILARQSDQINWESWLLEDSSRAELPVTDKSDDSLPMGVVVDYTNQVEITISDEKTLPPAPVLMLLSTDGVLCPFYMINQNPGVKSLIKTPERLSLEGERQPKSPGSTPTTPTSSQAPQKLDASAAAAPASLPPSSPAAPIATFSLLPAGGAPTVFSFGSSSLKSSATVTGEPPSYSSGSDSSKAAPGPGPSTFSFVPPSKASLAPTPAASPVAPSAASFSFGSSGFKPTLESTPVPSVSAPNIAMKPSFPPSTSAVKVNLSENSSQSAPPMSPFSSASKPAASGPLSHPTPLSAPPSSVPLKSSVLPSPSGRSAQGSSSPVPSMVQKSPRITPPAAKPGSPQAKSLQPAVAEKQGHQWKDSDPVMAGIGEEIAHFQKELEELKARTSKACFQVGTSEEMKMLRTESDDLHTFLLEIKETTESLHGDISSLKTTLLEGFAGVEEAREQNERNRDSGYLHLLYKRPLDPKSEAQLQEIRRLHQYVKFAVQDVNDVLDLEWDQHLEQKKKQRHLLVPERETLFNTLANNREIINQQRKRLNHLVDSLQQLRLYKQTSLWSLSSAVPSQSSIHSFDSDLESLCNALLKTTIESHTKSLPKVPAKLSPMKQAQLRNFLAKRKTPPVRSTAPASLSRSAFLSQRYYEDLDEVSSTSSVSQSLESEDARTSCKDDEAVVQAPRHAPVVRTPSIQPSLLPHAAPFAKSHLVHGSSPGVMGTSVATSASKIIPQGADSTMLATKTVKHGAPSPSHPISAPQAAAAAALRRQMASQAPAVNTLTESTLKNVPQVVNVQELKNNPATPSTAKTPHPVLTPVAANQAKQGSLINSLKPSGPTPASGQLSSGDKASGTAKIETAVTSTPSASGQFSKPFSFSPSGTGFNFGIITPTPSSNFTAAQGATPSTKESSQPDAFSSGGGSKPSYEAIPESSPPSGITSASNTTPGEPAASSSRPVAPSGTALSTTSSKLETPPSKLGELLFPSSLAGETLGSFSGLRVGQADDSTKPTNKASSTSLTSTQPTKTSGVPSGFNFTAPPVLGKHTEPPVTSSATTTSVAPPAATSTSSTAVFGSLPVTSAGSSGVISFGGTSLSAGKTSFSFGSQQTNSTVPPSAPPPTTAATPLPTSFPTLSFGSLLSSATTPSLPMSAGRSTEEATSSALPEKPGDSEVSASAASLLEEQQSAQLPQAPPQTSDSVKKEPVLAQPAVSNSGTAASSTSLVALSAEATPATTGVPDARTEAVPPASSFSVPGQTAVTAAAISSAGPVAVETSSTPIASSTTSIVAPGPSAEAAAFGTVTSGSSVFAQPPAASSSSAFNQLTNNTATAPSATPVFGQVAASTAPSLFGQQTGSTASTAAATPQVSSSGFSSPAFGTTAPGVFGQTTFGQASVFGQSASSAASVFSFSQPGFSSVPAFGQPASSTPTSTSGSVFGAASSTSSSSSFSFGQSSPNTGGGLFGQSNAPAFGQSPGFGQGGSVFGGTSAATTTAATSGFSFCQASGFGSSNTGSVFGQAASTGGIVFGQQSSSSSGSVFGSGNTGRGGGFFSGLGGKPSQDAANKNPFSSASGGFGSTATSNTSNLFGNSGAKTFGGFASSSFGEQKPTGTFSSGGGSVASQGFGFSSPNKTGGFGAAPVFGSPPTFGGSPGFGGVPAFGSAPAFTSPLGSTGGKVFGEGTAAASAGGFGSLAMSLSPTLKGRLLLMRPKAGGGREQAAPGRKSNESRSLGHLCMERALTSPLKVWEQQQHHILRHARESECPHFRITVPTDFWFWDPE

SEQ ID NO: 27382 - protein, 243 aa, Homo sapiens
MSRPVRNRKVVDYSQFQESDDADEDYGRDSGPPTKKIRSSPREAKNKRRSGKNSQEDSEDSEDKDVKTKKDDSHSAEDSEDEKEDHKNVRQQRQAASKAASKQREMLMEDVGSEEEQEEEDEAPFQEKDSGSDEDFLMEDDDDSDYGSSKKKNKKMVKKSKPERKEKKMPKPRLKATVTPSPVKGKGKVGRPTASKASKEKTPSPKEEDEEPESPPEKKTSTSPPPEKSGDEGSEDEAPSGED

SEQ ID NO: 27383 - protein, 203 aa, Homo sapiens
MSRPVRNRKVVDYSQEDSEDSEDKDVKTKKDDSHSAEDSEDEKEDHKNVRQQRQAASKAASKQREMLMEDVGSEEEQEEEDEAPFQEKDSGSDEDFLMEDDDDSDYGSSKKKNKKMVKKSKPERKEKKMPKPRLKATVTPSPVKGKGKVGRPTASKASKEKTPSPKEEDEEPESPPEKKTSTSPPPEKSGDEGSEDEAPSGED

SEQ ID NO: 27384 - protein, 1390 aa, Homo sapiens
MKAPAVLAPGILVLLFTLVQRSNGECKEALAKSEMNVNMKYQLPNFTAETPIQNVILHEHHIFLGATNYIYVLNEEDLQKVAEYKTGPVLEHPDCFPCQDCSSKANLSGGVWKDNINMALVVDTYYDDQLISCGSVNRGTCQRHVFPHNHTADIQSEVHCIFSPQIEEPSQCPDCVVSALGAKVLSSVKDRFINFFVGNTINSSYFPDHPLHSISVRRLKETKDGFMFLTDQSYIDVLPEFRDSYPIKYVHAFESNNFIYFLTVQRETLDAQTFHTRIIRFCSINSGLHSYMEMPLECILTEKRKKRSTKKEVFNILQAAYVSKPGAQLARQIGASLNDDILFGVFAQSKPDSAEPMDRSAMCAFPIKYVNDFFNKIVNKNNVRCLQHFYGPNHEHCFNRTLLRNSSGCEARRDEYRTEFTTALQRVDLFMGQFSEVLLTSISTFIKGDLTIANLGTSEGRFMQVVVSRSGPSTPHVNFLLDSHPVSPEVIVEHTLNQNGYTLVITGKKITKIPLNGLGCRHFQSCSQCLSAPPFVQCGWCHDKCVRSEECLSGTWTQQICLPAIYKVFPNSAPLEGGTRLTICGWDFGFRRNNKFDLKKTRVLLGNESCTLTLSESTMNTLKCTVGPAMNKHFNMSIIISNGHGTTQYSTFSYVDPVITSISPKYGPMAGGTLLTLTGNYLNSGNSRHISIGGKTCTLKSVSNSILECYTPAQTISTEFAVKLKIDLANRETSIFSYREDPIVYEIHPTKSFISGGSTITGVGKNLNSVSVPRMVINVHEAGRNFTVACQHRSNSEIICCTTPSLQQLNLQLPLKTKAFFMLDGILSKYFDLIYVHNPVFKPFEKPVMISMGNENVLEIKGNDIDPEAVKGEVLKVGNKSCENIHLHSEAVLCTVPNDLLKLNSELNIEWKQAISSTVLGKVIVQPDQNFTGLIAGVVSISTALLLLLGFFLWLKKRKQIKDLGSELVRYDARVHTPHLDRLVSARSVSPTTEMVSNESVDYRATFPEDQFPNSSQNGSCRQVQYPLTDMSPILTSGDSDISSPLLQNTVHIDLSALNPELVQAVQHVVIGPSSLIVHFNEVIGRGHFGCVYHGTLLDNDGKKIHCAVKSLNRITDIGEVSQFLTEGIIMKDFSHPNVLSLLGICLRSEGSPLVVLPYMKHGDLRNFIRNETHNPTVKDLIGFGLQVAKGMKYLASKKFVHRDLAARNCMLDEKFTVKVADFGLARDMYDKEYYSVHNKTGAKLPVKWMALESLQTQKFTTKSDVWSFGVLLWELMTRGAPPYPDVNTFDITVYLLQGRRLLQPEYCPDPLYEVMLKCWHPKAEMRPSFSELVSRISAIFSTFIGEHYVHVNATYVNVKCVAPYPSLLSSEDNADDEVDTRPASFWETS

SEQ ID NO: 27385 - protein, 1408 aa, Homo sapiens
MKAPAVLAPGILVLLFTLVQRSNGECKEALAKSEMNVNMKYQLPNFTAETPIQNVILHEHHIFLGATNYIYVLNEEDLQKVAEYKTGPVLEHPDCFPCQDCSSKANLSGGVWKDNINMALVVDTYYDDQLISCGSVNRGTCQRHVFPHNHTADIQSEVHCIFSPQIEEPSQCPDCVVSALGAKVLSSVKDRFINFFVGNTINSSYFPDHPLHSISVRRLKETKDGFMFLTDQSYIDVLPEFRDSYPIKYVHAFESNNFIYFLTVQRETLDAQTFHTRIIRFCSINSGLHSYMEMPLECILTEKRKKRSTKKEVFNILQAAYVSKPGAQLARQIGASLNDDILFGVFAQSKPDSAEPMDRSAMCAFPIKYVNDFFNKIVNKNNVRCLQHFYGPNHEHCFNRTLLRNSSGCEARRDEYRTEFTTALQRVDLFMGQFSEVLLTSISTFIKGDLTIANLGTSEGRFMQVVVSRSGPSTPHVNFLLDSHPVSPEVIVEHTLNQNGYTLVITGKKITKIPLNGLGCRHFQSCSQCLSAPPFVQCGWCHDKCVRSEECLSGTWTQQICLPAIYKVFPNSAPLEGGTRLTICGWDFGFRRNNKFDLKKTRVLLGNESCTLTLSESTMNTLKCTVGPAMNKHFNMSIIISNGHGTTQYSTFSYVDPVITSISPKYGPMAGGTLLTLTGNYLNSGNSRHISIGGKTCTLKSVSNSILECYTPAQTISTEFAVKLKIDLANRETSIFSYREDPIVYEIHPTKSFISTWWKEPLNIVSFLFCFASGGSTITGVGKNLNSVSVPRMVINVHEAGRNFTVACQHRSNSEIICCTTPSLQQLNLQLPLKTKAFFMLDGILSKYFDLIYVHNPVFKPFEKPVMISMGNENVLEIKGNDIDPEAVKGEVLKVGNKSCENIHLHSEAVLCTVPNDLLKLNSELNIEWKQAISSTVLGKVIVQPDQNFTGLIAGVVSISTALLLLLGFFLWLKKRKQIKDLGSELVRYDARVHTPHLDRLVSARSVSPTTEMVSNESVDYRATFPEDQFPNSSQNGSCRQVQYPLTDMSPILTSGDSDISSPLLQNTVHIDLSALNPELVQAVQHVVIGPSSLIVHFNEVIGRGHFGCVYHGTLLDNDGKKIHCAVKSLNRITDIGEVSQFLTEGIIMKDFSHPNVLSLLGICLRSEGSPLVVLPYMKHGDLRNFIRNETHNPTVKDLIGFGLQVAKGMKYLASKKFVHRDLAARNCMLDEKFTVKVADFGLARDMYDKEYYSVHNKTGAKLPVKWMALESLQTQKFTTKSDVWSFGVLLWELMTRGAPPYPDVNTFDITVYLLQGRRLLQPEYCPDPLYEVMLKCWHPKAEMRPSFSELVSRISAIFSTFIGEHYVHVNATYVNVKCVAPYPSLLSSEDNADDEVDTRPASFWETS

SEQ ID NO: 27386 - protein, 764 aa, Homo sapiens
MKAPAVLAPGILVLLFTLVQRSNGECKEALAKSEMNVNMKYQLPNFTAETPIQNVILHEHHIFLGATNYIYVLNEEDLQKVAEYKTGPVLEHPDCFPCQDCSSKANLSGGVWKDNINMALVVDTYYDDQLISCGSVNRGTCQRHVFPHNHTADIQSEVHCIFSPQIEEPSQCPDCVVSALGAKVLSSVKDRFINFFVGNTINSSYFPDHPLHSISVRRLKETKDGFMFLTDQSYIDVLPEFRDSYPIKYVHAFESNNFIYFLTVQRETLDAQTFHTRIIRFCSINSGLHSYMEMPLECILTEKRKKRSTKKEVFNILQAAYVSKPGAQLARQIGASLNDDILFGVFAQSKPDSAEPMDRSAMCAFPIKYVNDFFNKIVNKNNVRCLQHFYGPNHEHCFNRTLLRNSSGCEARRDEYRTEFTTALQRVDLFMGQFSEVLLTSISTFIKGDLTIANLGTSEGRFMQVVVSRSGPSTPHVNFLLDSHPVSPEVIVEHTLNQNGYTLVITGKKITKIPLNGLGCRHFQSCSQCLSAPPFVQCGWCHDKCVRSEECLSGTWTQQICLPAIYKVFPNSAPLEGGTRLTICGWDFGFRRNNKFDLKKTRVLLGNESCTLTLSESTMNTLKCTVGPAMNKHFNMSIIISNGHGTTQYSTFSYVDPVITSISPKYGPMAGGTLLTLTGNYLNSGNSRHISIGGKTCTLKSVSNSILECYTPAQTISTEFAVKLKIDLANRETSIFSYREDPIVYEIHPTKSFIRHVNIALIQR

SEQ ID NO: 27387 - protein, 614 aa, Homo sapiens
MTTLDSNNNTGGVITYIGSSGSSPSRTSPESLYSDNSNGSFQSLTQGCPTYFPPSPTGSLTQDPARSFGSIPPSLSDDGSPSSSSSSSSSSSSFYNGSPPGSLQVAMEDSSRVSPSKSTSNITKLNGMVLLCKVCGDVASGFHYGVHACEGCKGFFRRSIQQNIQYKRCLKNENCSIVRINRNRCQQCRFKKCLSVGMSRDAVRFGRIPKREKQRMLAEMQSAMNLANNQLSSQCPLETSPTQHPTPGPMGPSPPPAPVPSPLVGFSQFPQQLTPPRSPSPEPTVEDVISQVARAHREIFTYAHDKLGSSPGNFNANHASGSPPATTPHRWENQGCPPAPNDNNTLAAQRHNEALNGLRQAPSSYPPTWPPGPAHHSCHQSNSNGHRLCPTHVYAAPEGKAPANSPRQGNSKNVLLACPMNMYPHGRSGRTVQEIWEDFSMSFTPAVREVVEFAKHIPGFRDLSQHDQVTLLKAGTFEVLMVRFASLFNVKDQTVMFLSRTTYSLQELGAMGMGDLLSAMFDFSEKLNSLALTEEELGLFTAVVLVSADRSGMENSASVEQLQETLLRALRALVLKNRPLETSRFTKLLLKLPDLRTLNNMHSEKLLSFRVDAQ

SEQ ID NO: 27388 - protein, 544 aa, Homo sapiens
MCTVVDPRIVRRYLLRRQLGQGAYGIVWKAVDRRTGEVVAIKKIFDAFRDKTDAQRTFREITLLQEFGDHPNIISLLDVIRAENDRDIYLVFEFMDTDLNAVIRKGGLLQDVHVRSIFYQLLRATRFLHSGHVVHRDQKPSNVLLDANCTVKLCDFGLARSLGDLPEGPEDQAVTEYVATRWYRAPEVLLSSHRYTLGVDMWSLGCILGEMLRGRPLFPGTSTLHQLELILETIPPPSEEDLLALGSGCRASVLHQLGSRPRQTLDALLPPDTSPEALDLLRRLLVFAPDKRLSATQALQHPYVQRFHCPSDEWAREADVRPRAHEGVQLSVPEYRSRVYQMILECGGSSGTSREKGPEGVSPSQAHLHKPRADPQLPSRTPVQGPRPRPQSSPGHDPAEHESPRAAKNVPRQNSAPLLQTALLGNGERPPGAKEAPPLTLSLVKPSGRGAAPSLTSQAAAQVANQALIRGDWNRGGGVRVASVQQVPPRLPPEARPGRRMFSTSALQGAQGGARALLGGYSQAYGTVCHSALGHLPLLEGHHV

SEQ ID NO: 27389 - protein, 254 aa, Homo sapiens
MCTVVDPRIVRRYLLRRQLGQGAYGIVWKAVDRRTGEVVAIKKIFDAFRDKTDAQRTFREITLLQEFGDHPNIISLLDVIRAENDRDIYLVFEFMDTDLNAVIRKGGLLQDVHVRSIFYQLLRATRFLHSGHVVHRDQKPSNVLLDANCTVKLCDFGLARSLGDLPEGPEDQAVTEYVATRWYRAPEVLLSSHRYTLGVDMWSLGCILGEMLRGRPLFPGTSTLHQLELILETIPPPSEEGAQTACRSGTGAST

SEQ ID NO: 27390 - protein, 277 aa, Homo sapiens
MCTVVDPRIVRRYLLRRQLGQGAYGIVWKAVDRRTGEVVAIKKIFDAFRDKTDAQRTFREITLLQEFGDHPNIISLLDVIRAENDRDIYLVFEFMGCPPSPPPPTAVRTLSADTDLNAVIRKGGLLQDVHVRSIFYQLLRATRFLHSGHVVHRDQKPSNVLLDANCTVKLCDFGLARSLGDLPEGPEDQAVTEYVATRWYRAPEVLLSSHRYTLGVDMWSLGCILGEMLRGRPLFPGTSTLHQLELILETIPPPSEEDLLALGSGCRASVLHQLGSR

SEQ ID NO: 27391 - protein, 535 aa, Homo sapiens
MRLRNGTVATALAFITSFLTLSWYTTWQNGKEKLIAYQREFLALKERLRIAEHRISQRSSELNTIVQQFKRVGAETNGSKDALNKFSDNTLKLLKELTSKKSLQVPSIYYHLPHLLKNEGSLQPAVQIGNGRTGVSIVMGIPTVKREVKSYLIETLHSLIDNLYPEEKLDCVIVVFIGETDIDYVHGVVANLEKEFSKEISSGLVEVISPPESYYPDLTNLKETFGDSKERVRWRTKQNLDYCFLMMYAQEKGIYYIQLEDDIIVKQNYFNTIKNFALQLSSEEWMILEFSQLGFIGKMFQAPDLTLIVEFIFMFYKEKPIDWLLDHILWVKVCNPEKDAKHCDRQKANLRIRFRPSLFQHVGLHSSLSGKIQKLTDKDYMKPLLLKIHVNPPAEVSTSLKVYQGHTLEKTYMGEDFFWAITPIAGDYILFKFDKPVNVESYLFHSGNQEHPGDILLNTTVEVLPFKSEGLEISKETKDKRLEDGYFRIGKFENGVAEGMVDPSLNPISAFRLSVIQNSAVWAILNEIHIKKATN

SEQ ID NO: 27392 - protein, 423 aa, Homo sapiens
MNYSITVSIVMGIPTVKREVKSYLIETLHSLIDNLYPEEKLDCVIVVFIGETDIDYVHGVVANLEKEFSKEISSGLVEVISPPESYYPDLTNLKETFGDSKERVRWRTKQNLDYCFLMMYAQEKGIYYIQLEDDIIVKQNYFNTIKNFALQLSSEEWMILEFSQLGFIGKMFQAPDLTLIVEFIFMFYKEKPIDWLLDHILWVKVCNPEKDAKHCDRQKANLRIRFRPSLFQHVGLHSSLSGKIQKLTDKDYMKPLLLKIHVNPPAEVSTSLKVYQGHTLEKTYMGEDFFWAITPIAGDYILFKFDKPVNVESYLFHSGNQEHPGDILLNTTVEVLPFKSEGLEISKETKDKRLEDGYFRIGKFENGVAEGMVDPSLNPISAFRLSVIQNSAVWAILNEQRVFSGWWQKSRDKAEGPQAPLLF

SEQ ID NO: 27393 - protein, 741 aa, Homo sapiens
MALFTPWKLSSQKLGFFLVTFGFIWGMMLLHFTIQQRTQPESSSMLREQILDLSKRYIKALAEENRNVVDGPYAGVMTAYDLKKTLAVLLDNILQRIGKLESKVDNLVVNGTGTNSTNSTTAVPSLVALEKINVADIINGAQEKCVLPPMDGYPHCEGKIKWMKDMWRSDPCYADYGVDGSTCSFFIYLSEVENWCPHLPWRAKNPYEEADHNSLAEIRTDFNILYSMMKKHEEFRWMRLRIRRMADAWIQAIKSLAEKQNLEKRKRKKVLVHLGLLTKESGFKIAETAFSGGPLGELVQWSDLITSLYLLGHDIRISASLAELKEIMKKVVGNRSGCPTVGDRIVELIYIDIVGLAQFKKTLGPSWVHYQCMLRVLDSFGTEPEFNHANYAQSKGHKTPWGKWNLNPQQFYTMFPHTPDNSFLGFVVEQHLNSSDIHHINEIKRQNQSLVYGKVDSFWKNKKIYLDIIHTYMEVHATVYGSSTKNIPSYVKNHGILSGRDLQFLLRETKLFVGLGFPYEGPAPLEAIANGCAFLNPKFNPPKSSKNTDFFIGKPTLRELTSQHPYAEVFIGRPHVWTVDLNNQEEVEDAVKAILNQKIEPYMPYEFTCEGMLQRINAFIEKQDFCHGQVMWPPLSALQVKLAEPGQSCKQVCQESQLICEPSFFQHLNKDKDMLKYKVTCQSSELAKDILVPSFDPKNKHCVFQGDLLLFSCAGAHPRHQRVCPCRDFIKGQVALCKDCL

SEQ ID NO: 27394 - protein, 548 aa, Homo sapiens
MRLRNGTFLTLLLFCLCAFLSLSWYAALSGQKGDVVDVYQREFLALRDRLHAAEQESLKRSKELNLVLDEIKRAVSERQALRDGDGNRTWGRLTEDPRLKPWNGSHRHVLHLPTVFHHLPHLLAKESSLQPAVRVGQGRTGVSVVMGIPSVRREVHSYLTDTLHSLISELSPQEKEDSVIVVLIAETDSQYTSAVTENIKALFPTEIHSGLLEVISPSPHFYPDFSRLRESFGDPKERVRWRTKQNLDYCFLMMYAQSKGIYYVQLEDDIVAKPNYLSTMKNFALQQPSEDWMILEFSQLGFIGKMFKSLDLSLIVEFILMFYRDKPIDWLLDHILWVKVCNPEKDAKHCDRQKANLRIRFKPSLFQHVGTHSSLAGKIQKLKDKDFGKQALRKEHVNPPAEVSTSLKTYQHFTLEKAYLREDFFWAFTPAAGDFIRFRFFQPLRLERFFFRSGNIEHPEDKLFNTSVEVLPFDNPQSDKEALQEGRTATLRYPRSPDGYLQIGSFYKGVAEGEVDPAFGPLEALRLSIQTDSPVWVILSEIFLKKAD

SEQ ID NO: 27395 - protein, 547 aa, Homo sapiens
MRLRNGTFLTLLLFCLCAFLSLSWYAALSGQKGDVVDVYQREFLALRDRLHAAEQESLKRSKELNLVLDEIKRAVSERQALRDGDGNRTWGRLTEDPRLKPWNGSHRHVLHLPTVFHHLPHLLAKESSLQPAVRVGQGRTGVSVVMGIPSVRREVHSYLTDTLHSLISELSPQEKEDSVIVVLIAETDSQYTSAVTENIKALFPTEIHSGLLEVISPSPHFYPDFSRLRESFGDPKERVRWRTKQNLDYCFLMMYAQSKGIYYVQLEDDIVAKPNYLSTMKNFALQQPSEDWMILEFSQLGFIGKMFKSLDLSLIVEFILMFYRDKPIDWLLDHILWVKVCNPEKDAHCDRQKANLRIRFKPSLFQHVGTHSSLAGKIQKLKDKDFGKQALRKEHVNPPAEVSTSLKTYQHFTLEKAYLREDFFWAFTPAAGDFIRFRFFQPLRLERFFFRSGNIEHPEDKLFNTSVEVLPFDNPQSDKEALQEGRTATLRYPRSPDGYLQIGSFYKGVAEGEVDPAFGPLEALRLSIQTDSPVWVILSEIFLKKAD

SEQ ID NO: 27396 - protein, 563 aa, Homo sapiens
MSRVAGTRTDVNELLQRWTPRCVRWHTGGARRVALDRPLVTACLPPAGDVVDVYQREFLALRDRLHAAEQESLKRSKELNLVLDEIKRAVSERQALRDGDGNRTWGRLTEDPRLKPWNGSHRHVLHLPTVFHHLPHLLAKESSLQPAVRVGQGRTGVSVVMGIPSVRREVHSYLTDTLHSLISELSPQEKEDSVIVVLIAETDSQYTSAVTENIKALFPTEIHSGLLEVISPSPHFYPDFSRLRESFGDPKERVRWRTKQNLDYCFLMMYAQSKGIYYVQLEDDIVAKPNYLSTMKNFALQQPSEDWMILEFSQLGFIGKMFKSLDLSLIVEFILMFYRDKPIDWLLDHILWVKVCNPEKDAKHCDRQKANLRIRFKPSLFQHVGTHSSLAGKIQKLKDKDFGKQALRKEHVNPPAEVSTSLKTYQHFTLEKAYLREDFFWAFTPAAGDFIRFRFFQPLRLERFFFRSGNIEHPEDKLFNTSVEVLPFDNPQSDKEALQEGRTATLRYPRSPDGYLQIGSFYKGVAEGEVDPAFGPLEALRLSIQTDSPVWVILSEIFLKKAD

SEQ ID NO: 27397 - protein, 593 aa, Homo sapiens
MAFRRAEGTSMIQALAMTVAEIPVFLYTTFGQSAFSQLRLTPGLRKVLFATALGTVALALAAHQLKRRRRRKKQVGPEMGGEQLGTVPLPILLARKVPSVKKGYSSRRVQSPSSKSNDTLSGISSIEPSKHSGSSHSVASMMAVNSSSPTAACSGLWDARGMEESLTTSDGNAESLYMQGMELFEEALQKWEQALSVGQRGDSGSTPMPRDGLRNPETASEPLSEPESQRKEFAEKLESLLHRAYHLQEEFGSTFPADSMLLDLERTLMLPLTEGSLRLRADDEDSLTSEDSFFSATELFESLQTGDYPIPLSRPAAAYEEALQLVKEGRVPCRTLRTELLGCYSDQDFLAKLHCVRQAFEGLLEDKSNQLFFGKVGRQMVTGLMTKAEKSPKGFLESYEEMLSYALRPETWATTRLELEGRGVVCMSFFDIVLDFILMDAFEDLENPPASVLAVLRNRWLSDSFKETALATACWSVLKAKRRLLMVPDGFISHFYSVSEHVSPVLAFGFLGPKPQLAEVCAFFKHQIVQYLRDMFDLDNVRYTSLPALADDILQLSRRRSEILLGYLGVPAASSAGVNGALPRENGPLGELQ

SEQ ID NO: 27398 - protein, 323 aa, Homo sapiens
MAFRRAEGTSMIQALAMTVAEIPVFLYTTFGQSAFSQLRLTPGLRKVLFATALGTVALALAAHQLKRRRRRKKQVGPEMGGEQLGTVPLPILLARKVPSVKKGYSSRRVQSPSSKSNDTLSGISSIEPSKHSGSSHSVASMMAVNSSSPTAACSGLWDARGMEESLTTSDGNAESLYMQGMELFEEALQKWEQALSVGQRGDSGSTPMPRDGLRNPETASEPLSETESHSVARLECSGAISAQCNLRFLGSRDSPASASQVAGITARVTAEGVCREAGVPAAPCLPPAGGVRLHLPRRQHAARPREDPHAAPDRGLAAAAGGR

SEQ ID NO: 27399 - protein, 349 aa, Homo sapiens
MAFRRAEGTSMIQALAMTVAEIPVFLYTTFGQSAFSQLRLTPGLRKVLFATALGTVALALAAHQLKRRRRRKKQVGPEMGGEQLGTVPLPILLARKVPSVKKGYSSRRVQSPSSKSNDTLSGISSIEPSKHSGSSHSVASMMAVNSSSPTAACSGLWDARGMEESLTTSDGNAESLYMQGMELFEEALQKWEQALSVGQRGDSGSTPMPRDGLRNPETASEPLSEPESQRKEFAEKLESLLHRAYHLQEEFGSTFPADSMLLDLERTLMLPLTEGSLRLRADDEDSLTSEDSFFSATELFESLQTGDYPIPLSRPAAAYEEALQLVKEGRVPCRTLRAPKASWRATRRC

SEQ ID NO: 27400 - protein, 632 aa, Homo sapiens
MSDCCSAPGISWEAGVGRPAVPGLELQIRRGAMSEETVSESQFSLKTAALRVFDLPLTWYYSLSQIKFSPVAKKLFVVTAVSAISVIFLAHHFKRKRGKKKGKILPWEPEHLILEYTKRAASDKGSSCSSSRQNLTLSLSSTKDKGSQVCNYANGGLFSKYSGSAQSLASVQSVNSCHSCACGNSNSWDKADEDDIKLVNIPVTTPENLYLMGMELFEEALRRWEQALTFRNRQAEDEACGSIKLGAGDAIAEENVDDIISTEFIHKLEALLQRAYRLQEEFEATLGASDPNSLADDIDKDTDITMKGNVEDFGLRDTLSIASTDSFASAAELAEHREVRHTYSLESLCHCPFYEEAMHLVEEGKIYSRVLRTEMLECLGDSDFLAKLHCIRQAFQVILSESANRIFLAESGRKILSALIVKARKNPKKFEDVFDEMIYFLEQTDHWGSTEMELAARGVKNLNFYDVVLDFILMDSFEDLENPPTSIQNVVNNRWLNSSFKETAVASSCWSVLKQKRQQMKIPDGFFAHFYAICEHISPVLAWGFLGPRNSLYDLCCFFKNQVLLFLKDIFDFEKVRYSSTETLAEDLMQLLIRRTELLMAYLEADALRHTSSCLSSHGHVMSTGLLEAKVQ

SEQ ID NO: 27401 - protein, 384 aa, Homo sapiens
MSDCCSAPGISWEAGVGRPAVPGLELQIRRGAMSEETVSESQFSLKTAALRVFDLPLTWYYSLSQIKFSPVAKKLFVVTAVSAISVIFLAHHFKRKRGKKKGKILPWEPEHLILEYTKRAASDKGSSCSSSRQNLTLSLSSTKDKGSQVCNYANGGLFSKYSGSAQSLASVQSVNSCHSCACGNSNSWDKADEDDIKLVNIPVTTPENLYLMGMELFEEALRRWEQALTFRNRQAEDEACGSIKLGAGDAIAEENVDDIISTEFIHKLEALLQRAYRLQEEFEATLGASDPNSLADDIDKDTDITMKGNVEDFGLRDTLSIASTDSFASAAELAEHREVRHTYSLESLCHCPFYEEAMHLVEEGKIYSRVLRYHFSFVYVYEGY

SEQ ID NO: 27402 - protein, 569 aa, Homo sapiens
MPSSLFADLERNGSGGGGGGSSGGGETLDDQRALQLALDQLSLLGLDSDEGASLYDSEPRKKSVNMTECVPVPSSEHVAEIVGRQGCKIKALRAKTNTYIKTPVRGEEPVFVVTGRKEDVAMARREIISAAEHFSMIRASRNKNTALNGAVPGPPNLPGQTTIQVRVPYRVVGLVVGPKGATIKRIQQQTHTYIVTPSRDKEPVFEVTGMPENVDRAREEIEAHIALRTGGIIELTDENDFHANGTDVGFDLHHGSGGSGPGSLWSKPTPSITPTPGRKPFSSYRNDSSSSLGSASTDSYFGGGTSSSAAATQRLADYSPPSPALSFAHNGNNNNNGNGYTYTAGGEASVPSPDGCPELQPTFDPAPAPPPGAPLIWAQFERSPGGGPAAPVSSSCSSSASSSASSSSVVFPGGGASAPSNANLGLLVHRRLHPGTSCPRLSPPLHMAPGAGEHHLARRVRSDPGGGGLAYAAYANGLGAQLPGLQPSDTSGSSSSSSSSSSSSSSSSGLRRKGSRDCSVCFESEVIAALVPCGHNLFCMECANRICEKSEPECPVCHTAVTQAIRIFS

SEQ ID NO: 27403 - protein, 158 aa, Homo sapiens
MPSSLFADLERNGSGGGGGGSSGGGETLDDQRALQLALDQLSLLGLDSDEGASLYDSEPRKKSVNMTECVPVPSSEHVAEIVGRQGRSRRDGEVGGGGVGSQATASRGRRVQYRDPRRGVPWGERKSRAMGRRPRQRKCRQAVSRSRAAALAGCTFFC

SEQ ID NO: 27404 - protein, 164 aa, Homo sapiens
MKCKPNQTRTYDPEGFKKRAACLCFRSEREDEVLLVSSSRYPDRWIVPGGGMEPEEEPGGAAVREVYEEAGVKGKLGRLLGVFEQNQDPKHRTYVYVLTVTELLEDWEDSVSIGRKREWFKVEDAIKVLQCHKPVHAEYLEKLKLGGSPTNGNSMAPSSPDSDP

SEQ ID NO: 27405 - protein, 460 aa, Homo sapiens
MSSPTTSSLDTPLPGNGPPQPGAPSSSPTVKEEGPEPWPGGPDPDVPGTDEASSACSTDWVIPDPEEEPERKRKKGPAPKMLGHELCRVCGDKASGFHYNVLSCEGCKGFFRRSVVRGGARRYACRGGGTCQMDAFMRRKCQQCRLRKCKEAGMREQCVLSEEQIRKKKIRKQQQESQSQSQSPVGPQGSSSSASGPGASPGGSEAGSQGSGEGEGVQLTAAQELMIQQLVAAQLQCNKRSFSDQPKVTPWPLGADPQSRDARQQRFAHFTELAIISVQEIVDFAKQVPGFLQLGREDQIALLKASTIEIMLLETARRYNHETECITFLKDFTYSKDDFHRAGLQVEFINPIFEFSRAMRRLGLDDAEYALLIAINIFSADRPNVQEPGRVEALQQPYVEALLSYTRIKRPQDQLRFPRMLMKLVSLRTLSSVHSEQVFALRLQDKKLPPLLSEIWDVHE

SEQ ID NO: 27406 - protein, 363 aa, Homo sapiens
MSSPTTSSLDTPLPGNGPPQPGAPSSSPTVKEEGPEPWPGGPDPDVPGTDEASSACSTDWGVLSEEQIRKKKIRKQQQESQSQSQSPVGPQGSSSSASGPGASPGGSEAGSQGSGEGEGVQLTAAQELMIQQLVAAQLQCNKRSFSDQPKVTPWPLGADPQSRDARQQRFAHFTELAIISVQEIVDFAKQVPGFLQLGREDQIALLKASTIEIMLLETARRYNHETECITFLKDFTYSKDDFHRAGLQVEFINPIFEFSRAMRRLGLDDAEYALLIAINIFSADRPNVQEPGRVEALQQPYVEALLSYTRIKRPQDQLRFPRMLMKLVSLRTLSSVHSEQVFALRLQDKKLPPLLSEIWDVHE

SEQ ID NO: 27407 - protein, 863 aa, Homo sapiens
MAGPRGALLAWCRRQCEGYRGVEIRDLSSSFRDGLAFCAILHRHRPDLLDFDSLSKDNVFENNRLAFEVAEKELGIPALLDPNDMVSMSVPDCLSIMTYVSQYYNHFCSPGQAGVSPPRKGLAPCSPPSVAPTPVEPEDVAQGEELSSGSLSEQGTGQTPSSTCAACQQHVHLVQRYLADGRLYHRHCFRCRRCSSTLLPGAYENGPEEGTFVCAEHCARLGPGTRSGTRPGPFSQPKQQHQQQLAEDAKDVPGGGPSSSAPAGAEADGPKASPEARPQIPTKPRVPGKLQELASPPAGRPTPAPRKASESTTPAPPTPRPRSSLQQENLVEQAGSSSLVNGRLHELPVPKPRGTPKPSEGTPAPRKDPPWITLVQAEPKKKPAPLPPSSSPGPPSQDSRQVENGGTEEVAQPSPTASLESKPYNPFEEEEEDKEEEAPAAPSLATSPALGHPESTPKSLHPWYGITPTSSPKTKKRPAPRAPSASPLALHASRLSHSEPPSATPSPALSVESLSSESASQTAGAELLEPPAVPKSSSEPAVHAPGTPGNPVSLSTNSSLASSGELVEPRVEQMPQASPGLAPRTRGSSGPQPAKPCSGATPTPLLLVGDRSPVPSPGSSSPQLQVKSSCKENPFNRKPSPAASPATKKATKGSKPVRPPAPGHGFPLIKRKVQADQYIPEEDIHGEMDTIERRLDALEHRGVLLEEKLRGGLNEGREDDMLVDWFKLIHEKHLLVRRESELIYVFKQQNLEQRQADVEYELRCLLNKPEKDWTEEDRAREKVLMQELVTLIEQRNAIINCLDEDRQREEEEDKMLEAMIKKKEFQREAEPEGKKKGKFKTMKMLKLLGNKRDAKSKSPRDKS

SEQ ID NO: 27408 - protein, 506 aa, Homo sapiens
MSVEPPPELEEKAASEPEAGAMPEKRAGAQAAGSTWLQGFGRPSVYHAAIVIFLEFFAWGLLTTPMLTVLHETFSQHTFLMNGLIQGVKGLLSFLSAPLIGALSDVWGRKPFLLGTVFFTCFPIPLMRISPWWYFAMISVSGVFSVTFSVIFAYVADVTQEHERSTAYGWVSATFAASLVSSPAIGAYLSASYGDSLVVLVATVVALLDICFILVAVPESLPEKMRPVSWGAQISWKQADPFASLKKVGKDSTVLLICITVFLSYLPEAGQYSSFFLYLRQVIGFGSVKIAAFIAMVGILSIVAQTAFLSILMRSLGNKNTVLLGLGFQMLQLAWYGFGSQAWMMWAAGTVAAMSSITFPAISALVSRNAESDQQGVAQGIITGIRGLCNGLGPALYGFIFYMFHVELTELGPKLNSNNVPLQGAVIPGPPFLFGACIVLMSFLVALFIPEYSKASGVQKHSNSSSGSLTNTPERGSDEDIEPLLQDSSIWELSSFEEPGNQCTEL

SEQ ID NO: 27409 - protein, 311 aa, Homo sapiens
MLTVLHETFSQHTFLMNGLIQGVKGLLSFLSAPLIGALSDVWGRKPFLLGTVFFTCFPIPLMRISPWWYFAMISVSGVFSVTFSVIFAYVADVTQEHERSTAYGWVSATFAASLVSSPAIGAYLSASYGDSLVVLVATVVALLDICFILVAVPESLPEKMRPVSWGAQISWKQADPFASLKKVGKDSTVLLICITVFLSYLPEAGQYSSFFLYLRQVIGFGSVKIAAFIAMVGILSIVAQTAFLSILMRSLGNKNTVLLGLGFQMLQLAWYGFGSQAWSCPGDHNWNKRTMQWPGASTVWLHILHVPCGTD

SEQ ID NO: 27410 - protein, 904 aa, Homo sapiens
MAAIRALQQWCRQQCEGYRDVNICNMTTSFRDGLAFCAILHRHRPDLINFSALKKENIYENNKLAFRVAEEHLGIPALLDAEDMVALKVPDRLSILTYVSQYYNYFHGRSPIGGMAGVKRASEDSEEEPSGKKAPVQAAKLPSPAPARKPPLSPAQTNPVVQRRNEGAGGPPPKTDQALAGSLVSSTCGVCGKHVHLVQRHLADGRLYHRSCFRCKQCSCTLHSGAYKATGEPGTFVCTSHLPAAASASPKLTGLVPRQPGAMGVDSRTSCSPQKAQEANKARPSAWEPAAGNSPARASVPAAPNPAATSATSVHVRSPARPSESRLAPTPTEGKVRPRVTNSSPMGWSSAAPCTAAAASHPAVPPSAPDPRPATPQGGGAPRVAAPQTTLSSSSTSAATVDPPAWTPSASRTQQARNKFFQTSAVPPGTSLSGRGPTPSLVLSKDSSKEQARNFLKQALSALEEAGAPAPGRPSPATAAVPSSQPKTEAPQASPLAKPLQSSSPRVLGLPSRMEPPAPLSTSSTSQASALPPAGRRNLAESSGVGRVGAGSRPKPEAPMAKGKSTTLTQDMSTSLQEGQEDGPAGWRANLKPVDRRSPAERTLKPKEPRALAEPRAGEAPRKVSGSFAGSVHITLTPVRPDRTPRPASPGPSLPARSPSPPRRRRLAVPASLDVCDNWLRPEPPGQEARVQSWKEEEKKPHLQGKPGRPLSPANVPALPGETVTSPVRLHPDYLSPEEIQRQLQDIERRLDALELRGVELEKRLRAAEGDDAEDSLMVDWFWLIHEKQLLLRQESELMYKSKAQRLEEQQLDIEGELRRLMAKPEALKSLQERRREQELLEQYVSTVNDRSDIVDSLDEDRLREQEEDQMLRDMIEKLGLQRKKSKFRLSKIWSPKSKSSPSQ

SEQ ID NO: 27411 - protein, 680 aa, Homo sapiens
MFLSSRNFSALKKENIYENNKLAFRVAEEHLGIPALLDAEDMVALKVPDRLSILTYVSQYYNYFHGRSPIGGMAGVKRASEDSEEEPSGKKAPVQAAKLPSPAPARKPPLSPAQTNPVVQRRNEGAGGPPPKTDQALAGSLVSSTCGVCGKHVHLVQRHLADGRLYHRSCFRCKQCSCTLHSGAYKATGEPGTFVCTSHLPAAASASPKLTGLVPRQPGAMGVDSRTSCSPQKAQEANKARPSAWEPAAGNSPARASVPAAPNPAATSATSVHVRSPARPSESRLAPTPTEGKVRPRVTNSSPMGWSSAAPCTAAAASHPAVPPSAPDPRPATPQGGGAPRVAAPQTTLSSSSTSAATVDPPAWTPSASRTQQARNKFFQTSAVPPGTSLSGRGPTPSLVLSKDSSKEQARNFLKQALSALEEAGAPAPGRPSPATAAVPSSQPKTEAPQASPLAKPLQSSSPRVLGLPSRMEPPAPLSTSSTSQASALPPAGRRNLAESSGVGRVGAGSRPKPEAPMAKGKSTTLTQDMSTSLQEGQEDGPAGWRANLKPVDRRSPAERTLKPKEPRALAEPRAGEAPRKVSGSFAGSVHITLTPVRPDRTPRPASPGPSLPGPPPHPAAGDWPSLPASTFVTTGFGRSPLARKPECRAGRRRRRNLTFRANQGDPCPRPMSLLCLARR

SEQ ID NO: 27412 - protein, 493 aa, Homo sapiens
MALSSWAQGTSWAAKGFSRSFSLAEFSLLKPRAGSCRTQEPRKPADGQPWLRCSPCTGGQRIWVHGAHPATSPPIRQKGKLRPRGRESFPQGHTAQESQLGAPPLTPCPVLLMPPGRLAVGVSEGGVAMGRWQGEAQPPLQTPHSQHSFLTPRPLASHPDMSTSLQEGQEDGPAGWRANLKPVDRRSPAERTLKPKEPRALAEPRAGEAPRKVSGSFAGSVHITLTPVRPDRTPRPASPGPSLPARSPSPPRRRRLAVPASLDVCDNWLRPEPPGQEARVQSWKEEEKKPHLQGKPGRPLSPANVPALPGETVTSPVRLHPDYLSPEEIQRQLQDIERRLDALELRGVELEKRLRAAEGDDAEDSLMVDWFWLIHEKQLLLRQESELMYKSKAQRLEEQQLDIEGELRRLMAKPEALKSLQERRREQELLEQYVSTVNDRSDIVDSLDEDRLREQEEDQMLRDMIEKLGLQRKKSKFRLSKIWSPKSKSSPSQ

SEQ ID NO: 27413 - protein, 572 aa, Homo sapiens
MAAIRALQQWCRQQCEGYRDVNICNMTTSFRDGLAFCAILHRHRPDLINFSALKKENIYENNKLAFRVAEEHLGIPALLDAEDMVALKVPDRLSILTYVSQYYNYFHGRSPIGGMAGVKRASEDSEEEPSGKKAPVQAAKLPSPAPARKPPLSPAQTNPVVQRRNEGAGGPPPKTDQALAGSLVSSTCGVCGKHVHLVQRHLADGRLYHRSCFRCKQCSCTLHSGAYKATGEPGTFVCTSHLPAAASASPKLTGLVPRQPGAMGVDSRTSCSPQKAQEANKARPSAWEPAAGNSPARASVPAAPNPAATSATSVHVRSPARPSESRLAPTPTEGKVRPRVTNSSPMGWSSAAPCTAAAASHPAVPPSAPDPRPATPQGGGAPRVAAPQTTLSSSSTSAATVDPPAWTPSASRTQQARNKFFQTSAVPPGTSLSGRGPTPSLVLSKDSSKEQARNFLKQALSALEEAGAPAPGRPSPATAAVPSSQPKTEAPQASPLAKPLQSSSPRVLGLPSRMEPPAPLSTSSTSQASALPPAGRRNLAESSGVGRVGAGSRPKPEAPMAKGKSTTLTQGE

SEQ ID NO: 27414 - protein, 692 aa, Homo sapiens
MAAIRALQQWCRQQCEGYRDVNICNMTTHLPAAASASPKLTGLVPRQPGAMGVDSRTSCSPQKAQEANKARPSAWEPAAGNSPARASVPAAPNPAATSATSVHVRSPARPSESRLAPTPTEGKVRPRVTNSSPMGWSSAAPCTAAAASHPAVPPSAPDPRPATPQGGGAPRVAAPQTTLSSSSTSAATVDPPAWTPSASRTQQARNKFFQTSAVPPGTSLSGRGPTPSLVLSKDSSKEQARNFLKQALSALEEAGAPAPGRPSPATAAVPSSQPKTEAPQASPLAKPLQSSSPRVLGLPSRMEPPAPLSTSSTSQASALPPAGRRNLAESSGVGRVGAGSRPKPEAPMAKGKSTTLTQDMSTSLQEGQEDGPAGWRANLKPVDRRSPAERTLKPKEPRALAEPRAGEAPRKVSGSFAGSVHITLTPVRPDRTPRPASPGPSLPARSPSPPRRRRLAVPASLDVCDNWLRPEPPGQEARVQSWKEEEKKPHLQGKPGRPLSPANVPALPGETVTSPVRLHPDYLSPEEIQRQLQDIERRLDALELRGVELEKRLRAAEGDDAEDSLMVDWFWLIHEKQLLLRQESELMYKSKAQRLEEQQLDIEGELRRLMAKPEALKSLQERRREQELLEQYVSTVNDRSDIVDSLDEDRLREQEEDQMLRDMIEKLGLQRKKSKFRLSKIWSPKSKSSPSQ

SEQ ID NO: 27415 - protein, 150 aa, Homo sapiens
MSVEPPPELEEKAASEPEAGAMPEKRAGAQAAGSTWLQGFGPPSVYHAAIVIFLEFFAWGLLTTPMLTVLHETFSQHTFLMNGLIQGVKGLLSFLSAPLIGALSDVWGRKPFLLGTVFFTCFPIPLMRISPCRVWWRAPVVPATCGRRMA

SEQ ID NO: 27416 - protein, 525 aa, Homo sapiens
MRVFCVGLLLFSVTWAAPTFQPQTEKTKQSCVEEQRQEEKNKDNIGFHHLGKRINQELSSKENIVQERKKDLSLSEASENKGSSKSQNYFTNRQRLNKEYSISNKENTHNGLRMSIYPKSTGNKGFEDGDDAISKLHDQEEYGAALIRNNMQHIMGPVTAIKLLGEENKENTPRNVLNIIPASMNYAKAHSKDKKKPQRDSQAQKSPVKSKSTHRIQHNIDYLKHLSKVKKIPSDFEGSGYTDLQERGDNDISPFSGDGQPFKDIPGKGEATGPDLEGKDIQTGFAGPSEAESTHLDTKKPGYNEIPEREENGGNTIGTRDETAKEADAVDVSLVEGSNDIMGSTNFKELPGREGNRVDAGSQNAHQGKVEFHYPPAPSKEKRKEGSSDAAESTNYNEIPKNGKGSTRKGVDHSNRNQATLNEKQRFPSKGKSQGLPIPSRGLDNEIKNEMDSFNGPSHENIITHGRKYHYVPHRQNNSTRNKGMPQGKGSWGRQPHSNRRFSSRRRDDSSESSDSGSSSESDGD

SEQ ID NO: 27417 - protein, 556 aa, Homo sapiens
MRVFCVGLLLFSVTWAAPTFQPQTEKTKQSCVEEQRITYKGHYEKHGHYVFKCVYMSPEKKNQTDVKQEEKNKDNIGFHHLGKRINQELSSKENIVQERKKDLSLSEASENKGSSKSQNYFTNRQRLNKEYSISNKENTHNGLRMSIYPKSTGNKGFEDGDDAISKLHDQEEYGAALIRNNMQHIMGPVTAIKLLGEENKENTPRNVLNIIPASMNYAKAHSKDKKKPQRDSQAQKSPVKSKSTHRIQHNIDYLKHLSKVKKIPSDFEGSGYTDLQERGDNDISPFSGDGQPFKDIPGKGEATGPDLEGKDIQTGFAGPSEAESTHLDTKKPGYNEIPEREENGGNTIGTRDETAKEADAVDVSLVEGSNDIMGSTNFKELPGREGNRVDAGSQNAHQGKVEFHYPPAPSKEKRKEGSSDAAESTNYNEIPKNGKGSTRKGVDHSNRNQATLNEKQRFPSKGKSQGLPIPSRGLDNEIKNEMDSFNGPSHENIITHGRKYHYVPHRQNNSTRNKGMPQGKGSWGRQPHSNRRFSSRRRDDSSESSDSGSSSESDGD

SEQ ID NO: 27418 - protein, 412 aa, Homo sapiens
MSIYPKSTGNKGFEDGDDAISKLHDQEEYGAALIRNNMQHIMGPVTAIKLLGEENKENTPRNVLNIIPASMNYAKAHSKDKKKPQRDSQAQKSPVKSKSTHRIQHNIDYLKHLSKVKKIPSDFEGSGYTDLQERGDNDISPFSGDGQPFKDIPGKGEATGPDLEGKDIQTGFAGPSEAESTHLDTKKPGYNEIPEREENGGNTIGTRDETAKEADAVDVSLVEGSNDIMGSTNFKELPGREGNRVDAGSQNAHQGKVEFHYPPAPSKEKRKEGSSDAAESTNYNEIPKNGKGSTRKGVDHSNRNQATLNEKQRFPSKGKSQGLPIPSRGLDNEIKNEMDSFNGPSHENIITHGRKYHYVPHRQNNSTRNKGMPQGKGSWGRQPHSNRRFSSRRRDDSSESSDSGSSSESDGD

SEQ ID NO: 27419 - protein, 409 aa, Homo sapiens
MDRLKSHLTVCFLPSVPFLILVSTLATAKSVTNSTLNGTNVVLGSVPVIIARTDHIIVKEGNSALINCSVYGIPDPQFKWYNSIGKLLKEEEDEKERGGGKWQMHDSGLLNITKVSFSDRGKYTCVASNIYGTVNNTVTLRVIFTSGDMGVYYMVVCLVAFTIVMVLNITRLCMMSSHLKKTEKAINEFFRTEGAEKLQKAFEIAKRIPIITSAKTLELAKVTQFKTMEFARYIEELARSVPLPPLIMNCRTIMEEIMEVVGLEEQGQNFVRHTPEGQEAADRDEVYTIPNSLKRSDSPAADSDASSLHEQPQQIAIKVSVHPQSKKEHADDQEGGQFEVKDVEETELSAEHSPETAEPSTDVTSTELTSEEPTPVEVPDKVLPPAYLEATEPAVTHDKNTCIIYESHV

SEQ ID NO: 27420 - protein, 306 aa, Homo sapiens
MHDSGLLNITKVSFSDRGKYTCVASNIYGTVNNTVTLRVIFTSGDMGVYYMVVCLVAFTIVMVLNITRLCMMSSHLKKTEKAINEFFRTEGAEKLQKAFEIAKRIPIITSAKTLELAKVTQFKTMEFARYIEELARSVPLPPLIMNCRTIMEEIMEVVGLEEQGQNFVRHTPEGQEAADRDEVYTIPNSLKRSDSPAADSDASSLHEQPQQIAIKVSVHPQSKKEHADDQEGGQFEVKDVEETELSAEHSPETAEPSTDVTSTELTSEEPTPVEVPDKVLPPAYLEATEPAVTHDKNTCIIYESHV

SEQ ID NO: 27421 - protein, 102 aa, Homo sapiens
MDRLKSHLTVCFLPSVPFLILVSTLATAKSVTNSTLNGTNVVLGSVPVIIARTDHIIVKEGNSALINCSVYGIPDPQFKWYNSIGKLLKEEEDEKERGGGRL

SEQ ID NO: 27422 - protein, 689 aa, Homo sapiens
MIEMAAEKEPFLVPAPPPPLKDESGGGGGPTVPPHQEAASGELRGGTERGPGRCAPSAGSPAAAVGRESPGAAATSSSGPQAQQHRGGGPQAQSHGEARLSDPPGRAAPPDVGEERRGGGGTELGPPAPPRPRNGYQPHRPPGGGGGKRRNSCNVGGGGGGFKHPAFKRRRRVNSDCDSVLPSNFLLGGNIFDPLNLNSLLDEEVSRTLNAETPKSSPLPAKGRDPVEILIPKDITDPLSLNTCTDEGHVVLASPLKTGRKRHRHRGQHHQQQQAAGGSESHPVPPTAPLTPLLHGEGASQQPRHRGQNRDAPQPYELNTAINCRDEVVSPLPSALQGPSGSLSAPPAASVISAPPSSSSRHRKRRRTSSKSEAGARGGGQGSKEKGRGSWGGRHHHHHPLPAAGFKKQQRKFQYGNYCKYYGYRNPSCEDGRLRVLKPEWFRGRDVLDLGCNVGHLTLSIACKWGPSRMVGLDIDSRLIHSARQNIRHYLSEELRLPPQTLEGDPGAEGEEGTTTVRKRSCFPASLTASRGPIAAPQVPLDGADTSVFPNNVVFVTGNYVLDRDDLVEAQTPEYDVVLCLSLTKWVHLNWGDEGLKRMFRRIYRHLRPGGILVLEPQPWSSYGKRKTLTETIYKNYYRIQLKPEQFSSYLTSPDVGFSSYELVATPHNTSKGFQRPVYLFHKARSPSH

SEQ ID NO: 27423 - protein, 220 aa, Homo sapiens
MVGLDIDSRLIHSARQNIRHYLSEELRLPPQTLEGDPGAEGEEGTTTVRKRSCFPASLTASRGPIAAPQVPLDGADTSVFPNNVVFVTGNYVLDRDDLVEAQTPEYDVVLCLSLTKWVHLNWGDEGLKRMFRRIYRHLRPGGILVLEPQPWSSYGKRKTLTETIYKNYYRIQLKPEQFSSYLTSPDVGFSSYELVATPHNTSKGFQRPVYLFHKARSPSH

SEQ ID NO: 27424 - protein, 416 aa, Homo sapiens
MSTKQITCRYFMHGVCREGSQCLFSHDLANSKPSTICKYYQKGYCAYGTRCRYDHTRPSAAAGGAVGTMAHSVPSPAFHSPHPPSEVTASIVKTNSHEPGKREKRTLVLRDRNLSGMAERKTQPSMVSNPGSCSDPQPSPEMKPHSYLDAIRSGLDDVEASSSYSNEQQLCPYAAAGECRFGDACVYLHGEVCEICRLQVLHPFDPEQRKAHEKICMLTFEHEMEKAFAFQASQDKVCSICMEVILEKASASERRFGILSNCNHTYCLSCIRQWRCAKQFENPIIKSCPECRVISEFVIPSVYWVEDQNKKNELIEAFKQGMGKKACKYFEQGKGTCPFGSKCLYRHAYPDGRLAEPEKPRKQLSSQGTVRFFNSVRLWDFIENRESRHVPNNEDVDMTELGDLFMHLSGVESSEP

SEQ ID NO: 27425 - protein, 373 aa, Homo sapiens
MSTKQITCRYDHTRPSAAAGGAVGTMAHSVPSPAFHSPHPPSEVTASIVKTNSHEPGKREKRTLVLRDRNLSGMAERKTQPSMVSNPGSCSDPQPSPEMKPHSYLDAIRSGLDDVEASSSYSNEQQLCPYAAAGECRFGDACVYLHGEVCEICRLQVLHPFDPEQRKAHEKICMLTFEHEMEKAFAFQASQDKVCSICMEVILEKASASERRFGILSNCNHTYCLSCIRQWRCAKQFENPIIKSCPECRVISEFVIPSVYWVEDQNKKNELIEAFKQGMGKKACKYFEQGKGTCPFGSKCLYRHAYPDGRLAEPEKPRKQLSSQGTVRFFNSVRLWDFIENRESRHVPNNEDVDMTELGDLFMHLSGVESSEP

SEQ ID NO: 27426 - protein, 595 aa, Homo sapiens
MAGAIASRMSFSSLKRKQPKTFTVRIVTMDAEMEFNCEMKWKGKDLFDLVCRTLGLRETWFFGLQYTIKDTVAWLKMDKKVLDHDVSKEEPVTFHFLAKFYPENAEEELVQEITQHLFFLQVKKQILDEKIYCPPEASVLLASYAVQAKYGDYDPSVHKRGFLAQEELLPKRVINLYQMTPEMWEERITAWYAEHRGRARDEAEMEYLKIAQDLEMYGVNYFAIRNKKGTELLLGVDALGLHIYDPENRLTPKISFPWNEIRNISYSDKEFTIKPLDKKIDVFKFNSSKLRVNKLILQLCIGNHDLFMRRRKADSLEVQQMKAQAREEKARKQMERQRLAREKQMREEAERTRDELERRLLQMKEEATMANEALMRSEETADLLAEKAQITEEEAKLLAQKAAEAEQEMQRIKATAIRTEEEKRLMEQKVLEAEVLALKMAEESERRAKEADQLKQDLQEAREAERRAKQKLLEIATKPTYPPMNPIPAPLPPDIPSFNLIGDSLSFDFKDTDMKRLSMEIEKEKVEYMEKSKHLQEQLNELKTEIEALKLKERETALDILHNENSDRGGSSKHNTIKKLTLQSAKSRVAFFEEL

SEQ ID NO: 27427 - protein, 620 aa, Homo sapiens
MAGAIASRMSFSSLKRKQPKTFTVRIVTMDAEMEFNCEMKWKGKDLFDLVCRTLGLRETWFFGLQYTIKDTVAWLKMDKKVLDHDVSKEEPVTFHFLAKFYPENAEEELVQEITQHLFFLQVKKQILDEKIYCPPEASVLLASYAVQAKYGDYDPSVHKRGFLAQEELLPKRVINLYQMTPEMWEERITAWYAEHRGRARDEAEMEYLKIAQDLEMYGVNYFAIRNKKGTELLLGVDALGLHIYDPENRLTPKISFPWNEIRNISYSDKEFTIKPLDKKIDVFKFNSSKLRVNKLILQLCIGNHDLFMRRRKADSLEVQQMKAQAREEKARKQMERQRLAREKQMREEAERTRDELERRLLQMKEEATMANEALMRSEETADLLAEKAQITEEEAKLLAQKAAEAEQEMQRIKATAIRTEEEKRLMEQKVLEAEVLALKMAEESERRAKEADQLKQDLQEAREAERRAKQKLLEIATKPTYPPMNPIPAPLPPDIPSFNLIGDSLSFDFKDTDMKRLSMEIEKEKVEYMEKSKHLQEQLNELKTEIEALKLKERETALDILHNENSDRGGSSKHNTIKKSSPRQKTYLHLSPQSRLFPGTLYVVMLYVVMVLPSVILTRA

SEQ ID NO: 27428 - protein, 590 aa, Homo sapiens
MAGAIASRMSFSSLKRKQPKTFTVRIVTMDAEMEFNCEMKWKGKDLFDLVCRTLGLRETWFFGLQYTIKDTVAWLKMDKKVLDHDVSKEEPVTFHFLAKFYPENAEEELVQEITQHLFFLQVKKQILDEKIYCPPEASVLLASYAVQAKYGDYDPSVHKRGFLAQEELLPKRVINLYQMTPEMWEERITAWYAEHRGRARDEAEMEYLKIAQDLEMYGVNYFAIRNKKGTELLLGVDALGLHIYDPENRLTPKISFPWNEIRNISYSDKEFTIKPLDKKIDVFKFNSSKLRVNKLILQLCIGNHDLFMRRRKADSLEVQQMKAQAREEKARKQMERQRLAREKQMREEAERTRDELERRLLQMKEEATMANEALMRSEETADLLAEKAQITEEEAKLLAQKAAEAEQEMQRIKATAIRTEEEKRLMEQKVLEAEVLALKMAEESERRAKEADQLKQDLQEAREAERRAKQKLLEIATKPTYPPMNPIPAPLPPDIPSFNLIGDSLSFDFKDTDMKRLSMEIEKEKVEYMEKSKHLQEQLNELKTEIEALKLKERETALDILHNENSDRGGSSKHNTIKKPQAQGRRPICI

SEQ ID NO: 27429 - protein, 507 aa, Homo sapiens
MAGAIASRMSFSSLKRKQPKTFTVRIVTMDAEMEFNCEVKKQILDEKIYCPPEASVLLASYAVQAKYGDYDPSVHKRGFLAQEELLPKRVINLYQMTPEMWEERITAWYAEHRGRARDEAEMEYLKIAQDLEMYGVNYFAIRNKKGTELLLGVDALGLHIYDPENRLTPKISFPWNEIRNISYSDKEFTIKPLDKKIDVFKFNSSKLRVNKLILQLCIGNHDLFMRRRKADSLEVQQMKAQAREEKARKQMERQRLAREKQMREEAERTRDELERRLLQMKEEATMANEALMRSEETADLLAEKAQITEEEAKLLAQKAAEAEQEMQRIKATAIRTEEEKRLMEQKVLEAEVLALKMAEESERRAKEADQLKQDLQEAREAERRAKQKLLEIATKPTYPPMNPIPAPLPPDIPSFNLIGDSLSFDFKDTDMKRLSMEIEKEKVEYMEKSKHLQEQLNELKTEIEALKLKERETALDILHNENSDRGGSSKHNTIKKPQAQGRRPICI

SEQ ID NO: 27430 - protein, 549 aa, Homo sapiens
MAGAIASRMSFSSLKRKQPKTFTVRIVTMDAEMEFNCEMKWKGKDLFDLVCRTLGLRETWFFGLQYTIKDTVAWLKMDKKVKKQILDEKIYCPPEASVLLASYAVQAKYGDYDPSVHKRGFLAQEELLPKRVINLYQMTPEMWEERITAWYAEHRGRARDEAEMEYLKIAQDLEMYGVNYFAIRNKKGTELLLGVDALGLHIYDPENRLTPKISFPWNEIRNISYSDKEFTIKPLDKKIDVFKFNSSKLRVNKLILQLCIGNHDLFMRRRKADSLEVQQMKAQAREEKARKQMERQRLAREKQMREEAERTRDELERRLLQMKEEATMANEALMRSEETADLLAEKAQITEEEAKLLAQKAAEAEQEMQRIKATAIRTEEEKRLMEQKVLEAEVLALKMAEESERRAKEADQLKQDLQEAREAERRAKQKLLEIATKPTYPPMNPIPAPLPPDIPSFNLIGDSLSFDFKDTDMKRLSMEIEKEKVEYMEKSKHLQEQLNELKTEIEALKLKERETALDILHNENSDRGGSSKHNTIKKPQAQGRRPICI

SEQ ID NO: 27431 - protein, 548 aa, Homo sapiens
MAGAIASRMSFSSLKRKQPKTFTVRIVTMDAEMEFNCEVLDHDVSKEEPVTFHFLAKFYPENAEEELVQEITQHLFFLQVKKQILDEKIYCPPEASVLLASYAVQAKYGDYDPSVHKRGFLAQEELLPKRVINLYQMTPEMWEERITAWYAEHRGRARDEAEMEYLKIAQDLEMYGVNYFAIRNKKGTELLLGVDALGLHIYDPENRLTPKISFPWNEIRNISYSDKEFTIKPLDKKIDVFKFNSSKLRVNKLILQLCIGNHDLFMRRRKADSLEVQQMKAQAREEKARKQMERQRLAREKQMREEAERTRDELERRLLQMKEEATMANEALMRSEETADLLAEKAQITEEEAKLLAQKAAEAEQEMQRIKATAIRTEEEKRLMEQKVLEAEVLALKMAEESERRAKEADQLKQDLQEAREAERRAKQKLLEIATKPTYPPMNPIPAPLPPDIPSFNLIGDSLSFDFKDTDMKRLSMEIEKEKVEYMEKSKHLQEQLNELKTEIEALKLKERETALDILHNENSDRGGSSKHNTIKKPQAQGRRPICI

SEQ ID NO: 27432 - protein, 259 aa, Homo sapiens
MAGAIASRMSFSSLKRKQPKTFTVRIVTMDAEMEFNCEMKWKGKDLFDLVCRTLGLRETWFFGLQYTIKDTVAWLKMDKKVLDHDVSKEEPVTFHFLAKFYPENAEEELVQEITQHLFFLQVKKQILDEKIYCPPEASVLLASYAVQAKYGDYDPSVHKRGFLAQEELLPKRVINLYQMTPEMWEERITAWYAEHRGRARDEAEMEYLKIAQDLEMYGVNYFAIRNKKGTELLLGVDALGLHIYDPENRLTPKISFPWR

SEQ ID NO: 27433 - protein, 561 aa, Homo sapiens
MAGAIASRMSFSSLKRKQPKTFTVRIVTMDAEMEFNCEMKWKGKDLFDLVCRTLGLRETWFFGLQYTIKDTVAWLKMDKKVLDHDVSKEEPVTFHFLAKFYPENAEEELVQEITQHLFFLQVKKQILDEKIYCPPEASVLLASYAVQAKYGDYDPSVHKRGFLAQEELLPKRVINLYQMTPEMWEERITAWYAEHRGRARDEAEMEYLKIAQDLEMYGVNYFAIRNKKGTELLLGVDALGLHIYDPENRLTPKISFPWNEIRNISYSDKEFTIKPLDKKIDVFKFNSSKLRVNKLILQLCIGNHDLFMRRRKADSLEVQQMKAQAREEKARKQMKEEATMANEALMRSEETADLLAEKAQITEEEAKLLAQKAAEAEQEMQRIKATAIRTEEEKRLMEQKVLEAEVLALKMAEESERRAKEADQLKQDLQEAREAERRAKQKLLEIATKPTYPPMNPIPAPLPPDIPSFNLIGDSLSFDFKDTDMKRLSMEIEKEKVEYMEKSKHLQEQLNELKTEIEALKLKERETALDILHNENSDRGGSSKHNTIKKPQAQGRRPICI

SEQ ID NO: 27434 - protein, 165 aa, Homo sapiens
MAGAIASRMSFSSLKRKQPKTFTVRIVTMDAEMEFNCEMKWKGKDLFDLVCRTLGLRETWFFGLQYTIKDTVAWLKMDKKVLDHDVSKEEPVTFHFLAKFYPENAEEELVQEITQHLFFLQVKKQILDEKIYCPPEASVLLASYAVQAKLTLQSAKSRVAFFEEL

SEQ ID NO: 27435 - protein, 220 aa, Homo sapiens
MAGAIASRMSFSSLKRKQPKTFTVRIVTMDAEMEFNCEVKKQILDEKIYCPPEASVLLASYAVQAKNKKGTELLLGVDALGLHIYDPENRLTPKISFPWNEIRNISYSDKEFTIKPLDKKIDVFKFNSSKLRVNKLILQLCIGNHDLFMRRRKADSLEVQQMKAQAREEKARKQGQRGRSAEAGPAGSTRGGAKSQAEAPGDCHQAHVPAHEPNSSTVAS

SEQ ID NO: 27436 - protein, 315 aa, Homo sapiens
MPELLVFPAQTDLHEHPLYRAGHLILQDRASCLPAMLLDPRQAPMSWMPVPPQAIKTSHLAALLKNQGKIFAFDLDARRLASMATLLAWAGVSCCELAEEDFLAVSPLDPRYREVHYVLLDPSCSGSGMPSRQLEEPGAGTPSPVRLHALAGFQQRALCHALTFPSLQRLVYSMCSLCQEENEDMVQDALQQNPGAFRLAPALPARPHRGLSTFPGAEHCLRASPKTTLSGGFFVAVIERVEMPTSASQAKASAPERTPSPAPKRKKRAKSCSRCLHTALHIAEAPGSLLPGGKGRCLSSPWKTLGPHRRQQFAF

SEQ ID NO: 27437 - protein, 135 aa, Homo sapiens
MPELLVFPAQTDLHEHPLYRAGHLILQDRASCLPAMLLDPRQAPMSWMPVPPQAIKTSHLAALLKNQGKIFAFDLDARRLASMATLLAWAGVSCCELAEEDFLAVSPLDPRYREVHYVLLDPSCSGSGEMVRRRG

SEQ ID NO: 27438 - protein, 117 aa, Homo sapiens
MPSRQLEEPGAGTPSPVRLHALAGFQQRALCHALTFPSLQRLVYSMCSLCQEENEDMVQDALQQNPGAFRLAPALPARPHRGLSTFPGAEHCLRASPKTTLSGGFFVAVIERVEMPT

SEQ ID NO: 27439 - protein, 245 aa, Homo sapiens
MPELLVFPAQTDLHEHPLYRAGHLILQDRASCLPAMLLDPRQAPMSWMPVPPQAIKTSHLAALLKNQGKIFAFDLDARRLASMATLLAWAGVSCCELAEEDFLAVSPLDPRYREVHYVLLDPSCSGSGMPSRQLEEPGAGTPSPVRLHALAGFQQRALCHALTFPSLQRLVYSMCSLCQEENEDMVQDALQQNPGAFRLAPALPARPHRGLSTFPGAEHCLRASPKTTLSGGFFVAVIERVEMPT

SEQ ID NO: 27440 - protein, 291 aa, Homo sapiens
MPELLVFPAQTDLHEHPLYRAGHLILQDRASCLPAMLLDPRQAPMSWMPVPPQAIKTSHLAALLKNQGKIFAFDLDARRLASMATLLAWAGVSCCELAEEDFLAVSPLDPRYREVHYVLLDPSCSGSGMPSRQLEEPGAGTPSPRLVYSMCSLCQEENEDMVQDALQQNPGAFRLAPALPARPHRGLSTFPGAEHCLRASPKTTLSGGFFVAVIERVEMPTSASQAKASAPERTPSPAPKRKKRAKSCSRCLHTALHIAEAPGSLLPGGKGRCLSSPWKTLGPHRRQQFAF

SEQ ID NO: 27441 - protein, 487 aa, Homo sapiens
MLRAPGCLLRTSVAPAAALAAALLSSLARCSLLEPRDPVASSLSPYFGTKTRYEDVNPVLLSGPEAPWRDPELLEGTCTPVQLVALIRHGTRYPTVKQIRKLRQLHGLLQARGSRDGGASSTGSRDLGAALADWPLWYADWMDGQLVEKGRQDMRQLALRLASLFPALFSRENYGRLRLITSSKHRCMDSSAAFLQGLWQHYHPGLPPPDVADMEFGPPTVNDKLMRFFDHCEKFLTEVEKNATALYHVEAFKTGPEMQNILKKVAATLQVPVNDLNADLIQVAFFTCSFDLAIKGVKSPWCDVFDIDDAKVLEYLNDLKQYWKRGYGYTINSRSSCTLFQDIFQHLDKAVEQKQRSQPISSPVILQFGHAETLLPLLSLMGYFKDKEPLTAYNYKKQMHRKFRSGLIVPYASNLIFVLYHCENAKTPKEQFRVQMLLNEKVLPLAYSQETVSFYEDLKNHYKDILQSCQTSEECELARANSTSDEL

SEQ ID NO: 27442 - protein, 312 aa, Homo sapiens
MLRAPGCLLRTSVAPAAALAAALLSSLARCSLLEPRDPVASSLSPYFGTKTRYEDVNPVLLSGPEAPWRDPELLEGTCTPVQLVALIRHGTRYPTVKQIRKLRQLHGLLQARGSRDGGASSTGSRDLGAALADWPLWYADWMDGQLVEKGRQDMRQLALRLASLFPALFSRENYGRLRLITSSKHRCMDSSAAFLQGLWQHYHPGLPPPDVADMEFGPPTVNDKLMRFFDHCEKFLTEVEKNATALYHVEAFKTGPEMQNILKKVAATLQVPVNDLNAGLSQFLLQSSSSLVMQRLFFHCFLSWATSKTRNP

SEQ ID NO: 27443 - protein, 284 aa, Homo sapiens
MLRAPGCLLRTSVAPAAALAAALLSSLARCSLLEPRDPVASSLSPYFGTKTRYEDVNPVLLSGPEAPWRDPELLEGTCTPVQLVALIRHGTRYPTVKQIRKLRQLHGLLQARGSRDGGASSTGSRDLGAALADWPLWYADWMDGQLVEKGRQDMRQLALRLASLFPALFSRENYGRLRLITSSKHRCMDSSAAFLQGLWQHYHPGLPPPDVADMEFGPPTVNDKLMRFFDHCEKFLTEVEKNATALYHVEAFKTGPEMQNILKKVAATLQVPVNDLNAGIRIFK

SEQ ID NO: 27444 - protein, 286 aa, Homo sapiens
MCLFQLCGLVRYMEFGPPTVNDKLMRFFDHCEKFLTEVEKNATALYHVEAFKTGPEMQNILKKVAATLQVPVNDLNADLIQVAFFTCSFDLAIKGVKSPWCDVFDIDDAKVLEYLNDLKQYWKRGYGYTINSRSSCTLFQDIFQHLDKAVEQKQRSQPISSPVILQFGHAETLLPLLSLMGYFKDKEPLTAYNYKKQMHRKFRSGLIVPYASNLIFVLYHCENAKTPKEQFRVQMLLNEKVLPLAYSQETVSFYEDLKNHYKDILQSCQTSEECELARANSTSDEL

SEQ ID NO: 27445 - protein, 212 aa, Homo sapiens
MGVTCVSQMPVAEGKSVQQTVELLTRKLEMLGAEKQGTFCVDCETYHTAASTLGSQGQTGKLMYVMHNSEYPLSCFALFENGPCLIADTNFDVLMVKLKGFFQSAKASKIETRGTRYQYCDFLVKVGTVTMGPSARGISVEVEYGPCVVASDCWSLLLEFLQSFLGSHTPGAPAVFGNRHDAVYGPADTMVQYMELFNKIRKQQQVPVAGIR

SEQ ID NO: 27446 - protein, 123 aa, Homo sapiens
MGVTCVSQMPVAEGKSVQQTVELLTRKLEMLGAEKQGTFCVDCETYHTAASTLGSQGQTGKLMYVMHNSEYPLSCFALFENGPCLIADTNFDVLMVKLKGFFQSAKASKIETRGTRWSMAPVW

SEQ ID NO: 27447 - protein, 757 aa, Homo sapiens
MDSLFVEEVAASLVREFLSRKGLKKTCVTMDQERPRSDLSINNRNDLRKVLHLEFLYKENKAKENPLKTSLELITRYFLDHFGNTANNFTQDTPIPALSVPKKNNKVPSRCSETTLVNIYDLSDEDAGWRTSLSETSKARHDNLDGDVLGNFVSSKRPPHKSKPMQTVPGETPVLTSAWEKIDKLHSEPSLDVKRMGENSRPKSGLIVRGMMSGPIASSPQDSFHRHYLRRSSPSSSSTQPQEESRKVPELFVCTQQDILASSNSSPSRTSLGQLSELTVERQKTTASSPPHLPSKRLPPWDRARPRDPSEDTPAVDGSTDTDRMPLKLYLPGGNSRMTQERLERAFKRQGSQPAPVRKNQLLPSDKVDGELGALRLEDVEDELIREEVILSPVPSVLKLQTASKPIDLSVAKEIKTLLFGSSFCCFNEEWKLQSFSFSNTASLKYGIVQNKGGPCGVLAAVQGCVLQKLLFEGDSKADCAQGLQPSDAHRTRCLVLALADIVWRAGGRERAVVALASRTQQFSPTGKYKADGVLETLTLHSLTCYEDLVTFLQQSIHQFEVGPYGCILLTLSAILSRSTELIRQDFDVPTSHLIGAHGYCTQELVNLLLTGKAVSNVFNDVVELDSGDGNITLLRGIAARSDIGFLSLFEHYNMCQVGCFLKTPRFPIWVVCSESHFSILFSLQPGLLRDWRTERLFDLYYYDGLANQQEQIRLTIDTTQTISEDTDNDLVPPLELCIRTKWKGASVNWNGSDPIL

SEQ ID NO: 27448 - protein, 999 aa, Homo sapiens
MGPAPLPLLLGLFLPALWRRAITEAREEAKPYPLFPGPFPGSLQTDHTPLLSLPHASGYQPALMFSPTQPGRPHTGNVAIPQVTSVESKPLPPLAFKHTVGHIILSEHKGVKFNCSISVPNIYQDTTISWWKDGKELLGAHHAITQFYPDDEVTAIIASFSITSVQRSDNGSYICKMKINNEEIVSDPIYIEVQGLPHFTKQPESMNVTRNTAFNLTCQAVGPPEPVNIFWVQNSSRVNEQPEKSPSVLTVPGLTEMAVFSCEAHNDKGLTVSKGVQINIKAIPSPPTEVSIRNSTAHSILISWVPGFDGYSPFRNCSIQVKEADPLSNGSVMIFNTSALPHLYQIKQLQALANYSIGVSCMNEIGWSAVSPWILASTTEGAPSVAPLNVTVFLNESSDNVDIRWMKPPTKQQDGELVGYRISHVWQSAGISKELLEEVGQNGSRARISVQVHNATCTVRIAAVTRGGVGPFSDPVKIFIPAHGWVDYAPSSTPAPGNADPVLIIFGCFCGFILIGLILYISLAIRKRVQETKFGNAFTEEDSELVVNYIAKKSFCRRAIELTLHSLGVSEELQNKLEDVVIDRNLLILGKILGEGEFGSVMEGNLKQEDGTSLKVAVKTMKLDNSSQREIEEFLSEAACMKDFSHPNVIRLLGVCIEMSSQGIPKPMVILPFMKYGDLHTYLLYSRLETGPKHIPLQTLLKFMVDIALGMEYLSNRNFLHRDLAARNCMLRDDMTVCVADFGLSKKIYSGDYYRQGRIAKMPVKWIAIESLADRVYTSKSDVWAFGVTMWEIATRGMTPYPGVQNHEMYDYLLHGHRLKQPEDCLDELYEIMYSCWRTDPLDRPTFSVLRLQLEKLLESLPDVRNQADVIYVNTQLLESSEGLAQGSTLAPLDLNIDPDSIIASCTPRAAISVVTAEVHDSKPHEGRYILNGGSEEWEDLTSAPSAAVTAEKNSVLPGERLVRNGVSWSHSSMLPLGSSLPDELLFADDSSEGSEVLM

SEQ ID NO: 27449 - protein, 746 aa, Homo sapiens
MAWIRSTCILFFTLLFAHIAAVPIKYLPEENVHDADFGEQKDISEINLAAGLDLFQGDILLQKSRNGLRDPNTRWTFPIPYILADNLGLNAKGAILYAFEMFRLKSCVDFKPYEGESSYIIFQQFDGCWSEVGDQHVGQNISIGQGCAYKAIIEHEILHALGFYHEQSRTDRDDYVNIWWDQILSGYQHNFDTYDDSLITDLNTPYDYESLMHYQPFSFNKNASVPTITAKIPEFNSIIGQRLDFSAIDLERLNRMYNCTTTHTLLDHCTFEKANICGMIQGTRDDTDWAHQDSAQAGEVDHTLLGQCTGAGYFMQFSTSSGSAEEAALLESRILYPKRKQQCLQFFYKMTGSPSDRLVVWVRRDDSTGNVRKLVKVQTFQGDDDHNWKIAHVVLKEEQKFRYLFQGTKGDPQNSTGGIYLDDITLTETPCPTGVWTVRNFSQVLENTSKGDKLQSPRFYNSEGYGFGVTLYPNSRESSGYLRLAFHVCSGENDAILEWPVENRQVIITILDQEPDVRNRMSSSMVFTTSKSHTSPAINDTVIWDRPSRVGTYHTDCNCFRSIDLGWSGFISHQMLKRRSFLKNDDLIIFVDFEDITHLSQTEVPTKGKRLSPQGLILQGQEQQVSEEGSGKAMLEEALPVSLSQGQPSRQKRSVENTGPLEDHNWPQYFRDPCDPNPCQNDGICVNVKGMASCRCISGHAFFYTGERCQAVQVHGSVLGMVIGGTAGVIFLTFSIIAILSQRPRK

SEQ ID NO: 27450 - protein, 249 aa, Homo sapiens
MAKSGLRQDPQSTAAATVLKRAVELDSESRYPQALVCYQEGIDLLLQVLKGTKDNTKRCNLREKISKYMDRAENIKKYLDQEKEDGKYHKQIKIEENATGFSYESLFREYLNETVTEVWIEDPYIRHTHQLYNFLRFCEMLIKRPCKVKTIHLLTSLDEGIEQVQQSRGLQEIEESLRSHGVLLEVQYSSSIHDREIRFNNGWMIKIGRGLDYFKKPQSRFSLGYCDFDLRPCHETTVDIFHKKHTKNI

SEQ ID NO: 27451 - protein, 204 aa, Homo sapiens
MGEAEVGGGGAAGDKGPGEAATSPAEETVVWSPEVEVCLFHAMLGHKPVGVNRHFHMICIRDKFSQNIGRQVPSKVIWDHLSTMYDMQALHESEILPFPNPERNFVLPEEIIQEVREGKVMIEEEMKEEMKEDVDPHNGADDVFSSSGSLGKASEKSSKDKEKNSSDLGCKEGADKRKRSRVTDKVLTANSNPSSPSAAKRRRT

SEQ ID NO: 27452 - protein, 322 aa, Homo sapiens
MDPTISTLDTELTPINGTEETLCYKQTLSLTVLTCIVSLVGLTGNAVVLWLLGCRMRRNAFSIYILNLAAADFLFLSGRLIYSLLSFISIPHTISKILYPVMMFSYFAGLSFLSAVSTERCLSVLWPIWYRCHRPTHLSAVVCVLLWALSLLRSILEWMLCGFLFSGADSAWCQTSDFITVAWLIFLCVVLCGSSLVLLIRILCGSRKIPLTRLYVTILLTVLVFLLCGLPFGIQFFLFLWIHVDREVLFCHVHLVSIFLSALNSSANPIIYFFVGSFRQRQNRQNLKLVLQRALQDASEVDEGGGQLPEEILELSGSRLEQ

SEQ ID NO: 27453 - protein, 330 aa, Homo sapiens
MDPTTPAWGTESTTVNGNDQALLLLCGKETLIPVFLILFIALVGLVGNGFVLWLLGFRMRRNAFSVYVLSLAGADFLFLCFQIINCLVYLSNFFCSISINFPSFFTTVMTCAYLAGLSMLSTVSTERCLSVLWPIWYRCRRPRHLSAVVCVLLWALSLLLSILEGKFCGFLFSDGDSGWCQTFDFITAAWLIFLFMVLCGSSLALLVRILCGSRGLPLTRLYLTILLTVLVFLLCGLPFGIQWFLILWIWKDSDVLFCHIHPVSVVLSSLNSSANPIIYFFVGSFRKQWRLQQPILKLALQRALQDIAEVDHSEGCFRQGTPEMSRSSLV

SEQ ID NO: 27454 - protein, 216 aa, Homo sapiens
MSFLFGSRSSKTFKPKKNIPEGSHQYELLKHAEATLGSGNLRMAVMLPEGEDLNEWVAVNTVDFFNQINMLYGTITDFCTEESCPVMSAGPKYEYHWADGTNIKKPIKCSAPKYIDYLMTWVQDQLDDETLFPSKIGVPFPKNFMSVAKTILKRLFRVYAHIYHQHFDPVIQLQEEAHLNTSFKHFIFFVQEFNLIDRRELAPLQELIEKLTSKDR

SEQ ID NO: 27455 - protein, 221 aa, Homo sapiens
MEGATDVNESGSRSSKTFKPKKNIPEGSHQYELLKHAEATLGSGNLRMAVMLPEGEDLNEWVAVNTVDFFNQINMLYGTITDFCTEESCPVMSAGPKYEYHWADGTNIKKPIKCSAPKYIDYLMTWVQDQLDDETLFPSKIGVPFPKNFMSVAKTILKRLFRVYAHIYHQHFDPVIQLQEEAHLNTSFKHFIFFVQEFNLIDRRELAPLQELIEKLTSKDR

SEQ ID NO: 27456 - protein, 967 aa, Homo sapiens
MGPGQPASTCVHLAPRTQLDGRSDPKVLQTQNQLQFNRNVPTHSSNLAIRYSCPHAIRIEKLKHSYNESYHCKDADCRVGPDLGSSVSFSVISQERLSYAVHLARRDVKRRQFEKHIKEHHLRSQPQSSQKCGHTKYKIPDHRVERKESKSQAACQCSHQPSKVEISSSGAKVYLYSSHPGQSDLTVPNSPPTHDPGLQPHPRIGDHKNISEQKSLLEVQRLQKELSSCIHKIEEVTKKDRLEEALDPDEERRIRIRRQEQAARSARMLYVLQQQVKEIQEELDKLSPHKIKHTKKSWAMSKLAAAHRGAIRALQMFVTQFTDRGEHPLPARCKELGSLIRQLSLCSVKLDADPSVPDVVIDILQQIEALESLLEKKLSPKKVKKCFSEIRSRFPIGSQKALERWPSTSPKGERRPLTAKDTFPQETSRPSVAKQLLADKYQPDTELPETQRLQSELDVLDADIVLEEGPFILDQSASFKDEVLAVAKTKAGKKKPVTENVPFRKKDTLAPARQQGLRKAERGRQSQPHSKSRVQQTTVSSRLKMNRQPVKDRKAPWIPPNPTSPPASPKCAAWLKVKTSPRDATKEPLQQEDPQEESHLTGAVEHEAARLAWLDAETSKRLKELEELKAKEIDSMQKQRLDWLDAETSRRTKELNELKAEEMYRLQQLSVSATHLADKVEEAVLDRLKPLLVKAQRVNSTTEANIHLKDGSSVNTAKAQPAQEVAAVDFESNNIRQLDDFLEDCASELWAVTHAKILGSETLATVEDSKDSPDLEIMMRRMEEMEKYQESVRQRYNKIAYADPRLWMQEENNDQKISAISEKPLSPHPIRITKTVDRKDPAVNIMLERPCNGNSLDESVGTEEGSEKREAPLLSLAEDSQQKEGRAPLFVPPGMQHSIGDYCSRFEQYLRIISHEAVGSFNPWLIAESFSEELVDEALGAVAAELQDMCEDYAEAVFTSEFLEAAT

SEQ ID NO: 27457 - protein, 668 aa, Homo sapiens
MSKLAAAHRGAIRALQMFVTQFTDRGEHPLPARCKELGSLIRQLSLCSVKLDADPSVPDVVIDILQQIEALESLLEKKLSPKKVKKCFSEIRSRFPIGSQKALERWPSTSPKGERRPLTAKDTFPQETSRPSVAKQLLADKYQPDTELPETQRLQSELDVLDADIVLEEGPFILDQSASFKDEVLAVAKTKAGKKKPVTENVPFRKKDTLAPARQQGLRKAERGRQSQPHSKSRVQQTTVSSRLKMNRQPVKDRKAPWIPPNPTSPPASPKCAAWLKVKTSPRDATKEPLQQEDPQEESHLTGAVEHEAARLAWLDAETSKRLKELEELKAKEIDSMQKQRLDWLDAETSRRTKELNELKAEEMYRLQQLSVSATHLADKVEEAVLDRLKPLLVKAQRVNSTTEANIHLKDGSSVNTAKAQPAQEVAAVDFESNNIRQLDDFLEDCASELWAVTHAKILGSETLATVEDSKDSPDLEIMMRRMEEMEKYQESVRQRYNKIAYADPRLWMQEENNDQKISAISEKPLSPHPIRITKTVDRKDPAVNIMLERPCNGNSLDESVGTEEGSEKREAPLLSLAEDSQQKEGRAPLFVPPGMQHSIGDYCSRFEQYLRIISHEAVGSFNPWLIAESFSEELVDEALGAVAAELQDMCEDYAEAVFTSEFLEAAT

SEQ ID NO: 27458 - protein, 334 aa, Homo sapiens
MVEFAPLFMPWERRLQTLAVLQFVFSFLALAEICTVGFIALLFTRFWLLTVLYAAWWYLDRDKPRQGGRHIQAIRCWTIWKYMKDYFPISLVKTAELDPSRNYIAGFHPHGVLAVGAFANLCTESTGFSSIFPGIRPHLMMLTLWFRAPFFRDYIMSAGLVTSEKESAAHILNRKGGGNLLGIIVGGAQEALDARPGSFTLLLRNRKGFVRLALTHGAPLVPIFSFGENDLFDQIPNSSGSWLRYIQNRLQKIMGISLPLFHGRGVFQYSFGLIPYRRPITTVVGKPIEVQKTLHPSEEEVNQLHQRYIKELCNLFEAHKLKFNIPADQHLEFC

SEQ ID NO: 27459 - protein, 252 aa, Homo sapiens
MKDYFPISLVKTAELDPSRNYIAGFHPHGVLAVGAFANLCTESTGFSSIFPGIRPHLMMLTLWFRAPFFRDYIMSAGLVTSEKESAAHILNRKGGGNLLGIIVGGAQEALDARPGSFTLLLRNRKGFVRLALTHGAPLVPIFSFGENDLFDQIPNSSGSWLRYIQNRLQKIMGISLPLFHGRGVFQYSFGLIPYRRPITTVVGKPIEVQKTLHPSEEEVNQLHQRYIKELCNLFEAHKLKFNIPADQHLEFC

SEQ ID NO: 27460 - protein, 284 aa, Homo sapiens
MVEFAPLFMPWERRLQTLAVLQFVFSFLALAEICTVGFIALLFTRFWLLTVLYAAWWYLDRDKPRQGGRHIQAIRCWTIWKYMKDYFPISLVKTAELDPSRNYIAGFHPHGVLAVGAFANLCTESTGFSSIFPGIRPHLMMLTLWFRAPFFRDYIMSAGLVTSEKESAAHILNRKGGGNLLGIIVGGAQEALDARPGSFTLLLRNRKGFVRLALTHGYQASGKSTLGSVGNWQGFYFGGKMAETNADSILVEIFSPFTIKIIFWCLMPKYLEKFPQRRLSDLRN

SEQ ID NO: 27461 - protein, 716 aa, Homo sapiens
MNNFRATILFWAAAAWAKSGKPSGEMDEVGVQKCKNALKLPVLEVLPGGGWDNLRNVDMGRVMELTYSNCRTTEDGQYIIPDEIFTIPQKQSNLEMNSEILESWANYQSSTSYSINTELSLFSKVNGKFSTEFQRMKTLQVKDQAITTRVQVRNLVYTVKINPTLELSSGFRKELLDISDRLENNQTRMATYLAELLVLNYGTHVTTSVDAGAALIQEDHLRASFLQDSQSSRSAVTASAGLAFQNTVNFKFEENYTSQNVLTKSYLSNRTNSRVQSIGGVPFYPGITLQAWQQGITNHLVAIDRSGLPLHFFINPNMLPDLPGPLVKKVSKTVETAVKRYYTFNTYPGCTDLNSPNFNFQANTDDGSCEGKMTNFSFGGVYQECTQLSGNRDVLLCQKLEQKNPLTGDFSCPSGYSPVHLLSQIHEEGYNHLECHRKCTLLVFCKTVCEDVFQVAKAEFRAFWCVASSQVPENSGLLFGGLFSSKSINPMTNAQSCPAGYFPLRLFENLKVCVSQDYELGSRFAVPFGGFFSCTVGNPLVDPAISRDLGAPSLKKCPGGFSQHPALISDGCQVSYCVKSGLFTGGSLPPARLPPFTRPPLMSQAATNTVIVTNSENARSWIKDSQTHQWRLGEPIELRRAMNVIHGDGGGLSGGAAAGVTVGVTTILAVVITLAIYGTRKFKKKAYQAIEERQSLVPGTAATGDTTYQEQGQSPA

SEQ ID NO: 27462 - protein, 576 aa, Homo sapiens
MPALSTGSGSDTGLYELLAALPAQLQPHVDSQEDLTFLWDMFGEKSLHSLVKIHEKLHYYEKQSPVPILHGAAALADDLAEELQNKPLNSEIRELLKLLSKPNVKALLSVHDTVAQKNYDPVLPPMPEDIDDEEDSVKIIRLVKNREPLGATIKKDEQTGAIIVARIMRGGAADRSGLIHVGDELREVNGIPVEDKRPEEIIQILAQSQGAITFKIIPGSKEETPSKEGKMFIKALFDYNPNEDKAIPCKEAGLSFKKGDILQIMSQDDATWWQAKHEADANPRAGLIPSKHFQERRLALRRPEILVQPLKVSNRKSSGFRKSFRLSRKDKKTNKSMYECKKSDQYDTADVPTYEEVTPYRRQTNEKYRLVVLVGPVGVGLNELKRKLLISDTQHYGVTVPHTTRARRSQESDGVEYIFISKHLFETDVQNNKFIEYGEYKNNYYGTSIDSVRSVLAKNKVCLLDVQPHTVKHLRTLEFKPYVIFIKPPSIERLRETRKNAKIISSRDDQGAAKPFTEEDFQEMIKSAQIMESQYGHLFDKIIINDDLTVAFNELKTTFDKLETETHWVPVSWLHS

SEQ ID NO: 27463 - protein, 374 aa, Homo sapiens
MPEDIDDEEDSVKIIRLVKNREPLGATIKKDEQTGAIIVARIMRGGAADRSGLIHVGDELREVNGIPVEDKRPEEIIQILAQSQGAITFKIIPGSKEETPSKEGKMFIKALFDYNPNEDKAIPCKEAGLSFKKGDILQIMSQDDATWWQAKHEADANPRAGLIPSKHFQERRLALRRPEILVQPLKVSNRKSSGFRKSFRLSRKDKKTNKSMYECKKSDQYDTADVPTYEEVTPYRRQTNEKYRLVVLVGPVGVGLNELKRKLLISDTQHYGVTVPHTTRARRSQESDGVEYIFISKHLFETDVQNNKFIEYGEYKNNYYGTSIDSVRSVLAKNKVCLLDVQPHGPWFLLPLMAVPWGAKPPNARMTCGSPLDL

SEQ ID NO: 27464 - protein, 451 aa, Homo sapiens
MEQWDHFHNQQEDTDSCSESVKFDARSMTALLPPNPKNSPSLQEKLKSFKAALIALYLLVFAVLIPLIGIVAAQLLKWETKNCSVSSTNANDITQSLTGKGNDSEEEMRFQEVFMEHMSNMEKRIQHILDMEANLMDTEHFQNFSMTTDQRFNDILLQLSTLFSSVQGHGNAIDEISKSLISLNTTLLDLQLNIENLNGKIQENTFKQQEEISKLEERVYNVSAEIMAMKEEQVHLEQEIKGEVKVLNNITNDLRLKDWEHSQTLRNITLIQGPPGPPGEKGDRGPTGESGPRGFPGPIGPPGLKGDRGAIGFPGSRGLPGYAGRPGNSGPKGQKGEKGSGNTLTPFTKVRLVGGSGPHEGRVEILHSGQWGTICDDRWEVRVGQVVCRSLGYPGVQAVHKAAHFGQGTGPIWLNEVFCFGRESSIEECKIRQWGTRACSHSEDAGVTCTL

SEQ ID NO: 27465 - protein, 358 aa, Homo sapiens
MEQWDHFHNQQEDTDSCSESVKFDARSMTALLPPNPKNSPSLQEKLKSFKAALIALYLLVFAVLIPLIGIVAAQLLKWETKNCSVSSTNANDITQSLTGKGNDSEEEMRFQEVFMEHMSNMEKRIQHILDMEANLMDTEHFQNFSMTTDQRFNDILLQLSTLFSSVQGHGNAIDEISKSLISLNTTLLDLQLNIENLNGKIQENTFKQQEEISKLEERVYNVSAEIMAMKEEQVHLEQEIKGEVKVLNNITNDLRLKDWEHSQTLRNITLIQGPPGPPGEKGDRGPTGESGPRGFPGPIGPPGLKGDRGAIGFPGSRGLPGYAGRPGNSGPKGQKGEKGSGNTLRPVQLTDHIRAGPS

SEQ ID NO: 27466 - protein, 388 aa, Homo sapiens
MEQWDHFHNQQEDTDSCSESVKFDARSMTALLPPNPKNSPSLQEKLKSFKAALIALYLLVFAVLIPLIGIVAAQLLKWETKNCSVSSTNANDITQSLTGKGNDSEEEMRFQEVFMEHMSNMEKRIQHILDMEANLMDTEHFQNFSMTTDQRFNDILLQLSTLFSSVQGHGNAIDEISKSLISLNTTLLDLQLNIENLNGKIQENTFKQQEEISKLEERVYNVSAEIMAMKEEQVHLEQEIKGEVKVLNNITNDLRLKDWEHSQTLRNITLIQGPPGPPGEKGDRGPTGESGPRGFPGPIGPPGLKGDRGAIGFPGSRGLPGYAGRPGNSGPKGQKGEKGSGNTLSTGPIWLNEVFCFGRESSIEECKIRQWGTRACSHSEDAGVTCTL

SEQ ID NO: 27467 - protein, 604 aa, Homo sapiens
MAKESGISLKEIQVLARQWKVGPEKRVPAMPGSPVEVKIQSRSSPPTMPPLPPINPGGPRPVSFTPTALSNGINHSPPTLNGAPSPPQRFSNGPASSTSSALTNQQLPATCGARQLSKLKRFLTTLQQFGNDISPEIGEKVRTLVLALVNSTVTIEEFHCKLQEATNFPLRPFVIPFLKANLPLLQRELLHCARAAKQTPSQYLAQHEHLLLNTSIASPADSSELLMEVHGNGKRPSPERREENSFDRDTIAPEPPAKRVCTISPAPRHSPALTVPLMNPGGQFHPTPPPLQHYTLEDIATSHLYREPNKMLEHREVRDRHHSLGLNGGYQDELVDHRLTEREWADEWKHLDHALNCIMEMVEKTRRSMAVLRRCQESDREELNYWKRRYNENTELRKTGTELVSRQHSPGSADSLSNDSQREFNSRPGTGYVPVEFWKKTEEAVNKVKIQAMSEVQKAVAEAEQKAFEVIATERARMEQTIADVKRQAAEDAFLVINEQEESTENCWNCGRKASETCSGCNIARYCGSFCQHKDWERHHRLCGQNLHGQSPHGQGRPLLPVGRGSSARSADCSVPSPALDKTSATTSRSSTPASVTAIDTNGL

SEQ ID NO: 27468 - protein, 575 aa, Homo sapiens
MPGSPVEVKIQSRSSPPTMPPLPPINPGGPRPVSFTPTALSNGINHSPPTLNGAPSPPQRFSNGPASSTSSALTNQQLPATCGARQLSKLKRFLTTLQQFGNDISPEIGEKVRTLVLALVNSTVTIEEFHCKLQEATNFPLRPFVIPFLKANLPLLQRELLHCARAAKQTPSQYLAQHEHLLLNTSIASPADSSELLMEVHGNGKRPSPERREENSFDRDTIAPEPPAKRVCTISPAPRHSPALTVPLMNPGGQFHPTPPPLQHYTLEDIATSHLYREPNKMLEHREVRDRHHSLGLNGGYQDELVDHRLTEREWADEWKHLDHALNCIMEMVEKTRRSMAVLRRCQESDREELNYWKRRYNENTELRKTGTELVSRQHSPGSADSLSNDSQREFNSRPGTGYVPVEFWKKTEEAVNKVKIQAMSEVQKAVAEAEQKAFEVIATERARMEQTIADVKRQAAEDAFLVINEQEESTENCWNCGRKASETCSGCNIARYCGSFCQHKDWERHHRLCGQNLHGQSPHGQGRPLLPVGRGSSARSADCSVPSPALDKTSATTSRSSTPASVTAIDTNGL

SEQ ID NO: 27469 - protein, 263 aa, Homo sapiens
MPGSPVEVKIQSRSSPPTMPPLPPINPGGPRPVSFTPTALSNGINHSPPTLNGAPSPPQRFSNGPASSTSSALTNQQLPATCGARQLSKLKRFLTTLQQFGNDISPEIGEKVRTLVLALVNSTVTIEEFHCKLQEATNFPLRPFVIPFLKANLPLLQRELLHCARAAKQTPSQYLAQHEHLLLNTSIASPADSSELLMEVHGNGKRPSPESCIIHLKSMGVASRHEYFSGTLQMPAHPVRNSTLENLWVDCSRSLRSTVLPFP

SEQ ID NO: 27470 - protein, 614 aa, Homo sapiens
MGFHHVGQARLELLTSGDLPALASQRAGITVGPEKRVPAMPGSPVEVKIQSRSSPPTMPPLPPINPGGPRPVSFTPTALSNGINHSPPTLNGAPSPPQRFSNGPASSTSSALTNQQLPATCGARQLSKLKRFLTTLQQFGNDISPEIGEKVRTLVLALVNSTVTIEEFHCKLQEATNFPLRPFVIPFLKANLPLLQRELLHCARAAKQTPSQYLAQHEHLLLNTSIASPADSSELLMEVHGNGKRPSPERREENSFDRDTIAPEPPAKRVCTISPAPRHSPALTVPLMNPGGQFHPTPPPLQHYTLEDIATSHLYREPNKMLEHREVRDRHHSLGLNGGYQDELVDHRLTEREWADEWKHLDHALNCIMEMVEKTRRSMAVLRRCQESDREELNYWKRRYNENTELRKTGTELVSRQHSPGSADSLSNDSQREFNSRPGTGYVPVEFWKKTEEAVNKVKIQAMSEVQKAVAEAEQKAFEVIATERARMEQTIADVKRQAAEDAFLVINEQEESTENCWNCGRKASETCSGCNIARYCGSFCQHKDWERHHRLCGQNLHGQSPHGQGRPLLPVGRGSSARSADCSVPSPALDKTSATTSRSSTPASVTAIDTNGL

SEQ ID NO: 27471 - protein, 595 aa, Homo sapiens
MVGVPGAAAFQLGPEKRVPAMPGSPVEVKIQSRSSPPTMPPLPPINPGGPRPVSFTPTALSNGINHSPPTLNGAPSPPQRFSNGPASSTSSALTNQQLPATCGARQLSKLKRFLTTLQQFGNDISPEIGEKVRTLVLALVNSTVTIEEFHCKLQEATNFPLRPFVIPFLKANLPLLQRELLHCARAAKQTPSQYLAQHEHLLLNTSIASPADSSELLMEVHGNGKRPSPERREENSFDRDTIAPEPPAKRVCTISPAPRHSPALTVPLMNPGGQFHPTPPPLQHYTLEDIATSHLYREPNKMLEHREVRDRHHSLGLNGGYQDELVDHRLTEREWADEWKHLDHALNCIMEMVEKTRRSMAVLRRCQESDREELNYWKRRYNENTELRKTGTELVSRQHSPGSADSLSNDSQREFNSRPGTGYVPVEFWKKTEEAVNKVKIQAMSEVQKAVAEAEQKAFEVIATERARMEQTIADVKRQAAEDAFLVINEQEESTENCWNCGRKASETCSGCNIARYCGSFCQHKDWERHHRLCGQNLHGQSPHGQGRPLLPVGRGSSARSADCSVPSPALDKTSATTSRSSTPASVTAIDTNGL

SEQ ID NO: 27472 - protein, 188 aa, Homo sapiens
MVPGAAGWCCLVLWLPACVAAHGFRIHDYLYFQVLSPGDIRYIFTATPAKDFGGIFHTRYEQIHLVPAEPPEACGELSNGFFIQDQIALVERGGCSFLSKTRVVQEHGGRAVIISDNAVDNDSFYVEMIQDSTQRTADIPALFLLGRDGYMIRRSLEQHGLPWAIISIPVNVTSIPTFELLQPPWTFW

SEQ ID NO: 27473 - protein, 646 aa, Homo sapiens
MGLPRLVCAFLLAACCCCPRVAGVPGEAEQPAPELVEVEVGSTALLKCGLSQSQGNLSHVDWFSVHKEKRTLIFRVRQGQGQSEPGEYEQRLSLQDRGATLALTQVTPQDERIFLCQGKRPRSQEYRIQLRVYKAPEEPNIQVNPLGIPVNSKEPEEVATCVGRNGYPIPQVIWYKNGRPLKEEKNRVHIQSSQTVESSGLYTLQSILKAQLVKEDKDAQFYCELNYRLPSGNHMKESREVTVPVFYPTEKVWLEVEPVGMLKEGDRVEIRCLADGNPPPHFSISKQNPSTREAEEETTNDNGVLVLEPARKEHSGRYECQGLDLDTMISLLSEPQELLVNYVSDVRVSPAAPERQEGSSLTLTCEAESSQDLEFQWLREETGQVLERGPVLQLHDLKREAGGGYRCVASVPSIPGLNRTQLVNVAIFGPPWMAFKERKVWVKENMVLNLSCEASGHPRPTISWNVNGTASEQDQDPQRVLSTLNVLVTPELLETGVECTASNDLGKNTSILFLELVNLTTLTPDSNTTTGLSTSTASPHTRANSTSTERKLPEPESRGVVIVAVIVCILVLAVLGAVLYFLYKKGKLPCRRSGKQEITLPPSRKSELVVEVKSDKLPEEMGLLQGSSGDKRAPGDQGEKYIDLRH

SEQ ID NO: 27474 - protein, 527 aa, Homo sapiens
MVYIVRQFLLYNVSGSVYLDQLIVLLTAKFSILRIAGSRVHHSPFSGHLDGCSFLSLQHSLHTSLDMSRHENVFLGLTLSSKSAGLKGFQLAFVPGLLQGTGGYLDGPLPTPVDNPRVGLEVGLRLSLPPLPPCPGVHIQSSQTVESSGLYTLQSILKAQLVKEDKDAQFYCELNYRLPSGNHMKESREVTVPVFYPTEKVWLEVEPVGMLKEGDRVEIRCLADGNPPPHFSISKQNPSTREAEEETTNDNGVLVLEPARKEHSGRYECQGLDLDTMISLLSEPQELLVNYVSDVRVSPAAPERQEGSSLTLTCEAESSQDLEFQWLREETGQVLERGPVLQLHDLKREAGGGYRCVASVPSIPGLNRTQLVNVAIFGPPWMAFKERKVWVKENMVLNLSCEASGHPRPTISWNVNGTASEQDQDPQRVLSTLNVLVTPELLETGVECTASNDLGKNTSILFLELVNLTTLTPDSNTTTGLSTSTASPHTRANSTSTGKPGLAREQGCARASFLPCPSPESPVQKGE

SEQ ID NO: 27475 - protein, 235 aa, Homo sapiens
MLSATRRACQLLLLHSLFPVPRMGNSASNIVSPQEALPGRKEQTPVAAKHHVNGNRTVEPFPEGTQMAVFGMGCFWGAERKFWVLKGVYSTQVGFAGGYTSNPTYKEVCSEKTGHAEVVRVVYQPEHMSFEELLKVFWENHDPTQGMRQGNDHGTQYRSAIYPTSAKQMEAALSSKENYQKVLSEHGFGPITTDIREGQTFYYAEDYHQQYLSKNPNGYCGLGGTGVSCPVGIKK

SEQ ID NO: 27476 - protein, 169 aa, Homo sapiens
MAVFGMGCFWGAERKFWVLKGVYSTQVGFAGGYTSNPTYKEVCSEKTGHAEVVRVVYQPEHMSFEELLKVFWENHDPTQGMRQGNDHGTQYRSAIYPTSAKQMEAALSSKENYQKVLSEHGFGPITTDIREGQTFYYAEDYHQQYLSKNPNGYCGLGGTGVSCPVGIKK

SEQ ID NO: 27477 - protein, 192 aa, Homo sapiens
MCSEPKHHVNGNRTVEPFPEGTQMAVFGMGCFWGAERKFWVLKGVYSTQVGFAGGYTSNPTYKEVCSEKTGHAEVVRVVYQPEHMSFEELLKVFWENHDPTQGMRQGNDHGTQYRSAIYPTSAKQMEAALSSKENYQKVLSEHGFGPITTDIREGQTFYYAEDYHQQYLSKNPNGYCGLGGTGVSCPVGIKK

SEQ ID NO: 27478 - protein, 195 aa, Homo sapiens
MLSATRRACQLLLLHSLFPVPRMGNSASNIVSPQEALPGRKEQTPVAAKHHVNGNRTVEPFPEGTQMAVFEKTGHAEVVRVVYQPEHMSFEELLKVFWENHDPTQGMRQGNDHGTQYRSAIYPTSAKQMEAALSSKENYQKVLSEHGFGPITTDIREGQTFYYAEDYHQQYLSKNPNGYCGLGGTGVSCPVGIKK

SEQ ID NO: 27479 - protein, 213 aa, Homo sapiens
MGNSASNIVSPQEALPGRKEQTPVAAKHHVNGNRTVEPFPEGTQMAVFGMGCFWGAERKFWVLKGVYSTQVGFAGGYTSNPTYKEVCSEKTGHAEVVRVVYQPEHMSFEELLKVFWENHDPTQGMRQGNDHGTQYRSAIYPTSAKQMEAALSSKENYQKVLSEHGFGPITTDIREGQTFYYAEDYHQQYLSKNPNGYCGLGGTGVSCPVGIKK

SEQ ID NO: 27480 - protein, 8384 aa, Homo sapiens
MKLILWYLVVALWCFFKDVEALLYRQKSDGKIAASRSGGFSYGSSSSGDLDRKKPLFSLEFGSPGETEDKSRQRQDAGSPKSEDTPAGGFFNSSSSSGDSDRTKPFFSLGLGAPGKAEDKSGDSQDAGGSKSEDTPPGGFFYGSSSSGDSDKKKPLFSFEFGATGEDEDKSRERWDAGNSRSEDSPADSTNTRYGAGFSSSGASLDVGFGWGISDEKGLEVSKADGRETRGSGSAGGETIVFGPDAGSSVGTGSSGLKLGAGKGDAAFGFEVSDSNSFGDTGISSKTVEGNQTSSSGGSVSIDLGDTSFRSENQFVGGGSLNSISNLWDSGQEGFGINEIGGNGMSGSVSAEAGFKGFGSDSSSSGDSSARNGFENSSGISEDSGVILGSSDQHEVELSRTGGNRKRSSDPDEAGNLSPGSDVSDSGGNTWSSDSGSGGGGVTSSSEYSTSGPLNTPEKGSHIPEATPKYSETNAIIGEISTWSKGAYKSFNGRIFFFESSCPYTFCRHCIESGGDFNIEIKRNNDSEIEKITVLIDNNDVSIFGDTILVNGESVQIPYNNKLIHIKKYGEHNVLNSRRGILTLMWDKNNKLSLTLHKQYPTCGLCGNFNSTPGQDINEHIANSKIPGDCPNAVGKSYEVCEDGIQHCNKIIGTYFEKCGKVAALSNDYKMICIDEYCQTRDKTSTCDTYSELSRLCASDGPGTFESWRSDSDVVCGTQRCPEQHIYKECGPSNPATCSNVAPFQDSECVSGCTCPEGYLLDDIGEKGKCVLKAECPCESSGTVYQPGEVREGPCGSQCTCQDAKWSCTEALCPGRCKVEGSSLTTFDGVKYNFPGNCHFLAVHNEDWSISVELRPCPSGQTGTCLNSVTLLLNSSVPVDKYVFNSDGTVTNDKIRNQGYYYSDKIQIFNASSSYLQVETYFHVKLQIQIVPVMQLYVSMPPNQFTDTVGLCGSYNNKAEDDFMSSQNILEKTSQAFANSWEMMSCPKGNPSSCISIEKEKFAERHCGILLDSSGPLASCHPIVNPKPYHEECKKYTCTCENSQDCLCTILGNYVKACAEKETYIVGWRTGLCEHSCPSGLVFKYNVKACNSSCRSLSERDRSCDVEDVPVDGCTCPDAMYQNNEGNCVLKSQCDCYINDEVMQPGKLIHIDDNKCVCRDGILLCQIPIDLTLQNCSGGAEYVDCSDPKAQRRTNRTCSTRNIPVFDENLPCKRGCFCPEGMVRNSKGICVFPNDCPCSFGGREYDEGSVTSVGCNECTCIKGSWSCTQNECQTICHIYGEGHVRTFDGKSYSFDGLCQYSFLEDYCGHENGTFRILTESVPCCEDGLTCSRKIIVAFQDQNIVLQDGKVTAVKSTESKKCELNANAYSIHTVGLYLILKFQNGIIVIWDKNTRLSVILDPNWNGKVCGLCGNNNGDLKDDFTTRYSSVASGALEFGNSWKTSQECSDTVAQTFPCDSNPYCKAWAVRKCEILRDSTFRDCHNKVDPSAYHDACIEEACACDMEGKYLGFCTAVAMYAEACSAVGVCVSWRKPNLCPVYCDYYNAPGECRWHYEPCGTVTAKTCKDQLVGQKFSSLLEGCYAKCPDSAPYLDENTMKCVSLSECSCFYNDVIPAGGVIEDNCGRTCYCIAGQLECSETAPTNSTFAVSTTTATTILSTGAAITLVTGGPSTAASIPAITTSSSETTGTTLGPLTEPFTTGITETSVPIISTSGNAGMTGVVSPTVTGASGMAGTTGGVDAATTGAASENTSERAGTPRVSGETPAVGGGSTPGEAGPGATVSGSTGVSAGSITASPGASATSSESSKSGTTGPSVGGKTGATSSEATSSEGMSGVTGQSLGSTAGSDSEITAKTSFTGSSPPGKLTRPSPGSPGHFSGGTTEWGNVATTGAAGENTSGALGSTEGSVEATTSAGSGNTAGTSGTGDTGPGNTAVSGTPVVSPGATPGAPGSSTPGEADIGNTSFGKSGTPTVSAASTTSSPVSKHTDAASATAVTISGSKPGTPGTPGGATSGGKITSGWSSSGTSTGASNTPGATGSSTGQTDTSGPSAKVTGNYGQSSEIPGTIKSSSDVSGTMGQSDTTSGPSVAVTRTSEQSSGVTVASEPSVGVSGTTGPLAEISGTTRPLVSGLRTTGSSAEGSGTTGPSSRESVTTRPLAEGSGTSGQSVTGSRATGLSATELGTTVSFTGGLGTSRSSARETRTTGPSADGSGTTGPSVVRSGTTRLSVGVTRATESSPGVTGTTTPSAEESRTTGPSVLVTGTTGQSGQGSGTTGKSFIESGPSVVGSGTTGPTSAGLGTTAPSTRRSSTTKPSVGRTGTTGQSGAESGTTEPSARVAGVTGTSAEVSGRIEPSATESSTSRPLGETTGTTIPSMEGSEATGPSVIGSETTRLSVIGSGTTGTSSGGSGATRSSGGGMGTTGQSTARSETTGPLFGLTGTFGQSATVTGTSSNSAGVTTPEKSPGVAMTTGLLVEGSATTQPRILESETTESSAGVIVTSGQSARVTGATGPSAGETGTTEPSTEGSVAAVLFVIGSETTRPLDIGSGTTGTLSGGSSTTRSSDGTTGTTRKSTARSETTGLSGLTGTSGQLAGVTGTSSKSAGVTVTSEKSAGVAVITGSFVERPVTTGPPLLESETTRPSGGVTVTSGQSARVTETVGASAGVTGTTGPSTEGSGATGPSVVGSGTTRPLAGESGTTESSAGVTGTRPSSSRESATTGPSDEGSGTTGLSAGVTVTSGQSVRKTGTTGAPAGVTETTRPSVVKSGTTGPSVIGTRTTGTSSGGSGATRSSGGETETTGQSAVKSGTTESFTRLTRTSGQSAGMTGTSAQSAGVALTSPFVEGLVTTGSSTVGLETTRPSAVGSGKTGPPVVKAQTTGPSAGVTVTSGQSARMTGASGPSVGVTGTTGPASKGLGTIRPSVVGLETTELSAEGSGTTGPPIVGETTVPSAGVTVTSGYSDRVTGATEPLAGVTGTIKPSVAGSVTTGPSVTGVETTAKTTSGGLSTTISSVGGTGTTGQSPERSGTTGPFTGLTGTSAQSAGVTMTSIQSAGVLVTTGLNVDGLGTTGKALIGSGTTGLSAEATGTIGPSTEGLEKTGPSITGSGTTRPLVTESWTAGTSSGGHSTTSPSVRGTETTGQSAAESVTTGPVTGYTETSGPSAGVTVTPRQSPTVTQTTGSSAAVSGTTVQSLTVSGTTRPSSGQTEITGSSVKESGTTESSAVRSGTTGPTAGVTGTNGPSSAGVTGITGSSPGVTGTTGSSPGVTGTTGSSARSGTSIPSVGKTGTTRTSVEESRTTRPSAGITGTNGLSAEVTGTTGPLAGVTGTTGPSAGVTRTTGLSAGETGTTGLSPGVTRTTRSSAGLTGKTGLSAGVTGKTGLSAEVTGTTRLSAGVTGTTGPSPGVTGTTGTPAGVTGTTELSAGVTGKTGLSSEVTETTGLSYGVKRTIGLSAGSTGTSGQSAGVAGTTTLSAEVTGTTRPSAGVTGTTGLSAEVTEITGISAVVTGTTGPSAGVTETTGSSAGVAGTTRLSAGVTGITGLSAGVTGTTGLSTEVTGTTGPSAGATGTTGLSVGVTGITGLSDVVTETTGSSARSGTGIPSVGETRTTSTSVEESRTTRPSAGIMGTNGLPAEVTGTTEPLAGGTGTTGILAGVTGTTGLSAGETGKIGSSAGVTGKTGSSARVTGKTGPSAEVTGKTGLSAGVTGTTGLSPGVTGTSGLSAEVTGTTGPSAEATGLPGVSAGVTGTTGSLAGGTGTIGLSAGVTGTTGSSAGVTGTTGLSAGVTGIAGLSAGVTGITGPSAGVTGTTTVSAGVTGTTGLSAEATEITGLSAGVTGTTGLSAGVTETIRLSAGVTGTIRSSAGVTGITGLSAGVTGTTGPSAGVTGSTGLLAGVTETTGQSAKVTGTTGQSVGVTGTTRSSGGVTGITGLSAGVTGTNGLSAVTGMTGLSAEVTGTTGLSVGVTGIAGLSAGVTGITGPSAGITGTTTISAGVTGTSGLSAEATGITGLSAGVTGKTGLSAGVTETIGLSAEATGTIGSSPGVTGTTGSSTGVTGITGLSAGVTGTTGLSTEVTGTTGPSAGVTRTTGLSAGVTGITGLSAIVTETTGSSARSGTSIPSVGETGTTRTSVEESRTTRPSAGITGTNGLSAEVTGTIGPLAGGTGTTGLSAGVTGTVGSSAVVTGTTGLSAGVTGTTGPSAEETGATGPSAEVTETTGPSAGVTGTGRLSAEVTGTTGPSAEVTGLPGESAEVTGTIGSPAGVTGTTQLSAVVTGITGLSAEVTGTTGLSAGVTGITGLSAEVTRTTGLSAGVTGTIGLSAGVTGTTRPSAGVTGTTGQSAEVTGTTEPSAGLTETTGSSTGVTGATGPLAGVTGTTGISTEVTGTTGPSARVTGTTVLSAGVTGITGLSAIVTETTGSSARSGTSTPSVGETGTTRTSVEESRATRPSAGITGTNGQSAEVTWITGPLAGVTGTTGISAGVTGTTGLSAGVTGTIGSSAVVTGINGLSAGVTGTTGPSAEETGATGPSAEVTGTTGPSAEETGATGPSAEVTGTTGPSGGVTGTNGLSAEVTGTTGPSAEVTGLPGVSAGVTGTIGSPAAVTGTIRPSAVVTGITGLSAEVTGTTGLSAWVTGIAGLSAGVTETIGSSAGVTGTNGLSAEATGTTGPSAGVTGTTGLSAGVTGTAGLSARVTESTGLSAGVTGTTGLSAGVTGTTGPSAGITGTNGLSAEVTGTTGPLAGVTGTIGLSAGVTGIAGLSAGVTESTGLSAGVTGTIRSSAVVTGINGLSAGVTGTTGPSAEETGATGPSAEVTGTTGPSGGVTGTSGISAEVTGTTGPSAEVTGLPGVSAGVTGTIGSPAAVTGTTRPSAVVTGISGLSAEVTGTTGLSAGVTETIGSSAGVTGTNGLSAEATETTGPSAGVTGTTGLSAGVTGTTGPSAGIAGTNGLSAGVTGTTGLSARVTESTGLSAGVTGTIGSSAVVTETTRLSSGVTGTIGPSAEETGATGLSAEVTGTTGSLAEVTGTTGLSAGVTGTIGSSAVVTGTTGLSAGITGTNGLSAEVTGTAGPLAGVTGTTGLSAGVTGTTGLSAGVTETTGQSAGVTESTGLSPGVTGTIGSSAVVTGIKGLSAGVTGTTGPSAEETGATGPSAEVTGTTGPSGGVTGTSVLSVEVTGTTGPSAEVTGLPGVSAGLTGTIGSPAAVRGTTWPSAVVTGISGLSGEVTGTTGLSAGVTGIGGLSAGVTGTIGSSAGVTGTNALSAEATGTTGPSAGVTGTTGLSAGVTGTTGLSAGVTGTIRSSAVVTETTGLSAGVTGTTGPSAGIAGTNGLSAEVTGTTGLSAGMTGTTGLSARVTESTGLSAGVTGTIGSSAVVTETTRLSAGVTGTIGPSAEETGATGLSAEVTRTTGSLAGVTGTTGPSAVVTGKTELSAEVTGTTELSAEVTEKTGPSAEVTGKTGLSAGVMETTGPSAEVTGTTGSSAGVTGTTGPSAGVTGTTGPSAEATGLPGVSAGVTGTIGSPAGVTGTARLSAVVTGISGLSAEVTGTTGLSTGVTGIAGHSAAVTGITRPSAGVTGTTTVSAGVTGTIGLSAEATGITLPSAGVTETTGLSAGVTETIGLSAGVTGTIGSSAGVTEITGLSAGVTGTTGPSAGVTGSTVLSAGVTATTGQSVGVTGTTGPSAGVTGTTGLSAGVTGIAGLSAGVTGITGPSAGVTGTTTVSAGVTGTTGLSAEATEITGLSAGVTGTTGLSAGVTGIAGLSAGVTETIGSSAGVTGTNGLSAEATGKTGPSAGVTGTTGLSAGVTGTTGLSAGVTETIGLSAGVTGTIGSSAGVKGTTGQSAEVTGATGQSVGVTGTTRSSGGVTGITGLSAGLRGTTVSSAKAGTSIPLTGKTGTTRTSVEESTTTGPSAGITGTNGLSAEMTGTNELSAGVTGTIGSSAGVTGTTGLSVEATVTTGLSAGVTGTTVPLAGVTWTPGPSAGVTGIAALSAGVTGKSGLSAGVTGKTGLSAGVTGTTGPSAEATGKTGLSAGVTGITGPFAEVTGTTGLSAGVIGTTGSSAEVTGITGLSAGVTGKTRSSAGVTGTTGLSAKSGTSIPSAGKTGTTKTSVEESRTTRPSAGITATTGVPAATSPGAEGESIASTSVATGAIPRSTIAPGSTTTGTTGVTTGTTLAPRSFNIGTSGGISGKTLKPGSYVSEATTATGTPGAGPSGGTTISSPEVSTISEVSNTGITGVGSETSIETGISNTATTGVAPGTTLAPGSSSTEATTSIGGSASTRGGIATEATGSTRGVRTTGSEAPEGTSGEFSGTTISSGGFHTEATTLTGGRGSIGTESRAESTTSLPQSAKTRGGILTEATSSTGRIRATGSEAPGGTSRKFSGTTISSGGSHTEATTLAGGRDSTESEFRTATIGVVPATTVAPGSSKTEATTFLGVSGTTSVGRATGATTSIAGSDTSQAEHPGGTSGEFPGTTITSGDSHTEATALTGSRGSIGTESTVETTTYIGESGTTRGGLATATTGAFSGKTLEPGNDNTEATGSTGGIRATRTEAPGGTSGEFPGTTFTSGGSHTEATTFTGGKGSTGTESRAATTRAAPGTTLVPGSSNTGATASPGGSATTRGRITTATTGAFSGKTLESENDNTEATSSTRGVRTTRSEAPGGTSGEFPGTRITSGGSYTATTRAAPGTTLAPGSSNTGATASLGGSAMTRGRITTATTGAFSGKTLEPGNNNTEATSSTRGVRTTRSEAPGEATTLTGDRSSTGSESRTATTGVAPGTTVAPGSSKTEATTFLGVSGTTNIGRATGATTSIVGSDTSQAERPGGTTVVSPGASSTSQSSRPGTSVTPDSSASESETVTTKEFSGTTAISRTSHTGTPAASGGQATGSLTATTGVAPGTTVAPGSSNTEATTSVGERETTKAEIITGDTGELSGTTIISENSTTAGITAATGKQAGTSEVAPSTTVAPGSFSTAATTSPGASGTTGVTTTTKTTTSLGGSGTTGAEIKSATTGAPGSRTGTAGVPSATTVSPGSSNSEATTSVGESGKTGAETITEATTSTEGTGTSGTGFKTGTSEVAPATTVAPGSFSTAATTSPGASGMTGVTTTTKTTTSLGGSGTTGAKIKLVGTTTTAPESRTAGVPSGTRVTPGSSNSEATTSVEESRITRAEVITEATTFSGGSGATRAGLPRGTTGEFSGTNFISGSSNTEATTSTEGTGTSGTGFKIAGITSAPGKQAGTSGVSLATTVAPGSFSTATTSSGASGITRAGPTSETTTSLGGSGTTGAEIKSAAVPSGTTVAPGSSNSEATTSVGENGKTRGEIITDTTEGTSGKVLEPGSAHTEATTFPGGSGTTRAGPPGGTTGELSRMTIIPGSSNTEATTSTKGTGTSGTGFKTGTSWVAPGTTVSPGSFSTATISPGASRTTGAAPAAETTTSLEGGGTTGAEIKSGATSGVPGSKTGTAGVPSATTIAPGSSNSEATTSLGESGKTRVETITGTTEGKTLAAGSAHTEATTFSGGSGSTRAGPLGGASGTSGGYVPGRETEPTTSIEETGTSRTIFKTVGITSAPGRQAGTSVVAPSTTVAPGSFSTAATTSPGASGMTGVRTTSKTTTSLGGTGTTRTEIKSGATTGAPGIKTDIMGESSRTTILSGSSNTEATNSIEETGTSGTGFKTAGITAAPGKQAGTSGVAPGTTVAPGSFSTAATTSPGASGVTGTGPTAETTTFLGGSSTTGAEIKSGATTGAPGSKTGTAKVLSGTTVASGSSNSEATTFSGITEAVTVPSKNGSMTTALGSQLSSSQTVIPGSSGTISHTTVAPGSSVTGTTTGASDDQVTGSKTGTTGVALSTTVAPGSSSTEATTSTGVHRTTVVGQKTGATTRGSAKQGTRSTIEATTSFRGTGTTGSGMNTGTTGVVSGNTISPSSFNTEATSGTSERPNPGSEIGTTGIVSGTTVAPGSSNTEATTSLGNGGTTEAGSKIVTTGITTGTTIVPGSFNTKATTSTDVGVATGVGMATGITNIISGRSQPTGSKTGYTVTGSGTTALPGGFRTGNTPGSTGVTSSQEGTTVVSSGITGIPETSISGPSKEASDKTTAPGPPTTVTASTGVKETSETGVQTGSTLVTAGVPTRPQVSQPETTVVATREVETENKTECLASLPPAPVCHGPLGEEKSPGDIWTANCHRGTCTDAKTIDCKPEECPSPPTCKTGEKLVKFQSNDTCCEIGYCEPRTCLFNNTDYEIGASFDDPSNPCVSYSCKDTGFAAVVQDCPKQTWCAEANRIYDSKKCCYTCKNNCRSSLVNVTVIYSGCKKRVQMAKCTGECEKTAKYNYDILLLEHSCLCCREENYELRDIVLDCPDGSTIPYQYKHITTCSCLDICQLYTTFMYS

SEQ ID NO: 27481 - protein, 8066 aa, Homo sapiens
MKLILWYLVVALWCFFKDVEALLYRQKSDGKIAASRSGGFSYGSSSSGDLDRKKPLFSLEFGSPGETEDKSRQRQDAGSPKSEDTPAGGFFNSSSSSGDSDRTKPFFSLGLGAPGKAEDKSGDSQDAGGSKSEDTPPGGFFYGSSSSGDSDKKKPLFSFEFGATGEDEDKSRERWDAGNSRSEDSPADSTNTRYGAGFSSSGASLDVGFGWGISDEKGLEVSKADGRETRGSGSAGGETIVFGPDAGSSVGTGSSGLKLGAGKGDAAFGFEVSDSNSFGDTGISSKTVEGNQTSSSGGSVSIDLGDTSFRSENQFVGGGSLNSISNLWDSGQEGFGINEIGGNGMSGSVSAEAGFKGFGSDSSSSGDSSARNGFENSSGISEDSGVILGSSDQHEVELSRTGGNRKRSSDPDEAGNLSPGSDVSDSGGNTWSSDSGSGGGGVTSSSEYSTSGPLNTPEKGSHIPEATPKYSETNAIIGEISTWSKGAYKSFNGRIFFFESSCPYTFCRHCIESGGDFNIEIKRNNDSEIEKITVLIDNNDVSIFGDTILVNGESVQIPYNNKLIHIKKYGEHNVLNSRRGILTLMWDKNNKLSLTLHKQYPTCGLCGNFNSTPGQDINEHIANSKIPGDCPNAVGKSYEVCEDGIQHCNKIIGTYFEKCGKVAALSNDYKMICIDEYCQTRDKTSTCDTYSELSRLCASDGPGTFESWRSDSDVVCGTQRCPEQHIYKECGPSNPATCSNVAPFQDSECVSGCTCPEGYLLDDIGEKGKCVLKAECPCESSGTVYQPGEVREGPCGSQCTCQDAKWSCTEALCPGRCKVEGSSLTTFDGVKYNFPGNCHFLAVHNEDWSISVELRPCPSGQTGTCLNSVTLLLNSSVPVDKYVFNSDGTVTNDKIRNQGYYYSDKIQIFNASSSYLQVETYFHVKLQIQIVPVMQLYVSMPPNQFTDTVGLCGSYNNKAEDDFMSSQNILEKTSQAFANSWEMMSCPKGNPSSCISIEKEKFAERHCGILLDSSGPLASCHPIVNPKPYHEECKKYTCTCENSQDCLCTILGNYVKACAEKETYIVGWRTGLCEHSCPSGLVFKYNVKACNSSCRSLSERDRSCDVEDVPVDGCTCPDAMYQNNEGNCVLKSQCDCYINDEVMQPGKLIHIDDNKCVCRDGILLCQIPIDLTLQNCSGGAEYVDCSDPKAQRRTNRTCSTRNIPVFDENLPCKRGCFCPEGMVRNSKGICVFPNDCPCSFGGREYDEGSVTSVGCNECTCIKGSWSCTQNECQTICHIYGEGHVRTFDGKSYSFDGLCQYSFLEDYCGHENGTFRILTESVPCCEDGLTCSRKIIVAFQDQNIVLQDGKVTAVKSTESKKCELNANAYSIHTVGLYLILKFQNGIIVIWDKNTRLSVILDPNWNGKVCGLCGNNNGDLKDDFTTRYSSVASGALEFGNSWKTSQECSDTVAQTFPCDSNPYCKAWAVRKCEILRDSTFRDCHNKVDPSAYHDACIEEACACDMEGKYLGFCTAVAMYAEACSAVGVCVSWRKPNLCPVYCDYYNAPGECRWHYEPCGTVTAKTCKDQLVGQKFSSLLEGCYAKCPDSAPYLDENTMKCVSLSECSCFYNDVIPAGGVIEDNCGRTCYCIAGQLECSETAPTNSTFAVSTTTATTILSTGAAITLVTGGPSTAASIPAITTSSSETTGTTLGPLTEPFTTGITETSVPIISTSGNAGMTGVVSPTVTGASGMAGTTGGVDAATTGAASENTSERAGTPRVSGETPAVGGGSTPGEAGPGATVSGSTGVSAGSITASPGASATSSESSKSGTTGPSVGGKTGATSSEATSSEGMSGVTGQSLGSTAGSDSEITAKTSFTGSSPPGKLTRPSPGSPGHFSGGTTEWGNVATTGAAGENTSGALGSTEGSVEATTSAGSGNTAGTSGTGDTGPGNTAVSGTPVVSPGATPGAPGSSTPGEADIGNTSFGKSGTPTVSAASTTSSPVSKHTDAASATAVTISGSKPGTPGTPGGATSGGKITSGWSSSGTSTGASNTPGATGSSTGQTDTSGPSAKVTGNYGQSSEIPGTIKSSSDVSGTMGQSDTTSGPSVAVTRTSEQSSGVTVASEPSVGVSGTTGPLAEISGTTRPLVSGLRTTGSSAEGSGTTGPSSRESVTTRPLAEGSGTSGQSVTGSRATGLSATELGTTVSFTGGLGTSRSSARETRTTGPSADGSGTTGPSVVRSGTTRLSVGVTRATESSPGVTGTTTPSAEESRTTGPSVLVTGTTGQSGQGSGTTGKSFIESGPSVVGSGTTGPTSAGLGTTAPSTRRSSTTKPSVGRTGTTGQSGAESGTTEPSARVAGVTGTSAEVSGRIEPSATESSTSRPLGETTGTTIPSMEGSEATGPSVIGSETTRLSVIGSGTTGTSSGGSGATRSSGGGMGTTGQSTARSETTGPLFGLTGTFGQSATVTGTSSNSAGVTTPEKSPGVAMTTGLLVEGSATTQPRILESETTESSAGVIVTSGQSARVTGATGPSAGETGTTEPSTEGSVAAVLFVIGSETTRPLDIGSGTTGTLSGGSSTTRSSDGTTGTTRKSTARSETTGLSGLTGTSGQLAGVTGTSSKSAGVTVTSEKSAGVAVITGSFVERPVTTGPPLLESETTRPSGGVTVTSGQSARVTETVGASAGVTGTTGPSTEGSGATGPSVVGSGTTRPLAGESGTTESSAGVTGTRPSSSRESATTGPSDEGSGTTGLSAGVTVTSGQSVRKTGTTGAPAGVTETTRPSVVKSGTTGPSVIGTRTTGTSSGGSGATRSSGGETETTGQSAVKSGTTESFTRLTRTSGQSAGMTGTSAQSAGVALTSPFVEGLVTTGSSTVGLETTRPSAVGSGKTGPPVVKAQTTGPSAGVTVTSGQSARMTGASGPSVGVTGTTGPASKGLGTIRPSVVGLETTELSAEGSGTTGPPIVGETTVPSAGVTVTSGYSDRVTGATEPLAGVTGTIKPSVAGSVTTGPSVTGVETTAKTTSGGLSTTISSVGGTGTTGQSPERSGTTGPFTGLTGTSAQSAGVTMTSIQSAGVLVTTGLNVDGLGTTGKALIGSGTTGLSAEATGTIGPSTEGLEKTGPSITGSGTTRPLVTESWTAGTSSGGHSTTSPSVRGTETTGQSAAESVTTGPVTGYTETSGPSAGVTVTPRQSPTVTQTTGSSAAVSGTTVQSLTVSGTTRPSSGQTEITGSSVKESGTTESSAVRSGTTGPTAGVTGTNGPSSAGVTGITGSSPGVTGTTGSSPGVTGTTGSSARSGTSIPSVGKTGTTRTSVEESRTTRPSAGITGTNGLSAEVTGTTGPLAGVTGTTGPSAGVTRTTGLSAGETGTTGLSPGVTRTTRSSAGLTGKTGLSAGVTGKTGLSAEVTGTTRLSAGVTGTTGPSPGVTGTTGTPAGVTGTTELSAGVTGKTGLSSEVTETTGLSYGVKRTIGLSAGSTGTSGQSAGVAGTTTLSAEVTGTTRPSAGVTGTTGLSAEVTEITGISAVVTGTTGPSAGVTETTGSSAGVAGTTRLSAGVTGITGLSAGVTGTTGLSTEVTGTTGPSAGATGTTGLSVGVTGITGLSDVVTETTGSSARSGTGIPSVGETRTTSTSVEESRTTRPSAGIMGTNGLPAEVTGTTEPLAGGTGTTGILAGVTGTTGLSAGETGKIGSSAGVTGKTGSSARVTGKTGPSAEVTGKTGLSAGVTGTTGLSPGVTGTSGLSAEVTGTTGPSAEATGLPGVSAGVTGTTGSLAGGTGTIGLSAGVTGTTGSSAGVTGTTGLSAGVTGIAGLSAGVTGITGPSAGVTGTTTVSAGVTGTTGLSAEATEITGLSAGVTGTTGLSAGVTETIRLSAGVTGTIRSSAGVTGITGLSAGVTGTTGPSAGVTGSTGLLAGVTETTGQSAKVTGTTGQSVGVTGTTRSSGGVTGITGLSAGVTGTNGLSAVTGMTGLSAEVTGTTGLSVGVTGIAGLSAGVTGITGPSAGITGTTTISAGVTGTSGLSAEATGITGLSAGVTGKTGLSAGVTETIGLSAEATGTIGSSPGVTGTTGSSTGVTGITGLSAGVTGTTGLSTEVTGTTGPSAGVTRTTGLSAGVTGITGLSAIVTETTGSSARSGTSIPSVGETGTTRTSVEESRTTRPSAGITGTNGLSAEVTGTIGPLAGGTGTTGLSAGVTGTVGSSAVVTGTTGLSAGVTGTTGPSAEETGATGPSAEVTETTGPSAGVTGTGRLSAEVTGTTGPSAEVTGLPGESAEVTGTIGSPAGVTGTTQLSAVVTGITGLSAEVTGTTGLSAGVTGITGLSAEVTRTTGLSAGVTGTIGLSAGVTGTTRPSAGVTGTTGQSAEVTGTTEPSAGLTETTGSSTGVTGATGPLAGVTGTTGISTEVTGTTGPSARVTGTTVLSAGVTGITGLSAIVTETTGSSARSGTSTPSVGETGTTRTSVEESRATRPSAGITGTNGQSAEVTWITGPLAGVTGTTGISAGVTGTTGLSAGVTGTIGSSAVVTGINGLSAGVTGTTGPSAEETGATGPSAEVTGTTGPSAEETGATGPSAEVTGTTGPSGGVTGTNGLSAEVTGTTGPSAEVTGLPGVSAGVTGTIGSPAAVTGTIRPSAVVTGITGLSAEVTGTTGLSAWVTGIAGLSAGVTETIGSSAGVTGTNGLSAEATGTTGPSAGVTGTTGLSAGVTGTAGLSARVTESTGLSAGVTGTTGLSAGVTGTTGPSAGITGTNGLSAEVTGTTGPLAGVTGTIGLSAGVTGIAGLSAGVTESTGLSAGVTGTIRSSAVVTGINGLSAGVTGTTGPSAEETGATGPSAEVTGTTGPSGGVTGTSGISAEVTGTTGPSAEVTGLPGVSAGVTGTIGSPAAVTGTTRPSAVVTGISGLSAEVTGTTGLSAGVTETIGSSAGVTGTNGLSAEATETTGPSAGVTGTTGLSAGVTGTTGPSAGIAGTNGLSAGVTGTTGLSARVTESTGLSAGVTGTIGSSAVVTETTRLSSGVTGTIGPSAEETGATGLSAEVTGTTGSLAEVTGTTGLSAGVTGTIGSSAVVTGTTGLSAGITGTNGLSAEVTGTAGPLAGVTGTTGLSAGVTGTTGLSAGVTETTGQSAGVTESTGLSPGVTGTIGSSAVVTGIKGLSAGVTGTTGPSAEETGATGPSAEVTGTTGPSGGVTGTSVLSVEVTGTTGPSAEVTGLPGVSAGLTGTIGSPAAVRGTTWPSAVVTGISGLSGEVTGTTGLSAGVTGIGGLSAGVTGTIGSSAGVTGTNALSAEATGTTGPSAGVTGTTGLSAGVTGTTGLSAGVTGTIRSSAVVTETTGLSAGVTGTTGPSAGIAGTNGLSAEVTGTTGLSAGMTGTTGLSARVTESTGLSAGVTGTIGSSAVVTETTRLSAGVTGTIGPSAEETGATGLSAEVTRTTGSLAGVTGTTGPSAVVTGKTELSAEVTGTTELSAEVTEKTGPSAEVTGKTGLSAGVMETTGPSAEVTGTTGSSAGVTGTTGPSAGVTGTTGPSAEATGLPGVSAGVTGTIGSPAGVTGTARLSAVVTGISGLSAEVTGTTGLSTGVTGIAGHSAAVTGITRPSAGVTGTTTVSAGVTGTIGLSAEATGITLPSAGVTETTGLSAGVTETIGLSAGVTGTIGSSAGVTEITGLSAGVTGTTGPSAGVTGSTVLSAGVTATTGQSVGVTGTTGPSAGVTGTTGLSAGVTGIAGLSAGVTGITGPSAGVTGTTTVSAGVTGTTGLSAEATEITGLSAGVTGTTGLSAGVTGIAGLSAGVTETIGSSAGVTGTNGLSAEATGKTGPSAGVTGTTGLSAGVTGTTGLSAGVTETIGLSAGVTGTIGSSAGVKGTTGQSAEVTGATGQSVGVTGTTRSSGGVTGITGLSAGLRGTTVSSAKAGTSIPLTGKTGTTRTSVEESTTTGPSAGITGTNGLSAEMTGTNELSAGVTGTIGSSAGVTGTTGLSVEATVTTGLSAGVTGTTVPLAGVTWTPGPSAGVTGIAALSAGVTGKSGLSAGVTGKTGLSAGVTGTTGPSAEATGKTGLSAGVTGITGPFAEVTGTTGLSAGVIGTTGSSAEVTGITGLSAGVTGKTRSSAGVTGTTGLSAKSGTSIPSAGKTGTTKTSVEESRTTRPSAGITATTGVPAATSPGAEGESIASTSVATGAIPRSTIAPGSTTTGTTGVTTGTTLAPRSFNIGTSGGISGKTLKPGSYVSEATTATGTPGAGPSGGTTISSPEVSTISEVSNTGITGVGSETSIETGISNTATTGVAPGTTLAPGSSSTEATTSIGGSASTRGGIATEATGSTRGVRTTGSEAPEGTSGEFSGTTISSGGFHTEATTLTGGRGSIGTESRAESTTSLPQSAKTRGGILTEATSSTGRIRATGSEAPGGTSRKFSGTTISSGGSHTEATTLAGGRDSTESEFRTATIGVVPATTVAPGSSKTEATTFLGVSGTTSVGRATGATTSIAGSDTSQAEHPGGTSGEFPGTTITSGDSHTEATALTGSRGSIGTESTVETTTYIGESGTTRGGLATATTGAFSGKTLEPGNDNTEATGSTGGIRATRTEAPGGTSGEFPGTTFTSGGSHTEATTFTGGKGSTGTESRAATTRAAPGTTLVPGSSNTGATASPGGSATTRGRITTATTGAFSGKTLESENDNTEATSSTRGVRTTRSEAPGGTSGEFPGTRITSGGSYTATTRAAPGTTLAPGSSNTGATASLGGSAMTRGRITTATTGAFSGKTLEPGNNNTEATSSTRGVRTTRSEAPGEATTLTGDRSSTGSESRTATTGVAPGTTVAPGSSKTEATTFLGVSGTTNIGRATGATTSIVGSDTSQAERPGGTTVVSPGASSTSQSSRPGTSVTPDSSASESETVTTKEFSGTTAISRTSHTGTPAASGGQATGSLTATTGVAPGTTVAPGSSNTEATTSVGERETTKAEIITGDTGELSGTTIISENSTTAGITAATGKQAGTSEVAPSTTVAPGSFSTAATTSPGASGTTGVTTTTKTTTSLGGSGTTGAEIKSATTGAPGSRTGTAGVPSATTVSPGSSNSEATTSVGESGKTGAETITEATTSTEGTGTSGTGFKTGTSEVAPATTVAPGSFSTAATTSPGASGMTGVTTTTKTTTSLGGSGTTGAKIKLVGTTTTAPESRTAGVPSGTRVTPGSSNSEATTSVEESRITRAEVITEATTFSGGSGATRAGLPRGTTGEFSGTNFISGSSNTEATTSTEGTGTSGTGFKIAGITSAPGKQAGTSGVSLATTVAPGSFSTATTSSGASGITRAGPTSETTTSLGGSGTTGAEIKSAAVPSGTTVAPGSSNSEATTSVGENGKTRGEIITDTTEGTSGKVLEPGSAHTEATTFPGGSGTTRAGPPGGTTGELSRMTIIPGSSNTEATTSTKGTGTSGTGFKTGTSWVAPGTTVSPGSFSTATISPGASRTTGAAPAAETTTSLEGGGTTGAEIKSGATSGVPGSKTGTAGVPSATTIAPGSSNSEATTSLGESGKTRVETITGTTEGKTLAAGSAHTEATTFSGGSGSTRAGPLGGASGTSGGYVPGRETEPTTSIEETGTSRTIFKTVGITSAPGRQAGTSVVAPSTTVAPGSFSTAATTSPGASGMTGVRTTSKTTTSLGGTGTTRTEIKSGATTGAPGIKTDIMGESSRTTILSGSSNTEATNSIEETGTSGTGFKTAGITAAPGKQAGTSGVAPGTTVAPGSFSTAATTSPGASGVTGTGPTAETTTFLGGSSTTGAEIKSGATTGAPGSKTGTAKVLSGTTVASGSSNSEATTFSGITEAVTVPSKNGSMTTALGSQLSSSQTVIPGSSGTISHTTVAPGSSVTGTTTGASDDQVTGSKTGTTGVALSTTVAPGSSSTEATTSTGVHRTTVVGQKTGATTRGSAKQGTRSTIEATTSFRGTGTTGSGMNTGTTGVVSGNTISPSSFNTEATSGTSERPNPGSEIGTTGIVSGTTVAPGSSNTEATTSLGNGGTTEAGSKIVTTGITTGTTIVPGSFNTKATTSTDVGVATGVGMATGITNIISGRSQPTGSKTGYTVTGSGTTALPGGFRTDSPSFPLFLICSYRGHNF

SEQ ID NO: 27482 - protein, 747 aa, Homo sapiens
MLGKGVVGGGGGTKAPKPSFVSYVRPEEIHTNEKEVTEKEVTLHLLPGEQLLCEASTVLKYVQEDSCQHGVYGRLVCTDFKIAFLGDDESALDNDETQFKNKVIGENDITLHCVDQIYGVFDEKKKTLFGQLKKYPEKLIIHCKDLRVFQFCLRYTKEEEVKRIVSGIIHHTQAPKLLKRLFLFSYATAAQNNTVTDPKNHTVMFDTLKDWCWELERTKGNMKYKAVSVNEGYKVCERLPAYFVVPTPLPEENVQRFQGHGIPIWCWSCHNGSALLKMSALPKEQDDGILQIQKSFLDGIYKTIHRPPYEIVKTEDLSSNFLSLQEIQTAYSKFKQLFLIDNSTEFWDTDIKWFSLLESSSWLDIIRRCLKKAIEITECMEAQNMNVLLLEENASDLCCLISSLVQLMMDPHCRTRIGFQSLIQKEWVMGGHCFLDRCNHLRQNDKEEVPVFLLFLDCVWQLVHQHPPAFEFTETYLTVLSDSLYIPIFSTFFFNSPHQKDTNMGREGQDTQSKPLNLLTVWDWSVQFEPKAQTLLKNPLYVEKPKLDKGQRKGMRFKHQRQLSLPLTQSKSSPKRGFFREETDHLIKNLLGKRISKLINSSDELQDNFREFYDSWHSKSTDYHGLLLPHIEGPEIKVWAQRYLRWIPEAQILGGGQVATLSKLLEMMEEVQSLQEKIDERHHSQQAPQAEAPCLLRNSARLSSLFPFALLQRHSSKPVLPTSGWKALGDEDDLAKREDEFVDLGDV

SEQ ID NO: 27483 - protein, 693 aa, Homo sapiens
MLGKGVVGGGGGTKAPKPSFVSYVRPEEIHTNEKEVTEKEVTLHLLPGEQLLCEASTVLKYVQEDSCQHGVYGRLVCTDFKIAFLGDDESALDNDETQFKNKVIGENDITLHCVDQIYGVFDEKKKTLFGQLKKYPEKLIIHCKDLRVFQFCLRYTKEEEVKRIVSGIIHHTQAPKLLKRLFLFSYATAAQNNTVTDPKNHTVMFDTLKDWCWELERTKGNMKYKAVSVNEGYKVCERLPAYFVVPTPLPEENVQRFQGHGIPIWCWSCHNGSALLKMSALPKEQDDGILQIQKSFLDGIYKTIHRPPYEIVKTEDLSSNFLSLQEIQTAYSKFKQLFLIDNSTEFWDTDIKWFSLLESSSWLDIIRRCLKKAIEITECMEAQNMNVLLLEENASDLCCLISSLVQLMMDPHCRTRIGFQSLIQKEWVMGGHCFLDRCNHLRQNDKEEVPVFLLFLDCVWQLVHQHPPAFEFTETYLTVLSDSLYIPIFSTFFFNSPHQKDTNMHQRQLSLPLTQSKSSPKRGFFREETDHLIKNLLGKRISKLINSSDELQDNFREFYDSWHSKSTDYHGLLLPHIEGPEIKVWAQRYLRWIPEAQILGGGQVATLSKLLEMMEEVQSLQEKIDERHHSQQAPQAEAPCLLRNSARLSSLFPFALLQRHSSKPVLPTSGWKALGDEDDLAKREDEFVDLGDV

SEQ ID NO: 27484 - protein, 637 aa, Homo sapiens
MLGKGVVGGGGGTKAPKPSFVSYVRPEEIHTNEKEVTEKEVTLHLLPGEQLLCEASTVLKYVQEDSCQHGVYGRLVCTDFKIAFLGDDESALDNDETQFKNKVIGENDITLHCVDQIYGVFDEKKKTLFGQLKKYPEKLIIHCKDLRVFQFCLRYTKEEEVKRIVSGIIHHTQAPKLLKRLFLFSYATAAQNNTVTDPKNHTVMFDTLKDWCWELERTKGNMKYKAVSVNEGYKVCERLPAYFVVPTPLPEENVQRFQGHGIPIWCWSCHNGSALLKMSALPKEQDDGILQIQKSFLDGIYKTIHRPPYEIVKTEDLSSNFLSLQEIQTAYSKFKQLFLIDNSTEFWDTDIKWFSLLESSSWLDIIRRCLKKAIEITECMEAQNMNVLLLEENASDLCCLISSLVQLMMDPHCRTRIGFQSLIQKEWVMGGHCFLDRCNHLRQNDKEEHQRQLSLPLTQSKSSPKRGFFREETDHLIKNLLGKRISKLINSSDELQDNFREFYDSWHSKSTDYHGLLLPHIEGPEIKVWAQRYLRWIPEAQILGGGQVATLSKLLEMMEEVQSLQEKIDERHHSQQAPQAEAPCLLRNSARLSSLFPFALLQRHSSKPVLPTSGWKALGDEDDLAKREDEFVDLGDV

SEQ ID NO: 27485 - protein, 549 aa, Homo sapiens
MEFAELIKTPRVDNVVLHRPFYPAVEGTLCLTGHHLILSSRQDNTEELWLLHSNIDAIDKRFVGSLGTIIIKCKDFRIIQLDIPGMEECLNIASSIEALSTLDSITLMYPFFYRPMFEVIEDGWHSFLPEQEFELYSSATSEWRLSYVNKEFAVCPSYPPIVTVPKSIDDEALRKVATFRHGGRFPVLSYYHKKNGMVIMRSGQPLTGTNGRRCKEDEKLINATLRAGKRGYIIDTRSLNVAQQTRAKGGGFEQEAHYPQWRRIHKSIERYHILQESLIKLVEACNDQTHNMDRWLSKLEASNWLTHIKEILTTACLAAQCIDREGASILIHGTEGTDSTLQVTSLAQIILEPRSRTIRGFEALIEREWLQAGHPFQQRCAQSAYCNTKQKWEAPVFLLFLDCVWQILRQFPCSFEFNENFLIMLFEHAYASQFGTFLGNNESERCKLKLQQKTMSLWSWVNQPSELSKFTNPLFEANNLVIWPSVAPQSLPLWEGIFLRWNRSSKYLDEAYEEMVNIIEYNKELQAKVNILRRQLAELETEDGMQESP

SEQ ID NO: 27486 - protein, 464 aa, Homo sapiens
MEECLNIASSIEALSTLDSITLMYPFFYRPMFEVIEDGWHSFLPEQEFELYSSATSEWRLSYVNKEFAVCPSYPPIVTVPKSIDDEALRKVATFRHGGRFPVLSYYHKKNGMVIMRSGQPLTGTNGRRCKEDEKLINATLRAGKRGYIIDTRSLNVAQQTRAKGGGFEQEAHYPQWRRIHKSIERYHILQESLIKLVEACNDQTHNMDRWLSKLEASNWLTHIKEILTTACLAAQCIDREGASILIHGTEGTDSTLQVTSLAQIILEPRSRTIRGFEALIEREWLQAGHPFQQRCAQSAYCNTKQKWEAPVFLLFLDCVWQILRQFPCSFEFNENFLIMLFEHAYASQFGTFLGNNESERCKLKLQQKTMSLWSWVNQPSELSKFTNPLFEANNLVIWPSVAPQSLPLWEGIFLRWNRSSKYLDEAYEEMVNIIEYNKELQAKVNILRRQLAELETEDGMQESP

SEQ ID NO: 27487 - protein, 275 aa, Homo sapiens
MQNNEIIKPAKYFSELEKSILLALVEKYKYVLECKKSDARTIALKQRTWQALAHEYNSQPSVSLRDFKQLKKCWENIKARTKKIMAHERREKVKRSVSPLLSTHVLGKEKIASMLPEQLYFLQSPPEEEPEYHPDASAQESFAVSNRELCDDEKEFIHFPVCEGTSQPEPSCSAVRITANKNYRSKTSQEGALKKMHEEEHHQQMSILQLQLIQMNEVHVAKIQQIERECEMAEEEHRIKMEVLNKKKMYWERKLQTFTKEWPVSSFNRPFPNSP

SEQ ID NO: 27488 - protein, 159 aa, Homo sapiens
MQNNEIIKPAKYFSELEKSILLALVEKYKYVLECKKSDARTIALKQRTWQALAHEYNSQPSVSLRDFKQLKKCWENIKARTKKIMAHERREKVKRSVSPLLSTHVLGKEKIASMLPEQLYFLQSPPEEEPEYHPDASAQVFFQERKRSLELSIILSGTW

SEQ ID NO: 27489 - protein, 704 aa, Homo sapiens
MDHITVPKVENVKLVDRYVSKKPANGILYLTATHLIYVEASGAARKETWIALHHIATVEKLPITSLGCPLTLRCKNFRVAHFVLDSDLVCHEVYISLLKLSQPALPEDLYAFSYNPKSSKEMRESGWKLIDPISDFGRMGIPNRNWTITDANRNYEICSTYPPEIVVPKSVTLGTVVGSSKFRSKERVPVLSYLYKENNAAICRCSQPLSGFYTRCVDDELLLEAISQTNPGSQFMYVVDTRPKLNAMANRAAGKGYENEDNYANIRFRFMGIENIHVMRSSLQKLLEVCELKTPTMSEFLSGLESSGWLRHIKAIMDAGIFITKAVKVEKASVLVHCSDGWDRTAQVCSVASILLDPFYRTFKGLMILIEKEWISMGHKFSQRCGHLDGDSKEVSPIFTQFLDCIWQLMEQFPCAFEFNENFLLEIHDHVFSCQFGNFLGNCQKDREDLRVYEKTHSVWPFLVQRKPDFRNPLYKGFTMYGVLNPSTVPYNIQFWCGMYNRFDKGLQPKQSMLESLLEIKKQRAMLETDVHELEKKLKVRDEPPEEICTCSQLGNILSQHLGSPLTNPLGFMGINGDLNTLMENGTLSREGGLRAQMDQVKSQGADLHHNCCEIVGSLRAINISGDVGISEAMGISGDMCTFEATGFSKDLGICGAMDISEATGISGNLGISEARGFSGDMGILGDTGISKASTKEADYSKHQ

SEQ ID NO: 27490 - protein, 591 aa, Homo sapiens
MDHITVPKVENVKLVDRYVSKKPANGILYLTATHLIYVEASGAARKETWIALHHIATVEKLPITSLGCPLTLRCKNFRVAHFVLDSDLVCHEVYISLLKLSQPALPEDLYAFSYNPKSSKEMRESGWKLIDPISDFGRMGIPNRNWTITDANIRFRFMGIENIHVMRSSLQKLLEVCELKTPTMSEFLSGLESSGWLRHIKAIMDAGIFITKAVKVEKASVLVHCSDGWDRTAQVCSVASILLDPFYRTFKGLMILIEKEWISMGHKFSQRCGHLDGDSKEVSPIFTQFLDCIWQLMEQFPCAFEFNENFLLEIHDHVFSCQFGNFLGNCQKDREDLRVYEKTHSVWPFLVQRKPDFRNPLYKGFTMYGVLNPSTVPYNIQFWCGMYNRFDKGLQPKQSMLESLLEIKKQRAMLETDVHELEKKLKVRDEPPEEICTCSQLGNILSQHLGSPLTNPLGFMGINGDLNTLMENGTLSREGGLRAQMDQVKSQGADLHHNCCEIVGSLRAINISGDVGISEAMGISGDMCTFEATGFSKDLGICGAMDISEATGISGNLGISEARGFSGDMGILGDTGISKASTKEADYSKHQ

SEQ ID NO: 27491 - protein, 345 aa, Homo sapiens
MKQLKRKRKSNFSVQETQTLLKEITKRKEVIFSKQLNTTINVMKRMAWEEIAQCVNAVGEGEQRTGTEVKRRYLDWRALMKRKRMKANIKLVGSGFPLPSSDLDDSLTEEIDEKIGFRNDANFDWQNVADFRDAGGSLTEVKVEEEERDPQSPEFEIEEEEEMLSSVIPDSRRENELPDFPHIDEFFTLNSTPSRSAYDEPHLLVNIEKQKLELEKRRLDIEAERLQVEKERLQIEKERLRHLDMEHERLQLEKERLQIEREKLRLQIVNSEKPSLENELGQGEKSMLQPQDIETEKLKLERERLQLEKDRLQFLKFESEKLQIEKERLQVEKDRLRIQKEGHLQ

SEQ ID NO: 27492 - protein, 617 aa, Homo sapiens
MGPTLAVPTPYGCIGCKLPQPEYPPALIIFMFCAMVITIVVDLIGNSMVILAVTKNKKLRNSGNIFVVSLSVADMLVAIYPYPLMLHAMSIGGWDLSQLQCQMVGFITGLSVVGSIFNIVAIAINRYCYICHSLQYERIFSVRNTCIYLVITWIMTVLAVLPNMYIGTIEYDPRTYTCIFNYLNNPVFTVTIVCIHFVLPLLIVGFCYVRIWTKVLAARDPAGQNPDNQLAEVRNFLTMFVIFLLFAVCWCPINVLTVLVAVSPKEMAGKIPNWLYLAAYFIAYFNSCLNAVIYGLLNENFRREYWTIFHAMRHPIIFFSGLISDIREMQEARTLARARAHARDQAREQDRAHACPAVEETPMNVRNVPLPGDAAAGHPDRASGHPKPHSRSSSAYRKSASTHHKSVFSHSKAASGHLKPVSGHSKPASGHPKSATVYPKPASVHFKADSVHFKGDSVHFKPDSVHFKPASSNPKPITGHHVSAGSHSKSAFSAATSHPKPTTGHIKPATSHAEPTTADYPKPATTSHPKPTAADNPELSASHCPEIPAIAHPVSDDSDLPESASSPAAGPTKPAASQLESDTIADLPDPTVVTTSTNDYHDVVVIDVEDDPDEMAV

SEQ ID NO: 27493 - protein, 108 aa, Homo sapiens
MAQKSLANNSINLPYKDLTSEVTRRRVTMITRKEIITQKSDEAKEMLSHLDLEQAPPPHRTYLTVPPAPPPSPAEDPTPDGLSFKIREAGTSVSSDFSSWKAKVSKFH

SEQ ID NO: 27494 - protein, 176 aa, Homo sapiens
MASSSGNDDDLTIPRAAINKMIKETLPNVRVANDARELVVNCCTEFIHLISSEANEICNKSEKKTISPEHVIQALESLGFGSYISEVKEVLQECKTVALKRRKASSRLENLGIPEEELLRQQQELFAKARQQQAELAQQEWLQMQQAAQQAQLAAASASASNQAGSSQDEEDDDDI

SEQ ID NO: 27495 - protein, 570 aa, Homo sapiens
MAGGAREVLTLQLGHFAGFVGAHWWNQQDAALGRATDSKEPPGELCPDVLYRTGRTLHGQETYTPRLILMDLKGSLSSLKEEGGLYRDKQLDAAIAWQGKLTTHKEELYPKNPYLQDFLSAEGVLSSDGVWRVKSIPNGKGSSPLPTATTPKPLIPTEASIRVWSDFLRVHLHPRSICMIQKYNHDGEAGRLEAFGQGESVLKEPKYQEELEDRLHFYVEECDYLQGFQILCDLHDGFSGVGAKAAELLQDEYSGRGIITWGLLPGPYHRGEAQRNIYRLLNTAFGLVHLTAHSSLVCPLSLGGSLGLRPEPPVSFPYLHYDATLPFHCSAILATALDTVTVPYRLCSSPVSMVHLADMLSFCGKKVVTAGAIIPFPLAPGQSLPDSLMQFGGATPWTPLSACGEPSGTRCFAQSVVLRGIDRACHTSQLTPGTPPPSALHACTTGEEILAQYLQQQQPGVMSSSHLLLTPCRVAPPYPHLFSSCSPPGMVLDGSPKGAAVESIPVFGALCSSSSLHQTLEALARDLTKLDLRRWASFMDAGVEHDDVAELLQELQSLAQCYQGGDSLVD

SEQ ID NO: 27496 - protein, 569 aa, Homo sapiens
MAGGAREVLTLQLGHFAGFVGAHWWNQQDAALGRATDSKEPPGELCPDVLYRTGRTLHGQETYTPRLILMDLKGSLSSLKEEGGLYRDKQLDAAIAWQGKLTTHKEELYPKNPYLQDFLSAEGVLSSDGVWRVKSIPNGKGSSPLPTATTPKPLIPTEASIRVWSDFLRVHLHPRSICMIQKYNHDGEAGRLEAFGQGESVLKEPKYQEELEDRLHFYVEECDYLQGFQILCDLHDGFSGVGAKAAELLQDEYSGRGIITWGLLPGPYHRGEAQRNIYRLLNTAFGLVHLTAHSSLVCPLSLGGSLGLRPEPPVSFPYLHYDATLPFHCSAILATALDTVTVPYRLCSSPVSMVHLADMLSFCGKKVVTAGAIIPFPLAPGQSLPDSLMQFGGATPWTPLSACGEPSGTRCFAQSVVLRGIDRACHTSQLTPGTPPPSALHACTTGEEILAQYLQQQQPGVMSSSHLLLTPCRVAPPYPHLFSSCSPPGMVLDGSPKGAVESIPVFGALCSSSSLHQTLEALARDLTKLDLRRWASFMDAGVEHDDVAELLQELQSLAQCYQGGDSLVD

SEQ ID NO: 27497 - protein, 558 aa, Homo sapiens
MAGGAREVLTLQLGHFAGFVGAHWWNQQDAALGRATDSKEPPGELCPDVLYRTGRTLHGQETYTPRLILMDLKGSLSSLKEEGGLYRDKQLDAAIAWQGKLTTHKEELYPKNPYLQDFLSAEGVLSSDGVWRVKSIPNGKGSSPLPTATTPKPLIPTEASIRVWSDFLRVHLHPRSICMIQKYNHDGEAGRLEAFGQGESVLKEPKYQEELEDRLHFYVEECDYLQGFQILCDLHDGFSGVGAKAAELLQDEYSGRGIITWGLLPGPYHRGEAQRNIYRLLNTAFGLVHLTAHSSLVCPLSLGGSLGLRPEPPVSFPYLHYDATLPFHCSAILATALDTVTVPYRLCSSPVSMVHLADMLSFCGKKVVTAGAIIPFPLAPGQSLPDSLMQFGGATPWTPLSACGEPSGTRCFAQSVVLRGIDRACHTSQLTPGTPPPSALHACTTGEEILAQYLQQQQPGVMSSSHLLLTPCRVAPPYPHLFSSCSPPVESIPVFGALCSSSSLHQTLEALARDLTKLDLRRWASFMDAGVEHDDVAELLQELQSLAQCYQGGDSLVD

SEQ ID NO: 27498 - protein, 99 aa, Homo sapiens
MAGGAREVLTLQLGHFAGFVGAHWWNQQDAALGRATDSKEPPGELCPDVLYRTGRTLHGQETYTPRLILMDLKGSLSSLKEEGGLYRDKQLDAAIAWEC

SEQ ID NO: 27499 - protein, 391 aa, Homo sapiens
MIQKYNHDGEAGRLEAFGQGESVLKEPKYQEELEDRLHFYVEECDYLQGFQILCDLHDGFSGVGAKAAELLQDEYSGRGIITWGLLPGPYHRGEAQRNIYRLLNTAFGLVHLTAHSSLVCPLSLGGSLGLRPEPPVSFPYLHYDATLPFHCSAILATALDTVTVPYRLCSSPVSMVHLADMLSFCGKKVVTAGAIIPFPLAPGQSLPDSLMQFGGATPWTPLSACGEPSGTRCFAQSVVLRGIDRACHTSQLTPGTPPPSALHACTTGEEILAQYLQQQQPGVMSSSHLLLTPCRVAPPYPHLFSSCSPPGMVLDGSPKGAVESIPVFGALCSSSSLHQTLEALARDLTKLDLRRWASFMDAGVEHDDVAELLQELQSLAQCYQGGDSLVD

SEQ ID NO: 27500 - protein, 182 aa, Homo sapiens
MQFGGATPWTPLSACGEPSGTRCFAQSVVLRGIDRACHTSQLTPGTPPPSALHACTTGEEILAQYLQQQQPGVMSSSHLLLTPCRVAPPYPHLFSSCSPPGMVLDGSPKGAAVESIPVFGALCSSSSLHQTLEALARDLTKLDLRRWASFMDAGVEHDDVAELLQELQSLAQCYQGGDSLVD

SEQ ID NO: 27501 - protein, 524 aa, Homo sapiens
MAGGAREVLTLQLGHFAGFVGAHWWNQQDAALGRATDSKEPPGELCPDVLYRTGRTLHGQETYTPRLILMDLKGSLSSLKEEGGLYRDKQLDAAIAWQGKLTTHKGSSPLPTATTPKPLIPTEASIRVWSDFLRVHLHPRSICMIQKYNHDGEAGRLEAFGQGESVLKEPKYQEELEDRLHFYVEECDYLQGFQILCDLHDGFSGVGAKAAELLQDEYSGRGIITWGLLPGPYHRGEAQRNIYRLLNTAFGLVHLTAHSSLVCPLSLGGSLGLRPEPPVSFPYLHYDATLPFHCSAILATALDTVTVPYRLCSSPVSMVHLADMLSFCGKKVVTAGAIIPFPLAPGQSLPDSLMQFGGATPWTPLSACGEPSGTRCFAQSVVLRGIDRACHTSQLTPGTPPPSALHACTTGEEILAQYLQQQQPGVMSSSHLLLTPCRVAPPYPHLFSSCSPPAVESIPVFGALCSSSSLHQTLEALARDLTKLDLRRWASFMDAGVEHDDVAELLQELQSLAQCYQGGDSLVD

SEQ ID NO: 27502 - protein, 494 aa, Homo sapiens
MEVVEAAAAQLETLKFNGTDFGVGEGPAAPSPGSAPVPGTQPPLQSFEGSPDAGQTVEVKPAGEQPLQPVLNAVAAGTPAPQPQPPAESPACGDCVTSPGAAEPARAPDSLETSDSDSDSDSETDSDSSSSSSSSSSSSSSSSSSCISLPPVLSDGDDDLQIEKENKNFPLKTKDELLLNELPSVEELTIILPEDIELKPLGMVSSIIEQLVIIESMTNLPPVNEETVIFKSDRQAAGKIFEIFGPVAHPFYVLRFNSSDHIESKGIKIKETMYFAPSMKDFTQYIFTEKLKQDKGSDASWKNDQEPPPEALDFSDDEKEKEAKQRKKSQIQGRKKLKSEFNEPGEDFTEVHQNWNAHSSASEHAKGYRNREFTRGFSRARYPRSCHGRPPPQHFYNSEHMVSQETSGFPSQRQNNPIMPQYPFPLPVFDMHNFPLRPPPPPPPPPVNMGWATPNMAAHPLLNLPYSLPPPPPPPPLPPPPSSGDSNSHFGPYY

SEQ ID NO: 27503 - protein, 389 aa, Homo sapiens
MEVVEAAAAQLETLKFNGTDFGVGEGPAAPSPGSAPVPGTQPPLQSFEGSPDAGQTVEVKPAGEQPLQPVLNAVAAGTPAPQPQPPAESPACGDCVTSPGAAEPARAPDSLETSDSDSDSDSETDSDSSSSSSSSSSSSSSSSSSCISLPPVLSDGDDDLQIEKENKNFPLKTKDELLLNELPSVEELTIILPEDIELKPLGMVSSIIEQLVIIESMTNLPPVNEETVIFKSDRQAAGKIFEIFGPVAHPFYVLRFNSSDHIESKGIKIKETMYFAPSMKDFTQYIFTEKLKQDKGSDASWKNDQEPPPEALDFSDDEKEKEAKQRKKSQIQGRKKLKSEFNEPGTGISHRYCGLGSRPLQSSESHKLFGFQMHIKVTFTCYFSLLSMQ

SEQ ID NO: 27504 - protein, 243 aa, Homo sapiens
MEDSFLQSFGRLSLQPQQQQQRQRPPRPPPRGTPPRRHSFRKHLYLLRGLPGSGKTTLARQLQHDFPRALIFSTDDFFFREDGAYEFNPDFLEEAHEWNQKRARKAMRNGISPIIIDNTNLHAWEMKPYAVMALENNYEVIFREPDTRWKFNVQELARRNIHGVSREKIHRMKERYEHDVTFHSVLHAEKPSRMNRNQDRNNALPSNNARYWNSYTEFPNRRAHGGFTNESSYHRRGGCHHGY

SEQ ID NO: 27505 - protein, 173 aa, Homo sapiens
MEDSFLQSFGRLSLQPQQQQQRQRPPRPPPRGTPPRRHSFRKHLYLLRGLPGSGKTTLARQLQHDFPRALIFSTDDFFFREDGAYEFNPDFLEEAHEWNQKRARKAMRNGISPIIIDNTNLHAWEMKPYAVMVFQTEQKNLFRLEMDMVVFRPEMKKHSWCLKRKNPPNERTV

SEQ ID NO: 27506 - protein, 866 aa, Homo sapiens
MPAVSLPPKENALFKRILRCYEHKQYRNGLKFCKQILSNPKFAEHGETLAMKGLTLNCLGKKEEAYELVRRGLRNDLKSHVCWHVYGLLQRSDKKYDEAIKCYRNALKWDKDNLQILRDLSLLQIQMRDLEGYRETRYQLLQLRPAQRASWIGYAIAYHLLEDYEMAAKILEEFRKTQQTSPDKVDYEYSELLLYQNQVLREAGLYREALEHLCTYEKQICDKLAVEETKGELLLQLCRLEDAADVYRGLQERNPENWAYYKGLEKALKPANMLERLKIYEEAWTKYPRGLVPRRLPLNFLSGEKFKECLDKFLRMNFSKGCPPVFNTLRSLYKDKEKVAIIEELVVGYETSLKSCRLFNPNDDGKEEPPTTLLWVQYYLAQHYDKIGQPSIALEYINTAIESTPTLIELFLVKAKIYKHAGNIKEAARWMDEAQALDTADRFINSKCAKYMLKANLIKEAEEMCSKFTREGTSAVENLNEMQCMWFQTECAQAYKAMNKFGEALKKCHEIERHFIEITDDQFDFHTYCMRKITLRSYVDLLKLEDVLRQHPFYFKAARIAIEIYLKLHDNPLTDENKEHEADTANMSDKELKKLRNKQRRAQKKAQIEEEKKNAEKEKQQRNQKKKKDDDDEEIGGPKEELIPEKLAKVETPLEEAIKFLTPLKNLVKNKIETHLFAFEIYFRKEKFLLMLQSVKRAFAIDSSHPWLHECMIRLFNTAVCESKDLSDTVRTVLKQEMNRLFGATNPKNFNETFLKRNSDSLPHRLSAAKMVYYLDPSSQKRAIELATTLDESLTNRNLQTCMEVLEALYDGSLGDCKEAAEIYRANCHKLFPYALAFMPPGYEEDMKITVNGDSSAEAEELANEI

SEQ ID NO: 27507 - protein, 526 aa, Homo sapiens
MPAVSLPPKENALFKRILRCYEHKQYRNGLKFCKQILSNPKFAEHGETLAMKGLTLNCLGKKEEAYELVRRGLRNDLKSHVCWHVYGLLQRSDKKYDEAIKCYRNALKWDKDNLQILRDLSLLQIQMRDLEGYRETRYQLLQLRPAQRASWIGYAIAYHLLEDYEMAAKILEEFRKTQQTSPDKVDYEYSELLLYQNQVLREAGLYREALEHLCTYEKQICDKLAVEETKGELLLQLCRLEDAADVYRGLQERNPENWAYYKGLEKALKPANMLERLKIYEEAWTKYPRGLVPRRLPLNFLSGEKFKECLDKFLRMNFSKGCPPVFNTLRSLYKDKEKVAIIEELVVGYETSLKSCRLFNPNDDGKEEPPTTLLWVQYYLAQHYDKIGQPSIALEYINTAIESTPTLIELFLVKAKIYKHAGNIKEAARWMDEAQALDTADRFINSKCAKYMLKANLIKEAEEMCSKFTREGTSAVENLNEMQCMWFQTECAQAYKAMNKFGEALKKCHEIERKSLMTSLTFIHTV

SEQ ID NO: 27508 - protein, 313 aa, Homo sapiens
MALRICVTYTPALPIGLCTRCCLCLEQSPSWCHCLRGVSFLTFHLHQSVPLGDRDSLLMFTRQAGHFVEGSKAGRSRGRLCLSQALRVAVRGAFVSLWFAAGAGDRERNKGDKGAQTGAGLSQEAEDVDVSRARRVTDAPQGTLCGTGNRNSGSQSARVVGVAHLGEAFRVGVEQAISSCPEEVHGRHGLSMEIMWARMDVALRSPGRGLLAGAGALCMTLAESSCPDYERGRRACLTLHRHPTPHCSTWGLPLRVAGSWLTVVTVEALGGWRMGVRRTGQVGPTMHPPPVSGASPLLLHHLLLLLLIIILTC

SEQ ID NO: 27509 - protein, 1097 aa, Homo sapiens
MGLKVIQQNVHKFLQLRFWGWWKLYNKVKPLLNVARQEEEMKAKEEELRKAMAQTQELVNKVKELEEKTATLSQEKNDLTIQLQAEQENLMDAEERLTWMMKTKMDLESQISDMRERLEEEEGMAASLSAAKRKLEGELSDLKRDLEGLETTLAKTEKEKQALDHKVRTLTGDLSLREDSITKLQKEKRALEELHQKTLDDLQAEEDKVNHLTKNNSKLSTQIHELEDNWEQEKKIRAEVEKARRKAESDLKMTIDNLNEMERSKLDLEEVVKKRDLEINSVNSKYEDEQSLNSTLQRKLKEHQDRIEELEEELEAERAMRAKIEQNRKREAELLKLRRELEEAALQSEATASTLRKKHVDSMAELTEHVESLQRVKSKLEKDKQVMKAEIDDLNASMETIQKSKMNAEAHVRKLEDSLSEANAKVAELERNQAEINAIRTRLQAENSELSREYEESQSRLNQILRIKTSLTSQVDDYKRQLDEESKSRSTAVVSLANTKHDLDLVKEQLEEEQGGKSELQRLVSKLNTEVTTWRTKYETDAIQRTEELEETKRKLAARLQEAEEAAETAQARAASLEKNKQRLQAEVEDLTIDLEKANAAAAALDKKQRLFDKMLAEWQQKCEELQVEVDSSQKECRMYMTESFKIKTAYEESLEHLESVKKENKTLQEEIKDLIDQLGEGGRSVHELQKLKKKLEMEKEELQVALEEAESSLEVEESKVIRIQLELAQVKADIDRRIHEKEEEFEATRKNHQRAIESLQASLEAEAKGRAEALRLKKKMETDLNEMEIQLDHANKNNSELVKTLKRLQQQIKDLQVQMDEDARQHEELRKQYNLQERRLSLLQTELEEVRSALEGSERSRKLLEQEVVEITEWHNEINIQNQSLLVVKRKLESDVQRISNEHEELISEFRLTEERAKKAMMDAARMAEELRQEQDHCMHLEKIKKNYEVTIKDLQAKMEEAEQLALKGGKRTIMKLEARIKELETELDGEQKQHVETVKTLCKNERRLKELVFQTEEDHKTNQRMQALVEKLQNKLKVYKRQIEEAEDQANQTLARYRKTVHELDDAEDRAGMAETALNKLRTRHRVAGKGITSV

SEQ ID NO: 27510 - protein, 439 aa, Homo sapiens
MPLNVSFTNRNYDLDYDSVQPYFYCDEEENFYQQQQQSELQPPAPSEDIWKKFELLPTPPLSPSRRSGLCSPSYVAVTPFSLRGDNDGGGGSFSTADQLEMVTELLGGDMVNQSFICDPDDETFIKNIIIQDCMWSGFSAAAKLVSEKLASYQAARKDSGSPNPARGHSVCSTSSLYLQDLSAAASECIDPSVVFPYPLNDSSSPKSCASQDSSAFSPSSDSLLSSTESSPQGSPEPLVLHEETPPTTSSDSEEEQEDEEEIDVVSVEKRQAPGKRSESGSPSAGGHSKPPHSPLVLKRCHVSTHQHNYAAPPSTRKDYPAAKRVKLDSVRVLRQISNNRKCTSPRSSDTEENVKRRTHNVLERQRRNELKRSFFALRDQIPELENNEKAPKVVILKKATAYILSVQAEEQKLISEEDLLRKRREQLKHKLEQLRNSCA

SEQ ID NO: 27511 - protein, 454 aa, Homo sapiens
MDFFRVVENQQPPATMPLNVSFTNRNYDLDYDSVQPYFYCDEEENFYQQQQQSELQPPAPSEDIWKKFELLPTPPLSPSRRSGLCSPSYVAVTPFSLRGDNDGGGGSFSTADQLEMVTELLGGDMVNQSFICDPDDETFIKNIIIQDCMWSGFSAAAKLVSEKLASYQAARKDSGSPNPARGHSVCSTSSLYLQDLSAAASECIDPSVVFPYPLNDSSSPKSCASQDSSAFSPSSDSLLSSTESSPQGSPEPLVLHEETPPTTSSDSEEEQEDEEEIDVVSVEKRQAPGKRSESGSPSAGGHSKPPHSPLVLKRCHVSTHQHNYAAPPSTRKDYPAAKRVKLDSVRVLRQISNNRKCTSPRSSDTEENVKRRTHNVLERQRRNELKRSFFALRDQIPELENNEKAPKVVILKKATAYILSVQAEEQKLISEEDLLRKRREQLKHKLEQLRNSCA

SEQ ID NO: 27512 - protein, 376 aa, Homo sapiens
MGHRFLRGLLTLLLPPPPLYTRHRMLGPESVPPPKRSRSKLMAPPRIGTHNGTFHCDEALACALLRLLPEYRDAEIVRTRDPEKLASCDIVVDVGGEYDPRRHRYDHHQRSFTETMSSLSPGKPWQTKLSSAGLIYLHFGHKLLAQLLGTSEEDSMVGTLYDKMYENFVEEVDAVDNGISQWAEGEPRYALTTTLSARVARLNPTWNHPDQDTEAGFKRAMDLVQEEFLQRLDFYQHSWLPARALVEEALAQRFQVDPSGEIVELAKGACPWKEHLYHLESGLSPPVAIFFVIYTDQAGQWRIQCVPKEPHSFQSRLPLPEPWRGLRDEALDQVSGIPGCIFVHASGFTGGHHTREGALSMARATLAQRSYLPQIS

SEQ ID NO: 27513 - protein, 227 aa, Homo sapiens
MAPCHIRKYQESDRQWVVGLLSRGMAEHAPATFRQLLKLPRTLILLLGGPLALLLVSGSWLLALVFSISLFPALWFLAKKPWTEYVDMTLCTDMSDITKSYLSERGSCFWVAESEEKVVGMVGALPVDDPTLREKRLQLFHLFVDSEHRRQGIAKALVRTVLQFARDQGYSEVILDTGTIQLSAMALYQSMGFKKTGQSFFCVWARLVALHTVHFIYHLPSSKVGSL

SEQ ID NO: 27514 - protein, 927 aa, Homo sapiens
MAWLRLQPLTSAFLHFGLVTFVLFLNGLRAEAGGSGDVPSTGQNNESCSGSSDCKEGVILPIWYPENPSLGDKIARVIVYFVALIYMFLGVSIIADRFMASIEVITSQEREVTIKKPNGETSTTTIRVWNETVSNLTLMALGSSAPEILLSLIEVCGHGFIAGDLGPSTIVGSAAFNMFIIIGICVYVIPDGETRKIKHLRVFFITAAWSIFAYIWLYMILAVFSPGVVQVWEGLLTLFFFPVCVLLAWVADKRLLFYKYMHKKYRTDKHRGIIIETEGDHPKGIEMDGKMMNSHFLDGNLVPLEGKEVDESRREMIRILKDLKQKHPEKDLDQLVEMANYYALSHQQKSRAFYRIQATRMMTGAGNILKKHAAEQAKKASSMSEVHTDEPEDFISKVFFDPCSYQCLENCGAVLLTVVRKGGDMSKTMYVDYKTEDGSANAGADYEFTEGTVVLKPGETQKEFSVGIIDDDIFEEDEHFFVRLSNVRIEEEQPEEGMPPAIFNSLPLPRAVLASPCVATVTILDDDHAGIFTFECDTIHVSESIGVMEVKVLRTSGARGTVIVPFRTVEGTAKGGGEDFEDTYGELEFKNDETVKTIRVKIVDEEEYERQENFFIALGEPKWMERGISALLLSPDVTDRKLTMEEEEAKRIAEMGKPVLGEHPKLEVIIEESYEFKTTVDKLIKKTNLALVVGTHSWRDQFMEAITVSAAGDEDEDESGEERLPSCFDYVMHFLTVFWKVLFACVPPTEYCHGWACFAVSILIIGMLTAIIGDLASHFGCTIGLKDSVTAVVFVAFGTSVPDTFASKAAALQDVYADASIGNVTGSNAVNVFLGIGLAWSVAAIYWALQGQEFHVSAGTLAFSVTLFTIFAFVCISVLLYRRRPHLGGELGGPRGCKLATTWLFVSLWLLYILFATLEAYCYIKGF

SEQ ID NO: 27515 - protein, 921 aa, Homo sapiens
MAWLRLQPLTSAFLHFGLVTFVLFLNGLRAEAGGSGDVPSTGQNNESCSGSSDCKEGVILPIWYPENPSLGDKIARVIVYFVALIYMFLGVSIIADRFMASIEVITSQEREVTIKKPNGETSTTTIRVWNETVSNLTLMALGSSAPEILLSLIEVCGHGFIAGDLGPSTIVGSAAFNMFIIIGICVYVIPDGETRKIKHLRVFFITAAWSIFAYIWLYMILAVFSPGVVQVWEGLLTLFFFPVCVLLAWVADKRLLFYKYMHKKYRTDKHRGIIIETEGDHPKGIEMDGKMMNSHFLDGNLVPLEGKEVDESRREMIRILKDLKQKHPEKDLDQLVEMANYYALSHQQKSRAFYRIQATRMMTGAGNILKKHAAEQAKKASSMSEVHTDEPEDFISKVFFDPCSYQCLENCGAVLLTVVRKGGDMSKTMYVDYKTEDGSANAGADYEFTEGTVVLKPGETQKEFSVGIIDDDIFEEDEHFFVRLSNVRIEEEQPEEGMPPAIFNSLPLPRAVLASPCVATVTILDDDHAGIFTFECDTIHVSESIGVMEVKVLRTSGARGTVIVPFRTVEGTAKGGGEDFEDTYGELEFKNDETVKTIRVKIVDEEEYERQENFFIALGEPKWMERGISDVTDRKLTMEEEEAKRIAEMGKPVLGEHPKLEVIIEESYEFKTTVDKLIKKTNLALVVGTHSWRDQFMEAITVSAAGDEDEDESGEERLPSCFDYVMHFLTVFWKVLFACVPPTEYCHGWACFAVSILIIGMLTAIIGDLASHFGCTIGLKDSVTAVVFVAFGTSVPDTFASKAAALQDVYADASIGNVTGSNAVNVFLGIGLAWSVAAIYWALQGQEFHVSAGTLAFSVTLFTIFAFVCISVLLYRRRPHLGGELGGPRGCKLATTWLFVSLWLLYILFATLEAYCYIKGF

SEQ ID NO: 27516 - protein, 620 aa, Homo sapiens
MAWLRLQPLTSAFLHFGLVTFVLFLNGLRAEAGGSGDVPSTGQNNESCSGSSDCKEGVILPIWYPENPSLGDKIARVIVYFVALIYMFLGVSIIADRFMASIEVITSQEREVTIKKPNGETSTTTIRVWNETVSNLTLMALGSSAPEILLSLIEVCGHGFIAGDLGPSTIVGSAAFNMFIIIGICVYVIPDGETRKIKHLRVFFITAAWSIFAYIWLYMILAVFSPGVVQVWEGLLTLFFFPVCVLLAWVADKRLLFYKYMHKKYRTDKHRGIIIETEGDHPKGIEMDGKMMNSHFLDGNLVPLEGKEVDESRREMIRILKDLKQKHPEKDLDQLVEMANYYALSHQQKSRAFYRIQATRMMTGAGNILKKHAAEQAKKASSMSEVHTDEPEDFISKVFFDPCSYQCLENCGAVLLTVVRKGGDMSKTMYVDYKTEDGSANAGADYEFTEGTVVLKPGETQKEFSVGIIDDDIFEEDEHFFVRLSNVRIEEEQPEEGMPPAIFNSLPLPRAVLASPCVATVTILDDDHAGIFTFECDTIHVSESIGVMEVKVLRTSGARGTVIVPFRTVEGTAKGGGEDFEDTYGELEFKNDETVCDRQEADYGRRGGQEDSRDGKASIG

SEQ ID NO: 27517 - protein, 284 aa, Homo sapiens
MEEEEAKRIAEMGKPVLGEHPKLEVIIEESYEFKTTVDKLIKKTNLALVVGTHSWRDQFMEAITVSAAGDEDEDESGEERLPSCFDYVMHFLTVFWKVLFACVPPTEYCHGWACFAVSILIIGMLTAIIGDLASHFGCTIGLKDSVTAVVFVAFGTSVPDTFASKAAALQDVYADASIGNVTGSNAVNVFLGIGLAWSVAAIYWALQGQEFHVSAGTLAFSVTLFTIFAFVCISVLLYRRRPHLGGELGGPRGCKLATTWLFVSLWLLYILFATLEAYCYIKGF

SEQ ID NO: 27518 - protein, 298 aa, Homo sapiens
MERGISDVTDRKLTMEEEEAKRIAEMGKPVLGEHPKLEVIIEESYEFKTTVDKLIKKTNLALVVGTHSWRDQFMEAITVSAAGDEDEDESGEERLPSCFDYVMHFLTVFWKVLFACVPPTEYCHGWACFAVSILIIGMLTAIIGDLASHFGCTIGLKDSVTAVVFVAFGTSVPDTFASKAAALQDVYADASIGNVTGSNAVNVFLGIGLAWSVAAIYWALQGQEFHVSAGTLAFSVTLFTIFAFVCISVLLYRRRPHLGGELGGPRGCKLATTWLFVSLWLLYILFATLEAYCYIKGF

SEQ ID NO: 27519 - protein, 924 aa, Homo sapiens
MAWLRLQPLTSAFLHFGLVTFVLFLNGLRAEAGGSGDVPSTGQNNESCSGSSDCKEGVILPIWYPENPSLGDKIARVIVYFVALIYMFLGVSIIADRFMASIEVITSQEREVTIKKPNGETSTTTIRVWNETVSNLTLMALGSSAPEILLSLIEVCGHGFIAGDLGPSTIVGSAAFNMFIIIGICVYVIPDGETRKIKHLRVFFITAAWSIFAYIWLYMILAVFSPGVVQVWEGLLTLFFFPVCVLLAWVADKRLLFYKYMHKKYRTDKHRGIIIETEGDHPKGIEMDGKMMNSHFLDGNLVPLEGKEVDESRREMIRILKDLKQKHPEKDLDQLVEMANYYALSHQQKSRAFYRIQATRMMTGAGNILKKHAAEQAKKASSMSEVHTDEPEDFISKVFFDPCSYQCLENCGAVLLTVVRKGGDMSKTMYVDYKTEDGSANAGADYEFTEGTVVLKPGETQKEFSVGIIDDDIFEEDEHFFVRLSNVRIEEEQPEEGMPPAIFNSLPLPRAVLASPCVATVTILDDDHAGIFTFECDTIHVSESIGVMEVKVLRTSGARGTVIVPFRTVEGTAKGGGEDFEDTYGELEFKNDETVKTIRVKIVDEEEYERQENFFIALGEPKWMERGISALLLSPDRKLTMEEEEAKRIAEMGKPVLGEHPKLEVIIEESYEFKTTVDKLIKKTNLALVVGTHSWRDQFMEAITVSAAGDEDEDESGEERLPSCFDYVMHFLTVFWKVLFACVPPTEYCHGWACFAVSILIIGMLTAIIGDLASHFGCTIGLKDSVTAVVFVAFGTSVPDTFASKAAALQDVYADASIGNVTGSNAVNVFLGIGLAWSVAAIYWALQGQEFHVSAGTLAFSVTLFTIFAFVCISVLLYRRRPHLGGELGGPRGCKLATTWLFVSLWLLYILFATLEAYCYIKGF

SEQ ID NO: 27520 - protein, 925 aa, Homo sapiens
MAWLRLQPLTSAFLHFGLVTFVLFLNGLRAEAGGSGDVPSTGQNNESCSGSSDCKEGVILPIWYPENPSLGDKIARVIVYFVALIYMFLGVSIIADRFMASIEVITSQEREVTIKKPNGETSTTTIRVWNETVSNLTLMALGSSAPEILLSLIEVCGHGFIAGDLGPSTIVGSAAFNMFIIIGICVYVIPDGETRKIKHLRVFFITAAWSIFAYIWLYMILAVFSPGVVQVWEGLLTLFFFPVCVLLAWVADKRLLFYKYMHKKYRTDKHRGIIIETEGDHPKGIEMDGKMMNSHFLDGNLVPLEGKEVDESRREMIRILKDLKQKHPEKDLDQLVEMANYYALSHQQKSRAFYRIQATRMMTGAGNILKKHAAEQAKKASSMSEVHTDEPEDFISKVFFDPCSYQCLENCGAVLLTVVRKGGDMSKTMYVDYKTEDGSANAGADYEFTEGTVVLKPGETQKEFSVGIIDDDIFEEDEHFFVRLSNVRIEEEQPEEGMPPAIFNSLPLPRAVLASPCVATVTILDDDHAGIFTFECDTIHVSESIGVMEVKVLRTSGARGTVIVPFRTVEGTAKGGGEDFEDTYGELEFKNDETVKTIHIKVIDDEAYEKNKNYFIEMMGPRMVDMSFQKALLLSPDRKLTMEEEEAKRIAEMGKPVLGEHPKLEVIIEESYEFKTTVDKLIKKTNLALVVGTHSWRDQFMEAITVSAAGDEDEDESGEERLPSCFDYVMHFLTVFWKVLFACVPPTEYCHGWACFAVSILIIGMLTAIIGDLASHFGCTIGLKDSVTAVVFVAFGTSVPDTFASKAAALQDVYADASIGNVTGSNAVNVFLGIGLAWSVAAIYWALQGQEFHVSAGTLAFSVTLFTIFAFVCISVLLYRRRPHLGGELGGPRGCKLATTWLFVSLWLLYILFATLEAYCYIKGF

SEQ ID NO: 27521 - protein, 534 aa, Homo sapiens
MATALMAVVLRAAAVAPRLRGRGGTGGARRLSCGARRRAARGTSPGRRLSTAWSQPQPPPEEYAGADDVSQSPVAEEPSWVPSPRPPVPHESPEPPSGRSLVQRDIQAFLNQCGASPGEARHWLTQFQTCHHSADKPFAVIEVDEEVLKCQQGVSSLAFALAFLQRMDMKPLVVLGLPAPTAPSGCLSFWEAKAQLAKSCKVLVDALRHNAAAAVPFFGGGSVLRAAEPAPHASYGGIVSVETDLLQWCLESGSIPILCPIGETAARRSVLLDSLEVTASLAKALRPTKIIFLNNTGGLRDSSHKVLSNVNLPADLDLVCNAEWVSTKERQQMRLIVDVLSRLPHHSSAVITAASTLLTELFSNKGSGTLFKNAERMLRVRSLDKLDQGRLVDLVNASFGKKLRDDYLASLRPRLHSIYVSEGYNAAAILTMEPVLGGTPYLDKFVVSSSRQGQGSGQMLWECLRRDLQTLFWRSRVTNPINPWYFKHSDGSFSNKQWIFFWFGLADIRDSYELVNHAKGLPDSFHKPASDPGS

SEQ ID NO: 27522 - protein, 2754 aa, Homo sapiens
MAASERLYELWLLYYAQKDLGYLQQWLKAFVGAFKKSISLSSLEPRRPEEAGAEVPLLPLDELHVLAEQLHQADLEQALLLLKLFIILCRNLENIEAGRGQVLVPRVLALLTKLVAELKGCPPPQGRGTQLENVALHALLLCEGLFDPYQTWRRQRSGEVISSKEKSKYKFPPAALPQEFSAFFQESLQNADHLPPILLLRLIHLFCAVLAGGKENGQMAVSDGSVKGLLSVVRGWSRGPAPDPCLVPLALEALVGAVHVLHASRAPPRGPELRALLESYFHVLNADWPAGLSSGPEEALVTLRVSMLDAIPMMLACEDRPVLQATFLSNNCFEHLTRLIQNSKLYLQSRAPPEGDSDLATRLLTEPDVQKVLDQDTDAIAVHVVRVLTCIMSDSPSAKEVFKERIGYPHLQEVLQSHGPPTHRLLQELLNMAVEGDHSMCPPPPIRNEQPVLVLAQWLPSLPTAELRLFLAQRLRWLCDSCPASRATCVQAGLVGCLLETLSTGLALEARCQEQLLALLQALGRVSIRPMELRHLLRPRPGLDSEPGGAEAGKARHAGAVIRTLSGMARHQGPARALRYFDLTPSMAGIMVPPVQRWPGPGFTFHAWLCLHPMDTAPTPAPTRPLQRKQLYSFFTSSGSGFEAFFTAAGTLVVAVCTRKEYLTMSLPEVSFADSAWHCVAIVHVPGRRPFSQNLVHVYKDGHLVKTAPLRCPSLSEPFSSCCIGSAGYRTTTTTTGLPTPPVPATLAYTHPALTRSQSVPASTGLGWGSGLVAPLQEGSIDSTLAGTQDTRWGSPTSLEGELGAVAIFHEALQATALRTLCTLGPNETAPFKPEGELHELSTRLLLHYSPQACKNNICLDLSPSHGLDGRLTGHRVETWDVKDVVNCVGGMGALLPLLERVAAQPKEAEAGPAETHDLVGPELTSGHNTQGLVLPLGKSSEERMERNAVAAFLLMLRNFLQGHMVNQESLVQCQGPAIIGALLRKVPSWAMDMNVLMSAQLLMEQVAAEGSGPLLYLLYQHLLFNFHLWTLSDFAVRLGHIQYMSSIVREHRQKLRKKYGVQFILDALRTHYSPQRERPLAADDLRTVQTSLLGLAREFLVRSLSADDVQVTQTMLSFLAATGDDGQAVGALDLLLALLHGSLVQESLAVFLLEPGNLEVLLALLVRPGSLPLLPDRVCKILRRLQQNERLPERSRQRLRLRECGLQGLVACLPEGTVSPQLCQGLYKLFLGADCLNLSDLLAVVQLSLQADLSVRLDICRQLFHLIYGQPDVVRLLARQAGWQDVLTRLYVLEAATAGSPPPSSPESPTSPKPAPPKPPTESPAEPSDVFLPSEAPCPDPDGFYHALSPFCTPFDLGLERSSVGSGNTAGGGGSSGTLTPASQPGTPSPLDGPRPFPAAPGRHSSSLSNVLEDGSLPEPTISGDDTSNTSNPQQTSEEELCNLLTNVLFSVTWRGVEGSDEAAWRERGQVFSVLTQLGASATLVRPPDCIKRSLLEMMLESALTDIKEAPVGVLASLTQQALWLLRLLQDFLCAEGHGNQELWSEKLFEGVCSLLDRLGAWPHLANGTADLREMAQIGLRLVLGYILLEDPQLHAQAYVRLHMLLQTAVPARREEACYVLSKLEAALGRVLNTSSLESATDEAGSPLAAAAAAAAAERCSWLVPLVRTLLDRAYEPLGLQWGLPSLPPTNGSPTFFEDFQAFCATPEWRHFIDKQVQPTMSQFEMDTYAKSHDLMSGFWNACYDMLMSSGQRRQWERAQSRRAFQELVLEPAQRRARLEGLRYTAVLKQQATQHSMALLHWGALWRQLASPCGAWALRDTPIPRWKLSSAETYSRMRLKLVPNHHFDPHLEASALRDNLGEVPLTPTEEASLPLAVTKEAKVSTPPELLQEDQLGEDELAELETPMEAAELDEQREKLVLSAECQLVTVVAVVPGLLEVTTQNVYFYDGSTERVETEEGIGYDFRRPLAQLREVHLRRFNLRRSALELFFIDQANYFLNFPCKVGTTPVSSPSQTPRPQPGPIPPHTQVRNQVYSWLLRLRPPSQGYLSSRSPQEMLRASGLTQKWVQREISNFEYLMQLNTIAGRTYNDLSQYPVFPWVLQDYVSPTLDLSNPAVFRDLSKPIGVVNPKHAQLVREKYESFEDPAGTIDKFHYGTHYSNAAGVMHYLIRVEPFTSLHVQLQSGRFDCSDRQFHSVAAAWQARLESPADVKELIPEFFYFPDFLENQNGFDLGCLQLTNEKVGDVVLPPWASSPEDFIQQHRQALESEYVSAHLHEWIDLIFGYKQRGPAAEEALNVFYYCTYEGAVDLDHVTDERERKALEGIISNFGQTPCQLLKEPHPTRLSAEEAAHRLARLDTNSPSIFQHLDELKAFFAEVVSDGVPLVLALVPHRQPHSFITQGSPDLLVTVSASGLLGTHSWLPYDRNISNYFSFSKDPTMGSHKTQRLLSGPWVPGSGVSGQALAVAPDGKLLFSGGHWDGSLRVTALPRGKLLSQLSCHLDVVTCLALDTCGIYLISGSRDTTCMVWRLLHQGGLSVGLAPKPVQVLYGHGAAVSCVAISTELDMAVSGSEDGTVIIHTVRRGQFVAALRPLGATFPGPIFHLALGSEGQIVVQSSAWERPGAQVTYSLHLYSVNGKLRASLPLAEQPTALTVTEDFVLLGTAQCALHILQLNTLLPAAPPLPMKVAIRSVAVTKERSHVLVGLEDGKLIVVVAGQPSEVRSSQFARKLWRSSRRISQVSSGETEYNPTEAR

SEQ ID NO: 27523 - protein, 2570 aa, Homo sapiens
MAASERLYELWLLYYAQKDLGYLQQWLKAFVGAFKKSISLSSLEPRRPEEAGAEVPLLPLDELHVLAEQLHQADLEQALLLLKLFIILCRNLENIEAGRGQVLVPRVLALLTKLVAELKGCPPPQGRGTQLENVALHALLLCEGLFDPYQTWRRQRSGEVISSKEKSKYKFPPAALPQEFSAFFQESLQNADHLPPILLLRLIHLFCAVLAGGKENGQMAVSDGSVKGLLSVVRGWSRGPAPDPCLVPLALEALVGAVHVLHASRAPPRGPELRALLESYFHVLNADWPAGLSSGPEEALVTLRVSMLDAIPMMLACEDRPVLQATFLSNNCFEHLTRLIQNSKLYLQSRAPPEGDSDLATRLLTEPDVQKVLDQDTDAIAVHVVRVLTCIMSDSPSAKEVFKERIGYPHLQEVLQSHGPPTHRLLQELLNMAVEGDHSMCPPPPIRNEQPVLVLAQWLPSLPTAELRLFLAQRLRWLCDSCPASRATCVQAGLVGCLLETLSTGLALEARCQEQLLALLQALGRVSIRPMELRHLLRPRPGLDSEPGGAEAGKARHAGAVIRTLSGMARHQGPARALRYFDLTPSMAGIMVPPVQRWPGPGFTFHAWLCLHPMDTAPTPAPTRPLQRKQLYSFFTSSGSGFEAFFTAAGTLVVAVCTRKEYLTMSLPEVSFADSAWHCVAIVHVPGRRPFSQNLVHVYKDGHLVKTAPLRCPSLSEPFSSCCIGSAGYRTTTTTTGLPTPPVPATLAYTHPALTRSQSVPASTGLGWGSGLVAPLQEGSIDSTLAGTQDTRWGSPTSLEGELGAVAIFHEALQATALRTLCTLGPNETAPFKPEGELHELSTRLLLHYSPQACKNNICLDLSPSHGLDGRLTGHRVETWDVKDVVNCVGGMGALLPLLERVAAQPKEAEAGPAETHDLVGPELTSGHNTQGLVLPLGKSSEERMERNAVAAFLLMLRNFLQGHMVNQESLVQCQGPAIIGALLRKVPSWAMDMNVLMSAQLLMEQVAAEGSGPLLYLLYQHLLFNFHLWTLSDFAVRLGHIQYMSSIVREHRQKLRKKYGVQFILDALRTHYSPQRERPLAADDLRTVQTSLLGLAREFLVRSLSADDVQVTQTMLSFLAATGDDGQILRRLQQNERLPERSRQRLRLRECGLQGLVACLPEGTVSPQLCQGLYKLFLGAGSGNTAGGGGSSGTLTPASQPGTPSPLDGPRPFPAAPGRHSSSLSNVLEDGSLPEPTISGDDTSNTSNPQQTSEEELCNLLTNVLFSVTWRGVEGSDEAAWRERGQVFSVLTQLGASATLVRPPDCIKRSLLEMMLESALTDIKEAPVGVLASLTQQALWLLRLLQDFLCAEGHGNQELWSEKLFEGVCSLLDRLGAWPHLANGTADLREMAQIGLRLVLGYILLEDPQLHAQAYVRLHMLLQTAVPARREEACYVLSKLEAALGRVLNTSSLESATDEAGSPLAAAAAAAAAERCSWLVPLVRTLLDRAYEPLGLQWGLPSLPPTNGSPTFFEDFQAFCATPEWRHFIDKQVQPTMSQFEMDTYAKSHDLMSGFWNACYDMLMSSGQRRQWERAQSRRAFQELVLEPAQRRARLEGLRYTAVLKQQATQHSMALLHWGALWRQLASPCGAWALRDTPIPRWKLSSAETYSRMRLKLVPNHHFDPHLEASALRDNLGEVPLTPTEEASLPLAVTKEAKVSTPPELLQEDQLGEDELAELETPMEAAELDEQREKLVLSAECQLVTVVAVVPGLLEVTTQNVYFYDGSTERVETEEGIGYDFRRPLAQLREVHLRRFNLRRSALELFFIDQANYFLNFPCKVGTTPVSSPSQTPRPQPGPIPPHTQVRNQVYSWLLRLRPPSQGYLSSRSPQEMLRASGLTQKWVQREISNFEYLMQLNTIAGRTYNDLSQYPVFPWVLQDYVSPTLDLSNPAVFRDLSKPIGVVNPKHAQLVREKYESFEDPAGTIDKFHYGTHYSNAAGVMHYLIRVEPFTSLHVQLQSGRFDCSDRQFHSVAAAWQARLESPADVKELIPEFFYFPDFLENQNGFDLGCLQLTNEKVGDVVLPPWASSPEDFIQQHRQALESEYVSAHLHEWIDLIFGYKQRGPAAEEALNVFYYCTYEGAVDLDHVTDERERKALEGIISNFGQTPCQLLKEPHPTRLSAEEAAHRLARLDTNSPSIFQHLDELKAFFAEVVSDGVPLVLALVPHRQPHSFITQGSPDLLVTVSASGLLGTHSWLPYDRNISNYFSFSKDPTMGSHKTQRLLSGPWVPGSGVSGQALAVAPDGKLLFSGGHWDGSLRVTALPRGKLLSQLSCHLDVVTCLALDTCGIYLISGSRDTTCMVWRLLHQGGLSVGLAPKPVQVLYGHGAAVSCVAISTELDMAVSGSEDGTVIIHTVRRGQFVAALRPLGATFPGPIFHLALGSEGQIVVQSSAWERPGAQVTYSLHLYSVNGKLRASLPLAEQPTALTVTEDFVLLGTAQCALHILQLNTLLPAAPPLPMKVAIRSVAVTKERSHVLVGLEDGKLIVVVAGQPSEVRSSQFARKLWRSSRRISQVSSGETEYNPTEAR

SEQ ID NO: 27524 - protein, 2724 aa, Homo sapiens
MAASERLYELWLLYYAQKDLGYLQQWLKAFVGAFKKSISLSSLEPRRPEEAGAEVPLLPLDELHVLAEQLHQADLEQALLLLKLFIILCRNLENIEAGRGQVLVPRVLALLTKLVAELKGCPPPQGRGTQLENVALHALLLCEGLFDPYQTWRRQRSGEVISSKEKSKYKFPPAALPQEFSAFFQESLQNADHLPPILLLRLIHLFCAVLAGGKENGQMAVSDGSVKGLLSVVRGWSRGPAPDPCLVPLALEALVGAVHVLHASRAPPRGPELRALLESYFHVLNADWPAGLSSGPEEALVTLRVSMLDAIPMMLACEDRPVLQATFLSNNCFEHLTRLIQNSKLYLQSRAPPEGDSDLATRLLTEPDVQKVLDQDTDAIAVHVVRVLTCIMSDSPSAKEVFKERIGYPHLQEVLQSHGPPTHRLLQELLNMAVEGDHSMCPPPPIRNEQPVLVLAQWLPSLPTAELRLFLAQRLRWLCDSCPASRATCVQAGLVGCLLETLSTGLALEARCQEQLLALLQALGRVSIRPMELRHLLRPRPGLDSEPGGAEAGKARHAGAVIRTLSGMARHQGPARALRYFDLTPSMAGIMVPPVQRWPGPGFTFHAWLCLHPMDTAPTPAPTRPLQRKQLYSFFTSSGSGFEAFFTAAGTLVVAVCTRKEYLTMSLPEVSFADSAWHCVAIVHVPGRRPFSQNLVHVYKDGHLVKTAPLRCPSLSEPFSSCCIGSAGYRTTTTTTGLPTPPVPATLAYTHPALTRSQSVPASTGLGWGSGLVAPLQEGSIDSTLAGTQDTRWGSPTSLEGELGAVAIFHEALQATALRTLCTLGPNETAPFKPEGELHELSTRLLLHYSPQACKNNICLDLSPSHGLDGRLTGHRVETWDVKDVVNCVGGMGALLPLLERVAAQPKEAEAGPAETHDLVGPELTSGHNTQGLVLPLGKSSEERMERNAVAAFLLMLRNFLQGHMVNQESLVQCQGPAIIGALLRKVPSWAMDMNVLMSAQLLMEQVAAEGSGPLLYLLYQHLLFNFHLWTLSDFAVRLGHIQYMSSIVREHRQKLRKKYGVQFILDALRTHYSPQRERPLAADDLRTVQTSLLGLAREFLVRSLSADDVQVTQTMLSFLAATGDDGQAVGALDLLLALLHGSLVQESLAVFLLEPGNLEVLLALLVRPGSLPLLPDRVCKILRRLQQNERLPERSRQRLRLRECGLQGLVACLPEGTVSPQLCQGLYKLFLGADCLNLSDLLAVVQLSLQADLSVRLDICRQLFHLIYGQPDVVRLLARQAGWQDVLTRLYVLEAATAGSPPPSSPESPTSPKPAPPKPPTESPAEPSDVFLPSEAPCPDPDGFYHALSPFCTPFDLGLERSSVGSGNTAGGGGSSGTLTPASQPGTPSPLDGPRPFPAAPGRHSSSLSNVLEDGSLPEPTISGDDTSNTSNPQQTSEEELCNLLTNVLFSVTWRGVEGSDEAAWRERGQVFSVLTQLGASATLVRPPDCIKRSLLEMMLESALTDIKEAPVGVLASLTQQALWLLRLLQDFLCAEGHGNQELWSEKLFEGVCSLLDRLGAWPHLANGTADLREMAQIGLRLVLGYILLEDPQLHAQAYVRLHMLLQTAVPARREEACYVLSKLEAALGRVLNTSSLESATDEAGSPLAAAAAAAAAERCSWLVPLVRTLLDRAYEPLGLQWGLPSLPPTNGSPTFFEDFQAFCATPEWRHFIDKQVQPTMSQFEMDTYAKSHDLMSGFWNACYDMLMSSGQRRQWERAQSRRAFQELVLEPAQRRARLEGLRYTAVLKQQATQHSMALLHWGALWRQLASPCGAWALRDTPIPRWKLSSAETYSRMRLKLVPNHHFDPHLEASALRDNLGEVPLTPTEEASLPLAVTKEAKVSTPPELLQEDQLGEDELAELETPMEAAELDEQREKLVLSAECQLVTVVAVVPGLLEVTTQNVYFYDGSTERVETEEGIGYDFRRPLAQLREVHLRRFNLRRSALELFFIDQANYFLNFPCKVGTTPVSSPSQTPRPQPGPIPPHTQVRNQVYSWLLRLRPPSQGYLSSRSPQEMLRASGLTQKWVQREISNFEYLMQLNTIAGRTYNDLSQYPVFPWVLQDYVSPTLDLSNPAVFRDLSKPIGVVNPKHAQLVREKYESFEDPAGTIDKFHYGTHYSNAAGVMHYLIRVEPFTSLHVQLQSGRFDCSDRQFHSVAAAWQARLESPADVKELIPEFFYFPDFLENQNGFDLGCLQLTNEKVGDVVLPPWASSPEDFIQQHRQALESEYVSAHLHEWIDLIFGYKQRGPAAEEALNVFYYCTYEGAVDLDHVTDERERKALEGIISNFGQTPCQLLKEPHPTRLSAEEAAHRLARLDTNSPSIFQHLDELKAFFAEVTVSASGLLGTHSWLPYDRNISNYFSFSKDPTMGSHKTQRLLSGPWVPGSGVSGQALAVAPDGKLLFSGGHWDGSLRVTALPRGKLLSQLSCHLDVVTCLALDTCGIYLISGSRDTTCMVWRLLHQGGLSVGLAPKPVQVLYGHGAAVSCVAISTELDMAVSGSEDGTVIIHTVRRGQFVAALRPLGATFPGPIFHLALGSEGQIVVQSSAWERPGAQVTYSLHLYSVNGKLRASLPLAEQPTALTVTEDFVLLGTAQCALHILQLNTLLPAAPPLPMKVAIRSVAVTKERSHVLVGLEDGKLIVVVAGQPSEVRSSQFARKLWRSSRRISQVSSGETEYNPTEAR

SEQ ID NO: 27525 - protein, 1937 aa, Homo sapiens
MSASSDAEMAVFGEAAPYLRKSEKERIEAQNKPFDAKTSVFVAEPKESYVKSTIQSKEGGKVTVKTEGGATLTVREDQVFPMNPPKYDKIEDMAMMTHLHEPGVLYNLKERYAAWMIYTYSGLFCVTVNPYKWLPVYKPEVVAAYRGKKRQEAPPHIFSISDNAYQFMLTDRENQSILITGESGAGKTVNTKRVIQYFATIAVTGEKKKDESGKMQGTLEDQIISANPLLEAFGNAKTVRNDNSSRFGKFIRIHFGTTGKLASADIETYLLEKSRVTFQLKAERSYHIFYQITSNKKPDLIEMLLITTNPYDYAFVSQGEITVPSIDDQEELMATDSAIDILGFTPEEKVSIYKLTGAVMHYGNMKFKQKQREEQAEPDGTEVADKAAYLQSLNSADLLKALCYPRVKVGNEYVTKGQTVQQVYNAVGALAKAVYEKMFLWMVTRINQQLDTKQPRQYFIGVLDIAGFEIFDFNSLEQLCINFTNEKLQQFFNHHMFVLEQEEYKKEGIEWTFIDFGMDLAACIELIEKPLGIFSILEEECMFPKATDTSFKNKLYDQHLGKSANFQKPKVVKGKAEAHFSLIHYAGTVDYNITGWLDKNKDPLNDTVVGLYQKSAMKTLASLFSTYASAEADSSAKKGAKKKGSSFQTVSALFRENLNKLMTNLRSTHPHFVRCIIPNETKTPGAMEHELVLHQLRCNGVLEGIRICRKGFPSRILYGDFKQRYKVLNASAIPEGQFIDSKKASEKLLASIDIDHTQYKFGHTKVFFKAGLLGLLEEMRDEKLAQIITRTQAVCRGFLMRVEYQKMLQRREALFCIQYNVRAFMNVKHWPWMKLFFKIKPLLKSAETEKEMATMKEEFQKTKDELAKSEAKRKELEEKMVTLLKEKNDLQLQVQSEADSLADAEERCEQLIKNKIQLEAKIKEVTERAEEEEEINAELTAKKRKLEDECSELKKDIDDLELTLAKVEKEKHATENKVKNLTEEMAGLDETIAKLSKEKKALQETHQQTLDDLQAEEDKVNILTKAKTKLEQQVDDLEGSLEQEKKLRMDLERAKRKLEGDLKLAQESTMDMENDKQQLDEKLEKKEFEISNLISKIEDEQAVEIQLQKKIKELQARIEELGEEIEAERASRAKAEKQRSDLSRELEEISERLEEAGGATSAQVELNKKREAEFQKLRRDLEEATLQHEAMVAALRKKHADSMAELGEQIDNLQRVKQKLEKEKSELKMETDDLSSNAEAISKAKGNLEKMCRSLEDQVSELKTKEEEQQRLINDLTAQRARLQTEAGEYSRQLDEKDALVSQLSRSKQASTQQIEELKHQLEEETKAKNALAHALQSSRHDCDLLREQYEEEQEGKAELQRALSKANSEVAQWRTKYETDAIQRTEELEEAKKKLAQRLQEAEEHVEAVNAKCASLEKTKQRLQNEVEDLMLDVERSNAACAALDKKQRNFDKVLSEWKQKYEETQAELEASQKESRSLSTELFKVKNVYEESLDQLETLRRENKNLQQEISDLTEQIAEGGKQIHELEKIKKQVEQEKCEIQAALEEAEASLEHEEGKILRIQLELNQVKSEVDRKIAEKDEEIDQLKRNHTRVVETMQSTLDAEIRSRNDALRVKKKMEGDLNEMEIQLNHANRLAAESLRNYRNTQGILKETQLHLDDALRGQEDLKEQLAIVERRANLLQAEIEELWATLEQTERSRKIAEQELLDASERVQLLHTQNTSLINTKKKLENDVSQLQSEVEEVIQESRNAEEKAKKAITDAAMMAEELKKEQDTSAHLERMKKNLEQTVKDLQHRLDEAEQLALKGGKKQIQKLEARVRELEGEVENEQKRNAEAVKGLRKHERRVKELTYQTEEDRKNVLRLQDLVDKLQAKVKSYKRQAEEAEEQSNANLSKFRKLQHELEEAEERADIAESQVNKLRVKSREVHTKISAE

SEQ ID NO: 27526 - protein, 203 aa, Homo sapiens
MTVKWKQLSAPASGAEIQRFPVPAVEPVPAPGADSPPGTALELEEAPEPSCRCPGTAQDQPSEELPDFMAPPVEPPASALELKVWLELEVAERGGQHSSSQQLPHCSQSWAQWKLWRQRPGFAIWAPLPHWRGTSLIQQSSSPAAEGPAATAAGAVCLPAGGAGEQEKEPVSRGSSRSSCSQRRPPPPGMEVCPQLGIWAICP

SEQ ID NO: 27527 - protein, 100 aa, Homo sapiens
MRTLTILTAVLLVALQAKAEPLQAEDDPLQAKAYEADAQEQRGANDQDFAVSFAEDASSSLRALGSTRAFTCHCRRSCYSTEYSYGTCTVMGINHRFCCL

SEQ ID NO: 27528 - protein, 380 aa, Homo sapiens
MALRHLALLAGLLVGVASKSMENTVTRNSTAVINTQAEGTLSPPGLSSLPVVREWALTHTAQLPECCVDVVGVNASCPGASLCGPGCYRRWNADGSASCVRCGNGTLPAYNGSECRSFAGPGAPFPMNRSSGTPGRPHPGAPRVAASLFLGTFFISSGLILSVAGFFYLKRSSKLPRACYRRNKAPALQPGEAAAMIPPPQSSGNSSCRIPLWGFPSLGQSQGALWVCPQTGLPGSGSRPPLPGSPGDPPTRQGQGRIWLVPPALDLSWIWPAPPARPPLIPVTSMLFPVPETWGLQERRTHHDRADPQYLLLLEVQLHPRTDAAGLRQALLSSHRFSGAGSGGPKSQPVRKPRYVRRERPLDRATDPAAFPGEARISNV

SEQ ID NO: 27529 - protein, 185 aa, Homo sapiens
MALRHLALLAGLLVGVASKSMENTAQLPECCVDVVGVNASCPGASLCGPGCYRRWNADGSASCVRCGNGTLPAYNGSECRSFAGPGAPFPMNRSSGTPGRPHPGAPRVAASLFLGTFFISSGLILSVAGFFYLKRSSKLPRACYRRNKGPAPAGSLPGRWSSQQFGPQAPALQPGEAVSNPHHPG

SEQ ID NO: 27530 - protein, 189 aa, Homo sapiens
MALRHLALLAGLLVGVASKSMENTAQLPECCVDVVGVNASCPGASLCGPGCYRRWNADGSASCVRCGNGTLPAYNGSECRSFAGPGAPFPMNRSSGTPGRPHPGAPRVAASLFLGTFFISSGLILSVAGFFYLKRSSKLPRACYRRNKAPALQPGEAAAMIPPPQSSDVGSAGKEDPPRQGRPPIPAPP

SEQ ID NO: 27531 - protein, 198 aa, Homo sapiens
MALRHLALLAGLLVGVASKSMENTAQLPECCVDVVGVNASCPGASLCGPGCYRRWNADGSASCVRCGNGTLPAYNGSECRSFAGPGAPFPMNRSSGTPGRPHPGAPRVAASLFLGTFFISSGLILSVAGFFYLKRSSKLPRACYRRNKAPALQPGEAAAMIPPPQSSVRKPRYVRRERPLDRATDPAAFPGEARISNV

SEQ ID NO: 27532 - protein, 254 aa, Homo sapiens
MNRSSGTPGRPHPGAPRVAASLFLGTFFISSGLILSVAGFFYLKRSSKLPRACYRRNKAPALQPGEAAAMIPPPQSSGNSSCRIPLWGFPSLGQSQGALWVCPQTGLPGSGSRPPLPGSPGDPPTRQGQGRIWLVPPALDLSWIWPAPPARPPLIPVTSMLFPVPETWGLQERRTHHDRADPQYLLLLEVQLHPRTDAAGLRQALLSSHRFSGAGSGGPKSQPVRKPRYVRRERPLDRATDPAAFPGEARISNV

SEQ ID NO: 27533 - protein, 546 aa, Homo sapiens
MSSAWKTPRGSDAMPEIMVKIIGSKHFQYLVEKPKIKENDSLKTETQTMHQKPMTDNARQMSRDTPVPINFTDQQTTDNPDDVKEKKHPENNQKSENNQKLLTGANSSRFLDGNIPSQANVHCSSVPTGDQSLSYVHGIPRRKLRDWSLEQMVRGSSDQPEDIGQSPSGTTNEDAFLLALVRRELKSRPLSSNLLEKLQKELKILDPISSGFLLQSQLSRLFLKHEVPLQLPTVKILCQRFSKRGSPEMVNYEKLLWFLNSAASDYPQQNKAAADLRKTESHGTHSQSTPPQHSSSQPEVNRSLLEILKMALRTTNGRLNIDNLNLSFRKEDRSFSGCLPLPKVRAICGKHGLYLTLSLLETLLNHQDLGYQNEIKWQNFVEMLTRASSDLLSDLPTGKNEKKAPAPPMEPEVPEMSQSKTEHMKTPEEELQPESSPAETSACKDPLKPLKIRPVSQPFVNPAVKNKAEECETWIDRFRKLENALYLCDLSNTGVLEKERARRLIHNYNLIYNLSLSPQKIDQALRRFRSGENMLLEPALRYLKEL

SEQ ID NO: 27534 - protein, 180 aa, Homo sapiens
MSRGCSSDLRFHTWLGLRMLKNIIAVALLMLGKNEKKAPAPPMEPEVPEMSQSKTEHMKTPEEELQPESSPAETSACKDPLKPLKIRPVSQPFVNPAVKNKAEECETWIDRFRKLENALYLCDLSNTGVLEKERARRLIHNYNLIYNLSLSPQKIDQALRRFRSGENMLLEPALRYLKEL

SEQ ID NO: 27535 - protein, 138 aa, Homo sapiens
MEPEVPEMSQSKTEHMKTPEEELQPESSPAETSACKDPLKPLKIRPVSQPFVNPAVKNKAEECETWIDRFRKLENALYLCDLSNTGVLEKERARRLIHNYNLIYNLSLSPQKIDQALRRFRSGENMLLEPALRYLKEL

SEQ ID NO: 27536 - protein, 126 aa, Homo sapiens
MLAVPVRLKVGSRKPEWGTNRLTSCPAKDPLDRRLQNLRDRERVPEPQRSLRPGVQEDSREHGQVPEVSDPQVDLEFVDLQAKPRYRRLILKTQIPEASDSQAAQKPQAHRQIPETTEAGRETTSN

SEQ ID NO: 27537 - protein, 149 aa, Homo sapiens
MADQLTEEQVTEFKEAFSLFDKDGDGCITTRELGTVMRSLGQNPTEAELRDMMSEIDRDGNGTVDFPEFLGMMARKMKDTDNEEEIREAFRVFDKDGNGFVSAAELRHVMTRLGEKLSDEEVDEMIRAADTDGDGQVNYEEFVRVLVSK

SEQ ID NO: 27538 - protein, 805 aa, Homo sapiens
MAASGVPRGCDILIVYSPDAEEWCQYLQTLFLSSRQVRSQKILTHRLGPEASFSAEDLSLFLSTRCVVVLLSAELVQHFHKPALLPLLQRAFHPPHRVVRLLCGVRDSEEFLDFFPDWAHWQELTCDDEPETYVAAVKKAISEDSGCDSVTDTEPEDEKVVSYSKQQNLPTVTSPGNLMVVQPDRIRCGAETTVYVIVRCKLDDRVATEAEFSPEDSPSVRMEAKVENEYTISVKAPNLSSGNVSLKIYSGDLVVCETVISYYTDMEEIGNLLSNAANPVEFMCQAFKIVPYNTETLDKLLTESLKNNIPASGLHLFGINQLEEEDMMTNQRDEELPTLLHFAAKYGLKNLTALLLTCPGALQAYSVANKHGHYPNTIAEKHGFRDLRQFIDEYVETVDMLKSHIKEELMHGEEADAVYESMAHLSTDLLMKCSLNPGCDEDLYESMAAFVPAATEDLYVEMLQASTSNPIPGDGFSRATKDSMIRKFLEGNSMGMTNLERDQCHLGQEEDVYHTVDDDEAFSVDLASRPPVPVPRPETTAPGAHQLPDNEPYIFKVFAEKSQERPGNFYVSSESIRKGPPVRPWRDRPQSSIYDPFAGMKTPGQRQLITLQEQVKLGIVNVDEAVLHFKEWQLNQKKRSESFRFQQENLKRLRDSITRRQREKQKSGKQTDLEITVPIRHSQHLPAKVEFGVYESGPRKSVIPPRTELRRGDWKTDSTSSTASSTSNRSSTRSLLSVSSGMEGDNEDNEVPEVTRSRSPGPPQVDGTPTMSLERPPRVPPRAASQRPPTRETFHPPPPVPPRGR

SEQ ID NO: 27539 - protein, 627 aa, Homo sapiens
MVVQPDRIRCGAETTVYVIVRCKLDDRVATEAEFSPEDSPSVRMEAKVENEYTISVKAPNLSSGNVSLKIYSGDLVVCETVISYYTDMEEIGNLLSNAANPVEFMCQAFKIVPYNTETLDKLLTESLKNNIPASGLHLFGINQLEEEDMMTNQRDEELPTLLHFAAKYGLKNLTALLLTCPGALQAYSVANKHGHYPNTIAEKHGFRDLRQFIDEYVETVDMLKSHIKEELMHGEEADAVYESMAHLSTDLLMKCSLNPGCDEDLYESMAAFVPAATEDLYVEMLQASTSNPIPGDGFSRATKDSMIRKFLEGNSMGMTNLERDQCHLGQEEDVYHTVDDDEAFSVDLASRPPVPVPRPETTAPGAHQLPDNEPYIFKVFAEKSQERPGNFYVSSESIRKGPPVRPWRDRPQSSIYDPFAGMKTPGQRQLITLQEQVKLGIVNVDEAVLHFKEWQLNQKKRSESFRFQQENLKRLRDSITRRQREKQKSGKQTDLEITVPIRHSQHLPAKVEFGVYESGPRKSVIPPRTELRRGDWKTDSTSSTASSTSNRSSTRSLLSVSSGMEGDNEDNEVPEVTRSRSPGPPQVDGTPTMSLERPPRVPPRAASQRPPTRETFHPPPPVPPRGR

SEQ ID NO: 27540 - protein, 404 aa, Homo sapiens
MRFFTSVACYGSCLFASELLIRCKDWLKGRPALFTALLACVLYLCEWTGAKHVPGSSYVEMLQASTSNPIPGDGFSRATKDSMIRKFLEGNSMGMTNLERDQCHLGQEEDVYHTVDDDEAFSVDLASRPPVPVPRPETTAPGAHQLPDNEPYIFKVFAEKSQERPGNFYVSSESIRKGPPVRPWRDRPQSSIYDPFAGMKTPGQRQLITLQEQVKLGIVNVDEAVLHFKEWQLNQKKRSESFRFQQENLKRLRDSITRRQREKQKSGKQTDLEITVPIRHSQHLPAKVEFGVYESGPRKSVIPPRTELRRGDWKTDSTSSTASSTSNRSSTRSLLSVSSGMEGDNEDNEVPEVTRSRSPGPPQVDGTPTMSLERPPRVPPRAASQRPPTRETFHPPPPVPPRGR

SEQ ID NO: 27541 - protein, 412 aa, Homo sapiens
MQPSSLLPLALCLLAAPASALVRIPLHKFTSIRRTMSEVGGSVEDLIAKGPVSKYSQAVPAVTEGPIPEVLKNYMDAQYYGEIGIGTPPQCFTVVFDTGSSNLWVPSIHCKLLDIACWIHHKYNSDKSSTYVKNGTSFDIHYGSGSLSGYLSQDTVSVPCQSASSASALGGVKVERQVFGEATKQPGITFIAAKFDGILGMAYPRISVNNVLPVFDNLMQQKLVDQNIFSFYLSRDPDAQPGGELMLGGTDSKYYKGSLSYLNVTRKAYWQVHLDQVEVASGLTLCKEGCEAIVDTGTSLMVGPVDEVRELQKAIGAVPLIQGEYMIPCEKVSTLPAITLKLGGKGYKLSPEDYTLKVSQAGKTLCLSGFMGMDIPPPSGPLWILGDVFIGRYYTVFDRDNNRVGFAEAARL

SEQ ID NO: 27542 - protein, 256 aa, Homo sapiens
MFQTGGLIVFYGLLAQTMAQFGGLPVPLDQTLPLNVNPALPLSPTGLAGSLTNALSNGLLSGGLLGILENLPLLDILKPGGGTSGGLLGGLLGKVTSVIPGLNNIIDIKVTDPQLLELGLVQSPDGHRLYVTIPLGIKLQVNTPLVGASLLRLAVKLDITAEILAVRDKQERIHLVLGDCTHSPGSLQISLLDGLGPLPIQGLLDSLTGILNKVLPELVQGNVCPLVNEVLRGLDITLVHDIVNMLIHGLQFVIKV

SEQ ID NO: 27543 - protein, 242 aa, Homo sapiens
MFQTGGLIVFYGLLAQTLPLNVNPALPLSPTGLAGSLTNALSNGLLSGGLLGILENLPLLDILKPGGGTSGGLLGGLLGKVTSVIPGLNNIIDIKVTDPQLLELGLVQSPDGHRLYVTIPLGIKLQVNTPLVGASLLRLAVKLDITAEILAVRDKQERIHLVLGDCTHSPGSLQISLLDGLGPLPIQGLLDSLTGILNKVLPELVQGNVCPLVNEVLRGLDITLVHDIVNMLIHGLQFVIKV

SEQ ID NO: 27544 - protein, 300 aa, Homo sapiens
MEQANPLRPDGESKGGVLAHLERLETQVSRSRKQSEELQSVQAQEGALGTKIHKLRRLRDELRAVVRHRRASVKACIANVEPNQTVEINEQEALEEKLENVKAILQAYHFTGLSGKLTSRGVCVCISTAFEGNLLDSYFVDLVIQKPLRIHHHSVPVFIPLEEIAAKYLQTNIQHFLFSLCEYLNAYSGRKYQADRLQSDFAALLTGPLQRNPLCNLLSFTYKLDPGGQSFPFCARLLYKDLTATLPTDVTVTCQGVEVLSTSWEEQRASHETLFCTKPLHQVFASFTRKGEKLDMSLVS

SEQ ID NO: 27545 - protein, 294 aa, Homo sapiens
MAGILASGLGVLAHLERLETQVSRSRKQSEELQSVQAQEGALGTKIHKLRRLRDELRAVVRHRRASVKACIANVEPNQTVEINEQEALEEKLENVKAILQAYHFTGLSGKLTSRGVCVCISTAFEGNLLDSYFVDLVIQKPLRIHHHSVPVFIPLEEIAAKYLQTNIQHFLFSLCEYLNAYSGRKYQADRLQSDFAALLTGPLQRNPLCNLLSFTYKLDPGGQSFPFCARLLYKDLTATLPTDVTVTCQGVEVLSTSWEEQRASHETLFCTKPLHQVFASFTRKGEKLDMSLVS

SEQ ID NO: 27546 - protein, 329 aa, Homo sapiens
MDPQCTMGLSNILFVMAFLLSGAAPLKIQAYFNETADLPCQFANSQNQSLSELVVFWQDQENLVLNEVYLGKEKFDSVHSKYMGRTSFDSDSWTLRLHNLQIKDKGLYQCIIHHKKPTGMIRIHQMNSELSVLANFSQPEIVPISNITENVYINLTCSSIHGYPEPKKMSVLLRTKNSTIEYDGVMQKSQDNVTELYDVSISLSVSFPDVTSNMTIFCILETDKTRLLSSPFSIELEDPQPPPDHIPWITAVLPTVIICVMVFCLILWKWKKKKRPRNSYKCGTNTMEREESEQTKKREKIHIPERSDEAQRVFKSSKTSSCDKSDTCF

SEQ ID NO: 27547 - protein, 323 aa, Homo sapiens
MGLSNILFVMAFLLSGAAPLKIQAYFNETADLPCQFANSQNQSLSELVVFWQDQENLVLNEVYLGKEKFDSVHSKYMGRTSFDSDSWTLRLHNLQIKDKGLYQCIIHHKKPTGMIRIHQMNSELSVLANFSQPEIVPISNITENVYINLTCSSIHGYPEPKKMSVLLRTKNSTIEYDGVMQKSQDNVTELYDVSISLSVSFPDVTSNMTIFCILETDKTRLLSSPFSIELEDPQPPPDHIPWITAVLPTVIICVMVFCLILWKWKKKKRPRNSYKCGTNTMEREESEQTKKREKIHIPERSDEAQRVFKSSKTSSCDKSDTCF

SEQ ID NO: 27548 - protein, 110 aa, Homo sapiens
MGLSNILFVMAFLLSELEDPQPPPDHIPWITAVLPTVIICVMVFCLILWKWKKKKRPRNSYKCGTNTMEREESEQTKKREKIHIPERSDEAQRVFKSSKTSSCDKSDTCF

SEQ ID NO: 27549 - protein, 275 aa, Homo sapiens
MGLSNILFVMAFLLSGAAPLKIQAYFNETADLPCQFANSQNQSLSELVVFWQDQENLVLNEVYLGKEKFDSVHSKYMGRTSFDSDSWTLRLHNLQIKDKGLYQCIIHHKKPTGMIRIHQMNSELSVLANFSQPEIVPISNITENVYINLTCSSIHGYPEPKKMSVLLRTKNSTIEYDGVMQKSQDNVTELYDVSISLSVSFPDVTSNMTIFCILETDKTRLLSSPFSIGTNTMEREESEQTKKREKIHIPERSDEAQRVFKSSKTSSCDKSDTCF

SEQ ID NO: 27550 - protein, 217 aa, Homo sapiens
MDPQCTMGLSNILFVMAFLLSANFSQPEIVPISNITENVYINLTCSSIHGYPEPKKMSVLLRTKNSTIEYDGVMQKSQDNVTELYDVSISLSVSFPDVTSNMTIFCILETDKTRLLSSPFSIELEDPQPPPDHIPWITAVLPTVIICVMVFCLILWKWKKKKRPRNSYKCGTNTMEREESEQTKKREKIHIPERSDEAQRVFKSSKTSSCDKSDTCF

SEQ ID NO: 27551 - protein, 247 aa, Homo sapiens
MGRTSFDSDSWTLRLHNLQIKDKGLYQCIIHHKKPTGMIRIHQMNSELSVLANFSQPEIVPISNITENVYINLTCSSIHGYPEPKKMSVLLRTKNSTIEYDGVMQKSQDNVTELYDVSISLSVSFPDVTSNMTIFCILETDKTRLLSSPFSIELEDPQPPPDHIPWITAVLPTVIICVMVFCLILWKWKKKKRPRNSYKCGTNTMEREESEQTKKREKIHIPERSDEAQRVFKSSKTSSCDKSDTCF

SEQ ID NO: 27552 - protein, 658 aa, Homo sapiens
MIPCRAALTFARCLIRRKIVTLDSLEDTKLCRCLSTMDLIALGVGSTLGAGVYVLAGEVAKADSGPSIVVSFLIAALASVMAGLCYAEFGARVPKTGSAYLYTYVTVGELWAFITGWNLILSYVIGTSSVARAWSGTFDELLSKQIGQFLRTYFRMNYTGLAEYPDFFAVCLILLLAGLLSFGVKESAWVNKVFTAVNILVLLFVMVAGFVKGNVANWKISEEFLKNISASAREPPSENGTSIYGAGGFMPYGFTGTLAGAATCFYAFVGFDCIATTGEEVRNPQKAIPIGIVTSLLVCFMAYFGVSAALTLMMPYYLLDEKSPLPVAFEYVGWGPAKYVVAAGSLCALSTSLLGSIFPMPRVIYAMAEDGLLFKCLAQINSKTKTPIIATLSSGAVAALMAFLFDLKALVDMMSIGTLMAYSLVAACVLILRYQPGLSYDQPKCSPEKDGLGSSPRVTSKSESQVTMLQRQGFSMRTLFCPSLLPTQQSASLVSFLVGFLAFLVLGLSVLTTYGVHAITRLEAWSLALLALFLVLFVAIVLTIWRQPQNQQKVAFMVPFLPFLPAFSILVNIYLMVQLSADTWVRFSIWMAIGFLIYFSYGIRHSLEGHLRDENNEEDAYPDNVHAAAEEKSAIQANDHHPRNLSSPFIFHEKTSEF

SEQ ID NO: 27553 - protein, 697 aa, Homo sapiens
MKIETSGYNSDKLICRGFIGTPAPPVCDSKFLLSPSSDVRMIPCRAALTFARCLIRRKIVTLDSLEDTKLCRCLSTMDLIALGVGSTLGAGVYVLAGEVAKADSGPSIVVSFLIAALASVMAGLCYAEFGARVPKTGSAYLYTYVTVGELWAFITGWNLILSYVIGTSSVARAWSGTFDELLSKQIGQFLRTYFRMNYTGLAEYPDFFAVCLILLLAGLLSFGVKESAWVNKVFTAVNILVLLFVMVAGFVKGNVANWKISEEFLKNISASAREPPSENGTSIYGAGGFMPYGFTGTLAGAATCFYAFVGFDCIATTGEEVRNPQKAIPIGIVTSLLVCFMAYFGVSAALTLMMPYYLLDEKSPLPVAFEYVGWGPAKYVVAAGSLCALSTSLLGSMFPLPRILFAMARDGLLFRFLARVSKRQSPVAATLTAGVISALMAFLFDLKALVDMMSIGTLMAYSLVAACVLILRYQPGLSYDQPKCSPEKDGLGSSPRVTSKSESQVTMLQRQGFSMRTLFCPSLLPTQQSASLVSFLVGFLAFLVLGLSVLTTYGVHAITRLEAWSLALLALFLVLFVAIVLTIWRQPQNQQKVAFMVPFLPFLPAFSILVNIYLMVQLSADTWVRFSIWMAIGFLIYFSYGIRHSLEGHLRDENNEEDAYPDNVHAAAEEKSAIQANDHHPRNLSSPFIFHEKTSEF

SEQ ID NO: 27554 - protein, 698 aa, Homo sapiens
MKIETSGYNSDKLICRGFIGTPAPPVCDSKFLLSPSSDVRMIPCRAALTFARCLIRRKIVTLDSLEDTKLCRCLSTMDLIALGVGSTLGAGVYVLAGEVAKADSGPSIVVSFLIAALASVMAGLCYAEFGARVPKTGSAYLYTYVTVGELWAFITGWNLILSYVIGTSSVARAWSGTFDELLSKQIGQFLRTYFRMNYTGLAEYPDFFAVCLILLLAGLLSFGVKESAWVNKVFTAVNILVLLFVMVAGFVKGNVANWKISEEFLKNISASAREPPSENGTSIYGAGGFMPYGFTGTLAGAATCFYAFVGFDCIATTGEEVRNPQKAIPIGIVTSLLVCFMAYFGVSAALTLMMPYYLLDEKSPLPVAFEYVGWGPAKYVVAAGSLCALSTSLLGSIFPMPRVIYAMAEDGLLFKCLAQINSKTKTPIIATLSSGAVAALMAFLFDLKALVDMMSIGTLMAYSLVAACVLILRYQPGLSYDQPKCSPEKDGLGSSPRVTSKSESQVTMLQRQGFSMRTLFCPSLLPTQQSASLVSFLVGFLAFLVLGLSVLTTYGVHAITRLEAWSLALLALFLVLFVAIVLTIWRQPQNQQKVAFMVPFLPFLPAFSILVNIYLMVQLSADTWVRFSIWMAIGFLIYFSYGIRHSLEGHLRDENNEEDAYPDNVHAAAEEKSAIQANDHHPRNLSSPFIFHEKTSEF

SEQ ID NO: 27555 - protein, 273 aa, Homo sapiens
MNWSIFEGLLSGVNKYSTAFGRIWLSLVFIFRVLVYLVTAERVWSDDHKDFDCNTRQPGCSNVCFDEFFPVSHVRLWALQLILVTCPSLLVVMHVAYREVQEKRHREAHGENSGRLYLNPGKKRGGLWWTYVCSLVFKASVDIAFLYVFHSFYPKYILPPVVKCHADPCPNIVDCFISKPSEKNIFTLFMVATAAICILLNLVELIYLVSKRCHECLAARKAQAMCTGHHPHGTTSSCKQDDLLSGDLIFLGSDSHPPLLPDRPRDHVKKTIL

SEQ ID NO: 27556 - protein, 362 aa, Homo sapiens
MAPKPGAEWSTALSHLVLGVVSLHAAVSTAEASRGAAAGFLLQVLAATTTLAPGLSTHEDCLAGAWVATVIGLPLLAFDFHWCTNGHLMCAGCFIHLLADARLKEEQATCPNCRCEISKSLCCRNLAVEKAVSELPSECGFCLRQFPRSLLERHQKEECQDRVTQCKYKRIGCPWHGPFHELTVHEAACAHPTKTGSELMEILDGMDQSHRKEMQLYNSIFSLLSFEKIGYTEVQFRPYRTDDFITRLYYETPRFTVLNQTWVLKARVNDSERNPNLSCKRTLSFQLLLKSKVTAPLECSFLLLKGPYDDVRISPVIYHFVFTNESNETDYVPLPIIDSVECNKLLAAKNINLRLFLFQIQK

SEQ ID NO: 27557 - protein, 274 aa, Homo sapiens
MCAGCFIHLLADARLKEEQATCPNCRCEISKSLCCRNLAVEKAVSELPSECGFCLRQFPRSLLERHQKEECQDRVTQCKYKRIGCPWHGPFHELTVHEAACAHPTKTGSELMEILDGMDQSHRKEMQLYNSIFSLLSFEKIGYTEVQFRPYRTDDFITRLYYETPRFTVLNQTWVLKARVNDSERNPNLSCKRTLSFQLLLKSKVTAPLECSFLLLKGPYDDVRISPVIYHFVFTNESNETDYVPLPIIDSVECNKLLAAKNINLRLFLFQIQK

SEQ ID NO: 27558 - protein, 192 aa, Homo sapiens
MAPKPGAEWSTALSHLVLGVVSLHAAVSTAEASRGAAAGFLLQVLAATTTLAPGLSTHEDCLAGAWVATVIGLPLLAFDFHWVNGDRSSANLLLGGGMVLAVAGGHLGPEGRSVAGQAMLLVVAVTILIVAVFTANTYGMWGGAMLGVAGLLSRLEEDRLLLLPKEDVCRWALAVGSWAYCRALHTQRLQWE

SEQ ID NO: 27559 - protein, 203 aa, Homo sapiens
MCAGCFIHLLADARLKEEQATCPNCRCEISKSLCCRNLAVEKAVSELPSECGFCLRQFPRSLLERHQKEECQDRVTQCKYKRIGCPWHGPFHELTVHEAACAHPTKTGSELMEILDGMDQSHRKEMQLYNSIFSLLSFEKIGYTGEAPRRLLHATQVWVGGLAARSLGAAGSGHWALTAPDSRALDKLPVDRWTPRSRRQAGD

SEQ ID NO: 27560 - protein, 264 aa, Homo sapiens
MLLLSLTLSLVLLGSSWGCGIPAIKPALSFSQRIVNGENAVLGSWPWQVSLQDSSGFHFCGGSLISQSWVVTAAHCNVSPGRHFVVLGEYDRSSNAEPLQVLSVSRAITHPSWNSTTMNNDVTLLKLASPAQYTTRISPVCLASSNEALTEGLTCVTTGWGRLSGVGNVTPAHLQQVALPLVTVNQCRQYWGSSITDSMICAGGAGASSCQGDSGGPLVCQKGNTWVLIGIVSWGTKNCNVRAPAVYTRVSKFSTWINQVIAYN

SEQ ID NO: 27561 - protein, 394 aa, Homo sapiens
MDLCHPEPAELSSGETEELQRIKWHRKQLLEDIQKLKDEIADVFAQIDCFESAEESRMAQKEKELCIGRKKFNMDPAKGIQYFIEHKLLTPDVQDIARFLYKGEGLNKTAIGTYLGERDPINLQVLQAFVDCHEFANLNLVQALRQFLWSFRLPGEAQKIDRMMEAFATRYCLCNPGVFQSTDTCYVLSFSIIMLNTSLHNPNVRDRPPFERFVSMNRGINNGSDLPEDQLRNLFDSIKSEPFSIPEDDGNDLTHTFFNPDREGWLLKLGGRVKTWKRRWFILTDNCLYYFEFTTDKEPRGIIPLENLSVQKVDDPKKPFCLELYNPSCRGQKIKACKTDGDGRVVEGKHESYRISATSAEERDQWIESIRASITRVPFYDLVSTRKKKIASKQ

SEQ ID NO: 27562 - protein, 398 aa, Homo sapiens
MEEDDSYVPSDLTAEERQELENIRRRKQELLADIQRLKDEIAEVANEIENLGSTEERKNMQRNKQVAMGRKKFNMDPKKGIQFLIENDLLKNTCEDIAQFLYKGEGLNKTAIGDYLGERDEFNIQVLHAFVELHEFTDLNLVQALRQFLWSFRLPGEAQKIDRMMEAFAQRYCQCNNGVFQSTDTCYVLSFAIIMLNTSLHNPNVKDKPTVERFIAMNRGINDGGDLPEELLRNLYESIKNEPFKIPEDDGNDLTHTFFNPDREGWLLKLGGGRVKTWKRRWFILTDNCLYYFEYTTDKEPRGIIPLENLSIREVEDSKKPNCFELYIPDNKDQVIKACKTEADGRVVEGNHTVYRISAPTPEEKEEWIKCIKAAISRDPFYEMLAARKKKVSSTKRH

SEQ ID NO: 27563 - protein, 397 aa, Homo sapiens
MEEDDSYVPSDLTAEERQELENIRRRKQELLADIQRLKDEIAEVANEIENLGSTEERKNMQRNKQVAMGRKKFNMDPKKGIQFLIENDLLKNTCEDIAQFLYKGEGLNKTAIGDYLGERDEFNIQVLHAFVELHEFTDLNLVQALRQFLWSFRLPGEAQKIDRMMEAFAQRYCQCNNGVFQSTDTCYVLSFAIIMLNTSLHNPNVKDKPTVERFIAMNRGINDGGDLPEELLRNLYESIKNEPFKIPEDDGNDLTHTFFNPDREGWLLKLGGRVKTWKRRWFILTDNCLYYFEYTTDKEPRGIIPLENLSIREVEDSKKPNCFELYIPDNKDQVIKACKTEADGRVVEGNHTVYRISAPTPEEKEEWIKCIKAAISRDPFYEMLAARKKKVSSTKRH

SEQ ID NO: 27564 - protein, 339 aa, Homo sapiens
MQRNKQVAMGRKKFNMDPKKGIQFLIENDLLKNTCEDIAQFLYKGEGLNKTAIGDYLGERDEFNIQVLHAFVELHEFTDLNLVQALRQFLWSFRLPGEAQKIDRMMEAFAQRYCQCNNGVFQSTDTCYVLSFAIIMLNTSLHNPNVKDKPTVERFIAMNRGINDGGDLPEELLRNLYESIKNEPFKIPEDDGNDLTHTFFNPDREGWLLKLGGGRVKTWKRRWFILTDNCLYYFEYTTDKEPRGIIPLENLSIREVEDSKKPNCFELYIPDNKDQVIKACKTEADGRVVEGNHTVYRISAPTPEEKEEWIKCIKAAISRDPFYEMLAARKKKVSSTKRH

SEQ ID NO: 27565 - protein, 956 aa, Homo sapiens
MSSGLWSQEKVTSPYWEERIFYLLLQECSVTDKQTQKLLKVPKGSIGQYIQDRSVGHSRIPSAKGKKNQIGLKILEQPHAVLFVDEKDVVEINEKFTELLLAITNCEERFSLFKNRNRLSKGLQIDVGCPVKVQLRSGEEKFPGVVRFRGPLLAERTVSGIFFGVELLEEGRGQGFTDGVYQGKQLFQCDEDCGVFVALDKLELIEDDDTALESDYAGPGDTMQVELPPLEINSRVSLKVGETIESGTVIFCDVLPGKESLGYFVGVDMDNPIGNWDGRFDGVQLCSFACVESTILLHINDIIPALSESVTQERRPPKLAFMSRGVGDKGSSSHNKPKATGSTSDPGNRNRSELFYTLNGSSVDSQPQSKSKNTWYIDEVAEDPAKSLTEISTDFDRSSPPLQPPPVNSLTTENRFHSLPFSLTKMPNTNGSIGHSPLSLSAQSVMEELNTAPVQESPPLAMPPGNSHGLEVGSLAEVKENPPFYGVIRWIGQPPGLNEVLAGLELEDECAGCTDGTFRGTRYFTCALKKALFVKLKSCRPDSRFASLQPVSNQIERCNSLAFGGYLSEVVEENTPPKMEKEGLEIMIGKKKGIQGHYNSCYLDSTLFCLFAFSSVLDTVLLRPKEKNDVEYYSETQELLRTEIVNPLRIYGYVCATKIMKLRKILEKVEAASGFTSEEKDPEEFLNILFHHILRVEPLLKIRSAGQKVQDCYFYQIFMEKNEKVGVPTIQQLLEWSFINSNLKFAEAPSCLIIQMPRFGKDFKLFKKIFPSLELNITDLLEDTPRQCRICGGLAMYECRECYDDPDISAGKIKQFCKTCNTQVHLHPKRLNHKYNPVSLPKDLPDWDWRHGCIPCQNMELFAVLCIETSHYVAFVKYGKDDSAWLFFDSMADRDGGQNGFNIPQVTPCPEVGEYLKMSLEDLHSLDSRRIQGCARRLLCDAYMCMYQSPTMSLYK

SEQ ID NO: 27566 - protein, 953 aa, Homo sapiens
MSSGLWSQEKVTSPYWEERIFYLLLQECSVTDKQTQKLLKVPKGSIGQYIQDRSVGHSRIPSAKGKKNQIGLKILEQPHAVLFVDEKDVVEINEKFTELLLAITNCEERFSLFKNRNRLSKGLQIDVGCPVKVQLRSGEEKFPGVVRFRGPLLAERTVSGIFFGVELLEEGRGQGFTDGVYQGKQLFQCDEDCGVFVALDKLELIEDDDTALESDYAGPGDTMQVELPPLEINSRVSLKVGETIESGTVIFCDVLPGKESLGYFVGVDMDNPIGNWDGRFDGVQLCSFACVESTILLHINDIIPESVTQERRPPKLAFMSRGVGDKGSSSHNKPKATGSTSDPGNRNRSELFYTLNGSSVDSQPQSKSKNTWYIDEVAEDPAKSLTEISTDFDRSSPPLQPPPVNSLTTENRFHSLPFSLTKMPNTNGSIGHSPLSLSAQSVMEELNTAPVQESPPLAMPPGNSHGLEVGSLAEVKENPPFYGVIRWIGQPPGLNEVLAGLELEDECAGCTDGTFRGTRYFTCALKKALFVKLKSCRPDSRFASLQPVSNQIERCNSLAFGGYLSEVVEENTPPKMEKEGLEIMIGKKKGIQGHYNSCYLDSTLFCLFAFSSVLDTVLLRPKEKNDVEYYSETQELLRTEIVNPLRIYGYVCATKIMKLRKILEKVEAASGFTSEEKDPEEFLNILFHHILRVEPLLKIRSAGQKVQDCYFYQIFMEKNEKVGVPTIQQLLEWSFINSNLKFAEAPSCLIIQMPRFGKDFKLFKKIFPSLELNITDLLEDTPRQCRICGGLAMYECRECYDDPDISAGKIKQFCKTCNTQVHLHPKRLNHKYNPVSLPKDLPDWDWRHGCIPCQNMELFAVLCIETSHYVAFVKYGKDDSAWLFFDSMADRDGGQNGFNIPQVTPCPEVGEYLKMSLEDLHSLDSRRIQGCARRLLCDAYMCMYQSPTMSLYK

SEQ ID NO: 27567 - protein, 94 aa, Homo sapiens
MSVKGMAIALAVILCATVVQGFPMFKRGRCLCIGPGVKAVKVADIEKASIMYPSNNCDKIEVIITLKENKGQRCLNPKSKQARLIIKKVERKNF

SEQ ID NO: 27568 - protein, 798 aa, Homo sapiens
MLMLMLVAAVTMWLRPLVTAQLCRSRTVRTGKVFNLIQDVQGDRLYFHPTTTRLIKHPCEKNIALYLGKQVFFTMDNFETSLLPFTIPTSMQVGVPEVTSAHFAGSLLLLVVDQKVYIYDYENNSWSMSLGIKHPVTHVSGDNCCYTGSLFCVHVSNLVFAYFRGDQISQTYIYYSNTGGFSFWKYHYDRQAEIIGSLGGIFHFFSLSQVAMLVVNQGKGMFKYSDHPLNRSFGLSFDYNGTLDILIAPGQRGILLLWFENSLLFSHNAGQLVDTVRVKKGDQTLFSSIFEAKITIHNIAVTENELAVITREDNLYYGNLGIVPSSIIKFADQYIWSEDVALMFRSPGTLEILTPLRDTAFPAFDFQKCLVNIQALLMDPELHVGKCKIEFLTGEFIYRMYTIDMHSQLELTASLIPQPGTSLIPLVMVSNPHSLGFQATFYENGYTSDGNTKYKLDIFLKQQQHWGRTDSNFTSSLKKATMSTLTVDIANKEISCVDIKPLSTLISVGCDLDKKIVIQNKVSACSMGILDPLTLQDNYSFIIEKEFYDPGFQGQQSSEDLHVFYSYQQLGCPLLVYYDTLWKPVVELWRKDSFQEVIDAEYVLLEVNGQFSYSYSLTAQSAMCTSQPQNWTTMIKEFGGPFFWNRENYVSCHDPNNNAPLRWPDVQYQILGGRTANQIIFGHNGFYVFYISIVDPYYSYCQLETIFSIYVYGAFPVQLVSAGVVILLIISSILGSVWLAYKTPKLLRTARGRRIKKCATQLCRRCKTVCQFRASATARAGTEPPGRHRTPHGGRSDH

SEQ ID NO: 27569 - protein, 358 aa, Homo sapiens
MFRSPGTLEILTPLRDTAFPAFDFQKCLVNIQALLMDPELHVGKCKIEFLTGEFIYRMYTIDMHSQLELTASLIPQPGTSLIPLVMVSNPHSLGFQATFYENGYTSDGNTKYKLDIFLKQQQHWGRTDSNFTSSLKKATMSTLTVDIANKEISCVDIKPLSTLISVGCDLDKKIVIQNKVSACSMGILDPLTLQDNYSFIIEKEFYDPGFQGQQSSEDLHVFYSYQQLGCPLLVYYDTLWKPVVELLECSGMNTVHCSLNLPGSSGPPASASQVAGTAVAYHNARLIFFFFFFFFLRQSLALSPRLECSGVILAHRKLRLPGSRHSPASASRVAGITGARHCARLIFFIFSRDRVSPC

SEQ ID NO: 27570 - protein, 109 aa, Homo sapiens
MKFISTSLLLMLLVSSLSPVQGVLEVYYTSLRCRCVQESSVFIPRRFIDRIQILPRGNGCPRKEIIVWKKNKSIVCVDPQAEWIQRMMEVLRKRSSSTLPVPVFKRKIP

SEQ ID NO: 27571 - protein, 566 aa, Homo sapiens
MGRAGGGGPGRGPPPLLLFLGAALVLASGAVPAREAGSAVEAEELVKGSPAWEPPANDTREEAGPPAAGEDEASWTAPGGELAGPEEVLQESAAVTGTAWLEADSPGLGGVTAEAGSGDAQALPATLQAPHEVLGQSIMPPAIPEATEASGPPSPTPGDKLSPASELPKESPLEVWLNLGGSTPDPQGPELTYPFQGTLEPQPASDIIDIDYFEGLDGEGRGADLGSFPGSPGTSENHPDTEGETPSWSLLDLYDDFTPFDESDFYPTTSFYDDLDEEEEEEEDDKDAVGGGDLEDENELLVPTGKPGLGPGTGQPTSRWHAVPPQHTLGSVPGSSIALRPRPGEPGRDLASSENGTECRSGFVRHNGSCRSVCDLFPSYCHNGGQCYLVENIGAFCRCNTQDYIWHKGMRCESIITDFQVMCVAVGSAALVLLLLFMMTVFFAKKLYLLKTENTKLRRTNKFRTPSELHNDNFSLSTIAEGSHPNVRKLCNTPRTSSPHARALAHYDNVICQDDPSAPHKIQEVLKSCLKEEESFNIQNSMSPKLEGGKGDQADLDVNCLQNNLT

SEQ ID NO: 27572 - protein, 539 aa, Homo sapiens
MGRAGGGGPGRGPPPLLLFLGAALVLASGAVPAREAGSAVEAEELVKGSPAWEPPANDTREEAGPPAAGEDEASWTAPGGELAGPEEVLQESAAVTGTAWLEADSPGLGGVTAEAGSGDAQALPATLQAPHEVLGQSIMPPAIPEATEASGPPSPTPGDKLSPASELPKESPLEVWLNLGGSTPDPQGPELTYPFQGTLEPQPASDIIDIDYFEGLDGEGRGADLGSFPGSPGTSENHPDTEGETPSWSLLDLYDDFTPFDESDFYPTTSFYDDLDEEEEEEEDDKDAVGGGDLEDENELLVPTGKPGLGPGTGQPTSRWHAVPPQHTLGSVPGSSIALRPRPGEPGRDLASSENGTECRSGFVRHNGSCRSVCDLFPSYCHNGGQCYLVENIGAFCRCNTQDYIWHKGMRCESIITDFQVMCVAVGSAALVLLLLFMMTVFFAKKLYLLKTENTKLRRTNKFRTPSELHNDNFSLSTIAEGSHPNDDPSAPHKIQEVLKSCLKEEESFNIQNSMSPKLEGGKGDQADLDVNCLQNNLT

SEQ ID NO: 27573 - protein, 401 aa, Homo sapiens
MPPAIPEATEASGPPSPTPGDKLSPASELPKESPLEVWLNLGGSTPDPQGPELTYPFQGTLEPQPASDIIDIDYFEGLDGEGRGADLGSFPGSPGTSENHPDTEGETPSWSLLDLYDDFTPFDESDFYPTTSFYDDLDEEEEEEEDDKDAVGGGDLEDENELLVPTGKPGLGPGTGQPTSRWHAVPPQHTLGSVPGSSIALRPRPGEPGRDLASSENGTECRSGFVRHNGSCRSVCDLFPSYCHNGGQCYLVENIGAFCRCNTQDYIWHKGMRCESIITDFQVMCVAVGSAALVLLLLFMMTVFFAKKLYLLKTENTKLRRTNKFRTPSELHNDNFSLSTIAEGSHPNDDPSAPHKIQEVLKSCLKEEESFNIQNSMSPKLEGGKGDQADLDVNCLQNNLT

SEQ ID NO: 27574 - protein, 159 aa, Homo sapiens
MSSPQRRKAMPWALSLLLMGFQLLVTYAWCSEEEMGGNNKIVQDPMFLATVEFALNTFNVQSKEEHAYRLLRVLSSWREDSMDRKWRGKMVFSMNLQLRQTVCRKFEDDIDNCPFQESLELNNVRQGISFPQVHSCGCCMGCGVGTGAADKAIPRDKGK

SEQ ID NO: 27575 - protein, 956 aa, Homo sapiens
MTLLLLPLLLASLLASCSCNKANKHKPWIEAEYQGIVMENDNTVLLNPPLFALDKDAPLRYAGEICGFRLHGSGVPFEAVILDKATGEGLIRAKEPVDCEAQKEHTFTIQAYDCGEGPDGANTKKSHKATVHVRVNDVNEFAPVFVERLYRAAVTEGKLYDRILRVEAIDGDCSPQYSQICYYEILTPNTPFLIDNDGNIENTEKLQYSGERLYKFTVTAYDCGKKRAADDAEVEIQVKPTCKPSWQGWNKRIEYAPGAGSLALFPGIRLETCDEPLWNIQATIELQTSHVAKGCDRDNYSERALRKLCGAATGEVDLLPMPGPNANWTAGLSVHYSQDSSLIYWFNGTQAVQVPLGGPSGLGSGPQDSLSDHFTLSFWMKHGVTPNKGKKEEETIVCNTVQNEDGFSHYSLTVHGCRIAFLYWPLLESARPVKFLWKLEQVCDDEWHHYALNLEFPTVTLYTDGISFDPALIHDNGLIHPPRREPALMIGACWTEEKNKEKEKGDNSTDTTQGDPLSIHHYFHGYLAGFSVRSGRLESREVIECLYACREGLDYRDFESLGKGMKVHVNPSQSLLTLEGDDVETFNHALQHVAYMNTLRFATPGVRPLRLTTAVKCFSEESCVSIPEVEGYVVVLQPDAPQILLSGTAHFARPAVDFEGTNGVPLFPDLQITCSISHQVEAKKDESWQGTVTDTRMSDEIVHNLDGCEISLVGDDLDPERESLLLDTTSLQQRGLELTNTSAYLTIAGVESITVYEEILRQARYRLRHGAALYTRKFRLSCSEMNGRYSSNEFIVEVNVLHSMNRVAHPSHVLSSQQFLHRGHQPPPEMAGHSLASSHRNSMIPSAATLIIVVCVGFLVLMVVLGLVRIHSLHRRVSGAGGPPGASSDPKDPDLFWDDSALTIIVNPMESYQNRQSCVTGAVGGQQEDEDSSDSEVADSPSSDERRIIETPPHRY

SEQ ID NO: 27576 - protein, 968 aa, Homo sapiens
MVLGCELSGSTRVVVGVEALLTGASSPLPGVGPANKHKPWIEAEYQGIVMENDNTVLLNPPLFALDKDAPLRYAGEICGFRLHGSGVPFEAVILDKATGEGLIRAKEPVDCEAQKEHTFTIQAYDCGEGPDGANTKKSHKATVHVRVNDVNEFAPVFVERLYRAAVTEGKLYDRILRVEAIDGDCSPQYSQICYYEILTPNTPFLIDNDGNIENTEKLQYSGERLYKFTVTAYDCGKKRAADDAEVEIQVKPTCKPSWQGWNKRIEYAPGAGSLALFPGIRLETCDEPLWNIQATIELQTSHVAKGCDRDNYSERALRKLCGAATGEVDLLPMPGPNANWTAGLSVHYSQDSSLIYWFNGTQAVQVPLGGPSGLGSGPQDSLSDHFTLSFWMKHGVTPNKGKKEEETIVCNTVQNEDGFSHYSLTVHGCRIAFLYWPLLESARPVKFLWKLEQVCDDEWHHYALNLEFPTVTLYTDGISFDPALIHDNGLIHPPRREPALMIGACWTEEKNKEKEKGDNSTDTTQGDPLSIHHYFHGYLAGFSVRSGRLESREVIECLYACREGLDYRDFESLGKGMKVHVNPSQSLLTLEGDDVETFNHALQHVAYMNTLRFATPGVRPLRLTTAVKCFSEESCVSIPEVEGYVVVLQPDAPQILLSGTAHFARPAVDFEGTNGVPLFPDLQITCSISHQVEAKKDESWQGTVTDTRMSDEIVHNLDGCEISLVGDDLDPERESLLLDTTSLQQRGLELTNTSAYLTIAGVESITVYEEILRQARYRLRHGAALYTRKFRLSCSEMNGRYSSNEFIVEVNVLHSMNRVAHPSHVLSSQQFLHRGHQPPPEMAGHSLASSHRNSMIPSAATLIIVVCVGFLVLMVVLGLVRIHSLHRRVSGAGGPPGASSDPKDPDLFWDDSALTIIVNPMESYQNRQSCVTGAVGGQQEDEDSSDSEVADSPSSDERRIIETPPHRY

SEQ ID NO: 27577 - protein, 165 aa, Homo sapiens
MTRLCLPRPEAREDPIPVPPRGLGAGEGSGSPVRPPVSTWGPSWAQLLDSVLWLGALGLTIQAVFSTTGPALLLLLVSFLTFDLLHRPAGHTLPQRKLLTRGQSQGAGEGPGQQEALLLQMGTVSGQLSLQDALLLLLMGLGPLLRACGMPLTLLGLAFCLHPWA

SEQ ID NO: 27578 - protein, 348 aa, Homo sapiens
MPAPPCASCHAARAALRRPLSGQALCGACFCAAFEAEVLHTVLAGRLLPPGAVVAVGASGGKDSTVLAHVLRALAPRLGISLQLVAVDEGIGGYRDAALAAVRRQAARWELPLTVVAYEDLFGGWTMDAVARSTAGSGRSRSCCTFCGVLRRRALEEGARRVGATHIVTGHNADDMAETVLMNFLRGDAGRLARGGGLGSPGEGGALPRCRPLQFASQKEVVLYAHFRRLDYFSEECVYAPEAFRGHARDLLKRLEAARPSAVLDLVHSAERLALAPAARPPRPGACSRCGALASRALCQACALLDGLNRGRPRLAIGKGRRGLDEEATPGTPGDPARPPASKAVPTF

SEQ ID NO: 27579 - protein, 639 aa, Homo sapiens
MNLEKLSKPELLTLFSILEGELEARDLVIEALKAQHRDTFIEERYGKYNISDPLMALQRDFETLKEKNDGEKQPVCTNPLSILKVVMKQCKNMQERMLSQLAAAESRHRKVILDLEEERQRHAQDTAEGDDVTYMLEKERERLTQQLEFEKSQVKKFEKEQKKLSSQLEEERSRHKQLSSMLVLECKKATNKAAEEGQKAGELSLKLEKEKSRVSKLEEELAAERKRGLQTEAQVEKQLSEFDIEREQLRAKLNREENRTKTLKEEMESLKKIVKDLEASHQHSSPNEQLKKPVTVSKGTATEPLMLMSVFCQTESFPAERTHGSNIAKMTNTGLPGPATPAYSYAKTNGHCDPEIQTTRELTAGNNVENQVPPREKSVALAQEKPVENGGCPVGIETPVPMPSPLSSSGSSLSPSSTASSSLTSSPCSSPVLTKRLLGSSASSPGYQSSYQVGINQRFHAARHKFQSQADQDQQASGLQSPPSRDLSPTLIDNSAAKQLARNTVTQVLSRFTSQQGPIKPVSPNSSPFGTDYRNLANTANPRGDTSHSPTPGKVSSPLSPLSPGIKSPTIPRAERGNPPPIPPKKPGLTPSPSATTPLTKTHSQAASLTTAEDLASSCSSNTVVANGKDVELLLPTSS

SEQ ID NO: 27580 - protein, 670 aa, Homo sapiens
MSHLPMKLLRKKIEKRNLKLRQRNLKFQGASNLTLSETQNGDVSEETMGSRKVKKSKQKPMNVGLSETQNGGMSQEAVGNIKVTKSPQKSTVLTNGEAAMQSSNSESKKKKKKKRKMVNDAEPDTKKAKTENKGKSEEESAETTKETENNVEKPDNDEDESEVPSLPLGLTGAFEDTSFASLCNLVNENTLKAIKEMGFTNMTEIQHKSIRPLLEGRDLLAAAKTGSGKTLAFLIPAVELIVKLRFMPRNGTGVLILSPTRELAMQTFGVLKELMTHHVHTYGLIMGGSNRSAEAQKLGNGINIIVATPGRLLDHMQNTPGFMYKNLQCLVIDEADRILDVGFEEELKQIIKLLPTRRQTMLFSATQTRKVEDLARISLKKEPLYVGVDDDKANATVDGLEQGYVVCPSEKRFLLLFTFLKKNRKKKLMVFFSSCMSVKYHYELLNYIDLPVLAIHGKQKQNKRTTTFFQFCNADSGTLLCTDVAARGLDIPEVDWIVQYDPPDDPKEYIHRVGRTARGLNGRGHALLILRPEELGFLRYLKQSKVPLSEFDFSWSKISDIQSQLEKLIEKNYFLHKSAQEAYKSYIRAYDSHSLKQIFNVNNLNLPQVALSFGFKVPPFVDLNVNSNEGKQKKRGGGGGFGYQKTKKVEKSKIFKHISKKSSDSRQFSH

SEQ ID NO: 27581 - protein, 582 aa, Homo sapiens
MEALSRAGQEMSLAALKQHDPYITSIADLTGQVALYTFCPKANQWEKTDIEGTLFVYRRSASPYHGFTIVNRLNMHNLVEPVNKDLEFQLHEPFLLYRNASLSIYSIWFYDKNDCHRIAKLMADVVEEETRRSQQAARDKQSPSQANGCSDHRPIDILEMLSRAKDEYERNQMGDSNISSPGLQPSTQLSNLGSTETLEEMPSGSQDKSAPSGHKHLTVEELFGTSLPKEQPAVVGLDSEEMERLPGDASQKEPNSFLPFPFEQLGGAPQSETLGVPSAAHHSVQPEITTPVLITPASITQSNEKHAPTYTIPLSPVLSPTLPAEAPTAQVPPSLPRNSTMMQAVKTTPRQRSPLLNQPVPELSHASLIANQSPFRAPLNVTNTAGTSLPSVDLLQKLRLTPQHDQIQTQPLGKGAMVASFSPAAGQLATPESFIEPPSKTAAARVAASASLSNMVLAPLQSMQQNQDPEVFVQPKVLSSAIPVAGAPLVTATTTAVSSVLLAPSVFQQTVTRSSDLERKASSPSPLTIGTPESQRKPSIILSKSQLQDTLIHLIKNDSSFLSTLHEVYLQVLTKNKDNHNL

SEQ ID NO: 27582 - protein, 544 aa, Homo sapiens
MEALSRAGQEMSLAALKQHDPYITSIADLTGQVALYTFCPKANQWEKTDIEGTLFVYRRSASPYHGFTIVNRLNMHNLVEPVNKDLEFQLHEPFLLYRNASLSIYSIWFYDKNDCHRIAKLMADVVEEETRRSQQAARDKQSPSQANGCSDHRPIDILEMLSRAKDEYERSAPSGHKHLTVEELFGTSLPKEQPAVVGLDSEEMERLPGDASQKEPNSFLPFPFEQLGGAPQSETLGVPSAAHHSVQPEITTPVLITPASITQSNEKHAPTYTIPLSPVLSPTLPAEAPTAQVPPSLPRNSTMMQAVKTTPRQRSPLLNQPVPELSHASLIANQSPFRAPLNVTNTAGTSLPSVDLLQKLRLTPQHDQIQTQPLGKGAMVASFSPAAGQLATPESFIEPPSKTAAARVAASASLSNMVLAPLQSMQQNQDPEVFVQPKVLSSAIPVAGAPLVTATTTAVSSVLLAPSVFQQTVTRSSDLERKASSPSPLTIGTPESQRKPSIILSKSQLQDTLIHLIKNDSSFLSTLHEVYLQVLTKNKDNHNL

SEQ ID NO: 27583 - protein, 420 aa, Homo sapiens
METKRVEIPGSVLDDLCSRFILHIPSEERDNAIRVCFQIELAHWFYLDFYMQNTPGLPQCGIRDFAKAVFSHCPFLLPQGEDVEKVLDEWKEYKMGVPTYGAIILDETLENVLLVQGYLAKSGWGFPKGKVNKEEAPHDCAAREVFEETGFDIKDYICKDDYIELRINDQLARLYIIPGIPKDTKFNPKTRREIRNIEWFSIEKLPCHRNDMTPKSKLGLAPNKFFMAIPFIRPLRDWLSRRFGDSSDSDNGFSSTGSTPAKPTVEKLSRTKFRHSQQLFPDGSPGDQWVKHRQPLQQKPYNNHSEMSDLLKGKNQSMRGNGRKQYQDSPNQKKRTNGLQPAKQQNSLMKCEKKLHPRKLQDNFETDAVYDLPSSSEDQLLEHAEGQPVACNGHCKFPFSSRAFLSFKFDHNAIMKILDL

SEQ ID NO: 27584 - protein, 385 aa, Homo sapiens
METKRVEIPGSVLDDLCSRFILHIPSEERDNAIRVCFQIELAHWFYLDFYMQNTPGLPQCGIRDFAKAVFSHCPFLLPQGEDVEKVLDEWKEYKMGVPTYGAIILDETLENVLLVQGYLAKSGWGFPKGKVNKEEAPHDCAAREVFEETGFDIKDYICKDDYIELRINDQLARLYIIPGIPKDTKFNPKTRREIRNIEWFSIEKLPCHRNDMTPKSKLGLAPNKFFMAIPFIRPLRDWLSRRFGDSSDSDNGFSSTGSTPAKPTVEKLSRTKFRHSQQLFPDGSPGDQWVKHRQPLQQKPYNNHSEMSDLLKGKKCEKKLHPRKLQDNFETDAVYDLPSSSEDQLLEHAEGQPVACNGHCKFPFSSRAFLSFKFDHNAIMKILDL

SEQ ID NO: 27585 - protein, 617 aa, Homo sapiens
MSWGTELWDQFDNLEKHTQWGIDILEKYIKFVKERTEIELSYAKQLRNLSKKYQPKKNSKEEEEYKYTSCKAFISNLNEMNDYAGQHEVISENMASQIIVDLARYVQELKQERKSNFHDGRKAQQHIETCWKQLESSKRRFERDCKEADRAQQYFEKMDADINVTKADVEKARQQAQIRHQMAEDSKADYSSILQKFNHEQHEYYHTHIPNIFQKIQEMEERRIVRMGESMKTYAEVDRQVIPIIGKCLDGIVKAAESIDQKNDSQLVIEAYKSGFEPPGDIEFEDYTQPMKRTVSDNSLSNSRGEGKPDLKFGGKSKGKLWPFIKKNKLMSLLTSPHQPPPPPPASASPSAVPNGPQSPKQQKEPLSHRFNEFMTSKPKIHCFRSLKRGLSLKLGATPEDFSNLPPEQRRKKLQQKVDELNKEIQKEMDQRDAITKMKDVYLKNPQMGDPASLDHKLAEVSQNIEKLRVETQKFEAWLAEVEGRLPARSEQARRQSGLYDSQNPPTVNNCAQDRESPDGSYTEEQSQESEMKVLATDFDDEFDDEEPLPAIGTCKALYTFEGQNEGTISVVEGETLYVIEEDKGDGWTRIRRNEDEEGYVPTSYVEVCLDKNAKDS

SEQ ID NO: 27586 - protein, 616 aa, Homo sapiens
MSWGTELWDQFDNLEKHTQWGIDILEKYIKFVKERTEIELSYAKQLRNLSKKYQPKKNSKEEEEYKYTSCKAFISNLNEMNDYAGQHEVISENMASQIIVDLARYVQELKQERKSNFHDGRKAQQHIETCWKQLESSKRRFERDCKEADRAQQYFEKMDADINVTKADVEKARQQAQIRHQMAEDSKADYSSILQKFNHEQHEYYHTHIPNIFQKIQEMEERRIVRMGESMKTYAEVDRQVIPIIGKCLDGIVKAAESIDQKNDSQLVIEAYKSGFEPPGDIEFEDYTQPMKRTVSDNSLSNSRGEGKPDLKFGGKSKGKLWPFIKKNKLMSLLTSPHQPPPPPPASASPSAVPNGPQSPKQQKEPLSHRFNEFMTSKPKIHCFRSLKRGGATPEDFSNLPPEQRRKKLQQKVDELNKEIQKEMDQRDAITKMKDVYLKNPQMGDPASLDHKLAEVSQNIEKLRVETQKFEAWLAEVEGRLPARSEQARRQSGLYDSQNPPTVNNCAQDRESPDGSYTEEQSQESEMKVLATDFDDEFDDEEPLPAIGTCKALYTFEGQNEGTISVVEGETLYVIEEDKGDGWTRIRRNEDEEGYVPTSYVEVCLDKNAKGAKTYI

SEQ ID NO: 27587 - protein, 592 aa, Homo sapiens
MSWGTELWDQFDNLEKHTQWGIDILEKYIKFVKERTEIELSYAKQLRNLSKKYQPKKNSKEEEEYKYTSCKAFISNLNEMNDYAGQHEVISENMASQIIVDLARYVQELKQERKSNFHDGRKAQQHIETCWKQLESSKRRFERDCKEADRAQQYFEKMDADINVTKADVEKARQQAQIRHQMAEDSKADYSSILQKFNHEQHEYYHTHIPNIFQKIQEMEERRIVRMGESMKTYAEVDRQVIPIIGKCLDGIVKAAESIDQKNDSQLVIEAYKSGFEPPGDIEFEDYTQPMKRTVSDNSLSNSRGEGKPDLKFGGKSKGKLWPFIKKNKSPKQQKEPLSHRFNEFMTSKPKIHCFRSLKRGLSLKLGATPEDFSNLPPEQRRKKLQQKVDELNKEIQKEMDQRDAITKMKDVYLKNPQMGDPASLDHKLAEVSQNIEKLRVETQKFEAWLAEVEGRLPARSEQARRQSGLYDSQNPPTVNNCAQDRESPDGSYTEEQSQESEMKVLATDFDDEFDDEEPLPAIGTCKALYTFEGQNEGTISVVEGETLYVIEEDKGDGWTRIRRNEDEEGYVPTSYVEVCLDKNAKGAKTYI

SEQ ID NO: 27588 - protein, 551 aa, Homo sapiens
MSWGTELWDQFDNLEKHTQWGIDILEKYIKFVKERTEIELSYAKQLRNLSKKYQPKKNSKEEEEYKYTSCKAFISNLNEMNDYAGQHEVISENMASQIIVDLARYVQELKQERKSNFHDGRKAQQHIETCWKQLESSKRRFERDCKEADRAQQYFEKMDADINVTKADVEKARQQAQIRHQMAEDSKADYSSILQKFNHEQHEYYHTHIPNIFQKIQEMEERRIVRMGESMKTYAEVDRQVIPIIGKCLDGIVKAAESIDQKNDSQLVIEAYKSGFEPPGDIEFEDYTQPMKRTVSDNSLSNSRGEGKPDLKFGGKSKGKLWPFIKKNLGATPEDFSNLPPEQRRKKLQQKVDELNKEIQKEMDQRDAITKMKDVYLKNPQMGDPASLDHKLAEVSQNIEKLRVETQKFEAWLAEVEGRLPARSEQARRQSGLYDSQNPPTVNNCAQDRESPDGSYTEEQSQESEMKVLATDFDDEFDDEEPLPAIGTCKALYTFEGQNEGTISVVEGETLYVIEEDKGDGWTRIRRNEDEEGYVPTSYVEVCLDKNAKDS

SEQ ID NO: 27589 - protein, 612 aa, Homo sapiens
MSWGTELWDQFDNLEKHTQWGIDILEKYIKFVKERTEIELSYAKQLRNLSKKYQPKKNSKEEEEYKYTSCKAFISNLNEMNDYAGQHEVISENMASQIIVDLARYVQELKQERKSNFHDGRKAQQHIETCWKQLESSKRRFERDCKEADRAQQYFEKMDADINVTKADVEKARQQAQIRHQMAEDSKADYSSILQKFNHEQHEYYHTHIPNIFQKIQEMEERRIVRMGESMKTYAEVDRQVIPIIGKCLDGIVKAAESIDQKNDSQLVIEAYKSGFEPPGDIEFEDYTQPMKRTVSDNSLSNSRGEGKPDLKFGGKSKGKLWPFIKKNKLMSLLTSPHQPPPPPPASASPSAVPNGPQSPKQQKEPLSHRFNEFMTSKPKIHCFRSLKRGGATPEDFSNLPPEQRRKKLQQKVDELNKEIQKEMDQRDAITKMKDVYLKNPQMGDPASLDHKLAEVSQNIEKLRVETQKFEAWLAEVEGRLPARSEQARRQSGLYDSQNPPTVNNCAQDRESPDGSYTEEQSQESEMKVLATDFDDEFDDEEPLPAIGTCKALYTFEGQNEGTISVVEGETLYVIEEDKGDGWTRIRRNEDEEGYVPTSYVEVCLDKNAKDS

SEQ ID NO: 27590 - protein, 364 aa, Homo sapiens
MGTRGPSAPVDTTPAKTIVVYRNGDPFYVGKKFVLSRRRAATFEALLEQLTEQVDVPFGVRRLFTPTRGHRVLGLDALQAGGKYVAAGRERFKELDYIHIVPRKPAKIRKLKEIKPVVHCDINVPSKWQTYHRISRHINVFTNGRLFIPPAKIIIPKFSLSDWDIVLATIGEKVFPLGGVRKLFTMNGHLLGDSKDLQDNHFYVAVGLETFKYFPYWKSPRVPSEVQQRYANVEKNSQRKKKVDSKGKEPCKYDGIPPKTQDSVYYAKEEKKKTLAEPLVQRGAEGDVYKAPTPSKETQGALDVKEEHNVQLEVPVDQRQAEIVKEDEEIHENTPDFEGNKDKEDARLCEDVERKMAREWKPVD

SEQ ID NO: 27591 - protein, 648 aa, Homo sapiens
MSHHGGAPKASTWVVASRRSSTVSRAPERRPAEELNRTGPEGYSVGRGGRWRGTSRPPEAVAAGHEELPLCFALKSHFVGAVIGRGGSKIKNIQSTTNTTIQIIQEQPESLVKIFGSKAMQTKAKAVIDNFVKKLEENYNSECGIDTAFQPSVGKDGSTDNNVVAGDRPLIDWDQIREEGLKWQKTKWADLPPIKKNFYKESTATSAMSKVEADSWRKENFNITWDDLKDGEKRPIPNPTCTFDDAFQCYPEVMENIKKAGFQKPTPIQSQAWPIVLQGIDLIGVAQTGTGKTLCYLMPGFIHLVLQPSLKGQRNRPGMLVLTPTRELALQVEGECCKYSYKGLRSVCVYGGGNRDEQIEELKKGVDIIIATPGRLNDLQMSNFVNLKNITYLVLDEADKMLDMGFEPQIMKILLDVRPDRQTVMTSATWPHSVHRLAQSYLKEPMIVYVGTLDLVAVSSVKQNIIVTTEEEKWSHMQTFLQSMSSTDKVIVFVSRKAVADHLSSDLILGNISVESLHGDREQRDREKALENFKTGKVRILIATDLASRGLDVHDVTHVYNFDFPRNIEEYVHRIGRTGRAGRTGVSITTLTRNDWRVASELINILERANQSIPEELVSMAERFKAHQQKREMERKMERPQGRPKKFH

SEQ ID NO: 27592 - protein, 195 aa, Homo sapiens
MSHHGGAPKASTWVVASRRSSTVSRAPERRPAEELNRTGPEGYSVGRGGRWRGTSRPPEAVAAGHEELPLCFALKSHFVGAVIGRGGSKIKNIQSTTNTTIQIIQEQPESLVKIFGSKAMQTKAKAVIDNFVKKLEENYNSECGIDTAFQPSVGKDGSTDNNVVAGDRPLIDWDQIREEGLKWQKTKWAGKKILI

SEQ ID NO: 27593 - protein, 1177 aa, Homo sapiens
MDVYPPRRQGLPRARSPGGSSRGSPSVSCSRLRQVQSILTQSSKSRPDGILCILGIDSRYNEGCRELANYLLFGLYNQNTSDFEKTGFSEEVLDDVIILIKSDSVHLYCNPVNFRYLLPYVAHWRNLHFHCMTENEYEDEEAAEEFKITSFVDMVRDCSRIGIPYSSQGHLQIFDMFVVEKWPIVQAFALEGIGGDGFFTMKYELQDVSLNLWNVYSKMDPMSLESLLSDDLVAFEHQWTSFFANFDTEIPFLLELSESQAGEPFRSYFSHGMISSHITENSPNRQPFVLFGNHSTRENLNAGNFNFPSEGHLVRSTGPGGSFAKHMVAQCVSPKGPLACSRTYFFGATHVPYLGGDSKLPKKTEQIRLLSQIYAAVIEAVLAGIACYAKTSSLTKAKEVAEQTLGSGLDSFELIPFKAALRSKMTFHIHAVNNQGRIVPLDSEDSLSFVKTACMAVYDIPDLLGGNGCLGSVVFSESFLTSQILVKEKDGTVTTETSSVVLTAAVPRFCSWLVEDNEVKLSEKTQQAVRGDESFLGTYLTGGEGAYLYSSNLQSWPEEGNVHFFSSGLLFSHCRHRSIIISKDHMNSISFYDGDSTSTVAALLIDFKSSLLPHLPVHFHGSSNFLMIALFPKSKIYQAFYSEVFSLWKQQDNSGISLKVIQEDGLSVEQKRLHSSAQKLFSALSQPAGEKRSSLKLLSAKLPELDWFLQHFAISSISQEPVMRTHLPVLLQQAEINTTHRIESDKVIISIVTGLPGCHASELCAFLVTLHKECGRWMVYRQIMDSSECFHAAHFQRYLSSALEAQQNRSARQSAYIRKKTRLLVVLQGYTDVIDVVQALQTHPDSNVKASFTIGAITACVEPMSCYMEHRFLFPKCLDQCSQGLVSNVVFTSHTTEQRHPLLVQLQSLIRAANPAAAFILAENGIVTRNEDIELILSENSFSSPEMLRSRYLMYPGWYEGKLNAGSVYPLMVQICVWFGRPLEKTRFVAKCKAIQSSIKPSPFSGNIYHILGKVKFSDSERTMEVCYNTLANSLSIMPVLEGPTPPPDSKSVSQDSSGQQECYLVFIGCSLKEDSIKDWLRQSAKQKPQRKALKTRGMLTQQEIRSIHVKRHLEPLPAGYFYNGTQFVNFFGDKTDFHPLMDQFMNDYVEEANREIEKYNQELEQQEYHDLFELKP

SEQ ID NO: 27594 - protein, 1204 aa, Homo sapiens
MYVTMMMTDQIPLELPPLLNGEVAMMPHLVNGDAAQQVILVQVNPGETFTIRAEDGTLQCIQGPAEVPMMSPNGSIPPIHVPPGYISQVIEDSTGVRRVVVTPQSPECYPPSYPSAMSPTHHLPPYLTHHPHFIHNSHTAYYPPVTGPGDMPPQFFPQHHLPHTIYGEQEIIPFYGMSTYITREDQYSKPPHKKLKDRQIDRQNRLNSPPSSIYKSSCTTVYNGYGKGHSGGSGGGGSGSGPGIKKTERRARSSPKSNDSDLQEYELEVKRVQDILSGIEKPQVSNIQARAVVLSWAPPVGLSCGPHSGLSFPYSYEVALSDKGRDGKYKIIYSGEELECNLKDLRPATDYHVRVYAMYNSVKGSCSEPVSFTTHSCAPECPFPPKLAHRSKSSLTLQWKAPIDNGSKITNYLLEWDEGKRNSGFRQCFFGSQKHCKLTKLCPAMGYTFRLAARNDIGTSGYSQEVVCYTLGNIPQMPSAPRLVRAGITWVTLQWSKPEGCSPEEVITYTLEIQEDENDNLFHPKYTGEDLTCTVKNLKRSTQYKFRLTASNTEGKSCPSEVLVCTTSPDRPGPPTRPLVKGPVTSHGFSVKWDPPKDNGGSEILKYLLEITDGNSEANQWEVAYSGSATEYTFTHLKPGTLYKLRACCISTGGHSQCSESLPVRTLSIAPGQCRPPRVLGRPKHKEVHLEWDVPASESGCEVSEYSVEMTEPEDVASEVYHGPELECTVGNLLPGTVYRFRVRALNDGGYGPYSDVSEITTAAGPPGQCKAPCISCTPDGCVLVGWESPDSSGADISEYRLEWGEDEESLELIYHGTDTRFEIRDLLPAAQYCCRLQAFNQAGAGPYSELVLCQTPASAPDPVSTLCVLEEEPLDAYPDSPSACLVLNWEEPCNNGSEILAYTIDLGDTSITVGNTTMHVMKDLLPETTYRIRIQAINEIGAGPFSQFIKAKTRPLPPLPPRLECAAAGPQSLKLKWGDSNSKTHAAEDIVYTLQLEDRNKRFISIYRGPSHTYKVQRLTEFTCYSFRIQAASEAGEGPFSETYTFSTTKSVPPTIKAPRVTQLEGNSCEILWETVPSMKGDPVNYILQVLVGRESEYKQVYKGEEATFQISGLQTNTDYRFRVCACRRCLDTSQELSGAFSPSAAFVLQRSEVMLTGDMGSLDDPKMKSMMPTDEQFAAIIVLGFATLSILFAFILQYFLMK

SEQ ID NO: 27595 - protein, 629 aa, Homo sapiens
MYVTMMMTDQIPLELPPLLNGEVAMMPHLVNGDAAQQVILVQVNPGETFTIRAEDGTLQCIQGPAEVPMMSPNGSIPPIHVPPGYISQVIEDSTGVRRVVVTPQSPECYPPSYPSAMSPTHHLPPYLTHHPHFIHNSHTAYYPPVTGPGDMPPQFFPQHHLPHTIYGEQEIIPFYGMSTYITREDQYSKPPHKKLKDRQIDRQNRLNSPPSSIYKSSCTTVYNGYGKGHSGGSGGGGSGSGPGIKKTERRARSSPKSNDSDLQEYELEVKRVQDILSGIEKPQVSNIQARAVVLSWAPPVGLSCGPHSGLSFPYSYEVALSDKGRDGKYKIIYSGEELECNLKDLRPATDYHVRVYAMYNSVKGSCSEPVSFTTHSCAPECPFPPKLAHRSKSSLTLQWKAPIDNGSKITNYLLEWDEGKRNSGFRQCFFGSQKHCKLTKLCPAMGYTFRLAARNDIGTSGYSQEVVCYTLGNIPQMPSAPRLVRAGITWVTLQWSKPEGCSPEEVITYTLEIQEDENDNLFHPKYTGEDLTCTVKNLKRSTQYKFRLTASNTEGKSCPSEVLVCTTSPDRPGPPTRPLVKGPVTSHGFSVKWDPPKDNGGSEILKYLLEITDGNSEGEVFGNCFIQIQ

SEQ ID NO: 27596 - protein, 71 aa, Homo sapiens
MYVTMMMTDQIPLELPPLLNGEVAMMPHLVNGDAAQQVILVQVNPGETFTIRAEDGTLQCIQDEVVKRACD

SEQ ID NO: 27597 - protein, 1189 aa, Homo sapiens
MSAGGSARKSTGRSSYYYRLLRRPRLQRQRSRSRSRTRPARESPQERPGSRRSLPGSLSEKSPSMEPSAATPFRVTGFLSRRLKGSIKRTKSQPKLDRNHSFRHILPGFRSAAAAAADNERSHLMPRLKESRSHESLLSPSSAVEALDLSMEEEVVIKPVHSSILGQDYCFEVTTSSGSKCFSCRSAAERDKWMENLRRAVHPNKDNSRRVEHILKLWVIEAKDLPAKKKYLCELCLDDVLYARTTGKLKTDNVFWGEHFEFHNLPPLRTVTVHLYRETDKKKKKERNSYLGLVSLPAASVAGRQFVEKWYPVVTPNPKGGKGPGPMIRIKARYQTITILPMEMYKEFAEHITNHYLGLCAALEPILSAKTKEEMASALVHILQSTGKVKDFLTDLMMSEVDRCGDNEHLIFRENTLATKAIEEYLKLVGQKYLQDALGEFIKALYESDENCEVDPSKCSAADLPEHQGNLKMCCELAFCKIINSYCVFPRELKEVFASWRQECSSRGRPDISERLISASLFLRFLCPAIMSPSLFNLLQEYPDDRTARTLTLIAKVTQNLANFAKFGSKEEYMSFMNQFLEHEWTNMQRFLLEISNPETLSNTAGFEGYIDLGRELSSLHSLLWEAVSQLEQSIVSKLGPLPRILRDVHTALSTPGSGQLPGTNDLASTPGSGSSSISAGLQKMVIENDLSGLIDFTRLPSPTPENKDLFFVTRSSGVQPSPARSSSYSEANEPDLQMANGGKSLSMVDLQDARTLDGEAGSPAGPDVLPTDGQAAAAQLVAGWPARATPVNLAGLATVRRAGQTPTTPGTSEGAPGRPQLLAPLSFQNPVYQMAAGLPLSPRGLGDSGSEGHSSLSSHSNSEELAAAAKLGSFSTAAEELARRPGELARRQMSLTEKGGQPTVPRQNSAGPQRRIDQPPPPPPPPPPAPRGRTPPNLLSTLQYPRPSSGTLASASPDWVGPSTRLRQQSSSSKGDSPELKPRAVHKQGPSPVSPNALDRTAAWLLTMNAQLLEDEGLGPDPPHRDRLRSKDELSQAEKDLAVLQDKLRISTKKLEEYETLFKCQEETTQKLVLEYQARLEEGEERLRRQQEDKDIQMKGIISRLMSVEEELKKDHAEMQAAVDSKQKIIDAQEKRIASLDAANARLMSALTQLKERYSMQARNGISPTNPTKLQITENGEFRNSSNC

SEQ ID NO: 27598 - protein, 1065 aa, Homo sapiens
MPRLKESRSHESLLSPSSAVEALDLSMEEEVVIKPVHSSILGQDYCFEVTTSSGSKCFSCRSAAERDKWMENLRRAVHPNKDNSRRVEHILKLWVIEAKDLPAKKKYLCELCLDDVLYARTTGKLKTDNVFWGEHFEFHNLPPLRTVTVHLYRETDKKKKKERNSYLGLVSLPAASVAGRQFVEKWYPVVTPNPKGGKGPGPMIRIKARYQTITILPMEMYKEFAEHITNHYLGLCAALEPILSAKTKEEMASALVHILQSTGKVKDFLTDLMMSEVDRCGDNEHLIFRENTLATKAIEEYLKLVGQKYLQDALGEFIKALYESDENCEVDPSKCSAADLPEHQGNLKMCCELAFCKIINSYCVFPRELKEVFASWRQECSSRGRPDISERLISASLFLRFLCPAIMSPSLFNLLQEYPDDRTARTLTLIAKVTQNLANFAKFGSKEEYMSFMNQFLEHEWTNMQRFLLEISNPETLSNTAGFEGYIDLGRELSSLHSLLWEAVSQLEQSIVSKLGPLPRILRDVHTALSTPGSGQLPGTNDLASTPGSGSSSISAGLQKMVIENDLSGLIDFTRLPSPTPENKDLFFVTRSSGVQPSPARSSSYSEANEPDLQMANGGKSLSMVDLQDARTLDGEAGSPAGPDVLPTDGQAAAAQLVAGWPARATPVNLAGLATVRRAGQTPTTPGTSEGAPGRPQLLAPLSFQNPVYQMAAGLPLSPRGLGDSGSEGHSSLSSHSNSEELAAAAKLGSFSTAAEELARRPGELARRQMSLTEKGGQPTVPRQNSAGPQRRIDQPPPPPPPPPPAPRGRTPPNLLSTLQYPRPSSGTLASASPDWVGPSTRLRQQSSSSKGDSPELKPRAVHKQGPSPVSPNALDRTAAWLLTMNAQLLEDEGLGPDPPHRDRLRSKDELSQAEKDLAVLQDKLRISTKKLEEYETLFKCQEETTQKLVLEYQARLEEGEERLRRQQEDKDIQMKGIISRLMSVEEELKKDHAEMQAAVDSKQKIIDAQEKRIASLDAANARLMSALTQLKERYSMQARNGISPTNPTKLQITENGEFRNSSNC

SEQ ID NO: 27599 - protein, 967 aa, Homo sapiens
MENLRRAVHPNKDNSRRVEHILKLWVIEAKDLPAKKKYLCELCLDDVLYARTTGKLKTDNVFWGEHFEFHNLPPLRTVTVHLYRETDKKKKKERNSYLGLVSLPAASVAGRQFVEKWYPVVTPNPKGGKGPGPMIRIKARYQTITILPMEMYKEFAEHITNHYLGLCAALEPILSAKTKEEMASALVHILQSTGKVKDFLTDLMMSEVDRCGDNEHLIFRENTLATKAIEEYLKLVGQKYLQDALGEFIKALYESDENCEVDPSKCSAADLPEHQGNLKMCCELAFCKIINSYCVFPRELKEVFASWRQECSSRGRPDISERLISASLFLRFLCPAIMSPSLFNLLQEYPDDRTARTLTLIAKVTQNLANFAKFGSKEEYMSFMNQFLEHEWTNMQRFLLEISNPETLSNTAGFEGYIDLGRELSSLHSLLWEAVSQLEQSIVSKLGPLPRILRDVHTALSTPGSGQLPGTNDLASTPGSGSSSISAGLQKMVIENDLSGLIDFTRLPSPTPENKDLFFVTRSSGVQPSPARSSSYSEANEPDLQMANGGKSLSMVDLQDARTLDGEAGSPAGPDVLPTDGQAAAAQLVAGWPARATPVNLAGLATVRRAGQTPTTPGTSEGAPGRPQLLAPLSFQNPVYQMAAGLPLSPRGLGDSGSEGHSSLSSHSNSEELAAAAKLGSFSTAAEELARRPGELARRQMSLTEKGGQPTVPRQNSAGPQRRIDQPPPPPPPPPPAPRGRTPPNLLSTLQYPRPSSGTLASASPDWVGPSTRLRQQSSSSKGDSPELKPRAVHKQGPSPVSPNALDRTAAWLLTMNAQLLEDEGLGPDPPHRDRLRSKDELSQAEKDLAVLQDKLRISTKKLEEYETLFKCQEETTQKLVLEYQARLEEGEERLRRQQEDKDIQMKGIISRLMSVEEELKKDHAEMQAAVDSKQKIIDAQEKRIASLDAANARLMSALTQLKESMH

SEQ ID NO: 27600 - protein, 1036 aa, Homo sapiens
MPRLKESRSHESLLSPSSAVEALDLSMEEEVVIKPVHSSILGQDYCFEVTTSSGSKCFSCRSAAERDKWMENLRRAVHPNKDNSRRVEHILKLWVIEAKDLPAKKKYLCELCLDDVLYARTTGKLKTDNVFWGEHFEFHNLPPLRTVTVHLYRETDKKKKKERNSYLGLVSLPAASVAGRQFVEKWYPVVTPNPKGGKGPGPMIRIKARYQTITILPMEMYKEFAEHITNHYLGLCAALEPILSAKTKEEMASALVHILQSTGKVKDFLTDLMMSEVDRCGDNEHLIFRENTLATKAIEEYLKLVGQKYLQDALGEFIKALYESDENCEVDPSKCSAADLPEHQGNLKMCCELAFCKIINSYCVFPRELKEVFASWRQECSSRGRPDISERLISASLFLRFLCPAIMSPSLFNLLQEYPDDRTARTLTLIAKVTQNLANFAKFGSKEEYMSFMNQFLEHEWTNMQRFLLEISNPETLSNTAGFEGYIDLGRELSSLHSLLWEAVSQLEQSIVSKLGPLPRILRDVHTALSTPGSGQLPGTNDLASTPGSGSSSISAGLQKMVIENDLSGLIDFTRLPSPTPENKDLFFVTRSSGVQPSPARSSSYSEANEPDLQMANGGKSLSMVDLQDARTLDGEAGSPAGPDVLPTDGQAAAAQLVAGWPARATPVNLAGLATVRRAGQTPTTPGTSEGAPGRPQLLAPLSFQNPVYQMAAGLPLSPRGLGDSGSEGHSSLSSHSNSEELAAAAKLGSFSTAAEELARRPGELARRQMSLTEKGGQPTVPRQNSAGPQRRIDQPPPPPPPPPPAPRGRTPPNLLSTLQYPRPSSGTLASASPDWVGPSTRLRQQSSSSKGDSPELKPRAVHKQGPSPVSPNALDRTAAWLLTMNAQLLEDEGLGPDPPHRDRLRSKDELSQAEKDLAVLQDKLRISTKKLEEYETLFKCQEETTQKLVLEYQARLEEGEERLRRQQEDKDIQMKGIISRLMSVEEELKKDHAEMQAAVDSKQKIIDAQEKRIASLDAANARLMSALTQLKESMH

SEQ ID NO: 27601 - protein, 1132 aa, Homo sapiens
MEPDSLLDQDDSYESPQERPGSRRSLPGSLSEKSPSMEPSAATPFRVTGFLSRRLKGSIKRTKSQPKLDRNHSFRHILPGFRSAAAAAADNERSHLMPRLKESRSHESLLSPSSAVEALDLSMEEEVVIKPVHSSILGQDYCFEVTTSSGSKCFSCRSAAERDKWMENLRRAVHPNKDNSRRVEHILKLWVIEAKDLPAKKKYLCELCLDDVLYARTTGKLKTDNVFWGEHFEFHNLPPLRTVTVHLYRETDKKKKKERNSYLGLVSLPAASVAGRQFVEKWYPVVTPNPKGGKGPGPMIRIKARYQTITILPMEMYKEFAEHITNHYLGLCAALEPILSAKTKEEMASALVHILQSTGKVKDFLTDLMMSEVDRCGDNEHLIFRENTLATKAIEEYLKLVGQKYLQDALGEFIKALYESDENCEVDPSKCSAADLPEHQGNLKMCCELAFCKIINSYCVFPRELKEVFASWRQECSSRGRPDISERLISASLFLRFLCPAIMSPSLFNLLQEYPDDRTARTLTLIAKVTQNLANFAKFGSKEEYMSFMNQFLEHEWTNMQRFLLEISNPETLSNTAGFEGYIDLGRELSSLHSLLWEAVSQLEQSIVSKLGPLPRILRDVHTALSTPGSGQLPGTNDLASTPGSGSSSISAGLQKMVIENDLSGLIDFTRLPSPTPENKDLFFVTRSSGVQPSPARSSSYSEANEPDLQMANGGKSLSMVDLQDARTLDGEAGSPAGPDVLPTDGQAAAAQLVAGWPARATPVNLAGLATVRRAGQTPTTPGTSEGAPGRPQLLAPLSFQNPVYQMAAGLPLSPRGLGDSGSEGHSSLSSHSNSEELAAAAKLGSFSTAAEELARRPGELARRQMSLTEKGGQPTVPRQNSAGPQRRIDQPPPPPPPPPPAPRGRTPPNLLSTLQYPRPSSGTLASASPDWVGPSTRLRQQSSSSKGDSPELKPRAVHKQGPSPVSPNALDRTAAWLLTMNAQLLEDEGLGPDPPHRDRLRSKDELSQAEKDLAVLQDKLRISTKKLEEYETLFKCQEETTQKLVLEYQARLEEGEERLRRQQEDKDIQMKGIISRLMSVEEELKKDHAEMQAAVDSKQKIIDAQEKRIASLDAANARLMSALTQLKESMH

SEQ ID NO: 27602 - protein, 393 aa, Homo sapiens
MDPKRSQKESVLITGGSGYFGFRLGCALNQNGVHVILFDISSPAQTIPEGIKFIQGDIRHLSDVEKAFQDADVTCVFHIASYGMSGREQLNRNLIKEVNVRGTDNILQVCQRRRVPRLVYTSTFNVIFGGQVIRNGDESLPYLPLHLHPDHYSRTKSIAEQKVLEANATPLDRGDGVLRTCALRPAGIYGPGEQRHLPRIVSYIEKGLFKFVYGDPRSLVEFVHVDNLVQAHILASEALRADKGHIASGQPYFISDGRPVNNFEFFRPLVEGLGYTFPSTRLPLTLVYCFAFLTEMVHFILGRLYNFQPFLTRTEVYKTGVTHYFSLEKAKKELGYKAQPFDLQEAVEWFKAHGHGRSSGSRDSECFVWDGLLVFLLIIAVLMWLPSSVILSL

SEQ ID NO: 27603 - protein, 240 aa, Homo sapiens
MTSLPCPLPGRDASKAVFPDLAPVPSVAAAYPLGLSPTTAASPNLSYSRPYGHLLSYPYTEPANPGDSYLSCQQPAALSQPLCGPAEHPQELEADSEKPRLSPEPSERRPQAPAKKLRKPRTIYSSLQLQHLNQRFQHTQYLALPERAQLAAQLGLTQTQVKIWFQNKRSKYKKLLKQNSGGQEGDFPGRTFSVSPCSPPLPSLWDLPKAGTLPTSGYGNSFGAWYQHHSSDVLASPQMM

SEQ ID NO: 27604 - protein, 168 aa, Homo sapiens
MKLSVLPPRSLLAPYTVLCCPPDSEKPRLSPEPSERRPQAPAKKLRKPRTIYSSLQLQHLNQRFQHTQYLALPERAQLAAQLGLTQTQVKIWFQNKRSKYKKLLKQNSGGQEGDFPGRTFSVSPCSPPLPSLWDLPKAGTLPTSGYGNSFGAWYQHHSSDVLASPQMM

SEQ ID NO: 27605 - protein, 114 aa, Homo sapiens
MKLSVLPPRSLLAPYTVLCCPPDSEKPRLSPEPSERRPQAPAKKLRKPRTIYSSLQLQHLNQRFQHTQYLALPERAQLAAQLGLTQTQVGPVSSFPISHLPWFSGNSSPSPSCE

SEQ ID NO: 27606 - protein, 397 aa, Homo sapiens
MVKETTYYDVLGVKPNATQEELKKAYRKLALKYHPDKNPNEGEKFKQISQAYEVLSDAKKRELYDKGGEQAIKEGGAGGGFGSPMDIFDMFFGGGGRMQRERRGKNVVHQLSVTLEDLYNGATRKLALQKNVICDKCEGRGGKKGAVECCPNCRGTGMQIRIHQIGPGMVQQIQSVCMECQGHGERISPKDRCKSCNGRKIVREKKILEVHIDKGMKDGQKITFHGEGDQEPGLEPGDIIIVLDQKDHAVFTRRGEDLFMCMDIQLVEALCGFQKPISTLDNRTIVITSHPGQIVKHGDIKCVLNEGMPIYRRPYEKGRLIIEFKVNFPENGFLSPDKLSLLEKLLPERKEVEETDEMDQVELVDFDPNQERRRHYNGEAYEDDEHHPRGGVQCQTS

SEQ ID NO: 27607 - protein, 331 aa, Homo sapiens
MVKETTYYDVLGVKPNATQEELKKAYRKLALKYHPDKNPNEGEKFKQISQAYEVLSDAKKRELYDKGGEQAIKEGGAGGGFGSPMDIFDMFFGGGGRMQRERRGKNVVHQLSVTLEDLYNGATRKLALQKNVICDKCEGRGGKKGAVECCPNCRGTGMQIRIHQIGPGMVQQIQSVCMECQGHGERISPKDRCKSCNGRKIVREKKILEVHIDKGMKDGQKITFHGEGDQEPGLEPGDIIIVLDQKDHAVFTRRGEDLFMCMDIQLVEALCGFQKPISTLDNRTIVITSHPGQIVKHGDIKCVLNEGMPIYRRPYEKGRLIIEFKVSCNVL

SEQ ID NO: 27608 - protein, 467 aa, Homo sapiens
MATGADVRDILELGGPEGDAASGTISKKDIINPDKKKSKKSSETLTFKRPEGMHREVYALLYSDKKDAPPLLPSDTGQGYRTVKAKLGSKKVRPWKWMPFTNPARKDGAMFFHWRRAAEEGKDYPFARFNKTVQVPVYSEQEYQLYLHDDAWTKAETDHLFDLSRRFDLRFVVIHDRYDHQQFKKRSVEDLKERYYHICAKLANVRAVPGTDLKIPVFDAGHERRRKEQLERLYNRTPEQVAEEEYLLQELRKIEARKKEREKRSQDLQKLITAADTTAEQRRTERKAPKKKLPQKKEAEKPAVPETAGIKFPDFKSAGVTLRSQRMKLPSSVGQKKIKALEQMLLELGVELSPTPTEELVHMFNELRSDLVLLYELKQACANCEYELQMLRHRHEALARAGVLGGPATPASGPGPASAEPAVTEPGLGPDPKDTIIDVVGAPLTPNSRKRRESASSSSSVKKAKKP

SEQ ID NO: 27609 - protein, 312 aa, Homo sapiens
MESALPAAGFLYWVGAGTVAYLALRISYSLFTALRVWGVGNEAGVGPGLGEWAVVTGSTDGIGKSYAEELAKHGMKVVLISRSKDKLDQVSSEIKEKFKVETRTIAVDFASEDIYDKIKTGLAGLEIGILVNNVGMSYEYPEYFLDVPDLDNVIKKMININILSVCKMTQLVLPGMVERSKGAILNISSGSGMLPVPLLTIYSATKTFVDFFSQCLHEEYRSKGVFVQSVLPYFVATKLAKIRKPTLDKPSPETFVKSAIKTVGLQSRTNGYLIHALMGSIISNLPSWIYLKIVMNMNKSTRAHYLKKTKKN

SEQ ID NO: 27610 - protein, 98 aa, Homo sapiens
MESALPAAGFLYWVGAGTVAYLALRISYSLFTALRVWGVGNEAGVGPGLGEWAVVTGSTDGIGKSYAEELAKHGMKVVLISRSKDKLDQVSSEISNYT

SEQ ID NO: 27611 - protein, 190 aa, Homo sapiens
MAKATTIKEALARWEEKTGQRPSEAKEIKLYAQIPPIEKMDASLSMLANCEKLSLSTNCIEKIANLNGLKNLRILSLGRNNIKNLNGLEAVGDTLEELWISYNFIEKLKGIHIMKKLKILYMSNNLVKDWAEFVKLAELPCLEDLVFVGNPLEEKHSAENNWIEEATKRVPKLKKLDGTPVIKGDEEEDN

SEQ ID NO: 27612 - protein, 77 aa, Homo sapiens
MKKLKILYMSNNLVKDWAEFVKLAELPCLEDLVFVGNPLEEKHSAENNWIEEATKRVPKLKKLDGTPVIKGDEEEDN

SEQ ID NO: 27613 - protein, 151 aa, Homo sapiens
MDASLSMLANCEKLSLSTNCIEKIANLNGLKNLRILSLGRNNIKNLNGLEAVGDTLEELWISYNFIEKLKGIHIMKKLKILYMSNNLVKDWAEFVKLAELPCLEDLVFVGNPLEEKHSAENNWIEEATKRVPKLKKLDGTPVIKGDEEEDN

SEQ ID NO: 27614 - protein, 315 aa, Homo sapiens
MKVLLLTGLGALFFAYYWDDNFDPASLQGARVLLTGANAGVGEELAYHYARLGSHLVLTAHTEALLQKVVGNCRKLGAPKVFYIAADMASPEAPESVVQFALDKLGGLDYLVLNHIGGAPAGTRARSPQATRWLMQVNFVSYVQLTSRALPSLTDSKGSLVVVSSLLGRVPTSFSTPYSAAKFALDGFFGSLRRELDVQDVNVAITMCVLGLRDRASAAEAVRSSTSRPRQPEHRGVPLQSQTAMFLPPTVPGARTLTETPLRGWPQPKMKSSRQKSKTEKNDGHLEPVTAWEVQVPRVRRLCRGLARPHLFGHD

SEQ ID NO: 27615 - protein, 286 aa, Homo sapiens
MKVLLLTGLGALFFAYYWDDNFDPASLQGARVLLTGANAGVGEELAYHYARLGSHLVLTAHTEALLQKVVGNCRKLGAPKVFYIAADMASPEAPESVVQFALDKLGGLDYLVLNHIGGAPAGTRARSPQATRWLMQVNFVSYVQLTSRALPSLTDSKGSLVVVSSLLGRVPTSFSTPYSAAKFALDGFFGSLRRELDVQDVNVAITMCVLGLRDRASAAEAVRGVTRVKAAPGPKAALAVIRGGATRAAGVFYPWRFRLLCLLRRWLPRPRAWFIRQELNVTAAAA

SEQ ID NO: 27616 - protein, 234 aa, Homo sapiens
MKVLLLTGLGALFFAYYWDDNFDPGGLDYLVLNHIGGAPAGTRARSPQATRWLMQVNFVSYVQLTSRALPSLTDSKGSLVVVSSLLGRVPTSFSTPYSAAKFALDGFFGSLRRELDVQDVNVAITMCVLGLRDRASAAEAVRSSTSRPRQPEHRGVPLQSQTAMFLPPTVPGARTLTETPLRGWPQPKMKSSRQKSKTEKNDGHLEPVTAWEVQVPRVRRLCRGLARPHLFGHD

SEQ ID NO: 27617 - protein, 181 aa, Homo sapiens
MQVNFVSYVQLTSRALPSLTDSKGSLVVVSSLLGRVPTSFSTPYSAAKFALDGFFGSLRRELDVQDVNVAITMCVLGLRDRASAAEAVRSSTSRPRQPEHRGVPLQSQTAMFLPPTVPGARTLTETPLRGWPQPKMKSSRQKSKTEKNDGHLEPVTAWEVQVPRVRRLCRGLARPHLFGHD

SEQ ID NO: 27618 - protein, 199 aa, Homo sapiens
MASPEAPESVVQFALDKLGGLDYLVLNHIGGAPAGTRARSPQATRWLMQVNFVSYVQLTSRALPSLTDSKGSLVVVSSLLGRVPTSFSTPYSAAKFALDGFFGSLRRELDVQDVNVAITMCVLGLRDRASAAEAVRGVTRVKAAPGPKAALAVIRGGATRAAGVFYPWRFRLLCLLRRWLPRPRAWFIRQELNVTAAAA

SEQ ID NO: 27619 - protein, 205 aa, Homo sapiens
MKVLLLTGLGALFFAYYWDDNFDPGGLDYLVLNHIGGAPAGTRARSPQATRWLMQVNFVSYVQLTSRALPSLTDSKGSLVVVSSLLGRVPTSFSTPYSAAKFALDGFFGSLRRELDVQDVNVAITMCVLGLRDRASAAEAVRGVTRVKAAPGPKAALAVIRGGATRAAGVFYPWRFRLLCLLRRWLPRPRAWFIRQELNVTAAAA

SEQ ID NO: 27620 - protein, 152 aa, Homo sapiens
MQVNFVSYVQLTSRALPSLTDSKGSLVVVSSLLGRVPTSFSTPYSAAKFALDGFFGSLRRELDVQDVNVAITMCVLGLRDRASAAEAVRGVTRVKAAPGPKAALAVIRGGATRAAGVFYPWRFRLLCLLRRWLPRPRAWFIRQELNVTAAAA

SEQ ID NO: 27621 - protein, 87 aa, Homo sapiens
MKVLLLTGLGALFFAYYWDDNFDPASLQGARVLLTGANAGVGEELAYHYARLGSHLVLTAHTEALLQKARWLTLVVSTLGGRGKWIT

SEQ ID NO: 27622 - protein, 379 aa, Homo sapiens
MEGNRDEAEKCVEIAREALNAGNREKAQRFLQKAEKLYPLPSARALLEIIMKNGSTAGNSPHCRKPSGSGDQSKPNCTKDSTSGSGEGGKGYTKDQVDGVLSINKCKNYYEVLGVTKDAGDEDLKKAYRKLALKFHPDKNHAPGATDAFKKIGNAYAVLSNPEKRKQYDLTGNEEQACNHQNNGRFNFHRGCEADITPEDLFNIFFGGGFPSGSVHSFSNGRAGYSQQHQHRHSGHEREEERGDGGFSVFIQLMPIIVLILVSLLSQLMVSNPPYSLYPRSGTGQTIKMQTENLGVVYYVNKDFKNEYKGMLLQKVEKSVEEDYVTNIRNNCWKERQQKTDMQYAAKVYRDDRLRRKADALSMDNCKELERLTSLYKGG

SEQ ID NO: 27623 - protein, 294 aa, Homo sapiens
MDIGTLIWDGGPVPNTHINKCKNYYEVLGVTKDAGDEDLKKAYRKLALKFHPDKNHAPGATDAFKKIGNAYAVLSNPEKRKQYDLTGNEEQACNHQNNGRFNFHRGCEADITPEDLFNIFFGGGFPSGSVHSFSNGRAGYSQQHQHRHSGHEREEERGDGGFSVFIQLMPIIVLILVSLLSQLMVSNPPYSLYPRSGTGQTIKMQTENLGVVYYVNKDFKNEYKGMLLQKVEKSVEEDYVTNIRNNCWKERQQKTDMQYAAKVYRDDRLRRKADALSMDNCKELERLTSLYKGG

SEQ ID NO: 27624 - protein, 358 aa, Homo sapiens
MAATLGSGERWTEAYIDAVRRNKYPEDTPPESHDPCGCCNCMKAQKEKKSENEWTQTRQGEGNSTYSEEQLLGVQRIKKCRNYYEILGVSRDASDEELKKAYRKLALKFHPDKNCAPGATDAFKAIGNAFAVLSNPDKRLRYDEYGDEQVTFTAPRARPYNYYRDFEADITPEELFNVFFGGHFPTGNIHMFSNVTDDTYYYRRRHRHERTQTQKEEEEEKPQTTYSAFIQLLPVLVIVIISVITQLLATNPPYSLFYKSTLGYTISRETQNLQVPYFVDKNFDKAYRGASLHDLEKTIEKDYIDYIQTSCWKEKQQKSELTNLAGLYRDERLKQKAESLKLENCEKLSKLIGLRRGG

SEQ ID NO: 27625 - protein, 528 aa, Homo sapiens
MLGRSLREVSAALKQGQITPTELCQKCLSLIKKTKFLNAYITVSEEVALKQAEESEKRYKNGQSLGDLDGIPIAVKDNFSTSGIETTCASNMLKGYIPPYNATVVQKLLDQGALLMGKTNLDEFAMGSGSTDGVFGPVKNPWSYSKQYREKRKQNPHSENEDSDWLITGGSSGGSAAAVSAFTCYAALGSDTGGSTRNPAAHCGLVGFKPSYGLVSRHGLIPLVNSMDVPGILTRCVDDAAIVLGALAGPDPRDSTTVHEPINKPFMLPSLADVSKLCIGIPKEYLVPELSSEVQSLWSKAADLFESEGAKVIEVSLPHTSYSIVCYHVLCTSEVASNMARFDGLQYGHRCDIDVSTEAMYAATRREGFNDVVRGRILSGNFFLLKENYENYFVKAQKVRRLIANDFVNAFNSGVDVLLTPTTLSEAVPYLEFIKEDNRTRSAQDDIFTQAVNMAGLPAVSIPVALSNQGLPIGLQFIGRAFCDQQLLTVAKWFEKQVQFPVIQLQELMDDCSAVLENEKLASVSLKQ

SEQ ID NO: 27626 - protein, 303 aa, Homo sapiens
MLGRSLREVSAALKQGQITPTELCQKCLSLIKKTKFLNAYITVSEEVALKQAEESEKRYKNGQSLGDLDGIPIAVKDNFSTSGIETTCASNMLKGYIPPYNATVVQKLLDQGALLMGKTNLDEFAMGSGSTDGVFGPVKNPWSYSKQYREKRKQNPHSENEDSDWLITGGSSGGSAAAVSAFTCYAALGSDTGGSTRNPAAHCGLVGFKPSYGLVSRHGLIPLVNSMDVPGILTRCVDDAAIVLGALAGPDPRDSTTVHEPINKPFMLPSLADVSKLCIGIPKVTFSFHYFTEILSSPIESTD

SEQ ID NO: 27627 - protein, 515 aa, Homo sapiens [sequence omitted]

SEQ ID NO: 27628 - protein, 561 aa, Homo sapiens
MAEQVALSRTQVCGILREELFQGDAFHQSDTHIFIIMGASGDLAKKKIYPTIWWLFRDGLLPENTFIVGYARSRLTVADIRKQSEPFFKATPEEKLKLEDFFARNSYVAGQYDDAASYQRLNSHMNALHLGSQANRLFYLALPPTVYEAVTKNIHESCMSQIGWNRIIVEKPFGRDLQSSDRLSNHISSLFREDQIYRIDHYLGKEMVQNLMVLRFANRIFGPIWNRDNIACVILTFKEPFGTEGRGGYFDEFGIIRGPGRQGGSGSESCSLSLGSLVWGPHALEPGEQGGELRRALASSVPRDVMQNHLLQMLCLVAMEKPASTNSDDVRDEKVKVLKCISEVQANNVVLGQYVGNPDGEGEATKGYLDDPTVPRGSTTATFAAVVLYVENERWDGVPFILRCGKALNERKAEVRLQFHDVAGDIFHQQCKRNELVIRVQPNEAVYTKMMTKKPGMFFNPEESELDLTYGNRYKNVKLPDAYERLILDVFCGSQMHFVRSDELREAWRIFTPLLHQIELEKPKPIPYIYGSRGPTEADELMKRVGFQYEGTYKWVNPHKL

SEQ ID NO: 27629 - protein, 545 aa, Homo sapiens
MGRRGSAPGNGRTLRGCERGGRRRRSADSVMAEQVALSRTQVCGILREELFQGDAFHQSDTHIFIIMGASGDLAKKKIYPTIWWLFRDGLLPENTFIVGYARSRLTVADIRKQSEPFFKATPEEKLKLEDFFARNSYVAGQYDDAASYQRLNSHMNALHLGSQANRLFYLALPPTVYEAVTKNIHESCMSQIGWNRIIVEKPFGRDLQSSDRLSNHISSLFREDQIYRIDHYLGKEMVQNLMVLRFANRIFGPIWNRDNIACVILTFKEPFGTEGRGGYFDEFGIIRDVMQNHLLQMLCLVAMEKPASTNSDDVRDEKVKVLKCISEVQANNVVLGQYVGNPDGEGEATKGYLDDPTVPRGSTTATFAAVVLYVENERWDGVPFILRCGKALNERKAEVRLQFHDVAGDIFHQQCKRNELVIRVQPNEAVYTKMMTKKPGMFFNPEESELDLTYGNRYKNVKLPDAYERLILDVFCGSQMHFVRSDELREAWRIFTPLLHQIELEKPKPIPYIYGSRGPTEADELMKRVGFQYEGTYKWVNPHKL

SEQ ID NO: 27630 - protein, 684 aa, Homo sapiens
MGLSAAAPLWGPPGLLLAIALHPALSVPPRRDYCVLGAGPAGLQMAYFLQRAGRDYAVFERAPRPGSFFTRYPRHRKLISINKRYTGKANAEFNLRHDWNSLLSHDPRLLFRHYSRAYFPDARDMVRYLGDFADTLGLRVQYNTTIAHVTLDKDRQAWNGHYFILTDQKGQVHQCSVLFVATGLSVPNQVDFPGSEYAEGYESVSVDPEDFVGQNVLILGRGNSAFETAENILGVTNFIHMLSRSRVRLSWATHYVGDLRAINNGLLDTYQLKSLDGLLESDLTDLAILKDSKGKFHVTPKFFLEEANTNQSADSITLPQDDNDNFAMRVPYDRVIRCLGWNFDFSIFNKSLRLNSGNAFGKKYPLIRASYESKGSRGLFILGTASHSVDYRKSAGGFIHGFRYTVRAVHRLLEHRHHSVTWPATELPITQLTSSIVRRVNEASGLYQMFGVLADVILLKENSTAFEYLEEFPIQMLAQLETLTGRKAKHGLFVINMEYGRNFSGPDKDVFFDDRSVGHTEDAWQSNFLHPVIYYYRYLPTEQEVRFRPAHWPLPRPTAIHHIVEDFLTDWTAPIGHILPLRRFLENCLDTDLRSFYAESCFLFALTRQKLPPFCQQGYLRMQGLVSTESLWQHRVESRLLRDYAPTGRRLEDSSQQLGDQEPLGSPLAPGPLAQSVDSNKEEL

SEQ ID NO: 27631 - protein, 357 aa, Homo sapiens
MRVPYDRVIRCLGWNFDFSIFNKSLRLNSGNAFGKKYPLIRASYESKGSRGLFILGTASHSVDYRKSAGGFIHGFRYTVRAVHRLLEHRHHSVTWPATELPITQLTSSIVRRVNEASGLYQMFGVLADVILLKENSTAFEYLEEFPIQMLAQLETLTGRKAKHGLFVINMEYGRNFSGPDKDVFFDDRSVGHTEDAWQSNFLHPVIYYYRYLPTEQEVRFRPAHWPLPRPTAIHHIVEDFLTDWTAPIGHILPLRRFLENCLDTDLRSFYAESCFLFALTRQKLPPFCQQGYLRMQGLVSTESLWQHRVESRLLRDYAPTGRRLEDSSQQLGDQEPLGSPLAPGPLAQSVDSNKEEL

SEQ ID NO: 27632 - protein, 360 aa, Homo sapiens
MGAPLLSPGWGAGAAGRRWWMLLAPLLPALLLVRPAGALVEGLYCGTRDCYEVLGVSRSAGKAEIARAYRQLARRYHPDRYRPQPGDEGPGRTPQSAEEAFLLVATAYETLKDEETRKDYDYMLDHPEEYYSHYYHYYSRRLAPKVDVRVVILVSVCAISVFQFFSWWNSYNKAISYLATVPKYRIQATEIAKQQGLLKKAKEKGKNKKSKEEIRDEEENIIKNIIKSKIDIKGGYQKPQICDLLLFQIILAPFHLCSYIVWYCRWIYNFNIKGKEYGEEERLYIIRKSMKMSKSQFDSLEDHQKETFLKRELWIKENYEVYKQEQEEELKKKLANDPRWKRYRRWMKNEGPGRLTFVDD

SEQ ID NO: 27633 - protein, 238 aa, Homo sapiens
MLDHPEEYYSHYYHYYSRRLAPKVDVRVVILVSVCAISVFQFFSWWNSYNKAISYLATVPKYRIQATEIAKQQGLLKKAKEKGKNKKSKEEIRDEEENIIKNIIKSKIDIKGGYQKPQICDLLLFQIILAPFHLCSYIVWYCRWIYNFNIKGKEYGEEERLYIIRKSMKMSKSQFDSLEDHQKETFLKRELWIKENYEVYKQEQEEELKKKLANDPRWKRYRRWMKNEGPGRLTFVDD

SEQ ID NO: 27634 - protein, 153 aa, Homo sapiens
MGAPLLSPGWGAGAAGRRWWMLLAPLLPALLLVRPAGALVEGLYCGTRDCYEVLGVSRSAGKAEIARAYRQLARRYHPDRYRPQPGDEGPGRTPQSAEEAFLLVATAYETLKVSQAAAELQQYCMQNACKDALLVGVPAGSNPFREPRSCALL

SEQ ID NO: 27635 - protein, 123 aa, Homo sapiens
MARGSALLLASLLLAAALSASAGLWSPAKEKRGWTLNSAGYLLGPHAVGNHRSFSDKNGLTSKRELRPEDDMKPGSFDRSIPENNIMRTIIEFLSFLHLKEAGALDRLLDLPAAASSEDIERS

SEQ ID NO: 27636 - protein, 87 aa, Homo sapiens
MQKVTLGLLVFLAGFPVLDANDLEDKNSPFYYDWHSLQVGGLICAGVLCAMGIIIVMSAKCKCKFGQKSGHHPGETPPLITPGSAQS

SEQ ID NO: 27637 - protein, 113 aa, Homo sapiens
MQKVTLGLLVFLAGFPVLDANDLEDKNSPFYYDWHSLQVGGLICAGVLCAMGIIIVMSEWRSSGEQAGRGWGSPPLTTQLSPTGAKCKCKFGQKSGHHPGETPPLITPGSAQS

SEQ ID NO: 27638 - protein, 144 aa, Homo sapiens
MGRGYSGALQARGGLEEPLERGLRGPSFTQSPLHGAAAAYLSAQRDASLPVPGQRSDMQKVTLGLLVFLAGFPVLDANDLEDKNSPFYYDWHSLQVGGLICAGVLCAMGIIIVMSAKCKCKFGQKSGHHPGETPPLITPGSAQS

SEQ ID NO: 27639 - protein, 96 aa, Homo sapiens
MQKVTLGLLVFLAGFPVLDANDLEDKNSPFYYDWHSLQVGGLICAGVLCAMGIIIVMSEWRSSGEQAGRGWGSPPLTTQLSPTGAKCKCKFGQKSG

SEQ ID NO: 27640 - protein, 61 aa, Homo sapiens
MQKVTLGLLVFLAGFPVLDANDLEDKNSPFYYGESPCPLSPPHNPTYCLVPRVPIQGWGLT

SEQ ID NO: 27641 - protein, 226 aa, Homo sapiens
MAAMRWRWWQRLLPWRLLQARGFPQNSAPSLGLGARTYSQGDCSYSRTALYDLLGVPSTATQAQIKAAYYRQCFLYHPDRNSGSAEAAERFTRISQAYVVLGSATLRRKYDRGLLSDEDLRGPGVRPSRTPAPDPGSPRTPPPTSRTHDGSRASPGANRTMFNFDAFYQAHYGEQLERERRLRARREALRKRQEYRSMKGLRWEDTRDTAAIFLIFSIFIIIGFYI

SEQ ID NO: 27642 - protein, 89 aa, Homo sapiens
MERVTLALLLLAGLTALEANDPFANKDDPFYYDWKNLQLSGLICGGLLAIAGIAAVLSGKCKCKSSQKQHSPVPEKAIPLITPGSATTC

SEQ ID NO: 27643 - protein, 779 aa, Homo sapiens
MSRFPAVAGRAPRRQEEGERSRDLQEERLSAVCIADREEKGCTSQEGGTTPTFPIQKQRKKIIQAVRDNSFLIVTGNTGSGKTTQLPKYLYEAGFSQHGMIGVTQPRKVAAISVAQRVAEEMKCTLGSKVGYQVRFDDCSSKETAIKYMTDGCLLKHILGDPNLTKFSVIILDEAHERTLTTDILFGLLKKLFQEKSPNRKEHLKVVVMSATMELAKLSAFFGNCPIFDIPGRLYPVREKFCNLIGPRDRENTAYIQAIVKVTMDIHLNEMAGDILVFLTGQFEIEKSCELLFQMAESVDYDYDVQDTTLDGLLILPCYGSMTTDQQRRIFLPPPPGIRKCVISTNISATSLTIDGIRYVVDGGFVKQLNHNPRLGLDILEVVPISKSEALQRSGRAGRTSSGKCFRIYSKDFWNQCMPDHVIPEIKRTSLTSVVLTLKCLAIHDVIRFPYLDPPNERLILEALKQLYQCDAIDRSGHVTRLGLSMVEFPLPPHLTCAVIKAASLDCEDLLLPIAAMLSVENVFIRPVDPEYQKEAEQRHRELAAKAGGFNDFATLAVIFEQCKSSGAPASWCQKHWIHWRCLFSAFRVEAQLRELIRKLKQQSDFPKETFEGPKHEVLRRCLCAGYFKNVARRSVGRTFCTMDGRGSPVHIHPSSALHEQETKLEWIIFHEVLVTTKVYARIVCPIRYEWVRDLLPKLHEFNAHDLSSVARREVREDARRRWTNKENVKQLKDGISKDVLKKMQRRNDDKSISDARARFLERKQQRTQDHSDTRKETG

SEQ ID NO: 27644 - protein, 732 aa, Homo sapiens
MIGVTQPRKVAAISVAQRVAEEMKCTLGSKVGYQVRFDDCSSKETAIKYMTDGCLLKHILGDPNLTKFSVIILDEAHERTLTTDILFGLLKKLFQEKSPNRKEHLKVVVMSATMELAKLSAFFGNCPIFDIPGRLYPVREKFCNLIGPRDRENTAYIQAIVKVTMDIHLNEMAGDILVFLTGQFEIEKSCELLFQMAESVDYDYDVQDTTLDGLLILPCYGSMTTDQQRRIFLPPPPGIRKCVISTNISATSLTIDGIRYVVDGGFVKQLNHNPRLGLEQRRIFLPPPPGIRKCVISTNISATSLTIDGIRYVVDGGFVKQLNHNPRLGLDILEVVPISKSEALQRSGRAGRTSSGKCFRIYSKDFWNQCMPDHVIPEIKRTSLTSVVLTLKCLAIHDVIRFPYLDPPNERLILEALKQLYQCDAIDRSGHVTRLGLSMVEFPLPPHLTCAVIKAASLDCEDLLLPIAAMLSVENVFIRPVDPEYQKEAEQRHRELAAKAGGFNDFATLAVIFEQCKSSGAPASWCQKHWIHWRCLFSAFRVEAQLRELIRKLKQQSDFPKETFEGPKHEVLRRCLCAGYFKNVARRSVGRTFCTMDGRGSPVHIHPSSALHEQETKLEWIIFHEVLVTTKVYARIVCPIRYEWVRDLLPKLHEFNAHDLSSVARREVREDARRRWTNKENVKQLKDGISKDVLKKMQRRNDDKSISDARARFLERKQQRTQDHSDTRKETG

SEQ ID NO: 27645 - protein, 722 aa, Homo sapiens
MSRFPAVAGRAPRRQEEGERSRDLQEERLSAVCIADREEKGCTSQEGGTTPTFPIQKQRKKIIQAVRDNSFLIVTGNTGSGKTTQLPKYLYEAGFSQHGMIGVTQPRKVAAISVAQRVAEEMKCTLGSKVGYQVRFDDCSSKETAIKYMTDGCLLKHILGDPNLTKFSVIILDEAHERTLTTDILFGLLKKLFQEKSPNRKEHLKVVVMSATMELAKLSAFFGNCPIFDIPGRLYPVREKFCNLIGPRDRENTAYIQAIVKVTMDIHLNEMAGDILVFLTGQFEIEKSCELLFQMAESVDYDYDVQDTTLDGLLILPCYGSMTTDQQRRIFLPPPPGIRKCVISTNISATSLTIDGIRYVVDGGFVKQLNHNPRLGLDILEVVPISKSEALQRSGRAGRTSSGKCFRIYSKDFWNQCMPDHVIPEIKRTSLTSVVLTLKCLAIHDVIRFPYLDPPNERLILEALKQLYQCDAIDRSGHVTRLGLSMVEFPLPPHLTCAVIKAASLDCEDLLLPIAAMLSVENVFIRPVDPEYQKEAEQRHRELAAKAGGFNDFATLAVIFEQCKSSGAPASWCQKHWIHWRCLFSAFRVEAQLRELIRKLKQQSDFPKETFEGPKHEVLRRCLCAGYFKNVARRSVGRTFCTMDGRGSPVHIHPSSALHEQETKLEWIIFHEVLVTTKVYARIVCPIRYEWVRDLLPKLHEFNAHDLSSVARREVMKIYYFQ

SEQ ID NO: 27646 - protein, 702 aa, Homo sapiens
MSRFPAVAGRAPRRQEEGERSRDLQEERLSAVCIADREEKGCTSQEGGTTPTFPIQKQRKKIIQAETAIKYMTDGCLLKHILGDPNLTKFSVIILDEAHERTLTTDILFGLLKKLFQEKSPNRKEHLKVVVMSATMELAKLSAFFGNCPIFDIPGRLYPVREKFCNLIGPRDRENTAYIQAIVKVTMDIHLNEMAGDILVFLTGQFEIEKSCELLFQMAESVDYDYDVQDTTLDGLLILPCYGSMTTDQQRRIFLPPPPGIRKCVISTNISATSLTIDGIRYVVDGGFVKQLNHNPRLGLDILEVVPISKSEALQRSGRAGRTSSGKCFRIYSKDFWNQCMPDHVIPEIKRTSLTSVVLTLKCLAIHDVIRFPYLDPPNERLILEALKQLYQCDAIDRSGHVTRLGLSMVEFPLPPHLTCAVIKAASLDCEDLLLPIAAMLSVENVFIRPVDPEYQKEAEQRHRELAAKAGGFNDFATLAVIFEQCKSSGAPASWCQKHWIHWRCLFSAFRVEAQLRELIRKLKQQSDFPKETFEGPKHEVLRRCLCAGYFKNVARRSVGRTFCTMDGRGSPVHIHPSSALHEQETKLEWIIFHEVLVTTKVYARIVCPIRYEWVRDLLPKLHEFNAHDLSSVARREVREDARRRWTNKENVKQLKDGISKDVLKKMQRRNDDKSISDARARFLERKQQRTQDHSDTRKETG

SEQ ID NO: 27647 - protein, 1008 aa, Homo sapiens
MSYDYHQNWGRDGGPRSSGGGYGGGPAGGHGGNRGSGGGGGGGGGGRGGRGRHPGHLKGREIGMWYAKKQGQKNKEAERQERAVVHMDERREEQIVQLLNSVQAKNDKESEAQISWFAPEDHGYGTEVSTKNTPCSENKLDIQEKKLINQEKKMFRIRNRSYIDRDSEYLLQENEPDGTLDQKLLEDLQKKKNDLRYIEMQHFREKLPSYGMQKELVNLIDNHQVTVISGETGCGKTTQVTQFILDNYIERGKGSACRIVCTQPRRISAISVAERVAAERAESCGSGNSTGYQIRLQSRLPRKQGSILYCTTGIILQWLQSDPYLSSVSHIVLDEIHERNLQSDVLMTVVKDLLNFRSDLKVILMSATLNAEKFSEYFGNCPMIHIPGFTFPVVEYLLEDVIEKIRYVPEQKEHRSQFKRGFMQGHVNRQEKEEKEAIYKERWPDYVRELRRRYSASTVDVIEMMEDDKVDLNLIVALIRYIVLEEEDGAILVFLPGWDNISTLHDLLMSQVMFKSDKFLIIPLHSLMPTVNQTQVFKRTPPGVRKIVIATNIAETSITIDDVVYVIDGGKIKETHFDTQNNISTMSAEWVSKANAKQRKGRAGRVQPGHCYHLYNGLRASLLDDYQLPEILRTPLEELCLQIKILRLGGIAYFLSRLMDPPSNEAVLLSIRHLMELNALDKQEELTPLGVHLARLPVEPHIGKMILFGALFCCLDPVLTIAASLSFKDPFVIPLGKEKIADARRKELAKDTRSDHLTVVNAFEGWEEARRRGFRYEKDYCWEYFLSSNTLQMLHNMKGQFAEHLLGAGFVSSRNPKDPESNINSDNEKIIKAVICAGLYPKVAKIRLNLGKKRKMVKVYTKTDGLVAVHPKSVNVEQTDFHYNWLIYHLKMRTSSIYLYDCTEVSPYCLLFFGGDISIQKDNDQETIAVDEWIVFQSPARIAHLVKELRKELDILLQEKIESPHPVDWNDTKSRDCAVLSAIIDLIKTQEKATPRNFPPRFQDGYYS

SEQ ID NO: 27648 - protein, 994 aa, Homo sapiens
MSYDYHQNWGRDGGPRSSGGGYGGGPAGGHGGNRGSGGGGGGGGGGRGGRGRHPGHLKGREIGMWYAKKQGQKNKEAERQERAVVHMDERREEQIVQLLNSVQAKNDKESEAQISWFAPEDHGYGTEVSTKNTPCSENKLDIQEKKLINQEKKMFRIRNRSYIDRDSEYLLQENEPDGTLDQKLLEDLQKKKNDLRYIEMQHFREKLPSYGMQKELVNLIDNHQVTVISGETGCGKTTQVTQFILDNYIERGKGSACRIVCTQPRRISAISVAERVAAERAESCGSGNSTGYQIRLQSRLPRKQGSILYCTTGIILQWLQSDPYLSSVSHIVLDEIHERNLQSDVLMTVVKDLLNFRSDLKVILMSATLNAEKFSEYFGNCPMIHIPGFTFPVVEYLLEDVIEKIRYVPEQKEHRSQFKRGFMQGHVNRQEKEEKEAIYKERWPDYVRELRRRYSASTVDVIEMMEDDKVDLNLIVALIRYIVLEEEDGAILVFLPGWDNISTLHDLLMSQVMFKSVNQTQVFKRTPPGVRKIVIATNIAETSITIDDVVYVIDGGKIKETHFDTQNNISTMSAEWVSKANAKQRKGRAGRVQPGHCYHLYNGLRASLLDDYQLPEILRTPLEELCLQIKILRLGGIAYFLSRLMDPPSNEAVLLSIRHLMELNALDKQEELTPLGVHLARLPVEPHIGKMILFGALFCCLDPVLTIAASLSFKDPFVIPLGKEKIADARRKELAKDTRSDHLTVVNAFEGWEEARRRGFRYEKDYCWEYFLSSNTLQMLHNMKGQFAEHLLGAGFVSSRNPKDPESNINSDNEKIIKAVICAGLYPKVAKIRLNLGKKRKMVKVYTKTDGLVAVHPKSVNVEQTDFHYNWLIYHLKMRTSSIYLYDCTEVSPYCLLFFGGDISIQKDNDQETIAVDEWIVFQSPARIAHLVKELRKELDILLQEKIESPHPVDWNDTKSRDCAVLSAIIDLIKTQEKATPRNFPPRFQDGYYS

SEQ ID NO: 27649 - protein, 979 aa, Homo sapiens
MSYDYHQNWGRDGGPRSSGGGYGGGPAGGHGGNRGSGGGGGGGGGGRGGRGRHPGHLKGREIGMWYAKKQGQKNKEAERQERAVVHMDERREEQIVQLLNSVQAKNDKESEAQISWFAPEDHGYGTEVSTKNTPCSENKLDIQEKKLINQEKKMFRIRNRSYIDRDSEYLLQENEPDGTLDQKLLEDLQKKKNDLRYIEMQHFREKLPSYGMQKELVNLIDNHQVTVISGETGCGKTTQVTQFILDNYIERGKGSACRIVCTQPRRISAISVAERVAAERAESCGSGNSTGYQIRLQSRLPRKQGSILYCTTGIILQWLQSDPYLSSVSHIVLDEIHERNLQSDVLMTVVKDLLNFRSDLKVILMSATLNAEKFSEYFGNCPMIHIPGFTFPVVEYLLEDVIEKIRYVPEQKEHRSQFKRGFMQGHVNRQEKEEKEAIYKERWPDYVRELRRRYSASTVDVIEMMEDDKVDLNLIVALIRYIVLEEEDGAILVFLPGWDNISTLHDLLMSQVMFKSDKFLIIPLHSLMPTVNQTQVFKRTPPGVRKIVIATNIAETSITIDDVVYVIDGGKIKETHFDTQNNISTMSAEWVSKANAKQRKGRAGRVQPGHCYHLYNGLRASLLDDYQLPEILRTPLEELCLQIKILRLGGIAYFLSRLMDPPSNEAVLLSIRHLMELNALDKQEELTPLGVHLARLPVEPHIGKMILFGALFCCLDPVLTIAASLSFKDPFVIPLGWEEARRRGFRYEKDYCWEYFLSSNTLQMLHNMKGQFAEHLLGAGFVSSRNPKDPESNINSDNEKIIKAVICAGLYPKVAKIRLNLGKKRKMVKVYTKTDGLVAVHPKSVNVEQTDFHYNWLIYHLKMRTSSIYLYDCTEVSPYCLLFFGGDISIQKDNDQETIAVDEWIVFQSPARIAHLVKELRKELDILLQEKIESPHPVDWNDTKSRDCAVLSAIIDLIKTQEKATPRNFPPRFQDGYYS

SEQ ID NO: 27650 - protein, 383 aa, Homo sapiens
MPSGCRCLHLVCLLCILGAPGQPVRADDCSSHCDLAHGCCAPDGSCRCDPGWEGLHCERCVRMPGCQHGTCHQPWQCICHSGWAGKFCDKDEHICTTQSPCQNGGQCMYDGGGEYHCVCLPGFHGRDCERKAGPCEQAGSPCRNGGQCQDDQGFALNFTCRCLVGFVGARCEVNVDDCLMRPCANGATCLDGINRFSCLCPEGFAGRFCTINLDDCASRPCQRGARCRDRVHDFDCLCPSGYGGKTCELVLPVPDPPTTVDTPLGPTSAVVVPATGPAPHSAGAGLLRISVKEVVRRQEAGLGEPSLVALVVFGALTAALVLATVLLTLRAWRRGVCPPGPCCYPAPHYAPACQDQECQVSMLPAGLPLPRDLPPEPGKTTAL

SEQ ID NO: 27651 - protein, 204 aa, Homo sapiens
MRPCANGATCLDGINRFSCLCPEGFAGRFCTINLDDCASRPCQRGARCRDRVHDFDCLCPSGYGGKTCELVLPVPDPPTTVDTPLGPTSAVVVPATGPAPHSAGAGLLRISVKEVVRRQEAGLGEPSLVALVVFGALTAALVLATVLLTLRAWRRGVCPPGPCCYPAPHYAPACQDQECQVSMLPAGLPLPRDLPPEPGKTTAL

SEQ ID NO: 27652 - protein, 1270 aa, Homo sapiens
MGDVKNFLYAWCGKRKMTPSYEIRAVGNKNRQKFMCEVQVEGYNYTGMGNSTNKKDAQSNAARDFVNYLVRINEIKSEEVPAFGVASPPPLTDTPDTTANAEGDLPTTMGGPLPPHLALKAENNSEVGASGYGVPGPTWDRGANLKDYYSRKEEQEVQATLESEEVDLNAGLHGNWTLENAKARLNQYFQKEKIQGEYKYTQVGPDHNRSFIAEMTIYIKQLGRRIFAREHGSNKKLAAQSCALSLVRQLYHLGVVEAYSGLTKKKEGETVEPYKVNLSQDLEHQLQNIIQELNLEILPPPEDPSVPVALNIGKLAQFEPSQRQNQVGVVPWSPPQSNWNPWTSSNIDEGPLAFATPEQISMDLKNELMYQLEQDHDLQAILQERELLPVKKFESEILEAISQNSVVIIRGATGCGKTTQVPQFILDDFIQNDRAAECNIVVTQPRRISAVSVAERVAFERGEEPGKSCGYSVRFESILPRPHASIMFCTVGVLLRKLEAGIRGISHVIVDEIHERDINTDFLLVVLRDVVQAYPEVRIVLMSATIDTSMFCEYFFNCPIIEVYGRTYPVQEYFLEDCIQMTHFVPPPKDKKKKDKDDDGGEDDDANCNLICGDEYGPETRLSMSQLNEKETPFELIEALLKYIETLNVPGAVLVFLPGWNLIYTMQKHLEMNPHFGSHRYQILPLHSQIPREEQRKVFDPVPVGVTKVILSTNIAETSITINDVVYVIDSCKQKVKLFTAHNNMTNYATVWASKTNLEQRKGRAGRVRPGFCFHLCSRARFERLETHMTPEMFRTPLHEIALSIKLLRLGGIGQFLAKAIEPPPLDAVIEAEHTLRELDALDANDELTPLGRILAKLPIEPRFGKMMIMGCIFYVGDAICTIAAATCFPEPFINEGKRLGYIHRNFAGNRFSDHVALLSVFQAWDDARMGGEEAEIRFCEHKRLNMATLRMTWEAKVQLKEILINSGFPEDCLLTQVFTNTGPDNNLDVVISLLAFGVYPNVCYHKEKRKILTTEGRNALIHKSSVNCPFSSQDMKYPSPFFVFGEKIRTRAISAKGMTLVTPLQLLLFASKKVQSDGQIVLVDDWIKLQISHEAAACITGLRAAMEALVVEVTKQPAIISQLDPVNERMLNMIRQISRPSAAGINLMIGSTRYGDGPRPPKMARYDNGSGYRRGGSSYSGGGYGGGYSSGGYGSGGYGGSANSFRAGYGAGVGGGYRGVSRGGFRGNSGGDYRGPSGGYRGSGGFQRGGGRGAYGTGYFGQGRGGGGY

SEQ ID NO: 27653 - protein, 235 aa, Homo sapiens
MKYPSPFFVFGEKIRTRAISAKGMTLVTPLQLLLFASKKVQSDGQIVLVDDWIKLQISHEAAACITGLRAAMEALVVEVTKQPAIISQLDPVNERMLNMIRQISRPSAAGINLMIGSTRYGDGPRPPKMARYDNGSGYRRGGSSYSGGGYGGGYSSGGYGSGGYGGSANSFRAGYGAGVGGGYRGVSRGGFRGNSGGDYRGPSGGYRGSGGFQRGGGRGAYGTGYFGQGRGGGGY

SEQ ID NO: 27654 - protein, 608 aa, Homo sapiens
MALRGPAGLGPGSRRPLDEAVAGAEGREAPALVAAGGAPEDDEEDDGRGRGLLRWDSFSAWLHCVCVVGFDLELGQAVEVIYPQHSKLTDREKTNICYLSFPDSNSGCLGDTQFCFRFRQSSGRRVSLHCLLDQFDKDLPVYLKKDPAYFYGYVYFRQVRDKTLKRGYFQKSLVLISKLPYIHFFHTVLKQIAPEYFEKNEPYLEAACNDVDRWPAPVPGKTLHLPIMGVVMKVRIPTCHDKPGTTQIVQLTQQVDTNISVILPTVHEVDIFRCFCPVFLHSQMLWELVLLGEPLVVMAPSPSESSETVLALVNCISPLKYFSDFRPYFTIHDSEFKEYTTRTQAPPSVILGVTNPFFAKTLQHWPHIIRIGDLKPTGEIPKQVKVKKLKNLKTLDSKPGVYTSYKPYLNRDEEIIKQLQKGVQQKRPSEAQSVILRRYFLELTQSFIIPLERYVASLMPLQKSISPWKSPPQLRQFLPEEFMKTLEKTGPQLTSRIKGDWIGLYRHFLKSPNFDGWFKTRRKEMTQKLEALHLEALCEEDLLLWIQKHTEVETVDLVLKLKNKLLQADREHLPVKPDTMEKLRTHIDAIILALPEDLQGILLKTGMT

SEQ ID NO: 27655 - protein, 522 aa, Homo sapiens
MAAVVAATRWWQLLLVLSAAGMGASGAPQPPNILLLLMDDMGWGDLGVYGEPSRETPNLDRMAAEGLLFPNFYSANPLCSPSRAALLTGRLPIRNGFYTTNAHARNAYTPQEIVGGIPDSEQLLPELLKKAGYVSKIVGKWHLGHRPQFHPLKHGFDEWFGSPNCHFGPYDNKARPNIPVYRDWEMVGRYYEEFPINLKTGEANLTQIYLQEALDFIKRQARHHPFFLYWAVDATHAPVYASKPFLGTSQRGRYGDAVREIDDSIGKILELLQDLHVADNTFVFFTSDNGAALISAPEQGGSNGPFLCGKQTTFEGGMREPALAWWPGHVTAGQVSHQLGSIMDLFTTSLALAGLTPPSDRAIDGLNLLPTLLQGRLMDRPIFYYRGDTLMAATLGQHKAHFWTWTNSWENFRQGIDFCPGQNVSGVTTHNLEDHTKLPLIFHLGRDPGERFPLSFASAEYQEALSRITSVVQQHQEALVPAQPQLNVCNWAVMNWAPPGCEKLGKCLTPPESIPKKCLWSH

SEQ ID NO: 27656 - protein, 1042 aa, Homo sapiens
MPGIVVFRRRWSVGSDDLVLPAIFLFLLHTTWFVILSVVLFGLVYNPHEACSLNLVDHGRGYLGILLSCMIAEMAIIWLSMRGGILYTEPRDSMQYVLYVRLAILVIEFIYAIVGIVWLTQYYTSCNDLTAKNVTLGMVVCNWVVILSVCITVLCVFDPTGRTFVKLRATKRRQRNLRTYNLRHRLEEGQATSWSRRLKVFLCCTRTKDSQSDAYSEIAYLFAEFFRDLDIVPSDIIAGLVLLRQRQRAKRNAVLDEANNDILAFLSGMPVTRNTKYLDLKNSQEMLRYKEVCYYMLFALAAYGWPMYLMRKPACGLCQLARSCSCCLCPARPRFAPGVTIEEDNCCGCNAIAIRRHFLDENMTAVDIVYTSCHDAVYETPFYVAVDHDKKKVVISIRGTLSPKDALTDLTGDAERLPVEGHHGTWLGHKGMVLSAEYIKKKLEQEMVLSQAFGRDLGRGTKHYGLIVVGHSLGAGTAAILSFLLRPQYPTLKCFAYSPPGGLLSEDAMEYSKEFVTAVVLGKDLVPRIGLSQLEGFRRQLLDVLQRSTKPKWRIIVGATKCIPKSELPEEVEVTTLASTRLWTHPSDLTIALSASTPLYPPGRIIHVVHNHPAEQCCCCEQEEPTYFAIWGDNKAFNEVIISPAMLHEHLPYVVMEGLNKVLENYNKGKTALLSAAKVMVSPTEVDLTPELIFQQQPLPTGPPMPTGLALELPTADHRNSSVRSKSQSEMSLEGFSEGRLLSPVVAAAARQDPVELLLLSTQERLAAELQARRAPLATMESLSDTESLYSFDSRRSSGFRSIRGSPSLHAVLERDEGHLFYIDPAIPEENPSLSSRTELLAADSLSKHSQDTQPLEAALGSGGVTPERPPSAAANDEEEEVGGGGGGPASRGELALHNGRLGDSPSPQVLEFAEFIDSLFNLDSKSSSFQDLYCMVVPESPTSDYAEGPKSPSQQEILLRAQFEPNLVPKPPRLFAGSADPSSGISLSPSFPLSSSGELMDLTPTGLSSQECLAADKIRTSTPTGHGASPAKQDELVISAR

SEQ ID NO: 27657 - protein, 672 aa, Homo sapiens
MPGMVLFGRRWAIASDDLVFPGFFELVVRVLWWIGILTLYLMHRGKLDCAGGALLSSYLIVLMILLAVVICTVSAIMCVSMRGTICNPGPRKSMSKLLYIRLALFFPEMVWASLGAAWVADGVQCDRTVVNGIIATVVVSWIIIAATVVSIIIVFDPLGGKMAPYSSAGPSHLDSHDSSQLLNGLKTAATSVWETRIKLLCCCIGKDDHTRVAFSSTAELFSTYFSDTDLVPSDIAAGLALLHQQQDNIRNNQEPAQVVCHAPGSSQEADLDAELENCHHYMQFAAAAYGWPLYIYRNPLTGLCRIGGDCCRSRTTDYDLVGGDQLNCHFGSILHTTGLQYRDFIHVSFHDKVYELPFLVALDHRKESVVVAVRGTMSLQDVLTDLSAESEVLDVECEVQDRLAHKGISQAARYVYQRLINDGILSQAFSIAPEYRLVIVGHSLGGGAAALLATMLRAAYPQVRCYAFSPPRGLWSKALQEYSQSFIVSLVLGKDVIPRLSVTNLEDLKRRILRVVAHCNKPKYKILLHGLWYELFGGNPNNLPTELDGGDQEVLTQPLLGEQSLLTRWSPAYSFSSDSPLDSSPKYPPLYPPGRIIHLQEEGASGRFGCCSAAHYSAKWSHEAEFSKILIGPKMLTDHMPDILMRALDSVVSDRAACVSCPAQGVSSVDVA

SEQ ID NO: 27658 - protein, 391 aa, Homo sapiens
MQFAAAAYGWPLYIYRNPLTGLCRIGGDCCRSRTTDYDLVGGDQLNCHFGSILHTTGLQYRDFIHVSFHDKVYELPFLVALDHRKESVVVAVRGTMSLQDVLTDLSAESEVLDVECEVQDRLAHKGISQAARYVYQRLINDGILSQAFSIAPEYRLVIVGHSLGGGAAALLATMLRAAYPQVRCYAFSPPRGLWSKALQEYSQSFIVSLVLGKDVIPRLSVTNLEDLKRRILRVVAHCNKPKYKILLHGLWYELFGGNPNNLPTELDGGDQEVLTQPLLGEQSLLTRWSPAYSFSSDSPLDSSPKYPPLYPPGRIIHLQEEGASGRFGCCSAAHYSAKWSHEAEFSKILIGPKMLTDHMPDILMRALDSVVSDRAACVSCPAQGVSSVDVA

SEQ ID NO: 27659 - protein, 267 aa, Homo sapiens
MPGMVLFGRRWAIASDDLVFPGFFELVVRVLWWIGILTLYLMHRGKLDCAGGALLSSYLIVLMILLAVVICTVSAIMCVSMRGTICNPGPRKSMSKLLYIRLALFFPEMVWASLGAAWVADGVQCDRTVVNGIIATVVVSWIIIAATVVSIIIVFDPLGGKMAPYSSAGPSHLDSHDSSQLLNGLKTAATSVWETRIKLLCCCIGKDDHTRVAFSSTAELFSTYFSDTDLVPSDIAAGLALLHQQQDNTRATGNCPRNDGLTLLSLN

SEQ ID NO: 27660 - protein, 543 aa, Homo sapiens
MPGMVLFGRRWAIASDDLVFPGFFELVVRVLWWIGILTLYLMHRGKLDCAGGALLSSYLIVLMILLAVVICTVSAIMCVSMRGTICNPGPRKSMSKLLYIRLALFFPEMVWASLGAAWVADGVQCDRTVVNGIIATVVVRTQIWCPATLRRASPCFISNRTISGTTKSLPRWSAMPQGAPSCRSRTTDYDLVGGDQLNCHFGSILHTTGLQYRDFIHVSFHDKVYELPFLVALDHRKESVVVAVRGTMSLQDVLTDLSAESEVLDVECEVQDRLAHKGISQAARYVYQRLINDGILSQAFSIAPEYRLVIVGHSLGGGAAALLATMLRAAYPQVRCYAFSPPRGLWSKALQEYSQSFIVSLVLGKDVIPRLSVTNLEDLKRRILRVVAHCNKPKYKILLHGLWYELFGGNPNNLPTELDGGDQEVLTQPLLGEQSLLTRWSPAYSFSSDSPLDSSPKYPPLYPPGRIIHLQEEGASGRFGCCSAAHYSAKWSHEAEFSKILIGPKMLTDHMPDILMRALDSVVSDRAACVSCPAQGVSSVDVA

SEQ ID NO: 27661 - protein, 811 aa, Homo sapiens
MESQGVPPGPYRATKLWNEVTTSFRAGMPLRKHRQHFKKYGNCFTAGEAVDWLYDLLRNNSNFGPEVTRQQTIQLLRKFLKNHVIEDIKGRWGSENVDDNNQLFRFPATSPLKTLPRRYPELRKNNIENFSKDKDSIFKLRNLSRRTPKRHGLHLSQENGEKIKHEIINEDQENAIDNRELSQEDVEEVWRYVILIYLQTILGVPSLEEVINPKQVIPQYIMYNMANTSKRGVVILQNKSDDLPHWVLSAMKCLANWPRSNDMNNPTYVGFERDVFRTIADYFLDLPEPLLTFEYYELFVNILVVCGYITVSDRSSGIHKIQDDPQSSKFLHLNNLNSFKSTECLLLSLLHREKNKEESDSTERLQISNPGFQERCAKKMQLVNLRNRRVSANDIMGGSCHNLIGLSNMHDLSSNSKPRCCSLEGIVDVPGNSSKEASSVFHQSFPNIEGQNNKLFLESKPKQEFLLNLHSEENIQKPFSAGFKRTSTLTVQDQEELCNGKCKSKQLCRSQSLLLRSSTRRNSYINTPVAEIIMKPNVGQGSTSVQTAMESELGESSATINKRLCKSTIELSENSLLPASSMLTGTQSLLQPHLERVAIDALQLCCLLLPPPNRRKLQLLMRMISRMSQNVDMPKLHDAMGTRSLMIHTFSRCVLCCAEEVDLDELLAGRLVSFLMDHHQEILQVPSYLQTAVEKHLDYLKKGHIENPGDGLFAPLPTYSYCKQISAQEFDEQKVSTSQAAIAELLENIIKNRSLPLKEKRKKLKQFQKEYPLIYQKRFPTTESEAALFGDKPTIKQPMLILRKPKFRSLR

SEQ ID NO: 27662 - protein, 527 aa, Homo sapiens
MESQGVPPGPYRATKLWNEVTTSFRAGMPLRKHRQHFKKYGNCFTAGEAVDWLYDLLRNNSNFGPEVTRQQTIQLLRKFLKNHVIEDIKGRWGSENVDDNNQLFRFPATSPLKTLPRRYPELRKNNIENFSKDKDSIFKLRNLSRRTPKRHGLHLSQENGEKIKHEIINEDQENAIDNRELSQEDVEEVWRYVILIYLQTILGVPSLEEVINPKQVIPQYIMYNMANTSKRGVVILQNKSDDLPHWVLSAMKCLANWPRSNDMNNPTYVGFERDVFRTIADYFLDLPEPLLTFEYYELFVNILGLLQPHLERVAIDALQLCCLLLPPPNRRKLQLLMRMISRMSQNVDMPKLHDAMGTRSLMIHTFSRCVLCCAEEVDLDELLAGRLVSFLMDHHQEILQVPSYLQTAVEKHLDYLKKGHIENPGDGLFAPLPTYSYCKQISAQEFDEQKVSTSQAAIAELLENIIKNRSLPLKEKRKKLKQFQKEYPLIYQKRFPTTESEAALFGDKPTIKQPMLILRKPKFRSLR

SEQ ID NO: 27663 - protein, 198 aa, Homo sapiens
MAADISESSGADCKGDPRNSAKLDADYPLRVLYCGVCSLPTEYCEYMPDVAKCRQWLEKNFPNEFAKLTVENSPKQEAGISEGQGTAGEEEEKKKQKRGGRGQIKQKKKTVPQKVTIAKIPRAKKKYVTRVCGLATFEIDLKEAQRFFAQKFSCGASVTGEDEIIIQGDFTDDIIDVIQEKWPEVDDDSIEDLGEVKK

SEQ ID NO: 27664 - protein, 345 aa, Homo sapiens
MVAALLGGGGEARGGTVPGAWLCLMALLQLLGSAPRGSGLAHGRRLICWQALLQCQGEPECSYAYNQYAEACAPVLAQHGGGDAPGAAAAAFPASAASFSSRWRCPSHCISALIQLNHTRRGPALEDCDCAQDENCKSTKRAIEPCLPRTSGGGAGGPGAGGVMGCTEARRRCDRDSRCNLALSRYLTYCGKVFNGLRCTDECRTVIEDMLAMPKAALLNDCVCDGLERPICESVKENMARLCFGAELGNGPGSSGSDGGLDDYYDEDYDDEQRTGGAGGEQPLDDDDGVPHPPRPGSGAAASGGRGDLPYGPGRRSSGGGGRLAPRGAWTPLASILLLLLGPLF

SEQ ID NO: 27665 - protein, 570 aa, Homo sapiens
MLSRLMSGSSRSLEREYSCTVRLLDDSEYTCTIQRDAKGQYLFDLLCHHLNLLEKDYFGIRFVDPDKQRHWLEFTKSVVKQLRSQPPFTMCFRVKFYPADPAALKEEITRYLVFLQIKRDLYHGRLLCKTSDAALLAAYILQAEIGDYDSGKHPEGYSSKFQFFPKHSEKLERKIAEIHKTELSGQTPATSELNFLRKAQTLETYGVDPHPCKDVSGNAAFLAFTPFGFVVLQGNKRVHFIKWNEVTKLKFEGKTFYLYVSQKEEKKIILTYFAPTPEACKHLWKCGIENQAFYKLEKSSQVRTVSSSNLFFKGSRFRYSGRVAKEVMESSAKIKREPPEIHRAGMVPSRSCPSITHGPRLSSVPRTRRRAVHISIMEGLESLRDSAHSTPVRSTSHGDTFLPHVRSSRTDSNERVAVIADEAYSPADSVLPTPVAEHSLELMLLSRQINGATCSIEEEKESEASTPTATEVEALGGELRALCQGHSGPEEEQVNKFVLSVLRLLLVTMGLLFVLLLLLIILTESDLDIAFFRDIRQTPEFEQFHYQYFCPLRRWFACKIRSVVSLLIDT

SEQ ID NO: 27666 - protein, 555 aa, Homo sapiens
MLSRLMSGSSRSLEREYSCTVRLLDDSEYTCTIQRDAKGQYLFDLLCHHLNLLEKDYFGIRFVDPDKQRHWLEFTKSVVKFYPADPAALKEEITRYLVFLQIKRDLYHGRLLCKTSDAALLAAYILQAEIGDYDSGKHPEGYSSKFQFFPKHSEKLERKIAEIHKTELSGQTPATSELNFLRKAQTLETYGVDPHPCKDVSGNAAFLAFTPFGFVVLQGNKRVHFIKWNEVTKLKFEGKTFYLYVSQKEEKKIILTYFAPTPEACKHLWKCGIENQAFYKLEKSSQVRTVSSSNLFFKGSRFRYSGRVAKEVMESSAKIKREPPEIHRAGMVPSRSCPSITHGPRLSSVPRTRRRAVHISIMEGLESLRDSAHSTPVRSTSHGDTFLPHVRSSRTDSNERVAVIADEAYSPADSVLPTPVAEHSLELMLLSRQINGATCSIEEEKESEASTPTATEVEALGGELRALCQGHSGPEEEQVNKFVLSVLRLLLVTMGLLFVLLLLLIILTESDLDIAFFRDIRQTPEFEQFHYQYFCPLRRWFACKIRSVVSLLIDT

SEQ ID NO: 27667 - protein, 585 aa, Homo sapiens
MARPDPSAPPSLLLLLLAQLVGRAAAASKAPVCQEITVPMCRGIGYNLTHMPNQFNHDTQDEAGLEVHQFWPLVEIQCSPDLRFFLCSMYTPICLPDYHKPLPPCRSVCERAKAGCSPLMRQYGFAWPERMSCDRLPVLGRDAEVLCMDYNRSEATTAPPRPFPAKPTLPGPPGAPASGGECPAGGPFVCKCREPFVPILKESHPLYNKVRTGQVPNCAVPCYQPSFSADERTFATFWIGLWSVLCFISTSTTVATFLIDMERFRYPERPIIFLSACYLCVSLGFLVRLVVGHASVACSREHNHIHYETTGPALCTIVFLLVYFFGMASSIWWVILSLTWFLAAGMKWGNEAIAGYAQYFHLAAWLIPSVKSITALALSSVDGDPVAGICYVGNQNLNSLRGFVLGPLVLYLLVGTLFLLAGFVSLFRIRSVIKQGGTKTDKLEKLMIRIGIFTLLYTVPASIVVACYLYEQHYRESWEAALTCACPGHDTGQPRAKPEYWVLMLKYFMCLVVGITSGVWIWSGKTVESWRRFTSRCCCRPRRGHKSGGAMAAGDYPEASAALTGRTGPPGPAATYHKQVSLSHV

SEQ ID NO: 27668 - protein, 637 aa, Homo sapiens
MMFWRKLPKALFIGLTLAIAVNLLLVFSSKGTLQNLFTGGLHRELPLHLNKRYGAVIKRLSHLEVELQDLKESMKLALRQQENVNSTLKRAKDEVRPLLKAMETKVNETKKHKTQMKLFPHSQLFRQWGEDLSEAQQKAAQDLFRKFGYNAYLSNQLPLNRTIPDTRDYRCLRKTYPSQLPSLSVILIFVNEALSIIQRAITSIINRTPSRLLKEIILVDDFSSNGELKVHLDEKIKLYNQKYPGLLKIIRHPERKGLAQARNTGWEAATADVVAILDAHIEVNVGWAEPILARIQEDRTVIVSPVFDNIRFDTFKLDKYELAVDGFNWELWCRYDALPQAWIDLHDVTAPVKSPSIMGILAANRHFLGEIGSLDGGMLIYGGENVELSLRVWQCGGKVEILPCSRIAHLERHHKPYALDLTAALKRNALRVAEIWMDEHKHMVYLAWNIPLQNSGIDFGDVSSRMALREKLKCKTFDWYLKNVYPLLKPLHTIVGYGRMKNLLDENVCLDQGPVPGNTPIMYYCHEFSSQNVYYHLTGELYVGQLIAEASASDRCLTDPGKAEKPTLEPCSKAAKNRLHIYWDFKPGGAVINRDTKRCLEMKKDLLGSHVLVLQTCSTQVWEIQHTVRDWGQTNSQ

SEQ ID NO: 27669 - protein, 574 aa, Homo sapiens
MRDPGAAAPLSSLGLCALVLALLGALSAGAGAQPYHGEKGISVPDHGFCQPISIPLCTDIAYNQTILPNLLGHTNQEDAGLEVHQFYPLVKVQCSPELRFFLCSMYAPVCTVLDQAIPPCRSLCERARQGCEALMNKFGFQWPERLRCENFPVHGAGEICVGQNTSDGSGGPGGGPTAYPTAPYLPDLPFTALPPGASDGRGRPAFPFSCPRQLKVPPYLGYRFLGERDCGAPCEPGRANGLMYFKEEERRFARLWVGVWSVLCCASTLFTVLTYLVDMRRFSYPERPIIFLSGCYFMVAVAHVAGFLLEDRAVCVERFSDDGYRTVAQGTKKEGCTILFMVLYFFGMASSIWWVILSLTWFLAAGMKWGHEAIEANSQYFHLAAWAVPAVKTITILAMGQVDGDLLSGVCYVGLSSVDALRGFVLAPLFVYLFIGTSFLLAGFVSLFRIRTIMKHDGTKTEKLEKLMVRIGVFSVLYTVPATIVLACYFYEQAFREHWERTWLLQTCKSYAVPCPPGHFPPMSPDFTVFMIKYLMTMIVGITTGFWIWSGKTLQSWRRFYHRLSHSSKGETAV

SEQ ID NO: 27670 - protein, 678 aa, Homo sapiens
MAPSLSPGPAALRRAPQLLLLLLAAECALAALLPAREATQFLRPRQRRAFQVFEEAKQGHLERECVEELCSREEAREVFENDPETDYFYPRYLDCINKYGSPYTKNSGFATCVQNLPDQCTPNPCDRKGTQACQDLMGNFFCLCKAGWGGRLCDKDVNECSQENGGCLQICHNKPGSFHCSCHSGFELSSDGRTCQDIDECADSEACGEARCKNLPGSYSCLCDEGFAYSSQEKACRDVDECLQGRCEQVCVNSPGSYTCHCDGRGGLKLSQDMDTCEDILPCVPFSVAKSVKSLYLGRMFSGTPVIRLRFKRLQPTRLVAEFDFRTFDPEGILLFAGGHQDSTWIVLALRAGRLELQLRYNGVGRVTSSGPVINHGMWQTISVEELARNLVIKVNRDAVMKIAVAGDLFQPERGLYHLNLTVGGIPFHEKDLVQPINPRLDGCMRSWNWLNGEDTTIQETVKVNTRMQCFSVTERGSFYPGSGFAFYSLDYMRTPLDVGTESTWEVEVVAHIRPAADTGVLFALWAPDLRAVPLSVALVDYHSTKKLKKQLVVLAVEHTALALMEIKVCDGQEHVVTVSLRDGEATLEVDGTRGQSEVSAAQLQERLAVLERHLRSPVLTFAGGLPDVPVTSAPVTAFYRGCMTLEVNRRLLDLDEAAYKHSDITAHSCPPVEPAAA

SEQ ID NO: 27671 - protein, 721 aa, Homo sapiens
MAPSLSPGPAALRRAPQLLLLLLAAECALAALLPAREATQFLRPRQRRAFQVFEEAKQGHLERECVEELCSREEAREVFENDPETDYFYPRYLDCINKYGSPYTKNSGFATCVQNLPDQCTPNPCDRKGTQACQDLMGNFFCLCKAGWGGRLCDKDVNECSQENGGCLQICHNKPGSFHCSCHSGFELSSDGRTCQDIDECADSEACGEARCKNLPGSYSCLCDEGFAYSSQEKACRDVDECLQGRCEQVCVNSPGSYTCHCDGRGGLKLSQDMDTCELEAGWPCPRHRRDGSPAARPGRGAQGSRSEGHIPDRRGPRPWQDILPCVPFSVAKSVKSLYLGRMFSGTPVIRLRFKRLQPTRLVAEFDFRTFDPEGILLFAGGHQDSTWIVLALRAGRLELQLRYNGVGRVTSSGPVINHGMWQTISVEELARNLVIKVNRDAVMKIAVAGDLFQPERGLYHLNLTVGGIPFHEKDLVQPINPRLDGCMRSWNWLNGEDTTIQETVKVNTRMQCFSVTERGSFYPGSGFAFYSLDYMRTPLDVGTESTWEVEVVAHIRPAADTGVLFALWAPDLRAVPLSVALVDYHSTKKLKKQLVVLAVEHTALALMEIKVCDGQEHVVTVSLRDGEATLEVDGTRGQSEVSAAQLQERLAVLERHLRSPVLTFAGGLPDVPVTSAPVTAFYRGCMTLEVNRRLLDLDEAAYKHSDITAHSCPPVEPAAA

SEQ ID NO: 27672 - protein, 624 aa, Homo sapiens
MCMCQASPPPAALAGCLLSSCVQPAREHGGAFSKAEWLSNCINKYGSPYTKNSGFATCVQNLPDQCTPNPCDRKGTQACQDLMGNFFCLCKAGWGGRLCDKDVNECSQENGGCLQICHNKPGSFHCSCHSGFELSSDGRTCQDIDECADSEACGEARCKNLPGSYSCLCDEGFAYSSQEKACRDVDECLQGRCEQVCVNSPGSYTCHCDGRGGLKLSQDMDTCEDILPCVPFSVAKSVKSLYLGRMFSGTPVIRLRFKRLQPTRLVAEFDFRTFDPEGILLFAGGHQDSTWIVLALRAGRLELQLRYNGVGRVTSSGPVINHGMWQTISVEELARNLVIKVNRDAVMKIAVAGDLFQPERGLYHLNLTVGGIPFHEKDLVQPINPRLDGCMRSWNWLNGEDTTIQETVKVNTRMQCFSVTERGSFYPGSGFAFYSLDYMRTPLDVGTESTWEVEVVAHIRPAADTGVLFALWAPDLRAVPLSVALVDYHSTKKLKKQLVVLAVEHTALALMEIKVCDGQEHVVTVSLRDGEATLEVDGTRGQSEVSAAQLQERLAVLERHLRSPVLTFAGGLPDVPVTSAPVTAFYRGCMTLEVNRRLLDLDEAAYKHSDITAHSCPPVEPAAA

SEQ ID NO: 27673 - protein, 405 aa, Homo sapiens
MDTCEDILPCVPFSVAKSVKSLYLGRMFSGTPVIRLRFKRLQPTRLVAEFDFRTFDPEGILLFAGGHQDSTWIVLALRAGRLELQLRYNGVGRVTSSGPVINHGMWQTISVEELARNLVIKVNRDAVMKIAVAGDLFQPERGLYHLNLTVGGIPFHEKDLVQPINPRLDGCMRSWNWLNGEDTTIQETVKVNTRMQCFSVTERGSFYPGSGFAFYSLDYMRTPLDVGTESTWEVEVVAHIRPAADTGVLFALWAPDLRAVPLSVALVDYHSTKKLKKQLVVLAVEHTALALMEIKVCDGQEHVVTVSLRDGEATLEVDGTRGQSEVSAAQLQERLAVLERHLRSPVLTFAGGLPDVPVTSAPVTAFYRGCMTLEVNRRLLDLDEAAYKHSDITAHSCPPVEPAAA

SEQ ID NO: 27674 - protein, 379 aa, Homo sapiens
MFSGTPVIRLRFKRLQPTRLVAEFDFRTFDPEGILLFAGGHQDSTWIVLALRAGRLELQLRYNGVGRVTSSGPVINHGMWQTISVEELARNLVIKVNRDAVMKIAVAGDLFQPERGLYHLNLTVGGIPFHEKDLVQPINPRLDGCMRSWNWLNGEDTTIQETVKVNTRMQCFSVTERGSFYPGSGFAFYSLDYMRTPLDVGTESTWEVEVVAHIRPAADTGVLFALWAPDLRAVPLSVALVDYHSTKKLKKQLVVLAVEHTALALMEIKVCDGQEHVVTVSLRDGEATLEVDGTRGQSEVSAAQLQERLAVLERHLRSPVLTFAGGLPDVPVTSAPVTAFYRGCMTLEVNRRLLDLDEAAYKHSDITAHSCPPVEPAAA

SEQ ID NO: 27675 - protein, 603 aa, Homo sapiens
MAVARKIRTLLTVNILVFVGIVLFSVYCRLQGRSQELVRIVSGDRRVRSRHAKVGTLGDREAILQRLDHLEEVVYNQLNGLAKPIGLVEGPGGLGQGGLAATLRDDGQEAEGKYEEYGYNAQLSDRISLDRSIPDYRPRKCRQMSYAQDLPQVSVVFIFVNEALSVILRSVHSVVNHTPSQLLKEVILVDDNSDNVELKFNLDQYVNKRYPGLVKIVRNSRREGLIRARLQGWKAATAPVVGFFDAHVEFNTGWAEPALSRIREDRRRIVLPAIDNIKYSTFEVQQYANAAHGYNWGLRCMYIIPPQDWLDRGDESAPIRTPAMIGCSFVVDREYFGDIGLLDPGMEVYGGENVELGMRVWQCGGSMEVLPCSRVAHIERTRKPYNNDIDYYAKRNALRAAEVWMDDFKSHVYMAWNIPMSNPGVDFGDVSERLALRQRLKCRSFKWYLENVYPEMRVYNNTLTYGEVRNSKASAYCLDQGAEDGDRAILYPCHGMSSQLVRYSADGLLQLGPLGSTAFLPDSKCLVDDGTGRMPTLKKCEDVARPTQRLWDFTQSGPIVSRATGRCLEVEMSKDANFGLRLVVQRCSGQKWMIRNWIKHARH

SEQ ID NO: 27676 - protein, 237 aa, Homo sapiens
MEVLPCSRVAHIERTRKPYNNDIDYYAKRNALRAAEVWMDDFKSHVYMAWNIPMSNPGVDFGDVSERLALRQRLKCRSFKWYLENVYPEMRVYNNTLTYGEVRNSKASAYCLDQGAEDGDRAILYPCHGMSSQLVRYSADGLLQLGPLGSTAFLPDSKCLVDDGTGRMPTLKKCEDVARPTQRLWDFTQSGPIVSRATGRCLEVEMSKDANFGLRLVVQRCSGQKWMIRNWIKHARH

SEQ ID NO: 27677 - protein, 914 aa, Homo sapiens
MEAAVKEEISLEDEAVDKNIFRDCNKIAFYRRQKQWLSKKSTYQALLDSVTTDEDSTRFQIINEASKVPLLAEIYGIEGNIFRLKINEETPLKPRFEVPDVLTSKPSTVRLISCSGDTGSLILADGKGDLKCHITANPFKVDLVSEEEVVISINSLGQLYFEHLQILHKQRAAKENEEETSVDTSQENQEDLGLWEEKFGKFVDIKANGPSSIGLDFSLHGFEHLYGIPQHAESHQLKNTGDGDAYRLYNLDVYGYQIYDKMGIYGSVPYLLAHKLGRTIGIFWLNASETLVEINTEPAVEYTLTQMGPVAAKQKVRSRTHVHWMSESGIIDVFLLTGPTPSDVFKQYSHLTGTQAMPPLFSLGYHQCRWNYEDEQDVKAVDAGFDEHDIPYDAMWLDIEHTEGKRYFTWDKNRFPNPKRMQELLRSKKRKLVVISDPHIKIDPDYSVYVKAKDQGFFVKNQEGEDFEGVCWPGLSSYLDFTNPKVREWYSSLFAFPVYQGSTDILFLWNDMNEPSVFRGPEQTMQKNAIHHGNWEHRELHNIYGFYHQMATAEGLIKRSKGKERPFVLTRSFFAGSQKYGAVWTGDNTAEWSNLKISIPMLLTLSITGISFCGADIGGFIGNPETELLVRWYQAGAYQPFFRGHATMNTKRREPWLFGEEHTRLIREAIRERYGLLPYWYSLFYHAHVASQPVMRPLWVEFPDELKTFDMEDEYMLGSALLVHPVTEPKATTVDVFLPGSNEVWYDYKTFAHWEGGCTVKIPVALDTIPVFQRGGSVIPIKTTVGKSTGWMTESSYGLRVALSTKGSSVGELYLDDGHSFQYLHQKQFLHRKFSFCSSVLINSFADQRGHYPSKCVVEKILVLGFRKEPSSVTTHSSDGKDQPVAFTYCAKTSILSLEKLSLNIATDWEVRII

SEQ ID NO: 27678 - protein, 448 aa, Homo sapiens
MSLVDLGKRLLEAARKGQDDEVRTLMANGAPFTTDWLGTSPLHLAAQYGHYSTAEVLLRAGVSRDARTKVDRTPLHMAAADGHAHIVELLVRNGADVNAKDMLKMTALHWATERHHRDVVELLIKYGADVHAFSKFDKSAFDIALEKNNAEILVILQEAMQNQVNVNPERANPVTDPVSMAAPFIFTSGEVVNLASLISSTNTKTTSGDPHASTVQFSNSTTSVLATLAALAEASVPLSNSHRATANTEEIIEGNSVDSSIQQVMGSGGQRVITIVTDGVPLGNIQTSIPTGGIGQPFIVTVQDGQQVLTVPAGKVAEETVIKEEEEEKLPLTKKPRIGEKTNSVEESKEGNERELLQQQLQEANRRAQEYRHQLLKKEQEAEQYRLKLEAIARQQPNGVDFTMVEEVAEVDAVVVTEGELEERETKVTGSAGTTEPHTRVSMATVSS

SEQ ID NO: 27679 - protein, 454 aa, Homo sapiens
MTKREAEELIEIEIDGTEKAECTEESIVEQTYAPAECVSQAIDINEPIGNLKKLLEPRLQCSLDAHEICLQDIQLDPERSLFDQGVKTDGTVQLSVQVISYQGIEPKLNILEIVKPADTVEVVIDPDAHHAESEAHLVEEAQVITLDGTKHITTISDETSEQVTRWAAALEGYRKEQERLGIPYDPIQWSTDQVLHWVVWVMKEFSMTDIDLTTLNISGRELCSLNQEDFFQRVPRGEILWSHLELLRKYVLASQEQQMNEIVTIDQPVQIIPASVQSATPTTIKVINSSAKAAKVQRAPRISGEDRSSPGNRTGNNGQIQLWQFLLELLTDKDARDCISWVGDEGEFKLNQPELVAQKWGQRKNKPTMNYEKLSRALRYYYDGDMICKVQGKRFVYKFVCDLKTLIGYSAAELNRLVTECEQKKLAKMQLHGIAQPVTAVALATASLQTEKDN

SEQ ID NO: 27680 - protein, 365 aa, Homo sapiens
MWLRSHRQLCLAFLLVCVLSVIFFLHIHQDSFPHGLGLSILCPDRRLVTPPVAIFCLPGTAMGPNASSSCPQHPASLSGTWTVYPNGRFGNQMGQYATLLALAQLNGRRAFILPAMHAALAPVFRITLPVLAPEVDSRTPWRELQLHDWMSEEYADLRDPFLKLSGFPCSWTFFHHLREQIRREFTLHDHLREEAQSVLGQLRLGRTGDRPRTFVGVHVRRGDYLQVMPQRWKGVVGDSAYLRQAMDWFRARHEAPVFVVTSNGMEWCKENIDTSQGDVTFAGDGQEATPWKDFALLTQCNHTIMTIGTFGFWAAYLAGGDTVYLANFTLPDSEFLKIFKPEAAFLPEWVGINADLSPLWTLAKP

SEQ ID NO: 27681 - protein, 492 aa, Homo sapiens
MPTNGLHQVLKIQFGLVNDTDRYLTAESFGFKVNASAPSLKRKQTWVLEPDPGQGTAVLLRSSHLGRYLSAEEDGRVACEAEQPGRDCRFLVLPQPDGRWVLRSEPHGRFFGGTEDQLSCFATAVSPAELWTVHLAIHPQAHLLSVSRRRYVHLCPREDEMAADGDKPWGVDALLTLIFRSRRYCLKSCDSRYLRSDGRLVWEPEPRACYTLEFKAGKLAFKDCDGHYLAPVGPAGTLKAGRNTRPGKDELFDLEESHPQVVLVAANHRYVSVRQGVNVSANQDDELDHETFLMQIDQETKKCTFYSSTGGYWTLVTHGGIHATATQVSANTMFEMEWRGRRVALKASNGRYVCMKKNGQLAAISDFVGKDEEFTLKLINRPILVLRGLDGFVCHHRGSNQLDTNRSVYDVFHLSFSDGAYRIRGRDGGFWYTGSHGSVCSDGERAEDFVFEFRERGRLAIRARSGKYLRGGASGLLRADADAPAGTALWEY

SEQ ID NO: 27682 - protein, 516 aa, Homo sapiens
MPTNGLHQVLKIQFGLVNDTDRYLTAESFGFKVNASAPSLKRKQTWVLEPDPGQGTAVLLRSSHLGRYLSAEEDGRVACEAEQPGRDCRFLVLPQPDGRWVLRSEPHGRFFGGTEDQLSCFATAVSPAELWTVHLAIHPQAHLLSVSRRRYVHLCPREDEMAADGDKPWGVDALLTLIFRSRRYCLKSCDSRYLRSDGRLVWEPEPRACYTLEFKAGKLAFKDCDGHYLAPVGPAGTLKAGRNTRPGKDELFDLEESHPQVVLVAANHRYVSVRQGVNVSANQDDELDHETFLMQIDQETKKCTFYSSTGGYWTLVTHGGIHATATQVSANTMFEMEWRGRRVALKASNGRYVCMKKNGQLAAISDFVGPPPRPAWTGKVAGGAAQQTLSPPGKDEEFTLKLINRPILVLRGLDGFVCHHRGSNQLDTNRSVYDVFHLSFSDGAYRIRGRDGGFWYTGSHGSVCSDGERAEDFVFEFRERGRLAIRARSGKYLRGGASGLLRADADAPAGTALWEY

SEQ ID NO: 27683 - protein, 498 aa, Homo sapiens
MDETEWIHRHPKAEDLRVGLISWAGTYLTFEACKNTVTATAKSLGRRQTWEILVSNEHETQAVVRLKSVQGLYLLCECDGTVCYGRPRTSHHGCFLLRFHRNSKWTLQCLISGRYLESNGKDVFCTSHVLSAYHMWTPRPALHVHVILYSPIHRCYARADPTMGRIWVDAAVPCLEECGFLLHFRDGCYHLETSTHHFLSHVDRLFSQPSSQTAFHMQVRPGGLVALCDGEGGMLYPQGTHLLLGMGCNPMRGEEWFILQHCPTWVSLRSKTGRFISVIYDGEVRAASERLNRMSLFQFECDSESPTVQLRSANGYYLSQRRHRAVMADGHPLESDTFFRMHWNCGRIILQSCRGRFLGIAPNSLLMANVILPGPNEEFGILFANRSFLVLRGRYGYVGSSSGHDLIQCNQDQPDRIHLLPCRPGIYHFQAQGGSFWSITSFGTFRPWGKFALNFCIELQGSNLLTVLAPNGFYMRADQSGTLLADSEDITRECIWEF

SEQ ID NO: 27684 - protein, 351 aa, Homo sapiens
MWTPRPALHVHVILYSPIHRCYARADPTMGRIWVDAAVPCLEECGFLLHFRDGCYHLETSTHHFLSHVDRLFSQPSSQTAFHMQVRPGGLVALCDGEGGMLYPQGTHLLLGMGCNPMRGEEWFILQHCPTWVSLRSKTGRFISVIYDGEVRAASERLNRMSLFQFECDSESPTVQLRSANGYYLSQRRHRAVMADGHPLESDTFFRMHWNCGRIILQSCRGRFLGIAPNSLLMANVILPGPNEEFGILFANRSFLVLRGRYGYVGSSSGHDLIQCNQDQPDRIHLLPCRPGIYHFQGGILLVNNILWHLSPLGQVCPQLLYRASGEQLTHCTGPQWLLHASRPKWHPVGRQ

SEQ ID NO: 27685 - protein, 530 aa, Homo sapiens
MDSQKYCFKENENVTVDKACFLISNITIGPESINLQQEALQRIISTLANKNDEIQNFIDTLHHTLKGVQENSSNILSELDEEFDSLYSILDEVKESMINCIKQEQARKSQELQSQISQCNNALENSEELLEFATRSLDIKEPEEFSKAARQIKDRVTMASAFRLSLKPKVSDNMTHLMVDFSQERQMLQTLKFLPVPKAPEIDPVECLVADNSVTVAWRMPEEDNKIDHFILEHRKTNFDGLPRVKDERCWEIIDNIKGTEYTLSGLKFDSKYMNFRVRACNKAVAGEYSDPVTLETKALNFNLDNSSSHLNLKVEDTCVEWDPTGGKGQESKIKGKENKGRSGTPSPKRTSVGSRPPAVRGSRDRFTGESYTVLGDTAIESGQHYWEVKAQKDCKSYSVGVAYKTLGKFDQLGKTNTSWCIHVNNWLQNTFAAKHNNKVKALDVTVPEKIGVFCDFDGGQLSFYDANSKQLLYSFKTKFTQPVLPGFMVWCGGLSLSTGMQVPSAVRTLQKSENGMTGSASSLNNVVTQ

SEQ ID NO: 27686 - protein, 498 aa, Homo sapiens
MDSQKEALQRIISTLANKNDEIQNFIDTLHHTLKGVQENSSNILSELDEEFDSLYSILDEVKESMINCIKQEQARKSQELQSQISQCNNALENSEELLEFATRSLDIKEPEEFSKAARQIKDRVTMASAFRLSLKPKVSDNMTHLMVDFSQERQMLQTLKFLPVPKAPEIDPVECLVADNSVTVAWRMPEEDNKIDHFILEHRKTNFDGLPRVKDERCWEIIDNIKGTEYTLSGLKFDSKYMNFRVRACNKAVAGEYSDPVTLETKALNFNLDNSSSHLNLKVEDTCVEWDPTGGKGQESKIKGKENKGRSGTPSPKRTSVGSRPPAVRGSRDRFTGESYTVLGDTAIESGQHYWEVKAQKDCKSYSVGVAYKTLGKFDQLGKTNTSWCIHVNNWLQNTFAAKHNNKVKALDVTVPEKIGVFCDFDGGQLSFYDANSKQLLYSFKTKFTQPVLPGFMVWCGGLSLSTGMQVPSAVRTLQKSENGMTGSASSLNNVVTQ

SEQ ID NO: 27687 - protein, 145 aa, Homo sapiens
MDSQKEALQRIISTLANKNDEIQNFIDTLHHTLKGVQENSSNILSELDEEFDSLYSILDEVKESMINCIKQEQARKSQELQSQISQCNNALENSEELLEFATRSLDIKEPEEFSKVHKNCINTLNKGSCIFKKAFLFFFSFGFLY

SEQ ID NO: 27688 - protein, 380 aa, Homo sapiens; identical to SEQ ID NO: 204

SEQ ID NO: 27689 - protein, 266 aa, Homo sapiens; identical to SEQ ID NO: 205

SEQ ID NO: 27690 - protein, 344 aa, Homo sapiens; identical to SEQ ID NO: 206

SEQ ID NO: 27691 - protein, 364 aa, Homo sapiens
MNRAPLKRSRILHMALTGASDPSAEAEANGEKPFLLRALQIALVVSLYWVTSISMVFLNKYLLDSPSLRLDTPIFVTFYQCLVTTLLCKGLSALAACCPGAVDFPSLRLDLRVARSVLPLSVVFIGMITFNNLCLKYVGVAFYNVGRSLTTVFNVLLSYLLLKQTTSFYALLTCGIIIGGFWLGVDQEGAEGTLSWLGTVFGVLASLCVSLNAIYTTKVLPAVDGSIWRLTFYNNVNACILFLPLLLLLGELQALRDFAQLGSAHFWGMMTLGGLFGFAIGYVTGLQIKFTSPLTHNVSGTAKACAQTVLAVLYYEETKSFLWWTSNMMVLGGSSAYTWVRGWEMKKTPEEPSPKDSEKSAMGV

SEQ ID NO: 27692 - protein, 351 aa, Homo sapiens
MALTGASDPSAEAEANGEKPFLLRALQIALVVSLYWVTSISMVFLNKYLLDSPSLRLDTPIFVTFYQCLVTTLLCKGLSALAACCPGAVDFPSLRLDLRVARSVLPLSVVFIGMITFNNLCLKYVGVAFYNVGRSLTTVFNVLLSYLLLKQTTSFYALLTCGIIIGGFWLGVDQEGAEGTLSWLGTVFGVLASLCVSLNAIYTTKVLPAVDGSIWRLTFYNNVNACILFLPLLLLLGELQALRDFAQLGSAHFWGMMTLGGLFGFAIGYVTGLQIKFTSPLTHNVSGTAKACAQTVLAVLYYEETKSFLWWTSNMMVLGGSSAYTWVRGWEMKKTPEEPSPKDSEKSAMGV

SEQ ID NO: 27693 - protein, 496 aa, Homo sapiens
MEEQREALRKIIKTLAVKNEEIQSFIYSLKQMLLNVEANSAKVQEDLEAEFQSLFSLLEELKEGMLMKIKQDRASRTYELQNQLAACTRALESSEELLETANQTLQAMDSEDFPQAAKQIKDGVTMAPAFRLSLKAKVSDNMSHLMVDFAQERQMLQALKFLPVPSAPVIDLAESLVADNCVTLVWRMPDEDSKIDHYVLEYRRTNFEGPPRLKEDQPWMVIEGIRQTEYTLTGLKFDMKYMNFRVKACNKAVAGEFSEPVTLETPAFMFRLDASTSHQNLRVDDLSVEWDAMGGKVQDIKAREKDGKGRTASPINSPARGTPSPKRMPSGRGGRDRFTAESYTVLGDTLIDGGEHYWEVRYEPDSKAFGVGVAYRSLGRFEQLGKTAASWCLHVNNWLQVSFTAKHANKVKVLDAPVPDCLGVHCDFHQGLLSFYNARTKQVLHTFKTRFTQPLLPAFTVWCGSFQVTTGLQVPSAVRCLQKRGSATSSSNTSLT

SEQ ID NO: 27694 - protein, 350 aa, Homo sapiens
MLGSVKMEAHDLAEWSYYPEAGEVYSPVTPVPTMAPLNSYMTLNPLSSPYPPGGLPASPLPSGPLAPPAPAAPLGPTFPGLGVSGGSSSSGYGAPGPGLVHGKEMPKGYRRPLAHAKPPYSYISLITMAIQQAPGKMLTLSEIYQWIMDLFPYYRENQQRWQNSIRHSLSFNDCFVKVARSPDKPGKGSYWALHPSSGNMFENGCYLRRQKRFKLEEKVKKGGSGAATTTRNGTGSAASTTTPAATVTSPPQPPPPAPEPEAQGGEDVGALDCGSPASSTPYFTGLELPGELKLDAPYNFNHPFSINNLMSEQTPAPPKLDVGFGGYGAEGGEPGVYYQGLYSRSLLNAS

SEQ ID NO: 27695 - protein, 325 aa, Homo sapiens
MPRPGRNTYSDQKPPYSYISLTAMAIQSSPEKMLPLSEIYKFIMDRFPYYRENTQRWQNSLRHNLSFNDCFIKIPRRPDQPGKGSFWALHPSCGDMFENGSFLRRRKRFKVLKSDHLAPSKPADAAQYLQQQAKLRLSALAASGTHLPQMPAAAYNLGGVAQPSGFKHPFAIENIIAREYKMPGGLAFSAMQPVPAAYPLPNQLTTMGSSLGTGWPHVYGSAGMIDSATPISMASGDYSAYGVPLKPLCHAAGQTLPAIPVPIKPTPAAVPALPALPAPIPTLLSNSPPSLSPTSSQTATSQSSPATPSETLTSPASALHSVAVH

SEQ ID NO: 27696 - protein, 432 aa, Homo sapiens
MPRPGKSSYSDQKPPYSYISLTAMAIQHSAEKMLPLSDIYKFIMERFPYYREHTQRWQNSLRHNLSFNDCFIKIPRRPDQPGKGSFWALHPDCGDMFENGSFLRRRKRFKVLRADHTHLHAGSTKSAPGAGPGGHLHPHHHHHPHHHHHHHAAAHHHHHHHPPQPPPPPPPPPPHMVHYFHQQPPTAPQPPPHLPSQPPQQPPQQSQPQQPSHPGKMQEAAAVAAAAAAAAAAAVGSVGRLSQFPPYGLGSAAAAAAAAAASTSGFKHPFAIENIIGRDYKGVLQAGGLPLASVMHHLGYPVPGQLGNVVSSVWPHVGVMDSVAAAAAAAAAAGVPVGPEYGAFGVPVKSLCHSASQSLPAMPVPIKPTPALPPVSALQPGLTVPAASQQPPAPSTVCSAAAASPVASLLEPTAPTSAESKGGSLHSVLVHS

SEQ ID NO: 27697 - protein, 553 aa, Homo sapiens
MQARYSVSSPNSLGVVPYLGGEQSYYRAAAAAAGGGYTAMPAPMSVYSHPAHAEQYPGGMARAYGPYTPQPQPKDMVKPPYSYIALITMAIQNAPDKKITLNGIYQFIMDRFPFYRDNKQGWQNSIRHNLSLNECFVKVPRDDKKPGKGSYWTLDPDSYNMFENGSFLRRRRRFKKKDAVKDKEEKDRLHLKEPPPPGRQPPPAPPEQADGNAPGPQPPPVRIQDIKTENGTCPSPPQPLSPAAALGSGSAAAVPKIESPDSSSSSLSSGSSPPGSLPSARPLSLDGADSAPPPPAPSAPPPHHSQGFSVDNIMTSLRGSPQSAAAELSSGLLASAAASSRAGIAPPLALGAYSPGQSSLYSSPCSQTSSAGSSGGGGGGAGAAGGAGGAGTYHCNLQAMSLYAAGERGGHLQGAPGGAGGSAVDDPLPDYSLPPVTSSSSSSLSHGGGGGGGGGGQEAGHHPAAHQGRLTSWYLNQAGGDLGHLASAAAAAAAAGYPGQQQNFHSVREMFESQRIGLNNSPVNGNSSCQMAFPSSQSLYRTSGAFVYDCSKF

SEQ ID NO: 27698 - protein, 501 aa, Homo sapiens
MQARYSVSDPNALGVVPYLSEQNYYRAAGSYGGMASPMGVYSGHPEQYSAGMGRSYAPYHHHQPAAPKDLVKPPYSYIALITMAIQNAPEKKITLNGIYQFIMDRFPFYRENKQGWQNSIRHNLSLNECFVKVPRDDKKPGKGSYWTLDPDSYNMFENGSFLRRRRRFKKKDVSKEKEERAHLKEPPPAASKGAPATPHLADAPKEAEKKVVIKSEAASPALPVITKVETLSPESALQGSPRSAASTPAGSPDGSLPEHHAAAPNGLPGFSVENIMTLRTSPPGGELSPGAGRAGLVVPPLALPYAAAPPAAYGQPCAQGLEAGAAGGYQCSMRAMSLYTGAERPAHMCVPPALDEALSDHPSGPTSPLSALNLAAGQEGALAATGHHHQHHGHHHPQAPPPPPAPQPQPTPQPGAAAAQAASWYLNHSGDLNHLPGHTFAAQQQTFPNVREMFNSHRLGIENSTLGESQVSGNASCQLPYRSTPPLYRHAAPYSYDCTKY

SEQ ID NO: 27699 - protein, 465 aa, Homo sapiens
MTLSTEMSDASGLAEETDIDVVGEGEDEEDEEEEDDDEGGGGGPRLAVPAQRRRRRRSYAGEDELEDLEEEEDDDDILLAPPAGGSPAPPGPAPAAGAGAGGGGGGGGAGGGGSAGSGAKNPLVKPPYSYIALITMAILQSPKKRLTLSEICEFISGRFPYYREKFPAWQNSIRHNLSLNDCFVKIPREPGNPGKGNYWTLDPESADMFDNGSFLRRRKRFKRQPLLPPNAAAAESLLLRGAGAAGGAGDPAAAAALFPPAPPPPPHAYGYGPYGCGYGLQLPPYAPPSALFAAAAAAAAAAAFHPHSPPPPPPPHGAAAELARTAFGYRPHPLGAALPGPLPASAAKAGGPGASALARSPFSIESIIGGSLGPAAAAAAAAQAAAAAQASPSPSPVAAPPAPGSSGGGCAAQAAVGPAAALTRSLVAAAAAAASSVSSSAALGTLHQGTALSSVENFTARISNC

SEQ ID NO: 27700 - protein, 495 aa, Homo sapiens
MTLGSCCCEIMSSESSPAALSEADADIDVVGGGSGGGELPARSGPRAPRDVLPHGHEPPAEEAEADLAEDEEESGGCSDGEPRALASRGAAAAAGSPGPGAAAARGAAGPGPGPPSGGAATRSPLVKPPYSYIALITMAILQSPKKRLTLSEICEFISGRFPYYREKFPAWQNSIRHNLSLNDCFVKIPREPGNPGKGNYWTLDPESADMFDNGSFLRRRKRFKRQPLPPPHPHPHPHPELLLRGGAAAAGDPGAFLPGFAAYGAYGYGYGLALPAYGAPPPGPAPHPHPHPHAFAFAAAAAAAPCQLSVPPGRAAAPPPGPPTASVFAGAGSAPAPAPASGSGPGPGPAGLPAFLGAELGCAKAFYAASLSPPAAGTAAGLPTALLRQGLKTDAGGGAGGGGAGAGQRPSFSIDHIMGHGGGGAAPPGAGEGSPGPPFAAAAGPGGQAQVLAMLTAPALAPVAGHIRLSHPGDALLSSGSRFASKVAGLSGCHF

SEQ ID NO: 27701 - protein, 350 aa, Homo sapiens
METNSSLPTNISGGTPAVSAGYLFLDIITYLVFAVTFVLGVLGNGLVIWVAGFRMTHTVTTISYLNLAVADFCFTSTLPFFMVRKAMGGHWPFGWFLCKFVFTIVDINLFGSVFLIALIALDRCVCVLHPVWTQNHRTVSLAKKVIIGPWVMALLLTLPVIIRVTTVPGKTGTVACTFNFSPWTNDPKERINVAVAMLTVRGIIRFIIGFSAPMSIVAVSYGLIATKIHKQGLIKSSRPLRVLSFVAAAFFLCWSPYQVVALIATVRIRELLQGMYKEIGIAVDVTSALAFFNSCLNPMLYVFMGQDFRERLIHALPASLERALTEDSTQTSDTATNSTLPSAEVELQAK

SEQ ID NO: 27702 - protein, 319 aa, Homo sapiens
MAGRSDMDPPAAFSGFPALPAVAPSGPPPSPLAGAEPGREPEEAAAGRGEAAPTPAPGPGRRRRRPLQRGKPPYSYIALIAMALAHAPGRRLTLAAIYRFITERFAFYRDSPRKWQNSIRHNLTLNDCFVKVPREPGNPGKGNYWTLDPAAADMFDNGSFLRRRKRFKRAELPAHAAAAPGPPLPFPYAPYAPAPGPALLVPPPSAGPGPSPPARLFSVDSLVNLQPELAGLGAPEPPCCAAPDAAAAAFPPCAAAASPPLYSQVPDRLVLPATRPGPGPLPAEPLLALAGPAAALGPLSPGEAYLRQPGFASGLERYL

SEQ ID NO: 27703 - protein, 420 aa, Homo sapiens
MALYCGDNFGVYSQPGLPPPAATAAAPGAPPAARAPYGLADYAAPPAAAANPYLWLNGPGVGGPPSAAAAAAAAYLGAPPPPPPPGAAAGPFLQPPPAAGTFGCSQRPFAQPAPAAPASPAAPAGPGELGWLSMASREDLMKMVRPPYSYSALIAMAIQSAPERKLTLSHIYQFVADSFPFYQRSKAGWQNSIRHNLSLNDCFKKVPRDEDDPGKGNYWTLDPNCEKMFDNGNFRRKRKRRSEASNGSTVAAGTSKSEEGLSSGLGSGVGGKPEEESPSTLLRPSHSPEPPEGTKSTASSPGGPMLTSTPCLNTFFSSLSSLSVSSSVSTQRALPGSRHLGIQGAQLPSSGVFSPTSISEASADTLQLSNSTSNSTGQRSSYYSPFPASTSGGQSSPFSSPFHNFSMVNSLIYPREGSEV

SEQ ID NO: 27704 - protein, 421 aa, Homo sapiens
MAESWLRLSGAGPAEEAGPEGGLEEPDALDDSLTSLQWLQEFSILNAKAPALPPGGTDPHGYHQVPGSAAPGSPLAADPACLGQPHTPGKPTSSCTSRSAPPGLQAPPPDDVDYATNPHVKPPYSYATLICMAMQASKATKITLSAIYKWITDNFCYFRHADPTWQNSIRHNLSLNKCFIKVPREKDEPGKGGFWRIDPQYAERLLSGAFKKRRLPPVHIHPAFARQAAQEPSAVPRAGPLTVNTEAQQLLREFEEATGEAGWGAGEGRLGHKRKQPLPKRVAKVPRPPSTLLPTPEEQGELEPLKGNFDWEAIFDAGTLGGELGALEALELSPPLSPASHVDVDLTIHGRHIDCPATWGPSVEQAADSLDFDETFLATSFLQHPWDESGSGCLPPEPLFEAGDATLASDLQDWASVGAFL

SEQ ID NO: 27705 - protein, 510 aa, Homo sapiens
MYRALRLLARSRPLVRAPAAALASAPGLGGAAVPSFWPPNAARMASQNSFRIEYDTFGELKVPNDKYYGAQTVRSTMNFKIGGVTERMPTPVIKAFGILKRAAAEVNQDYGLDPKIANAIMKAADEVAEGKLNDHFPLVVWQTGSGTQTNMNVNEVISNRAIEMLGGELGSKIPVHPNDHVNKSQSSNDTFPTAMHIAAAIEVHEVLLPGLQKLHDALDAKSKEFAQIIKIGRTHTQDAVPLTLGQEFSGYVQQVKYAMTRIKAAMPRIYELAAGGTAVGTGLNTRIGFAEKVAAKVAALTGLPFVTAPNKFEALAAHDALVELSGAMNTTACSLMKIANDIRFLGSGPRSGLGELILPENEPGSSIMPGKVNPTQCEAMTMVAAQVMGNHVAVTVGGSNGHFELNVFKPMMIKNVLHSARLLGDASVSFTENCVVGIQANTERINKLMNESLMLVTALNPHIGYDKAAKIAKTAHKNGSTLKETAIELGYLTAEQFDEWVKPKDMLGPK

SEQ ID NO: 27706 - protein, 467 aa, Homo sapiens
MASQNSFRIEYDTFGELKVPNDKYYGAQTVRSTMNFKIGGVTERMPTPVIKAFGILKRAAAEVNQDYGLDPKIANAIMKAADEVAEGKLNDHFPLVVWQTGSGTQTNMNVNEVISNRAIEMLGGELGSKIPVHPNDHVNKSQSSNDTFPTAMHIAAAIEVHEVLLPGLQKLHDALDAKSKEFAQIIKIGRTHTQDAVPLTLGQEFSGYVQQVKYAMTRIKAAMPRIYELAAGGTAVGTGLNTRIGFAEKVAAKVAALTGLPFVTAPNKFEALAAHDALVELSGAMNTTACSLMKIANDIRFLGSGPRSGLGELILPENEPGSSIMPGKVNPTQCEAMTMVAAQVMGNHVAVTVGGSNGHFELNVFKPMMIKNVLHSARLLGDASVSFTENCVVGIQANTERINKLMNESLMLVTALNPHIGYDKAAKIAKTAHKNGSTLKETAIELGYLTAEQFDEWVKPKDMLGPK

SEQ ID NO: 27707 - protein, 212 aa, Homo sapiens
MRSRLLLSVAHLPTIRETTEEMLLGGPGQEPPPSPSLDDYVRSISRLAQPTSVLDKATAQGQPRPPHRPAQACRKGRPAVSLRDITARFSGQQPTLPMADTVDPLDWLFGESQEKQPSQRDLPRRTGPSAGLWGPHRQMDSSKPMGAPRGRLCEARMPGHSLARPPQDGQQSSDLRSWTFGQSAQAMASRHRPRPSSVLRTLYSHLPVIHEL

SEQ ID NO: 27708 - protein, 648 aa, Homo sapiens
MVSLPPPQSDVTLPGPTRLEGERQGDLMQAPGLPGSPAPQSKHAGFSCSSFVSDGPPERTPSLPPHSPRIASPGPEQVQGHCPAGPGPGPFRLSPSDKYPGFGFEEAAASSPGRFLKGSHAPFHPYKRPFHEDVFPEAETTLALKGHSFKTPGPLEAFEEIPVDVAEAEAFLPGFSAEAWCNGLPYPSQEHGPQVLGSEVKVKPPVLESGAGMFCYQPPLQHMYCSSQPPFHQYSPGGGSYPIPYLGSSHYQYQRMAPQASTDGHQPLFPKPIYSYSILIFMALKNSKTGSLPVSEIYNFMTEHFPYFKTAPDGWKNSVRHNLSLNKCFEKVENKSGSSSRKGCLWALNPAKIDKMQEELQKWKRKDPIAVRKSMAKPEELDSLIGDKREKLGSPLLGCPPPGLSGSGPIRPLAPPAGLSPPLHSLHPAPGPIPGKNPLQDLLMGHTPSCYGQTYLHLSPGLAPPGPPQPLFPQPDGHLELRAQPGTPQDSPLPAHTPPSHSAKLLAEPSPARTMHDTLLPDGDLGTDLDAINPSLTDFDFQGNLWEQLKDDSLALDPLVLVTSSPTSSSMPPPQPPPHCFPPGPCLTETGSGAGDLAAPGSGGSGALGDLHLTTLYSAFMELEPTPPTAPAGPSVYLSPSSKPVALA

SEQ ID NO: 27709 - protein, 442 aa, Homo sapiens
MGGSAPPDSSWRGSLKVSYNVGPGFTGNFSTQKVKMHIHSTNEVTRIYNVIGTLRGAVEPDRYVILGGHRDSWVFGGIDPQSGAAVVHETVRSFGTLKKEGWRPRRTILFASWDAEEFGLLGSTEWAEDNSRLLQERGVAYINADSSIEGNYTLRVDCTPLMYSLVYNLTKELKSPDEGFEGKSLYESWTKKSPSPEFSGMPRISKLGSGNDFEVFFQRLGIASGRARYTKNWETNKFSGYPLYHSVYETYELVEKFYDPMFKYHLTVAQVRGGMVFELANSIVLPFDCRDYAVVLRKYADKIYNISMKHPQEMKTYSLSFDSLFSAVKNFTEIASKFSERLQDFDKSNPILLRMMNDQLMFLERAFIDPLGLPDRPFYRHVIYAPSSHNKYAGESFPGIYDALFDIESKVDPSKAWGDVKRQISVAAFTVQAAAETLSEVA

SEQ ID NO: 27710 - protein, 549 aa, Homo sapiens
MAVPPRGRGIDPARTNPDTFPPSGARCMEPSPERPACSQQEPTLGMDAMASEHRDVLVLLPSREQLRLAVGVKATGRELFQQVCNVASIRDAQFFGLCVVRNNEYIFMDLEQKLSKYFSKDWKKERNEGNEKPRAPFVAFLRVQHYVENGRVISDHRARHLYYCHLKERVLRSQCAHREEAYFLLAACALQADLGEHRESAHAGRYFEPHSYFPQWIITKRGIDYILRHMPTLHRERQGLSPKEAMLCFIQEACRLEDVPVHFFRLHKDKKEGRPTVILGLALRGVHIYQGKKLEIQLDGLPAAQKLVYYTGCTWRSRHLLHLLRASHQLHLRVRPTLQQLRQREEAEEKQHYRESYISDELELDLASRSFPGSGVSSQHCPHCLSRHSADSHGSSYTSGIKANSWLRESREMSVDVPLEVHGLHEKEPSSSPRTSRSHPSTRGDSQATRQEPCTQVRTRGQSAEAVHQIQEMTAGVSEEQHSHGLDDMQLHQLALHPAPTSLSHTFHRALDCRLAGPCETRATLPSKRSSNCLALDLFGEAPPQEFVV

SEQ ID NO: 27711 - protein, 481 aa, Homo sapiens
MDDVKATGRELFQQVCNVASIRDAQFFGLCVVRNNEYIFMDLEQKLSKYFSKDWKKERNEGNEKPRAPFVAFLRVQHYVENGRVISDHRARHLYYCHLKERVLRSQCAHREEAYFLLAACALQADLGEHRESAHAGRYFEPHSYFPQWIITKRGIDYILRHMPTLHRERQGLSPKEAMLCFIQEACRLEDVPVHFFRLHKDKKEGRPTVILGLALRGVHIYQGKKLEIQLDGLPAAQKLVYYTGCTWRSRHLLHLLRASHQLHLRVRPTLQQLRQREEAEEKQHYRESYISDELELDLASRSFPGSGVSSQHCPHCLSRHSADSHGSSYTSGIKANSWLRESREMSVDVPLEVHGLHEKEPSSSPRTSRSHPSTRGDSQATRQEPCTQVRTRGQSAEAVHQIQEMTAGVSEEQHSHGLDDMQLHQLALHPAPTSLSHTFHRALDCRLAGPCETRATLPSKRSSNCLALDLFGEAPPQEFVV

SEQ ID NO: 27712 - protein, 677 aa, Homo sapiens; identical to SEQ ID NO: 244

SEQ ID NO: 27713 - protein, 603 aa, Homo sapiens; identical to SEQ ID NO: 245

SEQ ID NO: 27714 - protein, 679 aa, Homo sapiens; identical to SEQ ID NO: 246

SEQ ID NO: 27715 - protein, 114 aa, Homo sapiens; identical to SEQ ID NO: 247

SEQ ID NO: 27716 - protein, 601 aa, Homo sapiens; identical to SEQ ID NO: 248

SEQ ID NO: 27717 - protein, 676 aa, Homo sapiens; identical to SEQ ID NO: 249

SEQ ID NO: 27718 - protein, 693 aa, Homo sapiens; identical to SEQ ID NO: 250

SEQ ID NO: 27719 - protein, 257 aa, Homo sapiens
MAQRMTTQLLLLLVWVAVVGEAQTRIAWARTELLNVCMNAKHHKEKPGPEDKLHEQCRPWRKNACCSTNTSQEAHKDVSYLYRFNWNHCGEMAPACKRHFIQDTCLYECSPNLGPWIQQVDQSWRKERVLNVPLCKEDCEQWWEDCRTSYTCKSNWHKGWNWTSGFNKCAVGAACQPFHFYFPTPTVLCNEIWTHSYKVSNYSRGSGRCIQMWFDPAQGNPNEEVARFYAAAMSGAGPWAAWPFLLSLALMLLWLLS

SEQ ID NO: 27720 - protein, 255 aa, Homo sapiens
MVWKWMPLLLLLVCVATMCSAQDRTDLLNVCMDAKHHKTKPGPEDKLHDQCSPWKKNACCTASTSQELHKDTSRLYNFNWDHCGKMEPACKRHFIQDTCLYECSPNLGPWIQQVNQSWRKERFLDVPLCKEDCQRWWEDCHTSHTCKSNWHRGWDWTSGVNKCPAGALCRTFESYFPTPAALCEGLWSHSYKVSNYSRGSGRCIQMWFDSAQGNPNEEVARFYAAAMHVNAGEMLHGTGGLLLSLALMLQLWLLG

SEQ ID NO: 27721 - protein, 715 aa, Homo sapiens
MMQESATETISNSSMNQNGMSTLSSQLDAGSRDGRSSGDTSSEVSTVELLHLQQQQALQAARQLLLQQQTSGLKSPKSSDKQRPLQVPVSVAMMTPQVITPQQMQQILQQQVLSPQQLQALLQQQQAVMLQQQQLQEFYKKQQEQLHLQLLQQQQQQQQQQQQQQQQQQQQQQQQQQQQQQQQQQQQQQQQHPGKQAKEQQQQQQQQQQLAAQQLVFQQQLLQMQQLQQQQHLLSLQRQGLISIPPGQAALPVQSLPQAGLSPAEIQQLWKEVTGVHSMEDNGIKHGGLDLTTNNSSSTTSSNTSKASPPITHHSIVNGQSSVLSARRDSSSHEETGASHTLYGHGVCKWPGCESICEDFGQFLKHLNNEHALDDRSTAQCRVQMQVVQQLEIQLSKERERLQAMMTHLHMRPSEPKPSPKPLNLVSSVTMSKNMLETSPQSLPQTPTTPTAPVTPITQGPSVITPASVPNVGAIRRRHSDKYNIPMSSEIAPNYEFYKNADVRPPFTYATLIRQAIMESSDRQLTLNEIYSWFTRTFAYFRRNAATWKNAVRHNLSLHKCFVRVENVKGAVWTVDEVEYQKRRSQKITGSPTLVKNIPTSLGYGAALNASLQAALAESSLPLLSNPGLINNASSGLLQAVHEDLNGSLDHIDSNGNSSPGCSPQPHIHSIHVKEEPVIAEDEDCPMSLVTTANHSPELEDDREIEEEPLSEDLE

SEQ ID NO: 27722 - protein, 623 aa, Homo sapiens
MMTPQVITPQQMQQILQQQVLSPQQLQALLQQQQAVMLQQQQLQEFYKKQQEQLHLQLLQQQQQQQQQQQQQQQQQQQQQQQQQQQQQQQQQQQQQQQQHPGKQAKEQQQQQQQQQQLAAQQLVFQQQLLQMQQLQQQQHLLSLQRQGLISIPPGQAALPVQSLPQAGLSPAEIQQLWKEVTGVHSMEDNGIKHGGLDLTTNNSSSTTSSNTSKASPPITHHSIVNGQSSVLSARRDSSSHEETGASHTLYGHGVCKWPGCESICEDFGQFLKHLNNEHALDDRSTAQCRVQMQVVQQLEIQLSKERERLQAMMTHLHMRPSEPKPSPKPLNLVSSVTMSKNMLETSPQSLPQTPTTPTAPVTPITQGPSVITPASVPNVGAIRRRHSDKYNIPMSSEIAPNYEFYKNADVRPPFTYATLIRQAIMESSDRQLTLNEIYSWFTRTFAYFRRNAATWKNAVRHNLSLHKCFVRVENVKGAVWTVDEVEYQKRRSQKITGSPTLVKNIPTSLGYGAALNASLQAALAESSLPLLSNPGLINNASSGLLQAVHEDLNGSLDHIDSNGNSSPGCSPQPHIHSIHVKEEPVIAEDEDCPMSLVTTANHSPELEDDREIEEEPLSEDLE

SEQ ID NO: 27723 - protein, 740 aa, Homo sapiens
MMQESATETISNSSMNQNGMSTLSSQLDAGSRDGRSSGDTSSEVSTVELLHLQQQQALQAARQLLLQQQTSGLKSPKSSDKQRPLQELLPETKLCICGHSSGDGHPHNTFAVPVSVAMMTPQVITPQQMQQILQQQVLSPQQLQALLQQQQAVMLQQQQLQEFYKKQQEQLHLQLLQQQQQQQQQQQQQQQQQQQQQQQQQQQQQQQQQQQQQQQQHPGKQAKEQQQQQQQQQQLAAQQLVFQQQLLQMQQLQQQQHLLSLQRQGLISIPPGQAALPVQSLPQAGLSPAEIQQLWKEVTGVHSMEDNGIKHGGLDLTTNNSSSTTSSNTSKASPPITHHSIVNGQSSVLSARRDSSSHEETGASHTLYGHGVCKWPGCESICEDFGQFLKHLNNEHALDDRSTAQCRVQMQVVQQLEIQLSKERERLQAMMTHLHMRPSEPKPSPKPLNLVSSVTMSKNMLETSPQSLPQTPTTPTAPVTPITQGPSVITPASVPNVGAIRRRHSDKYNIPMSSEIAPNYEFYKNADVRPPFTYATLIRQAIMESSDRQLTLNEIYSWFTRTFAYFRRNAATWKNAVRHNLSLHKCFVRVENVKGAVWTVDEVEYQKRRSQKITGSPTLVKNIPTSLGYGAALNASLQAALAESSLPLLSNPGLINNASSGLLQAVHEDLNGSLDHIDSNGNSSPGCSPQPHIHSIHVKEEPVIAEDEDCPMSLVTTANHSPELEDDREIEEEPLSEDLE

SEQ ID NO: 27724 - protein, 168 aa, Homo sapiens
MMQESATETISNSSMNQNGMSTLSSQLDAGSRDGRSSGDTSSEVSTVELLHLQQQQALQAARQLLLQQQTSGLKSPKSSDKQRPLQELLPETKLCICGHSSGDGHPHNTFAVPVSVAMMTPQVITPQQMQQILQQQVLSPQQLQALLQQQQAVMLQQVMWVTCFGVLA

SEQ ID NO: 27725 - protein, 432 aa, Homo sapiens
MMQESATETISNSSMNQNGMSTLSSQLDAGSRDGRSSGDTSSEVSTVELLHLQQQQALQAARQLLLQQQTSGLKSPKSSDKQRPLQVPVSVAMMTPQVITPQQMQQILQQQVLSPQQLQALLQQQQAVMLQQQQLQEFYKKQQEQLHLQLLQQQQQQQQQQQQQQQQQQQQQQQQQQQQQQQQQQQQQQQQHPGKQAKEQQQQQQQQQQLAAQQLVFQQQLLQMQQLQQQQHLLSLQRQGLISIPPGQAALPVQSLPQAGLSPAEIQQLWKEVTGVHSMEDNGIKHGGLDLTTNNSSSTTSSNTSKASPPITHHSIVNGQSSVLSARRDSSSHEETGASHTLYGHGVCKWPGCESICEDFGQFLKHLNNEHALDDRSTAQCRVQMQVVQQLEIQLSKERERLQAMMTHLHMRPSEPKPSPKPVSAYCFINSK

SEQ ID NO: 27726 - protein, 365 aa, Homo sapiens
MMQESATETISNSSMNQNGMSTLSSQLDAGSRDGRSSGDTSSEVSTVELLHLQQQQALQAARQLLLQQQTSGLKSPKSSDKQRPLQVPVSVAMMTPQVITPQQMQQILQQQVLSPQQLQALLQQQQAVMLQQQQLQEFYKKQQEQLHLQLLQQQQQQQQQQQQQQQQQQQQQQQQQQQQQQQQQQQQQQQQHPGKQAKEQQQQQQQQQQLAAQQLVFQQQLLQMQQLQQQQHLLSLQRQGLISIPPGQAALPVQSLPQAGLSPAEIQQLWKEVTGVHSMEDNGIKHGGLDLTTNNSSSTTSSNTSKASPPITHHSIVNGQSSVLSARRDSSSHEETGASHTLYGHGVCKWPGCESICEDFGQFLK

SEQ ID NO: 27727 - protein, 87 aa, Homo sapiens
MMQESATETISNSSMNQNGMSTLSSQLDAGSRDGRSSGDTSSEVSTVELLHLQQQQALQAARQLLLQQQTSGLKSPKSSDKQRPLQP

SEQ ID NO: 27728 - protein, 732 aa, Homo sapiens
MMQESATETISNSSMNQNGMSTLSSQLDAGSRDGRSSGDTSSEVSTVELLHLQQQQALQAARQLLLQQQTSGLKSPKSSDKQRPLQVPVSVAMMTPQVITPQQMQQILQQQVLSPQQLQALLQQQQAVMLQQDFLDSGLENFRAALEKNQQLQEFYKKQQEQLHLQLLQQQQQQQQQQQQQQQQQQQQQQQQQQQQQQQQQQQQQQQQHPGKQAKEQQQQQQQQQQLAAQQLVFQQQLLQMQQLQQQQHLLSLQRQGLISIPPGQAALPVQSLPQAGLSPAEIQQLWKEVTGVHSMEDNGIKHGGLDLTTNNSSSTTSSNTSKASPPITHHSIVNGQSSVLSARRDSSSHEETGASHTLYGHGVCKWPGCESICEDFGQFLKHLNNEHALDDRSTAQCRVQMQVVQQLEIQLSKERERLQAMMTHLHMRPSEPKPSPKPLNLVSSVTMSKNMLETSPQSLPQTPTTPTAPVTPITQGPSVITPASVPNVGAIRRRHSDKYNIPMSSEIAPNYEFYKNADVRPPFTYATLIRQAIMESSDRQLTLNEIYSWFTRTFAYFRRNAATWKNAVRHNLSLHKCFVRVENVKGAVWTVDEVEYQKRRSQKITGSPTLVKNIPTSLGYGAALNASLQAALAESSLPLLSNPGLINNASSGLLQAVHEDLNGSLDHIDSNGNSSPGCSPQPHIHSIHVKEEPVIAEDEDCPMSLVTTANHSPELEDDREIEEEPLSEDLE

SEQ ID NO: 27729 - protein, 245 aa, Homo sapiens
MDMAWQMMQLLLLALVTAAGSAQPRSARARTDLLNVCMNAKHHKTQPSPEDELYGQCSPWKKNACCTASTSQELHKDTSRLYNFNWDHCGKMEPTCKRHFIQDSCLYECSPNLGPWIRQVNQSWRKERILNVPLCKEDCERWWEDCRTSYTCKSNWHKGWNWTSGINECPAGALCSTFESYFPTPAALCEGLWSHSFKVSNYSRGSGRCIQMWFDSAQGNPNEEVAKFYAAAMNAGAPSRGIIDS

SEQ ID NO: 27730 - protein, 172 aa, Homo sapiens
MDMAWQMMQLLLLALVTAAGSAQPRSARARTDLLNVCMNAKHHKTQPSPEDELYGQVGAPQGPSPGSVPLDDLPGAEEPEYGGDGCGGERLSPVSSPPSAVPGRRMPAARPAPARSCTRTPPACTTLTGITVVRWNPPASATLSRTAVSMSAHPTWGPGSGRSTRAGAKSAF

SEQ ID NO: 27731 - protein, 215 aa, Homo sapiens
MGLRTTKQMGRGTKAPGHQEDHMVKEPVEDTDPSTLSFNMSDKYPIQDTELPKAEECDTITLNCPRNSDMKNQGEENGFPDSTGDPLPEISKDNSCKENCTCSSCLLRAPTISDLLNDQDLLDVIRIKLDPCHPTVKNWRNFASKWGMSYDELCFLEQRPQSPTLEFLLRNSQRTVGQLMELCRLYHRADVEKVLRRWVDEEWPKRERGDPSRHF

SEQ ID NO: 27732 - protein, 205 aa, Homo sapiens
MASPDDPLRADHMVKEPVEDTDPSTLSFNMSDKYPIQDTELPKAEECDTITLNCPRNSDMKNQGEENGFPDSTGDPLPEISKDNSCKENCTCSSCLLRAPTISDLLNDQDLLDVIRIKLDPCHPTVKNWRNFASKWGMSYDELCFLEQRPQSPTLEFLLRNSQRTVGQLMELCRLYHRADVEKVLRRWVDEEWPKRERGDPSRHF

SEQ ID NO: 27733 - protein, 364 aa, Homo sapiens
MGILEKISEIEKEIARTQKNKATEYHLGLLKAKLAKYRAQLLEPSKSASSKGEGFDVMKSGDARVALIGFPSVGKSTFLSLMTSTASEAASYEFTTLTCIPGVIEYKGANIQLLDLPGIIEGAAQGKGRGRQVIAVARTADVIIMMLDATKGEVQRSLLEKELESVGIRLNKHKPNIYFKPKKGGGISFNSTVTLTQCSEKLVQLILHEYKIFNAEVLFREDCSPDEFIDVIVGNRVYMPCLYVYNKIDQISMEEVDRLARKPNSVVISCGMKLNLDYLLEMLWEYLALTCIYTKKRGQRPDFTDAIILRKGASVEHVCHRIHRSLASQFKYALVWGTSTKYSPQRVGLTHTMEHEDVIQIVKK

SEQ ID NO: 27734 - protein, 424 aa, Homo sapiens
MALPTPSDSTLPAEARGRGRRRRLVWTPSQSEALRACFERNPYPGIATRERLAQAIGIPEPRVQIWFQNERSRQLRQHRRESRPWPGRRGPPEGRRKRTAVTGSQTALLLRAFEKDRFPGIAAREELARETGLPESRIQIWFQNRRARHPGQGGRAPAQAGGLCSAAPGGGHPAPSWVAFAHTGAWGTGLPAPHVPCAPGALPQGAFVSQAARAAPALQPSQAAPAEGISQPAPARGDFAYAAPAPPDGALSHPQAPRWPPHPGKSREDRDPQRDGLPGPCAVAQPGPAQAGPQGQGVLAPPTSQGSPWWGWGRGPQVAGAAWEPQAGAAPPPQPAPPDASASARQGQMQGIPAPSQALQEPAPWSALPCGLLLDELLASPEFLQQAQPLLETEAPGELEASEEAASLEAPLSEEEYRALLEEL

SEQ ID NO: 27735 - protein, 160 aa, Homo sapiens
MALPTPSDSTLPAEARGRGRRRRLVWTPSQSEALRACFERNPYPGIATRERLAQAIGIPEPRVQIWFQNERSRQLRQHRRESRPWPGRRGPPEGRRKRTAVTGSQTALLLRAFEKDRFPGIAAREELARETGLPESRIQIWFQNRRARHPGQGGRAPAQV

SEQ ID NO: 27736 - protein, 204 aa, Homo sapiens
MAEDTYSHKMVKTNHRRCRTKFTEEQLKILINTFNQKPYPGYATKQKLALEINTEESRIQIWFQNRRARHGFQKRPEAETLESSQSQGQDQPGVEFQSREARRCRTTYSASQLHTLIKAFMKNPYPGIDSREELAKEIGVPESRVQIWFQNRRSRLLLQRKREPVASLEQEEQGKIPEGLQGAEDTQNGTNFTSDSHFSGARTW

SEQ ID NO: 27737 - protein, 266 aa, Homo sapiens
MRVTLATIAWMVSFVSNYSHTANILPDIENEDFIKDCVRIHNKFRSEVKPTASDMLYMTWDPALAQIAKAWASNCQFSHNTRLKPPHKLHPNFTSLGENIWTGSVPIFSVSSAITNWYDEIQDYDFKTRICKKVCGHYTQVVWADSYKVGCAVQFCPKVSGFDALSNGAHFICNYGPGGNYPTWPYKRGATCSACPNNDKCLDNLCVNRQRDQVKRYYSVVYPGWPIYPRNRYTSLFLIVNSVILILSVIITILVQHKYPNLVLLD

SEQ ID NO: 27738 - protein, 237 aa, Homo sapiens
MRVTLATIAWMVSFVSNYSHTANILPDIENEDFIKDCVRIHNKFRSEVKPTASDMLYMTWDPALAQIAKAWASNCQFSHNTRLKPPHKLHPNFTSLGENIWTGSVPIFSVSSAITNWYDEIQDYDFKTRICKKVCGHYTQVSQERGRDPNPKRGFLNLARENPGLFGQIVTKLAAQFNFALKFLALTLFPMEHILYATTDQEGITQLGHIREEPPAVPAPIMTSVWTISVLTDSETK

SEQ ID NO: 27739 - protein, 303 aa, Homo sapiens
MAAVAVLRAFGASGPMCLRRGPWAQLPARFCSRDPAGAGRRESEPRPTSARQLDGIRNIVLSNPKKRNALSLAMLKSLQSDILHDADSNDLKVIIISAEGPVFSSGHDLKELTEEQGRDYHAEVFQTCSKVMMHIRNHPVPVIAMVNGLAAAAGCQLVASCDIAVASDKSSFATPGVNVGLFCSTPGVALARAVPRKVALEMLFTGEPISAQEALLHGLLSKVVPEAELQEETMRIARKIASLSRPVVSLGKATFYKQLPQDLGTAYYLTSQAMVDNLALRDGQEGITAFLQKRKPVWSHEPV

SEQ ID NO: 27740 - protein, 172 aa, Homo sapiens
MMHIRNHPVPVIAMVNGLAAAAGCQLVASCDIAVASDKSSFATPGVNVGLFCSTPGVALARAVPRKVALEMLFTGEPISAQEALLHGLLSKVVPEAELQEETMRIARKIASLSRPVVSLGKATFYKQLPQDLGTAYYLTSQAMVDNLALRDGQEGITAFLQKRKPVWSHEPV

SEQ ID NO: 27741 - protein, 699 aa, Homo sapiens
MKIAVLFCFFLLIIFQTDFGKNEEIPRKQRRKIYHRRLRKSSTSHKHRSNRQLGIQQTTVFTPVARLPIVNFDYSMEEKFESFSSFPGVESSYNVLPGKKGHCLVKGITMYNKAVWSPEPCTTCLCSDGRVLCDETMCHPQRCPQTVIPEGECCPVCSATVSYSLLSGIALNDRNEFSGDSSEQREPTNLLHKQLPPPQVGMDRIVRKEALQSEEDEEVKEEDTEQKRETPESRNQGQLYSEGDSRGGDRKQRPGEERRLAHQQQRQGREEEEDEEEEGEEGEEDEEDEEDPVRGDMFRMPSRSPLPAPPRGTLRLPSGCSLSYRTISCINAMLTQIPPLTAPQITSLELTGNSIASIPDEAFNGLPNLERLDLSKNNITSSGIGPKAFKLLKKLMRLNMDGNNLIQIPSQLPSTLEELKVNENNLQAIDEESLSDLNQLVTLELEGNNLSEANVNPLAFKPLKSLAYLRLGKNKFRIIPQGLPGSIEELYLENNQIEEITEICFNHTRKINVIVLRYNKIEENRIAPLAWINQENLESIDLSYNKLYHVPSYLPKSLLHLVLLGNQIERIPGYVFGHMEPGLEYLYLSFNKLADDGMDRVSFYGAYHSLRELFLDHNDLKSIPPGIQEMKALHFLRLNNNKIRNILPEEICNAEEDDDSNLEHLHLENNYIKIREIPSYTFSCIRSYSSIVLKPQNIK

SEQ ID NO: 27742 - protein, 643 aa, Homo sapiens
MKIAVLFCFFLLIIFQTDFGKNEEIPRKQRRKIYHRRLRKSSTSHKHRSNRQLGIQQTTVFTPVARLPIVNFDYSMEEKFESFSSFPGVESSYNVLPGKKGHCLVKGITMYNKAVWSPEPCTTCLCSDGRVLCDETMCHPQRCPQTVIPEGECCPVCSATEQREPTNLLHKQLPPPQVGMDRIVRKEALQSEEDEEVKEEDTEQKRETPESRNQGQLYSEGDSRGGDRKQRPGEERRLAHQQQRQGREEEEDEEEEGEEGEEDEEDEEDPVRGDMFRMPSRSPLPAPPRGTLRLPSGCSLSYRTISCINAMLTQIPPLTAPQITSLELTGNSIASIPDEAFNGLPNLERLDLSKNNITSSGIGPKAFKLLKKLMRLNMDGNNLIQIPSQLPSTLEELKVNENNLQAIDEESLSDLNQLVTLELEGNNLSEANVNPLAFKPLKSLAYLRLGKNKFRIIPQGLPGSIEELYLENNQIEEITEICFNHTRKINVIVLRYNKIEENRIAPLAWINQENLESIDLSYNKLYHVPSYLPKSLLHLVLLGNQIERIPGYVFGHMEPGLEYLYLSFNKLADDGMDRVSFYGAYHSLRELFLDHNDLKSIPPGIQEMKALHFLRLNNNKIRCVSDAVLETVTNRSDVAFPLW

SEQ ID NO: 27743 - protein, 184 aa, Homo sapiens
MGNGMNKILPGLYIGNFKDARDAEQLSKNKVTHILSVHDSARPMLEGVKYLCIPAADSPSQNLTRHFKESIKFIHECRLRGESCLVHCLAGVSRSVTLVIAYIMTVTDFGWEDALHTVRAGRSCANPNVGFQRQLQEFEKHEVHQYRQWLKEEYGESPLQDAEEAKNILAAPGILKFWAFLRRL

SEQ ID NO: 27744 - protein, 205 aa, Homo sapiens
MGNGMNKILPGLYIGNFKDARDAEQLSKNKVTHILSVHDSARPMLEGVKYLCIPAADSPSQNLTRHFKESIKFIHECRLRGESCLVHCLAGVSRSVTLVIAYIMTVTDFGWEDALHTVRAGRSCANPNVGFQRQLQEFEKHEVHQYRQWLKEEYGESPLQDAEEAKNILGKYKEQGRTEPQPGARRWSSFPALAPLTYDNYTTET

SEQ ID NO: 27745 - protein, 367 aa, Homo sapiens
MVMEVGTLDAGGLRALLGERAAQCLLLDCRSFFAFNAGHIAGSVNVRFSTIVRRRAKGAMGLEHIVPNAELRGRLLAGAYHAVVLLDERSAALDGAKRDGTLALAAGALCREARAAQVFFLKGGYEAFSASCPELCSKQSTPMGLSLPLSTSVPDSAESGCSSCSTPLYDQGGPVEILPFLYLGSAYHASRKDMLDALGITALINVSANCPNHFEGHYQYKSIPVEDNHKADISSWFNEAIDFIDSIKNAGGRVFVHCQAGISRSATICLAYLMRTNRVKLDEAFEFVKQRRSIISPNFSFMGQLLQFESQVLAPHCSAEAGSPAMAVLDRGTSTTTVFNFPVSIPVHSTNSALSYLQSPITTSPSC

SEQ ID NO: 27746 - protein, 211 aa, Homo sapiens
MCPGNWLWASMTFMARFSRSSSRSPVRTRGTLEEMPTVQHPFLNVFELERLLYTGKTACNHADEVWPGLYLGDQDMANNRRELRRLGITHVLNASHSRWRGTPEAYEGLGIRYLGVEAHDSPAFDMSIHFQTAADFIHRALSQPGGKILVHCAVGVSRSATLVLAYLMLYHHLTLVEAIKKVKDHRGIIPNRGFLRQLLALDRRLRQGLEA

SEQ ID NO: 27747 - protein, 86 aa, Homo sapiens
MSIHFQTAADFIHRALSQPGGKILVHCAVGVSRSATLVLAYLMLYHHLTLVEAIKKVKDHRGIIPNRGFLRQLLALDRRLRQGLEA

SEQ ID NO: 27748 - protein, 520 aa, Homo sapiens
MPASELKASEIPFHPSIKTQDPKAEEKSPKKQKVTLTAAEALKLFKNQLSPYEQSEILGYAELWFLGLEAKKLDTAPEKFSKTSFDDEHGFYLKVLHDHIAYRYEVLETIGKGSFGQVAKCLDHKNNELVALKIIRNKKRFHQQALMELKILEALRKKDKDNTYNVVHMKDFFYFRNHFCITFELLGINLYELMKNNNFQGFSLSIVRRFTLSVLKCLQMLSVEKIIHCDLKPENIVLYQKGQASVKVIDFGSSCYEHQKVYTYIQSRFYRSPEVILGHPYDVAIDMWSLGCITAELYTGYPLFPGENEVEQLACIMEVLGLPPAGFIQTASRRQTFFDSKGFPKNITNNRGKKRYPDSKDLTMVLKTYDTSFLDFLRRCLVWEPSLRMTPDQALKHAWIHQSRNLKPQPRPQTLRKSNSFFPSETRKDKVQGCHHSSRKADEITKETTEKTKDSPTKHVQHSGDQQDCLQHGADTVQLPQLVDAPKKSEAAVGAEVSMTSPGQSKNFSLKNTNVLPPIV

SEQ ID NO: 27749 - protein, 519 aa, Homo sapiens
MPASELKASEIPFHPSIKTQDPKAEEKSPKKQKVTLTAAEALKLFKNQLSPYEQSEILGYAELWFLGLEAKKLDTAPEKFSKTSFDDEHGFYLKVLHDHIAYRYEVLETIGKGSFGQVAKCLDHKNNELVALKIIRNKKRFHQQALMELKILEALRKKDKDNTYNVVHMKDFFYFRNHFCITFELLGINLYELMKNNNFQGFSLSIVRRFTLSVLKCLQMLSVEKIIHCDLKPENIVLYQKGQASVKVIDFGSSCYEHQKVYTYIQSRFYRSPEVILGHPYDVAIDMWSLGCITAELYTGYPLFPGENEVEQLACIMEVLGLPPAGFIQTASRRQTFFDSKGFPKNITNNRGKKRYPDSKDLTMVLKTYDTSFLDFLRRCLVWEPSLRMTPDQALKHAWIHQSRNLKPQPRPQTLRKSNSFFPSETRKDKVQGCHHSSRKDEITKETTEKTKDSPTKHVQHSGDQQDCLQHGADTVQLPQLVDAPKKSEAAVGAEVSMTSPGQSKNFSLKNTNVLPPIV

SEQ ID NO: 27750 - protein, 635 aa, Homo sapiens
MQLLPPPIRTGTKTQMDAKKPRKCDLTPFLVLKARKKQKFTSAKVGSKLSVQIQKPPSNIKNSRMTQVFHKNTSVTSLPFVDTKGKKNTVSFPHISKKVLLKSSLLYQENQAHNQMPASELKASEIPFHPSIKTQDPKAEEKSPKKQKVTLTAAEALKLFKNQLSPYEQSEILGYAELWFLGLEAKKLDTAPEKFSKTSFDDEHGFYLKVLHDHIAYRYEVLETIGKGSFGQVAKCLDHKNNELVALKIIRNKKRFHQQALMELKILEALRKKDKDNTYNVVHMKDFFYFRNHFCITFELLGINLYELMKNNNFQGFSLSIVRRFTLSVLKCLQMLSVEKIIHCDLKPENIVLYQKGQASVKVIDFGSSCYEHQKVYTYIQSRFYRSPEVILGHPYDVAIDMWSLGCITAELYTGYPLFPGENEVEQLACIMEVLGLPPAGFIQTASRRQTFFDSKGFPKNITNNRGKKRYPDSKDLTMVLKTYDTSFLDFLRRCLVWEPSLRMTPDQALKHAWIHQSRNLKPQPRPQTLRKSNSFFPSETRKDKVQGCHHSSRKADEITKETTEKTKDSPTKHVQHSGDQQDCLQHGADTVQLPQLVDAPKKSEAAVGAEVSMTSPGQSKNFSLKNTNVLPPIV

SEQ ID NO: 27751 - protein, 644 aa, Homo sapiens
MQLLPPPIRTGTKTQMDAKKPRKCDLTPFLVLKARKKQKFTSAKGPTLSEIYMVGSKLSVQIQKPPSNIKNSRMTQVFHKNTSVTSLPFVDTKGKKNTVSFPHISKKVLLKSSLLYQENQAHNQMPASELKASEIPFHPSIKTQDPKAEEKSPKKQKVTLTAAEALKLFKNQLSPYEQSEILGYAELWFLGLEAKKLDTAPEKFSKTSFDDEHGFYLKVLHDHIAYRYEVLETIGKGSFGQVAKCLDHKNNELVALKIIRNKKRFHQQALMELKILEALRKKDKDNTYNVVHMKDFFYFRNHFCITFELLGINLYELMKNNNFQGFSLSIVRRFTLSVLKCLQMLSVEKIIHCDLKPENIVLYQKGQASVKVIDFGSSCYEHQKVYTYIQSRFYRSPEVILGHPYDVAIDMWSLGCITAELYTGYPLFPGENEVEQLACIMEVLGLPPAGFIQTASRRQTFFDSKGFPKNITNNRGKKRYPDSKDLTMVLKTYDTSFLDFLRRCLVWEPSLRMTPDQALKHAWIHQSRNLKPQPRPQTLRKSNSFFPSETRKDKVQGCHHSSRKADEITKETTEKTKDSPTKHVQHSGDQQDCLQHGADTVQLPQLVDAPKKSEAAVGAEVSMTSPGQSKNFSLKNTNVLPPIV

SEQ ID NO: 27752 - protein, 517 aa, Homo sapiens
MPASELKASEIPFHPSIKTQDPKAEEKSPKKQKVTLTAAEALKLFKNQLSPYEQSEILGYAELWFLGLEAKKLDTAPEKFSKTSFDDEHGFYLKVLHDHIAYRYEVLETIGKGSFGQVAKCLDHKNNELVALKIIRNKKRFHQQALMELKILEALRKKDKDNTYNVVHMKDFFYFRNHFCITFELLGINLYELMKNNNFQGFSLSIVRRFTLSVLKCLQMLSVEKIIHCDLKPENIVLYQKGQASVKVIDFGSSCYEHQKVYTYIQSRFYRSPEVILGHPYDVAIDMWSLGCITAELYTGYPLFPGENEVEQLACIMEVLGLPPAGFIQTASRRQTFFDSKGFPKNITNNRGKKRYPDSKDLTMVLKTYDTSFLDFLRRWEPSLRMTPDQALKHAWIHQSRNLKPQPRPQTLRKSNSFFPSETRKDKVQGCHHSSRKADEITKETTEKTKDSPTKHVQHSGDQQDCLQHGADTVQLPQLVDAPKKSEAAVGAEVSMTSPGQSKNFSLKNTNVLPPIV

SEQ ID NO: 27753 - protein, 299 aa, Homo sapiens
MVRCLGPALLLLLLLGSASSVGGNRCVDAAEACTADARCQRLRSEYVAQCLGRAAQGGCPRARCRRALRRFFARGPPALTHALLFCPCAGPACAERRRQTFVPSCAFSGPGPAPPSCLEPLNFCERSRVCRCARAAAGPWRGWGRGLSPAHRPPAAQASPPGLSGLVHPSAQRPRRLPAGPGRPLPARLRGPRGVPAGTAVTPNYVDNVSARVAPWCDCGASGNRREDCEAFRGLFTRNRCLDGAIQAFASGWPPVLLDQLNPQGDPEHSLLQVSSTGRALERRSLLSILPVLALPALL

SEQ ID NO: 27754 - protein, 269 aa, Homo sapiens
MVRCLGPALLLLLLLGSASSVGGNRCVDAAEACTADARCQRLRSEYVAQCLGRAAQGGCPRARCRRALRRFFARGPPALTHALLFCPCAGPACAERRRQTFVPSCAFSGPGPAPPSCLEPLNFCERSRVCRPRLLAFQVSCTPAPSAPDGCLLDQGARCLRAYAGLVGTAVTPNYVDNVSARVAPWCDCGASGNRREDCEAFRGLFTRNRCLDGAIQAFASGWPPVLLDQLNPQGDPEHSLLQVSSTGRALERRSLLSILPVLALPALL

SEQ ID NO: 27755 - protein, 182 aa, Homo sapiens
MVRCLGPALLLLLLLGSASSVGGNRCVDAAEACTADARCQRLRSEYVAQCLGRAAQGGCPRARCRRALRRFFARGPPALTHALLFCPCAGPACAERRRQTFVPSCAFSGPGPAPPSCLEPLNFCERSRVCRPRLLAFQVSCTPAPSAPDGCLLDQGARCLRAYAGLVGSPQAPPSPLTTWTT

SEQ ID NO: 27756 - protein, 312 aa, Homo sapiens
MEGAAAREARGTETPRASAPPPAPSEPPAAPRARPRLVFRTQLAHGSPTGKIEGFTNVRELYAKIAEAFGIAPTEILFCTLNSHKVDMQKLLGGQIGLEDFIFAHVRGETKEVEVTKTEDALGLTITDNGAGYAFIKRIKEGSIINRIEAVCVGDSIEAINDHSIVGCRHYEVAKMLRELPKSQPFTLRLVQPKRAFDMIGQRSRSSKCPVEAKVTSGRETLRLRSGGAATVEEAPSEFEEEASRKVDDLLESYMGIRDPELASTMVETSKKTASAQEFARCLDSVLGEFAFPDEFVVEVWAAIGEAREACG

SEQ ID NO: 27757 - protein, 902 aa, Homo sapiens
MSEFRIHHDVNELLSLLRVHGGDGAEVYIDLLQKNRTPYVTTTVSAHSAKVKIAEFSRTPEDFLKKYDELKSKNTRNLDPLVYLLSKLTEDKETLQYLQQNAKERAELAAAAVGSSTTSINVPAAASKISMQELEELRKQLGSVATGSTLQQSLELKRKMLRDKQNKKNSGQHLPIFPAWVYERPALIGDFLIGAGISTDTALPIGTLPLASQESAVVEDLLYVLVGVDGRYVSAQPLAGRQSRTFLVDPNLDLSIRELVHRILPVAASYSAVTRFIEEKSSFEYGQVNHALAAAMRTLVKEHLILVSQLEQLHRQGLLSLQKLWFYIQPAMRTMDILASLATSVDKGECLGGSTLSLLHDRSFSYTGDSQAQELCLYLTKAASAPYFEVLEKWIYRGIIHDPYSEFMVEEHELRKERIQEDYNDKYWDQRYTIVQQQIPSFLQKMADKILSTGKYLNVVRECGHDVTCPVAKEIIYTLKERAYVEQIEKAFNYASKVLLDFLMEEKELVAHLRSIKRYFLMDQGDFFVHFMDLAEEELRKPVEDITPPRLEALLELALRMSTANTDPFKDDLKIDLMPHDLITQLLRVLAIETKQEKAMAHADPTELALSGLEAFSFDYIVKWPLSLIINRKALTRYQMLFRHMFYCKHVERQLCSVWISNKTAKQHSLHSAQWFAGAFTLRQRMLNFVQNIQYYMMFEVMEPTWHILEKNLKSASNIDDVLGHHTGFLDTCLKDCMLTNPELLKVFSKLMSVCVMFTNCMQKFTQSMKLDGELGGQTLEHSTVLGLPAGAEERARKELARKHLAEHADTVQLVSGFEATINKFDKNFSAHLLDLLARLSIYSTSDCEHGMASVISRLDFNGFYTERLERLSAERSQKATPQVPVLRGPPAPAPRVAVTAQ

SEQ ID NO: 27758 - protein, 772 aa, Homo sapiens
MQELEELRKQLGSVATGSTLQQSLELKRKMLRDKQNKKNSGQHLPIFPAWVYERPALIGDFLIGAGISTDTALPIGTLPLASQESAVVEDLLYVLVGVDGRYVSAQPLAGRQSRTFLVDPNLDLSIRELVHRILPVAASYSAVTRFIEEKSSFEYGQVNHALAAAMRTLVKEHLILVSQLEQLHRQGLLSLQKLWFYIQPAMRTMDILASLATSVDKGECLGGSTLSLLHDRSFSYTGDSQAQELCLYLTKAASAPYFEVLEKWIYRGIIHDPYSEFMVEEHELRKERIQEDYNDKYWDQRYTIVQQQIPSFLQKMADKILSTGKYLNVVRECGHDVTCPVAKEIIYTLKERAYVEQIEKAFNYASKVLLDFLMEEKELVAHLRSIKRYFLMDQGDFFVHFMDLAEEELRKPVEDITPPRLEALLELALRMSTANTDPFKDDLKIDLMPHDLITQLLRVLAIETKQEKAMAHADPTELALSGLEAFSFDYIVKWPLSLIINRKALTRYQMLFRHMFYCKHVERQLCSVWISNKTAKQHSLHSAQWFAGAFTLRQRMLNFVQNIQYYMMFEVMEPTWHILEKNLKSASNIDDVLGHHTGFLDTCLKDCMLTNPELLKVFSKLMSVCVMFTNCMQKFTQSMKLDGELGGQTLEHSTVLGLPAGAEERARKELARKHLAEHADTVQLVSGFEATINKFDKNFSAHLLDLLARLSIYSTSDCEHGMASVISRLDFNGFYTERLERLSAERSQKATPQVPVLRGPPAPAPRVAVTAQ

SEQ ID NO: 27759 - protein, 930 aa, Homo sapiens
MSEFRIHHDVNELLSLLRVHGGDGAEVYIDLLQKNRTPYVTTTVSAHSAKVKIAEFSRTPEDFLKKYDELKSKNTRNLDPLVYLLSKLTEDKETLQYLQQNAKERAELAAAAVGSSTTSINVPAAASKISMQELEELRKQLGSVATGSTLQQSLELKRKMLRDKQNKKNSGQHLPIFPAWVYERPALIGDFLIGAGISTDTALPIVLLRWNLALSPRLKCSGVISAHCNLHLPGTLPLASQESAVVEDLLYVLVGVDGRYVSAQPLAGRQSRTFLVDPNLDLSIRELVHRILPVAASYSAVTRFIEEKSSFEYGQVNHALAAAMRTLVKEHLILVSQLEQLHRQGLLSLQKLWFYIQPAMRTMDILASLATSVDKGECLGGSTLSLLHDRSFSYTGDSQAQELCLYLTKAASAPYFEVLEKWIYRGIIHDPYSEFMVEEHELRKERIQEDYNDKYWDQRYTIVQQQIPSFLQKMADKILSTGKYLNVVRECGHDVTCPVAKEIIYTLKERAYVEQIEKAFNYASKVLLDFLMEEKELVAHLRSIKRYFLMDQGDFFVHFMDLAEEELRKPVEDITPPRLEALLELALRMSTANTDPFKDDLKIDLMPHDLITQLLRVLAIETKQEKAMAHADPTELALSGLEAFSFDYIVKWPLSLIINRKALTRYQMLFRHMFYCKHVERQLCSVWISNKTAKQHSLHSAQWFAGAFTLRQRMLNFVQNIQYYMMFEVMEPTWHILEKNLKSASNIDDVLGHHTGFLDTCLKDCMLTNPELLKVFSKLMSVCVMFTNCMQKFTQSMKLDGELGGQTLEHSTVLGLPAGAEERARKELARKHLAEHADTVQLVSGFEATINKFDKNFSAHLLDLLARLSIYSTSDCEHGMASVISRLDFNGFYTERLERLSAERSQKATPQVPVLRGPPAPAPRVAVTAQ

SEQ ID NO: 27760 - protein, 84 aa, Homo sapiens
MPYLLISTQIRMEVGPTMVGDEQSDPELMQHLGASKRRALGNNFYEYYVDDPPRIVLDKLERRGFRVLSMTGVGQTLVWCLHKE

SEQ ID NO: 27761 - protein, 73 aa, Homo sapiens
MPYLLISTQIRMSDPELMQHLGASKRRALGNNFYEYYVDDPPRIVLDKLERRGFRVLSMTGVGQTLVWCLHKE

SEQ ID NO: 27762 - protein, 1462 aa, Homo sapiens
MAPVHGDDSLSDSGSFVSSRARREKKSKKGRQEALERLKKAKAGEKYKYEVEDFTGVYEEVDEEQYSKLVQARQDDDWIVDDDGIGYVEDGREIFDDDLEDDALDADEKGKDGKARNKDKRNVKKLAVTKPNNIKSMFIACAGKKTADKAVDLSKDGLLGDILQDLNTETPQITPPPVMILKKKRSIGASPNPFSVHTATAVPSGKIASPVSRKEPPLTPVPLKRAEFAGDDVQVESTEEEQESGAMEFEDGDFDEPMEVEEVDLEPMAAKAWDKESEPAEEVKQEADSGKGTVSYLGSFLPDVSCWDIDQEGDSSFSVQEVQVDSSHLPLVKGADEEQVFHFYWLDAYEDQYNQPGVVFLFGKVWIESAETHVSCCVMVKNIERTLYFLPREMKIDLNTGKETGTPISMKDVYEEFDEKIATKYKIMKFKSKPVEKNYAFEIPDVPEKSEYLEVKYSAEMPQLPQDLKGETFSHVFGTNTSSLELFLMNRKIKGPCWLEVKSPQLLNQPVSWCKVEAMALKPDLVNVIKDVSPPPLVVMAFSMKTMQNAKNHQNEIIAMAALVHHSFALDKAAPKPPFQSHFCVVSKPKDCIFPYAFKEVIEKKNVKVEVAATERTLLGFFLAKVHKIDPDIIVGHNIYGFELEVLLQRINVCKAPHWSKIGRLKRSNMPKLGGRSGFGERNATCGRMICDVEISAKELIRCKSYHLSELVQQILKTERVVIPMENIQNMYSESSQLLYLLEHTWKDAKFILQIMCELNVLPLALQITNIAGNIMSRTLMGGRSERNEFLLLHAFYENNYIVPDKQIFRKPQQKLGDEDEEIDGDTNKYKKGRKKAAYAGGLVLDPKVGFYDKFILLLDFNSLYPSIIQEFNICFTTVQRVASEAQKVTEDGEQEQIPELPDPSLEMGILPREIRKLVERRKQVKQLMKQQDLNPDLILQYDIRQKALKLTANSMYGCLGFSYSRFYAKPLAALVTYKGREILMHTKEMVQKMNLEVIYGDTDSIMINTNSTNLEEVFKLGNKVKSEVNKLYKLLEIDIDGVFKSLLLLKKKKYAALVVEPTSDGNYVTKQELKGLDIVRRDWCDLAKDTGNFVIGQILSDQSRDTIVENIQKRLIEIGENVLNGSVPVSQFEINKALTKDPQDYPDKKSLPHVHVALWINSQGGRKVKAGDTVSYVICQDGSNLTASQRAYAPEQLQKQDNLTIDTQYYLAQQIHPVVARICEPIDGIDAVLIATWLGLDPTQFRVHHYHKDEENDALLGGPAQLTDEEKYRDCERFKCPCPTCGTENIYDNVFDGSGTDMEPSLYRCSNIDCKASPLTFTVQLSNKLIMDIRRFIKKYYDGWLICEEPTCRNRTRHLPLQFSRTGPLCPACMKATLQPEYSDKSLYTQLCFYRYIFDAECALEKLTTDHEKDKLKKQFFTPKVLQDYRKLKNTAEQFLSRSGYSEVNLSKLFAGCAVKS

SEQ ID NO: 27763 - protein, 317 aa, Homo sapiens
MKSDCMQTTICQERKKDPIEMFHSGQLVKVCAPMVRYSKLAFRTLVRKYSCDLCYTPMIVAADFVKSIKARDSEFTTNQGDCPLIVQFAANDARLLSDAARIVCPYANGIDINCGCPQRWAMAEGYGACLINKPELVQDMVKQVRNQVETPGFSVSIKIRIHDDLKRTVDLCQKAEATGVSWITVHGRTAEERHQPVHYDSIKIIKENMSIPVIANGDIRSLKEAENVWRITGTDGVMVARGLLANPAMFAGYEETPLKCIWDWVDIALELGTPYMCFHQHLMYMMEKITSRQEKRVFNALSSTSAIIDYLTDHYGI

SEQ ID NO: 27764 - protein, 196 aa, Homo sapiens
MAEGYGACLINKPELVQDMVKQVRNQVETPGFSVSIKIRIHDDLKRTVDLCQKAEATGVSWITVHGRTAEERHQPVHYDSIKIIKENMSIPVIANGDIRSLKEAENVWRITGTDGVMVARGLLANPAMFAGYEETPLKCIWDWVDIALELGTPYMCFHQHLMYMMEKITSRQEKRVFNALSSTSAIIDYLTDHYGI

SEQ ID NO: 27765 - protein, 335 aa, Homo sapiens
MSKRKAPQETLNGGITDMLTELANFEKNVSQAIHKYNAYRKAASVIAKYPHKIKSGAEAKKLPGVGTKIAEKIDEFLATGKLRKLEKIRQDDTSSSINFLTRVSGIGPSAARKFVDEGIKTLEDLRKNEDKLNHHQRIGLKYFGDFEKRIPREEMLQMQDIVLNEVKKVDSEYIATVCGSFRRGAESSGDMDVLLTHPSFTSESTKQPKLLHQVVEQLQKVHFITDTLSKGETKFMGVCQLPSKNDEKEYPHRRIDIRLIPKDQYYCGVLYFTGSDIFNKNMRAHALEKGFTINEYTIRPLGVTGVAGEPLPVDSEKDIFDYIQWKYREPKDRSE

SEQ ID NO: 27766 - protein, 2080 aa, Homo sapiens
MLRVFILYAENVHTPDTDISDAYCSAVFAGVKKRTKVIKNSVNPVWNEGFEWDLKGIPLDQGSELHVVVKDHETMGRNRFLGEAKVPLREVLATPSLSASFNAPLLDTKKQPTGASLVLQVSYTPLPGAVPLFPPPTPLEPSPTLPDLDVVADTGGEEDTEDQGLTGDEAEPFLDQSGGPGAPTTPRKLPSRPPPHYPGIKRKRSAPTSRKLLSDKPQDFQIRVQVIEGRQLPGVNIKPVVKVTAAGQTKRTRIHKGNSPLFNETLFFNLFDSPGELFDEPIFITVVDSRSLRTDALLGEFRMDVGTIYREPRHAYLRKWLLLSDPDDFSAGARGYLKTSLCVLGPGDEAPLERKDPSEDKEDIESNLLRPTGVALRGAHFCLKVFRAEDLPQMDDAVMDNVKQIFGFESNKKNLVDPFVEVSFAGKMLCSKILEKTANPQWNQNITLPAMFPSMCEKMRIRIIDWDRLTHNDIVATTYLSMSKISAPGGEIEEEPAGAVKPSKASDLDDYLGFLPTFGPCYINLYGSPREFTGFPDPYTELNTGKGEGVAYRGRLLLSLETKLVEHSEQKVEDLPADDILRVEKYLRRRKYSLFAAFYSATMLQDVDDAIQFEVSIGNYGNKFDMTCLPLASTTQYSRAVFDGCHYYYLPWGNVKPVVVLSSYWEDISHRIETQNQLLGIADRLEAGLEQVHLALKAQCSTEDVDSLVAQLTDELIAGCSQPLGDIHETPSATHLDQYLYQLRTHHLSQITEAALALKLGHSELPAALEQAEDWLLRLRALAEEPQNSLPDIVIWMLQGDKRVAYQRVPAHQVLFSRRGANYCGKNCGKLQTIFLKYPMEKVPGARMPVQIRVKLWFGLSVDEKEFNQFAEGKLSVFAETYENETKLALVGNWGTTGLTYPKFSDVTGKIKLPKDSFRPSAGWTWAGDWFVCPEKTLLHDMDAGHLSFVEEVFENQTRLPGGQWIYMSDNYTDVNGEKVLPKDDIECPLGWKWEDEEWSTDLNRAVDEQGWEYSITIPPERKPKHWVPAEKMYYTHRRRRWVRLRRRDLSQMEALKRHRQAEAEGEGWEYASLFGWKFHLEYRKTDAFRRRRWRRRMEPLEKTGPAAVFALEGALGGVMDDKSEDSMSVSTLSFGVNRPTISCIFDYGNRYHLRCYMYQARDLAAMDKDSFSDPYAIVSFLHQSQKTVVVKNTLNPTWDQTLIFYEIEIFGEPATVAEQPPSIVVELYDHDTYGADEFMGRCICQPSLERMPRLAWFPLTRGSQPSGELLASFELIQREKPAIHHIPGFEVQETSRILDESEDTDLPYPPPQREANIYMVPQNIKPALQRTAIEILAWGLRNMKSYQLANISSPSLVVECGGQTVQSCVIRNLRKNPNFDICTLFMEVMLPREELYCPPITVKVIDNRQFGRRPVVGQCTIRSLESFLCDPYSAESPSPQGGPDDVSLLSPGEDVLIDIDDKEPLIPIQEEEFIDWWSKFFASIGEREKCGSYLEKDFDTLKVYDTQLENVEAFEGLSDFCNTFKLYRGKTQEETEDPSVIGEFKGLFKIYPLPEDPAIPMPPRQFHQLAAQGPQECLVRIYIVRAFGLQPKDPNGKCDPYIKISIGKKSVSDQDNYIPCTLEPVFGKMFELTCTLPLEKDLKITLYDYDLLSKDEKIGETVVDLENRLLSKFGARCGLPQTYCVSGPNQWRDQLRPSQLLHLFCQQHRVKAPVYRTDRVMFQDKEYSIEEIEAGRIPNPHLGPVEERLALHVLQQQGLVPEHVESRPLYSPLQPDIEQGKLQMWVDLFPKALGRPGPPFNITPRRARRFFLRCIIWNTRDVILDDLSLTGEKMSDIYVKGWMIGFEEHKQKTDVHYRSLGGEGNFNWRFIFPFDYLPAEQVCTIAKKDAFWRLDKTESKIPARVVFQIWDNDKFSFDDFLGSLQLDLNRMPKPAKTAKKCSLDQLDDAFHPEWFVSLFEQKTVKGWWPCVAEEGEKKILAGKLEMTLEIVAESEHEERPAGQGRDEPNMNPKLEDPRRPDTSFLWFTSPYKTMKFILWRRFRWAIILFIILFILLLFLAIFIYAFPNYAAMKLVKPFS

SEQ ID NO: 27767 - protein, 2111 aa, Homo sapiens
MLRVFILYAENVHTPDTDISDAYCSAVFAGVKKRTKVIKNSVNPVWNEGFEWDLKGIPLDQGSELHVVVKDHETMGRNRFLGEAKVPLREVLATPSLSASFNAPLLDTKKQPTGASLVLQVSYTPLPGAVPLFPPPTPLEPSPTLPDLDVVAGGGQSRAETWSLLSDSTMDTRYSGKKWPAPTDTGGEEDTEDQGLTGDEAEPFLDQSGGPGAPTTPRKLPSRPPPHYPGIKRKRSAPTSRKLLSDKPQDFQIRVQVIEGRQLPGVNIKPVVKVTAAGQTKRTRIHKGNSPLFNETLFFNLFDSPGELFDEPIFITVVDSRSLRTDALLGEFRMDVGTIYREPRHAYLRKWLLLSDPDDFSAGARGYLKTSLCVLGPGDEAPLERKDPSEDKEDIESNLLRPTGVALRGAHFCLKVFRAEDLPQMDDAVMDNVKQIFGFESNKKNLVDPFVEVSFAGKMLCSKILEKTANPQWNQNITLPAMFPSMCEKMRIRIIDWDRLTHNDIVATTYLSMSKISAPGGEIEEEPAGAVKPSKASDLDDYLGFLPTFGPCYINLYGSPREFTGFPDPYTELNTGKGEGVAYRGRLLLSLETKLVEHSEQKVEDLPADDILRVEKYLRRRKYSLFAAFYSATMLQDVDDAIQFEVSIGNYGNKFDMTCLPLASTTQYSRAVFDGCHYYYLPWGNVKPVVVLSSYWEDISHRIETQNQLLGIADRLEAGLEQVHLALKAQCSTEDVDSLVAQLTDELIAGCSQPLGDIHETPSATHLDQYLYQLRTHHLSQITEAALALKLGHSELPAALEQAEDWLLRLRALAEEPQNSLPDIVIWMLQGDKRVAYQRVPAHQVLFSRRGANYCGKNCGKLQTIFLKYPMEKVPGARMPVQIRVKLWFGLSVDEKEFNQFAEGKLSVFAETYENETKLALVGNWGTTGLTYPKFSDVTGKIKLPKDSFRPSAGWTWAGDWFVCPEKTLLHDMDAGHLSFVEEVFENQTRLPGGQWIYMSDNYTDVNGEKVLPKDDIECPLGWKWEDEEWSTDLNRAVDEQGWEYSITIPPERKPKHWVPAEKMYYTHRRRRWVRLRRRDLSQMEALKRHRQAEAEGEGWEYASLFGWKFHLEYRKTDAFRRRRWRRRMEPLEKTGPAAVFALEGALGGVMDDKSEDSMSVSTLSFGVNRPTISCIFDYGNRYHLRCYMYQARDLAAMDKDSFSDPYAIVSFLHQSQKTVVVKNTLNPTWDQTLIFYEIEIFGEPATVAEQPPSIVVELYDHDTYGADEFMGRCICQPSLERMPRLAWFPLTRGSQPSGELLASFELIQREKPAIHHIPGFEVQETSRILDESEDTDLPYPPPQREANIYMVPQNIKPALQRTAIEILAWGLRNMKSYQLANISSPSLVVECGGQTVQSCVIRNLRKNPNFDICTLFMEVMLPREELYCPPITVKVIDNRQFGRRPVVGQCTIRSLESFLCDPYSAESPSPQGGPDDVSLLSPGEDVLIDIDDKEPLIPIQEEEFIDWWSKFFASIGEREKCGSYLEKDFDTLKVYDTQLENVEAFEGLSDFCNTFKLYRGKTQEETEDPSVIGEFKGLFKIYPLPEDPAIPMPPRQFHQLAAQGPQECLVRIYIVRAFGLQPKDPNGKCDPYIKISIGKKSVSDQDNYIPCTLEPVFGKMFELTCTLPLEKDLKITLYDYDLLSKDEKIGETVVDLENRLLSKFGARCGLPQTYCVSGPNQWRDQLRPSQLLHLFCQQHRVKAPVYRTDRVMFQDKEYSIEEIEAGRIPNPHLGPVEERLALHVLQQQGLVPEHVESRPLYSPLQPDIEQGKLQMWVDLFPKALGRPGPPFNITPRRARRFFLRCIIWNTRDVILDDLSLTGEKMSDIYVKGWMIGFEEHKQKTDVHYRSLGGEGNFNWRFIFPFDYLPAEQVCTIAKKDAFWRLDKTESKIPARVVFQIWDNDKFSFDDFLGSLQLDLNRMPKPAKTAKKCSLDQLDDAFHPEWFVSLFEQKTVKGWWPCVAEEGEKKILAGKLEMTLEIVAESEHEERPAGQGRDEPNMNPKLEDPRRPDTSFLWFTSPYKTMKFILWRRFRWAIILFIILFILLLFLAIFIYAFPNYAAMKLVKPFS

SEQ ID NO: 27768 - protein, 2066 aa, Homo sapiens
MLRVFILYAENVHTPDTDISDAYCSAVFAGVKKRTKVIKNSVNPVWNEGFEWDLKGIPLDQGSELHVVVKDHETMGRNRFLGEAKVPLREVLATPSLSASFNAPLLDTKKQPTGASLVLQVSYTPLPGAVPLFPPPTPLEPSPTLPDLDVVADTGGEEDTEDQGLTGDEAEPFLDQSGGPGAPTTPRKLPSRPPPHYPGIKRKRSAPTSRKLLSDKPQDFQIRVQVIEGRQLPGVNIKPVVKVTAAGQTKRTRIHKGNSPLFNETLFFNLFDSPGELFDEPIFITVVDSRSLRTDALLGEFRMDVGTIYREPRHAYLRKWLLLSDPDDFSAGARGYLKTSLCVLGPGDEAPLERKDPSEDKEDIESNLLRPTGVALRGAHFCLKVFRAEDLPQMDDAVMDNVKQIFGFESNKKNLVDPFVEVSFAGKMLCSKILEKTANPQWNQNITLPAMFPSMCEKMRIRIIDWDRLTHNDIVATTYLSMSKISAPGGEIEVDDYLGFLPTFGPCYINLYGSPREFTGFPDPYTELNTGKGEGVAYRGRLLLSLETKLVEHSEQKVEDLPADDILRVEKYLRRRKYSLFAAFYSATMLQDVDDAIQFEVSIGNYGNKFDMTCLPLASTTQYSRAVFDGCHYYYLPWGNVKPVVVLSSYWEDISHRIETQNQLLGIADRLEAGLEQVHLALKAQCSTEDVDSLVAQLTDELIAGCSQPLGDIHETPSATHLDQYLYQLRTHHLSQITEAALALKLGHSELPAALEQAEDWLLRLRALAEEPQNSLPDIVIWMLQGDKRVAYQRVPAHQVLFSRRGANYCGKNCGKLQTIFLKYPMEKVPGARMPVQIRVKLWFGLSVDEKEFNQFAEGKLSVFAETYENETKLALVGNWGTTGLTYPKFSDVTGKIKLPKDSFRPSAGWTWAGDWFVCPEKTLLHDMDAGHLSFVEEVFENQTRLPGGQWIYMSDNYTDVNGEKVLPKDDIECPLGWKWEDEEWSTDLNRAVDEQGWEYSITIPPERKPKHWVPAEKMYYTHRRRRWVRLRRRDLSQMEALKRHRQAEAEGEGWEYASLFGWKFHLEYRKTDAFRRRRWRRRMEPLEKTGPAAVFALEGALGGVMDDKSEDSMSVSTLSFGVNRPTISCIFDYGNRYHLRCYMYQARDLAAMDKDSFSDPYAIVSFLHQSQKTVVVKNTLNPTWDQTLIFYEIEIFGEPATVAEQPPSIVVELYDHDTYGADEFMGRCICQPSLERMPRLAWFPLTRGSQPSGELLASFELIQREKPAIHHIPGFEVQETSRILDESEDTDLPYPPPQREANIYMVPQNIKPALQRTAIEILAWGLRNMKSYQLANISSPSLVVECGGQTVQSCVIRNLRKNPNFDICTLFMEVMLPREELYCPPITVKVIDNRQFGRRPVVGQCTIRSLESFLCDPYSAESPSPQGGPDDVSLLSPGEDVLIDIDDKEPLIPIQEEEFIDWWSKFFASIGEREKCGSYLEKDFDTLKVYDTQLENVEAFEGLSDFCNTFKLYRGKTQEETEDPSVIGEFKGLFKIYPLPEDPAIPMPPRQFHQLAAQGPQECLVRIYIVRAFGLQPKDPNGKCDPYIKISIGKKSVSDQDNYIPCTLEPVFGKMFELTCTLPLEKDLKITLYDYDLLSKDEKIGETVVDLENRLLSKFGARCGLPQTYCVSGPNQWRDQLRPSQLLHLFCQQHRVKAPVYRTDRVMFQDKEYSIEEIEAGRIPNPHLGPVEERLALHVLQQQGLVPEHVESRPLYSPLQPDIEQGKLQMWVDLFPKALGRPGPPFNITPRRARRFFLRCIIWNTRDVILDDLSLTGEKMSDIYVKGWMIGFEEHKQKTDVHYRSLGGEGNFNWRFIFPFDYLPAEQVCTIAKKDAFWRLDKTESKIPARVVFQIWDNDKFSFDDFLGSLQLDLNRMPKPAKTAKKCSLDQLDDAFHPEWFVSLFEQKTVKGWWPCVAEEGEKKILAGKLEMTLEIVAESEHEERPAGQGRDEPNMNPKLEDPRRPDTSFLWFTSPYKTMKFILWRRFRWAIILFIILFILLLFLAIFIYAFPNYAAMKLVKPFS

SEQ ID NO: 27769 - protein, 2101 aa, Homo sapiens
MLRVFILYAENVHTPDTDISDAYCSAVFAGVKKRTKVIKNSVNPVWNEGFEWDLKGIPLDQGSELHVVVKDHETMGRNRFLGEAKVPLREVLATPSLSASFNAPLLDTKKQPTGASLVLQVSYTPLPGAVPLFPPPTPLEPSPTLPDLDVVADTGGEEDTEDQGLTGDEAEPFLDQSGGPGAPTTPRKLPSRPPPHYPGIKRKRSAPTSRKLLSDKPQDFQIRVQVIEGRQLPGVNIKPVVKVTAAGQTKRTRIHKGNSPLFNETLFFNLFDSPGELFDEPIFITVVDSRSLRTDALLGEFRMDVGTIYREPRHAYLRKWLLLSDPDDFSAGARGYLKTSLCVLGPGDEAPLERKDPSEDKEDIESNLLRPTGVALRGAHFCLKVFRAEDLPQMDDAVMDNVKQIFGFESNKKNLVDPFVEVSFAGKMLCSKILEKTANPQWNQNITLPAMFPSMCEKMRIRIIDWDRLTHNDIVATTYLSMSKISAPGGEIEEEPAGAVKPSKASDLDDYLGFLPTFGPCYINLYGSPREFTGFPDPYTELNTGKGEGVAYRGRLLLSLETKLVEHSEQKVEDLPADDILRVEKYLRRRKYSLFAAFYSATMLQDVDDAIQFEVSIGNYGNKFDMTCLPLASTTQYSRAVFDGCHYYYLPWGNVKPVVVLSSYWEDISHRIETQNQLLGIADRLEAGLEQVHLALKAQCSTEDVDSLVAQLTDELIAGCSQPLGDIHETPSATHLDQYLYQLRTHHLSQITEAALALKLGHSELPAALEQAEDWLLRLRALAEEPQNSLPDIVIWMLQGDKRVAYQRVPAHQVLFSRRGANYCGKNCGKLQTIFLKYPMEKVPGARMPVQIRVKLWFGLSVDEKEFNQFAEGKLSVFAETYENETKLALVGNWGTTGLTYPKFSDVTGKIKLPKDSFRPSAGWTWAGDWFVCPEKTLLHDMDAGHLSFVEEVFENQTRLPGGQWIYMSDNYTDVNGEKVLPKDDIECPLGWKWEDEEWSTDLNRAVDEQGWEYSITIPPERKPKHWVPAEKMYYTHRRRRWVRLRRRDLSQMEALKRHRQAEAEGEGWEYASLFGWKFHLEYRKTDAFRRRRWRRRMEPLEKTGPAAVFALEGALGGVMDDKSEDSMSVSTLSFGVNRPTISCIFDYGNRYHLRCYMYQARDLAAMDKDSFSDPYAIVSFLHQSQKTVVVKNTLNPTWDQTLIFYEIEIFGEPATVAEQPPSIVVELYDHDTYGADEFMGRCICQPSLERMPRLAWFPLTRGSQPSGELLASFELIQREKPAIHHIPGFEVQETSRILDESEDTDLPYPPPQREANIYMVPQNIKPALQRTAIEILAWGLRNMKSYQLANISSPSLVVECGGQTVQSCVIRNLRKNPNFDICTLFMEVMLPREELYCPPITVKVIDNRQFGRRPVVGQCTIRSLESFLCDPYSAESPSPQGGPDDVSLLSPGEDVLIDIDDKEPLIPIQLADGLSSLAPTNTASPPSSPHEEEFIDWWSKFFASIGEREKCGSYLEKDFDTLKVYDTQLENVEAFEGLSDFCNTFKLYRGKTQEETEDPSVIGEFKGLFKIYPLPEDPAIPMPPRQFHQLAAQGPQECLVRIYIVRAFGLQPKDPNGKCDPYIKISIGKKSVSDQDNYIPCTLEPVFGKMFELTCTLPLEKDLKITLYDYDLLSKDEKIGETVVDLENRLLSKFGARCGLPQTYCVSGPNQWRDQLRPSQLLHLFCQQHRVKAPVYRTDRVMFQDKEYSIEEIEAGRIPNPHLGPVEERLALHVLQQQGLVPEHVESRPLYSPLQPDIEQGKLQMWVDLFPKALGRPGPPFNITPRRARRFFLRCIIWNTRDVILDDLSLTGEKMSDIYVKGWMIGFEEHKQKTDVHYRSLGGEGNFNWRFIFPFDYLPAEQVCTIAKKDAFWRLDKTESKIPARVVFQIWDNDKFSFDDFLGSLQLDLNRMPKPAKTAKKCSLDQLDDAFHPEWFVSLFEQKTVKGWWPCVAEEGEKKILAGKLEMTLEIVAESEHEERPAGQGRDEPNMNPKLEDPRRPDTSFLWFTSPYKTMKFILWRRFRWAIILFIILFILLLFLAIFIYAFPNYAAMKLVKPFS

SEQ ID NO: 27770 - protein, 2097 aa, Homo sapiens
MLRVFILYAENVHTPDTDISDAYCSAVFAGVKKRTKVIKNSVNPVWNEGFEWDLKGIPLDQGSELHVVVKDHETMGRNRFLGEAKVPLREVLATPSLSASFNAPLLDTKKQPTGASLVLQVSYTPLPGAVPLFPPPTPLEPSPTLPDLDVVAGGGQSRAETWSLLSDSTMDTRYSGKKWPAPTDTGGEEDTEDQGLTGDEAEPFLDQSGGPGAPTTPRKLPSRPPPHYPGIKRKRSAPTSRKLLSDKPQDFQIRVQVIEGRQLPGVNIKPVVKVTAAGQTKRTRIHKGNSPLFNETLFFNLFDSPGELFDEPIFITVVDSRSLRTDALLGEFRMDVGTIYREPRHAYLRKWLLLSDPDDFSAGARGYLKTSLCVLGPGDEAPLERKDPSEDKEDIESNLLRPTGVALRGAHFCLKVFRAEDLPQMDDAVMDNVKQIFGFESNKKNLVDPFVEVSFAGKMLCSKILEKTANPQWNQNITLPAMFPSMCEKMRIRIIDWDRLTHNDIVATTYLSMSKISAPGGEIEVDDYLGFLPTFGPCYINLYGSPREFTGFPDPYTELNTGKGEGVAYRGRLLLSLETKLVEHSEQKVEDLPADDILRVEKYLRRRKYSLFAAFYSATMLQDVDDAIQFEVSIGNYGNKFDMTCLPLASTTQYSRAVFDGCHYYYLPWGNVKPVVVLSSYWEDISHRIETQNQLLGIADRLEAGLEQVHLALKAQCSTEDVDSLVAQLTDELIAGCSQPLGDIHETPSATHLDQYLYQLRTHHLSQITEAALALKLGHSELPAALEQAEDWLLRLRALAEEPQNSLPDIVIWMLQGDKRVAYQRVPAHQVLFSRRGANYCGKNCGKLQTIFLKYPMEKVPGARMPVQIRVKLWFGLSVDEKEFNQFAEGKLSVFAETYENETKLALVGNWGTTGLTYPKFSDVTGKIKLPKDSFRPSAGWTWAGDWFVCPEKTLLHDMDAGHLSFVEEVFENQTRLPGGQWIYMSDNYTDVNGEKVLPKDDIECPLGWKWEDEEWSTDLNRAVDEQGWEYSITIPPERKPKHWVPAEKMYYTHRRRRWVRLRRRDLSQMEALKRHRQAEAEGEGWEYASLFGWKFHLEYRKTDAFRRRRWRRRMEPLEKTGPAAVFALEGALGGVMDDKSEDSMSVSTLSFGVNRPTISCIFDYGNRYHLRCYMYQARDLAAMDKDSFSDPYAIVSFLHQSQKTVVVKNTLNPTWDQTLIFYEIEIFGEPATVAEQPPSIVVELYDHDTYGADEFMGRCICQPSLERMPRLAWFPLTRGSQPSGELLASFELIQREKPAIHHIPGFEVQETSRILDESEDTDLPYPPPQREANIYMVPQNIKPALQRTAIEILAWGLRNMKSYQLANISSPSLVVECGGQTVQSCVIRNLRKNPNFDICTLFMEVMLPREELYCPPITVKVIDNRQFGRRPVVGQCTIRSLESFLCDPYSAESPSPQGGPDDVSLLSPGEDVLIDIDDKEPLIPIQEEEFIDWWSKFFASIGEREKCGSYLEKDFDTLKVYDTQLENVEAFEGLSDFCNTFKLYRGKTQEETEDPSVIGEFKGLFKIYPLPEDPAIPMPPRQFHQLAAQGPQECLVRIYIVRAFGLQPKDPNGKCDPYIKISIGKKSVSDQDNYIPCTLEPVFGKMFELTCTLPLEKDLKITLYDYDLLSKDEKIGETVVDLENRLLSKFGARCGLPQTYCVSGPNQWRDQLRPSQLLHLFCQQHRVKAPVYRTDRVMFQDKEYSIEEIEAGRIPNPHLGPVEERLALHVLQQQGLVPEHVESRPLYSPLQPDIEQGKLQMWVDLFPKALGRPGPPFNITPRRARRFFLRCIIWNTRDVILDDLSLTGEKMSDIYVKGWMIGFEEHKQKTDVHYRSLGGEGNFNWRFIFPFDYLPAEQVCTIAKKDAFWRLDKTESKIPARVVFQIWDNDKFSFDDFLGSLQLDLNRMPKPAKTAKKCSLDQLDDAFHPEWFVSLFEQKTVKGWWPCVAEEGEKKILAGKLEMTLEIVAESEHEERPAGQGRDEPNMNPKLEDPRRPDTSFLWFTSPYKTMKFILWRRFRWAIILFIILFILLLFLAIFIYAFPNYAAMKLVKPFS

SEQ ID NO: 27771 - protein, 2087 aa, Homo sapiens
MLRVFILYAENVHTPDTDISDAYCSAVFAGVKKRTKVIKNSVNPVWNEGFEWDLKGIPLDQGSELHVVVKDHETMGRNRFLGEAKVPLREVLATPSLSASFNAPLLDTKKQPTGASLVLQVSYTPLPGAVPLFPPPTPLEPSPTLPDLDVVADTGGEEDTEDQGLTGDEAEPFLDQSGGPGAPTTPRKLPSRPPPHYPGIKRKRSAPTSRKLLSDKPQDFQIRVQVIEGRQLPGVNIKPVVKVTAAGQTKRTRIHKGNSPLFNETLFFNLFDSPGELFDEPIFITVVDSRSLRTDALLGEFRMDVGTIYREPRHAYLRKWLLLSDPDDFSAGARGYLKTSLCVLGPGDEAPLERKDPSEDKEDIESNLLRPTGVALRGAHFCLKVFRAEDLPQMDDAVMDNVKQIFGFESNKKNLVDPFVEVSFAGKMLCSKILEKTANPQWNQNITLPAMFPSMCEKMRIRIIDWDRLTHNDIVATTYLSMSKISAPGGEIEVDDYLGFLPTFGPCYINLYGSPREFTGFPDPYTELNTGKGEGVAYRGRLLLSLETKLVEHSEQKVEDLPADDILRVEKYLRRRKYSLFAAFYSATMLQDVDDAIQFEVSIGNYGNKFDMTCLPLASTTQYSRAVFDGCHYYYLPWGNVKPVVVLSSYWEDISHRIETQNQLLGIADRLEAGLEQVHLALKAQCSTEDVDSLVAQLTDELIAGCSQPLGDIHETPSATHLDQYLYQLRTHHLSQITEAALALKLGHSELPAALEQAEDWLLRLRALAEEPQNSLPDIVIWMLQGDKRVAYQRVPAHQVLFSRRGANYCGKNCGKLQTIFLKYPMEKVPGARMPVQIRVKLWFGLSVDEKEFNQFAEGKLSVFAETYENETKLALVGNWGTTGLTYPKFSDVTGKIKLPKDSFRPSAGWTWAGDWFVCPEKTLLHDMDAGHLSFVEEVFENQTRLPGGQWIYMSDNYTDVNGEKVLPKDDIECPLGWKWEDEEWSTDLNRAVDEQGWEYSITIPPERKPKHWVPAEKMYYTHRRRRWVRLRRRDLSQMEALKRHRQAEAEGEGWEYASLFGWKFHLEYRKTDAFRRRRWRRRMEPLEKTGPAAVFALEGALGGVMDDKSEDSMSVSTLSFGVNRPTISCIFDYGNRYHLRCYMYQARDLAAMDKDSFSDPYAIVSFLHQSQKTVVVKNTLNPTWDQTLIFYEIEIFGEPATVAEQPPSIVVELYDHDTYGADEFMGRCICQPSLERMPRLAWFPLTRGSQPSGELLASFELIQREKPAIHHIPGFEVQETSRILDESEDTDLPYPPPQREANIYMVPQNIKPALQRTAIEILAWGLRNMKSYQLANISSPSLVVECGGQTVQSCVIRNLRKNPNFDICTLFMEVMLPREELYCPPITVKVIDNRQFGRRPVVGQCTIRSLESFLCDPYSAESPSPQGGPDDVSLLSPGEDVLIDIDDKEPLIPIQLADGLSSLAPTNTASPPSSPHEEEFIDWWSKFFASIGEREKCGSYLEKDFDTLKVYDTQLENVEAFEGLSDFCNTFKLYRGKTQEETEDPSVIGEFKGLFKIYPLPEDPAIPMPPRQFHQLAAQGPQECLVRIYIVRAFGLQPKDPNGKCDPYIKISIGKKSVSDQDNYIPCTLEPVFGKMFELTCTLPLEKDLKITLYDYDLLSKDEKIGETVVDLENRLLSKFGARCGLPQTYCVSGPNQWRDQLRPSQLLHLFCQQHRVKAPVYRTDRVMFQDKEYSIEEIEAGRIPNPHLGPVEERLALHVLQQQGLVPEHVESRPLYSPLQPDIEQGKLQMWVDLFPKALGRPGPPFNITPRRARRFFLRCIIWNTRDVILDDLSLTGEKMSDIYVKGWMIGFEEHKQKTDVHYRSLGGEGNFNWRFIFPFDYLPAEQVCTIAKKDAFWRLDKTESKIPARVVFQIWDNDKFSFDDFLGSLQLDLNRMPKPAKTAKKCSLDQLDDAFHPEWFVSLFEQKTVKGWWPCVAEEGEKKILAGKLEMTLEIVAESEHEERPAGQGRDEPNMNPKLEDPRRPDTSFLWFTSPYKTMKFILWRRFRWAIILFIILFILLLFLAIFIYAFPNYAAMKLVKPFS

SEQ ID NO: 27772 - protein, 2118 aa, Homo sapiens
MLRVFILYAENVHTPDTDISDAYCSAVFAGVKKRTKVIKNSVNPVWNEGFEWDLKGIPLDQGSELHVVVKDHETMGRNRFLGEAKVPLREVLATPSLSASFNAPLLDTKKQPTGASLVLQVSYTPLPGAVPLFPPPTPLEPSPTLPDLDVVAGGGQSRAETWSLLSDSTMDTRYSGKKWPAPTDTGGEEDTEDQGLTGDEAEPFLDQSGGPGAPTTPRKLPSRPPPHYPGIKRKRSAPTSRKLLSDKPQDFQIRVQVIEGRQLPGVNIKPVVKVTAAGQTKRTRIHKGNSPLFNETLFFNLFDSPGELFDEPIFITVVDSRSLRTDALLGEFRMDVGTIYREPRHAYLRKWLLLSDPDDFSAGARGYLKTSLCVLGPGDEAPLERKDPSEDKEDIESNLLRPTGVALRGAHFCLKVFRAEDLPQMDDAVMDNVKQIFGFESNKKNLVDPFVEVSFAGKMLCSKILEKTANPQWNQNITLPAMFPSMCEKMRIRIIDWDRLTHNDIVATTYLSMSKISAPGGEIEVDDYLGFLPTFGPCYINLYGSPREFTGFPDPYTELNTGKGEGVAYRGRLLLSLETKLVEHSEQKVEDLPADDILRVEKYLRRRKYSLFAAFYSATMLQDVDDAIQFEVSIGNYGNKFDMTCLPLASTTQYSRAVFDGCHYYYLPWGNVKPVVVLSSYWEDISHRIETQNQLLGIADRLEAGLEQVHLALKAQCSTEDVDSLVAQLTDELIAGCSQPLGDIHETPSATHLDQYLYQLRTHHLSQITEAALALKLGHSELPAALEQAEDWLLRLRALAEEPQNSLPDIVIWMLQGDKRVAYQRVPAHQVLFSRRGANYCGKNCGKLQTIFLKYPMEKVPGARMPVQIRVKLWFGLSVDEKEFNQFAEGKLSVFAETYENETKLALVGNWGTTGLTYPKFSDVTGKIKLPKDSFRPSAGWTWAGDWFVCPEKTLLHDMDAGHLSFVEEVFENQTRLPGGQWIYMSDNYTDVNGEKVLPKDDIECPLGWKWEDEEWSTDLNRAVDEQGWEYSITIPPERKPKHWVPAEKMYYTHRRRRWVRLRRRDLSQMEALKRHRQAEAEGEGWEYASLFGWKFHLEYRKTDAFRRRRWRRRMEPLEKTGPAAVFALEGALGGVMDDKSEDSMSVSTLSFGVNRPTISCIFDYGNRYHLRCYMYQARDLAAMDKDSFSDPYAIVSFLHQSQKTVVVKNTLNPTWDQTLIFYEIEIFGEPATVAEQPPSIVVELYDHDTYGADEFMGRCICQPSLERMPRLAWFPLTRGSQPSGELLASFELIQREKPAIHHIPGFEVQETSRILDESEDTDLPYPPPQREANIYMVPQNIKPALQRTAIEILAWGLRNMKSYQLANISSPSLVVECGGQTVQSCVIRNLRKNPNFDICTLFMEVMLPREELYCPPITVKVIDNRQFGRRPVVGQCTIRSLESFLCDPYSAESPSPQGGPDDVSLLSPGEDVLIDIDDKEPLIPIQLADGLSSLAPTNTASPPSSPHEEEFIDWWSKFFASIGEREKCGSYLEKDFDTLKVYDTQLENVEAFEGLSDFCNTFKLYRGKTQEETEDPSVIGEFKGLFKIYPLPEDPAIPMPPRQFHQLAAQGPQECLVRIYIVRAFGLQPKDPNGKCDPYIKISIGKKSVSDQDNYIPCTLEPVFGKMFELTCTLPLEKDLKITLYDYDLLSKDEKIGETVVDLENRLLSKFGARCGLPQTYCVSGPNQWRDQLRPSQLLHLFCQQHRVKAPVYRTDRVMFQDKEYSIEEIEAGRIPNPHLGPVEERLALHVLQQQGLVPEHVESRPLYSPLQPDIEQGKLQMWVDLFPKALGRPGPPFNITPRRARRFFLRCIIWNTRDVILDDLSLTGEKMSDIYVKGWMIGFEEHKQKTDVHYRSLGGEGNFNWRFIFPFDYLPAEQVCTIAKKDAFWRLDKTESKIPARVVFQIWDNDKFSFDDFLGSLQLDLNRMPKPAKTAKKCSLDQLDDAFHPEWFVSLFEQKTVKGWWPCVAEEGEKKILAGKLEMTLEIVAESEHEERPAGQGRDEPNMNPKLEDPRRPDTSFLWFTSPYKTMKFILWRRFRWAIILFIILFILLLFLAIFIYAFPNYAAMKLVKPFS

SEQ ID NO: 27773 - protein, 2112 aa, Homo sapiens
MLCCLLVRASNLPSAKKDRRSDPVASLTFRGVKKRTKVIKNSVNPVWNEGFEWDLKGIPLDQGSELHVVVKDHETMGRNRFLGEAKVPLREVLATPSLSASFNAPLLDTKKQPTGASLVLQVSYTPLPGAVPLFPPPTPLEPSPTLPDLDVVAGGGQSRAETWSLLSDSTMDTRYSGKKWPAPTDTGGEEDTEDQGLTGDEAEPFLDQSGGPGAPTTPRKLPSRPPPHYPGIKRKRSAPTSRKLLSDKPQDFQIRVQVIEGRQLPGVNIKPVVKVTAAGQTKRTRIHKGNSPLFNETLFFNLFDSPGELFDEPIFITVVDSRSLRTDALLGEFRMDVGTIYREPRHAYLRKWLLLSDPDDFSAGARGYLKTSLCVLGPGDEAPLERKDPSEDKEDIESNLLRPTGVALRGAHFCLKVFRAEDLPQMDDAVMDNVKQIFGFESNKKNLVDPFVEVSFAGKMLCSKILEKTANPQWNQNITLPAMFPSMCEKMRIRIIDWDRLTHNDIVATTYLSMSKISAPGGEIEEEPAGAVKPSKASDLDDYLGFLPTFGPCYINLYGSPREFTGFPDPYTELNTGKGEGVAYRGRLLLSLETKLVEHSEQKVEDLPADDILRVEKYLRRRKYSLFAAFYSATMLQDVDDAIQFEVSIGNYGNKFDMTCLPLASTTQYSRAVFDGCHYYYLPWGNVKPVVVLSSYWEDISHRIETQNQLLGIADRLEAGLEQVHLALKAQCSTEDVDSLVAQLTDELIAGCSQPLGDIHETPSATHLDQYLYQLRTHHLSQITEAALALKLGHSELPAALEQAEDWLLRLRALAEEPQNSLPDIVIWMLQGDKRVAYQRVPAHQVLFSRRGANYCGKNCGKLQTIFLKYPMEKVPGARMPVQIRVKLWFGLSVDEKEFNQFAEGKLSVFAETYENETKLALVGNWGTTGLTYPKFSDVTGKIKLPKDSFRPSAGWTWAGDWFVCPEKTLLHDMDAGHLSFVEEVFENQTRLPGGQWIYMSDNYTDVNGEKVLPKDDIECPLGWKWEDEEWSTDLNRAVDEQGWEYSITIPPERKPKHWVPAEKMYYTHRRRRWVRLRRRDLSQMEALKRHRQAEAEGEGWEYASLFGWKFHLEYRKTDAFRRRRWRRRMEPLEKTGPAAVFALEGALGGVMDDKSEDSMSVSTLSFGVNRPTISCIFDYGNRYHLRCYMYQARDLAAMDKDSFSDPYAIVSFLHQSQKTVVVKNTLNPTWDQTLIFYEIEIFGEPATVAEQPPSIVVELYDHDTYGADEFMGRCICQPSLERMPRLAWFPLTRGSQPSGELLASFELIQREKPAIHHIPGFEVQETSRILDESEDTDLPYPPPQREANIYMVPQNIKPALQRTAIEILAWGLRNMKSYQLANISSPSLVVECGGQTVQSCVIRNLRKNPNFDICTLFMEVMLPREELYCPPITVKVIDNRQFGRRPVVGQCTIRSLESFLCDPYSAESPSPQGGPDDVSLLSPGEDVLIDIDDKEPLIPIQEEEFIDWWSKFFASIGEREKCGSYLEKDFDTLKVYDTQLENVEAFEGLSDFCNTFKLYRGKTQEETEDPSVIGEFKGLFKIYPLPEDPAIPMPPRQFHQLAAQGPQECLVRIYIVRAFGLQPKDPNGKCDPYIKISIGKKSVSDQDNYIPCTLEPVFGKMFELTCTLPLEKDLKITLYDYDLLSKDEKIGETVVDLENRLLSKFGARCGLPQTYCVSGPNQWRDQLRPSQLLHLFCQQHRVKAPVYRTDRVMFQDKEYSIEEIEAGRIPNPHLGPVEERLALHVLQQQGLVPEHVESRPLYSPLQPDIEQGKLQMWVDLFPKALGRPGPPFNITPRRARRFFLRCIIWNTRDVILDDLSLTGEKMSDIYVKGWMIGFEEHKQKTDVHYRSLGGEGNFNWRFIFPFDYLPAEQVCTIAKKDAFWRLDKTESKIPARVVFQIWDNDKFSFDDFLGSLQLDLNRMPKPAKTAKKCSLDQLDDAFHPEWFVSLFEQKTVKGWWPCVAEEGEKKILAGKLEMTLEIVAESEHEERPAGQGRDEPNMNPKLEDPRRPDTSFLWFTSPYKTMKFILWRRFRWAIILFIILFILLLFLAIFIYAFPNYAAMKLVKPFS

SEQ ID NO: 27774 - protein, 2067 aa, Homo sapiens
MLCCLLVRASNLPSAKKDRRSDPVASLTFRGVKKRTKVIKNSVNPVWNEGFEWDLKGIPLDQGSELHVVVKDHETMGRNRFLGEAKVPLREVLATPSLSASFNAPLLDTKKQPTGASLVLQVSYTPLPGAVPLFPPPTPLEPSPTLPDLDVVADTGGEEDTEDQGLTGDEAEPFLDQSGGPGAPTTPRKLPSRPPPHYPGIKRKRSAPTSRKLLSDKPQDFQIRVQVIEGRQLPGVNIKPVVKVTAAGQTKRTRIHKGNSPLFNETLFFNLFDSPGELFDEPIFITVVDSRSLRTDALLGEFRMDVGTIYREPRHAYLRKWLLLSDPDDFSAGARGYLKTSLCVLGPGDEAPLERKDPSEDKEDIESNLLRPTGVALRGAHFCLKVFRAEDLPQMDDAVMDNVKQIFGFESNKKNLVDPFVEVSFAGKMLCSKILEKTANPQWNQNITLPAMFPSMCEKMRIRIIDWDRLTHNDIVATTYLSMSKISAPGGEIEVDDYLGFLPTFGPCYINLYGSPREFTGFPDPYTELNTGKGEGVAYRGRLLLSLETKLVEHSEQKVEDLPADDILRVEKYLRRRKYSLFAAFYSATMLQDVDDAIQFEVSIGNYGNKFDMTCLPLASTTQYSRAVFDGCHYYYLPWGNVKPVVVLSSYWEDISHRIETQNQLLGIADRLEAGLEQVHLALKAQCSTEDVDSLVAQLTDELIAGCSQPLGDIHETPSATHLDQYLYQLRTHHLSQITEAALALKLGHSELPAALEQAEDWLLRLRALAEEPQNSLPDIVIWMLQGDKRVAYQRVPAHQVLFSRRGANYCGKNCGKLQTIFLKYPMEKVPGARMPVQIRVKLWFGLSVDEKEFNQFAEGKLSVFAETYENETKLALVGNWGTTGLTYPKFSDVTGKIKLPKDSFRPSAGWTWAGDWFVCPEKTLLHDMDAGHLSFVEEVFENQTRLPGGQWIYMSDNYTDVNGEKVLPKDDIECPLGWKWEDEEWSTDLNRAVDEQGWEYSITIPPERKPKHWVPAEKMYYTHRRRRWVRLRRRDLSQMEALKRHRQAEAEGEGWEYASLFGWKFHLEYRKTDAFRRRRWRRRMEPLEKTGPAAVFALEGALGGVMDDKSEDSMSVSTLSFGVNRPTISCIFDYGNRYHLRCYMYQARDLAAMDKDSFSDPYAIVSFLHQSQKTVVVKNTLNPTWDQTLIFYEIEIFGEPATVAEQPPSIVVELYDHDTYGADEFMGRCICQPSLERMPRLAWFPLTRGSQPSGELLASFELIQREKPAIHHIPGFEVQETSRILDESEDTDLPYPPPQREANIYMVPQNIKPALQRTAIEILAWGLRNMKSYQLANISSPSLVVECGGQTVQSCVIRNLRKNPNFDICTLFMEVMLPREELYCPPITVKVIDNRQFGRRPVVGQCTIRSLESFLCDPYSAESPSPQGGPDDVSLLSPGEDVLIDIDDKEPLIPIQEEEFIDWWSKFFASIGEREKCGSYLEKDFDTLKVYDTQLENVEAFEGLSDFCNTFKLYRGKTQEETEDPSVIGEFKGLFKIYPLPEDPAIPMPPRQFHQLAAQGPQECLVRIYIVRAFGLQPKDPNGKCDPYIKISIGKKSVSDQDNYIPCTLEPVFGKMFELTCTLPLEKDLKITLYDYDLLSKDEKIGETVVDLENRLLSKFGARCGLPQTYCVSGPNQWRDQLRPSQLLHLFCQQHRVKAPVYRTDRVMFQDKEYSIEEIEAGRIPNPHLGPVEERLALHVLQQQGLVPEHVESRPLYSPLQPDIEQGKLQMWVDLFPKALGRPGPPFNITPRRARRFFLRCIIWNTRDVILDDLSLTGEKMSDIYVKGWMIGFEEHKQKTDVHYRSLGGEGNFNWRFIFPFDYLPAEQVCTIAKKDAFWRLDKTESKIPARVVFQIWDNDKFSFDDFLGSLQLDLNRMPKPAKTAKKCSLDQLDDAFHPEWFVSLFEQKTVKGWWPCVAEEGEKKILAGKLEMTLEIVAESEHEERPAGQGRDEPNMNPKLEDPRRPDTSFLWFTSPYKTMKFILWRRFRWAIILFIILFILLLFLAIFIYAFPNYAAMKLVKPFS

SEQ ID NO: 27775 - protein, 2102 aa, Homo sapiens
MLCCLLVRASNLPSAKKDRRSDPVASLTFRGVKKRTKVIKNSVNPVWNEGFEWDLKGIPLDQGSELHVVVKDHETMGRNRFLGEAKVPLREVLATPSLSASFNAPLLDTKKQPTGASLVLQVSYTPLPGAVPLFPPPTPLEPSPTLPDLDVVADTGGEEDTEDQGLTGDEAEPFLDQSGGPGAPTTPRKLPSRPPPHYPGIKRKRSAPTSRKLLSDKPQDFQIRVQVIEGRQLPGVNIKPVVKVTAAGQTKRTRIHKGNSPLFNETLFFNLFDSPGELFDEPIFITVVDSRSLRTDALLGEFRMDVGTIYREPRHAYLRKWLLLSDPDDFSAGARGYLKTSLCVLGPGDEAPLERKDPSEDKEDIESNLLRPTGVALRGAHFCLKVFRAEDLPQMDDAVMDNVKQIFGFESNKKNLVDPFVEVSFAGKMLCSKILEKTANPQWNQNITLPAMFPSMCEKMRIRIIDWDRLTHNDIVATTYLSMSKISAPGGEIEEEPAGAVKPSKASDLDDYLGFLPTFGPCYINLYGSPREFTGFPDPYTELNTGKGEGVAYRGRLLLSLETKLVEHSEQKVEDLPADDILRVEKYLRRRKYSLFAAFYSATMLQDVDDAIQFEVSIGNYGNKFDMTCLPLASTTQYSRAVFDGCHYYYLPWGNVKPVVVLSSYWEDISHRIETQNQLLGIADRLEAGLEQVHLALKAQCSTEDVDSLVAQLTDELIAGCSQPLGDIHETPSATHLDQYLYQLRTHHLSQITEAALALKLGHSELPAALEQAEDWLLRLRALAEEPQNSLPDIVIWMLQGDKRVAYQRVPAHQVLFSRRGANYCGKNCGKLQTIFLKYPMEKVPGARMPVQIRVKLWFGLSVDEKEFNQFAEGKLSVFAETYENETKLALVGNWGTTGLTYPKFSDVTGKIKLPKDSFRPSAGWTWAGDWFVCPEKTLLHDMDAGHLSFVEEVFENQTRLPGGQWIYMSDNYTDVNGEKVLPKDDIECPLGWKWEDEEWSTDLNRAVDEQGWEYSITIPPERKPKHWVPAEKMYYTHRRRRWVRLRRRDLSQMEALKRHRQAEAEGEGWEYASLFGWKFHLEYRKTDAFRRRRWRRRMEPLEKTGPAAVFALEGALGGVMDDKSEDSMSVSTLSFGVNRPTISCIFDYGNRYHLRCYMYQARDLAAMDKDSFSDPYAIVSFLHQSQKTVVVKNTLNPTWDQTLIFYEIEIFGEPATVAEQPPSIVVELYDHDTYGADEFMGRCICQPSLERMPRLAWFPLTRGSQPSGELLASFELIQREKPAIHHIPGFEVQETSRILDESEDTDLPYPPPQREANIYMVPQNIKPALQRTAIEILAWGLRNMKSYQLANISSPSLVVECGGQTVQSCVIRNLRKNPNFDICTLFMEVMLPREELYCPPITVKVIDNRQFGRRPVVGQCTIRSLESFLCDPYSAESPSPQGGPDDVSLLSPGEDVLIDIDDKEPLIPIQLADGLSSLAPTNTASPPSSPHEEEFIDWWSKFFASIGEREKCGSYLEKDFDTLKVYDTQLENVEAFEGLSDFCNTFKLYRGKTQEETEDPSVIGEFKGLFKIYPLPEDPAIPMPPRQFHQLAAQGPQECLVRIYIVRAFGLQPKDPNGKCDPYIKISIGKKSVSDQDNYIPCTLEPVFGKMFELTCTLPLEKDLKITLYDYDLLSKDEKIGETVVDLENRLLSKFGARCGLPQTYCVSGPNQWRDQLRPSQLLHLFCQQHRVKAPVYRTDRVMFQDKEYSIEEIEAGRIPNPHLGPVEERLALHVLQQQGLVPEHVESRPLYSPLQPDIEQGKLQMWVDLFPKALGRPGPPFNITPRRARRFFLRCIIWNTRDVILDDLSLTGEKMSDIYVKGWMIGFEEHKQKTDVHYRSLGGEGNFNWRFIFPFDYLPAEQVCTIAKKDAFWRLDKTESKIPARVVFQIWDNDKFSFDDFLGSLQLDLNRMPKPAKTAKKCSLDQLDDAFHPEWFVSLFEQKTVKGWWPCVAEEGEKKILAGKLEMTLEIVAESEHEERPAGQGRDEPNMNPKLEDPRRPDTSFLWFTSPYKTMKFILWRRFRWAIILFIILFILLLFLAIFIYAFPNYAAMKLVKPFS

SEQ ID NO: 27776 - protein, 2098 aa, Homo sapiens
MLCCLLVRASNLPSAKKDRRSDPVASLTFRGVKKRTKVIKNSVNPVWNEGFEWDLKGIPLDQGSELHVVVKDHETMGRNRFLGEAKVPLREVLATPSLSASFNAPLLDTKKQPTGASLVLQVSYTPLPGAVPLFPPPTPLEPSPTLPDLDVVAGGGQSRAETWSLLSDSTMDTRYSGKKWPAPTDTGGEEDTEDQGLTGDEAEPFLDQSGGPGAPTTPRKLPSRPPPHYPGIKRKRSAPTSRKLLSDKPQDFQIRVQVIEGRQLPGVNIKPVVKVTAAGQTKRTRIHKGNSPLFNETLFFNLFDSPGELFDEPIFITVVDSRSLRTDALLGEFRMDVGTIYREPRHAYLRKWLLLSDPDDFSAGARGYLKTSLCVLGPGDEAPLERKDPSEDKEDIESNLLRPTGVALRGAHFCLKVFRAEDLPQMDDAVMDNVKQIFGFESNKKNLVDPFVEVSFAGKMLCSKILEKTANPQWNQNITLPAMFPSMCEKMRIRIIDWDRLTHNDIVATTYLSMSKISAPGGEIEVDDYLGFLPTFGPCYINLYGSPREFTGFPDPYTELNTGKGEGVAYRGRLLLSLETKLVEHSEQKVEDLPADDILRVEKYLRRRKYSLFAAFYSATMLQDVDDAIQFEVSIGNYGNKFDMTCLPLASTTQYSRAVFDGCHYYYLPWGNVKPVVVLSSYWEDISHRIETQNQLLGIADRLEAGLEQVHLALKAQCSTEDVDSLVAQLTDELIAGCSQPLGDIHETPSATHLDQYLYQLRTHHLSQITEAALALKLGHSELPAALEQAEDWLLRLRALAEEPQNSLPDIVIWMLQGDKRVAYQRVPAHQVLFSRRGANYCGKNCGKLQTIFLKYPMEKVPGARMPVQIRVKLWFGLSVDEKEFNQFAEGKLSVFAETYENETKLALVGNWGTTGLTYPKFSDVTGKIKLPKDSFRPSAGWTWAGDWFVCPEKTLLHDMDAGHLSFVEEVFENQTRLPGGQWIYMSDNYTDVNGEKVLPKDDIECPLGWKWEDEEWSTDLNRAVDEQGWEYSITIPPERKPKHWVPAEKMYYTHRRRRWVRLRRRDLSQMEALKRHRQAEAEGEGWEYASLFGWKFHLEYRKTDAFRRRRWRRRMEPLEKTGPAAVFALEGALGGVMDDKSEDSMSVSTLSFGVNRPTISCIFDYGNRYHLRCYMYQARDLAAMDKDSFSDPYAIVSFLHQSQKTVVVKNTLNPTWDQTLIFYEIEIFGEPATVAEQPPSIVVELYDHDTYGADEFMGRCICQPSLERMPRLAWFPLTRGSQPSGELLASFELIQREKPAIHHIPGFEVQETSRILDESEDTDLPYPPPQREANIYMVPQNIKPALQRTAIEILAWGLRNMKSYQLANISSPSLVVECGGQTVQSCVIRNLRKNPNFDICTLFMEVMLPREELYCPPITVKVIDNRQFGRRPVVGQCTIRSLESFLCDPYSAESPSPQGGPDDVSLLSPGEDVLIDIDDKEPLIPIQEEEFIDWWSKFFASIGEREKCGSYLEKDFDTLKVYDTQLENVEAFEGLSDFCNTFKLYRGKTQEETEDPSVIGEFKGLFKIYPLPEDPAIPMPPRQFHQLAAQGPQECLVRIYIVRAFGLQPKDPNGKCDPYIKISIGKKSVSDQDNYIPCTLEPVFGKMFELTCTLPLEKDLKITLYDYDLLSKDEKIGETVVDLENRLLSKFGARCGLPQTYCVSGPNQWRDQLRPSQLLHLFCQQHRVKAPVYRTDRVMFQDKEYSIEEIEAGRIPNPHLGPVEERLALHVLQQQGLVPEHVESRPLYSPLQPDIEQGKLQMWVDLFPKALGRPGPPFNITPRRARRFFLRCIIWNTRDVILDDLSLTGEKMSDIYVKGWMIGFEEHKQKTDVHYRSLGGEGNFNWRFIFPFDYLPAEQVCTIAKKDAFWRLDKTESKIPARVVFQIWDNDKFSFDDFLGSLQLDLNRMPKPAKTAKKCSLDQLDDAFHPEWFVSLFEQKTVKGWWPCVAEEGEKKILAGKLEMTLEIVAESEHEERPAGQGRDEPNMNPKLEDPRRPDTSFLWFTSPYKTMKFILWRRFRWAIILFIILFILLLFLAIFIYAFPNYAAMKLVKPFS

SEQ ID NO: 27777 - protein, 2088 aa, Homo sapiens
MLCCLLVRASNLPSAKKDRRSDPVASLTFRGVKKRTKVIKNSVNPVWNEGFEWDLKGIPLDQGSELHVVVKDHETMGRNRFLGEAKVPLREVLATPSLSASFNAPLLDTKKQPTGASLVLQVSYTPLPGAVPLFPPPTPLEPSPTLPDLDVVADTGGEEDTEDQGLTGDEAEPFLDQSGGPGAPTTPRKLPSRPPPHYPGIKRKRSAPTSRKLLSDKPQDFQIRVQVIEGRQLPGVNIKPVVKVTAAGQTKRTRIHKGNSPLFNETLFFNLFDSPGELFDEPIFITVVDSRSLRTDALLGEFRMDVGTIYREPRHAYLRKWLLLSDPDDFSAGARGYLKTSLCVLGPGDEAPLERKDPSEDKEDIESNLLRPTGVALRGAHFCLKVFRAEDLPQMDDAVMDNVKQIFGFESNKKNLVDPFVEVSFAGKMLCSKILEKTANPQWNQNITLPAMFPSMCEKMRIRIIDWDRLTHNDIVATTYLSMSKISAPGGEIEVDDYLGFLPTFGPCYINLYGSPREFTGFPDPYTELNTGKGEGVAYRGRLLLSLETKLVEHSEQKVEDLPADDILRVEKYLRRRKYSLFAAFYSATMLQDVDDAIQFEVSIGNYGNKFDMTCLPLASTTQYSRAVFDGCHYYYLPWGNVKPVVVLSSYWEDISHRIETQNQLLGIADRLEAGLEQVHLALKAQCSTEDVDSLVAQLTDELIAGCSQPLGDIHETPSATHLDQYLYQLRTHHLSQITEAALALKLGHSELPAALEQAEDWLLRLRALAEEPQNSLPDIVIWMLQGDKRVAYQRVPAHQVLFSRRGANYCGKNCGKLQTIFLKYPMEKVPGARMPVQIRVKLWFGLSVDEKEFNQFAEGKLSVFAETYENETKLALVGNWGTTGLTYPKFSDVTGKIKLPKDSFRPSAGWTWAGDWFVCPEKTLLHDMDAGHLSFVEEVFENQTRLPGGQWIYMSDNYTDVNGEKVLPKDDIECPLGWKWEDEEWSTDLNRAVDEQGWEYSITIPPERKPKHWVPAEKMYYTHRRRRWVRLRRRDLSQMEALKRHRQAEAEGEGWEYASLFGWKFHLEYRKTDAFRRRRWRRRMEPLEKTGPAAVFALEGALGGVMDDKSEDSMSVSTLSFGVNRPTISCIFDYGNRYHLRCYMYQARDLAAMDKDSFSDPYAIVSFLHQSQKTVVVKNTLNPTWDQTLIFYEIEIFGEPATVAEQPPSIVVELYDHDTYGADEFMGRCICQPSLERMPRLAWFPLTRGSQPSGELLASFELIQREKPAIHHIPGFEVQETSRILDESEDTDLPYPPPQREANIYMVPQNIKPALQRTAIEILAWGLRNMKSYQLANISSPSLVVECGGQTVQSCVIRNLRKNPNFDICTLFMEVMLPREELYCPPITVKVIDNRQFGRRPVVGQCTIRSLESFLCDPYSAESPSPQGGPDDVSLLSPGEDVLIDIDDKEPLIPIQLADGLSSLAPTNTASPPSSPHEEEFIDWWSKFFASIGEREKCGSYLEKDFDTLKVYDTQLENVEAFEGLSDFCNTFKLYRGKTQEETEDPSVIGEFKGLFKIYPLPEDPAIPMPPRQFHQLAAQGPQECLVRIYIVRAFGLQPKDPNGKCDPYIKISIGKKSVSDQDNYIPCTLEPVFGKMFELTCTLPLEKDLKITLYDYDLLSKDEKIGETVVDLENRLLSKFGARCGLPQTYCVSGPNQWRDQLRPSQLLHLFCQQHRVKAPVYRTDRVMFQDKEYSIEEIEAGRIPNPHLGPVEERLALHVLQQQGLVPEHVESRPLYSPLQPDIEQGKLQMWVDLFPKALGRPGPPFNITPRRARRFFLRCIIWNTRDVILDDLSLTGEKMSDIYVKGWMIGFEEHKQKTDVHYRSLGGEGNFNWRFIFPFDYLPAEQVCTIAKKDAFWRLDKTESKIPARVVFQIWDNDKFSFDDFLGSLQLDLNRMPKPAKTAKKCSLDQLDDAFHPEWFVSLFEQKTVKGWWPCVAEEGEKKILAGKLEMTLEIVAESEHEERPAGQGRDEPNMNPKLEDPRRPDTSFLWFTSPYKTMKFILWRRFRWAIILFIILFILLLFLAIFIYAFPNYAAMKLVKPFS

SEQ ID NO: 27778 - protein, 2119 aa, Homo sapiens
MLCCLLVRASNLPSAKKDRRSDPVASLTFRGVKKRTKVIKNSVNPVWNEGFEWDLKGIPLDQGSELHVVVKDHETMGRNRFLGEAKVPLREVLATPSLSASFNAPLLDTKKQPTGASLVLQVSYTPLPGAVPLFPPPTPLEPSPTLPDLDVVAGGGQSRAETWSLLSDSTMDTRYSGKKWPAPTDTGGEEDTEDQGLTGDEAEPFLDQSGGPGAPTTPRKLPSRPPPHYPGIKRKRSAPTSRKLLSDKPQDFQIRVQVIEGRQLPGVNIKPVVKVTAAGQTKRTRIHKGNSPLFNETLFFNLFDSPGELFDEPIFITVVDSRSLRTDALLGEFRMDVGTIYREPRHAYLRKWLLLSDPDDFSAGARGYLKTSLCVLGPGDEAPLERKDPSEDKEDIESNLLRPTGVALRGAHFCLKVFRAEDLPQMDDAVMDNVKQIFGFESNKKNLVDPFVEVSFAGKMLCSKILEKTANPQWNQNITLPAMFPSMCEKMRIRIIDWDRLTHNDIVATTYLSMSKISAPGGEIEVDDYLGFLPTFGPCYINLYGSPREFTGFPDPYTELNTGKGEGVAYRGRLLLSLETKLVEHSEQKVEDLPADDILRVEKYLRRRKYSLFAAFYSATMLQDVDDAIQFEVSIGNYGNKFDMTCLPLASTTQYSRAVFDGCHYYYLPWGNVKPVVVLSSYWEDISHRIETQNQLLGIADRLEAGLEQVHLALKAQCSTEDVDSLVAQLTDELIAGCSQPLGDIHETPSATHLDQYLYQLRTHHLSQITEAALALKLGHSELPAALEQAEDWLLRLRALAEEPQNSLPDIVIWMLQGDKRVAYQRVPAHQVLFSRRGANYCGKNCGKLQTIFLKYPMEKVPGARMPVQIRVKLWFGLSVDEKEFNQFAEGKLSVFAETYENETKLALVGNWGTTGLTYPKFSDVTGKIKLPKDSFRPSAGWTWAGDWFVCPEKTLLHDMDAGHLSFVEEVFENQTRLPGGQWIYMSDNYTDVNGEKVLPKDDIECPLGWKWEDEEWSTDLNRAVDEQGWEYSITIPPERKPKHWVPAEKMYYTHRRRRWVRLRRRDLSQMEALKRHRQAEAEGEGWEYASLFGWKFHLEYRKTDAFRRRRWRRRMEPLEKTGPAAVFALEGALGGVMDDKSEDSMSVSTLSFGVNRPTISCIFDYGNRYHLRCYMYQARDLAAMDKDSFSDPYAIVSFLHQSQKTVVVKNTLNPTWDQTLIFYEIEIFGEPATVAEQPPSIVVELYDHDTYGADEFMGRCICQPSLERMPRLAWFPLTRGSQPSGELLASFELIQREKPAIHHIPGFEVQETSRILDESEDTDLPYPPPQREANIYMVPQNIKPALQRTAIEILAWGLRNMKSYQLANISSPSLVVECGGQTVQSCVIRNLRKNPNFDICTLFMEVMLPREELYCPPITVKVIDNRQFGRRPVVGQCTIRSLESFLCDPYSAESPSPQGGPDDVSLLSPGEDVLIDIDDKEPLIPIQLADGLSSLAPTNTASPPSSPHEEEFIDWWSKFFASIGEREKCGSYLEKDFDTLKVYDTQLENVEAFEGLSDFCNTFKLYRGKTQEETEDPSVIGEFKGLFKIYPLPEDPAIPMPPRQFHQLAAQGPQECLVRIYIVRAFGLQPKDPNGKCDPYIKISIGKKSVSDQDNYIPCTLEPVFGKMFELTCTLPLEKDLKITLYDYDLLSKDEKIGETVVDLENRLLSKFGARCGLPQTYCVSGPNQWRDQLRPSQLLHLFCQQHRVKAPVYRTDRVMFQDKEYSIEEIEAGRIPNPHLGPVEERLALHVLQQQGLVPEHVESRPLYSPLQPDIEQGKLQMWVDLFPKALGRPGPPFNITPRRARRFFLRCIIWNTRDVILDDLSLTGEKMSDIYVKGWMIGFEEHKQKTDVHYRSLGGEGNFNWRFIFPFDYLPAEQVCTIAKKDAFWRLDKTESKIPARVVFQIWDNDKFSFDDFLGSLQLDLNRMPKPAKTAKKCSLDQLDDAFHPEWFVSLFEQKTVKGWWPCVAEEGEKKILAGKLEMTLEIVAESEHEERPAGQGRDEPNMNPKLEDPRRPDTSFLWFTSPYKTMKFILWRRFRWAIILFIILFILLLFLAIFIYAFPNYAAMKLVKPFS

SEQ ID NO: 27779 - protein, 2081 aa, Homo sapiens
MLCCLLVRASNLPSAKKDRRSDPVASLTFRGVKKRTKVIKNSVNPVWNEGFEWDLKGIPLDQGSELHVVVKDHETMGRNRFLGEAKVPLREVLATPSLSASFNAPLLDTKKQPTGASLVLQVSYTPLPGAVPLFPPPTPLEPSPTLPDLDVVADTGGEEDTEDQGLTGDEAEPFLDQSGGPGAPTTPRKLPSRPPPHYPGIKRKRSAPTSRKLLSDKPQDFQIRVQVIEGRQLPGVNIKPVVKVTAAGQTKRTRIHKGNSPLFNETLFFNLFDSPGELFDEPIFITVVDSRSLRTDALLGEFRMDVGTIYREPRHAYLRKWLLLSDPDDFSAGARGYLKTSLCVLGPGDEAPLERKDPSEDKEDIESNLLRPTGVALRGAHFCLKVFRAEDLPQMDDAVMDNVKQIFGFESNKKNLVDPFVEVSFAGKMLCSKILEKTANPQWNQNITLPAMFPSMCEKMRIRIIDWDRLTHNDIVATTYLSMSKISAPGGEIEEEPAGAVKPSKASDLDDYLGFLPTFGPCYINLYGSPREFTGFPDPYTELNTGKGEGVAYRGRLLLSLETKLVEHSEQKVEDLPADDILRVEKYLRRRKYSLFAAFYSATMLQDVDDAIQFEVSIGNYGNKFDMTCLPLASTTQYSRAVFDGCHYYYLPWGNVKPVVVLSSYWEDISHRIETQNQLLGIADRLEAGLEQVHLALKAQCSTEDVDSLVAQLTDELIAGCSQPLGDIHETPSATHLDQYLYQLRTHHLSQITEAALALKLGHSELPAALEQAEDWLLRLRALAEEPQNSLPDIVIWMLQGDKRVAYQRVPAHQVLFSRRGANYCGKNCGKLQTIFLKYPMEKVPGARMPVQIRVKLWFGLSVDEKEFNQFAEGKLSVFAETYENETKLALVGNWGTTGLTYPKFSDVTGKIKLPKDSFRPSAGWTWAGDWFVCPEKTLLHDMDAGHLSFVEEVFENQTRLPGGQWIYMSDNYTDVNGEKVLPKDDIECPLGWKWEDEEWSTDLNRAVDEQGWEYSITIPPERKPKHWVPAEKMYYTHRRRRWVRLRRRDLSQMEALKRHRQAEAEGEGWEYASLFGWKFHLEYRKTDAFRRRRWRRRMEPLEKTGPAAVFALEGALGGVMDDKSEDSMSVSTLSFGVNRPTISCIFDYGNRYHLRCYMYQARDLAAMDKDSFSDPYAIVSFLHQSQKTVVVKNTLNPTWDQTLIFYEIEIFGEPATVAEQPPSIVVELYDHDTYGADEFMGRCICQPSLERMPRLAWFPLTRGSQPSGELLASFELIQREKPAIHHIPGFEVQETSRILDESEDTDLPYPPPQREANIYMVPQNIKPALQRTAIEILAWGLRNMKSYQLANISSPSLVVECGGQTVQSCVIRNLRKNPNFDICTLFMEVMLPREELYCPPITVKVIDNRQFGRRPVVGQCTIRSLESFLCDPYSAESPSPQGGPDDVSLLSPGEDVLIDIDDKEPLIPIQEEEFIDWWSKFFASIGEREKCGSYLEKDFDTLKVYDTQLENVEAFEGLSDFCNTFKLYRGKTQEETEDPSVIGEFKGLFKIYPLPEDPAIPMPPRQFHQLAAQGPQECLVRIYIVRAFGLQPKDPNGKCDPYIKISIGKKSVSDQDNYIPCTLEPVFGKMFELTCTLPLEKDLKITLYDYDLLSKDEKIGETVVDLENRLLSKFGARCGLPQTYCVSGPNQWRDQLRPSQLLHLFCQQHRVKAPVYRTDRVMFQDKEYSIEEIEAGRIPNPHLGPVEERLALHVLQQQGLVPEHVESRPLYSPLQPDIEQGKLQMWVDLFPKALGRPGPPFNITPRRARRFFLRCIIWNTRDVILDDLSLTGEKMSDIYVKGWMIGFEEHKQKTDVHYRSLGGEGNFNWRFIFPFDYLPAEQVCTIAKKDAFWRLDKTESKIPARVVFQIWDNDKFSFDDFLGSLQLDLNRMPKPAKTAKKCSLDQLDDAFHPEWFVSLFEQKTVKGWWPCVAEEGEKKILAGKLEMTLEIVAESEHEERPAGQGRDEPNMNPKLEDPRRPDTSFLWFTSPYKTMKFILWRRFRWAIILFIILFILLLFLAIFIYAFPNYAAMKLVKPFS

SEQ ID NO: 27780 - protein, 1954 aa, Homo sapiens
MLRVFILYAENVHTPDTDISDAYCSAVFAGVKKRTKVIKNSVNPVWNEGFEWDLKGIPLDQGSELHVVVKDHETMGRNRFLGEAKVPLREVLATPSLSASFNAPLLDTKKQPTGASLVLQVSYTPLPGAVPLFPPPTPLEPSPTLPDLDVVADTGGEEDTEDQGLTGDEAEPFLDQSGGPGAPTTPRKLPSRPPPHYPGIKRKRSAPTSRKLLSDKPQDFQIRVQVIEGRQLPGVNIKPVVKVTAAGQTKRTRIHKGNSPLFNETLFFNLFDSPGELFDEPIFITVVDSRSLRTDALLGEFRMDVGTIYREPRHAYLRKWLLLSDPDDFSAGARGYLKTSLCVLGPGDEAPLERKDPSEDKEDIESNLLRPTGVALRGAHFCLKVFRAEDLPQMDDAVMDNVKQIFGFESNKKNLVDPFVEVSFAGKMLCSKILEKTANPQWNQNITLPAMFPSMCEKMRIRIIDWDRLTHNDIVATTYLSMSKISAPGGEIEVDDYLGFLPTFGPCYINLYGSPREFTGFPDPYTELNTGKGEGVAYRGRLLLSLETKLVEHSEQKVEDLPADDILRVEKYLRRRKYSLFAAFYSATMLQDVDDAIQFEVSIGNYGNKFDMTCLPLASTTQYSRAVFDGCHYYYLPWGNVKPVVVLSSYWEDISHRIETQNQLLGIADRLEAGLEQVHLALKAQCSTEDVDSLVAQLTDELIAGCSQPLGDIHETPSATHLDQYLYQLRTHHLSQITEAALALKLGHSELPAALEQAEDWLLRLRALAEEPQNSLPDIVIWMLQGDKRVAYQRVPAHQVLFSRRGANYCGKNCGKLQTIFLKYPMEKVPGARMPVQIRVKLWFGLSVDEKEFNQFAEGKLSVFAETYENETKLALVGNWGTTGLTYPKFSDVTGKIKLPKDSFRPSAGWTWAGDWFVCPEKTLLHDMDAGHLSFVEEVFENQTRLPGGQWIYMSDNYTDVNGEKVLPKDDIECPLGWKWEDEEWSTDLNRAVDEQGWEYSITIPPERKPKHWVPAEKMYYTHRRRRWVRLRRRDLSQMEALKRHRQAEAEGEGWEYASLFGWKFHLEYRKTDAFRRRRWRRRMEPLEKTGPAAVFALEGALGGVMDDKSEDSMSVSTLSFGVNRPTISCIFDYGNRYHLRCYMYQARDLAAMDKDSFSDPYAIVSFLHQSQKTVVVKNTLNPTWDQTLIFYEIEIFGEPATVAEQPPSIVVELYDHDTYGADEFMGRCICQPSLERMPRLAWFPLTRGSQPSGELLASFELIQREKPAIHHIPGFEVQETSRILDESEDTDLPYPPPQREANIYMVPQNIKPALQRTAIEILAWGLRNMKSYQLANISSPSLVVECGGQTVQSCVIRNLRKNPNFDICTLFMEVMLPREELYCPPITVKVIDNRQFGRRPVVGQCTIRSLESFLCDPYSAESPSPQGGPDDVSLLSPGEDVLIDIDDKEPLIPIQEEEFIDWWSKFFASIGEREKCGSYLEKDFDTLKVYDTQLENVEAFEGLSDFCNTFKLYRGKTQEETEDPSVIGEFKGLFKIYPLPEDPAIPMPPRQFHQLAAQGPQECLVRIYIVRAFGLQPKDPNGKCDPYIKISIGKKSVSDQDNYIPCTLEPVFGKMFELTCTLPLEKDLKITLYDYDLLSKDEKIGETVVDLENRLLSKFGARCGLPQTYCVSGPNQWRDQLRPSQLLHLFCQQHRVKAPVYRTDRVMFQDKEYSIEEIEAGRIPNPHLGPVEERLALHVLQQQGLVPEHVESRPLYSPLQPDIEQGKLQMWVDLFPKALGRPGPPFNITPRRARRFFLRCIIWNTRDVILDDLSLTGEKMSDIYVKGWMIGFEEHKQKTDVHYRSLGGEGNFNWRFIFPFDYLPAEQVCTIAKKDAFWRLDKTESKIPARVVFQIWDNDKFSFDDFLGSLQLDLNRMPSSASSSRPPRPDCPARVGRQTDGPAHTPRVANMEL

SEQ ID NO: 27781 - protein, 625 aa, Homo sapiens
MAGDRLPRKVMDAKKLASLLRGGPGGPLVIDSRSFVEYNSWHVLSSVNICCSKLVKRRLQQGKVTIAELIQPAARSQVEATEPQDVVVYDQSTRDASVLAADSFLSILLSKLDGCFDSVAILTGGFATFSSCFPGLCEGKPAALLPMSLSQPCLPVPSVGLTRILPHLYLGSQKDVLNKDLMTQNGISYVLNASNSCPKPDFICESRFMRVPINDNYCEKLLPWLDKSIEFIDKAKLSSCQVIVHCLAGISRSATIAIAYIMKTMGMSSDDAYRFVKDRRPSISPNFNFLGQLLEYERSLKLLAALQGDPGTPSGTPEPPPSPAAGAPLPRLPPPTSESAATGNAAAREGGLSAGGEPPAPPTPPATSALQQGLRGLHLSSDRLQDTNRLKRSFSLDIKSAYAPSRRPDGPGPPDPGEAPKLCKLDSPSGAALGLSSPSPDSPDAAPEARPRPRRRPRPPAGSPARSPAHSLGLNFGDAARQTPRHGLSALSAPGLPGPGQPAGPGAWAPPLDSPGTPSPDGPWCFSPEGAQGAGGVLFAPFGRAGAPGPGGGSDLRRREAARAEPRDARTGWPEEPAPETQFKRRSCQMEFEEGMVEGRARGEELAALGKQASFSGSVEVIEVS

SEQ ID NO: 27782 - protein, 766 aa, Homo sapiens
MKTPWKVLLGLLGAAALVTIITVPVVLLNKGTDDATADSRKTYTLTDYLKNTYRLKLYSLRWISDHEYLYKQENNILVFNAEYGNSSVFLENSTFDEFGHSINDYSISPDGQFILLEYNYVKQWRHSYTASYDIYDLNKRQLITEERIPNNTQWVTWSPVGHKLAYVWNNDIYVKIEPNLPSYRITWTGKEDIIYNGITDWVYEEEVFSAYSALWWSPNGTFLAYAQFNDTEVPLIEYSFYSDESLQYPKTVRVPYPKAGAVNPTVKFFVVNTDSLSSVTNATSIQITAPASMLIGDHYLCDVTWATQERISLQWLRRIQNYSVMDICDYDESSGRWNCLVARQHIEMSTTGWVGRFRPSEPHFTLDGNSFYKIISNEEGYRHICYFQIDKKDCTFITKGTWEVIGIEALTSDYLYYISNEYKGMPGGRNLYKIQLSDYTKVTCLSCELNPERCQYYSVSFSKEAKYYQLRCSGPGLPLYTLHSSVNDKGLRVLEDNSALDKMLQNVQMPSKKLDFIILNETKFWYQMILPPHFDKSKKYPLLLDVYAGPCSQKADTVFRLNWATYLASTENIIVASFDGRGSGYQGDKIMHAINRRLGTFEVEDQIEAARQFSKMGFVDNKRIAIWGWSYGGYVTSMVLGSGSGVFKCGIAVAPVSRWEYYDSVYTERYMGLPTPEDNLDHYRNSTVMSRAENFKQVEYLLIHGTADDNVHFQQSAQISKALVDVGVDFQAMWYTDEDHGIASSTAHQHIYTHMSHFIKQCFSLP

SEQ ID NO: 27783 - protein, 116 aa, Homo sapiens
MEEYHRHCDEVGFNAEEAHNIVKECVDGVLGGEDYNHNNINQWTASIVEQSLTHLVKLGKAYKYIVTCAVVQKSAYGFHTASSCFWDTTSDGTCTVRWENRTMNCIVNVFAIAIVL

SEQ ID NO: 27784 - protein, 669 aa, Homo sapiens
MGSNSSRIGDLPKNEYLKKLSGTESISENDPFWNQLLSFSFPAPTSSSELKLLEEATISVCRSLVENNPRTGNLGALIKVFLSRTKELKLSAECQNHIFIWQTHNALFIICCLLKVFICQMSEEELQLHFTYEEKSPGNYSSDSEDLLEELLCCLMQLITDIPLLDITYEISVEAISTMVVFLSCQLFHKEVLRQSISHKYLMRGPCLPYTSKLVKTLLYNFIRQEKPPPPGAHVFPQQSDGGGLLYGLASGVATGLWTVFTLGGVGSKAAASPELSSPLANQSLLLLLVLANLTDASDAPNPYRQAIMSFKNTQDSSPFPSSIPHAFQINFNSLYTALCEQQTSDQATLLLYTLLHQNSNIRTYMLARTDMENLVLPILEILYHVEERNSHHVYMALIILLILTEDDGFNRSIHEVILKNITWYSERVLTEISLGSLLILVVIRTIQYNMTRTRDKYLHTNCLAALANMSAQFRSLHQYAAQRIISLFSLLSKKHNKVLEQATQSLRGSLSSNDVPLPDYAQDLNVIEEVIRMMLEIINSCLTNSLHHNPNLVYALLYKRDLFEQFRTHPSFQDIMQNIDLVISFFSSRLLQAGAELSVERVLEIIKQGVVALPKDRLKKFPELKFKYVEEEQPEEFFIPYVWSLVYNSAVGLYWNPQDIQLFTMDSD

SEQ ID NO: 27785 - protein, 479 aa, Homo sapiens
MGSNSSRIGDLPKNEYLKKLSGTESISENDPFWNQLLSFSFPAPTSSSELKLLEEATISVCRSLAGLWTVFTLGGVGSKAAASPELSSPLANQSLLLLLVLANLTDASDAPNPYRQAIMSFKNTQDSSPFPSSIPHAFQINFNSLYTALCEQQTSDQATLLLYTLLHQNSNIRTYMLARTDMENLVLPILEILYHVEERNSHHVYMALIILLILTEDDGFNRSIHEVILKNITWYSERVLTEISLGSLLILVVIRTIQYNMTRTRDKYLHTNCLAALANMSAQFRSLHQYAAQRIISLFSLLSKKHNKVLEQATQSLRGSLSSNDVPLPDYAQDLNVIEEVIRMMLEIINSCLTNSLHHNPNLVYALLYKRDLFEQFRTHPSFQDIMQNIDLVISFFSSRLLQAGAELSVERVLEIIKQGVVALPKDRLKKFPELKFKYVEEEQPEEFFIPYVWSLVYNSAVGLYWNPQDIQLFTMDSD

SEQ ID NO: 27786 - protein, 536 aa, Homo sapiens
MEFSSPSREECPKPLSRVSIMAGSLTGLLLLQAVSWASGARPCIPKSFGYSSVVCVCNATYCDSFDPPTFPALGTFSRYESTRSGRRMELSMGPIQANHTGTGLLLTLQPEQKFQKVKGFGGAMTDAAALNILALSPPAQNLLLKSYFSEEGIGYNIIRVPMASCDFSIRTYTYADTPDDFQLHNFSLPEEDTKLKIPLIHRALQLAQRPVSLLASPWTSPTWLKTNGAVNGKGSLKGQPGDIYHQTWARYFVKFLDAYAEHKLQFWAVTAENEPSAGLLSGYPFQCLGFTPEHQRDFIARDLGPTLANSTHHNVRLLMLDDQRLLLPHWAKVVLTDPEAAKYVHGIAVHWYLDFLAPAKATLGETHRLFPNTMLFASEACVGSKFWEQSVRLGSWDRGMQYSHSIITNLLYHVVGWTDWNLALNPEGGPNWVRNFVDSPIIVDITKDTFYKQPMFYHLGHFSKFIPEGSQRVGLVASQKNDLDAVALMHPDGSAVVVVLNRSSKDVPLTIKDPAVGFLETISPGYSIHTYLWRRQ

SEQ ID NO: 27787 - protein, 516 aa, Homo sapiens
MAGSLTGLLLLQAVSWASGARPCIPKSFGYSSVVCVCNATYCDSFDPPTFPALGTFSRYESTRSGRRMELSMGPIQANHTGTGLLLTLQPEQKFQKVKGFGGAMTDAAALNILALSPPAQNLLLKSYFSEEGIGYNIIRVPMASCDFSIRTYTYADTPDDFQLHNFSLPEEDTKLKIPLIHRALQLAQRPVSLLASPWTSPTWLKTNGAVNGKGSLKGQPGDIYHQTWARYFVKFLDAYAEHKLQFWAVTAENEPSAGLLSGYPFQCLGFTPEHQRDFIARDLGPTLANSTHHNVRLLMLDDQRLLLPHWAKVVLTDPEAAKYVHGIAVHWYLDFLAPAKATLGETHRLFPNTMLFASEACVGSKFWEQSVRLGSWDRGMQYSHSIITNLLYHVVGWTDWNLALNPEGGPNWVRNFVDSPIIVDITKDTFYKQPMFYHLGHFSKFIPEGSQRVGLVASQKNDLDAVALMHPDGSAVVVVLNRSSKDVPLTIKDPAVGFLETISPGYSIHTYLWRRQ

SEQ ID NO: 27788 - protein, 263 aa, Homo sapiens
MASCDFSIRTYTYADTPDDFQLHNFSLPEEDTKLKIPLIHRALQLAQRPVSLLASPWTSPTWLKTNGAVNGKGSLKGQPGDIYHQTWARYFVKFLDAYAEHKLQFWAVTAENEPSAGLLSGYPFQCLGFTPEHQRDFIARDLGPTLANSTHHNVRLLMLDDQRLLLPHWAKVVLTDPEAAKYVHGIAVHWYLDFLAPAKATLGETHRLFPNTMLFASEACVGSKFWEQSVRLGSWDRGMQYSHSIITNLLYHVVGWTDWNPSL

SEQ ID NO: 27789 - protein, 449 aa, Homo sapiens
MELSMGPIQANHTGTGLLLTLQPEQKFQKVKGFGGAMTDAAALNILALSPPAQNLLLKSYFSEEGIGYNIIRVPMASCDFSIRTYTYADTPDDFQLHNFSLPEEDTKLKIPLIHRALQLAQRPVSLLASPWTSPTWLKTNGAVNGKGSLKGQPGDIYHQTWARYFVKFLDAYAEHKLQFWAVTAENEPSAGLLSGYPFQCLGFTPEHQRDFIARDLGPTLANSTHHNVRLLMLDDQRLLLPHWAKVVLTDPEAAKYVHGIAVHWYLDFLAPAKATLGETHRLFPNTMLFASEACVGSKFWEQSVRLGSWDRGMQYSHSIITNLLYHVVGWTDWNLALNPEGGPNWVRNFVDSPIIVDITKDTFYKQPMFYHLGHFSKFIPEGSQRVGLVASQKNDLDAVALMHPDGSAVVVVLNRSSKDVPLTIKDPAVGFLETISPGYSIHTYLWRRQ

SEQ ID NO: 27790 - protein, 487 aa, Homo sapiens
MEFSSPSREECPKPLSRVSIMAGSLTGLLLLQAVSWASGARPCIPKSFGYSSVVCVCNATYCDSFDPPTFPALGTFSRYESTRSGRRMELSMGPIQANHTGTGIGYNIIRVPMASCDFSIRTYTYADTPDDFQLHNFSLPEEDTKLKIPLIHRALQLAQRPVSLLASPWTSPTWLKTNGAVNGKGSLKGQPGDIYHQTWARYFVKFLDAYAEHKLQFWAVTAENEPSAGLLSGYPFQCLGFTPEHQRDFIARDLGPTLANSTHHNVRLLMLDDQRLLLPHWAKVVLTDPEAAKYVHGIAVHWYLDFLAPAKATLGETHRLFPNTMLFASEACVGSKFWEQSVRLGSWDRGMQYSHSIITNLLYHVVGWTDWNLALNPEGGPNWVRNFVDSPIIVDITKDTFYKQPMFYHLGHFSKFIPEGSQRVGLVASQKNDLDAVALMHPDGSAVVVVLNRSSKDVPLTIKDPAVGFLETISPGYSIHTYLWRRQ

SEQ ID NO: 27791 - protein, 722 aa, Homo sapiens
MEKNGNNRKLRVCVATCNRADYSKLAPIMFGIKTEPEFFELDVVVLGSHLIDDYGNTYRMIEQDDFDINTRLHTIVRGEDEAAMVESVGLALVKLPDVLNRLKPDIMIVHGDRFDALALATSAALMNIRILHIEGGEVSGTIDDSIRHAITKLAHYHVCCTRSAEQHLISMCEDHDRILLAGCPSYDKLLSAKNKDYMSIIRMWLGDDVKSKDYIVALQHPVTTDIKHSIKMFELTLDALISFNKRTLVLFPNIDAGSKEMVRVMRKKGIEHHPNFRAVKHVPFDQFIQLVAHAGCMIGNSSCGVREVGAFGTPVINLGTRQIGRETGENVLHVRDADTQDKILQALHLQFGKQYPCSKIYGDGNAVPRILKFLKSIDLQEPLQKKFCFPPVKENISQDIDHILETLSALAVDLGGTNLRVAIVSMKGEIVKKYTQFNPKTYEERINLILQMCVEAAAEAVKLNCRILGVGISTGGRVNPREGIVLHSTKLIQEWNSVDLRTPLSDTLHLPVWVDNDGNCAALAERKFGQGKGLENFVTLITGTGIGGGIIHQHELIHGSSFCAAELGHLVVSLDGPDCSCGSHGCIEAYASGMALQREAKKLHDEDLLLVEGMSVPKDEAVGALHLIQAAKLGNAKAQSILRTAGTALGLGVVNILHTMNPSLVILSGVLASHYIHIVKDVIRQQALSSVQDVDVVVSDLVDPALLGAASMVLDYTTRRIY

SEQ ID NO: 27792 - protein, 753 aa, Homo sapiens
METYGYLQRESCFQGPHELYFKNLSKRNKQIMEKNGNNRKLRVCVATCNRADYSKLAPIMFGIKTEPEFFELDVVVLGSHLIDDYGNTYRMIEQDDFDINTRLHTIVRGEDEAAMVESVGLALVKLPDVLNRLKPDIMIVHGDRFDALALATSAALMNIRILHIEGGEVSGTIDDSIRHAITKLAHYHVCCTRSAEQHLISMCEDHDRILLAGCPSYDKLLSAKNKDYMSIIRMWLGDDVKSKDYIVALQHPVTTDIKHSIKMFELTLDALISFNKRTLVLFPNIDAGSKEMVRVMRKKGIEHHPNFRAVKHVPFDQFIQLVAHAGCMIGNSSCGVREVGAFGTPVINLGTRQIGRETGENVLHVRDADTQDKILQALHLQFGKQYPCSKIYGDGNAVPRILKFLKSIDLQEPLQKKFCFPPVKENISQDIDHILETLSALAVDLGGTNLRVAIVSMKGEIVKKYTQFNPKTYEERINLILQMCVEAAAEAVKLNCRILGVGISTGGRVNPREGIVLHSTKLIQEWNSVDLRTPLSDTLHLPVWVDNDGNCAALAERKFGQGKGLENFVTLITGTGIGGGIIHQHELIHGSSFCAAELGHLVVSLDGPDCSCGSHGCIEAYASGMALQREAKKLHDEDLLLVEGMSVPKDEAVGALHLIQAAKLGNAKAQSILRTAGTALGLGVVNILHTMNPSLVILSGVLASHYIHIVKDVIRQQALSSVQDVDVVVSDLVDPALLGAASMVLDYTTRRIY

SEQ ID NO: 27793 - protein, 717 aa, Homo sapiens
MPIGDCSVAAKPRKQLLCSLFQTTLGYRARASGWKPMVICRGSHAFKDLINTYRMIEQDDFDINTRLHTIVRGEDEAAMVESVGLALVKLPDVLNRLKPDIMIVHGDRFDALALATSAALMNIRILHIEGGEVSGTIDDSIRHAITKLAHYHVCCTRSAEQHLISMCEDHDRILLAGCPSYDKLLSAKNKDYMSIIRMWLGDDVKSKDYIVALQHPVTTDIKHSIKMFELTLDALISFNKRTLVLFPNIDAGSKEMVRVMRKKGIEHHPNFRAVKHVPFDQFIQLVAHAGCMIGNSSCGVREVGAFGTPVINLGTRQIGRETGENVLHVRDADTQDKILQALHLQFGKQYPCSKIYGDGNAVPRILKFLKSIDLQEPLQKKFCFPPVKENISQDIDHILETLSALAVDLGGTNLRVAIVSMKGEIVKKYTQFNPKTYEERINLILQMCVEAAAEAVKLNCRILGVGISTGGRVNPREGIVLHSTKLIQEWNSVDLRTPLSDTLHLPVWVDNDGNCAALAERKFGQGKGLENFVTLITGTGIGGGIIHQHELIHGSSFCAAELGHLVVSLDGPDCSCGSHGCIEAYASGMALQREAKKLHDEDLLLVEGMSVPKDEAVGALHLIQAAKLGNAKAQSILRTAGTALGLGVVNILHTMNPSLVILSGVLASHYIHIVKDVIRQQALSSVQDVDVVVSDLVDPALLGAASMVLDYTTRRIY

SEQ ID NO: 27794 - protein, 648 aa, Homo sapiens
MEKNGNNRKLRVCVATCNRADYSKLAPIMFGIKTEPEFFELDVVVLGSHLIDDYGNTYRMIEQDDFDINTRLHTIVRGEDEAAMVESVGLALVKLPDVLNRLKPDIMIVHGDRFDALALATSAALMNIRILHIEGGEVSGTIDDSIRHAITKLAHYHVCCTRSAEQHLISMCEDHDRILLAGCPSYDKLLSAKNKDYMSIIRMWLGDDVKSKDYIVALQHPVTTDIKHSIKMFELTLDALISFNKRTLVLFPNIDAGSKEMVRVMRKKGIEHHPNFRAVKHVPFDQFIQLVAHAGCMIGNSSCGVREVGAFGTPVINLGTRQIGRETGENVLHVRDADTQDKILQALHLQFGKQYPCSKIYGDGNAVPRILKFLKSIDLQEPLQKKFCFPPVKENISQDIDHILETLSALAVDLGGTNLRVAIVSMKGEIVKKYTQFNPKTYEERINLILQMCVEAAAEAVKLNCRILGVGIGGGIIHQHELIHGSSFCAAELGHLVVSLDGPDCSCGSHGCIEAYASGMALQREAKKLHDEDLLLVEGMSVPKDEAVGALHLIQAAKLGNAKAQSILRTAGTALGLGVVNILHTMNPSLVILSGVLASHYIHIVKDVIRQQALSSVQDVDVVVSDLVDPALLGAASMVLDYTTRRIY

SEQ ID NO: 27795 - protein, 612 aa, Homo sapiens
MIEQDDFDINTRLHTIVRGEDEAAMVESVGLALVKLPDVLNRLKPDIMIVHGDRFDALALATSAALMNIRILHIEGGEVSGTIDDSIRHAITKLAHYHVCCTRSAEQHLISMCEDHDRILLAGCPSYDKLLSAKNKDYMSIIRMWLGSKEMVRVMRKKGIEHHPNFRAVKHVPFDQFIQLVAHAGCMIGNSSCGVREVGAFGTPVINLGTRQIGRETGENVLHVRDADTQDKILQALHLQFGKQYPCSKIYGDGNAVPRILKFLKSIDLQEPLQKKFCFPPVKENISQDIDHILETLSALAVDLGGTNLRVAIVSMKGEIVKKYTQFNPKTYEERINLILQMCVEAAAEAVKLNCRILGVGISTGGRVNPREGIVLHSTKLIQEWNSVDLRTPLSDTLHLPVWVDNDGNCAALAERKFGQGKGLENFVTLITGTGIGGGIIHQHELIHGSSFCAAELGHLVVSLDGPDCSCGSHGCIEAYASGMALQREAKKLHDEDLLLVEGMSVPKDEAVGALHLIQAAKLGNAKAQSILRTAGTALGLGVVNILHTMNPSLVILSGVLASHYIHIVKDVIRQQALSSVQDVDVVVSDLVDPALLGAASMVLDYTTRRIY

SEQ ID NO: 27796 - protein, 423 aa, Homo sapiens
MLRVRCLRGGSRGAEAVHYIGSRLGRTLTGWVQRTFQSTQAATASSRNSCAADDKATEPLPKDCPVSSYNEWDPLEEVIVGRAENACVPPFTIEVKANTYEKYWPFYQKQGGHYFPKDHLKKAVAEIEEMCNILKTEGVTVRRPDPIDWSLKYKTPDFESTGLYSAMPRDILIVVGNEIIEAPMAWRSRFFEYRAYRSIIKDYFHRGAKWTTAPKPTMADELYNQDYPIHSVEDRHKLAAQGKFVTTEFEPCFDAADFIRAGRDIFAQRSQVTNYLGIEWMRRHLAPDYRVHIISFKDPNPMHIDATFNIIGPGIVLSNPDRPCHQIDLFKKAGWTIITPPTPIIPDDHPLWMSSKWLSMNVLMLDEKRVMVDANEVPIQKMFEKLGITTIKVNIRNANSLGGGFHCWTCDVRRRGTLQSYLD

SEQ ID NO: 27797 - protein, 391 aa, Homo sapiens
MNILKSTQAATASSRNSCAADDKATEPLPKDCPVSSYNEWDPLEEVIVGRAENACVPPFTIEVKANTYEKYWPFYQKQGGHYFPKDHLKKAVAEIEEMCNILKTEGVTVRRPDPIDWSLKYKTPDFESTGLYSAMPRDILIVVGNEIIEAPMAWRSRFFEYRAYRSIIKDYFHRGAKWTTAPKPTMADELYNQDYPIHSVEDRHKLAAQGKFVTTEFEPCFDAADFIRAGRDIFAQRSQVTNYLGIEWMRRHLAPDYRVHIISFKDPNPMHIDATFNIIGPGIVLSNPDRPCHQIDLFKKAGWTIITPPTPIIPDDHPLWMSSKWLSMNVLMLDEKRVMVDANEVPIQKMFEKLGITTIKVNIRNANSLGGGFHCWTCDVRRRGTLQSYLD

SEQ ID NO: 27798 - protein, 391 aa, Homo sapiens
MLRVRCLRGGSRGAEAVHYIGSRLGRTLTGWVQRTFQSTQAATASSRNSCAADDKATEPLPKDCPVSSYNEWDPLEEVIVGRAENACVPPFTIEVKANTYEKYWPFYQKQGGHYFPKDHLKKAVAEIEEMCNILKTEGVTVRRPDPIDWSLKYKTPDFESTGLYSAMPRDILIVVGNEIIEAPMAWRSRFFEYRAYRSIIKDYFHRGAKWTTAPKPTMADELYNQDYPIHSVEDRHKLAAQGKFVTTEFEPCFDAADFIRAGRDIFAQRSQVTNYLGIEWMRRHLAPDYRVHIISFKDPNPMHIDATFNIIGPGIVLSNPDRPCHQIDLFKKAGWTIITPPTPIIPDDHPLWMSSKWLSMNVLMLDEKRVMVDANEVPIQKMFEKLGMYNK

SEQ ID NO: 27799 - protein, 424 aa, Homo sapiens; identical to SEQ ID NO: 19153

SEQ ID NO: 27800 - protein, 424 aa, Homo sapiens; identical to SEQ ID NO: 19153

SEQ ID NO: 27801 - protein, 424 aa, Homo sapiens; identical to SEQ ID NO: 19153

SEQ ID NO: 27802 - protein, 191 aa, Homo sapiens
MPGSEDLRKGKDQMHSHRKRTMFTKKQLEDLNILFNENPYPNPSLQKEMASKIDIHPTVLQVWFKNHRAKLKKAKCKHIHQKQETPQPPIPEGGVSTSVGLRNADTLPRLPNAAHPIGLVYTGHRVPSFQLILYPNLKVPANDFIGHRIVHFGCCRDPNIYCLYPILESQVCAPSFHSGSPACSSNQSRER

SEQ ID NO: 27803 - protein, 598 aa, Homo sapiens
MSASAQQLAEELQIFGLDCEEALIEKLVELCVQYGQNEEGMVGELIAFCTSTHKVGLTSEILNSFEHEFLSKRLSKARHSTCKDSGHAGARDIVSIQELIEVEEEEEILLNSYTTPSKGSQKRAISTPETPLTKRSVSTRSPHQLLSPSSFSPSATPSQKYNSRSNRGEVVTSFGLAQGVSWSGRGGAGNISLKVLGCPEALTGSYKSMFQKLPDIREVLTCKIEELGSELKEHYKIEAFTPLLAPAQEPVTLLGQIGCDSNGKLNNKSVILEGDREHSSGAQIPVDLSELKEYSLFPGQVVIMEGINTTGRKLVATKLYEGVPLPFYQPTEEDADFEQSMVLVACGPYTTSDSITYDPLLDLIAVINHDRPDVCILFGPFLDAKHEQVENCLLTSPFEDIFKQCLRTIIEGTRSSGSHLVFVPSLRDVHHEPVYPQPPFSYSDLSREDKKQVQFVSEPCSLSINGVIFGLTSTDLLFHLGAEEISSSSGTSDRFSRILKHILTQRSYYPLYPPQEDMAIDYESFYVYAQLPVTPDVLIIPSELRYFVKDVLGCVCVNPGRLTKGQVGGTFARLYLRRPAADGAERQSPCIAVQVVRI

SEQ ID NO: 27804 - protein, 361 aa, Homo sapiens
MFQKLPDIREVLTCKIEELGSELKEHYKIEAFTPLLAPAQEPVTLLGQIGCDSNGKLNNKSVILEGDREHSSGAQIPVDLSELKEYSLFPGQVVIMEGINTTGRKLVATKLYEGVPLPFYQPTEEDADFEQSMVLVACGPYTTSDSITYDPLLDLIAVINHDRPDVCILFGPFLDAKHEQVENCLLTSPFEDIFKQCLRTIIEGTRSSGSHLVFVPSLRDVHHEPVYPQPPFSYSDLSREDKKQVQFVSEPCSLSINGVIFGLTSTDLLFHLGAEEISSSSGTSDRFSRILKHILTQRSYYPLYPPQEDMAIDYESFYVYAQLPVTPDVLIIPSELRYFVKVGLNSAFSQKHQNPVFDFPF

SEQ ID NO: 27805 - protein, 210 aa, Homo sapiens
MPGVKLTTQAYCKMVLHGAKYPHCAVNGLLVAEKQKPRKEHLPLGGPGAHHTLFVDCIPLFHGTLALAPMLEVALTLIDSWCKDHSYVIAGYYQANERVKDASPNQVAEKVASRIAEGFSDTALIMVDNTKFTMDCVAPTIHVYEHHENRWRCRDPHHDYCEDWPEAQRISASLLDSRSYETLVDFDNHLDDIRNDWTNPEINKAVLHLC

SEQ ID NO: 27806 - protein, 126 aa, Homo sapiens
MPGVKLTTQAYCKMVLHGAKYPHCAVNGLLVAEKQKPRKEHLPLGGPGAHHTLFVDCIPLFHGTLALAPMLEVALTLIDSWCKDHSYVIAGYYQANERVKDASPNQVAEKVASRIAEGFSDTALIM

SEQ ID NO: 27807 - protein, 326 aa, Homo sapiens
MSNGYEDHMAEDCRGDIGRTNLIVNYLPQNMTQDELRSLFSSIGEVESAKLIRDKVAGHSLGYGFVNYVTAKDAERAINTLNGLRLQSKTIKVSYARPSSEVIKDANLYISGLPRTMTQKDVEDMFSRFGRIINSRVLVDQTTGLSRGVAFIRFDKRSEAEEAITSFNGHKPPGSSEPITVKFAANPNQNKNVALLSQLYHSPARRFGGPVHHQAQRFRFSPMGVDHMSGLSGVNVPGNASSGWCIFIYNLGQDADEGILWQMFGPFGAVTNVKVIRDFNTNKCKGFGFVTMTNYEEAAMAIASLNGYRLGDKILQVSFKTNKSHK

SEQ ID NO: 27808 - protein, 353 aa, Homo sapiens
MGSGGRSAQVSTGQRAWLLPCRFLKNTMSNGYEDHMAEDCRGDIGRTNLIVNYLPQNMTQDELRSLFSSIGEVESAKLIRDKVAGHSLGYGFVNYVTAKDAERAINTLNGLRLQSKTIKVSYARPSSEVIKDANLYISGLPRTMTQKDVEDMFSRFGRIINSRVLVDQTTGLSRGVAFIRFDKRSEAEEAITSFNGHKPPGSSEPITVKFAANPNQNKNVALLSQLYHSPARRFGGPVHHQAQRFRFSPMGVDHMSGLSGVNVPGNASSGWCIFIYNLGQDADEGILWQMFGPFGAVTNVKVIRDFNTNKCKGFGFVTMTNYEEAAMAIASLNGYRLGDKILQVSFKTNKSHK

SEQ ID NO: 27809 - protein, 273 aa, Homo sapiens
MGSGWVPWVVALLVNLTRLDSSMTQGTDSPEDFVIQAKADCYFTNGTEKVQFVVRFIFNLEEYVRFDSDVGMFVALTKLGQPDAEQWNSRLDLLERSRQAVDGVCRHNYRLGAPFTVGRKVQPEVTVYPERTPLLHQHNLLHCSVTGFYPGDIKIKWFLNGQEERAGVMSTGPIRNGDWTFQTVVMLEMTPELGHVYTCLVDHSSLLSPVSVEWRAQSEYSWRKMLSGIAAFLLGLIFLLVGIVIQLRAQKGYVRTQMSGNEVSRAVLLPQSC

SEQ ID NO: 27810 - protein, 1865 aa, Homo sapiens
MTRWVPTKREEKYGVAFYNYDARGADELSLQIGDTVHILETYEGWYRGYTLRKKSKKGIFPASYIHLKEAIVEGKGQHETVIPGDLPLIQEVTTTLREWSTIWRQLYVQDNREMFRSVRHMIYDLIEWRSQILSGTLPQDELKELKKKVTAKIDYGNRILDLDLVVRDEDGNILDPELTSTISLFRAHEIASKQVEERLQEEKSQKQNIDINRQAKFAATPSLALFVNLKNVVCKIGEDAEVLMSLYDPVESKFISENYLVRWSSSGLPKDIDRLHNLRAVFTDLGSKDLKREKISFVCQIVRVGRMELRDNNTRKLTSGLRRPFGVAVMDVTDIINGKVDDEDKQHFIPFQPVAGENDFLQTVINKVIAAKEVNHKGQGLWVTLKLLPGDIHQIRKEFPHLVDRTTAVARKTGFPEIIMPGDVRNDIYVTLVQGDFDKGSKTTAKNVEVTVSVYDEDGKRLEHVIFPGAGDEAISEYKSVIYYQVKQPRWFETVKVAIPIEDVNRSHLRFTFRHRSSQDSKDKSEKIFALAFVKLMRYDGTTLRDGEHDLIVYKAEAKKLEDAATYLSLPSTKAELEEKGHSATGKSMQSLGSCTISKDSFQISTLVCSTKLTQNVDLLGLLKWRSNTSLLQQNLRQLMKVDGGEVVKFLQDTLDALFNIMMENSESETFDTLVFDALVFIIGLIADRKFQHFNPVLETYIKKHFSATLAYTKLTKVLKNYVDGAEKPGVNEQLYKAMKALESIFKFIVRSRILFNQLYENKGEADFVESLLQLFRSINDMMSSMSDQTVRVKGAALKYLPTIVNDVKLVFDPKELSKMFTEFILNVPMGLLTIQKLYCLIEIVHSDLFTQHDCREILLPMMTDQLKYHLERQEDLEACCQLLSHILEVLYRKDVGPTQRHVQIIMEKLLRTVNRTVISMGRDSELIGNFVACMTAILRQMEDYHYAHLIKTFGKMRTDVVDFLMETFIMFKNLIGKNVYPFDWVIMNMVQNKVFLRAINQYADMLNKKFLDQANFELQLWNNYFHLAVAFLTQESLQLENFSSAKRAKILNKYGDMRRQIGFEIRDMWYNLGQHKIKFIPEMVGPILEMTLIPETELRKATIPIFFDMMQCEFHSTRSFQMFENEIITKLDHEVEGGRGDEQYKVLFDKILLEHCRKHKYLAKTGETFVKLVVRLMERLLDYRTIMHDENKENRMSCTVNVLNFYKEIEREEMYIRYLYKLCDLHKECDNYTEAAYTLLLHAKLLKWSEDVCVAHLTQRDGYQATTQGQLKEQLYQEIIHYFDKGKMWEEAIALGKELAEQYENEMFDYEQLSELLKKQAQFYENIVKVIRPKPDYFAVGYYGQGFPTFLRGKVFIYRGKEYERREDFEARLLTQFPNAEKMKTTSPPGDDIKNSPGQYIQCFTVKPKLDLPPKFHRPVSEQIVSFYRVNEVQRFEYSRPIRKGEKNPDNEFANMWIERTIYTTAYKLPGILRWFEVKSVFMVEISPLENAIETMQLTNDKINSMVQQHLDDPSLPINPLSMLLNGIVDPAVMGGFANYEKAFFTDRYLQEHPEAHEKIEKLKDLIAWQIPFLAEGIRIHGDKVTEALRPFHERMEACFKQLKEKVEKEYGVRIMPSSLDDRRGSRPRSMVRSFTMPSSSRPLSVASVSSLSSDSTPSRPGSDGFALEPLLPKKMHSRSQDKLDKDDLEKEKKDKKKEKRNSKHQEIFEKEFKPTDISLQQSEAVILSETISPLRPQRPKSQVMNVIGSERRFSVSPSSPSSQQTPPPVTPRAKLSFSMQSSLELNGMTGADVADVPPPLPLKGSVADYGNLMENQDLLGSPTPPPPPPHQRHLPPPLPSKTPPPPPPKTTRKQASVDSGIVQ

SEQ ID NO: 27811 - protein, 334 aa, Homo sapiens
MKHFLRMLIQVCLYFYCKFLWRCLKFVMRKLTGRCELQRICYNTKPGASRTMKIETSLRDSKSKLLQTSVSVHPDAIEKTIEDIMELKKINPDVNPQLGISLQACLLQIVGYRNLIADVEKLRREAYDSDNPQHEEMLLKLWKFLKPNTPLESRISKQWCEIGFQGDDPKTDFRGMGLLGLYNLQYFAERDATAAQQVLSDSLHPKCRDITKEEISKFSKAEWEKKRMDKAIGYSFAIVGINITDLAYNLLVSGALKTHFYNIAPEAPTLSHFQQTFCYLMHEFHKFWIEEDPMDIMEFNRVREKFRKRIIKQLQNPDMALCPHFAASEGLINM

SEQ ID NO: 27812 - protein, 190 aa, Homo sapiens
MLLKLWKFLKPNTPLESRISKQWCEIGFQGDDPKTDFRGMGLLGLYNLQYFAERDATAAQQVLSDSLHPKCSKFSKAEWEKKRMDKAIGYSFAIVGINITDLAYNLLVSGALKTHFYNIAPEAPTLSHFQQTFCYLMHEFHKFWIEEDPMDIMEFNRVREKFRKRIIKQLQNPDMALCPHFAASEGLINM

SEQ ID NO: 27813 - protein, 326 aa, Homo sapiens
MKHFLRMLIQVCLYFYCKFLWRCLKFVMRKLTGRCELQRICYNTKPGASRTMKIETSLRDSKSKLLQTSVSVHPDAIEKTIEDIMELKKINPDVNPQLGISLQACLLQIVGYRNLIADVEKLRREAYDSDNPQHEEMLLKLWKFLKPNTPLESRISKQWCEIGFQGDDPKTDFRGMGLLGLYNLQYFAERDATAAQQVLSDSLHPKCSKFSKAEWEKKRMDKAIGYSFAIVGINITDLAYNLLVSGALKTHFYNIAPEAPTLSHFQQTFCYLMHEFHKFWIEEDPMDIMEFNRVREKFRKRIIKQLQNPDMALCPHFAASEGLINM

SEQ ID NO: 27814 - protein, 252 aa, Homo sapiens
MFQPAPKRCFTIESLVAKDSPLPASRSEDPIRPAALSYANSSPINPFLNGFHSAAAAAAGRGVYSNPDLVFAEAVSHPPNPAVPVHPVPPPHALAAHPLPSSHSPHPLFASQQRDPSTFYPWLIHRYRYLGHRFQGNDTSPESFLLHNALARKPKRIRTAFSPSQLLRLEHAFEKNHYVVGAERKQLAHSLSLTETQVKVWFQNRRTKFKRQKLEEEGSDSQQKKKGTHHINRWRIATKQASPEEIDVTSDD

SEQ ID NO: 27815 - protein, 169 aa, Homo sapiens
MFQPAPKRCFTIESLVAKDSPLPASRSEDPIRPAALSYANSSPINPFLNGFHSAAAAAAGRGVYSNPDLVFAEAVSHPPNPAVPVHPVPPPHALAAHPLPSSHSPHPLFASQQRDPSTFYPWLIHRYRYLGHRFQGKSMVSEPKNKVQKAEAGGRRLRFATKEKRDAPY

SEQ ID NO: 27816 - protein, 258 aa, Homo sapiens
MAAAAAAAGDSDSWDADAFSVEDPVRKVGGGGTAGGDRWEGEDEDEDVKDNWDDDDDEKKEEAEVKPEVKISEKKKIAEKIKEKERQQKKRQEEIKKRLEEPEEPKVLTPEEQLADKLRLKKLQEESDLELAKETFGVNNAVYGIDAMNPSSRDDFTEFGKLLKDKITQYEKSLYYASFLEVLVRDVCISLEIDDLKKITNSLTVLCSEKQKQEKQSKAKKKKKGVVPGGGLKATMKDDLADYGGYDGGYVQDYEDFM

SEQ ID NO: 27817 - protein, 204 aa, Homo sapiens
MAAAAAAAGDSDSWDADAFSVEDPVRKVGGGGTAGGDRWEGEDEDEDVKDNWDDDDDEKKEEAEVKPEVKISEKKKIAEKIKEKERQQKKRQEEIKKRLEEPEEPKVLTPEEQLADKLRLKKLQEESDLELAKETFVEIDDLKKITNSLTVLCSEKQKQEKQSKAKKKKKGVVPGGGLKATMKDDLADYGGYDGGYVQDYEDFM

SEQ ID NO: 27818 - protein, 209 aa, Homo sapiens
MAAAAAAAGDSDSWDADAFSVEDPVRKVGGGGTAGGDRWEGEDEDEDVKLEEPEEPKVLTPEEQLADKLRLKKLQEESDLELAKETFGVNNAVYGIDAMNPSSRDDFTEFGKLLKDKITQYEKSLYYASFLEVLVRDVCISLEIDDLKKITNSLTVLCSEKQKQEKQSKAKKKKKGVVPGGGLKATMKDDLADYGGYDGGYVQDYEDFM

SEQ ID NO: 27819 - protein, 407 aa, Homo sapiens
MDSPCQPQPLSQALPQLPGSSSEPLEPEPGRARMGVESYLPCPLLPSYHCPGVPSEASAGSGTPRATATSTTASPLRDGFGGQDGGELRPLQSEGAAALVTKGCQRLAAQGARPEAPKRKWAEDGGDAPSPSKRPWARQENQEAEREGGMSCSCSSGSGEASAGLMEEALPSAPERLALDYIVPCMRYYGICVKDSFLGAALGGRVLAEVEALKRGGRLRDGQLVSQRAIPPRSIRGDQIAWVEGHEPGCRSIGALMAHVDAVIRHCAGRLGSYVINGRTKAMVACYPGNGLGYVRHVDNPHGDGRCITCIYYLNQNWDVKVHGGLLQIFPEGRPVVANIEPLFDRLLIFWSDRRNPHEVKPAYATRYAITVWYFDAKERAAAKDKYQLASGQKGVQVPVSQPPTPT

SEQ ID NO: 27820 - protein, 374 aa, Homo sapiens
MGVESYLPCPLLPSYHCPGVPSEASAGSGTPRATATSTTASPLRDGFGGQDGGELRPLQSEGAAALVTKGCQRLAAQGARPEAPKRKWAEDGGDAPSPSKRPWARQENQEAEREGGMSCSCSSGSGEASAGLMEEALPSAPERLALDYIVPCMRYYGICVKDSFLGAALGGRVLAEVEALKRGGRLRDGQLVSQRAIPPRSIRGDQIAWVEGHEPGCRSIGALMAHVDAVIRHCAGRLGSYVINGRTKAMVACYPGNGLGYVRHVDNPHGDGRCITCIYYLNQNWDVKVHGGLLQIFPEGRPVVANIEPLFDRLLIFWSDRRNPHEVKPAYATRYAITVWYFDAKERAAAKDKYQLASGQKGVQVPVSQPPTPT

SEQ ID NO: 27821 - protein, 387 aa, Homo sapiens
MTGKLAEKLPVTMSSLLNQLPDNLYPEEIPSALNLFSGSSDSVVHYNQMATENVMDIGLTNEKPNPELSYSGSFQPAPGNKTVTYLGKFAFDSPSNWCQDNIISLMSAGILGVPPASGALSTQTSTASMVQPPQGDVEAMYPALPPYSNCGDLYSEPVSFHDPQGNPGLAYSPQDYQSAKPALDSNLFPMIPDYNLYHHPNDMGSIPEHKPFQGMDPIRVNPPPITPLETIKAFKDKQIHPGFGSLPQPPLTLKPIRPRKYPNRPSKTPLHERPHACPAEGCDRRFSRSDELTRHLRIHTGHKPFQCRICMRSFSRSDHLTTHIRTHTGEKPFACEFCGRKFARSDERKRHAKIHLKQKEKKAEKGGAPSASSAPPVSLAPVVTTCA

SEQ ID NO: 27822 - protein, 349 aa, Homo sapiens
MEPCAAWSPRGGRENVMDIGLTNEKPNPELSYSGSFQPAPGNKTVTYLGKFAFDSPSNWCQDNIISLMSAGILGVPPASGALSTQTSTASMVQPPQGDVEAMYPALPPYSNCGDLYSEPVSFHDPQGNPGLAYSPQDYQSAKPALDSNLFPMIPDYNLYHHPNDMGSIPEHKPFQGMDPIRVNPPPITPLETIKAFKDKQIHPGFGSLPQPPLTLKPIRPRKYPNRPSKTPLHERPHACPAEGCDRRFSRSDELTRHLRIHTGHKPFQCRICMRSFSRSDHLTTHIRTHTGEKPFACEFCGRKFARSDERKRHAKIHLKQKEKKAEKGGAPSASSAPPVSLAPVVTTCA

SEQ ID NO: 27823 - protein, 462 aa, Homo sapiens
MSIMMLPMEQKIQWVPTSLQDITAVLGTEAYTEEDKSMVSHAQKSQHSCLSHSRWLRSPQVTGGSWDLRIRPSKDSSSFRQAQCLRKDPGANNHLESQGVRGTAGDADRELRGPSEKATAGQPRVTLLPTPHVSGLSQEFESHWPEIAERSPCVAGVIPVIYYSVLLGLGLPVSLLTAVALARLATRTRRPSYYYLLALTASDIIIQVVIVFAGFLLQGAVLARQVPQAVVRTANILEFAANHASVWIAILLTVDRYTALCHPLHHRAASSPGRTRRAIAAVLSAALLTGIPFYWWLDMWRDTDSPRTLDEVLKWAHCLTVYFIPCGVFLVTNSAIIHRLRRRGRSGLQPRVGKSTAILLGITTLFTLLWAPRVFVMLYHMYVAPVHRDWRVHLALDVANMVAMLHTAANFGLYCFVSKTFRATVRQVIHDAYLPCTLASQPEGMAAKPVMEPPGLPTGAEV

SEQ ID NO: 27824 - protein, 266 aa, Homo sapiens
MFVELNNLLNTTPDRAEQGKLTLLCDAKTDGSFLVHHFLSFYLKANCKVCFVALIQSFSHYSIVGQKLGVSLTMARERGQLVFLEGLKSAVDVVFQAQKEPHPLQFLREANAGNLKPLFEFVREALKPVDSGEARWTYPVLLVDDLSVLLSLGMGAVAVLDFIHYCRATVCWELKGNMVVLVHDSGDAEDEENDILLNGLSHQSHLILRAEGLATGFCRDVHGQLRILWRRPSQPAVHRDQSFTYQYKIQDKSVSFFAKGMSPAVL

SEQ ID NO: 27825 - protein, 250 aa, Homo sapiens
MFVELNNLLNTTPDRAEQGKLTLLCDAKTDGSFLVHHFLSFYLKANCKVCFVALIQSFSHYSIVGQKLGVSLTMARERGQLVFLEGLKSAVDVVFQAQKEPHPLQFLREANAGNLKPLFEFVREALKPVDSGEARWTYPVLLVDDLSVLLSLGMGAVAVLDFIHYCRATVCWELKGNMVVLVHDSGDAEDEENDILLNGLSHQSHLILRAEGLATGFCRDVHGQVCRGLLGNGLLARVPVILDYIGESQA

SEQ ID NO: 27826 - protein, 608 aa, Homo sapiens
MGSVTVRYFCYGCLFTSATWTVLLFVYFNFSEVTQPLKNVPVKGSGPHGPSPKKFYPRFTRGPSRVLEPQFKANKIDDVIDSRVEDPEEGHLKFSSELGMIFNERDQELRDLGYQKHAFNMLISDRLGYHRDVPDTRNAACKEKFYPPDLPAASVVICFYNEAFSALLRTVHSVIDRTPAHLLHEIILVDDDSDFDDLKGELDEYVQKYLPGKIKVIRNTKREGLIRGRMIGAAHATGEVLVFLDSHCEVNVMWLQPLLAAIREDRHTVVCPVIDIISADTLAYSSSPVVRGGFNWGLHFKWDLVPLSELGRAEGATAPIKSPTMAGGLFAMNRQYFHELGQYDSGMDIWGGENLEISFRIWMCGGKLFIIPCSRVGHIFRKRRPYGSPEGQDTMTHNSLRLAHVWLDEYKEQYFSLRPDLKTKSYGNISERVELRKKLGCKSFKWYLDNVYPEMQISGSHAKPQQPIFVNRGPKRPKVLQRGRLYHLQTNKCLVAQGRPSQKGGLVVLKACDYSDPNQIWIYNEEHELVLNSLLCLDMSETRSSDPPRLMKCHGSGGSQQWTFGKNNRLYQVSVGQCLRAVDPLGQKGSVAMAICDGSSSQQWHLEG

SEQ ID NO: 27827 - protein, 202 aa, Homo sapiens
MGSVTVRYFCYGCLFTSATWTVLLFVYFNFSEVTQPLKNVPVKGSGPHGPSPKKFYPRFTRGPSRVLEPQFKANKIDDVIDSRVEDPEEGHLKFSSELGMIFNERDQELRDLGYQKHAFNMLISDRLGYHRDVPDTRNAACKEKFYPPDLPAASVVICFYNEAFSALLRTVHSVIDRTPAHLLHEIILVDDDSDFGKECCTW

SEQ ID NO: 27828 - protein, 320 aa, Homo sapiens
MPTGDFDSKPSWADQVEEEGEDDKCVTSELLKGIPLATGDTSPEPELLPGAPLPPPKEVINGNIKTVTEYKIDEDGKKFKIVRTFRIETRKASKAVARRKNWKKFGNSEFDPPGPNVATTTVSDDVSMTFITSKEDLNCQEEEDPMNKLKGQKIVSCRICKGDHWTTRCPYKDTLGPMQKELAEQLGLSTGEKEKLPGELEPVQATQNKTGKYVPPSLRDGASRRGESMQPNRRADDNATIRVTNLSEDTRETDLQELFRPFGSISRIYLAKDKTTGQSKGFAFISFHRREDAARAIAGVSGFGYDHLILNVEWAKPSTN

SEQ ID NO: 27829 - protein, 1231 aa, Homo sapiens
MASVWKRLQRVGKHASKFQFVASYQELMVECTKKWQPDKLVVVWTRRSRRKSSKAHSWQPGIKNPYRGVVVWPVPENIEITVTLFKDPHAEEFEDKEWTFVIENESPSGRRKALATSSINMKQYASPMPTQTDVKLKFKPLSKKVVSAALQFSLSCIFLREGKATDEDMQSLASLMSMKQADIGNLDDFEEDNEDDDENRVNQEEKAAKITEIVNQLNALSSLDEDQDDCIKQANMRSAKSASSSEELINKLNFLDEAEKDLATVNSNPFDDPDAAELNPFGDPDSEEPITETASPRKTEDSFYNNSYNPFKEVQTPQYLNPFDEPEAFVTIKDSPPQSTKRKNIRPVDMSKYLYADSSKTEEEELDESNPFYEPKSTPPPNNLVNPVQELETERRVKRKAPAPPVLSPKTGVLNENTVSAGKDLSTSPKPSPIPSPVLGRKPNASQSLLVWCKEVTKNYRGVKITNFTTSWRNGLSFCAILHHFRPDLIDYKSLNPQDIKENNKKAYDGFASIGISRLLEPSDMVLLAIPDKLTVMTYLYQIRAHFSGQELNVVQIEENSSKSTYKVGNYETDTNSSVDQEKFYAELSDLKREPELQQPISGAVDFLSQDDSVFVNDSGVGESESEHQTPDDHLSPSTASPYCRRTKSDTEPQKSQQSSGRTSGSDDPGICSNTDSTQAQVLLGKKRLLKAETLELSDLYVSDKKKDMSPPFICEETDEQKLQTLDIGSNLEKEKLENSRSLECRSDPESPIKKTSLSPTSKLGYSYSRDLDLAKKKHASLRQTESDPDADRTTLNHADHSSKIVQHRLLSRQEELKERARVLLEQARRDAALKAGNKHNTNTATPFCNRQLSDQQDEERRRQLRERARQLIAEARSGVKMSELPSYGEMAAEKLKERSKASGDENDNIEIDTNEEIPEGFVVGGGDELTNLENDLDTPEQNSKLVDLKLKKLLEVQPQVANSPSSAAQKAVTESSEQDMKSGTEDLRTERLQKTTERFRNPVVFSKDSTVRKTQLQSFSQYIENRPEMKRQRSIQEDTKKGNEEKAAITETQRKPSEDEVLNKGFKDTSQYVVGELAALENEQKQIDTRAALVEKRLRYLMDTGRNTEEEEAMMQEWFMLVNKKNALIRRMNQLSLLEKEHDLERRYELLNRELRAMLAIEDWQKTEAQKRREQLLLDELVALVNKRDALVRDLDAQEKQAEEEDEHLERTLEQNKGKMAKKEEKCVLQ

SEQ ID NO: 27830 - protein, 1196 aa, Homo sapiens
MASVWKRLQRVGKHASKFQFVASYQELMVECTKKWQPDKLVVVWTRRSRRKSSKAHSWQPGIKNPYRGVVVWPVPENIEITVTLFKDPHAEEFEDKEWTFVIENESPSGRRKALATSSINMKQYASPMPTQTDVKLKFKPLSKKVVSAALQFSLSCIFLREGKATDEDMQSLASLMSMKQADIGNLDDFEEDNEDDDENRVNQEEKAAKITELINKLNFLDEAEKDLATVNSNPFDDPDAAELNPFGDPDSEEPITETASPRKTEDSFYNNSYNPFKEVQTPQYLNPFDEPEAFVTIKDSPPQSTKRKNIRPVDMSKYLYADSSKTEEEELDESNPFYEPKSTPPPNNLVNPVQELETERRVKRKAPAPPVLSPKTGVLNENTVSAGKDLSTSPKPSPIPSPVLGRKPNASQSLLVWCKEVTKNYRGVKITNFTTSWRNGLSFCAILHHFRPDLIDYKSLNPQDIKENNKKAYDGFASIGISRLLEPSDMVLLAIPDKLTVMTYLYQIRAHFSGQELNVVQIEENSSKSTYKVGNYETDTNSSVDQEKFYAELSDLKREPELQQPISGAVDFLSQDDSVFVNDSGVGESESEHQTPDDHLSPSTASPYCRRTKSDTEPQKSQQSSGRTSGSDDPGICSNTDSTQAQVLLGKKRLLKAETLELSDLYVSDKKKDMSPPFICEETDEQKLQTLDIGSNLEKEKLENSRSLECRSDPESPIKKTSLSPTSKLGYSYSRDLDLAKKKHASLRQTESDPDADRTTLNHADHSSKIVQHRLLSRQEELKERARVLLEQARRDAALKAGNKHNTNTATPFCNRQLSDQQDEERRRQLRERARQLIAEARSGVKMSELPSYGEMAAEKLKERSKASGDENDNIEIDTNEEIPEGFVVGGGDELTNLENDLDTPEQNSKLVDLKLKKLLEVQPQVANSPSSAAQKAVTESSEQDMKSGTEDLRTERLQKTTERFRNPVVFSKDSTVRKTQLQSFSQYIENRPEMKRQRSIQEDTKKGNEEKAAITETQRKPSEDEVLNKGFKDTSQYVVGELAALENEQKQIDTRAALVEKRLRYLMDTGRNTEEEEAMMQEWFMLVNKKNALIRRMNQLSLLEKEHDLERRYELLNRELRAMLAIEDWQKTEAQKRREQLLLDELVALVNKRDALVRDLDAQEKQAEEEDEHLERTLEQNKGKMAKKEEKCVLQ

SEQ ID NO: 27831 - protein, 1160 aa, Homo sapiens
MASVWKRLQRVGKHASKFQFVASYQELMVECTKKWQPDKLVVVWTRRSRRKSSKAHSWQPGIKNPYRGVVVWPVPENIEITVTLFKDPHAEEFEDKEWTFVIENESPSGRRKALATSSINMKQYASPMPTQTDVKLKFKPLSKKVVSAALQFSLSCIFLREGKATDEDMQSLASLMSMKQADIGNLDDFEEDNEDDDENRVNQEEKAAKITELINKLNFLDEAEKDLATVNSNPFDDPDAAELNPFGDPDSEEPITETASPRKTEDSFYNNSYNPFKEVQTPQYLNPFDEPEAFVTIKDSPPQSTKRKNIRPVDMSKYLYADSSKTEEEELDESNPFYEPKSTPPPNNLVNPVQELETERRVKRKAPAPPVLSPKTGVLNENTVSAGKDLSTSPKPSPIPSPVLGRKPNASQSLLVWCKEVTKNYRGVKITNFTTSWRNGLSFCAILHHFRPDLIDYKSLNPQDIKENNKKAYDGFASIGISRLLEPSDMVLLAIPDKLTVMTYLYQIRAHFSGQELNVVQIEENSSKSTYKVGNYETDTNSSVDQEKFYAELSDLKREPELQQPISGAVDFLSQDDSVFVNDSGVGESESEHQTPDDHLSPSTASPYCRRTKSDTEPQKSQQSSGRTSGSDDPGICSNTDSTQAQVLLGKKRLLKAETLELSDLYVSDKKKDMSPPFICEETDEQKLQTLDIGSNLEKEKLENSRSLECRSDPESPIKKTSLSPTSKLGYSYSRDLDLAKKKHASLRQTESDPDADRTTLNHADHSSKIVQHRLLSRQEELKERARVLLEQARRDAALKAGNKHNTNTATPFCNRQLSDQQDEERRRQLRERARQLIAEARSGVKMSELPSYGEMAAEKLKERSKASGEQNSKLVDLKLKKLLEVQPQVANSPSSAAQKAVTESSEQDMKSGTEDLRTERLQKTTERFRNPVVFSKDSTVRKTQLQSFSQYIENRPEMKRQRSIQEDTKKGNEEKAAITETQRKPSEDEVLNKGFKDTSQYVVGELAALENEQKQIDTRAALVEKRLRYLMDTGRNTEEEEAMMQEWFMLVNKKNALIRRMNQLSLLEKEHDLERRYELLNRELRAMLAIEDWQKTEAQKRREQLLLDELVALVNKRDALVRDLDAQEKQAEEEDEHLERTLEQNKGKMAKKEEKCVLQ

SEQ ID NO: 27832 - protein, 896 aa, Homo sapiens
MDGAAGPGDGPAREALQSLSQRLRVQEQEMELVKAALAEALRLLRLQVPPSSLQGSGTPAPPGDSLAAPPGLPPTCTPSLVSRGTQTETEVELKSSPGPPGLSNGPPAPQGASEEPSGTQSEGGGSSSSGAGSPGPPGILRPLQPPQRADTPRRNSSSSSSPSERPRQKLSRKAISSANLLVRSGSTESRGGKDPLSSPGGPGSRRSNYNLEGISVKMFLRGRPITMYIPSGIRSLEELPSGPPPETLSLDWVYGYRGRDSRSNLFVLRSGEVVYFIACVVVLYRPGGGPGGPGGGGQRHYRGHTDCVRCLAVHPDGVRVASGQTAGVDKDGKPLQPVVHIWDSETLLKLQEIGLGAFERGVGALAFSAADQGAFLCVVDDSNEHMLSVWDCSRGMKLAEIKSTNDSVLAVGFNPRDSSCIVTSGKSHVHFWNWSGGVGVPGNGTLTRKQGVFGKYKKPKFIPCFVFLPDGDILTGDSEGNILTWGRSPSDSKTPGRGGAKETYGIVAQAHAHEGSIFALCLRRDGTVLSGGGRDRRLVQWGPGLVALQEAEIPEHFGAVRAIAEGLGSELLVGTTKNALLRGDLAQGFSPVIQGHTDELWGLCTHPSQNRFLTCGHDRQLCLWDGESHALAWSIDLKETGLCADFHPSGAVVAVGLNTGRWLVLDTETREIVSDVIDGNEQLSVVRYSPDGLYLAIGSHDNVIYIYSVSSDGAKSSRFGRCMGHSSFITHLDWSKDGNFIMSNSGDYEILYWDVAGGCKQLKNRYESRDREWATYTCVLGFHVYGVWPDGSDGTDINSLCRSHNERVVAVADDFCKVHLFQYPCARAKAPSRMYGGHGSHVTSVRFTHDDSHLVSLGGKDASIFQWRVLGAGGAGPAPATPSRTPSLSPASSLDV

SEQ ID NO: 27833 - protein, 917 aa, Homo sapiens
MDGAAGPGDGPAREALQSLSQRLRVQEQEMELVKAALAEALRLLRLQVPPSSLQGSGTPAPPGDSLAAPPGLPPTCTPSLVSRGTQTETEVELKSSPGPPGLSNGPPAPQGASEEPSGTQSEGGGSSSSGAGSPGPPGILRPLQPPQRADTPRRNSSSSSSPSERPRQKLSRKAISSANLLVRSGSTESRGGKDPLSSPGGPGSRRSNYNLEGISVKMFLRGRPITMYIPSGIRSLEELPSGPPPETLSLDWVYGYRGRDSRSNLFVLRSGEVVYFIACVVVLYRPGGGPGGPGGGGQRHYRGHTDCVRCLAVHPDGVRVASGQTAGVDKDGKPLQPVVHIWDSETLLKLQEIGLGAFERGVGALAFSAADQGAFLCVVDDSNEHMLSVWDCSRGMKLAEIKSTNDSVLAVGFNPRDSSCIVTSGKSHVHFWNWSGGVGVPGNGTLTRKQGVFGKYKKPKFIPCFVFLPDGDILTGDSEGNILTWGRSPSDSKTPGRGGAKETYGIVAQAHAHEGSIFALCLRRDGTVLSGGGRDRRLVQWGPGLVALQEAEIPEHFGAVRAIAEGLGSELLVGTTKNALLRGDLAQGFSPVIQGHTDELWGLCTHPSQNRFLTCGHDRQLCLWDGESHALAWSIDLKETGLCADFHPSGAVVAVGLNTGRWLVLDTETREIVSDVIDGNEQLSVVRYSPDGLYLAIGSHDNVIYIYSVSSDGAKSSRFGRCMGHSSFITHLDWSKDGNFIMSNSGDYEILYWDVAGGCKQLKNRYESRDREWATYTCVLGFHVYVPVRSCQGAEPHVRGPRQPRDQRPIHARRLAPRLAGRQGRQHLPVASAGRWGRGAGARHALSNPLPVPRLLPRRLIAAWRDRLARRRGPAPPCPSLAQSPTTRGRLFPGLTSRHSRSRIFLEGANGAPAHTV

SEQ ID NO: 27834 - protein, 194 aa, Homo sapiens
MELVKAALAEALRLLRLQVPPSSLQGSGTPAPPGDSLAAPPGLPPTCTPSLVSRGTQTETEVELKSSPGPPGLSNGPPAPQGASEEPSGTQSEGGGSSSSGAGSPGPPGILRPLQPPQRADTAASAEALQEGNLLRQPVSAVREHREPWGKRPPLQPWGPWISEEQLQFGRHLSEDVPSRAPHYHVHPVWHPQP

SEQ ID NO: 27835 - protein, 543 aa, Homo sapiens
MFSWLKRGGARGQQPEAIRTVTSALKELYRTKLLPLEEHYRFGAFHSPALEDADFDGKPMVLVAGQYSTGKTSFIQYLLEQEVPGSRVGPEPTTDCFVAVMHGDTEGTVPGNALVVDPDKPFRKLNPFGNTFLNRFMCAQLPNQVLESISIIDTPGILSGAKQRVSRGYDFPAVLRWFAERVDLIILLFDAHKLEISDEFSEAIGALRGHEDKIRVVLNKADMVETQQLMRVYGALMWALGKVVGTPEVLRVYIGSFWSQPLLVPDNRRLFELEEQDLFRDIQGLPRHAALRKLNDLVKRARLVRVHAYIISYLKKEMPSVFGKENKKKQLILKLPVIFAKIQLEHHISPGDFPDCQKMQELLMAHDFTKFHSLKPKLLEALDEMLTHDIAKLMPLLRQEELESTEVGVQGGAFEGTHMGPFVERGPDEAMEDGEEGSDDEAEWVVTKDKSKYDEIFYNLAPADGKLSGSKAKTWMVGTKLPNSVLGRIWKLSDVDRDGMLDDEEFALASHLIEAKLEGHGLPANLPRRLVPPSKRRHKGSAE

SEQ ID NO: 27836 - protein, 407 aa, Homo sapiens
MCAQLPNQVLESISIIDTPGILSGAKQRVSRGYDFPAVLRWFAERVDLIILLFDAHKLEISDEFSEAIGALRGHEDKIRVVLNKADMVETQQLMRVYGALMWALGKVVGTPEVLRVYIGSFWSQPLLVPDNRRLFELEEQDLFRDIQGLPRHAALRKLNDLVKRARLVRVHAYIISYLKKEMPSVFGKENKKKQLILKLPVIFAKIQLEHHISPGDFPDCQKMQELLMAHDFTKFHSLKPKLLEALDEMLTHDIAKLMPLLRQEELESTEVGVQGGAFEGTHMGPFVERGPDEAMEDGEEGSDDEAEWVVTKDKSKYDEIFYNLAPADGKLSGSKAKTWMVGTKLPNSVLGRIWKLSDVDRDGMLDDEEFALASHLIEAKLEGHGLPANLPRRLVPPSKRRHKGSAE

SEQ ID NO: 27837 - protein, 386 aa, Homo sapiens
MAVPPSAPQPRASFHLRRHTPCPQCSWGMEEKAAASASCREPPGPPRAAAVAYFGISVDPDDILPGALRLIQELRPHWKPEQVRTKRFTDGITNKLVACYVEEDMQDCVLVRVYGERTELLVDRENEVRNFQLLRAHSCAPKLYCTFQNGLCYEYMQGVALEPEHIREPRLFRLIALEMAKIHTIHANGSLPKPILWHKMHNYFTLVKNEINPSLSADVPKVEVLERELAWLKEHLSQLESPVVFCHNDLLCKNIIYDSIKGHVRFIDYEYAGYNYQAFDIGNHFNEFAGVNEVDYCLYPARETQLQWLHYYLQAQKGMAVTPREVQRLYVQVNKFALASHFFWALWALIQNQYSTIDFDFLRYAVIRFNQYFKVKPQASALEMPK

SEQ ID NO: 27838 - protein, 394 aa, Homo sapiens
MAVPPSAPQPRASFHLRRHTPCPQCSWGMEEKAAASASCREPPGPPRAAAVAYFGISVDPDDILPGALRLIQELRPHWKPEQVRTKRFTDGITNKLVACYVEEDMQDCVLVRVYGERTELLVDRENEVRNFQLLRAHSCAPKLYCTFQNGLCYEYMQGVALEPEHIREPRLFRLIALEMAKIHTIHANGSLPKPILWHKMHNYFTLVKNEINPSLSADVPKVEVLERELAWLKEHLSQLESPVVFCHNDLLCKNIIYDSIKGHVRFIDYEYAGYNYQAFDIGNHFNEFAGVNEVDYCLYPARETQLQWLHYYLQAQKGMAVTPREVQRLYVQVNKFALGPSCVSSTMTASLQCCRVGNRHGEIARLTLSGLFPGVSLLLGSLGPHPEPVLHHRL

SEQ ID NO: 27839 - protein, 345 aa, Homo sapiens
MAVPPSAPQPRASFHLRRHTPCPQCSWGMEEKAAASASCREPPGPPRAAAVAYFGISVDPDDILPGALRLIQELRPHWKPEQVRTKRFTDGITNKLVACYVEEDMQDCVLVRVYGERTELLVDRENEVRNFQLLRAHSCAPKLYCTFQNGLCYEYMQGVALEPEHIREPRLFSLSADVPKVEVLERELAWLKEHLSQLESPVVFCHNDLLCKNIIYDSIKGHVRFIDYEYAGYNYQAFDIGNHFNEFAGVNEVDYCLYPARETQLQWLHYYLQAQKGMAVTPREVQRLYVQVNKFALASHFFWALWALIQNQYSTIDFDFLRYAVIRFNQYFKVKPQASALEMPK

SEQ ID NO: 27840 - protein, 581 aa, Homo sapiens [sequence omitted]

SEQ ID NO: 27841 - protein, 272 aa, Homo sapiens
MAGGLFAVSKKYFEYLGSYDTGMEVWGGENLEFSFRIWQCGGVLETHPCSHVGHVFPKQAPYSRNKALANSVRAAEVWMDEFKELYYHRNPRARLEPFGDVTERKQLRDKLQCKDFKWFLETVYPELHVPEDRPGFFGMLQNKGLTDYCFDYNPPDENQIVGHQVILYLCHGMGQNQFFEYTSQKEIRYNTHQPEGCIAVEAGMDTLIMHLCEETAPENQKFILQEDGSLFHEQSKKCVQAARKESSDSFVPLLRDCTNSDHQKWFFKERML

SEQ ID NO: 27842 - protein, 325 aa, Homo sapiens
MKPILLQGHERSITQIKYNREGDLLFTVAKDPIVNVWYSVNGERLGTYMGHTGAVWCVDADWDTKHVLTGSADNSCRLWDCETGKQLALLKTNSAVRTCGFDFGGNIIMFSTDKQMGYQCFVSFFDLRDPSQIDNNEPYMKIPCNDSKITSAVWGPLGECIIAGHESGELNQYSAKSGEVLVNVKEHSRQINDIQLSRDMTMFVTASKDNTAKLFDSTTLEHQKTFRTERPVNSAALSPNYDHVVLGGGQEAMDVTTTSTRIGKFEARFFHLAFEEEFGRVKGHFGPINSVAFHPDGKSYSSGGEDGYVRIHYFDPQYFEFEFEA

SEQ ID NO: 27843 - protein, 749 aa, Homo sapiens
MALPLLPGNSFNRNVGKEKFHKSQHWGFCNNVMMLVSDEKPGIGGEPLLGQKIKPKCSIYPKGDGSDVPSWVAFDKQVLSFDAYLEEEVLDKSQTNYRIRYYKIYFYPEDDTIQVNEPEVKNSGLLQGTSIRRHRITLPPPDEDQFYTVYHFNVGTEVVFYGRTFKIYDCDAFTRNFLRKIGVKVNPPVQCPEDPYMKIRREVVEHVEPLRPYESLDTLKQFLQYHGKILCFFCLWDDSVSMFGDRRELILHYFLCDDTIEIKELLPHSSGRDALKMFLRRSKLPKNCPPRVYQPGQITDRAVLNSYGDFIKNQADGYLFDRYKLGKVDQEFYKDSDLSLGVTINVWGRKVLLYDCDEFTKSYYKSKYGIENFTSVSCKPPSPPPKIERKFPPYNGFGSEEDSLRNCIDLKPTPHRRNFKKFMEKDSYGSKSNILRFFAKLVTDKCVDLDRMFVISYYLGDDTISVFEPIERNSGIAGGMFLKRSRVKKPGQEVFKSELSEYIKAEELYIGVTVNVNGYLFRLLNADEYTLNYMEQNTDKYPFSNLKLALQKLKQEEGKSRELKQVFKAADSKHTNMVDYNTFRDILMSLTVGNLAEQEFVTIARHYRVPEGTCSDMDFLIALAHEKFKKNMFENFDTFIYSCVYEDREKKNVLPTKDIKRLCKSSRLPLSDDLLESLLSRFEDSEKQIDYKSFFSALNWRKNPVPELQPASYLKERCEDVWLGMPSPIPAKYIDYWTFLKDAFGLEEE

SEQ ID NO: 27844 - protein, 162 aa, Homo sapiens
MSLTVGNLAEQEFVTIARHYRVPEGTCSDMDFLIALAHEKFKKNMFENFDTFIYSCVYEDREKKNVLPTKDIKRLCKSSRLPLSDDLLESLLSRFEDSEKQIDYKSFFSALNWRKNPVPELQPASYLKERCEDVWLGMPSPIPAKYIDYWTFLKDAFGLEEE

SEQ ID NO: 27845 - protein, 640 aa, Homo sapiens
MVSNPVHGLPFLPGTSFKDSTKTAFHRSQTLSYRNGYAIVRRPTVGIGGDRLQFNQLSQAELDELASKAPVLTYGQPKQAPPADFIPAHVAFDKKVLKFDAYFQEDVPMSTEEQYRIRQVNIYYYLEDDSMSVIEPVVENSGILQGKLIKRQRLAKNDRGDHYHWKDLNRGINITIYGKTFRVVDCDQFTQVFLESQGIELNPPEKMALDPYTELRKQPLRKYVTPSDFDQLKQFLTFDKQVLRFYAIWDDTDSMYGECRTYIIHYYLMDDTVEIREVHERNDGRDPFPLLMNRQRVPKVLVENAKNFPQCVLEISDQEVLEWYTAKDFIVGKSLTILGRTFFIYDCDPFTRRYYKEKFGITDLPRIDVSKREPPPVKQELPPYNGFGLVEDSAQNCFALIPKAPKKDVIKMLVNDNKVLRYLAVLESPIPEDKDRRFVFSYFLATDMISIFEPPVRNSGIIGGKYLGRTKVVKPYSTVDNPVYYGPSDFFIGAVIEVFGHRFIILDTDEYVLKYMESNAAQYSPEALASIQNHVRKREAPAPEAESKQTEKDPGVQELEALIDTIQKQLKDHSCKDNIREAFQIYDKEASGYVDRDMFFKICESLNVPVDDSLVKELIRMCSHGEGKINYYNFVRAFSN

SEQ ID NO: 27846 - protein, 278 aa, Homo sapiens
MVSNPVHGLPFLPGTSFKDSTKTAFHRSQTLSYRNGYAIVRRPTVGIGGDRLQFNQLSQAELDELASKAPVLTYGQPKQAPPADFIPAHVAFDKKVLKFDAYFQEDVPMSTEEQYRIRQVNIYYYLEDDSMSVIEPVVENSGILQGKLIKRQRLAKNDRGDHYHWKDLNRGINITIYGKTFRVVDCDQFTQVFLESQGIELNPPEKMALDPYTELRKQPLRKYVTPSDFDQLKQFLTFDKQVSDIGTTIGLLISKCDLHLLAKGLGSCIGNYFETLQL

SEQ ID NO: 27847 - protein, 621 aa, Homo sapiens
MLKTAFHRSQTLSYRNGYAIVRRPTVGIGGDRLQFNQLSQAELDELASKAPVLTYGQPKQAPPADFIPAHVAFDKKVLKFDAYFQEDVPMSTEEQYRIRQVNIYYYLEDDSMSVIEPVVENSGILQGKLIKRQRLAKNDRGDHYHWKDLNRGINITIYGKTFRVVDCDQFTQVFLESQGIELNPPEKMALDPYTELRKQPLRKYVTPSDFDQLKQFLTFDKQVLRFYAIWDDTDSMYGECRTYIIHYYLMDDTVEIREVHERNDGRDPFPLLMNRQRVPKVLVENAKNFPQCVLEISDQEVLEWYTAKDFIVGKSLTILGRTFFIYDCDPFTRRYYKEKFGITDLPRIDVSKREPPPVKQELPPYNGFGLVEDSAQNCFALIPKAPKKDVIKMLVNDNKVLRYLAVLESPIPEDKDRRFVFSYFLATDMISIFEPPVRNSGIIGGKYLGRTKVVKPYSTVDNPVYYGPSDFFIGAVIEVFGHRFIILDTDEYVLKYMESNAAQYSPEALASIQNHVRKREAPAPEAESKQTEKDPGVQELEALIDTIQKQLKDHSCKDNIREAFQIYDKEASGYVDRDMFFKICESLNVPVDDSLVKELIRMCSHGEGKINYYNFVRAFSN

SEQ ID NO: 27848 - protein, 523 aa, Homo sapiens
MAAVAVAVREDSGSGMKAELPPGPGAVGREMTKEEKLQLRKEKKQQKKKRKEEKGAEPETGSAVSAAQCQVGPTRELPESGIQLGTPREKVPAGRSKAELRAERRAKQEAERALKQARKGEQGGPPPKASPSTAGETPSGVKRLPEYPQVDDLLLRRLVKKPERQQVPTRKDYGSKVSLFSHLPQYSRQNSLTQFMSIPSSVIHPAMVRLGLQYSQGLVSGSNARCIALLRALQQVIQDYTTPPNEELSRDLVNKLKPYMSFLTQCRPLSASMHNAIKFLNKEITSVGSSKREEEAKSELRAAIDRYVQEKIVLAAQAISRFAYQKISNGDVILVYGCSSLVSRILQEAWTEGRRFRVVVVDSRPWLEGRHTLRSLVHAGVPASYLLIPAASYVLPEVSKVLLGAHALLANGSVMSRVGTAQLALVARAHNVPVLVCCETYKFCERVQTDAFVSNELDDPDDLQCKRGEHVALANWQNHASLRLLNLVYDVTPPELVDLVITELGMIPCSSVPVVLRVKSSDQ

SEQ ID NO: 27849 - protein, 543 aa, Homo sapiens
MPTQQPAAPSTRAPKPSRSLSGSLCALFSDADSGSGMKAELPPGPGAVGREMTKEEKLQLRKEKKQQKKKRKEEKGAEPETGSAVSAAQCQGPTRELPESGIQLGTPREKVPAGRSKAELRAERRAKQEAERALKQARKGEQGGPPPKASPSTAGETPSGVKRLPEYPQVDDLLLRRLVKKPERQQVPTRKDYGSKVSLFSHLPQYSRQNSLTQFMSIPSSVIHPAMVRLGLQYSQGLVSGSNARCIALLRALQQVIQDYTTPPNEELSRDLVNKLKPYMSFLTQCRPLSASMHNAIKFLNKEITSVGSSKREEEAKSELRAAIDRYVQEKIVLAAQAISRFAYQKISNGDVILVYGCSSLVSRILQEAWTEGRRFRVVVVDSRPWLEGRHTLRSLVHAGVPASYLLIPAASYVLPEVSKVLLGAHALLANGSVMSRVGTAQLALVARAHNVPVLVCCETYKFCERVQTDAFVSNELDDPDDLQCKRGEHVALANWQNHASLRLLNLVYDVTPPELVDLVITELGMIPCSSVPVVLRVKSSDQ

SEQ ID NO: 27850 - protein, 522 aa, Homo sapiens
MAAVAVAVREDSGSGMKAELPPGPGAVGREMTKEEKLQLRKEKKQQKKKRKEEKGAEPETGSAVSAAQCQGPTRELPESGIQLGTPREKVPAGRSKAELRAERRAKQEAERALKQARKGEQGGPPPKASPSTAGETPSGVKRLPEYPQVDDLLLRRLVKKPERQQVPTRKDYGSKVSLFSHLPQYSRQNSLTQFMSIPSSVIHPAMVRLGLQYSQGLVSGSNARCIALLRALQQVIQDYTTPPNEELSRDLVNKLKPYMSFLTQCRPLSASMHNAIKFLNKEITSVGSSKREEEAKSELRAAIDRYVQEKIVLAAQAISRFAYQKISNGDVILVYGCSSLVSRILQEAWTEGRRFRVVVVDSRPWLEGRHTLRSLVHAGVPASYLLIPAASYVLPEVSKVLLGAHALLANGSVMSRVGTAQLALVARAHNVPVLVCCETYKFCERVQTDAFVSNELDDPDDLQCKRGEHVALANWQNHASLRLLNLVYDVTPPELVDLVITELGMIPCSSVPVVLRVKSSDQ

SEQ ID NO: 27851 - protein, 698 aa, Homo sapiens
MNPSEMQRKAPPRRRRHRNRAPLTHKMNKMVTSEEQMKLPSTKKAEPPTWAQLKKLTQLATKYLENTKVTQTPESMLLAALMIVSMVVSLPMPAGAAAANYTNWAYVPFPPLIRAVTWMDNPIEVYVNDSVWVPGPIDDRCPAKPEEEGMMINISIGYRYPICLGRAPGCLMPAVQNWLVEVPIVSPICRFTYHMVSGMSLRPRVNYLQDFSYQRSLKFRPKGKPCPKEIPKESKNTEVLVWEECVANSAVILQNNEFGTIIDWTPQGQFYHNCSGQTQSCPSAQVSPAVDSDLTESLDKHKHKKLQSFYPWEWGEKGISTPRPKIISPVSGPEHPELWRLTVASHHIRIWSGNQTLETRDRKPFYTVDLNSSLTLPLQSCVKPPYMLVVGNIVIKPDSQTITCENCRLLTCIDSTFNWQHRILLVRAREGVWIPVSMDRPWEASPSIHILTEVLKGVLNRSKRFIFTLIAVIMGLIAVTATAAVAGVALHSSVQSVNFVNDGQKNSTRLWNSQSSIDQKLANQINDLRQTVIWMGDRLMSLEHRFQLQCDWNTSDFCITPQIYNESEHHWDMVRRHLQGREDNLTLDISKLKEQIFEASKAHLNLVPGTEAIAGVADGLANLNPVTWVKTIGSTTIINLILILVCLFCLLLVCRCTQQLRRDSDHRERAMMTMAVLSKRKGGNVGKSKRDQIVTVSV

SEQ ID NO: 27852 - protein, 731 aa, Homo sapiens
MAAPDGRVVSRPQRLGQGSGQGPKGSGACLHPLDSLEQKETQEQTSGQLVMLRKAQEFFQTCDAEGKGFIARKDMQRLHKELPLSLEELEDVFDALDADGNGYLTPQEFTTGFSHFFFSQNNPSQEDAGEQVAQRHEEKVYLSRGDEDLGDMGEDEEAQFRMLMDRLGAQKVLEDESDVKQLWLQLKKEEPHLLSNFEDFLTRIISQLQEAHEEKNELECALKRKIAAYDEEIQHLYEEMEQQIKSEKEQFLLKDTERFQARSQELEQKLLCKEQELEQLTQKQKRLEGQCTALHHDKHETKAENTKLKLTNQELARELERTSWELQDAQQQLESLQQEACKLHQEKEMEVYRVTESLQREKAGLLKQLDFLRERNKHLRDERDICFQKNKAAKANTAASRASWKKRSGSVIGKYVDSRGILRSQSEEEEEVFGIPRRSSLGLSGYPLTEEEPGTGEPGPGGPYPRPLRRIISVEEDPLPQLLDGGFEQPLSKCSEEEEVSDQGVQGQIPEAPPLKLTPTSPRGQPVGKEALCKEESSPSAPDRLFKIVFVGNSAVGKTSFLRRFCEDRFSPGMAATVGIDYRVKTLNVDNSQVALQLWDTAGQERYRCITQQFFRKADGVIVMYDLTDKQSFLSVRRWLSSVEEAVGDRVPVLLLGNKLDNEKEREVPRGLGEQLATENNLIFYECSAYSGHNTKESLLHLARFLKEQEDTVREDTIQVGHPAKKKSCCG

SEQ ID NO: 27853 - protein, 395 aa, Homo sapiens
MAAPDGRVVSRPQRLGQGSGQGPKGSGACLHPLDSLEQKETQEQTSGQLVMLRKAQEFFQTCDAEGKGFIARKDMQRLHKELPLSLEELEDVFDALDADGNGYLTPQEFTTGFSHFFFSQNNPSQEDAGEQVAQRHEEKVYLSRGDEDLGDMGEDEEAQFRMLMDRLGAQKVLEDESDVKQLWLQLKKEEPHLLSNFEDFLTRIISQLQEAHEEKNELECALKRKIAAYDEEIQHLYEEMEQQIKSEKEQFLLKDTERFQARSQELEQKLLCKEQELEQLTQKQKRLEGQCTALHHDKHETKAENTKLKLTNQELARELERTSWELQDAQQQLESLQQEACKLHQEKEMEVYRVTESLQREKAGLLKQLDFLRCVGGHWPVLRAPPRSLGSEGPV

SEQ ID NO: 27854 - protein, 629 aa, Homo sapiens
MAISPRSDATFSSQKSTPSESPRTKKFPLTEEEIFYMNCRAAYLTVFKSSLENIISKDQLYLALQHAGRNPSQKTINKYWTPQTAKLNFDDFCIILRKEKPTSKAELLKSFKQLDVNDDGCILHTDLYKFLTKRGEKMTREEVNAIINLADVNADGKFDYIKFCKLYMTTNEQCLKTTLEKLEVDSKLMRHQFGNHIEGSPERDPSPVPKPSPKITRKTDPETFLNKGDTRSSLLSATRKFKTSVSFTVTMGANGNRNSKLMEPNLIKDWQHMQSKGCFFLEEDGEIISHQYRMQIAQRSMVYLTIKPLNLSQVEGKPSPWLSVDTALYILKENESQANLQLVCFTELRNREVFGWTGELGPGIYWLIPSTTGCRLRKKIKPVTDEAQLVYRDETGELFLTKEFKSTLSDIFEVIDLDGNGLLSLEEYNFFELRTSGEKCDEDAWAVCRENFDTKRNELTRQGFMDLNLMEANDREGDPCDLWVTLHSMGYNKALELTEACPFVIDIYAEKCKPKIKAVHMEACSGQLEKAICKSVLSNGDAKVMDGYENIIVHTYSCDTWITSVIENKSDEKVIIHISNELSKNCINNRGLNIFAVEVGPKSTMVCQHVMPLNERQEWIYYCIYSLIS

SEQ ID NO: 27855 - protein, 606 aa, Homo sapiens
MAISPRSDATFSSQKSTPSESPRTKKFPLTEEEIFYMNCRAAYLTVFKSSLENIISKDQLYLALQHAGRNPSQKTINKYWTPQTAKLNFDDFCIILRKEKPTSKAELLKSFKQLDVNDDGCILHTDLYKFLTKRGEKMTREEVNAIINLADVNADGKFDYIKFCKLYMTTNEQCLKTTLEKLEVDSKLMRHQFGNHIEGSPERDPSPVPKPSPKITRKTDPETFLNKGDTRSSLLSATRKFKTSVSFTVTMGANGNRNSKLMEPNLIKDWQHMQSKGCFFLEEDGEIISHQYRMQIAQRSMVYLTIKPLNLSQVEGKPSPWLSVDTALYILKENESQANLQLVCFTELRNREVFGWTGELGPGIYWLIPSTTGCRLRKKIKPVTDEAQLVYRDETGELFLTKEFKSTLSDIFEVIDLDGNGLLSLEEYNFFELRTSGEKCDEDAWAVCRENFDTKRNELTRQGFMDLNLMEANDREGDPCDLWVTLHSMGYNKALELTEACPFVIDIYAEKCKPKIKAVHMEACSGQLEKAICKSVLSNGDAKVMDGYENIIVHTYSCDTWITSVIENKSDEKVIIHISNELSKNCINNRGLNIFAVEVGPKSTMP

SEQ ID NO: 27856 - protein, 448 aa, Homo sapiens
MAHVGDCTQTPWLPVLVVSLMCSARAEYSNCGENEYYNQTTGLCQECPPCGPGEEPYLSCGYGTKDEDYGCVPCPAEKFSKGGYQICRRHKDCEGFFRATVLTPGDMENDAECGPCLPGYYMLENRPRNIYGMVCYSCLLAPPNTKECVGATSGASANFPGTSGSSTLSPFQHAHKELSGQGHLATALIIAMSTIFIMAIAIVLIIMFYILKTKPSAPACCTSHPGKSVEAQVSKDEEKKEAPDNVVMFSEKDEFEKLTATPAKPTKSENDASSENEQLLSRSVDSDEEPAPDKQGSPELCLLSLVHLAREKSATSNKSAGIQSRRKKILDVYANVCGVVEGLSPTELPFDCLEKTSRMLSSTYNSEKAVVKTWRHLAESFGLKRDEIGGMTDGMQLFDRISTAGYSIPELLTKLVQIERLDAVESLCADILEWAGVVPPASQPHAAS

SEQ ID NO: 27857 - protein, 480 aa, Homo sapiens
MAHVGDCTQTPWLPVLVVSLMCSARAEYSNCGENEYYNQTTGLCQECPPCGPGEEPYLSCGYGTKDEDYGCVPCPAEKFSKGGYQICRRHKDCEGFFRATVLTPGDMENDAECGPCLPGYYMLENRPRNIYGMVCYSCLLAPPNTKECVGATSGASANFPGTSGSSTLSPFQHAHKELSGQGHLATALIIAMSTIFIMAIAIVLIIMFYILKTKPSAPGDGPHAPVPCFLDSPSTPPVGEPGCSLPPLSPACCTSHPGKSVEAQVSKDEEKKEAPDNVVMFSEKDEFEKLTATPAKPTKSENDASSENEQLLSRSVDSDEEPAPDKQGSPELCLLSLVHLAREKSATSNKSAGIQSRRKKILDVYANVCGVVEGLSPTELPFDCLEKTSRMLSSTYNSEKAVVKTWRHLAESFGLKRDEIGGMTDGMQLFDRISTAGYSIPELLTKLVQIERLDAVESLCADILEWAGVVPPASQPHAAS

SEQ ID NO: 27858 - protein, 129 aa, Homo sapiens
MPMASPQTLVLYLLVLAVTEAWGQEAVIPGCHLHPFNVTVRSDRQGTCQGSHVAQACVGHCESSAFPSRYSVLVASGYRHNITSVSQCCTISGLKKVKVQLQCVGSRREELEIFTARACQCDMCRLSRY

SEQ ID NO: 27859 - protein, 441 aa, Homo sapiens
MSEREVSTAPAGTDMPAAKKQKLSSDENSNPDLSGDENDDAVSIESGTNTERPDTPTNTPNAPGRKSWGKGKWKSKKCKYSFKCVNSLKEDHNQPLFGVQFNWHSKEGDPLVFATVGSNRVTLYECHSQGEIRLLQSYVDADADENFYTCAWTYDSNTSHPLLAVAGSRGIIRIINPITMQCIKHYVGHGNAINELKFHPRDPNLLLSVSKDHALRLWNIQTDTLVAIFGGVEGHRDEVLSADYDLLGEKIMSCGMDHSLKLWRINSKRMMNAIKESYDYNPNKTNRPFISQKIHFPDFSTRDIHRNYVDCVRWLGDLILSKSCENAIVCWKPGKMEDDIDKIKPSESNVTILGRFDYSQCDIWYMRFSMDFWQKMLALGNQVGKLYVWDLEVEDPHKAKCTTLTHHKCGAAIRQTSFSRDSSILIAVCDDASIWRWDRLR

SEQ ID NO: 27860 - protein, 466 aa, Homo sapiens
MSEREVSTAPAGTDMPAAKKQKLSSDENSNPDLSGDENDDAVSIESGTNTERPDTPTNTPNAPGRKSWGKGKWKSKKCKYSFKCVNSLKEDHNQPLFGVQFNWHSKEGDPLVFATVGSNRVTLYECHSQGEIRLLQSYVDADADENFYTCAWTYDSNTSHPLLAVAGSRGIIRIINPITMQCIKHYVGHGNAINELKFHPRDPNLLLSVSKDHALRLWNIQTDTLVAIFGGVEGHRDEVLSADYDLLGEKIMSCGMDHSLKLWRINSKRMMNAIKESYDYNPNKTNRPFISQKIHFPDFSTRDIHRNYVDCVRWLGDLILSKSGRAILHSHQQCMRDPVSPNLRQHLSCENAIVCWKPGKMEDDIDKIKPSESNVTILGRFDYSQCDIWYMRFSMDFWQKMLALGNQVGKLYVWDLEVEDPHKAKCTTLTHHKCGAAIRQTSFSRDSSILIAVCDDASIWRWDRLR

SEQ ID NO: 27861 - protein, 400 aa, Homo sapiens
MSEREVSTAPAGTDMPAAKKQKLSSDENSNPDLSGDENDDAVSIESGTNTERPDTPTNTPNAPGRKSWGKGKWKSKKCKYSFKCVNSLKEDHNQPLFGVQFNWHSKEGDPLVFATVGSNRVTLYECHSQGEIRLLQSYVDADADENFYTCAWTYDSNTSHPLLAVAGSRGIIRIINPITMQCIKHYVGHGNAINELKFHPRDPNLLLSVSKDHALRLWNIQTDTLVAIFGGVEGHRDEVLSADYDLLGEKIMSCGMDHSLKLWRINSKRMMNAIKESYDYNPNKTNRPFISQKIHFPDFSTRDIHRNYVDCVRWLGDLILSKSCENAIVCWKPGKMEDDIDKIKPSESNVTILGRFDYSQCDIWYMRFSMDFWQKMLALGNQVGKLYVWDLEVEDPHKAK

SEQ ID NO: 27862 - protein, 437 aa, Homo sapiens
MAAGTLYTYPENWRAFKALIAAQYSGAQVRVLSAPPHFHFGQTNRTPEFLRKFPAGKVPAFEGDDGFCVFESNAIAYYVSNEELRGSTPEAAAQVVQWVSFADSDIVPPASTWVFPTLGIMHHNKQATENAKEEVRRILGLLDAYLKTRTFLVGERVTLADITVVCTLLWLYKQVLEPSFRQAFPNTNRWFLTCINQPQFRAVLGEVKLCEKMAQFDAKKFAETQPKKDTPRKEKGSREEKQKPQAERKEEKKAAAPAPEEEMDECEQALAAEPKAKDPFAHLPKSTFVLDEFKRKYSNEDTLSVALPYFWEHFDKDGWSLWYSEYRFPEELTQTFMSCNLITGMFQRLDKLRKNAFASVILFGTNNSSSISGVWVFRGQELAFPLSPDWQVDYESYTWRKLDPGSEETQTLVREYFSWEGAFQHVGKAFNQGKIFK

SEQ ID NO: 27863 - protein, 487 aa, Homo sapiens
MAERWVAPAVLRRARFASTFFLSPQIYAHKDGDLRSAFFILSFKRGEFIPFLNWTLYTYPENWRAFKALIAAQYSGAQVRVLSAPPHFHFGQTNRTPEFLRKFPAGKVPAFEGDDGFCVFESNAIAYYVSNEELRGSTPEAAAQVVQWVSFADSDIVPPASTWVFPTLGIMHHNKQATENAKEEVRRILGLLDAYLKTRTFLVGERVTLADITVVCTLLWLYKQVLEPSFRQAFPNTNRWFLTCINQPQFRAVLGEVKLCEKMAQFDAKKFAETQPKKDTPRKEKGSREEKQKPQAERKEEKKAAAPAPEEEMDECEQALAAEPKAKDPFAHLPKSTFVLDEFKRKYSNEDTLSVALPYFWEHFDKDGWSLWYSEYRFPEELTQTFMSCNLITGMFQRLDKLRKNAFASVILFGTNNSSSISGVWVFRGQELAFPLSPDWQVDYESYTWRKLDPGSEETQTLVREYFSWEGAFQHVGKAFNQGKIFK

SEQ ID NO: 27864 - protein, 569 aa, Homo sapiens
MGSTLGCHRSIPRDPSDLSHSRKFSAACNFSNILVNQERLNINTATEEELMTLPGVTRAVARSIVEYREYIGGFKKVEDLALVSGVGATKLEQVKFEICVSSKGSSAQHSPSSLRRDLLAEQQPHHLATAVPLTPRVNINTATPAQLMSVRGLSEKMALSIVDFRREHGPFRSVEDLVRMDGINAAFLDRIRHQVFAERSRPPSTHTNGGLTFTAKPHPSPTSLSLQSEDLDLPPGGPTQIISTRPSVEAFGGTRDGRPVLRLATWNLQGCSVEKANNPGVREVVCMTLLENSIKLLAVQELLDREALEKFCTELNQPTLPNIRKWKGPRGCWKAVVAEKPSSQLQKGAGYAGFLWDAAAGMELRDAGSQESSPSNGHGKLAGPSPYLGRFKVGSHDLTLVNLHLAALTLLGSENPSKNHSDGHRLASFAQTLQETLKGEKDVIILGDFGQGPDSNDYDILRKEKFHHLIPAHTFTNISTKNPQGSKSLDNIWISKSLKKVFTGHWAVVREGLTNPWIPDNWSWGGVASEHCPVLAEFYTEKDWSKKDAPRNGSGVALERSEANIKHER

SEQ ID NO: 27865 - protein, 1023 aa, Homo sapiens
MGAGALAICQSKAAVRLKEDMKKIVAVPLNEQKDFTYQKLFGVSLQELERQGLTENGIPAVVWNIVEYLTQHGLTQEGLFRVNGNVKVVEQLRLKFESGVPVELGKDGDVCSAASLLKLFLRELPDSLITSALQPRFIQLFQDGRNDVQESSLRDLIKELPDTHYCLLKYLCQFLTKVAKHHVQNRMNVHNLATVFGPNCFHVPPGLEGMKEQDLCNKIMAKILENYNTLFEVEYTENDHLRCENLARLIIVKEVYYKNSLPILLTRGLERDMPKPPPKTKIPKSRSEGSIQAHRVLQPELSDGIPQLSLRLSYRKACLEDMNSAEGAISAKLVPSSQEDERPLSPFYLSAHVPQVSNVSATGELLERTIRSAVEQHLFDVNNSGGQSSEDSESGTLSASSATSARQRRRQSKEQDEVRHGRDKGLINKENTPSGFNHLDDCILNTQEVEKVHKNTFGCAGERSKPKRQKSSTKLSELHDNQDGLVNMESLNSTRSHERTGPDDFEWMSDERKGNEKDGGHTQHFESPTMKIQEHPSLSDTKQQRNQDAGDQEESFVSEVPQSDLTALCDEKNWEEPIPAFSSWQRENSDSDEAHLSPQAGRLIRQLLDEDSDPMLSPRFYAYGQSRQYLDDTEVPPSPPNSHSFMRRRSSSLGSYDDEQEDLTPAQLTRRIQSLKKKIRKFEDRFEEEKKYRPSHSDKAANPEVLKWTNDLAKFRRQLKESKLKISEEDLTPRMRQRSNTLPKSFGSQLEKEDEKKQELVDKAIKPSVEATLESIQRKLQEKRAESSRPEDIKDMTKDQIANEKVALQKALLYYESIHGRPVTKNERQVMKPLYDRYRLVKQILSRANTIPIIGSPSSKRRSPLLQPIIEGETASFFKEIKEEEEGSEDDSNVKPDFMVTLKTDFSARCFLDQFEDDADGFISPMDDKIPSKCSQDTGLSNLHAASIPELLEHLQEMREEKKRIRKKLRDFEDNFFRQNGRNVQKEDRTPMAEEYSEYKHIKAKLRLLEVLISKRDTDSKSM

SEQ ID NO: 27866 - protein, 697 aa, Homo sapiens
MACEIMPLQSSQEDERPLSPFYLSAHVPQVSNVSATGELLERTIRSAVEQHLFDVNNSGGQSSEDSESGTLSASSATSARQRRRQSKEQDEVRHGRDKGLINKENTPSGFNHLDDCILNTQEVEKVHKNTFGCAGERSKPKRQKSSTKLSELHDNQDGLVNMESLNSTRSHERTGPDDFEWMSDERKGNEKDGGHTQHFESPTMKIQEHPSLSDTKQQRNQDAGDQEESFVSEVPQSDLTALCDEKNWEEPIPAFSSWQRENSDSDEAHLSPQAGRLIRQLLDEDSDPMLSPRFYAYGQSRQYLDDTEVPPSPPNSHSFMRRRSSSLGSYDDEQEDLTPAQLTRRIQSLKKKIRKFEDRFEEEKKYRPSHSDKAANPEVLKWTNDLAKFRRQLKESKLKISEEDLTPRMRQRSNTLPKSFGSQLEKEDEKKQELVDKAIKPSVEATLESIQRKLQEKRAESSRPEDIKDMTKDQIANEKVALQKALLYYESIHGRPVTKNERQVMKPLYDRYRLVKQILSRANTIPIIGSPSSKRRSPLLQPIIEGETASFFKEIKEEEEGSEDDSNVKPDFMVTLKTDFSARCFLDQFEDDADGFISPMDDKIPSKCSQDTGLSNLHAASIPELLEHLQEMREEKKRIRKKLRDFEDNFFRQNGRNVQKEDRTPMAEEYSEYKHIKAKLRLLEVLISKRDTDSKSM

SEQ ID NO: 27867 - protein, 669 aa, Homo sapiens
MACEIMPLQSSQEDERPLSPFYLSAHVPQVSNVSATGELLERTIRSAVEQHLFDVNNSGGQSSEDSESGTLSASSATSARQRRRQSKEQDEVRHGRDKGLINKENTPSGFNHLDDCILNTQEVEKVHKNTFGCAGERSKPKRQKSSTKLSELHDNQDGLVNMESLNSTRSHERTGPDDFEWMSDERKGNEKDGGHTQHFESPTMKIQEHPSLSDTKQQRNQDAGDQEESFVSEVPQSDLTALCDEKNWEEPIPAFSSWQRENSDSDEAHLSPQAGRLIRQLLDEDSDPMLSPRFYAYGQSRQYLDDTEVPPSPPNSHSFMRRRSSSLGSYDDEQEDLTPAQLTRRIQSLKKKIRKFEDRFEEEKKYRPSHSDKAANPEVLKWTNDLAKFRRQLKESKLKISEEDLTPRMRQRSNTLPKSFGSQLEKEDEKKQELVDKAIKPSVEATLESIQRKLQEKRAESSRPEDIKDMTKDQIANEKVALQKALLYYESIHGRPVTKNERQVMKPLYDRYRLVKQILSRANTIPIIEEEEGSEDDSNVKPDFMVTLKTDFSARCFLDQFEDDADGFISPMDDKIPSKCSQDTGLSNLHAASIPELLEHLQEMREEKKRIRKKLRDFEDNFFRQNGRNVQKEDRTPMAEEYSEYKHIKAKLRLLEVLISKRDTDSKSM

SEQ ID NO: 27868 - protein, 683 aa, Homo sapiens
MACEIMPLQSAHVPQVSNVSATGELLERTIRSAVEQHLFDVNNSGGQSSEDSESGTLSASSATSARQRRRQSKEQDEVRHGRDKGLINKENTPSGFNHLDDCILNTQEVEKVHKNTFGCAGERSKPKRQKSSTKLSELHDNQDGLVNMESLNSTRSHERTGPDDFEWMSDERKGNEKDGGHTQHFESPTMKIQEHPSLSDTKQQRNQDAGDQEESFVSEVPQSDLTALCDEKNWEEPIPAFSSWQRENSDSDEAHLSPQAGRLIRQLLDEDSDPMLSPRFYAYGQSRQYLDDTEVPPSPPNSHSFMRRRSSSLGSYDDEQEDLTPAQLTRRIQSLKKKIRKFEDRFEEEKKYRPSHSDKAANPEVLKWTNDLAKFRRQLKESKLKISEEDLTPRMRQRSNTLPKSFGSQLEKEDEKKQELVDKAIKPSVEATLESIQRKLQEKRAESSRPEDIKDMTKDQIANEKVALQKALLYYESIHGRPVTKNERQVMKPLYDRYRLVKQILSRANTIPIIGSPSSKRRSPLLQPIIEGETASFFKEIKEEEEGSEDDSNVKPDFMVTLKTDFSARCFLDQFEDDADGFISPMDDKIPSKCSQDTGLSNLHAASIPELLEHLQEMREEKKRIRKKLRDFEDNFFRQNGRNVQKEDRTPMAEEYSEYKHIKAKLRLLEVLISKRDTDSKSM

SEQ ID NO: 27869 - protein, 669 aa, Homo sapiens
MACEIMPLQRLLERTIRSAVEQHLFDVNNSGGQSSEDSESGTLSASSATSARQRRRQSKEQDEVRHGRDKGLINKENTPSGFNHLDDCILNTQEVEKVHKNTFGCAGERSKPKRQKSSTKLSELHDNQDGLVNMESLNSTRSHERTGPDDFEWMSDERKGNEKDGGHTQHFESPTMKIQEHPSLSDTKQQRNQDAGDQEESFVSEVPQSDLTALCDEKNWEEPIPAFSSWQRENSDSDEAHLSPQAGRLIRQLLDEDSDPMLSPRFYAYGQSRQYLDDTEVPPSPPNSHSFMRRRSSSLGSYDDEQEDLTPAQLTRRIQSLKKKIRKFEDRFEEEKKYRPSHSDKAANPEVLKWTNDLAKFRRQLKESKLKISEEDLTPRMRQRSNTLPKSFGSQLEKEDEKKQELVDKAIKPSVEATLESIQRKLQEKRAESSRPEDIKDMTKDQIANEKVALQKALLYYESIHGRPVTKNERQVMKPLYDRYRLVKQILSRANTIPIIGSPSSKRRSPLLQPIIEGETASFFKEIKEEEEGSEDDSNVKPDFMVTLKTDFSARCFLDQFEDDADGFISPMDDKIPSKCSQDTGLSNLHAASIPELLEHLQEMREEKKRIRKKLRDFEDNFFRQNGRNVQKEDRTPMAEEYSEYKHIKAKLRLLEVLISKRDTDSKSM

SEQ ID NO: 27870 - protein, 561 aa, Homo sapiens
MRWILCWSLTLCLMAQTALGALHTKRPQVVTKYGTLQGKQMHVGKTPIQVFLGVPFSRPPLGILRFAPPEPPEPWKGIRDATTYPPGCLQESWGQLASMYVSTRERYKWLRFSEDCLYLNVYAPARAPGDPQLPVMVWFPGGAFIVGAASSYEGSDLAAREKVVLVFLQHRLGIFGFLSTDDSHARGNWGLLDQMAALRWVQENIAAFGGDPGNVTLFGQSAGAMSISGLMMSPLASGLFHRAISQSGTALFRLFITSNPLKVAKKVAHLAGCNHNSTQILVNCLRALSGTKVMRVSNKMRFLQLNFQRDPEEIIWSMSPVVDGVVIPDDPLVLLTQGKVSSVPYLLGVNNLEFNWLLPYIMKFPLNRQAMRKETITKMLWSTRTLLNITKEQVPLVVEEYLDNVNEHDWKMLRNRMMDIVQDATFVYATLQTAHYHRDAGLPVYLYEFEHHARGIIVKPRTDGADHGDEMYFLFGGPFATGLSMGKEKALSLQMMKYWANFARTGNPNDGNLPCWPRYNKDEKYLQLDFTTRVGMKLKEKKMAFWMSLYQSQRPEKQRQF

SEQ ID NO: 27871 - protein, 491 aa, Homo sapiens
MRWILCWSLTLCLMAQTALGALHTKRPQVVTKYGTLQGKQMHVGKTPIQVFLGVPFSRPPLGILRFAPPEPPEPWKGIRDATTYPPGCLQESWGQLASMYVSTRERYKWLRFSEDCLYLNVYAPARAPGDPQLPVMVWFPGGAFIVGAASSYEGSDLAAREKVVLVFLQHRLGIFGFLSTDDSHARGNWGLLDQMAALRWVQENIAAFGGDPGNVTLFGQSAGAMSISGLMMSPLASGLFHRAISQSGTALFRLFITSNPLKVAKKVAHLAGCNHNSTQILVNCLRALSGTKVMRVSNKMRFLQLNFQRDPEEIIWSMSPVVDGVVIPDDPLVLLTQGKVSSVPYLLGVNNLEFNWLLPYNITKEQVPLVVEEYLDNVNEHDWKMLRNRMMDIVQDATFVYATLQTAHYHRGLSMGKEKALSLQMMKYWANFARTGNPNDGNLPCWPRYNKDEKYLQLDFTTRVGMKLKEKKMAFWMSLYQSQRPEKQRQF

SEQ ID NO: 27872 - protein, 367 aa, Homo sapiens
MAALRWVQENIAAFGGDPGNVTLFGQSAGAMSISGLMMSPLASGLFHRAISQSGTALFRLFITSNPLKVAKKVAHLAGCNHNSTQILVNCLRALSGTKVMRVSNKMRFLQLNFQRDPEEIIWSMSPVVDGVVIPDDPLVLLTQGKVSSVPYLLGVNNLEFNWLLPYIMKFPLNRQAMRKETITKMLWSTRTLLNITKEQVPLVVEEYLDNVNEHDWKMLRNRMMDIVQDATFVYATLQTAHYHRDAGLPVYLYEFEHHARGIIVKPRTDGADHGDEMYFLFGGPFATGLSMGKEKALSLQMMKYWANFARTGNPNDGNLPCWPRYNKDEKYLQLDFTTRVGMKLKEKKMAFWMSLYQSQRPEKQRQF

SEQ ID NO: 27873 - protein, 468 aa, Homo sapiens
MRWILCWSLTLCLMAQTALGALHTKRPQVVTKYGTLQGKQMHVGKTPIQVFLGVPFSRPPLGILRFAPPEPPEPWKGIRDATTYPPGCLQESWGQLASMYVSTRERYKWLRFSEDCLYLNVYAPARAPGDPQLPVMVWFPGGAFIVGAASSYEGSDLAAREKVVLVFLQHRLGIFGFLSTDDSHARGNWGLLDQMAALRWVQENIAAFGGDPGNVTLFGQSAGAMSISGLMMSPLASGLFHRAISQSGTALFRLFITSNPLKVAKKVAHLAGCNHNSTQILVNCLRALSGTKVMRVSNKMRFLQLNFQRDPEEIIWSMSPVVDGVVIPDDPLVLLTQGKVSSVPYLLGVNNLEFNWLLPYIMKFPLNRQAMRKETITKMLWSTRTLLNITKEQVPLVVEEYLDNVNEHDWKMLRNRMMDIVQDATFVYATLQTAHYHRETPMMGICPAGHATTRMKSTCSWILPQEWA

SEQ ID NO: 27874 - protein, 463 aa, Homo sapiens
MYVSTRERYKWLRFSEDCLYLNVYAPARAPGDPQLPVMVWFPGGAFIVGAASSYEGSDLAAREKVVLVFLQHRLGIFGFLSTDDSHARGNWGLLDQMAALRWVQENIAAFGGDPGNVTLFGQSAGAMSISGLMMSPLASGLFHRAISQSGTALFRLFITSNPLKVAKKVAHLAGCNHNSTQILVNCLRALSGTKVMRVSNKMRFLQLNFQRDPEEIIWSMSPVVDGVVIPDDPLVLLTQGKVSSVPYLLGVNNLEFNWLLPYIMKFPLNRQAMRKETITKMLWSTRTLLNITKEQVPLVVEEYLDNVNEHDWKMLRNRMMDIVQDATFVYATLQTAHYHRDAGLPVYLYEFEHHARGIIVKPRTDGADHGDEMYFLFGGPFATGLSMGKEKALSLQMMKYWANFARTGNPNDGNLPCWPRYNKDEKYLQLDFTTRVGMKLKEKKMAFWMSLYQSQRPEKQRQF

SEQ ID NO: 27875 - protein, 374 aa, Homo sapiens
MYVSTRERYKWLRFSEDCLYLNVYAPARAPGDPQLPVMVWFPGGAFIVGAASSYEGSDLAAREKVVLVFLQHRLGIFGFLRWRGRTDDSHARGNWGLLDQMAALRWVQENIAAFGGDPGNVTLFGQSAGAMSISGLMMSPLASGLFHRAISQSGTALFRLFITSNPLKVAKKVAHLAGCNHNSTQILVNCLRALSGTKVMRVSNKMRFLQLNFQRDPEEIIWSMSPVVDGVVIPDDPLVLLTQGKVSSVPYLLGVNNLEFNWLLPYIMKFPLNRQAMRKETITKMLWSTRTLLNITKEQVPLVVEEYLDNVNEHDWKMLRNRMMDIVQDATFVYATLQTAHYHRETPMMGICPAGHATTRMKSTCSWILPQEWA

SEQ ID NO: 27876 - protein, 481 aa, Homo sapiens
MRWILCWSLTLCLMAQTALGALHTKRPQVVTKYGTLQGKQMHVGKTPIQVFLGVPFSRPPLGILRFAPPEPPEPWKGIRDATTYPPGWSLALSPGWSAVARSRLTATSASRVQASLLPQPLSVWGYRCLQESWGQLASMYVSTRERYKWLRFSEDCLYLNVYAPARAPGDPQLPVMVWFPGGAFIVGAASSYEGSDLAAREKVVLVFLQHRLGIFGFLSTDDSHARGNWGLLDQMAALRWVQENIAAFGGDPGNVTLFGQSAGAMSISGLMMSPLASGLFHRAISQSGTALFRLFITSNPLKVAKKVAHLAGCNHNSTQILVNCLRALSGTKVMRVSNKMRFLQLNFQRDPEEIIWSMSPVVDGVVIPDDPLVLLTQGKVSSVPYLLGVNNLEFNWLLPYNITKEQVPLVVEEYLDNVNEHDWKMLRNRMMDIVQDATFVYATLQTAHYHRETPMMGICPAGHATTRMKSTCSWILPQEWA

SEQ ID NO: 27877 - protein, 890 aa, Homo sapiens
MSRSATLLLCLLGCHVWKAVTKTLREPGAGAQEVTLKVHISDASTHQPVADALIEIFTNQASIASGTSGTDGVAFIKFQYKLGSQLIVTASKHAYVPNSAPWKPIRLPVFSSLSLGLLPERSATLMVYEDVVQIVSGFQGARPQPRVHFQRRALRLPENTSYSDLTAFLTAASSPSEVDSFPYLRGLDGNGTGNSTRHDLTPVTAVSVHLLSSNGTPVLVDGPIYVTVPLATQSSLRHNAYVAAWRFDQKLGTWLKSGLGLVHQEGSQLTWTYIAPQLGYWVAAMSPPIPGPVVTQDITTYHTVFLLAILGGMAFILLVLLCLLLYYCRRKCLKPRQHHRKLQLPAGLESSKRDQSTSMSHINLLFSRRASEFPGPLSVTSHGRPEAPGTKELMSGVHLEMMSPGGEGDLHTPMLKLSYSTSQEFSSREELLSCKEEDKSQISFDNLTPSGTLGKDYHKSVEVFPLKARKSMEREGYESSGNDDYRGSYNTVLSQPLFEKQDREGPASTGSKLTIQEHLYPAPSSPEKEQLLDRRPTECMMSRSVDHLERPTSFPRPGQLICCSSVDQVNDSVYRKVLPALVIPAHYMKLPGDHSYVSQPLVVPADQQLEIERLQAELSNPHAGIFPHPSSQIQPQPLSSQAISQQHLQDAGTREWSPQNASMSESLSIPASLNDAALAQMNSEVQLLTEKALMELGGGKPLPHPRAWFVSLDGRSNAHVRHSYIDLQRAGRNGSNDASLDSGVDMNEPKSARKGRGDALSLQQNYPPVQEHQQKEPRAPDSTAYTQLVYLDDVEQSGSECGTTVCTPEDSALRCLLEGSSRRSGGQLPSLQEETTRRTADAPSEPAASPHQRRSAHEEEEDDDDDDQGEDKKSPWQKREERPLMAFNIK

SEQ ID NO: 27878 - protein, 645 aa, Homo sapiens
MGDRRPQDRPRSQGMDSKPWYCDKPPSKYFAKRKHRRLRFPPVDTQNWVFVTEGMDDFRYACQSPEDTLVCRRDEFLLPKISLRGPQADRKSRKKKLLKKAALFSELSPVQPARKAFVEEVEAQLMTKHPLAMYPNLGKDMPPDLLLQVLKQLDPERKLEDAWARCEAREKTTEVPTESGKYPCGESCPRPPETPVSRLRPQLPKTPVSSRRPEPPKTRVSSLRPEPPKTRVSSLHPEPPETRASHLRVDPPETGVSHLCPEPPKTLVSSVHPEPPDTGASHLCPEPPETRVSHLHPEPPETGVSHLRPEPSKTQVSSLCPEPPEAGVSHLCLEPPNTHRVSSFLLQVLKLDSEKKLEDARARCEGQEMTTEELTKPGKYHFWESCPRPFESRMPHLRLVLPITRRMASLCLKPPKTRRVSSLCPEPTKTGASHLKELFQEDTPSTMECVSDSLQRRHTSRKLRDFKWAGDLGVNEESISSLFDFTPECRTTDQDQKIKKANECASRLMYGMELDDMDEVEFLRIKYWDRRRRAAPHSYSAQRGRIRYGPWYFEPKLGKKLRSDEPLIDPKPVLEKPDEPDILDGLYGPIAFKDFILSKGYRMPGVIEKLFAKKGWTYDSVKTPIQRAVQVYKYKEDVTDASKED

SEQ ID NO: 27879 - protein, 641 aa, Homo sapiens
MTTSSIRRQMKNIVNNYSEAEIKVREATSNDPWGPSSSLMTEIADLTYNVVAFSEIMSMVWKRLNDHGKNWRHVYKALTLLDYLIKTGSERVAQQCRENIFAIQTLKDFQYIDRDGKDQGINVREKSKQLVALLKDEERLKAERAQALKTKERMAQVATGMGSNQITFGRGSSQPNLSTSHSEQEYGKAGGSPASYHGSPEASLCPQHRTGAPLGQSEELQPLSQRHPFLPHLGLASRPNGDWSQPCLTCDRAARATSPRVSSELEQARPQTSGEEELQLQLALAMSREVAEQEERLRRGDDLRLQMALEESRRDTVKIPKKKEHGSLPQQTTLLDLMDALPSSGPAAQKAEPWGPSASTNQTNPWGGPAAPASTSDPWPSFGTKPAASIDPWGVPTGATVQSVPKNSDPWAASQQPASSAGKRASDAWGAVSTTKPVSVSGSFELFSNLNGTIKDDFSEFDNLRTSKKTAESVTSLPSQNNGTTSPDPFESQPLTVASSKPSSARKTPESFLGPNAALVNLDSLVTRPAPPAQSLNPFLAPGAPATSAPVNPFQVNQPQPLTLNQLRGSPVLGTSTSFGPGPGVESMAVASMTSAAPQPALGATGSSLTPLGPAMMNMVGSVGIPPSAAQATGTTNPFLL

SEQ ID NO: 27880 - protein, 584 aa, Homo sapiens
MTTSSIRRQMKNIVNNYSEAEIKVREATSNDPWGPSSSLMTEIADLTYNVVAFSEIMSMVWKRLNDHGKNWRHVYKALTLLDYLIKTGSERVAQQCRENIFAIQTLKDFQYIDRDGKDQGINVREKSKQLVALLKDEERLKAERAQALKTKERMAQVATGMGSNQITFGRGSSQPNLSTSHSEQEYGKAGGSPASYHGSTSPRVSSELEQARPQTSGEEELQLQLALAMSREVAEQEERLRRGDDLRLQMALEESRRDTVKIPKKKEHGSLPQQTTLLDLMDALPSSGPAAQKAEPWGPSASTNQTNPWGGPAAPASTSDPWPSFGTKPAASIDPWGVPTGATVQSVPKNSDPWAASQQPASSAGKRASDAWGAVSTTKPVSVSGSFELFSNLNGTIKDDFSEFDNLRTSKKTAESVTSLPSQNNGTTSPDPFESQPLTVASSKPSSARKTPESFLGPNAALVNLDSLVTRPAPPAQSLNPFLAPGAPATSAPVNPFQVNQPQPLTLNQLRGSPVLGTSTSFGPGPGVESMAVASMTSAAPQPALGATGSSLTPLGPAMMNMVGSVGIPPSAAQATGTTNPFLL

SEQ ID NO: 27881 - protein, 545 aa, Homo sapiens
MTEIADLTYNVVAFSEIMSMVWKRLNDHGKNWRHVYKALTLLDYLIKTGSERVAQQCRENIFAIQTLKDFQYIDRDGKDQGINVREKSKQLVALLKDEERLKAERAQALKTKERMAQVATGMGSNQITFGRGSSQPNLSTSHSEQEYGKAGGSPASYHGSTSPRVSSELEQARPQTSGEEELQLQLALAMSREVAEQEERLRRGDDLRLQMALEESRRDTVKIPKKKEHGSLPQQTTLLDLMDALPSSGPAAQKAEPWGPSASTNQTNPWGGPAAPASTSDPWPSFGTKPAASIDPWGVPTGATVQSVPKNSDPWAASQQPASSAGKRASDAWGAVSTTKPVSVSGSFELFSNLNGTIKDDFSEFDNLRTSKKTAESVTSLPSQNNGTTSPDPFESQPLTVASSKPSSARKTPESFLGPNAALVNLDSLVTRPAPPAQSLNPFLAPGAPATSAPVNPFQVNQPQPLTLNQLRGSPVLGTSTSFGPGPGVESMAVASMTSAAPQPALGATGSSLTPLGPAMMNMVGSVGIPPSAAQATGTTNPFLL

SEQ ID NO: 27882 - protein, 356 aa, Homo sapiens
MSREVAEQEERLRRGDDLRLQMALEESRRDTVKIPKKKEHGSLPQQTTLLDLMDALPSSGPAAQKAEPWGPSASTNQTNPWGGPAAPASTSDPWPSFGTKPAASIDPWGVPTGATVQSVPKNSDPWAASQQPASSAGKRASDAWGAVSTTKPVSVSGSFELFSNLNGTIKDDFSEFDNLRTSKKTAESVTSLPSQNNGTTSPDPFESQPLTVASSKPSSARKTPESFLGPNAALVNLDSLVTRPAPPAQSLNPFLAPGAPATSAPVNPFQVNQPQPLTLNQLRGSPVLGTSTSFGPGPGVESMAVASMTSAAPQPALGATGSSLTPLGPAMMNMVGSVGIPPSAAQATGTTNPFLL

SEQ ID NO: 27883 - protein, 297 aa, Homo sapiens
MDPGKDKEGVPQPSGPPARKKFVIPLDEDEVPPGVAKPLFRSTQSLPTVDTSAQAAPQTYAEYAISQPLEGAGATCPTGSEPLAGETPNQALKPGAKSNSIIVSPRQRGNPVLKFVRNVPWEFGDVIPDYVLGQSTCALFLSLRYHNLHPDYIHGRLQSLGKNFALRVLLVQVDVKDPQQALKELAKMCILADCTLILAWSPEEAGRYLETYKAYEQKPADLLMEKLEQDFVSRVTECLTTVKSVNKTDSQTLLTTFGSLEQLIAASREDLALCPGLGPQKARRLFDVLHEPFLKVP

SEQ ID NO: 27884 - protein, 273 aa, Homo sapiens
MDPGKDKEGVPQPSGPPARKKFVIPLDEDEVPPGVAKPLFRSTQSLPTVDTSAQAAPQTYAEYAISQPLEGAGATCPTGSEPLAGETPNQALKPGAKSNSIIVSPRQRGNPVLKFVRNVPWEFGDVIPDYVLGQSTCALFLSLRYHNLHPDYIHGRLQSLGKNFALRVLLVQVDVKDPQQALKELAKMCILADCTLILAWSPEEAGRYLETYKAYEQKPADLLMEKLEQDFVSRSLEQLIAASREDLALCPGLGPQKARRLFDVLHEPFLKVP

SEQ ID NO: 27885 - protein, 323 aa, Homo sapiens
MDPGKDKEGVPQPSGPPARKKFVIPLDEDEVPPGVAKPLFRSTQSLPTVDTSAQAAPQTYAEYAISQPLEGAGATCPTGSEPLAGETPNQALKPGAKSNSIIVSPRQRGNPVLKFVRNVPWEFGDVIPDYVLGQSTCALFLSLRYHNLHPDYIHGRLQSLGKNFALRVLLVQVDVKDPQQALKELAKMCILADCTLILAWSPEEAGRYLETYKAYEQKPADLLMEKLEQDFVSRVTECLTTVKSVNKTDSQTLLTTFGSLEQLIAASREDLALCPGLGPQKVRALGKNPRSWGKERAPNKHNLRPQSFKVKKEPKTRHSGFRL

SEQ ID NO: 27886 - protein, 225 aa, Homo sapiens
MDPGKDKEGVPQPSGPPARKKFVIPLDEDEVPPGVRGNPVLKFVRNVPWEFGDVIPDYVLGQSTCALFLSLRYHNLHPDYIHGRLQSLGKNFALRVLLVQVDVKDPQQALKELAKMCILADCTLILAWSPEEAGRYLETYKAYEQKPADLLMEKLEQDFVSRVTECLTTVKSVNKTDSQTLLTTFGSLEQLIAASREDLALCPGLGPQKARRLFDVLHEPFLKVP

SEQ ID NO: 27887 - protein, 289 aa, Homo sapiens
MMRRTLENRNAQTKQLQTAVSNVEKHFGELCQIFAAYVRKTARLRDKADLLVNEINAYAATETPHLKLGLMNFADEFAKLQDYRQAEVERLEAKVVEPLKTYGTIVKMKRDDLKATLTARNREAKQLTQLERTRQRNPSDRHVISQAETELQRAAMDASRTSRHLEETINNFERQKMKDIKTIFSEFITIEMLFHGKALEVYTAAYQNIQNIDEDEDLEVFRNSLYAPDYSSRLDIVRANSKSPLQRSLSAKCVSGTGQVSTCRLRKDQQAEDDEDDELDVTEEENFLK

SEQ ID NO: 27888 - protein, 251 aa, Homo sapiens
MMRRTLENRNAQTKQLQTAVSNVEKHFGELCQIFAAYVRKTARLRDKADLLVNEINAYAATETPHLKLGLMNFADEFAKLQDYRQAEVERLEAKVVEPLKTYGTIVKMKRDDLKATLTARNREAKQLTQLERTRQRNPSDRHVISQAETELQRAAMDASRTSRHLEETINNFERQKMKDIKVFRNSLYAPDYSSRLDIVRANSKSPLQRSLSAKCVSGTGQVSTCRLRKDQQAEDDEDDELDVTEEENFLK

SEQ ID NO: 27889 - protein, 271 aa, Homo sapiens
MMRRTLENRNAQTKQLQTAVSNVEKHFGELCQIFAAYVRKTARLRDKADLLVNEINAYAATETPHLKLGLMNFADEFAKLQDYRQAEVERLEAKVVEPLKTYGTIVKMKRDDLKATLTARNREAKQLTQLERTRQRNPSDRHVISQAETELQRAAMDASRTSRHLEETINNFERQKMKDIKTIFSEFITIEMLFHGKALEVYTAAYQNIQNIDEDEDLEVFRNSLYAPDYSSRLDIVRANSKSPLQRSLSAKCVSGTGQEAGWAATCQTLI

SEQ ID NO: 27890 - protein, 262 aa, Homo sapiens
MMRRTLENRNAQTKQLQTAVSNVEKHFGELCQIFAAYVRKTARLRDKADLLVNEINAYAATETPHLKLGLMNFADEFAKLQDYRQAEVERLEAKVVEPLKTYGTIVKMKRDDLKATLTARNREAKQLTQLERTRQRNPSDRHVISQAETELQRAAMDASRTSRHLEETINNFERQKMKDIKTIFSEFITIEMLFHGKALEVYTAAYQNIQNIDEDEDLERWSFAMLPRLVLNSWGSSDPPALASQSVRFSEILCMHQIIHLV

SEQ ID NO: 27891 - protein, 97 aa, Homo sapiens
MMRRTLENRNAQTKQLQTAVSNVEKHFGELCQIFAAYVRKTARLRDKADLLVNEINAYAATETPHLKLGLMNFADEFAKLQDYRQAEVWSEITVSLL

SEQ ID NO: 27892 - protein, 607 aa, Homo sapiens
MWMTPKRSKMEVDEALVFRPEWTQRYLVVEPPEGDGALCLVCRRLIVATRERDVRRHYEAEHEYYERYVADGERAALVERLRQGDLPVASFTPEERAARAGLGLCRLLALKGRGWGEGDFVYQCMEVLLREVLPEHVSVLQGVDLSPDITRQRILSIDRNLRNQLFNRARDFKAYSLALDDQAFVAYENYLLVFIRGVGPELEVQEDLLTIINLTHHFSVGALMSAILESLQTAGLSLQRMVGLTTTHTLRMIGENSGLVSYMREKAVSPNCWNVIHYSGFLHLELLSSYDVDVNQIINTISEWIVLIKTRGVRRPEFQTLLTESESEHGERVNGRCLNNWLRRGKTLKLIFSLRKEMEAFLVSVGATTVHFSDKQWLCDFGFLVDIMEHLRELSEELRVSKVFAAAAFDHICTFEVKLNLFQRHIEEKNLTDFPALREVVDELKQQNKEDEKIFDPDRYQMVICRLQKEFERHFKDLRFIKKDLELFSNPFNFKPEYAPISVRVELTKLQANTNLWNEYRIKDLGQFYAGLSAESYPIIKGVACKVASLFDSNQICEKAFSYLTRNQHTLSQPLTDEHLQALFRVATTEMEPGWDDLVRERNESNP

SEQ ID NO: 27893 - protein, 368 aa, Homo sapiens
MENMHLRRVRTMPRHSQSLTMAPYSSVSLVEQLEDRILCHEKTTAALVEHAFRIKDDIVNSLQKMQNKGGGDRLARLFLEEHIRNITAIVKQLNRDIEVLQEQIRARDNISYGTNSALKTLEMRQLSGLGDLRGRVARCDASIARLSAEHKTTYEGLQHLNKEQQAAKLILETKIKDAEGQISQLLNRVDLSISEQSTKLKMSHRDSNHQLQLLDTKFKGTVEELSNQILSARSWLQQEQERIEKELLQKIDQLSLIVKENSGASERDMEKKLSQMSARLDKIEEGQKKTFDGQRTRQEEEKMHGRITKLELQMNQNIKEMKAEVNAGFTAVYESIGSLRQVLEAKMKLDRDQLQKQIQLMQKPETPM

SEQ ID NO: 27894 - protein, 1060 aa, Homo sapiens
MASALNSKINPPGTCQGSKADGGAGWRMDCDPQMHVKMCKKIAQLTKVIYALNTRQDEAEASMEALREAHQEELQNAVAETKARLLQEQGCAEEEALLQRIQALESALELQKRLTEEALAESASCRLETKERELRVEAEHAERVLTLSREMLELKADYERRLQHLTSHEATPQGRLPQESPETKSEPGQGPEMQEVLLEVQRLRVENQQLSKDYARKAEELQATYERENEAIRQAMQQSVSQALWQWQEKESDLRKNFQVQESALQAQVRKLEGDLEHRGRKISDLKKYAQKLKERIQDLDVQLKEARQENSELKGTAKKLGEKLAVAKDRMMLQECRGTQQTDAMKTELVSENKVLREENDLEAGNLHPQQDQSCLKECPCMKGGTDMQTKKEASAETEYMKQQYEEDLRKIKHQTEEEKKHLKDQLVKRLEDLVKKHTVEIKSVRSSVEAERKKLQREVEAQLEEVRKKSEKEIKQLEEEKAALNVKLQNSLLEVLRLEEFIQQNKTRPTGAEESPQELGRQHCSILETQDPCLKLDETSPRGEEYQDKLAAEEGTSSDEEERTKVLLKEGSDPQPPLGSLLKEKTSKIQRLEEDWQSQKAKLQAQVSQMQQALEQCTSNYREDLQALKQLSDLEREKLQRELQETTQQNHAMKAQLEASHQRALRMLEKARHQELKATEERLKKESSHSLQIQHQTHRLELQALEEKARQELQEERERMQAQQALLLESLRQELSEQQAACSGHQKDLEALQAELRALGRQQASSQCPGDSKDHIIATEERGGPGQAGSPPGAAGQGSGEGCGLWEENAQLQDAVRRLRAEVEQHQQEAQKLRDQRRFLEETQQAQRAREVETLRQEHRKEMQAMVADFSSAQAQLQARLAALEAELKDSGEKPGKGASRPEDLQLIGRLQTRLKEREDIIKQLTEERRFHYAAFPSAMSHRNRSFSFNPHPGYLTPSMKKKKVEDVPSRVVSVPNLASYAKNFLSGDLSSRINAPPITTSPSLDPSPSCGRTYKPNQSTDAKTATRTPDGETAQAKEVQQKQGSPHQEWFTKYFSF

SEQ ID NO: 27895 - protein, 718 aa, Homo sapiens
MCASVKYNIRGPALIPRMKTKHRIYYITLFSIVLLGLIATGMFQFWPHSIESSNDWNVEKRSIRDVPVVRLPADSPIPERGDLSCRMHTCFDVYRCGFNPKNKIKVYIYALKKYVDDFGVSVSNTISREYNELLMAISDSDYYTDDINRACLFVPSIDVLNQNTLRIKETAQAMAQLSRWDRGTNHLLFNMLPGGPPDYNTALDVPRDRALLAGGGFSTWTYRQGYDVSIPVYSPLSAEVDLPEKGPGPRQYFLLSSQVGLHPEYREDLEALQVKHGESVLVLDKCTNLSEGVLSVRKRCHKHQVFDYPQVLQEATFCVVLRGARLGQAVLSDVLQAGCVPVVIADSYILPFSEVLDWKRASVVVPEEKMSDVYSILQSIPQRQIEEMQRQARWFWEAYFQSIKAIALATLQIINDRIYPYAAISYEEWNDPPAVKWGSVSNPLFLPLIPPQSQGFTAIVLTYDRVESLFRVITEVSKVPSLSKLLVVWNNQNKNPPEDSLWPKIRVPLKVVRTAENKLSNRFFPYDEIETEAVLAIDDDIIMLTSDELQFGYEVWREFPDRLVGYPGRLHLWDHEMNKWKYESEWTNEVSMVLTGAAFYHKYFNYLYTYKMPGDIKNWVDAHMNCEDIAMNFLVANVTGKAVIKVTPRKKFKCPECTAIDGLSLDQTHMVERSECINKFASVFGTMPLKVVEHRADPVLYKDDFPEKLKSFPNIGSL

SEQ ID NO: 27896 - protein, 728 aa, Homo sapiens
MCASVKYNIRGPALIPRMKTKHRIYYITLFSIVLLGLIATGMFQFWPHSIESSNDWNVEKRSIRDVPVVRLPADSPIPERGDLSCRMHTCFDVYRCGFNPKNKIKVYIYALKKYVDDFGVSVSNTISREYNELLMAISDSDYYTDDINRACLFVPSIDVLNQNTLRIKETAQAMAQLSRWDRGTNHLLFNMLPGGPPDYNTALDVPRDRALLAGGGFSTWTYRQGYDVSIPVYSPLSAEVDLPEKGPGPRQYFLLSSQVGLHPEYREDLEALQVKHGESVLVLDKCTNLSEGVLSVRKRCHKHQVFDYPQVLQEATFCVVLRGARLGQAVLSDVLQAGCVPVVIADSYILPFSEVLDWKRASVVVPEEKMSDVYSILQSIPQRQIEEMQRQLFMEPARRENWSAANHQMNSLIWPREQWDSQIINDRIYPYAAISYEEWNDPPAVKWGSVSNPLFLPLIPPQSQGFTAIVLTYDRVESLFRVITEVSKVPSLSKLLVVWNNQNKNPPEDSLWPKIRVPLKVVRTAENKLSNRFFPYDEIETEAVLAIDDDIIMLTSDELQFGYEVWREFPDRLVGYPGRLHLWDHEMNKWKYESEWTNEVSMVLTGAAFYHKYFNYLYTYKMPGDIKNWVDAHMNCEDIAMNFLVANVTGKAVIKVTPRKKFKCPECTAIDGLSLDQTHMVERSECINKFASVFGTMPLKVVEHRADPVLYKDDFPEKLKSFPNIGSL

SEQ ID NO: 27897 - protein, 751 aa, Homo sapiens
MSCASGSGGGLRHPLRCQKPWDEECEEEAVCVIMCASVKYNIRGPALIPRMKTKHRIYYITLFSIVLLGLIATGMFQFWPHSIESSNDWNVEKRSIRDVPVVRLPADSPIPERGDLSCRMHTCFDVYRCGFNPKNKIKVYIYALKKYVDDFGVSVSNTISREYNELLMAISDSDYYTDDINRACLFVPSIDVLNQNTLRIKETAQAMAQLSRWDRGTNHLLFNMLPGGPPDYNTALDVPRDRALLAGGGFSTWTYRQGYDVSIPVYSPLSAEVDLPEKGPGPRQYFLLSSQVGLHPEYREDLEALQVKHGESVLVLDKCTNLSEGVLSVRKRCHKHQVFDYPQVLQEATFCVVLRGARLGQAVLSDVLQAGCVPVVIADSYILPFSEVLDWKRASVVVPEEKMSDVYSILQSIPQRQIEEMQRQARWFWEAYFQSIKAIALATLQIINDRIYPYAAISYEEWNDPPAVKWGSVSNPLFLPLIPPQSQGFTAIVLTYDRVESLFRVITEVSKVPSLSKLLVVWNNQNKNPPEDSLWPKIRVPLKVVRTAENKLSNRFFPYDEIETEAVLAIDDDIIMLTSDELQFGYEVWREFPDRLVGYPGRLHLWDHEMNKWKYESEWTNEVSMVLTGAAFYHKYFNYLYTYKMPGDIKNWVDAHMNCEDIAMNFLVANVTGKAVIKVTPRKKFKCPECTAIDGLSLDQTHMVERSECINKFASVFGTMPLKVVEHRADPVLYKDDFPEKLKSFPNIGSL

SEQ ID NO: 27898 - protein, 131 aa, Homo sapiens
MSGRGKQGGKARAKSKSRSSRAGLQFPVGRIHRLLRKGNYAERIGAGAPVYLAAVLEYLTAEILELAGNASRDNKKTRIIPRHLQLAIRNDEELNKLLGGVTIAQGGVLPNIQAVLLPKKTESHHHKAQSK

SEQ ID NO: 27899 - protein, 896 aa, Homo sapiens
MAAAAQLSLTQLSSGNPVYEKYYRQVDTGNTGRVLASDAAAFLKKSGLPDLILGKIWDLADTDGKGILNKQEFFVALRLVACAQNGLEVSLSSLNLAVPPPRFHDTSSPLLISGTSAAELPWAVKPEDKAKYDAIFDSLSPVNGFLSGDKVKPVLLNSKLPVDILGRVWELSDIDHDGMLDRDEFAVAMFLVYCALEKEPVPMSLPPALVPPSKRKTWVVSPAEKAKYDEIFLKTDKDMDGFVSGLEVREIFLKTGLPSTLLAHIWSLCDTKDCGKLSKDQFALAFHLISQKLIKGIDPPHVLTPEMIPPSDRASLQKNIIGSSPVADFSAIKELDTLNNEIVDLQREKNNVEQDLKEKEDTIKQRTSEVQDLQDEVQRENTNLQKLQAQKQQVQELLDELDEQKAQLEEQLKEVRKKCAEEAQLISSLKAELTSQESQISTYEEELAKAREELSRLQQETAELEESVESGKAQLEPLQQHLQDSQQEISSMQMKLMEMKDLENHNSQLNWCSSPHSILVNGATDYCSLSTSSSETANLNEHVEGQSNLESEPIHQESPARSSPELLPSGVTDENEVTTAVTEKVCSELDNNRHSKEEDPFNVDSSSLTGPVADTNLDFFQSDPFVGSDPFKDDPFGKIDPFGGDPFKGSDPFASDCFFRQSTDPFATSSTDPFSAANNSSITSVETLKHNDPFAPGGTVVAASDSATDPFASVFGNESFGGGFADFSTLSKVNNEDPFRSATSSSVSNVVITKNVFEETSVKSEDEPPALPPKIGTPTRPCPLPPGKRSINKLDSPDPFKLNDPFQPFPGNDSPKEKDPEIFCDPFTSATTTTNKEADPSNFANFSAYPSEEDMIEWAKRESEREEEQRLARLNQQEQEDLELAIALSKSEISEA

SEQ ID NO: 27900 - protein, 582 aa, Homo sapiens
MYLKSDSGLGGWITIPAVADVLKYSCIVCWSSREKNNVEQDLKEKEDTIKQRTSEVQDLQDEVQRENTNLQKLQAQKQQVQELLDELDEQKAQLEEQLKEVRKKCAEEAQLISSLKAELTSQESQISTYEEELAKAREELSRLQQETAELEESVESGKAQLEPLQQHLQDSQQEISSMQMKLMEMKDLENHNSQLNWCSSPHSILVNGATDYCSLSTSSSETANLNEHVEGQSNLESEPIHQESPARSSPELLPSGVTDENEVTTAVTEKVCSELDNNRHSKEEDPFNVDSSSLTGPVADTNLDFFQSDPFVGSDPFKDDPFGKIDPFGGDPFKGSDPFASDCFFRQSTDPFATSSTDPFSAANNSSITSVETLKHNDPFAPGGTVVAASDSATDPFASVFGNESFGGGFADFSTLSKVNNEDPFRSATSSSVSNVVITKNVFEETSVKSEDEPPALPPKIGTPTRPCPLPPGKRSINKLDSPDPFKLNDPFQPFPGNDSPKEKDPEIFCDPFTSATTTTNKEADPSNFANFSAYPSEEDMIEWAKRESEREEEQRLARLNQQEQEDLELAIALSKSEISEA

SEQ ID NO: 27901 - protein, 193 aa, Homo sapiens
MGVHECPAWLWLLLSLLSLPLGLPVLGAPPRLICDSRVLERYLLEAKEAENITTGCAEHCSLNENITVPDTKVNFYAWKRMEVGQQAVEVWQGLALLSEAVLRGQALLVNSSQPWEPLQLHVDKAVSGLRSLTTLLRALGAQKEAISPPDAASAAPLRTITADTFRKLFRVYSNFLRGKLKLYTGEACRTGDR

SEQ ID NO: 27902 - protein, 138 aa, Homo sapiens
MAELQQLRVQEAVESMVKSLERENIRKMQGLMFRCSASCCEDSQASMKQVHQCIERCHVPLAQAQALVTSELEKFQDRLARCTMHCNDKAKDSIDAGSKELQVKQQLDSCVTKCVDDHMHLIPTMTKKMKEALLSIGK

SEQ ID NO: 27903 - protein, 657 aa, Homo sapiens
MDHFFIKRKRNSEVKYTEACSSSSVESGIVNSDNIEKNTDSNLQTSTSFEPHFKKKKVSARRYNEDYLKYGFIKCEKPFENDRPQCVICNNILANESLKPSKLKRHLETQHAELIDKPLEYFQRKKKDIKLSTQFLSCSTAVSEKALLSSYLVAYRVAKEKIANTAAEKIILPACLDMVRTIFDDKSADKLKTIPNDNTVSLRICTIAEHLETMLITRLQSGIDFAIQLDESTDIGSCTTLLVYVRYAWQDDFLEDFLCFLNLTSHLSGLDIFTELERRIVGQYKLNWKNCKGITSDGTATMTGKHSRVIKKLLEVTNNGAVWNHCFIHREGLASREIPQNLMEVLKNAVKVVNFIKGSSLNSRLLETFCSEIGTNHTHLLYHTKIRWLSQGKILSRVYELRNEIHFFLIEKKSHLASIFEDDTWVTKLAYLTDIFSILNELSLKLQGKNSDVFQHVERIQGFRKTLLLWQVRLKSNRPSYYMFPRFLQHIEENIINENILKEIKLEILLHLTSLSQTFNHFFPEEKFETLRENSWVKDPFAFRHPESIIELNLVPEEENELLQLSSSYTLKNDYETLSLSAFWMKVKEDFPLLSRKSVLLLLPFTTTSLCELGFSILTQLKTKERNGLNCAAVMRVALSSCVPDWNELMNRQAHPS

SEQ ID NO: 27904 - protein, 556 aa, Homo sapiens
MHPMALHMVLPAHLPFLSPEVLRLLEVHVKKWMHFQRWGLPRRVEESLRQLMPNPPLYYQPGNDQPVSFNLNNTSQVSLHRSETISLQTWCSCVAGQPIQTFWVSEWSTMNPEQRHHCQQTPNPMALALPSPALKALSGPHPQSGGQDNDSGSDLQQKYSQLFCGLPSLHSESLVATFMGSQGLPKIENVPKPPLKDPFLFNDLSFPQLLPKTSPQSAPPSSPLSPNWVSPSDHQRAQINVPFLTLAEYEALEWHLLQRQLQLQWGWPAALQRSQHTQCLMQHEPCGKAQSPETTTASQTGKSISVLTRELLFFPEHARKLLEFHIQKQSIRHRWGLPQKIQQSIQLLLTSTDQQTVSSSSTALANVSIPQPVALEANGACDVLSPIAAPVSIPRPHLLTQVKAILQSHIDSKCGQIHQGKIPACVHRSWDCRISGVLAVAPFPCIPESQFLVLQTASDPDLHHKVMPWMPTALDQQQQALPGTVTEHPKLLRVLSVEAIEKLETTLRHKHLAFLSGLPALYYVALPRALAPAVTSQSVITEMEPSPVEIPAEPLI

SEQ ID NO: 27905 - protein, 455 aa, Homo sapiens
MDETQGPLAMTVHLLANSGHGSLLQRTLDQLLDCICPEVRLFQVSERASPVKYCEKSHSKRSRFPGMSVLLFLHESPGEDRLFRVLDSLQHSPWQCYPTQDTRGRLCPYFFANQEFYSLDSQLPIWGVRQVHCGSEILRVTLYCSFDNYEDAIRLYEMILQREATLQKSNFCFFVLYASKSFALQLSLKQLPPGMSVDPKESSVLQFKVQEIGQLVPLLPNPCMPISSTRWQTQDYDGNKILLQVQLNPELGVKNGILGAGMLPLGSRLTSVSAKRTSEPRSQRNQGKRSQGHSLELPEPSGSPTSDRCAGTSWKSPGRSFQVSSPAMGAHLHLSSHHLESGARMKVLNRENSFQKLEAETNVDTGLTIINSEPRQTYFGGFPRDLQTSQPPFCLPASSLGVATSKNNSVLKERVSPLPLAGQRDLGTRKTISECLLHLQVQGEEKEEDEEEFFI

SEQ ID NO: 27906 - protein, 272 aa, Homo sapiens
MDETQGPLAMTVHLLANSGHGSLLQRTLDQLLDCICPEVRLFQVSERASPVKYCEKSHSKRSRFPGMSVLLFLHESPGEDRLFRVLDSLQHSPWQCYPTQDTRGRLCPYFFANQEFYSLDSQLPIWGVRQVHCGSEILRVTLYCSFDNYEDAIRLYEMILQREATLQKSNFCFFVLYASKSFALQLSLKQLPPGMSVDPKESSVLQFKVQEIGQLVPLLPNPCMPISSTRWQTQDYDGNKILLQRWESSSVAQTRVRWCHHSSLRSSPSGFK

SEQ ID NO: 27907 - protein, 371 aa, Homo sapiens
MAAAAAGLGGGGAGPGPEAGDFLARYRLVSNKLKKRFLRKPNVAEAGEQFGQLGRELRAQECLPYAAWCQLAVARCQQALFHGPGEALALTEAARLFLRQERDARQRLVCPAAYGEPLQAAASALGAAVRLHLELGQPAAAAALCLELAAALRDLGQPAAAAGHFQRAAQLQLPQLPLAALQALGEAASCQLLARDYTGALAVFTRMQRLAREHGSHPVQSLPPPPPPAPQPGPGATPALPAALLPPNSGSAAPSPAALGAFSDVLVRCEVSRVLLLLLLQPPPAKLLPEHAQTLEKYSWEAFDSHGQESSGQLPEELFLLLQSLVMATHEKDTEAIKSLQVEMWPLLTAEQNHLLHLVLQETISPSGQGV

SEQ ID NO: 27908 - protein, 262 aa, Homo sapiens
MALSLGWKAHRNHCGLLLQALRSSGLLLFPCGQCPWRGAGSFLDPEIKAFLEENTEVTSSGSLTPEIQLRLLTPRCKFWWERADLWPHSDPYWAIYWPGGQALSRYLLDNPDVVRGKSVLDLGSGCGATAIAAKMSGASRILANDIDPIAGMAITLNCELNRLNPFPILIQNILNLEQDKWDLVVLGDMFYDEDLADSLHQWLKKCFWTYRTRVLIGDPGRPQFSGHSIQHHLHKVVEYSLLESTRQENSGLTTSTVWGFQP

SEQ ID NO: 27909 - protein, 477 aa, Homo sapiens
MDGFYDQQVPYMVTNSQRGRNCNEKPTNVRKRKFINRDLAHDSEELFQDLSQLQETWLAEAQVPDNDEQFVPDYQAESLAFHGLPLKIKKEPHSPCSEISSACSQEQPFKFSYGEKCLYNVSAYDQKPQVGMRPSNPPTPSSTPVSPLHHASPNSTHTPKPDRAFPAHLPPSQSIPDSSYPMDHRFRRQLSEPCNSFPPLPTMPREGRPMYQRQMSEPNIPFPPQGFKQEYHDPVYEHNTMVGSAASQSFPPPLMIKQEPRDFAYDSEVPSCHSIYMRQEGFLAHPSRTEGCMFEKGPRQFYDDTCVVPEKFDGDIKQEPGMYREGPTYQRRGSLQLWQFLVALLDDPSNSHFIAWTGRGMEFKLIEPEEVARRWGIQKNRPAMNYDKLSRSLRYYYEKGIMQKVAGERYVYKFVCDPEALFSMAFPDNQRPLLKTDMERHINEEDTVPLSHFDESMAYMPEGGCCNPHPYNEGYVY

SEQ ID NO: 27910 - protein, 459 aa, Homo sapiens
MDGFYDQQVPYMVTNSQRGRNCNEKPTNVRKRKFINRDLAHDSEELFQDLSQLQETWLAEVAFHGLPLKIKKEPHSPCSEISSACSQEQPFKFSYGEKCLYNVSAYDQKPQVGMRPSNPPTPSSTPVSPLHHASPNSTHTPKPDRAFPAHLPPSQSIPDSSYPMDHRFRRQLSEPCNSFPPLPTMPREGRPMYQRQMSEPNIPFPPQGFKQEYHDPVYEHNTMVGSAASQSFPPPLMIKQEPRDFAYDSEVPSCHSIYMRQEGFLAHPSRTEGCMFEKGPRQFYDDTCVVPEKFDGDIKQEPGMYREGPTYQRRGSLQLWQFLVALLDDPSNSHFIAWTGRGMEFKLIEPEEVARRWGIQKNRPAMNYDKLSRSLRYYYEKGIMQKVAGERYVYKFVCDPEALFSMAFPDNQRPLLKTDMERHINEEDTVPLSHFDESMAYMPEGGCCNPHPYNEGYVY

SEQ ID NO: 27911 - protein, 454 aa, Homo sapiens
MDGFYDQQVPYMVTNSQRGRNCNEKPTNVRKRKFINRDLAHDSEELFQDLSQLQETWLAEAQVPDNDEQFVPDYQAESLAFHGLPLKIKKEPHSPCSEISSACSQEQPFKFSYGEKCLYNVSAYDQKPQVGMRPSNPPTPSSTPVSPLHHASPNSTHTPKPDRAFPAHLPPSQSIPDSSYPMDHRFRRQLSEPCNSFPPLPTMPREGRPMYQRQMSEPNIPFPPQGFKQEYHDPVYEHNTMVGSAASQSFPPPLMIKQEPRDFAYDSGCMFEKGPRQFYDDTCVVPEKFDGDIKQEPGMYREGPTYQRRGSLQLWQFLVALLDDPSNSHFIAWTGRGMEFKLIEPEEVARRWGIQKNRPAMNYDKLSRSLRYYYEKGIMQKVAGERYVYKFVCDPEALFSMAFPDNQRPLLKTDMERHINEEDTVPLSHFDESMAYMPEGGCCNPHPYNEGYVY

SEQ ID NO: 27912 - protein, 374 aa, Homo sapiens
MLQDLSASVFFPPCSQHRTLAQVPDNDEQFVPDYQAESLAFHGLPLKIKKEPHSPCSEISSACSQEQPFKFSYGEKCLYNVRFRRQLSEPCNSFPPLPTMPREGRPMYQRQMSEPNIPFPPQGFKQEYHDPVYEHNTMVGSAASQSFPPPLMIKQEPRDFAYDSEVPSCHSIYMRQEGFLAHPSRTEGCMFEKGPRQFYDDTCVVPEKFDGDIKQEPGMYREGPTYQRRGSLQLWQFLVALLDDPSNSHFIAWTGRGMEFKLIEPEEVARRWGIQKNRPAMNYDKLSRSLRYYYEKGIMQKVAGERYVYKFVCDPEALFSMAFPDNQRPLLKTDMERHINEEDTVPLSHFDESMAYMPEGGCCNPHPYNEGYVY

SEQ ID NO: 27913 - protein, 419 aa, Homo sapiens
MLQDLSASVFFPPCSQHRTLVAFHGLPLKIKKEPHSPCSEISSACSQEQPFKFSYGEKCLYNVSAYDQKPQVGMRPSNPPTPSSTPVSPLHHASPNSTHTPKPDRAFPAHLPPSQSIPDSSYPMDHRFRRQLSEPCNSFPPLPTMPREGRPMYQRQMSEPNIPFPPQGFKQEYHDPVYEHNTMVGSAASQSFPPPLMIKQEPRDFAYDSEVPSCHSIYMRQEGFLAHPSRTEGCMFEKGPRQFYDDTCVVPEKFDGDIKQEPGMYREGPTYQRRGSLQLWQFLVALLDDPSNSHFIAWTGRGMEFKLIEPEEVARRWGIQKNRPAMNYDKLSRSLRYYYEKGIMQKVAGERYVYKFVCDPEALFSMAFPDNQRPLLKTDMERHINEEDTVPLSHFDESMAYMPEGGCCNPHPYNEGYVY

SEQ ID NO: 27914 - protein, 437 aa, Homo sapiens
MLQDLSASVFFPPCSQHRTLAQVPDNDEQFVPDYQAESLAFHGLPLKIKKEPHSPCSEISSACSQEQPFKFSYGEKCLYNVSAYDQKPQVGMRPSNPPTPSSTPVSPLHHASPNSTHTPKPDRAFPAHLPPSQSIPDSSYPMDHRFRRQLSEPCNSFPPLPTMPREGRPMYQRQMSEPNIPFPPQGFKQEYHDPVYEHNTMVGSAASQSFPPPLMIKQEPRDFAYDSEVPSCHSIYMRQEGFLAHPSRTEGCMFEKGPRQFYDDTCVVPEKFDGDIKQEPGMYREGPTYQRRGSLQLWQFLVALLDDPSNSHFIAWTGRGMEFKLIEPEEVARRWGIQKNRPAMNYDKLSRSLRYYYEKGIMQKVAGERYVYKFVCDPEALFSMAFPDNQRPLLKTDMERHINEEDTVPLSHFDESMAYMPEGGCCNPHPYNEGYVY

SEQ ID NO: 27915 - protein, 387 aa, Homo sapiens
MGCAYSCCLEVCCGEDEIVYPRMPGESTVCHREREKPITYHWYHWHPGHIYPRVASMEDYDEDLVQEASSEDVLGVHMVDKDTERDIEMKRQLRRLRELHLYSTWKKYQEAMKTSLGVPQCERDEGSLGKPLCPPEILSETLPGSVKKRVCFPSEDHLEEFIAEHLPEASNQSLLTVAHADTGIQTNGDLEDLEEHGPGQTVSEEATEVHMMEGDPDTLAELLIRDVLQELSSYNGEEEDPEEVKTSLGVPQRGDLEDLEEHVPGQTVSEEATGVHMMQVDPATPAKSDLEDLEEHVPGQTVSEEATGVHMMQVDPATLAKQLEDSTITGSHQQMSASPSSAPAEEATEKTKVEEEVKTRKPKKKTRKPSKKSRWNVLKCWDIFNIF

SEQ ID NO: 27916 - protein, 338 aa, Homo sapiens
MGCAYSCCLEVCCGEDEIVYPRMPGESTVCHREREKPITYHWYHWHPGHIYPRVASMEDYDEDLVQEASSEDVLGVHMVDKDTERDIEMKRQLRRLRELHLYSTWKKYQEAMKTSLGVPQCERDEGSLGKPLCPPEILSETLPGSVKKRVCFPSEDHLEEFIAEHLPEASNQSLLTVAHADTGIQTNGDLEDLEEHGPGQTVSEEATEVHMMEGDPDTLAELLIRDVLQELSSYNGEEEDPEEVKTSLGVPQRGDLEDLEEHVPGQTVSEEATGVHMMQVDPATPAKSDLEDLEEHVPGQTVSEEATGVHMMQVDPATLAKRTYSGIISLFRCEILVL

SEQ ID NO: 27917 - protein, 273 aa, Homo sapiens
MLGQLLPHTARGLGAAEMPGQGPGSDWTERSSSAEPPAVAGTEGGGGGSAGYSCYQNSKGSDRIKDGYKVNSHIAKLQELWKTPQNQTIHLSKSMMEASFFKHPDLTTGQKRYLCSIAKIYNANYLKMLMKRQYMHVLQHSSQKPGVLTHHRSRLSSRYSQKQHYPCTTWRHQLEREDSGSSDIAAASAPEMLIQHSLWRPVRNKEGIKTGYASKTRCKSLKIFRRPRKLFMQTVSSDDSESHMSEEKKEEDLLNNFMQSMSIEEQGEHLMLT

SEQ ID NO: 27918 - protein, 78 aa, Homo sapiens
MNNQYIRREVFCCGTCHELKSFWEKEISKQTFYRELEEDRQERSALKKLREEWRQRLERRLRMLDNPVEKEKPAHTAD

SEQ ID NO: 27919 - protein, 297 aa, Homo sapiens
MNEEEQFVNIDLNDDNICSVCKLGTDKETLSFCHICFELNIEGVPKSDLLHTKSLRGHKDCFEKYHLIANQGCPRSKLSKSTYEEVKTILSKKINWIVQYAQNKDLDSDSECSKNPQHHLFNFRHKPEEKLLPQFDSQVPKYSAKWIDGSAGGISNCTQRILEQRENTDFGLSMLQDSGATLCRNSVLWPHSHNQAQKKEETISSPEANVQTQHPHYSREELNSMTLGEVEQLNAKLLQQIQEVFEELTHQVQEKDSLASQLHVRHVAIEQLLKNCSKLPCLQVGRTGMKSHLPINN

SEQ ID NO: 27920 - protein, 221 aa, Homo sapiens
MNEEEQFVNIDLNDDNICSVCKLGTDKETLSFCHICFELNIEGVPKSDLLHTKSLRGHKDCFEKYHLIANQGCPRSKLSKSTYEEVKTILSKKINWIVQYAQNKDLDSDSECSKNPQHHLFNFRHKPEEKLLPQFDSQVPKYSAKWIDGSAGGISNCTQRILEQRENTDFGLSMLQDSGATLCRNSVLWPHSHNQAQKKEETISSPEANVQTQHPHYSREE

SEQ ID NO: 27921 - protein, 296 aa, Homo sapiens
MNEEEQFVNIDLNDDNICSVCKLGTDKETLSFCHICFELNIEGVPKSDLLHTKSLRGHKDCFEKYHLIANQGCPRSKLSKSTYEEVKTILSKKINWIVQYAQNKDLDSDSECSKNPQHHLFNFRHKPEEKLLPQFDSQVPKYSAKWIDGSAGGISNCTQRILEQRENTDFGLSMLQDSGATLCRNSVLWPHSHNQAQKKEETISSPEANVQTQHPHYSREELNSMTLGEVEQLNAKLLQQIQVFEELTHQVQEKDSLASQLHVRHVAIEQLLKNCSKLPCLQVGRTGMKSHLPINN

SEQ ID NO: 27922 - protein, 95 aa, Homo sapiens
MVGKNMSKSLTLKNPGRVAYDSGGIKMFWEKKIEHHARHLQNEDIRVRRSALNKLRVGWAEQLEGRNKMLQGPGRCPDRVPEATESLHTKDKKAA

SEQ ID NO: 27923 - protein, 195 aa, Homo sapiens
MNPVYSPGSSGVPYANAKGIGYPAGFPMGYAAAAPAYSPNMYPGANPTFQTGYTPGTPYKVSCSPTSGAVPPYSSSPNPYQTAVYPVRSAYPQQSPYAQQGTYYTQPLYAAPPHVIHHTTVVQPNGMPATVYPAPIPPPRGNGVTMGMVAGTTMAMSAGTLLTAHSPTPVAPHPVTVPTYRAPGTPTYSYVPPQW

SEQ ID NO: 27924 - protein, 123 aa, Homo sapiens
MNPVYSPGSSGVPYANAKGIGYPAGFPMGYAAAAPAYSPNMYPGANPTFQTGYTPGTPYKVSCSPTSGAVPPYSSSPQAVPMSPCADQWARQLGQISGQPFVLLAGLLCWPHGEALESLMDCN

SEQ ID NO: 27925 - protein, 354 aa, Homo sapiens
MDCSCVSDLLFAPPALPALWTPGFAFPDWAYKPESSPGSRQIQLWHFILELLQKEEYQGVIAWQGDYGEFVIKDPDEVARLWGIRKCKPHMNYDKLSRALRYYYNKRILHKTKGKRFTYKFNFSKVVLVNYPLLDMAAAATGSPLLLTPSPFGGAPGPDAPPLTPETLQTLFSAPRLGEPGARTPLFTSETDKLRLDSPFPFLGSGATSYSKPPGLLGPYGRAFPEYPWNFNPYLTGPFPKLPPSLYPPHFYPNPLASSLGHLPSSGAGGGPTATPLLASTGEGLGPERPSGLAAAPRLALPGAGGPEAALGGKEDSDSELEITDVSGCSSDSEGDEGLPAPPKAKAGKGGTGS

SEQ ID NO: 27926 - protein, 894 aa, Homo sapiens
MTAIKHALQRDIFTPNDERLLSIVNVCKAGKKKKNCFLCATVTTERPVQVKVVKVKKSDKGDFYKRQIAWALRDLAVVDAKDAIKENPEFDLHFEKIYKWVASSTAEKNAFISCIWKLNQRYLRKKIDFVNVSSQLLEESVPSGENQSVTGGDEEVVDEYQELNAREEQDIEIMMEGCEYAISNAEAFAEKLSRELQVLDGANIQSIMASEKQVNILMKLLDEALKEVDQIELKLSSYEEMLQSVKEQMDQISESNHLIHLSNTNNVKLLSEIEFLVNHMDLAKGHIKALQEGDLASSRGIEACTNAADALLQCMNVALRPGHDLLLAVKQQQQRFSDLRELFARRLASHLNNVFVQQGHDQSSTLAQHSVELTLPNHHPFHRDLLRYAKLMEWLKSTDYGKYEGLTKNYMDYLSRLYEREIKDFFEVAKIKMTGTTKESKKFATLPRKESAVKQETESLHGSSGKLTGSTSSLNKLSVQSSGNRRSQSSSLLDMGNMSASDLDVADRTKFDKIFEQVLSELEPLCLAEQDFISKFFKLQQHQSMPGTMAEAEDLDGGTLSRQHNCGTPLPVSSEKDMIRQMMIKIFRCIEPELNNLIALGDKIDSFNSLYMLVKMSHHVWTAQNVDPASFLSTTLGNVLVTVKRNFDKCISNQIRQMEEVKISKKSKVGILPFVAEFEEFAGLAESIFKNAERRGDLDKAYTKLIRGVFVNVEKVANESQKTPRDVVMMENFHHIFATLSRLKISCLEAEKKEAKQKYTDHLQSYVIYSLGQPLEKLNHFFEGVEARVAQGIREEEVSYQLAFNKQELRKVIKEYPGKEVKKGLDNLYKKVDKHLCEEENLLQVVWHSMQDEFIRQYKHFEGLIARCYPGSGVTMEFTIQDILDYCSSIAQSH

SEQ ID NO: 27927 - protein, 879 aa, Homo sapiens
MTAIKHALQRDIFTPNDERLLSIVNVCKAGKKKKNCFLCATVTTERPVQVKVVKVKKSDKGDFYKRQIAWALRDLAVVDAKDAIKENPEFDLHFEKIYKWVASSTAEKNAFISCIWKLNQRYLRKKIDFVNVSSQLLEESVPSGENQSVTGGDEEVVDEYQELNAREEQDIEIMMEGCEYAISNAEAFAEKLSRELQVLDGANIQSIMASEKQVNILMKLLDEALKEVDQIELKLSSYEEMLQSVKEQMDQISESNHLIHLSNTNNVKLLSEIEFLVNHMDLAKGHIKALQEGDLASSRGIEACTNAADALLQCMNVALRPGHDLLLAVKQQQQRFSDLRELFARRLASHLNNVFVQQGHDQSSTLAQHSVELTLPNHHPFHRDLLRYAKLMEWLKSTDYGKYEGLTKNYMDYLSRLYEREIKDFFEVAKIKMTGTTKESKKFGLHGSSGKLTGSTSSLNKLSVQSSGNRRSQSSSLLDMGNMSASDLDVADRTKFDKIFEQVLSELEPLCLAEQDFISKFFKLQQHQSMPGTMAEAEDLDGGTLSRQHNCGTPLPVSSEKDMIRQMMIKIFRCIEPELNNLIALGDKIDSFNSLYMLVKMSHHVWTAQNVDPASFLSTTLGNVLVTVKRNFDKCISNQIRQMEEVKISKKSKVGILPFVAEFEEFAGLAESIFKNAERRGDLDKAYTKLIRGVFVNVEKVANESQKTPRDVVMMENFHHIFATLSRLKISCLEAEKKEAKQKYTDHLQSYVIYSLGQPLEKLNHFFEGVEARVAQGIREEEVSYQLAFNKQELRKVIKEYPGKEVKKGLDNLYKKVDKHLCEEENLLQVVWHSMQDEFIRQYKHFEGLIARCYPGSGVTMEFTIQDILDYCSSIAQSH

SEQ ID NO: 27928 - protein, 922 aa, Homo sapiens
MIWLRNRRCLEPLQGTPKWVPVLGELQKTLQKGEYLPLRPLPMFESNFVQVTHQGGPVFVNHRTNRLAMGVAASLPGLVLPDILLIGQPAEDRDCSGLVLTRMIPLDLVHLCVHDLSAWRLKLRLVSGRQYYLALDAPDNEVGFLFHCWVRLINLLQEPAPTWTPRTTRTAPLDMPLAEAPASTWHLQDQPISRHAVRVAERNFPHKTVAAQRQRKAKALKRSFKSQAVGDSVPLIWSQLEHADVRKKPAEKKSHSDPRPDRTHTQIRLPEKTSITTWTIFSIISSTANQTQSSPKACTSASDEATGQGHVVESPSHCVSADSPDGFFLGSCSSLDPCLWHQDTEDLMDSGGSTLSSAASGLAPYPPAACLSTPYSSIPRGREKAGPMGSHQGPGPPPCQKAPSGLVTSCKAPFLVDQSQKLPAVPASSWKPPPGLAPPQKAPAASAPPRKAPAVPAPSQKAPAVPAPSQKAPAIPAPSRKASAASASPRKASAVPAPPQKTPPPSQKAPSVPTIPQKAVSPTAPKKKSLLLPAPSQKALPTSPTEYQMALSPPASRGKLPGDFDVLPTGIPGRAVLERSQSGGKPEPVVTVRTQETDVVEMTTQAKSPESPFTVTKKESKDILISQTKEVTLEAFRGQGKLEDWAHWAKLEERSPDLPGVRSKELEQRKRWVKAKELAVEGPSQEHSRPFSVEALTLTKLMITANSKEQPSKSALVSLPSWLLATPQASATSMMASVPSRPGQLSLLEGKPVVVREQPESHTWVKEGKRPWGEMKEQPWGEMKEPPWDPKGPPKVPFRSKPTSASLKREGISQAPIPLTASPWEDLRPSPLSETLISKMEATARASQQPKRVSQEPMRMPAQHPLATVGSSSEILLPMLLELETVRNTATKAEEIQEESGVLNLLPSLQHSQHSEWPDAGA

SEQ ID NO: 27929 - protein, 127 aa, Homo sapiens
MWRELRGCPGGDVETAQRLSQRRRGKSSEAVPEKTWRAQRMSQRRRGESSEAVPEKTWKELRNSETVPEKTWKQLRRCLQEDVERVQRLSLLLHLAVFLWIIIAINFSNSGVKSQSSTYLPSGKILK

SEQ ID NO: 27930 - protein, 464 aa, Homo sapiens
MMARRDPKSWAKRLVRAQTLQKQRRAPVGPRAPPPDEEDPRLKCKNCGAFGHTARSTRCPMKCWKAALVPATLGKKEGKENLKPWKPRVEANPGPLNKDKGEKEERPRQQDPQRKALLHMFSGKPPEKPLPNGKGSTESSDHLRVASGPMPVHTTSKRPRVDPVLADRSAAEMSGRGSVLASLSPLRKASLSSSSSLGPKERQTGAAADIPQPAVRHQGREPLLVVKPTHSRPEGGCREVPQAASKTHGLLQAARPQAQDKRPAVTSQPCPPAATHSLGLGSNLSFGPGAKRPAQAPIQACLNFPKKPRLGPFQIPESAIQGGELGAPENLQPPPAATELGPSTSPQMGRRTPAQVPSVDRQPPHSTPCLPTAQACTMSHHSAASHDGAQPLRVLFRRLENGRWSSSLLAAPSFHSPEKPGAFLAQSPHVSEKSEAPCVRVPPSVLYEDLQVSSSSEDSDSDLE

SEQ ID NO: 27931 - protein, 587 aa, Homo sapiens
MGWDLGTRLFQRQEQRSRLSRIWLEKTRVFLEGSTRTPALPHCLFWLLQVPSTQDPLFPGYGPQCPVDLAGPPCLRPLFGGLGGYWRALQRGREGRTMTSRASELSPGRSVTAGIIIVGDEILKGHTQDTNTFFLCRTLRSLGVQVCRVSVVPDEVATIAAEVTSFSNRFTHVLTAGGIGPTHDDVTFEAVAQAFGDELKPHPKLEAATKALGGEGWEKLSLVPSSARLHYGTDPCTGQPFRFPLVSVRNVYLFPGIPELLRRVLEGMKGLFQNPAVQFHSKELYVAADEASIAPILAEAQAHFGRRLGLGSYPDWGSNYYQVKLTLDSEEEGPLEECLAYLTARLPQGSLVPYMPNAVEQASEAVYKLAESGSSLGKKVAGALQTIETSLAQYSLTQLCVGFNGGKDCTALLHLFHAAVQRKLPDVPNPLQILYIRSISPFPELEQFLQDTIKRYNLQMLEAEGSMKQALGELQARHPQLEAVLMGTRRTDPYSCSLCPFSPTDPGWPAFMRINPLLDWTYRDIWDFLRQLFVPYCILYDRGYTSLGSRENTVRNPALKCLSPGGHPTYRPAYLLENEEEERNSRT

SEQ ID NO: 27932 - protein, 490 aa, Homo sapiens
MTSRASELSPGRSVTAGIIIVGDEILKGHTQDTNTFFLCRTLRSLGVQVCRVSVVPDEVATIAAEVTSFSNRFTHVLTAGGIGPTHDDVTFEAVAQAFGDELKPHPKLEAATKALGGEGWEKLSLVPSSARLHYGTDPCTGQPFRFPLVSVRNVYLFPGIPELLRRVLEGMKGLFQNPAVQFHSKELYVAADEASIAPILAEAQAHFGRRLGLGSYPDWGSNYYQVKLTLDSEEEGPLEECLAYLTARLPQGSLVPYMPNAVEQASEAVYKLAESGSSLGKKVAGALQTIETSLAQYSLTQLCVGFNGGKDCTALLHLFHAAVQRKLPDVPNPLQILYIRSISPFPELEQFLQDTIKRYNLQMLEAEGSMKQALGELQARHPQLEAVLMGTRRTDPYSCSLCPFSPTDPGWPAFMRINPLLDWTYRDIWDFLRQLFVPYCILYDRGYTSLGSRENTVRNPALKCLSPGGHPTYRPAYLLENEEEERNSRT

SEQ ID NO: 27933 - protein, 446 aa, Homo sapiens
MTSRASELSPGRSVTAGIIIVGDEILKGHTQDTNTFFLCRTLRSLGVQVCRVSVVPDEVATIAAEVTSFSNRFTHVLTAGGIGPTHDDVTFEAVAQAFGDELKPHPKLEAATKALGGEGWEKLSLVPSSARLHYGTDPCTGQPFRFPLVSVRNVYLFPGIPELLRRVLEGMKGLFQNPAVQFHSKELYVAADEASIAPILAEAQAHFGRRLGLGSYPDWGSNYYQVKLTLDSEEEGPLEECLAYLTARLPQGSLVPYMPNAVEQASEAVYKLAESGSSLGKKVAGALQTIETSLAQYSLTQLCVGFNGGKDCTALLHLFHAAVQRKLPDVPNPLQILYIRSISPFPELEQFLQDTIKRYNLQMLEAEGSMKQALGELQARHPQLEAVLMGTRRTDPYSCSLCPFSPTDPGWPAFMRINPLLDWTYRDIWDFLRQLFVPYCILYDRG

SEQ ID NO: 27934 - protein, 294 aa, Homo sapiens
MQPSSSTPPLHPYSTDGLIFPFNPQGHTQDTNTFFLCRTLRSLGVQVCRVSVVPDEVATIAAEVTSFSNRFTHVLTAGGIGPTHDDVTFEAVAQAFGDELKPHPKLEAATKALGGEGWEKLSLVPSSARLHYGTDPCTGQPFRFPLVSVRNVYLFPGIPELLRRVLEGMKGLFQNPAVQFHSKELYVAADEASIAPILAEAQAHFGRRLGLGSYPDWGSNYYQVKLTLDSEEEGPLEECLAYLTARLPQGSLVPYMPNAVEQASEAVYKLAESGRDLMEEGHYAQSHWWHPRSQ

SEQ ID NO: 27935 - protein, 338 aa, Homo sapiens
MQPSSSTPPLHPYSTDGLIFPFNPQGHTQDTNTFFLCRTLRSLGVQVCRVSVVPDEVATIAAEVTSFSNRFTHVLTAGGIGPTHDDVTFEAVAQAFGDELKPHPKLEAATKALGGEGWEKLSLVPSSARLHYGTDPCTGQPFRFPLVSVRNVYLFPGIPELLRRVLEGMKGLFQNPAVQFHSKELYVAADEASIAPILAEAQAHFGRRLGLGSYPDWGSNYYQVKLTLDSEEEGPLEECLAYLTARLPQGSLVPYMPNAVEQASEAVYKLAESGNYLMFQTPSRSCISAASPLSLSWNSFYRTLSREQAIPENQIASPPSEAKGAEEPWMGPFPGQQG

SEQ ID NO: 27936 - protein, 745 aa, Homo sapiens
MKETDREAVATAVQRVAGMLQRPDQLDKVEQYRRREARKKASVEARLKAAIQSQLDGVRTGLSQLHNALNDVKDIQQSLADVSKDWRQSINTIESLKDVKDAVVQHSQLAAAVENLKNIFSVPEIVRETQDLIEQGALLQAHRKLMDLECSRDGLMYEQYRMDSGNTRDMTLIHGYFGSTQGLSDELAKQLWMVLQRSLVTVRRDPTLLVSVVRIIEREEKIDRRILDRKKQTGFVPPGRPKNWKEKMFTILERTVTTRIEGTQADTRESDKMWLVRHLEIIRKYVLDDLIVAKNLMVQCFPPHYEIFKNLLNMYHQALSTRMQDLASEDLEANEIVSLLTWVLNTYTSTEMMRNVELAPEVDVGTLEPLLSPHVVSELLDTYMSTLTSNIIAWLRKALETDKKDWVKETEPEADQDGYYQTTLPAIVFQMFEQNLQVAAQISEDLKTKVLVLCLQQMNSFLSRYKDEAQLYKEEHLRNRQHPHCYVQYMIAIINNCQTFKESIVSLKRKYLKNEVEEGVSPSQPSMDGILDAIAKEGCSGLLEEVFLDLEQHLNELMTKKWLLGSNAVDIICVTVEDYFNDFAKIKKPYKKRMTAEAHRRVVVEYLRAVMQKRISFRSPEERKEGAEKMVREAEQLRFLFRKLASGFGEDVDGYCDTIVAVAEVIKLTDPSLLYLEVSTLVSKYPDIRDDHIGALLAVRGDASRDMKQTIMETLEQGPAQASPSYVPLFKDIVVPSLNVAKLLK

SEQ ID NO: 27937 - protein, 464 aa, Homo sapiens
MMACRDPKPGAKRLVRAQTLQKQRRAPVGPRAPPPDEEDPRLKCKNCGAFGHMARSTRCPMKCWKAALVPPTLGKKEGKENLKPWKPQVEANPGPLNKDKGEKEERPRQQDPQRKALLHIFSGKPPEKPLPNRKGSTESSVYLRVASGPMPVHTTSKRPRVDPVLADRSATEMSDRGSALASLSPLRKASLSSSSSLGPKERQTGAAADIPQPAVRHQGPEPLLVVKPTHSSPEGGCREVPQAASKTHGLLQAISPQAQDKRPAVTSQPCPPAATHSLGLGSNLSFGPGAKRPAQAPIQACLNFPKKPRLGPFQIPESAIQGGELGAPEYLQPPPATTELGPSTSPQMGRRTPAQVSSVDRQPPHSRPCLPTAQACTMSHHPATSHDGAQPLRVLFRRLENGRWSSSLLAAPSFHSPEKPGAFLAQSPHVSEKSEVPRVRVPPNVLYEDLQVSSSSEDSDSDLE

SEQ ID NO: 27938 - protein, 464 aa, Homo sapiens
MMARRDPKSWAKRLVRAQTLQKQRRAPVGPRAPPPDEEDPRLKCKNCGAFGHTARSTTCPMKCWKAALVPATLGKKEGKENLKPWKPRGEANPGPLNKDKGEKEERPRQQDPQRKALLHMFSGKPPEKPLPNGKGSTESSEHLRVASGPMPVHTTSKRPRVDPVLADRSATEMSGRGSVLASLSPLRKASLSSSSSLGPKERQTGAAADIPQPAFRHQGPEPLLVVKPTHSSPEGGCREVPQAASKTHGLLQAARPQAQDKRPAVTSQPCPPAATHSLGLGSNLSFGPGAKRPAQAPIQACLNFPKKPRLGPFQIPESAIQGGELGAPENLQPPPAATELGPSTSPQMGRRTPAQVPSVDWQPPHSTPCLPTAQACTMSHHPAAGHDGAQPLRVLFRRLENGRWSSSLLAAPSFHSPEKPGAFLAQSPHVSEKSEAPCVRVPPSVLYEDLQVSSSSEDSDSDLE

SEQ ID NO: 27939 - protein, 464 aa, Homo sapiens
MMARRDPTSWAKRLVRAQTLQKQRRAPVGPRAPPPDEEDPRLKCKNCGAFGHTARSTRCPMKCWKAALVPATLGKKEGKENLKPWKPGVEANPGPLNKDKGEKEERPRQQDPQRKALLHMFSGKPPEKPLPNGKGSTESSDYLRVARGPMPVHTTCKRPRMDPVLSGRSATEMSGRGSVLASLSPLRKASLSSSSSLGPKERQTGAAADIPRPAVRHQVHETLLVVEPTHSSPEGSCREVPQAASKTHGLLQAVRTQAQDKRPAVTSQPCPSAATHSLGLGSNLSFGSGAKRPAQAPIQACLNFPKKPRLGPFQIPESTIQGGELGAPENLQPPPAATELGPSRSPQMGRRTPAQVPSVERQPPHRRPCLPTAQACTMSHHPAASHDGAQPLRVLFRRLENGRWSSSLLAAPSFHSPEKPGAFLAQSPHVSEKSEAPCVRVPPSVLYEDLQVSSSSEDSDSDLE

SEQ ID NO: 27940 - protein, 149 aa, Homo sapiens
MNLYLHPKLWPQLAGTKTLHVADAQRVRKITVHDGIWDAELPRAKRNHSYHLRYHGSSYSRCFLERYRCKTIGVFRRSNQPDCLETRSEKAKNRDGVVQEKSVRTLFSECVNQCDIRRRPTRFLRMFYHQKHFQLGLKGTETEKNERRL

SEQ ID NO: 27941 - protein, 735 aa, Homo sapiens
MIPPQEASARRREIEDKLKQEEETLSFIRDSLEKSDQLTKNMVSILSSFESRLMKLENSIIPVHKQTENLQRLQENVEKTLSCLDHVISYYHVASDTEKIIREGPTGRLEEYLGSMAKIQKAVEYFQDNSPDSPELNKVKLLFERGKEALESEFRSLMTRHSKVVSPVLILDLISGDDDLEAQEDVTLEHLPESVLQDVIRISRWLVEYGRNQDFMNVYYQIRSSQLDRSIKGLKEHFHKSSSSSGVPYSPAIPNKRKDTPTKKPVKRPGTIRKAQNLLKQYSQHGLDGKKGGSNLIPLEGLLPCTPRGGLPGPWINAACVCAADISPGHEHDFRVKHLSEALNDKHGPLAGRDDMLDVETDAYIHCVSAFVKLAQSEYQLLADIIPEHHQKKTFDSLIQDALDGLMLEGENIVSAARKAIVRHDFSTVLTVFPILRHLKQTKPEFDQVLQGTAASTKNKLPGLITSMETIGAKALEDFADNIKNDPDKEYNMPKDGTVHELTSNAILFLQQLLDFQETAGAMLASQETSSSATSYSSEFSKRLLSTYICKVLGNLQLNLLSKSKVYEDPALSAIFLHNNYNYILKSLEKSELIQLVAVTQKTAERSYREHIEQQIQTYQRSWLKVTDYIAEKNLPVFQPGVKLRDKERQIIKERFKGFNDGLEELCKIQKAWAIPDTEQRDRIRQAQKTIVKETYGAFLQKFGSVPFTKNPEKYIKYGVEQVGDMIDRLFDTSA

SEQ ID NO: 27942 - protein, 684 aa, Homo sapiens
MIPPQEASARRREIEDKLKQEEETLSFIRDSLEKSDQLTKNMVSILSSFESRLMKLENSIIPVHKQTENLQRLQENVEKTLSCLDHVISYYHVASDTEKIIREGPTGRLEEYLGSMAKIQKAVEYFQDNSPDSPELNKVKLLFERGKEALESEFRSLMTRHSKVVSPVLILDLISGDDDLEAQEDVTLEHLPESVLQDVIRISRWLVEYGRNQDFMNVYYQIRSSQLDRSIKGLKEHFHKSSSSSGVPYSPAIPNKRKDTPTKKPVKRPGTIRKAQNLLKQYSQHGLDGKKGGSNLIPLEGRDDMLDVETDAYIHCVSAFVKLAQSEYQLLADIIPEHHQKKTFDSLIQDALDGLMLEGENIVSAARKAIVRHDFSTVLTVFPILRHLKQTKPEFDQVLQGTAASTKNKLPGLITSMETIGAKALEDFADNIKNDPDKEYNMPKDGTVHELTSNAILFLQQLLDFQETAGAMLASQETSSSATSYSSEFSKRLLSTYICKVLGNLQLNLLSKSKVYEDPALSAIFLHNNYNYILKSLEKSELIQLVAVTQKTAERSYREHIEQQIQTYQRSWLKVTDYIAEKNLPVFQPGVKLRDKERQIIKERFKGFNDGLEELCKIQKAWAIPDTEQRDRIRQAQKTIVKETYGAFLQKFGSVPFTKNPEKYIKYGVEQVGDMIDRLFDTSA

SEQ ID NO: 27943 - protein, 653 aa, Homo sapiens
MIPPQEASARRREIEDKLKQEEETLSFIRDSLEKSDQLTKNMVSILSSFESRLMKLENSIIPVHKQTENLQRLQENVEKTLSCLDHVISYYHVASDTEKIIREGPTGRLEEYLGSMAKIQKAVEYFQDNSPDSPELNKVKLLFERGKEALESEFRSLMTRHSKVVSPVLILDLISGDDDLEAQEDVTLEHLPESVLQDVIRISRWLVEYGRNQDFMNVYYQIRSSQLDRSIKGLKEHFHKSSSSSGVPYSPAIPNKRKDTPTKKPVKRPGRDDMLDVETDAYIHCVSAFVKLAQSEYQLLADIIPEHHQKKTFDSLIQDALDGLMLEGENIVSAARKAIVRHDFSTVLTVFPILRHLKQTKPEFDQVLQGTAASTKNKLPGLITSMETIGAKALEDFADNIKNDPDKEYNMPKDGTVHELTSNAILFLQQLLDFQETAGAMLASQETSSSATSYSSEFSKRLLSTYICKVLGNLQLNLLSKSKVYEDPALSAIFLHNNYNYILKSLEKSELIQLVAVTQKTAERSYREHIEQQIQTYQRSWLKVTDYIAEKNLPVFQPGVKLRDKERQIIKERFKGFNDGLEELCKIQKAWAIPDTEQRDRIRQAQKTIVKETYGAFLQKFGSVPFTKNPEKYIKYGVEQVGDMIDRLFDTSA

SEQ ID NO: 27944 - protein, 283 aa, Homo sapiens
MIPPQEASARRREIEDKLKQEEETLSFIRDSLEKSDQLTKNMVSILSSFESRLMKLENSIIPVHKQTENLQRLQENVEKTLSCLDHVISYYHVASDTEKIIREGPTGRLEEYLGSMAKIQKAVEYFQDNSPDSPELNKVKLLFERGKEALESEFRSLMTRHSKVVSPVLILDLISGDDDLEAQEDVTLEHLPESVLQDVIRISRWLVEYGRNQDFMNVYYQIRSSQLDRSIKGLKEHFHKSSSSSGVPYSPAIPNKRKDTPTKKPVKRPGEPPSWPISATARG

SEQ ID NO: 27945 - protein, 676 aa, Homo sapiens
MIPPQEASARRREIEDKLKQEEETLSFIRDSLEKSDQLTKNMVSILSSFESRLMKLENSIIPVHKQTENLQRLQENVEKTLSCLDHVISYYHVASDTEKIIREGPTGRLEEYLGSMAKIQKAVEYFQDNSPDSPELNKVKLLFERGKEALESEFRSLMTRHSKVVSPVLILDLISGDDDLEAQEDVTLEHLPESVLQDVIRISRWLVEYGRNQDFMNVYYQIRSSQLDRSIKGLKEHFHKSSSSSGVPYSPAIPNKRKDTPTKKPVKRPGHEHDFRVKHLSEALNDKHGPLAGRDDMLDVETDAYIHCVSAFVKLAQSEYQLLADIIPEHHQKKTFDSLIQDALDGLMLEGENIVSAARKAIVRHDFSTVLTVFPILRHLKQTKPEFDQVLQGTAASTKNKLPGLITSMETIGAKALEDFADNIKNDPDKEYNMPKDGTVHELTSNAILFLQQLLDFQETAGAMLASQETSSSATSYSSEFSKRLLSTYICKVLGNLQLNLLSKSKVYEDPALSAIFLHNNYNYILKSLEKSELIQLVAVTQKTAERSYREHIEQQIQTYQRSWLKVTDYIAEKNLPVFQPGVKLRDKERQIIKERFKGFNDGLEELCKIQKAWAIPDTEQRDRIRQAQKTIVKETYGAFLQKFGSVPFTKNPEKYIKYGVEQVGDMIDRLFDTSA

SEQ ID NO: 27946 - protein, 707 aa, Homo sapiens
MIPPQEASARRREIEDKLKQEEETLSFIRDSLEKSDQLTKNMVSILSSFESRLMKLENSIIPVHKQTENLQRLQENVEKTLSCLDHVISYYHVASDTEKIIREGPTGRLEEYLGSMAKIQKAVEYFQDNSPDSPELNKVKLLFERGKEALESEFRSLMTRHSKVVSPVLILDLISGDDDLEAQEDVTLEHLPESVLQDVIRISRWLVEYGRNQDFMNVYYQIRSSQLDRSIKGLKEHFHKSSSSSGVPYSPAIPNKRKDTPTKKPVKRPGTIRKAQNLLKQYSQHGLDGKKGGSNLIPLEGHEHDFRVKHLSEALNDKHGPLAGRDDMLDVETDAYIHCVSAFVKLAQSEYQLLADIIPEHHQKKTFDSLIQDALDGLMLEGENIVSAARKAIVRHDFSTVLTVFPILRHLKQTKPEFDQVLQGTAASTKNKLPGLITSMETIGAKALEDFADNIKNDPDKEYNMPKDGTVHELTSNAILFLQQLLDFQETAGAMLASQETSSSATSYSSEFSKRLLSTYICKVLGNLQLNLLSKSKVYEDPALSAIFLHNNYNYILKSLEKSELIQLVAVTQKTAERSYREHIEQQIQTYQRSWLKVTDYIAEKNLPVFQPGVKLRDKERQIIKERFKGFNDGLEELCKIQKAWAIPDTEQRDRIRQAQKTIVKETYGAFLQKFGSVPFTKNPEKYIKYGVEQVGDMIDRLFDTSA

SEQ ID NO: 27947 - protein, 530 aa, Homo sapiens
MDIKNSPSSLNSPSSYNCSQSILPLEHGSIYIPSSYVDSHHEYPAMTFYSPAVMNYSIPSNVTNLEGGPGRQTTSPNVLWPTPGHLSPLVVHRQLSHLYAEPQKSPWCEARSLEHTLPVNRETLKRKVSGNRCASPVTGPGSKRDAHFCAVCSDYASGYHYGVWSCEGCKAFFKRSIQGHNDYICPATNQCTIDKNRRKSCQACRLRKCYEVGMVKCGSRRERCGYRLVRRQRSADEQLHCAGKAKRSGGHAPRVRELLLDALSPEQLVLTLLEAEPPHVLISRPSAPFTEASMMMSLTKLADKELVHMISWAKKIPGFVELSLFDQVRLLESCWMEVLMMGLMWRSIDHPGKLIFAPDLVLDRDEGKCVEGILEIFDMLLATTSRFRELKLQHKEYLCVKAMILLNSSMYPLVTATQDADSSRKLAHLLNAVTDALVWVIAKSGISSQQQSMRLANLLMLLSHVRHASNKGMEHLLNMKCKNVVPVYDLLLEMLNAHVLRGCKSSITGSECSPAEDSKSKEGSQNPQSQ

SEQ ID NO: 27948 - protein, 495 aa, Homo sapiens
MDIKNSPSSLNSPSSYNCSQSILPLEHGSIYIPSSYVDSHHEYPAMTFYSPAVMNYSIPSNVTNLEGGPGRQTTSPNVLWPTPGHLSPLVVHRQLSHLYAEPQKSPWCEARSLEHTLPVNRETLKRKVSGNRCASPVTGPGSKRDAHFCAVCSDYASGYHYGVWSCEGCKAFFKRSIQGHNDYICPATNQCTIDKNRRKSCQACRLRKCYEVGMVKCGSRRERCGYRLVRRQRSADEQLHCAGKAKRSGGHAPRVRELLLDALSPEQLVLTLLEAEPPHVLISRPSAPFTEASMMMSLTKLADKELVHMISWAKKIPGFVELSLFDQVRLLESCWMEVLMMGLMWRSIDHPGKLIFAPDLVLDRDEGKCVEGILEIFDMLLATTSRFRELKLQHKEYLCVKAMILLNSSMYPLVTATQDADSSRKLAHLLNAVTDALVWVIAKSGISSQQQSMRLANLLMLLSHVRHARAEKASQTLTSFGMKMETLLPEATMEQ

SEQ ID NO: 27949 - protein, 323 aa, Homo sapiens
MDIKNSPSSLNSPSSYNCSQSILPLEHGSIYIPSSYVDSHHEYPAMTFYSPAVMNYSIPSNVTNLEGGPGRQTTSPNVLWPTPGHLSPLVVHRQLSHLYAEPQKSPWCEARSLEHTLPVNRETLKRKVSGNRCASPVTGPGSKRDAHFCAVCSDYASGYHYGVWSCEGCKAFFKRSIQGHNDYICPATNQCTIDKNRRKSCQACRLRKCYEVGMVKCGSRRERCGYRLVRRQRSADEQLHCAGKAKRSGGHAPRVRELLLDALSPEQLVLTLLEAEPPHVLISRPSAPFTEASMMMSLTKLADKELVHMISWAKKIPGMRGNA

SEQ ID NO: 27950 - protein, 513 aa, Homo sapiens
MDIKNSPSSLNSPSSYNCSQSILPLEHGSIYIPSSYVDSHHEYPAMTFYSPAVMNYSIPSNVTNLEGGPGRQTTSPNVLWPTPGHLSPLVVHRQLSHLYAEPQKSPWCEARSLEHTLPVNRETLKRKVSGNRCASPVTGPGSKRDAHFCAVCSDYASGYHYGVWSCEGCKAFFKRSIQGHNDYICPATNQCTIDKNRRKSCQACRLRKCYEVGMVKCGSRRERCGYRLVRRQRSADEQLHCAGKAKRSGGHAPRVRELLLDALSPEQLVLTLLEAEPPHVLISRPSAPFTEASMMMSLTKLADKELVHMISWAKKIPGFVELSLFDQVRLLESCWMEVLMMGLMWRSIDHPGKLIFAPDLVLDRDEGKCVEGILEIFDMLLATTSRFRELKLQHKEYLCVKAMILLNSSMYPLVTATQDADSSRKLAHLLNAVTDALVWVIAKSGISSQQQSMRLANLLMLLSHVRHASSLSLSWRLFMLREASCHGVRQTPGGAHMSVSRSRSFEACQQPRE

SEQ ID NO: 27951 - protein, 481 aa, Homo sapiens
MDIKNSPSSLNSPSSYNCSQSILPLEHGSIYIPSSYVDSHHEYPAMTFYSPAVMNYSIPSNVTNLEGGPGRQTTSPNVLWPTPGHLSPLVVHRQLSHLYAEPQKSPWCEARSLEHTLPVNRETLKRKVSGNRCASPVTGPGSKRDAHFCAVCSDYASGYHYGVWSCEGCKAFFKRSIQGHNDYICPATNQCTIDKNRRKSCQACRLRKCYEVGMVKCGSRRERCGYRLVRRQRSADEQLHCAGKAKRSGGHAPRVRELLLDALSPEQLVLTLLEAEPPHVLISRPSAPFTEASMMMSLTKLADKELVHMISWAKKIPGFVELSLFDQVRLLESCWMEVLMMGLMWRSIDHPGKLIFAPDLVLDRDEGKCVEGILEIFDMLLATTSRFRELKLQHKEYLCVKAMILLNSSMYPLVTATQDADSSRKLAHLLNAVTDALVWVIAKSGISSQQQSMRLANLLMLLSHVRHARWGEKQFIHLKLS

SEQ ID NO: 27952 - protein, 472 aa, Homo sapiens
MDIKNSPSSLNSPSSYNCSQSILPLEHGSIYIPSSYVDSHHEYPAMTFYSPAVMNYSIPSNVTNLEGGPGRQTTSPNVLWPTPGHLSPLVVHRQLSHLYAEPQKSPWCEARSLEHTLPVNRETLKRKVSGNRCASPVTGPGSKRDAHFCAVCSDYASGYHYGVWSCEGCKAFFKRSIQGHNDYICPATNQCTIDKNRRKSCQACRLRKCYEVGMVKCGSRRERCGYRLVRRQRSADEQLHCAGKAKRSGGHAPRVRELLLDALSPEQLVLTLLEAEPPHVLISRPSAPFTEASMMMSLTKLADKELVHMISWAKKIPGFVELSLFDQVRLLESCWMEVLMMGLMWRSIDHPGKLIFAPDLVLDRDEGKCVEGILEIFDMLLATTSRFRELKLQHKEYLCVKAMILLNSSMYPLVTATQDADSSRKLAHLLNAVTDALVWVIAKSGISSQQQSMRLANLLMLLSHVRHARYAP

SEQ ID NO: 27953 - protein, 439 aa, Homo sapiens
MDIKNSPSSLNSPSSYNCSQSILPLEHGSIYIPSSYVDSHHEYPAMTFYSPAVMNYSIPSNVTNLEGGPGRQTTSPNVLWPTPGHLSPLVVHRQLSHLYAEPQKSPWCEARSLEHTLPVNRETLKRKVSGNRCASPVTGPGSKRDAHFCAVCSDYASGYHYGVWSCEGCKAFFKRSIQGHNDYICPATNQCTIDKNRRKSCQACRLRKCYEVGMVKCGSRRERCGYRLVRRQRSADEQLHCAGKAKRSGGHAPRVRELLLDALSPEQLVLTLLEAEPPHVLISRPSAPFTEASMMMSLTKLADKELVHMISWAKKIPGMYPLVTATQDADSSRKLAHLLNAVTDALVWVIAKSGISSQQQSMRLANLLMLLSHVRHASNKGMEHLLNMKCKNVVPVYDLLLEMLNAHVLRGCKSSITGSECSPAEDSKSKEGSQNPQSQ

SEQ ID NO: 27954 - protein, 375 aa, Homo sapiens
MDIKNSPSSLNSPSSYNCSQSILPLEHGSIYIPSSYVDSHHEYPAMTFYSPAVMNYSIPSNVTNLEGGPGRQTTSPNVLWPTPGHLSPLVVHRQLSHLYAEPQKSPWCEARSLEHTLPVNRETLKRKVSGNRCASPVTGPGSKRDAHFCAVCSDYASGYHYGVWSCEGCKAFFKRSIQGHNDYICPATNQCTIDKNRRKSCQACRLRKCYEVGMVKCGSRRERCGYRLVRRQRSADEQLHCAGKAKRSGGHAPRVRELLLDALSPEQLVLTLLEAEPPHVLISRPSAPFTEASMMMSLTKLADKELVHMISWAKKIPGFVELSLFDQVRLLESCWMEVLMMGLMWRSIDHPGKLIFAPDLVLDRYVPSGHSDPGC

SEQ ID NO: 27955 - protein, 474 aa, Homo sapiens
MDIKNSPSSLNSPSSYNCSQSILPLEHGSIYIPSSYVDSHHEYPAMTFYSPAVMNYSIPSNVTNLEGGPGRQTTSPNVLWPTPGHLSPLVVHRQLSHLYAEPQKSPWCEARSLEHTLPVNRETLKRKVSGNRCASPVTGPGSKRDAHFCAVCSDYASGYHYGVWSCEGCKAFFKRSIQGHNDYICPATNQCTIDKNRRKSCQACRLRKCYEVGMVKCGSRRERCGYRLVRRQRSADEQLHCAGKAKRSGGHAPRVRELLLDALSPEQLVLTLLEAEPPHVLISRPSAPFTEASMMMSLTKLADKELVHMISWAKKIPGFVELSLFDQVRLLESCWMEVLMMGLMWRSIDHPGKLIFAPDLVLDRDEGKCVEGILEIFDMLLATTSRFRELKLQHKEYLCVKAMILLNSSMYPLVTATQDADSSRKLAHLLNAVTDALVWVIAKSGISSQQQSMRLANLLMLLSHVRHARSCVYK

SEQ ID NO: 27956 - protein, 607 aa, Homo sapiens
MAFRRQVKNFVKNYSDAEIKVREATSNDPWGPSSSLMLDISDLTFNTISLSEIMNMLWHRLNDHGKNWRHVYKSLTLMDYLIKNGSKKVIQHCREGFCNLQTLKDFQHIDEAGKDQGYYIREKSKQVITLLMDEPLLCKEREVACRTRQRTSHSILFSKRQLGSSNSLTACTSAPTPDISASEKKYKLPKFGRLHNKRNVCKAGLKQEHCQDVHLPTETMLSQETLPLKIHGWKSTEDLMTFLDDDPELPLLATPPSIVSPITCLSEAEEVCNLSGADAVPTLSENSPSGQRDVSLDKRSDGIFTNTVTENLLETPLEKQSAAEGLKTLTILPACWSSKEEFISPDLRVSKSDSTFHNQASVETLCLSPSFKIFDRVKEIVINKAYQKPAQSSIQMDDKILKTTTRVSTASEGASSFSPLSMSSPDLASPEKSAHLLSPILAGPSFWTLSHQQLSSTSFKDEDKTAKLHHSFASRGPVSSDVEENDSLNLLGILPNNSDSAKKNISHISSSHWGEFSTQNVDQFIPLSCSGFQSTKDFPQEPEAKNSISVLLREVKRAIARLHEDLSTVIQELNVINNILMSMSLNSSQISQSSQVPQSSEGSSDQI

SEQ ID NO: 27957 - protein, 348 aa, Homo sapiens
MNMTQARVLVAAVVGLVAVLLYASIHKIEEGHLAVYYRGGALLTSPSGPGYHIMLPFITTFRSVQTTLQTDEVKNVPCGTSGGVMIYIDRIEVVNMLAPYAVFDIVRNYTADYDKTLIFNKIHHELNQFCSAHTLQEVYIELFDQIDENLKQALQKDLNLMAPGLTIQAVRVTKPKIPEAIRRNFELMEAEKTKLLIAAQKQKVVEKEAETERKKAVIEAEKIAQVAKIRFQQKVMEKETEKRISEIEDAAFLAREKAKADAEYYAAHKYATSNKHKLTPEYLELKKYQAIASNSKIYFGSNIPNMFVDSSCALKYSDIRTGRESSLPSKEALEPSGENVIQNKESTG

SEQ ID NO: 27958 - protein, 272 aa, Homo sapiens
MPGDHRRIRGPEESQPPQLYAADEEEAPGTRDPTRLRPVYARAGLLSQAKGSAYLEAGGTKVLCAVSGPRQAEGGERGGGPAGAGGEAPAALRGRLLCDFRRAPFAGRRRRAPPGGCEERELALALQEALEPAVRLGRYPRAQLEVSALLLEDGGSALAAALTAAALALADAGVEMYDLVVGCGLSLAPGPAPTWLLDPTRLEEERAAAGLTVALMPVLNQVAGLLGSGEGGLTESWAEAVRLGLEGCQRLYPVLQQSLVRAARRRGAAAQP

SEQ ID NO: 27959 - protein, 443 aa, Homo sapiens
MAAHRKHVFVEKVLQRLFPPVPSGQGKREPQTLAVQNPPKKVTSEKVSQKHAEPLTDTGSETPTARRLYTASGPPEGYVPCWPEPSSCGSPENASSGDDTEDQDPHDQPKRRRIRKHKSKKKFKNPNNVLIEQAELEKQQSLLQEKSQRQHTDGTTISKNKKRKLKKKQQIKRKKAAGLAAKAAGVSFMYQPEDSSNEGEGVGEACEEDGVDTSEEDPTLAGEEDVKDTREEDGADASEEDLTRARQEEGADASEEDPTPAGEEDVKDAREEDGVDTIEEDLTRAGEEDGKDTREEDGADASEEDPTWAGEEEGADSGEEDGADASEEDDTITNEKAHSILNFLKSTQEMYFYDGVSRDAASAALADAAEELLDRLASHSMLPSDVSILYHMKTLLLLQDTERLKHALEMFPEHCTMPPDHARVISAFFSYWITHILPEKSSD

SEQ ID NO: 27960 - protein, 195 aa, Homo sapiens
MAPPVRYCIPGERLCNLEEGSPGSGTYTRHGYIFSSLAGCLMKSSENGALPVVSVVRETESQLLPDVGAIVTCKVSSINSRFAKVHILYVGSMPLKNSFRGTIRKEDVRATEKDKVEIYKSFRPGDIVLAKVISLGDAQSNYLLTTAENELGVVVAHSESGIQMVPISWCEMQCPKTHTKEFRKVARVQPEFLQT

SEQ ID NO: 27961 - protein, 2414 aa, Homo sapiens
MAENVVEPGPPSAKRPKLSSPALSASASDGTDFGSLFDLEHDLPDELINSTELGLTNGGDINQLQTSLGMVQDAASKHKQLSELLRSGSSPNLNMGVGGPGQVMASQAQQSSPGLGLINSMVKSPMTQAGLTSPNMGMGTSGPNQGPTQSTGMMNSPVNQPAMGMNTGMNAGMNPGMLAAGNGQGIMPNQVMNGSIGAGRGRQNMQYPNPGMGSAGNLLTEPLQQGSPQMGGQTGLRGPQPLKMGMMNNPNPYGSPYTQNPGQQIGASGLGLQIQTKTVLSNNLSPFAMDKKAVPGGGMPNMGQQPAPQVQQPGLVTPVAQGMGSGAHTADPEKRKLIQQQLVLLLHAHKCQRREQANGEVRQCNLPHCRTMKNVLNHMTHCQSGKSCQVAHCASSRQIISHWKNCTRHDCPVCLPLKNAGDKRNQQPILTGAPVGLGNPSSLGVGQQSAPNLSTVSQIDPSSIERAYAALGLPYQVNQMPTQPQVQAKNQQNQQPGQSPQGMRPMSNMSASPMGVNGGVGVQTPSLLSDSMLHSAINSQNPMMSENASVPSLGPMPTAAQPSTTGIRKQWHEDITQDLRNHLVHKLVQAIFPTPDPAALKDRRMENLVAYARKVEGDMYESANNRAEYYHLLAEKIYKIQKELEEKRRTRLQKQNMLPNAAGMVPVSMNPGPNMGQPQPGMTSNGPLPDPSMIRGSVPNQMMPRITPQSGLNQFGQMSMAQPPIVPRQTPPLQHHGQLAQPGALNPPMGYGPRMQQPSNQGQFLPQTQFPSQGMNVTNIPLAPSSGQAPVSQAQMSSSSCPVNSPIMPPGSQGSHIHCPQLPQPALHQNSPSPVPSRTPTPHHTPPSIGAQQPPATTIPAPVPTPPAMPPGPQSQALHPPPRQTPTPPTTQLPQQVQPSLPAAPSADQPQQQPRSQQSTAASVPTPTAPLLPPQPATPLSQPAVSIEGQVSNPPSTSSTEVNSQAIAEKQPSQEVKMEAKMEVDQPEPADTQPEDISESKVEDCKMESTETEERSTELKTEIKEEEDQPSTSATQSSPAPGQSKKKIFKPEELRQALMPTLEALYRQDPESLPFRQPVDPQLLGIPDYFDIVKSPMDLSTIKRKLDTGQYQEPWQYVDDIWLMFNNAWLYNRKTSRVYKYCSKLSEVFEQEIDPVMQSLGYCCGRKLEFSPQTLCCYGKQLCTIPRDATYYSYQNRYHFCEKCFNEIQGESVSLGDDPSQPQTTINKEQFSKRKNDTLDPELFVECTECGRKMHQICVLHHEIIWPAGFVCDGCLKKSARTRKENKFSAKRLPSTRLGTFLENRVNDFLRRQNHPESGEVTVRVVHASDKTVEVKPGMKARFVDSGEMAESFPYRTKALFAFEEIDGVDLCFFGMHVQEYGSDCPPPNQRRVYISYLDSVHFFRPKCLRTAVYHEILIGYLEYVKKLGYTTGHIWACPPSEGDDYIFHCHPPDQKIPKPKRLQEWYKKMLDKAVSERIVHDYKDIFKQATEDRLTSAKELPYFEGDFWPNVLEESIKELEQEEEERKREENTSNESTDVTKGDSKNAKKKNNKKTSKNKSSLSRGNKKKPGMPNVSNDLSQKLYATMEKHKEVFFVIRLIAGPAANSLPPIVDPDPLIPCDLMDGRDAFLTLARDKHLEFSSLRRAQWSTMCMLVELHTQSQDRFVYTCNECKHHVETRWHCTVCEDYDLCITCYNTKNHDHKMEKLGLGLDDESNNQQAAATQSPGDSRRLSIQRCIQSLVHACQCRNANCSLPSCQKMKRVVQHTKGCKRKTNGGCPICKQLIALCCYHAKHCQENKCPVPFCLNIKQKLRQQQLQHRLQQAQMLRRRMASMQRTGVVGQQQGLPSPTPATPTTPTGQQPTTPQTPQPTSQPQPTPPNSMPPYLPRTQAAGPVSQGKAAGQVTPPTPPQTAQPPLPGPPPAAVEMAMQIQRAAETQRQMAHVQIFQRPIQHQMPPMTPMAPMGMNPPPMTRGPSGHLEPGMGPTGMQQQPPWSQGGLPQPQQLQSGMPRPAMMSVAQHGQPLNMAPQPGLGQVGISPLKPGTVSQQALQNLLRTLRSPSSPLQQQQVLSILHANPQLLAAFIKQRAAKYANSNPQPIPGQPGMPQGQPGLQPPTMPGQQGVHSNPAMQNMNPMQAGVQRAGLPQQQPQQQLQPPMGGMSPQAQQMNMNHNTMPSQFRDILRRQQMMQQQQQQGAGPGIGPGMANHNQFQQPQGVGYPPQQQQRMQHHMQQMQQGNMGQIGQLPQALGAEAGASLQAYQQRLLQQQMGSPVQPNPMSPQQHMLPNQAQSPHLQGQQIPNSLSNQVRSPQPVPSPRPQSQPPHSSPSPRMQPQPSPHHVSPQTSSPHPGLVAAQANPMEQGHFASPDQNSMLSQLASNPGMANLHGASATDLGLSTDNSDLNSNLSQSTLDIH

SEQ ID NO: 27962 - protein, 390 aa, Homo sapiens
MSVRVARVAWVRGLGASYRRGASSFPVPPPGAQGVAELLRDATGAEEEAPWAATERRMPGQCSVLLFPGQGSQVVGMGRGLLNYPRVRELYAAARRVLGYDLLELSLHGPQETLDRTVHCQPAIFVASLAAVEKLHHLQPSVIENCVAAAGFSVGEFAALVFAGAMEFAEGLYAVKIRAEAMQEASEAVPSGMLSVLGQPQSKFNFACLEAREHCKSLGIENPVCEVSNYLFPDCRVISGHQEALRFLQKNSSKFHFRRTRMLPVSGAFHTRLMEPAVEPLTQALKAVDIKKPLVSVYSNVHAHRYRHPGHIHKLLAQQLVSPVKWEQTMHAIYERKKGRGFPQTFEVGPGRQLGAILKSCNMQAWKSYSAVDVLQTLEHVDLDPQEPPR

SEQ ID NO: 27963 - protein, 180 aa, Homo sapiens
MSVRVARVAWVRGLGASYRRGASSFPVPPPGAQGVAELLRDATGAEEEAPWAATERRMPGQCSVLLFPGQGSQVVGMGRGLLNYPRVRELYAAARRVLGYDLLELSLHGPQETLDRTVHCQPAIFVASLAAVEKLHHLQPSVIENCVAAAGFSVGEFAALVFAGAMEFAEGSTVSPEEFL

SEQ ID NO: 27964 - protein, 496 aa, Homo sapiens
MRALRRLIQGRILLLTICAAGIGGTFQFGYNLSIINAPTLHIQEFTNETWQARTGEPLPDHLVLLMWSLIVSLYPLGGLFGALLAGPLAITLGRKKSLLVNNIFVVSAAILFGFSRKAGSFEMIMLGRLLVGVNAGVSMNIQPMYLGESAPKELRGAVAMSSAIFTALGIVMGQVVGLRELLGGPQAWPLLLASCLVPGALQLASLPLLPESPRYLLIDCGDTEACLAALRRLRGSGDLAGELEELEEERAACQGCRARRPWELFQHRALRRQVTSLVVLGSAMELCGNDSVYAYASSVFRKAGVPEAKIQYAIIGTGSCELLTAVVSCVVIERVGRRVLLIGGYSLMTCWGSIFTVALCLQSSFPWTLYLAMACIFAFILSFGIGPAGVTGILATELFDQMARPAACMVCGALMWIMLILVGLGFPFIMEALSHFLYVPFLGVCVCGAIYTGLFLPETKGKTFQEISKELHRLNFPRRAQGPTWRSLEVIQSTEL

SEQ ID NO: 27965 - protein, 242 aa, Homo sapiens
MLHALLRSRMIQGRILLLTICAAGIGGTFQFGYNLSIINAPTLHIQEFTNETWQARTGEPLPDHLVLLMWSLIVSLYPLGGLFGALLAGPLAITLGRKKSLLVNNIFVVSAAILFGFSRKAGSFEMIMLGRLLVGVNAGVSMNIQPMYLGESAPKELRGAVAMSSAIFTALGIVMGQVVGLSTTAATGLRGLGRGAGGAGGGARCLPGLPCPAPMGAVPASGPEETGDKPRGSGQCHGALRE

SEQ ID NO: 27966 - protein, 499 aa, Homo sapiens
MLHALLRSRMIQGRILLLTICAAGIGGTFQFGYNLSIINAPTLHIQEFTNETWQARTGEPLPDHLVLLMWSLIVSLYPLGGLFGALLAGPLAITLGRKKSLLVNNIFVVSAAILFGFSRKAGSFEMIMLGRLLVGVNAGVSMNIQPMYLGESAPKELRGAVAMSSAIFTALGIVMGQVVGLRELLGGPQAWPLLLASCLVPGALQLASLPLLPESPRYLLIDCGDTEACLAALRRLRGSGDLAGELEELEEERAACQGCRARRPWELFQHRALRRQVTSLVVLGSAMELCGNDSVYAYASSVFRKAGVPEAKIQYAIIGTGSCELLTAVVSCVVIERVGRRVLLIGGYSLMTCWGSIFTVALCLQSSFPWTLYLAMACIFAFILSFGIGPAGVTGILATELFDQMARPAACMVCGALMWIMLILVGLGFPFIMEALSHFLYVPFLGVCVCGAIYTGLFLPETKGKTFQEISKELHRLNFPRRAQGPTWRSLEVIQSTEL

SEQ ID NO: 27967 - protein, 503 aa, Homo sapiens
MEDELEPSLRPRTQIQGRILLLTICAAGIGGTFQFGYNLSIINAPTLHIQEFTNETWQARTGEPLPDHLVLLMWSLIVSLYPLGGLFGALLAGPLAITLGRKKSLLVNNIFVVSAAILFGFSRKAGSFEMIMLGRLLVGVNAGVSMNIQPMYLGESAPKELRGAVAMSSAIFTALGIVMGQVVGLRELLGGPQAWPLLLASCLVPGALQLASLPLLPESPRYLLIDCGDTEACLAALRRLRGSGDLAGELEELEEERAACQGCRARRPWELFQHRALRRQVTSLVVLGSAMELCGNDSVYAYASSVFRKAGVPEAKIQYAIIGTGSCELLTAVVSCVVIERVGRRVLLIGGYSLMTCWGSIFTVALCLQSSFPWTLYLAMACIFAFILSFGIGPAGVTGILATELFDQMARPAACMVCGALMWIMLILVGLGFPFIMEALSHFLYVPFLGVCVCGAIYTGLFLPETKGKTFQEISKELHRLNFPRRAQGPTWRSLEVIQSTEL

SEQ ID NO: 27968 - protein, 300 aa, Homo sapiens
MDLPPQLSFGLYVAAFALGFPLNVLAIRGATAHARLRLTPSLVYALNLGCSDLLLTVSLPLKAVEALASGAWPLPASLCPVFAVAHFFPLYAGGGFLAALSAGRYLGAAFPLGYQAFRRPCYSWGVCAAIWALVLCHLGLVFGLEAPGGWLDHSNTSLGINTPVNGSPVCLEAWDPASAGPARFSLSLLLFFLPLAITAFCYVGCLRALARSGLTHRRKLRAAWVAGGALLTLLLCVGPYNASNVASFLYPNLGGSWRKLGLITGAWSVVLNPLVTGYLGRGPGLKTVCAARTQGGKSQK

SEQ ID NO: 27969 - protein, 113 aa, Homo sapiens
MAALGSPSHTFRGLLRELRYLSAATGRPYRDTAAYRYLVKAFRAHRVTSEKLCRAQHELHFQAATYLCLLRSIRKHVALHQEFHGKGERSVEESAGLVGLKLPHQPGGKGWEP

SEQ ID NO: 27970 - protein, 458 aa, Homo sapiens
MAALGSPSHTFRGLLRELRYLSAATGRPYRDTAAYRYLVKAFRAHRVTSEKLCRAQHELHFQAATYLCLLRSIRKHVALHQEFHGKGDTTRQRIKFSDDRVCKSHLLNCCPHDVLSGTRMDLGECLKVHDLALRADYEIASKEQDFFFELDAMDHLQSFIADCDRRTEVAKKRLAETQEEISAEVAAKAERVHELNEEIGKLLAKVEQLGAEGNVEESQKVMDEVEKARAKKREAEEVYRNSMPASSFQQQKLRVCEVCSAYLGLHDNDRRLADHFGGKLHLGFIEIREKLEELKRVVAEKQEKRNQERLKRREEREREEREKLRRSRSHSKNPKRSRSREHRRHRSRSMSRERKRRTRSKSREKRHRHRSRSSSRSRSRSHQRSRHSSRDRSRERSKRRSSKERFRDQDLASCDRDRSSRDRSPRDRDRKDKKRSYESANGRSEDRRSSEEREAGEI

SEQ ID NO: 27971 - protein, 655 aa, Homo sapiens
MKGASEEKLASVSNLVTVFENSRTPEAAPRGQRLEDVHHRPECRPPESPGPREKTNVGEAVGSEPRTVSRRYLNSLKNKLSSEAWRKSCQPVTLSGSGTQEPEKKIVQELLETEQAYVARLHLLDQVFFQELLKTARSSKAFPEDVVRVIFSNISSIYQFHSQFFLPELQRRLDDWTANPRIGDVIQKLAPFLKMYSEYVKNFERAAELLATWTDKSPLFQEVLTRIQSSEASGSLTLQHHMLEPVQRIPRYELLLKEYIQKLPAQAPDQADAQKALDMIFSAAQHSNAAITEMERLQDLWEVYQRLGLEDDIVDPSNTLLREGPVLKISFRRNDPMERYLFLFNNMLLYCVPRVIQVGAQFQVRTRIDVAGMKVRELMDAEFPHSFLVSGKQRTLELQARSQEEMISWMQAFQAAIDQIEKRNETFKAAAQGPEGDIQEQELQSEELGLRAPQWVRDKMVTMCMRCQEPFNALTRRRHHCRACGYVVCARCSDYRAELKYDDNRPNRVCLHCYAFLTGNVLPEAKEDKRRGILEKGSSATPDQSLMCSFLQLIGDKWGKSGPRGWCVIPRDDPLVLYVYAAPQDMRAHTSIPLLGYQVTVGPQGDPRVFQLQQSGQLYTFKAETEELKGRWVKAMERAASGWSPSWPNDGDLSD

SEQ ID NO: 27972 - protein, 180 aa, Homo sapiens
MGGRRSPRAHSCPTPLNPQLQSEELGLRAPQWVRDKMVTMCMRCQEPFNALTRRRHHCRACGYVVCARCSDYRAELKYDDNRPNRVCLHCYAFLTGNVLPEAKEDKRRGILEKGSSATPDQSLMCSFLQLIGDKWGKSGPRGWCVIPRDDPLVLYVYAAPQVRPPPARPPSGPGLPTACV

SEQ ID NO: 27973 - protein, 142 aa, Homo sapiens
MKVRELMDAEFPHSFLVSGKQRTLELQARSQEEMISWMQAFQAAIDQIEKRNETFKAAAQGPEGDIQEQELQSEELGLRAPQWVRDKMVTMCMRCQEPFNALTRRRHHCRACGYVSTPASTPASTCVTQASTCITQASTFPT

SEQ ID NO: 27974 - protein, 128 aa, Homo sapiens
MFPKKARHPGAPALGICTRQPKSTPGTCCCFPCSPGRKPSGLSLLLRTPEAAPRGQRLEDVHHRPECRPPESPGPREKTNVGEAVGSEPRTVSRRYLNSLKNKLSSEAWRKSCQPVTLSGSGTQVPEG

SEQ ID NO: 27975 - protein, 262 aa, Homo sapiens
MEHLERCEWLLRGTLVRAAVRRYLPWALVASMLAGSLLKELSPLPESYLSNKRNVLNVYFVKVAWAWTFCLLLPFIALTNYHLTGKAGLVLRRLSTLLVGTAIWYICTSIFSNIEHYTGSCYQSPALEGVRKEHQSKQQCHQEGGFWHGFDISGHSFLLTFCALMIVEEMSVLHEVKTDRSHCLHTAITTLVVALGILTFIWVLMFLCTAVYFHNLSQKVFGTLFGLLSWYGTYGFWYPKAFSPGLPPQSCSLNLKQDSYKK

SEQ ID NO: 27976 - protein, 428 aa, Homo sapiens
MGNCHTVGPNEALVVSGGCCGSDYKQYVFGGWAWAWWCISDTQRISLEIMTLQPRCEDVETAEGVALTVTGVAQVKIMTEKELLAVACEQFLGKNVQDIKNVVLQTLEGHLRSILGTLTVEQIYQDRDQFAKLVREVAAPDVGRMGIEILSFTIKDVYDKVDYLSSLGKTQTAVVQRDADIGVAEAERDAGIREAECKKEMLDVKFMADTKIADSKRAFELQKSAFSEEVNIKTAEAQLAYELQGAREQQKIRQEEIEIEVVQRKKQIAVEAQEILRTDKELIATVRRPAEAEAHRIQQIAEGEKVKQVLLAQAEAEKIRKIGEAEAAVIEAMGKAEAERMKLKAEAYQKYGDAAKMALVLEALPQIAAKIAAPLTKVDEIVVLSGDNSKVTSEVNRLLAELPASVHALTGVDLSKIPLIKKATGVQV

SEQ ID NO: 27977 - protein, 459 aa, Homo sapiens
MTAEEMKATESGAQSAPLPMEGVDISPKQDEGVLKVIKREGTGTEMPMIGDRVFVHYTGWLLDGTKFDSSLDRKDKFSFDLGKGEVIKAWDIAIATMKVGEVCHITCKPEYAYGSAGSPPKIPPNATLVFEVELFEFKGEDLTEEEDGGIIRRIQTRGEGYAKPNEGAIVEVALEGYYKDKLFDQRELRFEIGEGENLDLPYGLERAIQRMEKGEHSIVYLKPSYAFGSVGKEKFQIPPNAELKYELHLKSFEKAKESWEMNSEEKLEQSTIVKERGTVYFKEGKYKQALLQYKKIVSWLEYESSFSNEEAQKAQALRLASHLNLAMCHLKLQAFSAAIESCNKALELDSNNEKGLFRRGEAHLAVNDFELARADFQKVLQLYPNNKAAKTQLAVCQQRIRRQLAREKKLYANMFERLAEEENKAKAEASSGDHPTDTEMKEEQKSNTAGSQSQVETEA

SEQ ID NO: 27978 - protein, 810 aa, Homo sapiens
MVMAYFVENFWGEKNSGFDVLYHNMKHGQISTKELADFVRERATIEEAYSRSMTKLAKSASNYSQLGTFAPVWDVFKTSTEKLANCHLDLVRKLQELIKEVQKYGEEQVKSHKKTKEEVAGTLEAVQTIQSITQALQKSKENYNAKCVEQERLKKEGATQREIEKAAVKSKKATDTYKLYVEKYALAKADFEQKMTETAQKFQDIEETHLIHIKEIIGSLSNAIKEIHLQIGQVHEEFINNMANTTVESLIQKFAESKGTGKERPGLIEFEECDTASAVEGIKPRKRKTFALPGIIKKEKDAESVECPDADSLNIPDVDEEGYSIKPETNQNDTKENHFYSSSDSDSEDEEPKKYRIEIKPMHPNNSHHTMASLDELKVSIGNITLSPAISRHSPVQMNRNLSNEELTKSKPSAPPNEKGTSDLLAWDPLFGPSLDSSSSSSLTSSSSARPTTPLSVGTIVPPPRPASRPKLTSGKLSGINEIPRPFSPPVTSNTSPPPAAPLARAESSSSISSSASLSAANTPTVGVSRGPSPVSLGNQDTLPVAVALTESVNAYFKGADPTKCIVKITGDMTMSFPSGIIKVFTSNPTPAVLCFRVKNISRLEQILPNAQLVFSDPSQCDSNTKDFWMNMQAVTVYLKKLSEQNPAASYYNVDVLKYQVSSNGIQSTPLNLATYWKCSASTTDLRVDYKYNPEAMVAPSVLSNIQVVVPVDGGVTNMQSLPPAIWNAEQMKAFWKLSSISEKSENGGSGSLRAKFDLSEGPSKPTTLAVQFLSEGSTLSGVDFELVGTGYRLSLIKKRFATGRYLADC

SEQ ID NO: 27979 - protein, 375 aa, Homo sapiens
MVMAYFVENFWGEKNSGFDVLYHNMKHGQISTKELADFVRERATIEEAYSRSMTKLAKSASNYSQLGTFAPVWDVFKTSTEKLANCHLDLVRKLQELIKEVQKYGEEQVKSHKKTKEEVAGTLEAVQTIQSITQALQKSKENYNAKCVEQERLKKEGATQREIEKAAVKSKKATDTYKLYVEKYALAKADFEQKMTETAQKFQDIEETHLIHIKEIIGSLSNAIKEIHLQIGQVHEEFINNMANTTVESLIQKFAESKGTGKERPGLIEFEECDTASAVEGIKPRKRKTFALPGIIKKEKDAESVWSFTVVAQVGMQWRDLGLLHSPPPRFKRFSSYLSLPSSWNYGAHHHIWLIFCIFSRDRVSPYWPGWSRTP

SEQ ID NO: 27980 - protein, 777 aa, Homo sapiens
MVMAYFVENFWGEKNSGFDVLYHNMKHGQISTKELADFVRERATIEEAYSRSMTKLAKSASNYSQLGTFAPVWDVFKTSTEKLANCHLDLVRKLQELIKEVQKYGEEQVKSHKKTKEEVAGTLEAVQTIQSITQALQKSKENYNAKCVEQERLKKEGATQREIEKAAVKSKKATDTYKLYVEKYALAKADFEQKMTETAQVHEEFINNMANTTVESLIQKFAESKGTGKERPGLIEFEECDTASAVEGIKPRKRKTFALPGIIKKEKDAESVECPDADSLNIPDVDEEGYSIKPETNQNDTKENHFYSSSDSDSEDEEPKKYRIEIKPMHPNNSHHTMASLDELKVSIGNITLSPAISRHSPVQMNRNLSNEELTKSKPSAPPNEKGTSDLLAWDPLFGPSLDSSSSSSLTSSSSARPTTPLSVGTIVPPPRPASRPKLTSGKLSGINEIPRPFSPPVTSNTSPPPAAPLARAESSSSISSSASLSAANTPTVGVSRGPSPVSLGNQDTLPVAVALTESVNAYFKGADPTKCIVKITGDMTMSFPSGIIKVFTSNPTPAVLCFRVKNISRLEQILPNAQLVFSDPSQCDSNTKDFWMNMQAVTVYLKKLSEQNPAASYYNVDVLKYQVSSNGIQSTPLNLATYWKCSASTTDLRVDYKYNPEAMVAPSVLSNIQVVVPVDGGVTNMQSLPPAIWNAEQMKAFWKLSSISEKSENGGSGSLRAKFDLSEGPSKPTTLAVQFLSEGSTLSGVDFELVGTGYRLSLIKKRFATGRYLADC

SEQ ID NO: 27981 - protein, 1198 aa, Homo sapiens
MAPVYEGMASHVQVFSPHTLQSSAFCSVKKLKIEPSSNWDMTGYGSHSKVYSQSKNIPLSQPATTTVSTSLPVPNPSLPYEQTIVFPGSTGHIVVTSASSTSVTGQVLGGPHNLMRRSTVSLLDTYQKCGLKRKSEEIENTSSVQIIEEHPPMIQNNASGATVATATTSTATSKNSGSNSEGDYQLVQHEVLCSMTNTYEVLEFLGRGTFGQVVKCWKRGTNEIVAIKILKNHPSYARQGQIEVSILARLSTESADDYNFVRAYECFQHKNHTCLVFEMLEQNLYDFLKQNKFSPLPLKYIRPVLQQVATALMKLKSLGLIHADLKPENIMLVDPSRQPYRVKVIDFGSASHVSKAVCSTYLQSRYYRAPEIILGLPFCEAIDMWSLGCVIAELFLGWPLYPGASEYDQIRYISQTQGLPAEYLLSAGTKTTRFFNRDTDSPYPLWRLKTPDDHEAETGIKSKEARKYIFNCLDDMAQVNMTTDLEGSDMLVEKADRREFIDLLKKMLTIDADKRITPIETLNHPFVTMTHLLDFPHSTHVKSCFQNMEICKRRVNMYDTVNQSKTPFITHVAPSTSTNLTMTFNNQLTTVHNQAPSSTSATISLANPEVSILNYPSTLYQPSAASMAAVAQRSMPLQTGTAQICARPDPFQQALIVCPPGFQGLQASPSKHAGYSVRMENAVPIVTQAPGAQPLQIQPGLLAQQAWPSGTQQILLPPAWQQLTGVATHTSVQHATVIPETMAGTQQLADWRNTHAHGSHYNPIMQQPALLTGHVTLPAAQPLNVGVAHVMRQQPTSTTSSRKSKQHQSSVRNVSTCEVSSSQAISSPQRSKRVKENTPPRCAMVHSSPACSTSVTCGWGDVASSTTRERQRQTIVIPDTPSPTVSVITISSDTDEEEEQKHAPTSTVSKQRKNVISCVTVHDSPYSDSSSNTSPYSVQQRAGHNNANAFDTKGSLENHCTGNPRTIIVPPLKTQASEVLVECDSLVPVNTSHHSSSYKSKSSSNVTSTSGHSSGSSSGAITYRQQRPGPHFQQQQPLNLSQAQQHITTDRTGSHRRQQAYITPTMAQAPYSFPHNSPSHGTVHPHLAAAAAAAHLPTQPHLYTYTAPAALGSTGTVAHLVASQGSARHTVQHTAYPASIVHQVPVSMGPRVLPSPTIHPSQYPAQFAHQTYISASPASTVYTGYPLSPAKVNQYPYI

SEQ ID NO: 27982 - protein, 918 aa, Homo sapiens
MAPVYEGMASHVQVFSPHTLQSSAFCSVKKLKIEPSSNWDMTGYGSHSKVYSQSKNIPLSQPATTTVSTSLPVPNPSLPYEQTIVFPGSTGHIVVTSASSTSVTGQVLGGPHNLMRRSTVSLLDTYQKCGLKRKSEEIENTSSVQIIEEHPPMIQNNASGATVATATTSTATSKNSGSNSEGDYQLVQHEVLCSMTNTYEVLEFLGRGTFGQVVKCWKRGTNEIVAIKILKNHPSYARQGQIEVSILARLSTESADDYNFVRAYECFQHKNHTCLVFEMLEQNLYDFLKQNKFSPLPLKYIRPVLQQVATALMKLKSLGLIHADLKPENIMLVDPSRQPYRVKVIDFGSASHVSKAVCSTYLQSRYYRAPEIILGLPFCEAIDMWSLGCVIAELFLGWPLYPGASEYDQIRYISQTQGLPAEYLLSAGTKTTRFFNRDTDSPYPLWRLKTPDDHEAETGIKSKEARKYIFNCLDDMAQVNMTTDLEGSDMLVEKADRREFIDLLKKMLTIDADKRITPIETLNHPFVTMTHLLDFPHSTHVKSCFQNMEICKRRVNMYDTVNQSKTPFITHVAPSTSTNLTMTFNNQLTTVHNQAPSSTSATISLANPEVSILNYPSTLYQPSAASMAAVAQRSMPLQTGTAQICARPDPFQQALIVCPPGFQGLQASPSKHAGYSVRMENAVPIVTQAPGAQPLQIQPGLLAQQAWPSGTQQILLPPAWQQLTGVATHTSVQHATVIPETMAGTQQLADWRNTHAHGSHYNPIMQQPALLTGHVTLPAAQPLNVGVAHVMRQQPTSTTSSRKSKQHVSKQRKNVISCVTVHDSPYSDSSSNTSPYSVQQRAGHNNANAFDTKGSLENHCTGNPRTIIVPPLKTQASEVLVECDSLVPGNLGPGQGRNLSLESGFPAFLLLEMLLYGS

SEQ ID NO: 27983 - protein, 1171 aa, Homo sapiens
MAPVYEGMASHVQVFSPHTLQSSAFCSVKKLKIEPSSNWDMTGYGSHSKVYSQSKNIPLSQPATTTVSTSLPVPNPSLPYEQTIVFPGSTGHIVVTSASSTSVTGQVLGGPHNLMRRSTVSLLDTYQKCGLKRKSEEIENTSSVQIIEEHPPMIQNNASGATVATATTSTATSKNSGSNSEGDYQLVQHEVLCSMTNTYEVLEFLGRGTFGQVVKCWKRGTNEIVAIKILKNHPSYARQGQIEVSILARLSTESADDYNFVRAYECFQHKNHTCLVFEMLEQNLYDFLKQNKFSPLPLKYIRPVLQQVATALMKLKSLGLIHADLKPENIMLVDPSRQPYRVKVIDFGSASHVSKAVCSTYLQSRYYRAPEIILGLPFCEAIDMWSLGCVIAELFLGWPLYPGASEYDQIRYISQTQGLPAEYLLSAGTKTTRFFNRDTDSPYPLWRLKTPDDHEAETGIKSKEARKYIFNCLDDMAQVNMTTDLEGSDMLVEKADRREFIDLLKKMLTIDADKRITPIETLNHPFVTMTHLLDFPHSTHVKSCFQNMEICKRRVNMYDTVNQSKTPFITHVAPSTSTNLTMTFNNQLTTVHNQPSAASMAAVAQRSMPLQTGTAQICARPDPFQQALIVCPPGFQGLQASPSKHAGYSVRMENAVPIVTQAPGAQPLQIQPGLLAQQAWPSGTQQILLPPAWQQLTGVATHTSVQHATVIPETMAGTQQLADWRNTHAHGSHYNPIMQQPALLTGHVTLPAAQPLNVGVAHVMRQQPTSTTSSRKSKQHQSSVRNVSTCEVSSSQAISSPQRSKRVKENTPPRCAMVHSSPACSTSVTCGWGDVASSTTRERQRQTIVIPDTPSPTVSVITISSDTDEEEEQKHAPTSTVSKQRKNVISCVTVHDSPYSDSSSNTSPYSVQQRAGHNNANAFDTKGSLENHCTGNPRTIIVPPLKTQASEVLVECDSLVPVNTSHHSSSYKSKSSSNVTSTSGHSSGSSSGAITYRQQRPGPHFQQQQPLNLSQAQQHITTDRTGSHRRQQAYITPTMAQAPYSFPHNSPSHGTVHPHLAAAAAAAHLPTQPHLYTYTAPAALGSTGTVAHLVASQGSARHTVQHTAYPASIVHQVPVSMGPRVLPSPTIHPSQYPAQFAHQTYISASPASTVYTGYPLSPAKVNQYPYI

SEQ ID NO: 27984 - protein, 245 aa, Homo sapiens
MAAAIASSLIRQKRQAREREKSNACKCVSSPSKGKTSCDKNKLNVFSRVKLFGSKKRRRRRPEPQLKGIVTKLYSRQGYHLQLQADGTIDGTKDEDSTYTLFNLIPVGLRVVAIQGVQTKLYLAMNSEGYLYTSELFTPECKFKESVFENYYVTYSSMIYRQQQSGRGWYLGLNKEGEIMKGNHVKKNKPAAHFLPKPLKVAMYKEPSLHDLTEFSRSGSGTPTKSRSVSGVLNGGKSMSHNEST

SEQ ID NO: 27985 - protein, 192 aa, Homo sapiens
MALLRKSYSEPQLKGIVTKLYSRQGYHLQLQADGTIDGTKDEDSTYTLFNLIPVGLRVVAIQGVQTKLYLAMNSEGYLYTSELFTPECKFKESVFENYYVTYSSMIYRQQQSGRGWYLGLNKEGEIMKGNHVKKNKPAAHFLPKPLKVAMYKEPSLHDLTEFSRSGSGTPTKSRSVSGVLNGGKSMSHNEST

SEQ ID NO: 27986 - protein, 255 aa, Homo sapiens
MSGKVTKPKEEKDASKVLDDAPPGTQEYIMLRQDSIQSAELKKKESPFRAKCHEIFCCPLKQVHHKENTEPEEPQLKGIVTKLYSRQGYHLQLQADGTIDGTKDEDSTYTLFNLIPVGLRVVAIQGVQTKLYLAMNSEGYLYTSELFTPECKFKESVFENYYVTYSSMIYRQQQSGRGWYLGLNKEGEIMKGNHVKKNKPAAHFLPKPLKVAMYKEPSLHDLTEFSRSGSGTPTKSRSVSGVLNGGKSMSHNEST

SEQ ID NO: 27987 - protein, 199 aa, Homo sapiens
MSGKVTKPKEEKDASKEPQLKGIVTKLYSRQGYHLQLQADGTIDGTKDEDSTYTLFNLIPVGLRVVAIQGVQTKLYLAMNSEGYLYTSELFTPECKFKESVFENYYVTYSSMIYRQQQSGRGWYLGLNKEGEIMKGNHVKKNKPAAHFLPKPLKVAMYKEPSLHDLTEFSRSGSGTPTKSRSVSGVLNGGKSMSHNEST

SEQ ID NO: 27988 - protein, 226 aa, Homo sapiens
MLRQDSIQSAELKKKESPFRAKCHEIFCCPLKQVHHKENTEPEEPQLKGIVTKLYSRQGYHLQLQADGTIDGTKDEDSTYTLFNLIPVGLRVVAIQGVQTKLYLAMNSEGYLYTSELFTPECKFKESVFENYYVTYSSMIYRQQQSGRGWYLGLNKEGEIMKGNHVKKNKPAAHFLPKPLKVAMYKEPSLHDLTEFSRSGSGTPTKSRSVSGVLNGGKSMSHNEST

SEQ ID NO: 27989 - protein, 247 aa, Homo sapiens
MAAAIASGLIRQKRQAREQHWDRPSASRRRSSPSKNRGLCNGNLVDIFSKVRIFGLKKRRLRRQDPQLKGIVTRLYCRQGYYLQMHPDGALDGTKDDSTNSTLFNLIPVGLRVVAIQGVKTGLYIAMNGEGYLYPSELFTPECKFKESVFENYYVIYSSMLYRQQESGRAWFLGLNKEGQAMKGNRVKKTKPAAHFLPKPLEVAMYREPSLHDVGETVPKPGVTPSKSTSASAIMNGGKPVNKSKTT

SEQ ID NO: 27990 - protein, 252 aa, Homo sapiens
MVKPVPLFRRTDFKLLLCNHKDLFFLRVSKLLDCFSPKSMWFLWNIFSKGTHMLQCLCGKSLKKNKNPTDPQLKGIVTRLYCRQGYYLQMHPDGALDGTKDDSTNSTLFNLIPVGLRVVAIQGVKTGLYIAMNGEGYLYPSELFTPECKFKESVFENYYVIYSSMLYRQQESGRAWFLGLNKEGQAMKGNRVKKTKPAAHFLPKPLEVAMYREPSLHDVGETVPKPGVTPSKSTSASAIMNGGKPVNKSKTT

SEQ ID NO: 27991 - protein, 299 aa, Homo sapiens
MDLLWILPSLWLLLLGGPACLKTQEHPSCPGPRELEASKVVLLPSCPGAPGSPGEKGAPGPQGPPGPPGKMGPKGEPGDPVNLLRCQEGPRNCRELLSQGATLSGWYHLCLPEGRALPVFCDMDTEGGGWLVFQRRQDGSVDFFRSWSSYRAGFGNQESEFWLGNENLHQLTLQGNWELRVELEDFNGNRTFAHYATFRLLGEVDHYQLALGKFSEGTAGDSLSLHSGRPFTTYDADHDSSNSNCAVIVHGAWWYASCYRSNLNGRYAVSEAAAHKYGIDWASGRGVGHPYRRVRMMLR

SEQ ID NO: 27992 - protein, 288 aa, Homo sapiens
MDLLWILPSLWLLLLGGPACLKTQEHPSCPGPRELEASKVVLLPSCPGAPGSPGEKGAPGPQGPPGPPGKMGPKGEPGPRNCRELLSQGATLSGWYHLCLPEGRALPVFCDMDTEGGGWLVFQRRQDGSVDFFRSWSSYRAGFGNQESEFWLGNENLHQLTLQGNWELRVELEDFNGNRTFAHYATFRLLGEVDHYQLALGKFSEGTAGDSLSLHSGRPFTTYDADHDSSNSNCAVIVHGAWWYASCYRSNLNGRYAVSEAAAHKYGIDWASGRGVGHPYRRVRMMLR

SEQ ID NO: 27993 - protein, 207 aa, Homo sapiens
MAEVGGVFASLDWDLHGFSSSLGNVPLADSPGFLNERLGQIEGKLQRGSPTDFAHLKGILRRRQLYCRTGFHLEIFPNGTVHGTRHDHSRFGILEFISLAVGLISIRGVDSGLYLGMNERGELYGSKKLTRECVFREQFEENWYNTYASTLYKHSDSERQYYVALNKDGSPREGYRTKRHQKFTHFLPRPVDPSKLPSMSRDLFHYR

SEQ ID NO: 27994 - protein, 632 aa, Homo sapiens [sequence omitted]

SEQ ID NO: 27995 - protein, 594 aa, Homo sapiens
MEELVVEVRGSNGAFYKAFVKDVHEDSITVAFENNWQPDRQIPFHDVRFPPPVGYNKDINESDEVEVYSRANEKEPCCWWLAKVRMIKGEFYVIEYAACDATYNEIVTIERLRSVNPNKPATKDTFHKIKLDVPEDLRQMCAKEAAHKDFKKAVGAFSVTYDPENYQLVILSINEVTSKRAHMLIDMHFRSLRTKLSLIMRNEEASKQLESSRQLASRFHEQFIVREDLMGLAIGTHGANIQQARKVPGVTAIDLDEDTCTFHIYGEDQDAVKKARSFLEFAEDVIQVPRNLVGKVIGKNGKLIQEIVDKSGVVRVRIEAENEKNVPQEEEIMPPNSLPSNNSRVGPNAPEEKKHLDIKENSTHFSQPNSTKVQRGMVPFVFVGTKDSIANATVLLDYHLNYLKEVDQLRLERLQIDEQLRQIGASSRPPPNRTDKEKSYVTDDGQGMGRGSRPYRNRGHGRRGPGYTSGTNSEASNASETESDHRDELSDWSLAPTEEERESFLRRGDGRRRGGGGRGQGGRGRGGGFKGNDDHSRTDNRPRNPREAKGRTTDGSLQNTSSEGSRLRTGKDRNQKKEKPDSVDGQQPLVNGVP

SEQ ID NO: 27996 - protein, 620 aa, Homo sapiens
MEELVVEVRGSNGAFYKAFVKDVHEDSITVAFENNWQPDRQIPFHDVRFPPPVGYNKDINESDEVEVYSRANEKEPCCWWLAKVRMIKGEFYVIEYAACDATYNEIVTIERLRSVNPNKPATKDTFHKIKLDVPEDLRQMCAKEAAHKDFKKAVGAFSVTYDPENYQLVILSINEVTSKRAHMLIDMHFRSLRTKLSLIMRNEEASKQLESSRQLASRFHEQFIVREDLMGLAIGTHGANIQQARKVPGVTAIDLDEDTCTFHIYGEDQDAVKKARSFLEFAEDVIQVPRNLVGKVIGKNGKLIQEIVDKSGVVRVRIEAENEKNVPQEEEIMPPNSLPSNNSRVGPNAPEEKKHLDIKENSTHFSQPNSTKVQRVLVASSVVAGESQKPELKAWQGMVPFVFVGTKDSIANATVLLDYHLNYLKEVDQLRLERLQIDEQLRQIGASSRPPPNRTDKEKSYVTDDGQGMGRGSRPYRNRGHGRRGPGYTSESDHRDELSDWSLAPTEEERESFLRRGDGRRRGGGGRGQGGRGRGGGFKGNDDHSRTDNRPRNPREAKGRTTDGSLQIRVDCNNERSVHTKTLQNTSSEGSRLRTGKDRNQKKEKPDSVDGQQPLVNGVP

SEQ ID NO: 27997 - protein, 603 aa, Homo sapiens
MEELVVEVRGSNGAFYKAFVKDVHEDSITVAFENNWQPDRQIPFHDVRFPPPVGYNKDINESDEVEVYSRANEKEPCCWWLAKVRMIKGEFYVIEYAACDATYNEIVTIERLRSVNPNKPATKDTFHKIKLDVPEDLRQMCAKEAAHKDFKKAVGAFSVTYDPENYQLVILSINEVTSKRAHMLIDMHFRSLRTKLSLIMRNEEASKQLESSRQLASRFHEQFIVREDLMGLAIGTHGANIQQARKVPGVTAIDLDEDTCTFHIYGEDQDAVKKARSFLEFAEDVIQVPRNLVGKVIGKNGKLIQEIVDKSGVVRVRIEAENEKNVPQEEEIMPPNSLPSNNSRVGPNAPEEKKHLDIKENSTHFSQPNSTKVQRVLVASSVVAGESQKPELKAWQGMVPFVFVGTKDSIANATVLLDYHLNYLKEVDQLRLERLQIDEQLRQIGASSRPPPNRTDKEKSYVTDDGQGMGRGSRPYRNRGHGRRGPGYTSESDHRDELSDWSLAPTEEERESFLRRGDGRRRGGGGRGQGGRGRGGGFKGNDDHSRTDNRPRNPREAKGRTTDGSLQNTSSEGSRLRTGKDRNQKKEKPDSVDGQQPLVNGVP

SEQ ID NO: 27998 - protein, 607 aa, Homo sapiens
MEELVVEVRGSNGAFYKAFVKDVHEDSITVAFENNWQPDRQIPFHDVRFPPPVGYNKDINESDEVEVYSRANEKEPCCWWLAKVRMIKGEFYVIEYAACDATYNEIVTIERLRSVNPNKPATKDTFHKIKLDVPEDLRQMCAKEAAHKDFKKAVGAFSVTYDPENYQLVILSINEVTSKRAHMLIDMHFRSLRTKLSLIMRNEEASKQLESSRQLASRFHEQFIVREDLMGLAIGTHGANIQQARKVPGVTAIDLDEDTCTFHIYGEDQDAVKKARSFLEFAEDVIQVPRNLVGKVIGKNGKLIQEIVDKSGVVRVRIEAENEKNVPQEEEIMPPNSLPSNNSRVGPNAPEEKKHLDIKENSTHFSQPNSTKVQRVLVASSVVAGESQKPELKAWQGMVPFVFVGTKDSIANATVLLDYHLNYLKEVDQLRLERLQIDEQLRQIGASSRPPPNRTDKEKSYVTDDGQGMGRGSRPYRNRGHGRRGPGYTSAPTEEERESFLRRGDGRRRGGGGRGQGGRGRGGGFKGNDDHSRTDNRPRNPREAKGRTTDGSLQIRVDCNNERSVHTKTLQNTSSEGSRLRTGKDRNQKKEKPDSVDGQQPLVNGVP

SEQ ID NO: 27999 - protein, 590 aa, Homo sapiens
MEELVVEVRGSNGAFYKAFVKDVHEDSITVAFENNWQPDRQIPFHDVRFPPPVGYNKDINESDEVEVYSRANEKEPCCWWLAKVRMIKGEFYVIEYAACDATYNEIVTIERLRSVNPNKPATKDTFHKIKLDVPEDLRQMCAKEAAHKDFKKAVGAFSVTYDPENYQLVILSINEVTSKRAHMLIDMHFRSLRTKLSLIMRNEEASKQLESSRQLASRFHEQFIVREDLMGLAIGTHGANIQQARKVPGVTAIDLDEDTCTFHIYGEDQDAVKKARSFLEFAEDVIQVPRNLVGKVIGKNGKLIQEIVDKSGVVRVRIEAENEKNVPQEEEIMPPNSLPSNNSRVGPNAPEEKKHLDIKENSTHFSQPNSTKVQRVLVASSVVAGESQKPELKAWQGMVPFVFVGTKDSIANATVLLDYHLNYLKEVDQLRLERLQIDEQLRQIGASSRPPPNRTDKEKSYVTDDGQGMGRGSRPYRNRGHGRRGPGYTSAPTEEERESFLRRGDGRRRGGGGRGQGGRGRGGGFKGNDDHSRTDNRPRNPREAKGRTTDGSLQNTSSEGSRLRTGKDRNQKKEKPDSVDGQQPLVNGVP

SEQ ID NO: 28000 - protein, 615 aa, Homo sapiens
MEELVVEVRGSNGAFYKAFVKDVHEDSITVAFENNWQPDRQIPFHDVRFPPPVGYNKDINESDEVEVYSRANEKEPCCWWLAKVRMIKGEFYVIEYAACDATYNEIVTIERLRSVNPNKPATKDTFHKIKLDVPEDLRQMCAKEAAHKDFKKAVGAFSVTYDPENYQLVILSINEVTSKRAHMLIDMHFRSLRTKLSLIMRNEEASKQLESSRQLASRFHEQFIVREDLMGLAIGTHGANIQQARKVPGVTAIDLDEDTCTFHIYGEDQDAVKKARSFLEFAEDVIQVPRNLVGKVIGKNGKLIQEIVDKSGVVRVRIEAENEKNVPQEEEIMPPNSLPSNNSRVGPNAPEEKKHLDIKENSTHFSQPNSTKVQRVLVASSVVAGESQKPELKAWQGMVPFVFVGTKDSIANATVLLDYHLNYLKEVDQLRLERLQIDEQLRQIGASSRPPPNRTDKEKSYVTDDGQGMGRGSRPYRNRGHGRRGPGYTSGTNSEASNASETESDHRDELSDWSLAPTEEERESFLRRGDGRRRGGGGRGQGGRGRGGGFKGNDDHSRTDNRPRNPREAKGRTTDGSLQNTSSEGSRLRTGKDRNQKKEKPDSVDGQQPLVNGVP

SEQ ID NO: 28001 - protein, 586 aa, Homo sapiens
MEELVVEVRGSNGAFYKAFVKDVHEDSITVAFENNWQPDRQIPFHDVRFPPPVGYNKDINESDEVEVYSRANEKEPCCWWLAKVRMIKGEFYVIEYAACDATYNEIVTIERLRSVNPNKPATKDTFHKIKLDVPEDLRQMCAKEAAHKDFKKAVGAFSVTYDPENYQLVILSINEVTSKRAHMLIDMHFRSLRTKLSLIMRNEEASKQLESSRQLASRFHEQFIVREDLMGLAIGTHGANIQQARKVPGVTAIDLDEDTCTFHIYGEDQDAVKKARSFLEFAEDVIQVPRNLVGKVIGKNGKLIQEIVDKSGVVRVRIEAENEKNVPQEEEIMPPNSLPSNNSRVGPNAPEEKKHLDIKENSTHFSQPNSTKVQRGMVPFVFVGTKDSIANATVLLDYHLNYLKEVDQLRLERLQIDEQLRQIGASSRPPPNRTDKEKSYVTDDGQGMGRGSRPYRNRGHGRRGPGYTSAPTEEERESFLRRGDGRRRGGGGRGQGGRGRGGGFKGNDDHSRTDNRPRNPREAKGRTTDGSLQIRVDCNNERSVHTKTLQNTSSEGSRLRTGKDRNQKKEKPDSVDGQQPLVNGVP

SEQ ID NO: 28002 - protein, 611 aa, Homo sapiens
MEELVVEVRGSNGAFYKAFVKDVHEDSITVAFENNWQPDRQIPFHDVRFPPPVGYNKDINESDEVEVYSRANEKEPCCWWLAKVRMIKGEFYVIEYAACDATYNEIVTIERLRSVNPNKPATKDTFHKIKLDVPEDLRQMCAKEAAHKDFKKAVGAFSVTYDPENYQLVILSINEVTSKRAHMLIDMHFRSLRTKLSLIMRNEEASKQLESSRQLASRFHEQFIVREDLMGLAIGTHGANIQQARKVPGVTAIDLDEDTCTFHIYGEDQDAVKKARSFLEFAEDVIQVPRNLVGKVIGKNGKLIQEIVDKSGVVRVRIEAENEKNVPQEEEIMPPNSLPSNNSRVGPNAPEEKKHLDIKENSTHFSQPNSTKVQRGMVPFVFVGTKDSIANATVLLDYHLNYLKEVDQLRLERLQIDEQLRQIGASSRPPPNRTDKEKSYVTDDGQGMGRGSRPYRNRGHGRRGPGYTSGTNSEASNASETESDHRDELSDWSLAPTEEERESFLRRGDGRRRGGGGRGQGGRGRGGGFKGNDDHSRTDNRPRNPREAKGRTTDGSLQIRVDCNNERSVHTKTLQNTSSEGSRLRTGKDRNQKKEKPDSVDGQQPLVNGVP

SEQ ID NO: 28003 - protein, 537 aa, Homo sapiens
MEELVVEVRGSNGAFYKAFVKDVHEDSITVAFENNWQPDRQIPFHDVRFPPPVGYNKDINESDEVEVYSRANEKEPCCWWLAKVRMIKGEFYVIEYAACDATYNEIVTIERLRSVNPNKPATKDTFHKIKLDVPEDLRQMCAKEAAHKDFKKAVGAFSVTYDPENYQLVILSINEVTSKRAHMLIDMHFRSLRTKLSLIMRNEEASKQLESSRQLASRFHEQFIVREDLMGLAIGTHGANIQQARKVPGVTAIDLDEDTCTFHIYGEDQDAVKKARSFLEFAEDVIQVPRNLVGKVIGKNGKLIQEIVDKSGVVRVRIEAENEKNVPQEEEIMPPNSLPSNNSRVGPNAPEEKKHLDIKENSTHFSQPNSTKVQRVLVASSVVAGESQKPELKAWQGMVPFVFVGTKDSIANATVLLDYHLNYLKLQQRKRGRASCAEETDGGVEGEEEDKEEEDVEEASKETTITPEQIIVHVIQERLKEEQQMDPFRSELTAIMKGVSTLKHYRIPPVKVVGCARVKIVTRRKRSQTAWMVSNHS

SEQ ID NO: 28004 - protein, 516 aa, Homo sapiens
MEELVVEVRGSNGAFYKAFVKDVHEDSITVAFENNWQPDRQIPFHDVRFPPPVGYNKDINESDEVEVYSRANEKEPCCWWLAKVRMIKGEFYVIEYAACDATYNEIVTIERLRSVNPNKPATKDTFHKIKLDVPEDLRQMCAKEAAHKDFKKAVGAFSVTYDPENYQLVILSINEVTSKRAHMLIDMHFRSLRTKLSLIMRNEEASKQLESSRQLASRFHEQFIVREDLMGLAIGTHGANIQQARKVPGVTAIDLDEDTCTFHIYGEDQDAVKKARSFLEFAEDVIQVPRNLVGKVIGKNGKLIQEIVDKSGVVRVRIEAENEKNVPQEEEIMPPNSLPSNNSRVGPNAPEEKKHLDIKENSTHFSQPNSTKVQRGMVPFVFVGTKDSIANATVLLDYHLNYLKLQQRKRGRASCAEETDGGVEGEEEDKEEEDVEEASKETTITPEQIIVHVIQERLKEEQQMDPFRSELTAIMKGVSTLKHYRIPPVKVVGCARVKIVTRRKRSQTAWMVSNHS

SEQ ID NO: 28005 - protein, 740 aa, Homo sapiens
MQPPPRKVKVTQELKNIQVEQMTKLQAKHQAECDLLEDMRTFSQKKAAIEREYAQGMQKLASQYLKRDWPGVKADDRNDYRSMYPVWKSFLEGTMQVAQSRMNICENYKNFISEPARTVRSLKEQQLKRCVDQLTKIQTELQETVKDLAKGKKKYFETEQMAHAVREKADIEAKSKLSLFQSRISLQKASVKLKARRSECNSKATHARNDYLLTLAAANAHQDRYYQTDLVNIMKALDGNVYDHLKDYLIAFSRTELETCQAVQNTFQFLLENSSKVVRDYNLQLFLQENAVFHKPQPFQFQPCDSDTSRQLESETGTTEEHSLNKEARKWATRVAREHKNIVHQQRVLNDLECHGAAVSEQSRAELEQKIDEARENIRKAEIIKLKAEARLDLLKQIGVSVDTWLKSAMNQVMEELENERWARPPAVTSNGTLHSLNADTEREEGEEFEDNMDVFDDSSSSPSGTLRNYPLTCKVVYSYKASQPDELTIEEHEVLEVIEDGDMEDWVKARNKVGQVGYVPEKYLQFPTSNSLLSMLQSLAALDSRSHTSSNSTEAELVSGSLNGDASVCFVKALYDYEGQTDDELSFPEGAIIRILNKENQDDDGFWEGEFNGRIGVFPSVLVEELSASENGDTPWMREIQISPSPKPHASLPPLPLYDQPPSSPYPSPDKRSSLYFPRSPSANEKSLHAESPGFSQASRHTPETSYGKLRPVRAAPPPPTQNHRRPAEKIEDVEITLV

SEQ ID NO: 28006 - protein, 684 aa, Homo sapiens
MQKLASQYLKRDWPGVKADDRNDYRSMYPVWKSFLEGTMQVAQSRMNICENYKNFISEPARTVRSLKEQQLKRCVDQLTKIQTELQETVKDLAKGKKKYFETEQMAHAVREKADIEAKSKLSLFQSRISLQKASVKLKARRSECNSKATHARNDYLLTLAAANAHQDRYYQTDLVNIMKALDGNVYDHLKDYLIAFSRTELETCQAVQNTFQFLLENSSKVVRDYNLQLFLQENAVFHKPQPFQFQPCDSDTSRQLESETGTTEEHSLNKEARKWATRVAREHKNIVHQQRVLNDLECHGAAVSEQSRAELEQKIDEARENIRKAEIIKLKAEARLDLLKQIGVSVDTWLKSAMNQVMEELENERWARPPAVTSNGTLHSLNADTEREEGEEFEDNMDVFDDSSSSPSGTLRNYPLTCKVVYSYKASQPDELTIEEHEVLEVIEDGDMEDWVKARNKVGQVGYVPEKYLQFPTSNSLLSMLQSLAALDSRSHTSSNSTEAELVSGSLNGDASVCFVKALYDYEGQTDDELSFPEGAIIRILNKENQDDDGFWEGEFNGRIGVFPSVLVEELSASENGDTPWMREIQISPSPKPHASLPPLPLYDQPPSSPYPSPDKRSSLYFPRSPSANEKSLHAESPGFSQASRHTPETSYGKLRPVRAAPPPPTQNHRRPAEKIEDVEITLV

SEQ ID NO: 28007 - protein, 515 aa, Homo sapiens
MQKLASQYLKRDWPGVKADDRNDYRSMYPVWKSFLEGTMQVAQSRMNICENYKNFISEPARTVRSLKEQQLKRCVDQLTKIQTELQETVKDLAKGKKKYFETEQMAHAVREKADIEAKSKLSLFQSRISLQKASVKLKARRSECNSKATHARNDYLLTLAAANAHQDRYYQTDLVNIMKALDGNVYDHLKDYLIAFSRTELETCQAVQNTFQFLLENSSKVVRDYNLQLFLQENAVFHKPQPFQFQPCDSDTSRQLESETGTTEEHSLNKEARKWATRVAREHKNIVHQQRVLNDLECHGAAVSEQSRAELEQKIDEARENIRKAEIIKLKAEARLDLLKQIGVSVDTWLKSAMNQVMEELENERWARPPAVTSNGTLHSLNADTEREEGEEFEDNMDVFDDSSSSPSGTLRNYPLTCKVVYSYKASQPDELTIEEHEVLEVIEDGDMEDWVKARNKVGQVGYVPEKYLQFPTSNSLLSMLQSLAALDSRSHTSSNSTEAELVSGSLNGDASGKD

SEQ ID NO: 28008 - protein, 396 aa, Homo sapiens
MTNEEPLPKKVRLSETDFKVMARDELILRWKQYEAYVQALEGKYTDLNSNDVTGLRESEEKLKQQQQESARRENILVMRLATKEQEMQECTTQIQYLKQVQQPSVAQLRSTMVDPAINLFFLKMKGELEQTKDKLEQAQNELSAWKFTPDSQTGKKLMAKCRMLIQENQELGRQLSQGRIAQLEAELALQKKYSEELKSSQDELNDFIIQLDEEVEGMQSTILVLQQQLKETRQQLAQYQQQQSQASAPSTSRTTASEPVEQSEATSKDCSRLTNGPSNGSSSRQRTSGSGFHREGNTTEDDFPSSPGNGNKSSNSSEERTGRGGSGYVNQLSAGYESVDSPTGSENSLTHQSNDTDSSHDPQEEKAVSGKGNRTVGSRHVQNGLDSSVNVQGSVL

SEQ ID NO: 28009 - protein, 151 aa, Homo sapiens
MTNEEPLPKKVRLSETDFKVMARDELILRWKQYEAYVQALEGKYTDLNSNDVTGLRESEEKLKQQQQESARRENILVMRLATKEQEMQECTTQIQYLKQVQQPSVAQLRSTMVDPAINLFFLKMKGELEQTKDKLEQAQNELSAWKFTPDR

SEQ ID NO: 28010 - protein, 646 aa, Homo sapiens
MDLRDWLFLCYGLIAFLTEVIDSTTCPSVCRCDNGFIYCNDRGLTSIPADIPDDATTLYLQNNQINNAGIPQDLKTKVNVQVIYLYENDLDEFPINLPRSLRELHLQDNNVRTIARDSLARIPLLEKLHLDDNSVSTVSIEEDAFADSKQLKLLFLSRNHLSSIPSGLPHTLEELRLDDNRISTIPLHAFKGLNSLRRLVLDGNLLANQRIADDTFSRLQNLTELSLVRNSLAAPPLNLPSAHLQKLYLQDNAISHIPYNTLAKMRELERLDLSNNNLTTLPRGLFDDLGNLAQLLLRNNPWFCGCNLMWLRDWVKARAAVVNVRGLMCQGPEKVRGMAIKDITSEMDECFETGPQGGVANAAAKTTASNHASATTPQGSLFTLKAKRPGLRLPDSNIDYPMATGDGAKTLAIHVKALTADSIRITWKATLPASSFRLSWLRLGHSPAVGSITETLVQGDKTEYLLTALEPKSTYIICMVTMETSNAYVADETPVCAKAETADSYGPTTTLNQEQNAGPMASLPLAGIIGGAVALVFLFLVLGAICWYVHQAGELLTRERAYNRGSRKKDDYMESGTKKDNSILEIRGPGLQMLPINPYRAKEEYVVHTIFPSNGSSLCKATHTIGYGTTRGYRDGGIPDIDYSYT

SEQ ID NO: 28011 - protein, 194 aa, Homo sapiens
MHKWILTWILPTLLYRSCFHIICLVGTISLACNDMTPEQMATNVNCSSPERHTRSYDYMEGGDIRVRRLFCRTQWYLRIDKRGKVKGTQEMKNNYNIMEIRTVAVGIVAIKGVESEFYLAMNKEGKLYAKKECNEDCNFKELILENHYNTYASAKWTHNGGEMFVALNQKGIPVRGKKTKKEQKTAHFLPMAIT

SEQ ID NO: 28012 - protein, 97 aa, Homo sapiens
MHKWILTWILPTLLYRSCFHIICLVGTISLACNDMTPEQMATNVNCSSPERHTRSYDYMEGGDIRVRRLFCRTQWYLRIDKRGKVKGTQEMKNNYSK

SEQ ID NO: 28013 - protein, 208 aa, Homo sapiens
MAPLGEVGNYFGVQDAVPFGNVPVLPVDSPVLLSDHLGQSEAGGLPRGPAVTDLDHLKGILRRRQLYCRTGFHLEIFPNGTIQGTRKDHSRFGILEFISIAVGLVSIRGVDSGLYLGMNEKGELYGSEKLTQECVFREQFEENWYNTYSSNLYKHVDTGRRYYVALNKDGTPREGTRTKRHQKFTHFLPRPVDPDKVPELYKDILSQS

SEQ ID NO: 28014 - protein, 206 aa, Homo sapiens
MSGPGTAAVALLPAVLLALLAPWAGRGGAAAPTAPNGTLEAELERRWESLVALSLARLPVAAQPKEAAVQSGAGDYLLGIKRLRRLYCNVGIGFHLQALPDGRIGGAHADTRDSLLELSPVERGVVSIFGVASRFFVAMSSKGKLYGSPFFTDECTFKEILLPNNYNAYESYKYPGMFIALSKNGKTKKGNRVSPTMKVTHFLPRL

SEQ ID NO: 28015 - protein, 118 aa, Homo sapiens
MSGPGTAAVALLPAVLLALLAPWAGRGGAAAPTAPNGTLEAELERRWESLVALSLARLPVAAQPKEAAVQSGAGDYLLGIKRLRRLYCNVGIGFHLQALPDGRIGGAHADTRDTLLHR

SEQ ID NO: 28016 - protein, 491 aa, Homo sapiens
MKRMVSWSFHKLKTMKHLLLLLLCVFLVKSQGVNDNEEGFFSARGHRPLDKKREEAPSLRPAPPPISGGGYRARPAKAAATQKKVERKAPDAGGCLHADPDLGVLCPTGCQLQEALLQQERPIRNSVDELNNNVEAVSQTSSSSFQYMYLLKDLWQKRQKQVKDNENVVNEYSSELEKHQLYIDETVNSNIPTNLRVLRSILENLRSKIQKLESDVSAQMEYCRTPCTVSCNIPVVSGKECEEIIRKGGETSEMYLIQPDSSVKPYRVYCDMNTENGGWTVIQNRQDGSVDFGRKWDPYKQGFGNVATNTDGKNYCGLPGEYWLGNDKISQLTRMGPTELLIEMEDWKGDKVKAHYGGFTVQNEANKYQISVNKYRGTAGNALMDGASQLMGENRTMTIHNGMFFSTYDRDNDGWLTSDPRKQCSKEDGGGWWYNRCHAANPNGRYYWGGQYTWDMAKHGTDDGVVWMNWKGSWYSMRKMSMKIRPFFPQQ

SEQ ID NO: 28017 - protein, 233 aa, Homo sapiens
MGSPRSALSCLLLHLLVLCLQAQEGPGRGPALGRELASLFRAGREPQGVSQQHVREQSLVTDQLSRRLIRTYQLYSRTSGKHVQVLANKRINAMAEDGDPFAKLIVETDTFGSRVRVRGAETGLYICMNKKGKLIAKSNGKGKDCVFTEIVLENNYTALQNAKYEGWYMAFTRKGRPRKGSKTRQHQREVHFMKRLPRGHHTTEQSLRFEFLNYPPFTRSLRGSQRTWAPEPR

SEQ ID NO: 28018 - protein, 204 aa, Homo sapiens
MGSPRSALSCLLLHLLVLCLQAQHVREQSLVTDQLSRRLIRTYQLYSRTSGKHVQVLANKRINAMAEDGDPFAKLIVETDTFGSRVRVRGAETGLYICMNKKGKLIAKSNGKGKDCVFTEIVLENNYTALQNAKYEGWYMAFTRKGRPRKGSKTRQHQREVHFMKRLPRGHHTTEQSLRFEFLNYPPFTRSLRGSQRTWAPEPR

SEQ ID NO: 28019 - protein, 215 aa, Homo sapiens
MGSPRSALSCLLLHLLVLCLQAQVTVQSSPNFTQHVREQSLVTDQLSRRLIRTYQLYSRTSGKHVQVLANKRINAMAEDGDPFAKLIVETDTFGSRVRVRGAETGLYICMNKKGKLIAKSNGKGKDCVFTEIVLENNYTALQNAKYEGWYMAFTRKGRPRKGSKTRQHQREVHFMKRLPRGHHTTEQSLRFEFLNYPPFTRSLRGSQRTWAPEPR

SEQ ID NO: 28020 - protein, 244 aa, Homo sapiens
MGSPRSALSCLLLHLLVLCLQAQEGPGRGPALGRELASLFRAGREPQGVSQQVTVQSSPNFTQHVREQSLVTDQLSRRLIRTYQLYSRTSGKHVQVLANKRINAMAEDGDPFAKLIVETDTFGSRVRVRGAETGLYICMNKKGKLIAKSNGKGKDCVFTEIVLENNYTALQNAKYEGWYMAFTRKGRPRKGSKTRQHQREVHFMKRLPRGHHTTEQSLRFEFLNYPPFTRSLRGSQRTWAPEPR

SEQ ID NO: 28021 - protein, 821 aa, Homo sapiens
MVSWGRFICLVVVTMATLSLARPSFSLVEDTTLEPEEPPTKYQISQPEVYVAAPGESLEVRCLLKDAAVISWTKDGVHLGPNNRTVLIGEYLQIKGATPRDSGLYACTASRTVDSETWYFMVNVTDAISSGDDEDDTDGAEDFVSENSNNKRAPYWTNTEKMEKRLHAVPAANTVKFRCPAGGNPMPTMRWLKNGKEFKQEHRIGGYKVRNQHWSLIMESVVPSDKGNYTCVVENEYGSINHTYHLDVVERSPHRPILQAGLPANASTVVGGDVEFVCKVYSDAQPHIQWIKHVEKNGSKYGPDGLPYLKVLKAAGVNTTDKEIEVLYIRNVTFEDAGEYTCLAGNSIGISFHSAWLTVLPAPGREKEITASPDYLEIAIYCIGVFLIACMVVTVILCRMKNTTKKPDFSSQPAVHKLTKRIPLRRQVTVSAESSSSMNSNTPLVRITTRLSSTADTPMLAGVSEYELPEDPKWEFPRDKLTLGKPLGEGCFGQVVMAEAVGIDKDKPKEAVTVAVKMLKDDATEKDLSDLVSEMEMMKMIGKHKNIINLLGACTQDGPLYVIVEYASKGNLREYLRARRPPGMEYSYDINRVPEEQMTFKDLVSCTYQLARGMEYLASQKCIHRDLAARNVLVTENNVMKIADFGLARDINNIDYYKKTTNGRLPVKWMAPEALFDRVYTHQSDVWSFGVLMWEIFTLGGSPYPGIPVEELFKLLKEGHRMDKPANCTNELYMMMRDCWHAVPSQRPTFKQLVEDLDRILTLTTNEEYLDLSQPLEQYSPSYPDTRSSCSSGDDSVFSPDPMPYEPCLPQYPHINGSVKT

SEQ ID NO: 28022 - protein, 768 aa, Homo sapiens
MVSWGRFICLVVVTMATLSLARPSFSLVEDTTLEPEEPPTKYQISQPEVYVAAPGESLEVRCLLKDAAVISWTKDGVHLGPNNRTVLIGEYLQIKGATPRDSGLYACTASRTVDSETWYFMVNVTDAISSGDDEDDTDGAEDFVSENSNNKRAPYWTNTEKMEKRLHAVPAANTVKFRCPAGGNPMPTMRWLKNGKEFKQEHRIGGYKVRNQHWSLIMESVVPSDKGNYTCVVENEYGSINHTYHLDVVERSPHRPILQAGLPANASTVVGGDVEFVCKVYSDAQPHIQWIKHVEKNGSKYGPDGLPYLKVLKAAGVNTTDKEIEVLYIRNVTFEDAGEYTCLAGNSIGISFHSAWLTVLPAPGREKEITASPDYLEIAIYCIGVFLIACMVVTVILCRMKNTTKKPDFSSQPAVHKLTKRIPLRRQVTVSAESSSSMNSNTPLVRITTRLSSTADTPMLAGVSEYELPEDPKWEFPRDKLTLGKPLGEGCFGQVVMAEAVGIDKDKPKEAVTVAVKMLKDDATEKDLSDLVSEMEMMKMIGKHKNIINLLGACTQDGPLYVIVEYASKGNLREYLRARRPPGMEYSYDINRVPEEQMTFKDLVSCTYQLARGMEYLASQKCIHRDLAARNVLVTENNVMKIADFGLARDINNIDYYKKTTNGRLPVKWMAPEALFDRVYTHQSDVWSFGVLMWEIFTLGGSPYPGIPVEELFKLLKEGHRMDKPANCTNELYMMMRDCWHAVPSQRPTFKQLVEDLDRILTLTTNEI

SEQ ID NO: 28023 - protein, 822 aa, Homo sapiens
MVSWGRFICLVVVTMATLSLARPSFSLVEDTTLEPEEPPTKYQISQPEVYVAAPGESLEVRCLLKDAAVISWTKDGVHLGPNNRTVLIGEYLQIKGATPRDSGLYACTASRTVDSETWYFMVNVTDAISSGDDEDDTDGAEDFVSENSNNKRAPYWTNTEKMEKRLHAVPAANTVKFRCPAGGNPMPTMRWLKNGKEFKQEHRIGGYKVRNQHWSLIMESVVPSDKGNYTCVVENEYGSINHTYHLDVVERSPHRPILQAGLPANASTVVGGDVEFVCKVYSDAQPHIQWIKHVEKNGSKYGPDGLPYLKVLKHSGINSSNAEVLALFNVTEADAGEYICKVSNYIGQANQSAWLTVLPKQQAPGREKEITASPDYLEIAIYCIGVFLIACMVVTVILCRMKNTTKKPDFSSQPAVHKLTKRIPLRRQVTVSAESSSSMNSNTPLVRITTRLSSTADTPMLAGVSEYELPEDPKWEFPRDKLTLGKPLGEGCFGQVVMAEAVGIDKDKPKEAVTVAVKMLKDDATEKDLSDLVSEMEMMKMIGKHKNIINLLGACTQDGPLYVIVEYASKGNLREYLRARRPPGMEYSYDINRVPEEQMTFKDLVSCTYQLARGMEYLASQKCIHRDLAARNVLVTENNVMKIADFGLARDINNIDYYKKTTNGRLPVKWMAPEALFDRVYTHQSDVWSFGVLMWEIFTLGGSPYPGIPVEELFKLLKEGHRMDKPANCTNELYMMMRDCWHAVPSQRPTFKQLVEDLDRILTLTTNEEYLDLSQPLEQYSPSYPDTRSSCSSGDDSVFSPDPMPYEPCLPQYPHINGSVKT

SEQ ID NO: 28024 - protein, 682 aa, Homo sapiens
MVSWGRFICLVVVTMATLSLARPSFSLVEDTTLEPEDAISSGDDEDDTDGAEDFVSENSNNKRAPYWTNTEKMEKRLHAVPAANTVKFRCPAGGNPMPTMRWLKNGKEFKQEHRIGGYKVRNQHWSLIMESVVPSDKGNYTCVVENEYGSINHTYHLDVVERSPHRPILQAGLPANASTVVGGDVEFVCKVYSDAQPHIQWIKHVEKNGSKYGPDGLPYLKVLKHSGINSSNAEVLALFNVTEADAGEYICKVSNYIGQANQSAWLTVLPKQQAPGREKEITASPDYLEIAIYCIGVFLIACMVVTVILCRMKNTTKKPDFSSQPAVHKLTKRIPLRRQVSAESSSSMNSNTPLVRITTRLSSTADTPMLAGVSEYELPEDPKWEFPRDKLTLGKPLGEGCFGQVVMAEAVGIDKDKPKEAVTVAVKMLKDDATEKDLSDLVSEMEMMKMIGKHKNIINLLGACTQDGPLYVIVEYASKGNLREYLRARRPPGMEYSYDINRVPEEQMTFKDLVSCTYQLARGMEYLASQKCIHRDLAARNVLVTENNVMKIADFGLARDINNIDYYKKTTNGRLPVKWMAPEALFDRVYTHQSDVWSFGVLMWEIFTLGGSPYPGIPVEELFKLLKEGHRMDKPANCTNELYMMMRDCWHAVPSQRPTFKQLVEDLDRIPPNPSLMSIFRK

SEQ ID NO: 28025 - protein, 819 aa, Homo sapiens
MVSWGRFICLVVVTMATLSLARPSFSLVEDTTLEPEEPPTKYQISQPEVYVAAPGESLEVRCLLKDAAVISWTKDGVHLGPNNRTVLIGEYLQIKGATPRDSGLYACTASRTVDSETWYFMVNVTDAISSGDDEDDTDGAEDFVSENSNNKRAPYWTNTEKMEKRLHAVPAANTVKFRCPAGGNPMPTMRWLKNGKEFKQEHRIGGYKVRNQHWSLIMESVVPSDKGNYTCVVENEYGSINHTYHLDVVERSPHRPILQAGLPANASTVVGGDVEFVCKVYSDAQPHIQWIKHVEKNGSKYGPDGLPYLKVLKAAGVNTTDKEIEVLYIRNVTFEDAGEYTCLAGNSIGISFHSAWLTVLPAPGREKEITASPDYLEIAIYCIGVFLIACMVVTVILCRMKNTTKKPDFSSQPAVHKLTKRIPLRRQVSAESSSSMNSNTPLVRITTRLSSTADTPMLAGVSEYELPEDPKWEFPRDKLTLGKPLGEGCFGQVVMAEAVGIDKDKPKEAVTVAVKMLKDDATEKDLSDLVSEMEMMKMIGKHKNIINLLGACTQDGPLYVIVEYASKGNLREYLRARRPPGMEYSYDINRVPEEQMTFKDLVSCTYQLARGMEYLASQKCIHRDLAARNVLVTENNVMKIADFGLARDINNIDYYKKTTNGRLPVKWMAPEALFDRVYTHQSDVWSFGVLMWEIFTLGGSPYPGIPVEELFKLLKEGHRMDKPANCTNELYMMMRDCWHAVPSQRPTFKQLVEDLDRILTLTTNEEYLDLSQPLEQYSPSYPDTRSSCSSGDDSVFSPDPMPYEPCLPQYPHINGSVKT

SEQ ID NO: 28026 - protein, 785 aa, Homo sapiens
MVSWGRFICLVVVTMATLSLARPSFSLVEDTTLEPEEPPTKYQISQPEVYVAAPGESLEVRCLLKDAAVISWTKDGVHLGPNNRTVLIGEYLQIKGATPRDSGLYACTASRTVDSETWYFMVNVTDAISSGDDEDDTDGAEDFVSENSNNKRAPYWTNTEKMEKRLHAVPAANTVKFRCPAGGNPMPTMRWLKNGKEFKQEHRIGGYKVRNQHWSLIMESVVPSDKGNYTCVVENEYGSINHTYHLDVVERSPHRPILQAGLPANASTVVGGDVEFVCKVYSDAQPHIQWIKHVEKNGSKYGPDGLPYLKVLKAAGVNTTDKEIEVLYIRNVTFEDAGEYTCLAGNSIGISFHSAWLTVLPAPGREKEITASPDYLEIAIYCIGVFLIACMVVTVILCRMKNTTKKPDFSSQPAVHKLTKRIPLRRQVSAESSSSMNSNTPLVRITTRLSSTADTPMLAGVSEYELPEDPKWEFPRDKLTLGKPLGEGCFGQVVMAEAVGIDKDKPKEAVTVAVKMLKDDATEKDLSDLVSEMEMMKMIGKHKNIINLLGACTQDGPLYVIVEYASKGNLREYLRARRPPGMEYSYDINRVPEEQMTFKDLVSCTYQLARGMEYLASQKCIHRDLAARNVLVTENNVMKIADFGLARDINNIDYYKKTTNGRLPVKWMAPEALFDRVYTHQSDVWSFGVLMWEIFTLGGSPYPGIPVEELFKLLKEGHRMDKPANCTNELYMMMRDCWHAVPSQRPTFKQLVEDLDRILTLTTNEEYLDLSQPLEPYSPCYPDPR

SEQ ID NO: 28027 - protein, 766 aa, Homo sapiens
MVSWGRFICLVVVTMATLSLARPSFSLVEDTTLEPEEPPTKYQISQPEVYVAAPGESLEVRCLLKDAAVISWTKDGVHLGPNNRTVLIGEYLQIKGATPRDSGLYACTASRTVDSETWYFMVNVTDAISSGDDEDDTDGAEDFVSENSNNKRAPYWTNTEKMEKRLHAVPAANTVKFRCPAGGNPMPTMRWLKNGKEFKQEHRIGGYKVRNQHWSLIMESVVPSDKGNYTCVVENEYGSINHTYHLDVVERSPHRPILQAGLPANASTVVGGDVEFVCKVYSDAQPHIQWIKHVEKNGSKYGPDGLPYLKVLKAAGVNTTDKEIEVLYIRNVTFEDAGEYTCLAGNSIGISFHSAWLTVLPAPGREKEITASPDYLEIAIYCIGVFLIACMVVTVILCRMKNTTKKPDFSSQPAVHKLTKRIPLRRQVSAESSSSMNSNTPLVRITTRLSSTADTPMLAGVSEYELPEDPKWEFPRDKLTLGKPLGEGCFGQVVMAEAVGIDKDKPKEAVTVAVKMLKDDATEKDLSDLVSEMEMMKMIGKHKNIINLLGACTQDGPLYVIVEYASKGNLREYLRARRPPGMEYSYDINRVPEEQMTFKDLVSCTYQLARGMEYLASQKCIHRDLAARNVLVTENNVMKIADFGLARDINNIDYYKKTTNGRLPVKWMAPEALFDRVYTHQSDVWSFGVLMWEIFTLGGSPYPGIPVEELFKLLKEGHRMDKPANCTNELYMMMRDCWHAVPSQRPTFKQLVEDLDRILTLTTNEI

SEQ ID NO: 28028 - protein, 254 aa, Homo sapiens
MVSWGRFICLVVVTMATLSLARPSFSLVEDTTLEPEEPPTKYQISQPEVYVAAPGESLEVRCLLKDAAVISWTKDGVHLGPNNRTVLIGEYLQIKGATPRDSGLYACTASRTVDSETWYFMVNVTDAISSGDDEDDTDGAEDFVSENSNNKRAPYWTNTEKMEKRLHAVPAANTVKFRCPAGGNPMPTMRWLKNGKEFKQEHRIGGYKVRNQHWSLIMESVVPSDKGNYTCVVENEYGSINHTYHLDVVGSQGL

SEQ ID NO: 28029 - protein, 705 aa, Homo sapiens
MVSWGRFICLVVVTMATLSLARPSFSLVEDTTLEPEEPPTKYQISQPEVYVAAPGESLEVRCLLKDAAVISWTKDGVHLGPNNRTVLIGEYLQIKGATPRDSGLYACTASRTVDSETWYFMVNVTDAISSGDDEDDTDGAEDFVSENSNNKRAPYWTNTEKMEKRLHAVPAANTVKFRCPAGGNPMPTMRWLKNGKEFKQEHRIGGYKVRNQHWSLIMESVVPSDKGNYTCVVENEYGSINHTYHLDVVERSPHRPILQAGLPANASTVVGGDVEFVCKVYSDAQPHIQWIKHVEKNGSKYGPDGLPYLKVLKVSAESSSSMNSNTPLVRITTRLSSTADTPMLAGVSEYELPEDPKWEFPRDKLTLGKPLGEGCFGQVVMAEAVGIDKDKPKEAVTVAVKMLKDDATEKDLSDLVSEMEMMKMIGKHKNIINLLGACTQDGPLYVIVEYASKGNLREYLRARRPPGMEYSYDINRVPEEQMTFKDLVSCTYQLARGMEYLASQKCIHRDLAARNVLVTENNVMKIADFGLARDINNIDYYKKTTNGRLPVKWMAPEALFDRVYTHQSDVWSFGVLMWEIFTLGGSPYPGIPVEELFKLLKEGHRMDKPANCTNELYMMMRDCWHAVPSQRPTFKQLVEDLDRILTLTTNEEYLDLSQPLEQYSPSYPDTRSSCSSGDDSVFSPDPMPYEPCLPQYPHINGSVKT

SEQ ID NO: 28030 - protein, 822 aa, Homo sapiens
MVSWGRFICLVVVTMATLSLARPSFSLVEDTTLEPEEPPTKYQISQPEVYVAAPGESLEVRCLLKDAAVISWTKDGVHLGPNNRTVLIGEYLQIKGATPRDSGLYACTASRTVDSETWYFMVNVTDAISSGDDEDDTDGAEDFVSENSNNKRAPYWTNTEKMEKRLHAVPAANTVKFRCPAGGNPMPTMRWLKNGKEFKQEHRIGGYKVRNQHWSLIMESVVPSDKGNYTCVVENEYGSINHTYHLDVVERSPHRPILQAGLPANASTVVGGDVEFVCKVYSDAQPHIQWIKHVEKNGSKYGPDGLPYLKVLKVTKAAGVNTTDKEIEVLYIRNVTFEDAGEYTCLAGNSIGISFHSAWLTVLPAPGREKEITASPDYLEIAIYCIGVFLIACMVVTVILCRMKNTTKKPDFSSQPAVHKLTKRIPLRRQVSAESSSSMNSNTPLVRITTRLSSTADTPMLAGVSEYELPEDPKWEFPRDKLTLGKPLGEGCFGQVVMAEAVGIDKDKPKEAVTVAVKMLKDDATEKDLSDLVSEMEMMKMIGKHKNIINLLGACTQDGPLYVIVEYASKGNLREYLRARRPPGMEYSYDINRVPEEQMTFKDLVSCTYQLARGMEYLASQKCIHRDLAARNVLVTENNVMKIADFGLARDINNIDYYKKTTNGRLPVKWMAPEALFDRVYTHQSDVWSFGVLMWEIFTLGGSPYPGIPVEELFKLLKEGHRMDKPANCTNELYMMMRDCWHAVPSQRPTFKQLVEDLDRILTLTTNEEYLDLSQPLEQYSPSYPDTRSSCSSGDDSVFSPDPMPYEPCLPQYPHINGSVKT

SEQ ID NO: 28031 - protein, 769 aa, Homo sapiens
MVSWGRFICLVVVTMATLSLARPSFSLVEDTTLEPEEPPTKYQISQPEVYVAAPGESLEVRCLLKDAAVISWTKDGVHLGPNNRTVLIGEYLQIKGATPRDSGLYACTASRTVDSETWYFMVNVTDAISSGDDEDDTDGAEDFVSENSNNKRAPYWTNTEKMEKRLHAVPAANTVKFRCPAGGNPMPTMRWLKNGKEFKQEHRIGGYKVRNQHWSLIMESVVPSDKGNYTCVVENEYGSINHTYHLDVVERSPHRPILQAGLPANASTVVGGDVEFVCKVYSDAQPHIQWIKHVEKNGSKYGPDGLPYLKVLKHSGINSSNAEVLALFNVTEADAGEYICKVSNYIGQANQSAWLTVLPKQQAPGREKEITASPDYLEIAIYCIGVFLIACMVVTVILCRMKNTTKKPDFSSQPAVHKLTKRIPLRRQVTVSAESSSSMNSNTPLVRITTRLSSTADTPMLAGVSEYELPEDPKWEFPRDKLTLGKPLGEGCFGQVVMAEAVGIDKDKPKEAVTVAVKMLKDDATEKDLSDLVSEMEMMKMIGKHKNIINLLGACTQDGPLYVIVEYASKGNLREYLRARRPPGMEYSYDINRVPEEQMTFKDLVSCTYQLARGMEYLASQKCIHRDLAARNVLVTENNVMKIADFGLARDINNIDYYKKTTNGRLPVKWMAPEALFDRVYTHQSDVWSFGVLMWEIFTLGGSPYPGIPVEELFKLLKEGHRMDKPANCTNELYMMMRDCWHAVPSQRPTFKQLVEDLDRILTLTTNEI

SEQ ID NO: 28032 - protein, 820 aa, Homo sapiens
MVSWGRFICLVVVTMATLSLARPSFSLVEDTTLEPEEPPTKYQISQPEVYVAAPGESLEVRCLLKDAAVISWTKDGVHLGPNNRTVLIGEYLQIKGATPRDSGLYACTASRTVDSETWYFMVNVTDAISSGDDEDDTDGAEDFVSENSNNKRAPYWTNTEKMEKRLHAVPAANTVKFRCPAGGNPMPTMRWLKNGKEFKQEHRIGGYKVRNQHWSLIMESVVPSDKGNYTCVVENEYGSINHTYHLDVVERSPHRPILQAGLPANASTVVGGDVEFVCKVYSDAQPHIQWIKHVEKNGSKYGPDGLPYLKVLKHSGINSSNAEVLALFNVTEADAGEYICKVSNYIGQANQSAWLTVLPKQQAPGREKEITASPDYLEIAIYCIGVFLIACMVVTVILCRMKNTTKKPDFSSQPAVHKLTKRIPLRRQVSAESSSSMNSNTPLVRITTRLSSTADTPMLAGVSEYELPEDPKWEFPRDKLTLGKPLGEGCFGQVVMAEAVGIDKDKPKEAVTVAVKMLKDDATEKDLSDLVSEMEMMKMIGKHKNIINLLGACTQDGPLYVIVEYASKGNLREYLRARRPPGMEYSYDINRVPEEQMTFKDLVSCTYQLARGMEYLASQKCIHRDLAARNVLVTENNVMKIADFGLARDINNIDYYKKTTNGRLPVKWMAPEALFDRVYTHQSDVWSFGVLMWEIFTLGGSPYPGIPVEELFKLLKEGHRMDKPANCTNELYMMMRDCWHAVPSQRPTFKQLVEDLDRILTLTTNEEYLDLSQPLEQYSPSYPDTRSSCSSGDDSVFSPDPMPYEPCLPQYPHINGSVKT

SEQ ID NO: 28033 - protein, 366 aa, Homo sapiens
MVSWGRFICLVVVTMATLSLARPSFSLVEDTTLEPEEPPTKYQISQPEVYVAAPGESLEVRCLLKDAAVISWTKDGVHLGPNNRTVLIGEYLQIKGATPRDSGLYACTASRTVDSETWYFMVNVTDAISSGDDEDDTDGAEDFVSENSNNKRAPYWTNTEKMEKRLHAVPAANTVKFRCPAGGNPMPTMRWLKNGKEFKQEHRIGGYKVRNQHWSLIMESVVPSDKGNYTCVVENEYGSINHTYHLDVVERSPHRPILQAGLPANASTVVGGDVEFVCKVYSDAQPHIQWIKHVEKNGSKYGPDGLPYLKVLKHSGINSSNAEVLALFNVTEADAGEYICKVSNYIGQANQSAWLTVLPKQQGRRC

SEQ ID NO: 28034 - protein, 704 aa, Homo sapiens
MVSWGRFICLVVVTMATLSLARPSFSLVEDTTLEPEGAPYWTNTEKMEKRLHAVPAANTVKFRCPAGGNPMPTMRWLKNGKEFKQEHRIGGYKVRNQHWSLIMESVVPSDKGNYTCVVENEYGSINHTYHLDVVERSPHRPILQAGLPANASTVVGGDVEFVCKVYSDAQPHIQWIKHVEKNGSKYGPDGLPYLKVLKAAGVNTTDKEIEVLYIRNVTFEDAGEYTCLAGNSIGISFHSAWLTVLPAPGREKEITASPDYLEIAIYCIGVFLIACMVVTVILCRMKNTTKKPDFSSQPAVHKLTKRIPLRRQVSAESSSSMNSNTPLVRITTRLSSTADTPMLAGVSEYELPEDPKWEFPRDKLTLGKPLGEGCFGQVVMAEAVGIDKDKPKEAVTVAVKMLKDDATEKDLSDLVSEMEMMKMIGKHKNIINLLGACTQDGPLYVIVEYASKGNLREYLRARRPPGMEYSYDINRVPEEQMTFKDLVSCTYQLARGMEYLASQKCIHRDLAARNVLVTENNVMKIADFGLARDINNIDYYKKTTNGRLPVKWMAPEALFDRVYTHQSDVWSFGVLMWEIFTLGGSPYPGIPVEELFKLLKEGHRMDKPANCTNELYMMMRDCWHAVPSQRPTFKQLVEDLDRILTLTTNEEYLDLSQPLEQYSPSYPDTRSSCSSGDDSVFSPDPMPYEPCLPQYPHINGSVKT

SEQ ID NO: 28035 - protein, 707 aa, Homo sapiens
MVSWGRFICLVVVTMATLSLARPSFSLVEDTTLEPEDAISSGDDEDDTDGAEDFVSENSNNKRAPYWTNTEKMEKRLHAVPAANTVKFRCPAGGNPMPTMRWLKNGKEFKQEHRIGGYKVRNQHWSLIMESVVPSDKGNYTCVVENEYGSINHTYHLDVVERSPHRPILQAGLPANASTVVGGDVEFVCKVYSDAQPHIQWIKHVEKNGSKYGPDGLPYLKVLKAAGVNTTDKEIEVLYIRNVTFEDAGEYTCLAGNSIGISFHSAWLTVLPAPGREKEITASPDYLEIAIYCIGVFLIACMVVTVILCRMKNTTKKPDFSSQPAVHKLTKRIPLRRQVTVSAESSSSMNSNTPLVRITTRLSSTADTPMLAGVSEYELPEDPKWEFPRDKLTLGKPLGEGCFGQVVMAEAVGIDKDKPKEAVTVAVKMLKDDATEKDLSDLVSEMEMMKMIGKHKNIINLLGACTQDGPLYVIVEYASKGNLREYLRARRPPGMEYSYDINRVPEEQMTFKDLVSCTYQLARGMEYLASQKCIHRDLAARNVLVTENNVMKIADFGLARDINNIDYYKKTTNGRLPVKWMAPEALFDRVYTHQSDVWSFGVLMWEIFTLGGSPYPGIPVEELFKLLKEGHRMDKPANCTNELYMMMRDCWHAVPSQRPTFKQLVEDLDRILTLTTNEEEKKVSGAVDCHKPPCNPSHLPCVLAVDQ

SEQ ID NO: 28036 - protein, 680 aa, Homo sapiens
MVSWGRFICLVVVTMATLSLARPSFSLVEDTTLEPEDAISSGDDEDDTDGAEDFVSENSNNKRAPYWTNTEKMEKRLHAVPAANTVKFRCPAGGNPMPTMRWLKNGKEFKQEHRIGGYKVRNQHWSLIMESVVPSDKGNYTCVVENEYGSINHTYHLDVVERSPHRPILQAGLPANASTVVGGDVEFVCKVYSDAQPHIQWIKHVEKNGSKYGPDGLPYLKVLKHSGINSSNAEVLALFNVTEADAGEYICKVSNYIGQANQSAWLTVLPKQQAPGREKEITASPDYLEIAIYCIGVFLIACMVVTVILCRMKNTTKKPDFSSQPAVHKLTKRIPLRRQVTVSAESSSSMNSNTPLVRITTRLSSTADTPMLAGVSEYELPEDPKWEFPRDKLTLGKPLGEGCFGQVVMAEAVGIDKDKPKEAVTVAVKMLKDDATEKDLSDLVSEMEMMKMIGKHKNIINLLGACTQDGPLYVIVEYASKGNLREYLRARRPPGMEYSYDINRVPEEQMTFKDLVSCTYQLARGMEYLASQKCIHRDLAARNVLVTENNVMKIADFGLARDINNIDYYKKTTNGRLPVKWMAPEALFDRVYTHQSDVWSFGVLMWEIFTLGGSPYPGIPVEELFKLLKEGHRMDKPANCTNELYMMMRDCWHAVPSQRPTFKQLVEDLDRILTLTTNEI

SEQ ID NO: 28037 - protein, 709 aa, Homo sapiens
MVSWGRFICLVVVTMATLSLARPSFSLVEDTTLEPEEPPTKYQISQPEVYVAAPGESLEVRCLLKDAAVISWTKDGVHLGPNNRTVLIGEYLQIKGATPRDSGLYACTASRTVDSETWYFMVNVTDAISSGDDEDDTDGAEDFVSENSNNKRAPYWTNTEKMEKRLHAVPAANTVKFRCPAGGNPMPTMRWLKNGKEFKQEHRIGGYKVRNQHWSLIMESVVPSDKGNYTCVVENEYGSINHTYHLDVVAPGREKEITASPDYLEIAIYCIGVFLIACMVVTVILCRMKNTTKKPDFSSQPAVHKLTKRIPLRRQVTVSAESSSSMNSNTPLVRITTRLSSTADTPMLAGVSEYELPEDPKWEFPRDKLTLGKPLGEGCFGQVVMAEAVGIDKDKPKEAVTVAVKMLKDDATEKDLSDLVSEMEMMKMIGKHKNIINLLGACTQDGPLYVIVEYASKGNLREYLRARRPPGMEYSYDINRVPEEQMTFKDLVSCTYQLARGMEYLASQKCIHRDLAARNVLVTENNVMKIADFGLARDINNIDYYKKTTNGRLPVKWMAPEALFDRVYTHQSDVWSFGVLMWEIFTLGGSPYPGIPVEELFKLLKEGHRMDKPANCTNELYMMMRDCWHAVPSQRPTFKQLVEDLDRILTLTTNEEYLDLSQPLEQYSPSYPDTRSSCSSGDDSVFSPDPMPYEPCLPQYPHINGSVKT

SEQ ID NO: 28038 - protein, 569 aa, Homo sapiens
MLLLFSVILISWVSTVGGEGTLCDFPKIHHGFLYDEEDYNPFSQVPTGEVFYYSCEYNFVSPSKSFWTRITCTEEGWSPTPKCLRMCSFPFVKNGHSESSGLIHLEGDTVQIICNTGYSLQNNEKNISCVERGWSTPPICSFTKGECHVPILEANVDAQPKKESYKVGDVLKFSCRKNLIRVGSDSVQCYQFGWSPNFPTCKGQVRSCGPPPQLSNGEVKEIRKEEYGHNEVVEYDCNPNFIINGPKKIQCVDGEWTTLPTCVEQVKTCGYIPELEYGYVQPSVPPYQHGVSVEVNCRNEYAMIGNNMITCINGIWTELPMCVATHQLKRCKIAGVNIKTLLKLSGKEFNHNSRIRYRCSDIFRYRHSVCINGKWNPEVDCTEKREQFCPPPPQIPNAQNMTTTVNYQDGEKVAVLCKENYLLPEAKEIVCKDGRWQSLPRCVESTAYCGPPPSINNGDTTSFPLSVYPPGSTVTYRCQSFYKLQGSVTVTCRNKQWSEPPRCLDPCVVSEENMNKNNIQLKWRNDGKLYAKTGDAVEFQCKFPHKAMISSPPFRAICQEGKFEYPICE

SEQ ID NO: 28039 - protein, 279 aa, Homo sapiens
MTERFDCHHCNESLFGKKYILREESPYCVVCFETLFANTCEECGKPIGCDCKDLSYKDRHWHEACFHCSQCRNSLVDKPFAAKEDQLLCTDCYSNEYSSKCQECKKTIMPGTRKMEYKGSSWHETCFICHRCQQPIGTKSFIPKDNQNFCVPCYEKQHAMQCVQCKKPITTGGVTYREQPWHKECFVCTACRKQLSGQRFTARDDFAYCLNCFCDLYAKKCAGCTNPISGLGGTKYISFEERQWHNDCFNCKKCSLSLVGRGFLTERDDILCPDCGKDI

SEQ ID NO: 28040 - protein, 151 aa, Homo sapiens
MTERFDCHHCNESLFGKKYILREESPYCVVCFETLFANTCEECGKPIGCDCKVPARWSTRAAAGMRPASSATAASSQLEPRVSSPKTIRISVCPAMRNNMPCSAFSAKSPSPREGSLTGSSPGTRSASCAPPAGSSCLGSASQLAMTLPTA

SEQ ID NO: 28041 - protein, 764 aa, Homo sapiens
MAATLKSLKLVRYRAFCSPSAFGAVRSVSYWNVSSTQHGGQDPPEHISLCHSAKKVKNICSTFSSRRILTTSSAHPGLEFSKTSSSKASTLQLGSPRATGVDEEDVEVFDSFENMRVFLQLRPEYRVHSYNASETSQLLSVSEGELILHKVRVNQNNLQAQVIVDYLCKLSSLPAEQHPVLLGSTSFALLCQLSVKKIQLFDTQDLINVLKAFVILGIPHSHSMLDVYETKCCHQVWEMNMDQLLLVADLWRYLGRKVPRFLNIFSSYLNLHWKDLSLSQLVHLIYVIGENRQVSQDLMQKLESLILKYIDLINLEEVGTICLGFFKSSTNLSEFVMRKIGDLACANIQHLSSRSLVNIVKMFRFTHVDHINFMKQIGEIAPQRIPSLGVQGVMHLTLYCSALRFLNEGVMNAVAASLPPRVAHCRSKDVAKILWSFGTLNYKPPNAEEFYSSLISEIHRKMPEFNQYPEHLPTCLLGLAFLEYFPVELIDFALSPGFVRLAQERTKFDLLKELYTLDGTVGIECPDYRGNRLSTHLQQEGSELLWYLAEKDMNSKPEFLETVFLLETMLGGPQYVKHHMILPHTRSSDLEVQLDVNLKPLPFNREATPAENVAKLRLEHVGVSLTDDLMNKLLKGKARGHFQGKTESEPGQQPMELENKAAVPLGGFLCNVADKSGAMEMAGLCPAACMQTPRMKLAVQFTNRNQYCYGSRDLLGLHNMKRRQLARLGYRVVELSYWEWLPLLKRTRLEKLAFLHEKVFTSAL

SEQ ID NO: 28042 - protein, 215 aa, Homo sapiens
MEKNPPDDTGPVHVPLGHIVANEKWRGSQLAQEMQGKIKLIFEDGLTPDFYLSNRCCILYVTEADLVAGNGYRKRLVRVRNSNNLKGIVVVEKTRMSEQYFPALQKFTVLDLGMVLLPVASQMEASCLVIQLVQEQTKEPSKNPLLGKKRALLLSEPSLLRTVQQIPGVGKVKAPLLLQKFPSIQQLSNASIGELEQVVGQAVAQQIHAFFTQPR

SEQ ID NO: 28043 - protein, 332 aa, Homo sapiens
MEPVGRKRSRKAAKAQLEAQVTAAQGATKEGSGIASNFPGQPTMEPVGRKRSRKAAKAQLEAQVRAAPAKKHTGKDPVRDECEERNPFTETREEDVTDEHGEREPFAEKDEHTGIHTMKLEHIAADIKKGLAAKREMIKIDKAAYRKTKNTIERALKKKQLKRQKRDYRHTRKLLNVLKEYIAEKQKDDEAEEAEAAAAAAEAAAAAEAAAAAAEVIVVEDEEEEEKEEEEEKEEEEEEGEEEGGGEEGEEGGGGGEGEETEEEEEEEEEEEEEEQIKAFQEKQKRWQQPTGVRSWRLREMKPLLEQLLKAAKDTKDNYCIISSSEESELDN

SEQ ID NO: 28044 - protein, 413 aa, Homo sapiens
MEFPGLGSLGTSEPLPQFVDPALVSSTPESGVFFPSGPEGLDAAASSTAPSTATAAAAALAYYRDAEAYRHSPVFQVYPLLNCMEGIPGGSPYAGWAYGKTGLYPASTVCPTREDSPPQAVEDLDGKGSTSFLETLKTERLSPDLLTLGPALPSSLPVPNSAYGGPDFSSTFFSPTGSPLNSAAYSSPKLRGTLPLPPCEARECVNCGATATPLWRRDRTGHYLCNACGLYHKMNGQNRPLIRPKKRLIVSKRAGTQCTNCQTTTTTLWRRNASGDPVCNACGLYYKLHQVNRPLTMRKDGIQTRNRKASGKGKKKRGSSLGGTGAAEGPAGGFMVVAGGSGSGNCGEVASGLTLGPPGTAHLYQGLGPVVLSGPVSHLMPFPGPLLGSPTGSFPTGPMPPTTSTTVVAPLSS

SEQ ID NO: 28045 - protein, 335 aa, Homo sapiens
MEFPGLGSLGTSEPLPQFVDPALVSSTPESGVFFPSGPEGLDAAASSTAPSTATAAAAALAYYRDAEAYRHSPVFQVYPLLNCMEGIPGGSPYAGWAYGKTGLYPASTVCPTREDSPPQAVEDLDGKGSTSFLETLKTERLSPDLLTLGPALPSSLPVPNSAYGGPDFSSTFFSPTGSPLNSAAYSSPKLRGTLPLPPCEARECVNCGATATPLWRRDRTGHYLCNACGLYHKMNGQNRPLIRPKKRLIVSKRAGTQCTNCQTTTTTLWRRNASGDPVCNACGLYYKLHHQHYCGGSAQLMRAQSMASRGGVVSFSSCSQNSGQPKSLGPRHPLA

SEQ ID NO: 28046 - protein, 330 aa, Homo sapiens
MEGIPGGSPYAGWAYGKTGLYPASTVCPTREDSPPQAVEDLDGKGSTSFLETLKTERLSPDLLTLGPALPSSLPVPNSAYGGPDFSSTFFSPTGSPLNSAAYSSPKLRGTLPLPPCEARECVNCGATATPLWRRDRTGHYLCNACGLYHKMNGQNRPLIRPKKRLIVSKRAGTQCTNCQTTTTTLWRRNASGDPVCNACGLYYKLHQVNRPLTMRKDGIQTRNRKASGKGKKKRGSSLGGTGAAEGPAGGFMVVAGGSGSGNCGEVASGLTLGPPGTAHLYQGLGPVVLSGPVSHLMPFPGPLLGSPTGSFPTGPMPPTTSTTVVAPLSS

SEQ ID NO: 28047 - protein, 1164 aa, Homo sapiens
MAGGEDRGDGEPVSVVTVRVQYLEDTDPFACANFPEPRRAPTCSLDGALPLGAQIPAVHRLLGAPLKLEDCALQVSPSGYYLDTELSLEEQREMLEGFYEEISKGRKPTLILRTQLSVRVNAILEKLYSSSGPELRRSLFSLKQIFQEDKDLVPEFVHSEGLSCLIRVGAAADHNYQSYILRALGQLMLFVDGMLGVVAHSDTIQWLYTLCASLSRLVVKTALKLLLVFVEYSENNAPLFIRAVNSVASTTGAPPWANLVSILEEKNGADPELLVYTVTLINKTLAALPDQDSFYDVTDALEQQGMEALVQRHLGTAGTDVDLRTQLVLYENALKLEDGDIEEAPGAGGRRERRKPSSEEGKRSRRSLEGGGCPARAPEPGPTGPASPVGPTSSTGPALLTGPASSPVGPPSGLQASVNLFPTISVAPSADTSSERSIYKARFLENVAAAETEKQVALAQGRAETLAGAMPNEAGGHPDARQLWDSPETAPAARTPQSPAPCVLLRAQRSLAPEPKEPLIPASPKAEPIWELPTRAPRLSIGDLDFSDLGEDEDQDMLNVESVEAGKDIPAPSPPLPLLSGVPPPPPLPPPPPIKGPFPPPPPLPLAAPLPHSVPDSSALPTKRKTVKLFWRELKLAGGHGVSASRFGPCATLWASLDPVSVDTARLEHLFESRAKEVLPSKKAGEGRRTMTTVLDPKRSNAINIGLTTLPPVHVIKAALLNFDEFAVSKDGIEKLLTMMPTEEERQKIEEAQLANPDIPLGPAENFLMTLASIGGLAARLQLWAFKLDYDSMEREIAEPLFDLKVGMEQLVQNATFRCILATLLAVGNFLNGSQSSGFELSYLEKVSEVKDTVRRQSLLHHLCSLVLQTRPESSDLYSEIPALTRCAKVDFEQLTENLGQLERRSRAAEESLRSLAKHELAPALRARLTHFLDQCARRVAMLRIVHRRVCNRFHAFLLYLGYTPQAAREVRIMQFCHTLREFALEYRTCRERVLQQQQKQATYRERNKTRGRMITETEKFSGVAGEAPSNPSVPVAVSSGPGRGDADSHASMKSLLTSRPEDTTHNRRSRGMVQSSSPIMPTVGPSTASPEEPPGSSLPSDTSDEIMDLLVQSVTKSSPRALAARERKRSRGNRKSLRRTLKSGLGDDLVQALGLSKGPGLEV

SEQ ID NO: 28048 - protein, 284 aa, Homo sapiens
MTTAHFYCQYCTASLLGKKYVLKDDSPYCVTCYDRVFSNYCEECKKPIESDSKDLCYKDRHWHEGCFKCTKCNHSLVEKPFAAKDERLLCTECYSNECSSKCFHCKRTIMPGSRKMEFKGNYWHETCFVCENCRQPIGTKPLISKESGNYCVPCFEKEFAHYCNFCKKVITSGGITFCDQLWHKECFLCSGCRKDLCEEQFMSRDDYPFCVDCYNHLYANKCVACSKPISGLTGAKFICFQDSQWHSECFNCGKCSVSLVGKGFLTQNKEIFCQKCGSGMDTDI

SEQ ID NO: 28049 - protein, 418 aa, Homo sapiens
MGEEGTGGTVHLLCLAASSGVPLFCRSSRGGAPARQQLPFSVIGSLNGVHMFGQNLEVQLSSARTENTTVVWKSFHDSITLIVLSSEVGISELRLERLLQMVFGAMVLLVGLEELTNIRNVERLKKDLRASYCLIDSFLGDSELIGDLTQCVDCVIPPEGSLLQEALSGFAEAAGTTFVSLVVSGRVVAATEGWWRLGTPEAVLLPWLVGSLPPQTARDYPVYLPHGSPTVPHRLLTLTLLPSLELCLLCGPSPPLSQLYPQLLERWWQPLLDPLRACLPLGPRALPSGFPLHTDILGLLLLHLELKRCLFTVEPLGDKEPSPEQRRRLLRNFYTLVTSTHFPPEPGPPEKTEDEVYQAQLPRACYLVLGTEEPGTGVRLVALQLGLRRLLLLLSPQSPTHGLRSLATHTLHALTPLL

SEQ ID NO: 28050 - protein, 387 aa, Homo sapiens
MGEEGTGGTVHLLCLAASSGVPLFCRSSRGGAPARQQLPFSVIGSLNGVHMFGQNLEVQLSSARTENTTVVWKSFHDSITLIVLSSEVGISELRLERLLQMVFGAMVLLVGLEELTNIRNVERLKKDLRASYCLIDSFLGDSELIGDLTQCVDCVIPPEGSLLQEALSGFAEAAGTTFVSLVVSGRVVAATEGWWRLGTPEAVLLPWLVGSLPPQTARDYPVYLPHGSPTVPHRLLTLTLLPSLELCLLCGPSPPLSQLYPQLLERWWQPLLDPLRACLPLGPRALPSGFPLHTDILGLLLLHLELKRCLFTVEPLGDKEPSPEQRRRLLRNFYTLVTSTHFPPEPGPPEKTEDEVYQAQLPRADYLAVGDGHRHGAVSVSLFIRSQ

SEQ ID NO: 28051 - protein, 382 aa, Homo sapiens
MGEEGTGGTVHLLCLAASSGVPLFCRSSRGGAPARQQLPFSVIGSLNGVHMFGQNLEVQLSSARTENTTVVLLVGLEELTNIRNVERLKKDLRASYCLIDSFLGDSELIGDLTQCVDCVIPPEGSLLQEALSGFAEAAGTTFVSLVVSGRVVAATEGWWRLGTPEAVLLPWLVGSLPPQTARDYPVYLPHGSPTVPHRLLTLTLLPSLELCLLCGPSPPLSQLYPQLLERWWQPLLDPLRACLPLGPRALPSGFPLHTDILGLLLLHLELKRCLFTVEPLGDKEPSPEQRRRLLRNFYTLVTSTHFPPEPGPPEKTEDEVYQAQLPRACYLVLGTEEPGTGVRLVALQLGLRRLLLLLSPQSPTHGLRSLATHTLHALTPLL

SEQ ID NO: 28052 - protein, 581 aa, Homo sapiens
MQRPGPRLWLVLQVMGSCAAISSMDMERPGDGKCQPIEIPMCKDIGYNMTRMPNLMGHENQREAAIQLHEFAPLVEYGCHGHLRFFLCSLYAPMCTEQVSTPIPACRVMCEQARLKCSPIMEQFNFKWPDSLDCRKLPNKNDPNYLCMEAPNNGSDEPTRGSGLFPPLFRPQRPHSAQEHPLKDGGPGRGGCDNPGKFHHVEKSASCAPLCTPGVDVYWSREDKRFAVVWLAIWAVLCFFSSAFTVLTFLIDPARFRYPERPIIFLSMCYCVYSVGYLIRLFAGAESIACDRDSGQLYVIQEGLESTGCTLVFLVLYYFGMASSLWWVVLTLTWFLAAGKKWGHEAIEANSSYFHLAAWAIPAVKTILILVMRRVAGDELTGVCYVGSMDVNALTGFVLIPLACYLVIGTSFILSGFVALFHIRRVMKTGGENTDKLEKLMVRIGLFSVLYTVPATCVIACYFYERLNMDYWKILAAQHKCKMNNQTKTLDCLMAASIPAVEIFMVKIFMLLVVGITSGMWIWTSKTLQSWQQVCSRRLKKKSRRKPASVITSGGIYKKAQHPQKTHHGKYEIPAQSPTCV

SEQ ID NO: 28053 - protein, 355 aa, Homo sapiens
MGCRQSSEEKEAARRSRRIDRHLRSESQRQRREIKLLLLGTSNSGKSTIVKQMKIIHSGGFNLEACKEYKPLIIYNAIDSLTRIIRALAALRIDFHNPDRAYDAVQLFALTGPAESKGEITPELLGVMRRLWADPGAQACFSRSSEYHLEDNAAYYLNDLERIAAADYIPTVEDILRSRDMTTGIVENKFTFKELTFKMVDVGGQRSERKKWIHCFEGVTAIIFCVELSGYDLKLYEDNQTSRMAESLRLFDSICNNNWFINTSLILFLNKKDLLAEKIRRIPLTICFPEYKGQNTYEEAAVYIQRQFEDLNRNKETKEIYSHFTCATDTSNIQFVFDAVTDVIIQNNLKYIGLC

SEQ ID NO: 28054 - protein, 394 aa, Homo sapiens
MGCLGNSKTEDQRNEEKAQREANKKIEKQLQKDKQVYRATHRLLLLGAGESGKSTIVKQMRILHVNGFNGEGGEEDPQAARSNSDGEKATKVQDIKNNLKEAIETIVAAMSNLVPPVELANPENQFRVDYILSVMNVPDFDFPPEFYEHAKALWEDEGVRACYERSNEYQLIDCAQYFLDKIDVIKQADYVPSDQDLLRCRVLTSGIFETKFQVDKVNFHMFDVGGQRDERRKWIQCFNDVTAIIFVVASSSYNMVIREDNQTNRLQEALNLFKSIWNNRWLRTISVILFLNKQDLLAEKVLAGKSKIEDYFPEFARYTTPEDATPEPGEDPRVTRAKYFIRDEFLRISTASGDGRHYCYPHFTCAVDTENIRRVFNDCRDIIQRMHLRQYELL

SEQ ID NO: 28055 - protein, 380 aa, Homo sapiens
MGCLGNSKTEDQRNEEKAQREANKKIEKQLQKDKQVYRATHRLLLLGAGESGKSTIVKQMRILHVNGFNGDSEKATKVQDIKNNLKEAIETIVAAMSNLVPPVELANPENQFRVDYILSVMNVPDFDFPPEFYEHAKALWEDEGVRACYERSNEYQLIDCAQYFLDKIDVIKQADYVPSDQDLLRCRVLTSGIFETKFQVDKVNFHMFDVGGQRDERRKWIQCFNDVTAIIFVVASSSYNMVIREDNQTNRLQEALNLFKSIWNNRWLRTISVILFLNKQDLLAEKVLAGKSKIEDYFPEFARYTTPEDATPEPGEDPRVTRAKYFIRDEFLRISTASGDGRHYCYPHFTCAVDTENIRRVFNDCRDIIQRMHLRQYELL

SEQ ID NO: 28056 - protein, 379 aa, Homo sapiens
MGCLGNSKTEDQRNEEKAQREANKKIEKQLQKDKQVYRATHRLLLLGAGESGKSTIVKQMRILHVNGFNGDEKATKVQDIKNNLKEAIETIVAAMSNLVPPVELANPENQFRVDYILSVMNVPDFDFPPEFYEHAKALWEDEGVRACYERSNEYQLIDCAQYFLDKIDVIKQADYVPSDQDLLRCRVLTSGIFETKFQVDKVNFHMFDVGGQRDERRKWIQCFNDVTAIIFVVASSSYNMVIREDNQTNRLQEALNLFKSIWNNRWLRTISVILFLNKQDLLAEKVLAGKSKIEDYFPEFARYTTPEDATPEPGEDPRVTRAKYFIRDEFLRISTASGDGRHYCYPHFTCAVDTENIRRVFNDCRDIIQRMHLRQYELL

SEQ ID NO: 28057 - protein, 395 aa, Homo sapiens
MGCLGNSKTEDQRNEEKAQREANKKIEKQLQKDKQVYRATHRLLLLGAGESGKSTIVKQMRILHVNGFNGEGGEEDPQAARSNSDGSEKATKVQDIKNNLKEAIETIVAAMSNLVPPVELANPENQFRVDYILSVMNVPDFDFPPEFYEHAKALWEDEGVRACYERSNEYQLIDCAQYFLDKIDVIKQADYVPSDQDLLRCRVLTSGIFETKFQVDKVNFHMFDVGGQRDERRKWIQCFNDVTAIIFVVASSSYNMVIREDNQTNRLQEALNLFKSIWNNRWLRTISVILFLNKQDLLAEKVLAGKSKIEDYFPEFARYTTPEDATPEPGEDPRVTRAKYFIRDEFLRISTASGDGRHYCYPHFTCAVDTENIRRVFNDCRDIIQRMHLRQYELL

SEQ ID NO: 28058 - protein, 529 aa, Homo sapiens
MSLNSSLSCRKELSNLTEEEGGEGGVIITQFIAIIVITIFVCLGNLVIVVTLYKKSYLLTLSNKFVFSLTLSNFLLSVLVLPFVVTSSIRREWIFGVVWCNFSALLYLLISSASMLTLGVIAIDRYYAVLYPMVYPMKITGNRAVMALVYIWLHSLIGCLPPLFGWSSVEFDEFKWMCVAAWHREPGYTAFWQIWCALFPFLVMLVCYGFIFRVARVKARKVHCGTVVIVEEDAQRTGRKNSSTSTSSSGSRRNAFQGVVYSANQCKALITILVVLGAFMVTWGPYMVVIASEALWGKSSVSPSLETWATWLSFASAVCHPLIYGLWNKTVRKELLGMCFGDRYYREPFVQRQRTSRLFSISNRITDLGLSPHLTALMAGGQPLGHSSSTGDTGFSCSQDSGTDMMLLEDYTSDDNPPSHCTCPPKRRSSVTFEDEVEQIKEAAKNSILHVKAEVHKSLDSYAASLAKAIEAEAKINLFGEEALPGVLVTARTVPGGGFGGRRGSRTLVSQRLQLQSIEEGDVLAAEQR

SEQ ID NO: 28059 - protein, 407 aa, Homo sapiens
MSLNSSLSCRKELSNLTEEEGGEGGVIITQFIAIIVITIFVCLGNLVIVVTLYKKSYLLTLSNKFVFSLTLSNFLLSVLVLPFVVTSSIRREWIFGVVWCNFSALLYLLISSASMLTLGVIAIDRYYAVLYPMVYPMKITGNRAVMALVYIWLHSLIGCLPPLFGWSSVEFDEFKWMCVAAWHREPGYTAFWQIWCALFPFLVMLVCYGFIFRVARVKARKVHCGTVVIVEEDAQRTGRKNSSTSTSSSGSRRNAFQGVVYSANQCKALITILVVLGAFMVTWGPYMVVIASEALWGKSSVSPSLETWATWLSFASAVCHPLIYGLWNKTVRKELLGMCFGDRYYREPFVQRQRTSRLFSISNRITDLGLSPHLTALMAGGQPLGHSSSTGDTGFSCSQDSGNLRAL

SEQ ID NO: 28060 - protein, 397 aa, Homo sapiens
MVYPMKITGNRAVMALVYIWLHSLIGCLPPLFGWSSVEFDEFKWMCVAAWHREPGYTAFWQIWCALFPFLVMLVCYGFIFRVARVKARKVHCGTVVIVEEDAQRTGRKNSSTSTSSSGSRRNAFQGVVYSANQCKALITILVVLGAFMVTWGPYMVVIASEALWGKSSVSPSLETWATWLSFASAVCHPLIYGLWNKTVRKELLGMCFGDRYYREPFVQRQRTSRLFSISNRITDLGLSPHLTALMAGGQPLGHSSSTGDTGFSCSQDSGTDMMLLEDYTSDDNPPSHCTCPPKRRSSVTFEDEVEQIKEAAKNSILHVKAEVHKSLDSYAASLAKAIEAEAKINLFGEEALPGVLVTARTVPGGGFGGRRGSRTLVSQRLQLQSIEEGDVLAAEQR

SEQ ID NO: 28061 - protein, 451 aa, Homo sapiens
MGGRRCVPGTLPMRAAPPGAKRLHVPLRAKGVGRSGHAPRLESVRTSYYAVLYPMVYPMKITGNRAVMALVYIWLHSLIGCLPPLFGWSSVEFDEFKWMCVAAWHREPGYTAFWQIWCALFPFLVMLVCYGFIFRVARVKARKVHCGTVVIVEEDAQRTGRKNSSTSTSSSGSRRNAFQGVVYSANQCKALITILVVLGAFMVTWGPYMVVIASEALWGKSSVSPSLETWATWLSFASAVCHPLIYGLWNKTVRKELLGMCFGDRYYREPFVQRQRTSRLFSISNRITDLGLSPHLTALMAGGQPLGHSSSTGDTGFSCSQDSGTDMMLLEDYTSDDNPPSHCTCPPKRRSSVTFEDEVEQIKEAAKNSILHVKAEVHKSLDSYAASLAKAIEAEAKINLFGEEALPGVLVTARTVPGGGFGGRRGSRTLVSQRLQLQSIEEGDVLAAEQR

SEQ ID NO: 28062 - protein, 415 aa, Homo sapiens
MLVPVGWMNESYYAVLYPMVYPMKITGNRAVMALVYIWLHSLIGCLPPLFGWSSVEFDEFKWMCVAAWHREPGYTAFWQIWCALFPFLVMLVCYGFIFRVARVKARKVHCGTVVIVEEDAQRTGRKNSSTSTSSSGSRRNAFQGVVYSANQCKALITILVVLGAFMVTWGPYMVVIASEALWGKSSVSPSLETWATWLSFASAVCHPLIYGLWNKTVRKELLGMCFGDRYYREPFVQRQRTSRLFSISNRITDLGLSPHLTALMAGGQPLGHSSSTGDTGFSCSQDSGTDMMLLEDYTSDDNPPSHCTCPPKRRSSVTFEDEVEQIKEAAKNSILHVKAEVHKSLDSYAASLAKAIEAEAKINLFGEEALPGVLVTARTVPGGGFGGRRGSRTLVSQRLQLQSIEEGDVLAAEQR

SEQ ID NO: 28063 - protein, 549 aa, Homo sapiens
MSARGVVQHALPTPRRGALTMSLNSSLSCRKELSNLTEEEGGEGGVIITQFIAIIVITIFVCLGNLVIVVTLYKKSYLLTLSNKFVFSLTLSNFLLSVLVLPFVVTSSIRREWIFGVVWCNFSALLYLLISSASMLTLGVIAIDRYYAVLYPMVYPMKITGNRAVMALVYIWLHSLIGCLPPLFGWSSVEFDEFKWMCVAAWHREPGYTAFWQIWCALFPFLVMLVCYGFIFRVARVKARKVHCGTVVIVEEDAQRTGRKNSSTSTSSSGSRRNAFQGVVYSANQCKALITILVVLGAFMVTWGPYMVVIASEALWGKSSVSPSLETWATWLSFASAVCHPLIYGLWNKTVRKELLGMCFGDRYYREPFVQRQRTSRLFSISNRITDLGLSPHLTALMAGGQPLGHSSSTGDTGFSCSQDSGTDMMLLEDYTSDDNPPSHCTCPPKRRSSVTFEDEVEQIKEAAKNSILHVKAEVHKSLDSYAASLAKAIEAEAKINLFGEEALPGVLVTARTVPGGGFGGRRGSRTLVSQRLQLQSIEEGDVLAAEQR

SEQ ID NO: 28064 - protein, 292 aa, Homo sapiens
MSAGNGTPWDATWNITVQWLAVDIACRTLMFLKLMATYSAAFLPVVIGLDRQAAVLNPLGSRSGVRKLLGAAWGLSFLLAFPQLFLFHTVHCAGPVPFTQCVTKGSFKAQWQETTYNLFTFCCLFLLPLTAMAICYSRIVLSVSRPQTRKGSHAPAGEFALPRSFDNCPRVRLRALRLALLILLTFILCWTPYYLLGMWYWFSPTMLTEVPPSLSHILFLLGLLNAPLDPLLYGAFTLGCRRGHQELSIDSSKEGSGRMLQEEIHAFRQLEVQKTVTSRRAGETKGISITSI

SEQ ID NO: 28065 - protein, 373 aa, Homo sapiens
MANTTGEPEEVSGALSPPSASAYVKLVLLGLIMCVSLAGNAILSLLVLKERALHKAPYYFLLDLCLADGIRSAVCFPFVLASVRHGSSWTFSALSCKIVAFMAVLFCFHAAFMLFCISVTRYMAIAHHRFYAKRMTLWTCAAVICMAWTLSVAMAFPPVFDVGTYKFIREEDQCIFEHRYFKANDTLGFMLMLAVLMAATHAVYGKLLLFEYRHRKMKPVQMVPAISQNWTFHGPGATGQAAANWIAGFGRGPMPPTLLGIRQNGHAASRRLLGMDEVKGEKQLGRMFYAITLLFLLLWSPYIVACYWRVFVKACAVPHRYLATAVWMSFAQAAVNPIVCFLLNKDLKKCLRTHAPCWGTGGAPAPREPYCVM

SEQ ID NO: 28066 - protein, 675 aa, Homo sapiens
MAGPAPPVADELPGPAARRLYSRMEASCLELALEGERLCKAGDFKTGVAFFEAAVQVGTEDLKTLSAIYSQLGNAYFYLKEHGRALEYHKHDLLLARTIGDRMGEAKASGNLGNTLKVLGRFDEAAVCCQRHLSIAQEQGDKVGEARALYNIGNVYHAKGKQLSWNAANATQDPGHLPPDVRETLCKASEFYERNLSLVKELGDRAAQGRAYGNLGNTHYLLGNFTEATTFHKERLAIAKEFGDKAAERRAYSNLGNAHVFLGRFDVAAEYYKKTLQLSRQLRDQAVEAQACYSLGNTYTLLQDYERAAEYHLRHLLIAQELADRVGEGRACWSLGNAYVSMGRPAQALTFAKKHLQISQEIGDRHGELTARMNVAQLQLVLGRLTSPAASEKPDLAGYEAQGARPKRTQRLSAETWDLLRLPLEREQNGDSHHSGDWRGPSRDSLPLPVRSRKYQEGPDAERRPREGSHSPLDSADVRVHVPRTSIPRAPSSDEECFFDLLTKFQSSRMDDQRCPLDDGQAGAAEATAAPTLEDRIAQPSMTASPQTEEFFDLIASSQSRRLDDQRASVGSLPGLRITHSNAGHLRGHGEPQEPGDDFFNMLIKYQSSRIDDQRCPPPDVLPRGPTMPDEDFFSLIQRVQAKRMDEQRVDLAGGPEQGAGGPPEPQQQCQPGAS

SEQ ID NO: 28067 - protein, 166 aa, Homo sapiens
MDDQRCPLDDGQAGAAEATAAPTLEDRIAQPSMTASPQTEEFFDLIASSQSRRLDDQRASVGSLPGLRITHSNAGHLRGHGEPQEPGDDFFNMLIKYQSSRIDDQRCPPPDVLPRGPTMPDEDFFSLIQRVQAKRMDEQRVDLAGGPEQGAGGPPEPQQQCQPGAS

SEQ ID NO: 28068 - protein, 457 aa, Homo sapiens
MAGPAPPVADELPGPAARRLYSRMEASCLELALEGERLCKAGDFKTGVAFFEAAVQVGTEDLKTLSAIYSQLGNAYFYLKEHGRALEYHKHDLLLARTIGDRMGEAKASGNLGNTLKVLGRFDEAAVCCQRHLSIAQEQGDKVGEARALYNIGNVYHAKGKQLSWNAANATQDPGHLPPDVRETLCKASEFYERNLSLVKELGDRAAQGRAYGNLGNTHYLLGNFTEATTFHKERLAIAKEFGDKAAERRAYSNLGNAHVFLGRFDVAAEYYKKTLQLSRQLRDQAVEAQACYSLGNTYTLLQDYERAAEYHLRHLLIAQELADRVGEGRACWSLGNAYVSMGRPAQALTFAKKHLQISQEIGDRHGELTARMNVAQLQLVLGRLTSPAASEKPDLAGYEAQGEFQGCGGVLLPTGTDRIRSCGGVGSRPGQHGGGGSRQKMAPTSQFFLASGTAQA

SEQ ID NO: 28069 - protein, 652 aa, Homo sapiens
MEASCLELALEGERLCKAGDFKTGVAFFEAAVQVGTEDLKTLSAIYSQLGNAYFYLKEHGRALEYHKHDLLLARTIGDRMGEAKASGNLGNTLKVLGRFDEAAVCCQRHLSIAQEQGDKVGEARALYNIGNVYHAKGKQLSWNAANATQDPGHLPPDVRETLCKASEFYERNLSLVKELGDRAAQGRAYGNLGNTHYLLGNFTEATTFHKERLAIAKEFGDKAAERRAYSNLGNAHVFLGRFDVAAEYYKKTLQLSRQLRDQAVEAQACYSLGNTYTLLQDYERAAEYHLRHLLIAQELADRVGEGRACWSLGNAYVSMGRPAQALTFAKKHLQISQEIGDRHGELTARMNVAQLQLVLGRLTSPAASEKPDLAGYEAQGARPKRTQRLSAETWDLLRLPLEREQNGDSHHSGDWRGPSRDSLPLPVRSRKYQEGPDAERRPREGSHSPLDSADVRVHVPRTSIPRAPSSDEECFFDLLTKFQSSRMDDQRCPLDDGQAGAAEATAAPTLEDRIAQPSMTASPQTEEFFDLIASSQSRRLDDQRASVGSLPGLRITHSNAGHLRGHGEPQEPGDDFFNMLIKYQSSRIDDQRCPPPDVLPRGPTMPDEDFFSLIQRVQAKRMDEQRVDLAGGPEQGAGGPPEPQQQCQPGAS

SEQ ID NO: 28070 - protein, 474 aa, Homo sapiens
MAQHDFVPAWLNFSTPQSAKSPTATFEKHGEHLPRGEGRFGVSRRRHNSSDGFFNNGPLRTAGDSWHQPSLFRHDSVDSGVSKGAYAGITGNPSGWHSSSRGHDGMSQRSGGGTGNHRHWNGSFHSRKGCAFQEKPPMEIREEKKEDKVEKLQFEEEDFPSLNPEAGKQHQPCRPIGTPSGVWENPPSAKQPSKMLVIKKVSKEDPAAAFSAAFTSPGSHHANGNKLSSVVPSVYKNLVPKPVPPPSKPNAWKANRMEHKSGSLSSSRESAFTSPISVTKPVVLASGAALSSPKESPSSTTPPIEISSSRLTKLTRRTTDRKSEFLKTLKDDRNGDFSENRDCDKLEDLEDNSTPEPKENGEEGCHQNGLALPVVEEGEVLSHSLEAEHRLLKAMGWQEYPENDENCLPLTEDELKEFHMKTEQLRRNGFGKNGFLQSRSSSLFSPWRSTCKAEFEDSDTETSSSETSDDDAWK

SEQ ID NO: 28071 - protein, 473 aa, Homo sapiens
MAQHDFAPAWLNFPTPPSSTKSSLNFEKHSENFAWTENRYDVNRRRHNSSDGFDSAIGRPNGGNFGRKEKNGWRTHGRNGTENINHRGGYHGGSSRSRSSIFHAGKSQGLHENNIPDNETGRKEDKRERKQFEAEDFPSLNPEYEREPNHNKSLAAGVWEYPPNPKSRAPRMLVIKKGNTKDLQLSGFPVVGNLPSQPVKNGTGPSVYKGLVPKPAAPPTKPTQWKSQTKENKVGTSFPHESTFGVGNFNAFKSTAKNFSPSTNSVKECNRSNSSSPVDKLNQQPRLTKLTRMRTDKKSEFLKALKRDRVEEEHEDESRAGSEKDDDSFNLHNSNSTHQERDINRNFDENEIPQENGNASVISQQIIRSSTFPQTDVLSSSLEAEHRLLKEMGWQEDSENDETCAPLTEDEMREFQVISEQLQKNGLRKNGILKNGLICDFKFGPWKNSTFKPTTENDDTETSSSDTSDDDDV

SEQ ID NO: 28072 - protein, 480 aa, Homo sapiens
MAQHDFAPAWLNFPTPPSSTKVLTSSLKSSLNFEKHSENFAWTENRYDVNRRRHNSSDGFDSAIGRPNGGNFGRKEKNGWRTHGRNGTENINHRGGYHGGSSRSRSSIFHAGKSQGLHENNIPDNETGRKEDKRERKQFEAEDFPSLNPEYEREPNHNKSLAAGVWEYPPNPKSRAPRMLVIKKGNTKDLQLSGFPVVGNLPSQPVKNGTGPSVYKGLVPKPAAPPTKPTQWKSQTKENKVGTSFPHESTFGVGNFNAFKSTAKNFSPSTNSVKECNRSNSSSPVDKLNQQPRLTKLTRMRTDKKSEFLKALKRDRVEEEHEDESRAGSEKDDDSFNLHNSNSTHQERDINRNFDENEIPQENGNASVISQQIIRSSTFPQTDVLSSSLEAEHRLLKEMGWQEDSENDETCAPLTEDEMREFQVISEQLQKNGLRKNGILKNGLICDFKFGPWKNSTFKPTTENDDTETSSSDTSDDDDV

SEQ ID NO: 28073 - protein, 465 aa, Homo sapiens
MAQHDFAPAWLNFPTPPSSTKVLTSSLKSSLNFEKHSENFAWTENRYDVNRRRHNSSDGFDSAIGRPNGGNFGRKEKNGWRTHGRNGTENINHRGGYHGGSSRSRSSIFHAGKSQGLHENNIPDNETGRKEDKRERKQFEAEDFPSLNPEYEREPNHNKSLAAGVWEYPPNPKSRAPRMLVIKKGNTKDLQLSGFPVVGNLPSQPVKNGTGPSVYKGLVPKPAAPPTKPTQWKSQTKENKVGTSFPHESTFGVGNFNAFKSTAKNFSPSTNSVKEQPRLTKLTRMRTDKKSEFLKALKRDRVEEEHEDESRAGSEKDDDSFNLHNSNSTHQERDINRNFDENEIPQENGNASVISQQIIRSSTFPQTDVLSSSLEAEHRLLKEMGWQEDSENDETCAPLTEDEMREFQVISEQLQKNGLRKNGILKNGLICDFKFGPWKNSTFKPTTENDDTETSSSDTSDDDDV

SEQ ID NO: 28074 - protein, 302 aa, Homo sapiens
MLVIKKGNTKDLQLSGFPVVGNLPSQPVKNGTGPSVYKGLVPKPAAPPTKPTQWKSQTKENKVGTSFPHESTFGVGNFNAFKSTAKNFSPSTNSVKECNRSNSSSPVDKLNQQPRLTKLTRMRTDKKSEFLKALKRDRVEEEHEDESRAGSEKDDDSFNLHNSNSTHQERDINRNFDENEIPQENGNASVISQQIIRSSTFPQTDVLSSSLEAEHRLLKEMGWQEDSENDETCAPLTEDEMREFQVISEQLQKNGLRKNGILKNGLICDFKFGPWKNSTFKPTTENDDTETSSSDTSDDDDV

SEQ ID NO: 28075 - protein, 350 aa, Homo sapiens
MGPHFTLLCAALAGCLLPAEGCVICDPSVVLALKSLEKDYLPGHLDAKHHKAMMERVENAVKDFQELSLNEDAYMGVVDEATLQKGSWSLLKDLKRITDSDVKGDLFVKELFWMLHLQKETFATYVARFQKEAYCPNKCGVMLQTLIWCKNCKKEVHACRKSYDCGERNVEVPQMEDMILDCELNWHQASEGLTDYSFYRVWGNNTETLVSKGKEATLTKPMVGPEDAGSYRCELGSVNSSPATIINFHVTVLPKMIKEEKPSPNIVTPGEATTESSISLQPLQPEKMLASRLLGLLICGSLALITGLTFAIFRRRKVIDFIKSSLFGLGSGAAEQTQVPKEKATDSRQQ

SEQ ID NO: 28076 - protein, 194 aa, Homo sapiens
MGPHFTLLCAALAGCLLPAEGCVICDPSVVLALKSLEKDYLPGHLDAKHHKAMMERVENAVKDFQELSLNEDAYMGVVDEATLQKGSWSLLKDLKRITDSDVKGDLFVKELFWMLHLQKETFATYVARFQKEAYCPNKCGVMLQTLIWCKNCKKEVHACRKSYDCGGERTGPSRRNWCRAECGSSSNGRHDPGL

SEQ ID NO: 28077 - protein, 68 aa, Homo sapiens
MGPHFTLLCAALAGCLLPAEGCVICDPSVVLALKSLEKDYLPGHLDAKHHKAMMERMRPHCKRGPGVC

SEQ ID NO: 28078 - protein, 558 aa, Homo sapiens
MELRARGWWLLCAAAALVACARGDPASKSRSCGEVRQIYGAKGFSLSDVPQAEISGEHLRICPQGYTCCTSEMEENLANRSHAELETALRDSSRVLQAMLATQLRSFDDHFQHLLNDSERTLQATFPGAFGELYTQNARAFRDLYSELRLYYRGANLHLEETLAEFWARLLERLFKQLHPQLLLPDDYLDCLGKQAEALRPFGEAPRELRLRATRAFVAARSFVQGLGVASDVVRKVAQVPLGPECSRAVMKLVYCAHCLGVPGARPCPDYCRNVLKGCLANQADLDAEWRNLLDSMVLITDKFWGTSGVESVIGSVHTWLAEAINALQDNRDTLTAKVIQGCGNPKVNPQGPGPEEKRRRGKLAPRERPPSGTLEKLVSEAKAQLRDVQDFWISLPGTLCSEKMALSTASDDRCWNGMARGRYLPEVMGDGLANQINNPEVEVDITKPDMTIRQQIMQLKIMTNRLRSAYNGNDVDFQDASDDGSGSGSGDGCLDDLCSRKVSRKSSSSRTPLTHALPGLSEQEGQKTSAASCPQPPTFLLPLLLFLALTVARPRWR

SEQ ID NO: 28079 - protein, 287 aa, Homo sapiens
MEENLANRSHAELETALRDSSRVLQAMLATQLRSFDDHFQHLLNDSERTLQATFPGAFGELYTQNARAFRDLYSELRLYYRGANLHLEETLAEFWARLLERLFKQLHPQLLLPDDYLDCLGKQAEALRPFGEAPRELRLRATRAFVAARSFVQGLGVASDVVRKVAQVPLGPECSRAVMKLVYCAHCLGVPGARPCPDYCRNVLKGCLANQADLDAEWRNLLGEPPPARAAWNCLGECTTGGPGGRVVPSLELGPRDLIRDALTRARSGWCCRVEGPGCLLNVLSDV

SEQ ID NO: 28080 - protein, 603 aa, Homo sapiens
MAEETGQSKLAAAKKKFKEYWQRNRPGVPAAAKRNTKANGSSPETAASGGCHSSEASSSASSSLHARQSPCQEQAAVLNSRSIKISRLNDTIKSLKQQKKQVEHQLEEEKKANNEKQKAERELEGQIQRLNTEKKKLNTDLYHMKHSLRYFEEESKDLAGRLQRSSQRIGELEWSLCAVAATQKKKPDGFSSRSKALLKRQLEQSIREQILLKGHVTQLKESLKEVQLERDQYAEQIKGERAQWQQRMRKMSQEVCTLKEEKKHDTHRVEELERSLSRLKNQMAEPLPPDAPAVSSEVELQDLRKELERVAGELQAQVENNQCISLLNRGQKERLREQEERLQEQQERLREREKRLQQLAEPQSDLEELKHENKSALQLEQQVKELQEKLGQVMETLTSAEKEPEAAVPASGTGGESSGLMDLLEEKADLREHVEKLELGFIQYRRERCHQKVHRLLTEPGDSAKDASPGGGHHQAGPGQGGEEGEAAGAAGDGVAACGSYSEGHGKFLAAARNPAAEPSPGAPAPQELGAADKHGDLCEASLTNSVEPAQGEAREGSSQDNPTAQPVLQLLGEMQDHQEHPGLGSNCCVPCFCWAWLPRRRR

SEQ ID NO: 28081 - protein, 460 aa, Homo sapiens
MKHSLRYFEEESKDLAGRLQRSSQRIGELEWSLCAVAATQKKKPDGFSSRSKALLKRQLEQSIREQILLKGHVTQLKESLKEVQLERDQYAEQIKGERAQWQQRMRKMSQEVCTLKEEKKHDTHRVEELERSLSRLKNQMAEPLPPDAPAVSSEVELQDLRKELERVAGELQAQVENNQCISLLNRGQKERLREQEERLQEQQERLREREKRLQQLAEPQSDLEELKHENKSALQLEQQVKELQEKLGQVMETLTSAEKEPEAAVPASGTGGESSGLMDLLEEKADLREHVEKLELGFIQYRRERCHQKVHRLLTEPGDSAKDASPGGGHHQAGPGQGGEEGEAAGAAGDGVAACGSYSEGHGKFLAAARNPAAEPSPGAPAPQELGAADKHGDLCEASLTNSVEPAQGEAREGSSQDNPTAQPVLQLLGEMQDHQEHPGLGSNCCVPCFCWAWLPRRRR

SEQ ID NO: 28082 - protein, 632 aa, Homo sapiens
MAEETQHNKLAAAKKKLKEYWQKNRPRVPAGVNRNRKTNGSIPETATSGGCQPPGDSATGFHREGPTSSATLKDLESPCQERAVVLDSTSVKISRLKNTIKSLKQQKKQVEHQLEEEKKANNERQKAERELEVQIQTLIIQKEELNTDLYHMERSLRYFEEESKDLAVRLQHSLQCKGELERALSAVIATEKKKANQLSSCSKAHTEWELEQSLQDQALLKAQLTQLKESFQQLQLERDECAEHIEGERARWHQRMSKMLQEICTLKKEKQQDMRRVEELERSLSKLKNQMAEPLPPEPPAVPSEVELQHLRKELERVAGELQSQVKNNQHISLLNRRQEERIREQEERLRKQEERLQEQHEKLRQLAKPQSVFEELNNENKSTLQLEQQVKELQEKLGEEHLEAASQQNQQLTAQLNLMALPGEGHGGEHLDSEGEEAPQPMPSVPEDLESREAMSSFMDHLKEKADLSELVKKQELRFIQYWQERCHQKIHHLLSEPGGRAKDAALGGGHHQAGAQGGDEGEAAGAAADGIAAYSNYNNGHRKFLAAAHNSADEPGPGAPAPQELGAADKHGDLREVTLTSSAQGEAREDPLLDKPTAQPIVQDHQEHPGLGSNCCVPLFCWAWLPRRRR

SEQ ID NO: 28083 - protein, 483 aa, Homo sapiens
MTMPVNGAHKDADLWSSHDKMLAQPLKDSDVEVYNIIKKESNRQRVGLELIASENFASRAVLEALGSCLNNKYSEGYPGQRYYGGTEFIDELETLCQKRALQAYKLDPQCWGVNVQPYSGSPANFAVYTALVEPHGRIMGLDLPDGGHLTHGFMTDKKKISATSIFFESMPYKVNPDTGYINYDQLEENARLFHPKLIIAGTSCYSRNLEYARLRKIADENGAYLMADMAHISGLVAAGVVPSPFEHCHVVTTTTHKTLRGCRAGMIFYRKGVKSVDPKTGKEILYNLESLINSAVFPGLQGGPHNHAIAGVAVALKQAMTLEFKVYQHQVVANCRALSEALTELGYKIVTGGSDNHLILVDLRSKGTDGGRAEKVLEACSIACNKNTCPGDRSALRPSGLRLGTPALTSRGLLEKDFQKVAHFIHRGIELTLQIQSDTGVRATLKEFKERLAGDKYQAAVQALREEVESFASLFPLPGLPDF

SEQ ID NO: 28084 - protein, 444 aa, Homo sapiens
MTMPVNGAHKDADLWSSHDKMLAQPLKDSDVEVYNIIKKESNRQRVGLELIASENFASRAVLEALGSCLNNKYSEGYPGQRYYGGTEFIDELETLCQKRALQAYKLDPQCWGVNVQPYSGSPANFAVYTALVEPHGRIMGLDLPDGGHLTHGFMTDKKKISATSIFFESMPYKVNPDTGYINYDQLEENARLFHPKLIIAGTSCYSRNLEYARLRKIADENGAYLMADMAHISGLVAAGVVPSPFEHCHVVTTTTHKTLRGCRAGMIFYRKGVAVALKQAMTLEFKVYQHQVVANCRALSEALTELGYKIVTGGSDNHLILVDLRSKGTDGGRAEKVLEACSIACNKNTCPGDRSALRPSGLRLGTPALTSRGLLEKDFQKVAHFIHRGIELTLQIQSDTGVRATLKEFKERLAGDKYQAAVQALREEVESFASLFPLPGLPDF

SEQ ID NO: 28085 - protein, 403 aa, Homo sapiens
MTMPVNGAHKDADLWSSHDKMLAQPLKDSDVEVYNIIKKESNRQRVGLELIASENFASRAVLEALGSCLNNKYSEGYPGQRYYGGTEFIDELETLCQKRALQAYKLDPQCWGVNVQPYSGSPANFAVYTALVEPHGRIMGLDLPDGGHLTHGFMTDKKKISATSIFFESMPYKVNPDTGYINYDQLEENARLFHPKLIIAGTSCYSRNLEYARLRKIADENGAYLMADMAHISGLVAAGVVPSPFEHCHVVTTTTHKTLRGCRAGMIFYRKGGSDNHLILVDLRSKGTDGGRAEKVLEACSIACNKNTCPGDRSALRPSGLRLGTPALTSRGLLEKDFQKVAHFIHRGIELTLQIQSDTGVRATLKEFKERLAGDKYQAAVQALREEVESFASLFPLPGLPDF

SEQ ID NO: 28086 - protein, 345 aa, Homo sapiens
MGLDLPDGGHLTHGFMTDKKKISATSIFFESMPYKVNPDTGYINYDQLEENARLFHPKLIIAGTSCYSRNLEYARLRKIADENGAYLMADMAHISGLVAAGVVPSPFEHCHVVTTTTHKTLRGCRAGMIFYRKGVKSVDPKTGKEILYNLESLINSAVFPGLQGGPHNHAIAGVAVALKQAMTLEFKVYQHQVVANCRALSEALTELGYKIVTGGSDNHLILVDLRSKGTDGGRAEKVLEACSIACNKNTCPGDRSALRPSGLRLGTPALTSRGLLEKDFQKVAHFIHRGIELTLQIQSDTGVRATLKEFKERLAGDKYQAAVQALREEVESFASLFPLPGLPDF

SEQ ID NO: 28087 - protein, 631 aa, Homo sapiens
MAEETQHNKLAAAKKKLKEYWQKNRPRVPAGVNRNRKTNGSIPETATSGGCQPPGDSATGFHREGPTSSATLKDLESPCQERAVVLDSTSVKISRLKNTIKSLKQQKKQVEHQLEEEKKANNERQKAERVLEVQIQTLIIQKEELNTDLYHMERSLRYFEEESKDLAVRLQHSLQCKGELERALSAVIATEKKKANQLSSCSKAHTEWELEQSLQDQALLKAQLTQLKESFQQLQLERDECAEHIEGERARWHQRMSKMSQEICTLKKEKQDMRWVEQLEWSLSKLKNQTAEPLPPEPPAVPSEVELQHLRKELERVAGELQSQVKNNQHISLLNRRQEERIREQEERLRKQEERLQEQHEKLRQLAKPQSVFEELNNENKSTLQLEQQVKELQEKLGEEHLEVASQQNQQLTAQLSLMALPGEGHGGEHLDSEGEEAPQPMPSVPEDPESREAMSSFMDHLKEKADLSELLKKQELRFIQYWQERCHQKIHHLLSEPGGRAKDAALGGGHHQAGAQGGDEGEAAGAAADGIAAYSNYNNGHRKFLAAAHNSADEPGPGAPAPQELGAADKHGDLREVTLTSSAQGEAREDPLLDKPTAQPIVQDHQEHPGLGSNCCVPLFCWAWLPRRRR

SEQ ID NO: 28088 - protein, 294 aa, Homo sapiens
MAEETQHNKLAAAKKKLKEYWQKNRPRVPAGVNRNRKTNGSIPETATSGGCQPPGDSATGFHREGPTSSATLKDLESPCQERAVVLDSTSVKISRLKNTIKSLICTLKKEKQDMRWVEQLEWSLSKLKNQTAEPLPPEPPAVPSEVELQHLRKELERVAGELQSQVKNNQHISLLNRRQEERIREQEERLRKQEERLQEQHEKLRQLAKPQSVFEELNNENKSTLQLEQQVKELQEKLGEVKETETSTPSKKGWEAGSSLLGGEVPGQRQLPAWGLVTTAPRRAVLRLFLTSCL

SEQ ID NO: 28089 - protein, 625 aa, Homo sapiens
MAEETRQSKLAAAKRKLKEYWQRNSPGVPAGAKRNRKTNGSIHETATSGGCHSPGDSATGIHGESPTSSATLKDLESPCQELAVVPDSRSVKVSQLKNTIKSLKQQKKQVVHQLEEEKKANNEKQKAERELEVQIQRLNIQKGKLNTDLYHTKRSLRYFEEESKDLAVRLQHSLQRKGELERALSAVTATQKKKAERFSSRSKARTEWKLEQSMREQALLKAQLTQLKESLKEVQLERDEYAEHLKGERARWQQRMRKMSQEVCSLKKEKKHDKYRVETLERSLSKLKNQMAEPLPPEPPAVPSEAELQHLRKELERVAGALQAQVEYNQRISLLNEGQKERLREQQERLPEQEERLQQLAEPQNSFKELNNENKSVLQLEQQVKELQEKLGKERLEAASQQKQQLTAQLSLMALPGEGDGGGHLDSEGEEAPRPIPSIPQDLESREAMSSFMDHLEEKADLSELVKKQELRFIQYWQERCHQKIHHLLSEPGGRAKDAALGGGHHQAGAQGGDEDEAAGAAADGIAAYSNYNNGHRKFLAAAHNPADEPGPGAPAPQELGAADKHGDLCEVSLTSSAQGEAREDPLLDKPTAQPIVQDHQEHPGLGNNCCVPFFCWAWLPRRRR

SEQ ID NO: 28090 - protein, 607 aa, Homo sapiens
MAEETQHNKLAAAKKKLKEYWQKNSPRVPAGANRNRKTNGSIPEKATSGGCQPPRDSATGFHREGPTSSATLKDLESPCQERAVVLDSRSVEISQLKNTIKSLKQQKKQVEHQLEEEKKANNKKQKAKRVLEVQIQTLNIQKEELNTDLYHMKRSLRYFEEKSKDLAVRLQHSLQRKGELESVLSNVMATQKKKANQLSSRSKARTEWKLEQSMREEALLKVQLTQLKESFQQVQLERDEYSEHLKGERARWQQRMRKMSQEICTLKKEKQQDMRRVEKLERSLSKLKNQMAEPLPPEPPAVPSEVELQHLRKELERVAGELQAQVKKNQRISLLNQRQEERIQEQEERLRKQEERIQEQHKSLQQLAKPQSVFEEPEHLEAASQQNQQLTAQLSLMALPGEGHGEHLDSEGEEAPQPMPSVPEDLESREAMSSFMDHLKEKADLSELVKKELCFIHHWRDRRHQKTHHLLSEPGGCAKDAALGGGHHQAGAQGGDEGEAAGAAADGIAAYSNYNNGHRKFLAAAHNPADEPGPGAPAPQELGAADKHGDLREVSLTSSAQGEAREDPLLDKPTAQPIVQDHKEHPGLGSNCCVPLFCWAWLPRRRR

SEQ ID NO: 28091 - protein, 441 aa, Homo sapiens
MAIHKALVMCLGLPLFLFPGAWAQGHVPPGCSQGLNPLYYNLCDRSGAWGIVLEAVAGAGIVTTFVLTIILVASLPFVQDTKKRSLLGTQVFFLLGTLGLFCLVFACVVKPDFSTCASRRFLFGVLFAICFSCLAAHVFALNFLARKNHGPRGWVIFTVALLLTLVEVIINTEWLIITLVRGSGEGGPQGNSSAGWAVASPCAIANMDFVMALIYVMLLLLGAFLGAWPALCGRYKRWRKHGVFVLLTTATSVAIWVVWIVMYTYGNKQHNSPTWDDPTLAIALAANAWAFVLFYVIPEVSQVTKSSPEQSYQGDMYPTRGVGYETILKEQKGQSMFVENKAFSMDEPVAAKRPVSPYSGYNGQLLTSVYQPTEMALMHKVPSEGAYDIILPRATANSQVMGSANSTLRAEDMYSAQSHQAATPPKDGKNSQVFRNPYVWD

SEQ ID NO: 28092 - protein, 453 aa, Homo sapiens
MGTQPEPGLGARMAIHKALVMCLGLPLFLFPGAWAQGHVPPGCSQGLNPLYYNLCDRSGAWGIVLEAVAGAGIVTTFVLTIILVASLPFVQDTKKRSLLGTQVFFLLGTLGLFCLVFACVVKPDFSTCASRRFLFGVLFAICFSCLAAHVFALNFLARKNHGPRGWVIFTVALLLTLVEVIINTEWLIITLVRGSGEGGPQGNSSAGWAVASPCAIANMDFVMALIYVMLLLLGAFLGAWPALCGRYKRWRKHGVFVLLTTATSVAIWVVWIVMYTYGNKQHNSPTWDDPTLAIALAANAWAFVLFYVIPEVSQVTKSSPEQSYQGDMYPTRGVGYETILKEQKGQSMFVENKAFSMDEPVAAKRPVSPYSGYNGQLLTSVYQPTEMALMHKVPSEGAYDIILPRATANSQVMGSANSTLRAEDMYSAQSHQAATPPKDGKNSQVFRNPYVWD

SEQ ID NO: 28093 - protein, 767 aa, Homo sapiens
MFAKLKKKIAEETAVAQRPGGATRIPRSVSKESVASMGADSGDDFASDGSSSREDLSSQLLRRNEQIRKLEARLSDYAEQVRNLQKIKEKLEIALEKHQDSSMRKFQEQNETFQANRAKMAEGLALALARKDQEWSEKMDQLEKEKNILTAQLQEMKNQSMNLFQRRDEMDELEGFQQQELSKIKHMLLKKEESLGKMEQELEARTRELSRTQEELMNSNQMSSDLSQKLEELQRHYSTLEEQRDHVIASKTGAESKITALEQKEQELQALIQQLSIDLQKVTAETQEKEDVITHLQEKVASLEKRLEQNLSGEEHLQELLKEKTLAEQNLEDTRQQLLAARSSQAKAINTLETRVRELEQTLQASEEQLQQSKGIVAAQETQIQELAAANQESSHVQQQALALEQQFLERTQALEAQIVALERTRAADQTTAEQGMRQLEQENAALKECRNEYERSLQNHQFELKKLKEEWSQREIVSVAMAQALEEVRKQREEFQQQAANLTAIIDEKEQNLREKTEVLLQKEQEILQLERGHNSALLQIHQLQAELEALRTLKAEEAAVVAEQEDLLRLRGPLQAEALSVNESHVTSRAMQDPVFQLPTAGRTPNGEVGAMDLTQLQKEKQDLEQQLLEKNKTIKQMQQRMLELRKTLQKELKIRPDNELFEVREKPGPEMANMAPSVTNNTDLTDAREINFEYLKHVVLKFMSCRESEAFHLIKAVSVLLNFSQEEENMLKETLEYKMSWFGSKPAPKGSIRPSISNPRIPWS

SEQ ID NO: 28094 - protein, 926 aa, Homo sapiens
MAFLIILITCFVIILATSQPCQTPDDFVAATSPGHIIIGGLFAIHEKMLSSEDSPRRPQIQECVGFEISVFLQTLAMIHSIEMINNSTLLPGVKLGYEIYDTCTEVTVAMAATLRFLSKFNCSRETVEFKCDYSSYMPRVKAVIGSGYSEITMAVSRMLNLQLMPQVGYESTAEILSDKIRFPSFLRTVPSDFHQIKAMAHLIQKSGWNWIGIITTDDDYGRLALNTFIIQAEANNVCIAFKEVLPAFLSDNTIEVRINRTLKKIILEAQVNVIVVFLRQFHVFDLFNKAIEMNINKMWIASDNWSTATKITTIPNVKKIGKVVGFAFRRGNISSFHSFLQNLHLLPSDSHKLLHEYAMHLSACAYVKDTDLSQCIFNHSQRTLAYKANKAIERNFVMRNDFLWDYAEPGLIHSIQLAVFALGYAIRDLCQARDCQNPNAFQPWELLGVLKNVTFTDGWNSFHFDAHGDLNTGYDVVLWKEINGHMTVTKMAEYDLQNDVFIIPDQETKNEFRNLKQIQSKCSKECSPGQMKKTTRSQHICCYECQNCPENHYTNQTDMPHCLLCNNKTHWAPVRSTMCFEKEVEYLNWNDSLAILLLILSLLGIIFVLVVGIIFTRNLNTPVVKSSGGLRVCYVILLCHFLNFASTSFFIGEPQDFTCKTRQTMFGVSFTLCISCILTKSLKILLAFSFDPKLQKFLKCLYRPILIIFTCTGIQVVICTLWLIFAAPTVEVNVSLPRVIILECEEGSILAFGTMLGYIAILAFICFIFAFKGKYENYNEAKFITFGMLIYFIAWITFIPIYATTFGKYVPAVEIIVILISNYGILYCTFIPKCYVIICKQEINTKSAFLKMIYSYSSHSVSSIALSPASLDSMSGNVTMTNPSSSGKSATWQKSKDLQAQAFAHICRENATSVSKTLPRKRMSSI

SEQ ID NO: 28095 - protein, 751 aa, Homo sapiens
MAFLIILITCFVIILATSQPCQTPDDFVAATSPGHIIIGGLFAIHEKMLSSEDSPRRPQIQECVGFEISVFLQTLAMIHSIEMINNSTLLPGVKLGYEIYDTCTEVTVAMAATLRFLSKFNCSRETVEFKCDYSSYMPRVKAVIGSGYSEITMAVSRMLNLQLMPQVGYESTAEILSDKIRFPSFLRTVPSDFHQIKAMAHLIQKSGWNWIGIITTDDDYGRLALNTFIIQAEANNVCIAFKEVLPAFLSDNTIEVRINRTLKKIILEAQLLGVLKNVTFTDGWNSFHFDAHGDLNTGYDVVLWKEINGHMTVTKMAEYDLQNDVFIIPDQETKNEFRNLKQIQSKCSKECSPGQMKKTTRSQHICCYECQNCPENHYTNQTDMPHCLLCNNKTHWAPVRSTMCFEKEVEYLNWNDSLAILLLILSLLGIIFVLVVGIIFTRNLNTPVVKSSGGLRVCYVILLCHFLNFASTSFFIGEPQDFTCKTRQTMFGVSFTLCISCILTKSLKILLAFSFDPKLQKFLKCLYRPILIIFTCTGIQVVICTLWLIFAAPTVEVNVSLPRVIILECEEGSILAFGTMLGYIAILAFICFIFAFKGKYENYNEAKFITFGMLIYFIAWITFIPIYATTFGKYVPAVEIIVILISNYGILYCTFIPKCYVIICKQEINTKSAFLKMIYSYSSHSVSSIALSPASLDSMSGNVTMTNPSSSGKSATWQKSKDLQAQAFAHICRENATSVSKTLPRKRMSSI

SEQ ID NO: 28096 - protein, 855 aa, Homo sapiens
MAFLIILITCFVIILATSQPCQTPDDFVAATSPGHIIIGGLFAIHEKMLSSEDSPRRPQIQECVGFEISVFLQTLAMIHSIEMINNSTLLPGVKLGYEIYDTCTEVTVAMAATLRFLSKFNCSRETVEFKCDYSSYMPRVKAVIGSGYSEITMAVSRMLNLQLMPQVGYESTAEILSDKIRFPSFLRTVPSDFHQIKAMAHLIQKSGWNWIGIITTDDDYGRLALNTFIIQAEANNVCIAFKEVLPAFLSDNTIEVRINRTLKKIILEAQVNVIVVFLRQFHVFDLFNKAIEMNINKMWIASDNWSTATKITTIPNVKKIGKVVGFAFRRGNISSFHSFLQNLHLLPSDSHKLLHEYAMHLSACAYVKDTDLSQCIFNHSQRTLAYKANKAIERNFVMRNDFLWDYAEPGLIHSIQLAVFALGYAIRDLCQARDCQNPNAFQPWEQIQSKCSKECSPGQMKKTTRSQHICCYECQNCPENHYTNQTDMPHCLLCNNKTHWAPVRSTMCFEKEVEYLNWNDSLAILLLILSLLGIIFVLVVGIIFTRNLNTPVVKSSGGLRVCYVILLCHFLNFASTSFFIGEPQDFTCKTRQTMFGVSFTLCISCILTKSLKILLAFSFDPKLQKFLKCLYRPILIIFTCTGIQVVICTLWLIFAAPTVEVNVSLPRVIILECEEGSILAFGTMLGYIAILAFICFIFAFKGKYENYNEAKFITFGMLIYFIAWITFIPIYATTFGKYVPAVEIIVILISNYGILYCTFIPKCYVIICKQEINTKSAFLKMIYSYSSHSVSSIALSPASLDSMSGNVTMTNPSSSGKSATWQKSKDLQAQAFAHICRENATSVSKTLPRKRMSSI

SEQ ID NO: 28097 - protein, 203 aa, Homo sapiens
  MOD_RES (49)..(49): Selenocysteine
MCAARLAAAAAAAQSVYAFSARPLAGGEPVSLGSLRGKVLLIENVASLXGTTVRDYTQMNELQRRLGPRGLVVLGFPCNQFGHQENAKNEEILNSLKYVRPGGGFEPNFMLFEKCEVNGAGAHPLFAFLREALPAPSDDATALMTDPKLITWSPVCRNDVAWNFEKFLVGPDGVPLRRYSRRFQTIDIEPDIEALLSQGPSCA

SEQ ID NO: 28098 - protein, 98 aa, Homo sapiens
  MOD_RES (49)..(49): Selenocysteine
MCAARLAAAAAAAQSVYAFSARPLAGGEPVSLGSLRGKVLLIENVASLXGTTVRDYTQMNELQRRLGPRGLVVLGFPCNQFGHQVRRAERGGAGADVQ

SEQ ID NO: 28099 - protein, 727 aa, Homo sapiens
MAFQKAVKGTILVGGGALATVLGLSQFAHYRRKQMNLAYVKAADCISEPVNREPPSREAQLLTLQNTSEFDILVIGGGATGSGCALDAVTRGLKTALVERDDFSSGTSSRSTKLIHGGVRYLQKAIMKLDIEQYRMVKEALHERANLLEIAPHLSAPLPIMLPVYKWWQLPYYWVGIKLYDLVAGSNCLKSSYVLSKSRALEHFPMLQKDKLVGAIVYYDGQHNDARMNLAIALTAARYGAATANYMEVVSLLKKTDPQTGKVRVSGARCKDVLTGQEFDVRAKCVINATGPFTDSVRKMDDKDAAAICQPSAGVHIVMPGYYSPESMGLLDPATSDGRVIFFLPWQKMTIAGTTDTPTDVTHHPIPSEEDINFILNEVRNYLSCDVEVRRGDVLAAWSGIRPLVTDPKSADTQSISRNHVVDISESGLITIAGGKWTTYRSMAEDTINAAVKTHNLKAGPSRTVGLFLQGGKDWSPTLYIRLVQDYGLESEVAQHLAATYGDKAFEVAKMASVTGKRWPIVGVRLVSEFPYIEAEVKYGIKEYACTAVDMISRRTRLAFLNVQAAEEALPRIVELMGRELNWDDYKKQEQLETARKFLYYEMGYKSRSEQLTDRSEISLLPSDIDRYKKRFHKFDADQKGFITIVDVQRVLESINVQMDENTLHEILNEVDLNKNGQVELNEFLQLMSAIQKGRVSGSRLAILMKTAEENLDRRVPIPVDRSCGGL

SEQ ID NO: 28100 - protein, 601 aa, Homo sapiens
MKLDIEQYRMVKEALHERANLLEIAPHLSAPLPIMLPVYKWWQLPYYWVGIKLYDLVAGSNCLKSSYVLSKSRALEHFPMLQKDKLVGAIVYYDGQHNDARMNLAIALTAARYGAATANYMEVVSLLKKTDPQTGKVRVSGARCKDVLTGQEFDVRAKCVINATGPFTDSVRKMDDKDAAAICQPSAGVHIVMPGYYSPESMGLLDPATSDGRVIFFLPWQKMTIAGTTDTPTDVTHHPIPSEEDINFILNEVRNYLSCDVEVRRGDVLAAWSGIRPLVTDPKSADTQSISRNHVVDISESGLITIAGGKWTTYRSMAEDTINAAVKTHNLKAGPSRTVGLFLQGGKDWSPTLYIRLVQDYGLESEVAQHLAATYGDKAFEVAKMASVTGKRWPIVGVRLVSEFPYIEAEVKYGIKEYACTAVDMISRRTRLAFLNVQAAEEALPRIVELMGRELNWDDYKKQEQLETARKFLYYEMGYKSRSEQLTDRSEISLLPSDIDRYKKRFHKFDADQKGFITIVDVQRVLESINVQMDENTLHEILNEVDLNKNGQVELNEFLQLMSAIQKGRVSGSRLAILMKTAEENLDRRVPIPVDRSCGGL

SEQ ID NO: 28101 - protein, 150 aa, Homo sapiens [sequence omitted]

SEQ ID NO: 28102 - protein, 124 aa, Homo sapiens
MHTSTSSSVTKSYISSQTNDTHKRDTYAATPRAHEVSEISVRTVYPPEEETGERVQLAHHFSEPEITLIIFGVMAGVIGTILLISYGIRRLIKKSPSDVKPLPSPDTDVPLSSVEIENPETSDQ

SEQ ID NO: 28103 - protein, 117 aa, Homo sapiens
MYGKIIFVLLLSDTHKRDTYAATPRAHEVSEISVRTVYPPEEETGERVQLAHHFSEPEITLIIFGVMAGVIGTILLISYGIRRLIKKSPSDVKPLPSPDTDVPLSSVEIENPETSDQ

SEQ ID NO: 28104 - protein, 302 aa, Homo sapiens
MILLNNSHKLLALYKSLARSIPESLKVYGSVYHINHGNPFNMEVLVDSWPEYQMVIIRPQKQEMTDDMDSYTNVYRMFSKEPQKSEEVLKNCEIVNWKQRLQIQGLQESLGEGIRVATFSKSVKVEHSRALLLVTEDILKLNASSKSKLGSWAETGHPDDEFESETPNFKYAQLDVSYSGLVNDNWKRGKNERSLHYIKRCIEDLPAACMLGPEGVPVSWVTMDPSCEVGMAYSMEKYRRTGNMARVMVRYMKYLRQKNIPFYISVLEENEDSRRFVGQFGFFEASCEWHQWTCYPQNLVPF

SEQ ID NO: 28105 - protein, 333 aa, Homo sapiens
MFKLCSNKMVSQEGSEVELLVSPGARSEHGRYLQDPIVSIDLSEWLRIIEFLLQGLKVYGSVYHINHGNPFNMEVLVDSWPEYQMVIIRPQKQEMTDDMDSYTNVYRMFSKEPQKSEEVLKNCEIVNWKQRLQIQGLQESLGEGIRVATFSKSVKVEHSRALLLVTEDILKLNASSKSKLGSWAETGHPDDEFESETPNFKYAQLDVSYSGLVNDNWKRGKNERSLHYIKRCIEDLPAACMLGPEGVPVSWVTMDPSCEVGMAYSMEKYRRTGNMARVMVRYMKYLRQKNIPFYISVLEENEDSRRFVGQFGFFEASCEWHQWTCYPQNLVPF

SEQ ID NO: 28106 - protein, 194 aa, Homo sapiens
MAASLVGKKIVFVTGNAKKLEEVVQILGDKFPCTLVAQKIDLPEYQGEPDEISIQKCQEAVRQVQGPVLVEDTCLCFNALGGLPGPYIKWFLEKLKPEGLHQLLAGFEDKSAYALCTFALSTGDPSQPVRLFRGRTSGRIVAPRGCQDFGWDPCFQPDGYEQTYAEMPKAEKNAVSHRFRALLELQEYFGSLAA

SEQ ID NO: 28107 - protein, 177 aa, Homo sapiens
MAASLVVQILGDKFPCTLVAQKIDLPEYQGEPDEISIQKCQEAVRQVQGPVLVEDTCLCFNALGGLPGPYIKWFLEKLKPEGLHQLLAGFEDKSAYALCTFALSTGDPSQPVRLFRGRTSGRIVAPRGCQDFGWDPCFQPDGYEQTYAEMPKAEKNAVSHRFRALLELQEYFGSLAA

SEQ ID NO: 28108 - protein, 153 aa, Homo sapiens
MAASLVGKKIVFVTGNAKKLEEVQGPVLVEDTCLCFNALGGLPGPYIKWFLEKLKPEGLHQLLAGFEDKSAYALCTFALSTGDPSQPVRLFRGRTSGRIVAPRGCQDFGWDPCFQPDGYEQTYAEMPKAEKNAVSHRFRALLELQEYFGSLAA

SEQ ID NO: 28109 - protein, 374 aa, Homo sapiens
MAASAAAAELQASGGPRHPVCLLVLGMAGSGKTTFVQRLTGHLHAQGTPPYVINLDPAVHEVPFPANIDIRDTVKYKEVMKQYGLGPNGGIVTSLNLFATRFDQVMKFIEKAQNMSKYVLIDTPGQIEVFTWSASGTIITEALASSFPTVVIYVMDTSRSTNPVTFMSNMLYACSILYKTKLPFIVVMNKTDIIDHSFAVEWMQDFEAFQDALNQETTYVSNLTRSMSLVLDEFYSSLRVVGVSAVLGTGLDELFVQVTSAAEEYEREYRPEYERLKKSLANAESQQQREQLERLRKDMGSVALDAGTAKDSLSPVLHPSDLILTRGTLDEEDEEADSDTDDIDHRVTEESHEEPAFQNFMQESMAQYWKRNNK

SEQ ID NO: 28110 - protein, 295 aa, Homo sapiens
MKQYGLGPNGGIVTSLNLFATRFDQVMKFIEKAQNMSKYVLIDTPGQIEVFTWSASGTIITEALASSFPTVVIYVMDTSRSTNPVTFMSNMLYACSILYKTKLPFIVVMNKTDIIDHSFAVEWMQDFEAFQDALNQETTYVSNLTRSMSLVLDEFYSSLRVVGVSAVLGTGLDELFVQVTSAAEEYEREYRPEYERLKKSLANAESQQQREQLERLRKDMGSVALDAGTAKDSLSPVLHPSDLILTRGTLDEEDEEADSDTDDIDHRVTEESHEEPAFQNFMQESMAQYWKRNNK

SEQ ID NO: 28111 - protein, 279 aa, Homo sapiens
MKFPFLPILVMKFIEKAQNMSKYVLIDTPGQIEVFTWSASGTIITEALASSFPTVVIYVMDTSRSTNPVTFMSNMLYACSILYKTKLPFIVVMNKTDIIDHSFAVEWMQDFEAFQDALNQETTYVSNLTRSMSLVLDEFYSSLRVVGVSAVLGTGLDELFVQVTSAAEEYEREYRPEYERLKKSLANAESQQQREQLERLRKDMGSVALDAGTAKDSLSPVLHPSDLILTRGTLDEEDEEADSDTDDIDHRVTEESHEEPAFQNFMQESMAQYWKRNNK

SEQ ID NO: 28112 - protein, 362 aa, Homo sapiens
MTGHTRSSLPRCTGIVLLIKLRFSERLTGHLHAQGTPPYVINLDPAVHEVPFPANIDIRDTVKYKEVMKQYGLGPNGGIVTSLNLFATRFDQVMKFIEKAQNMSKYVLIDTPGQIEVFTWSASGTIITEALASSFPTVVIYVMDTSRSTNPVTFMSNMLYACSILYKTKLPFIVVMNKTDIIDHSFAVEWMQDFEAFQDALNQETTYVSNLTRSMSLVLDEFYSSLRVVGVSAVLGTGLDELFVQVTSAAEEYEREYRPEYERLKKSLANAESQQQREQLERLRKDMGSVALDAGTAKDSLSPVLHPSDLILTRGTLDEEDEEADSDTDDIDHRVTEESHEEPAFQNFMQESMAQYWKRNNK

SEQ ID NO: 28113 - protein, 388 aa, Homo sapiens
MRCLYGRVGGARRKMAASAAAAELQASGGPRHPVCLLVLGMAGSGKTTFVQRLTGHLHAQGTPPYVINLDPAVHEVPFPANIDIRDTVKYKEVMKQYGLGPNGGIVTSLNLFATRFDQVMKFIEKAQNMSKYVLIDTPGQIEVFTWSASGTIITEALASSFPTVVIYVMDTSRSTNPVTFMSNMLYACSILYKTKLPFIVVMNKTDIIDHSFAVEWMQDFEAFQDALNQETTYVSNLTRSMSLVLDEFYSSLRVVGVSAVLGTGLDELFVQVTSAAEEYEREYRPEYERLKKSLANAESQQQREQLERLRKDMGSVALDAGTAKDSLSPVLHPSDLILTRGTLDEEDEEADSDTDDIDHRVTEESHEEPAFQNFMQESMAQYWKRNNK

SEQ ID NO: 28114 - protein, 106 aa, Homo sapiens
MEFDLGAALEPTSQKPGVGAGHGGDPKLSPHKVQGRSEAGAGPGPKQGHHSSSDSSSSSSDSDTDVKSHAAGSKQHESIPGKAKKPKVKKKEKGKKEKGKKKEAPH

SEQ ID NO: 28115 - protein, 85 aa, Homo sapiens
MEFDLGAALEPTSQKPGVGAGHGGDPKLSPHKVQGRSEAGAGPGPKASNFRGLGKGRRLTAAPPSSKDTTALPTPAAAPAIRTRM

SEQ ID NO: 28116 - protein, 515 aa, Homo sapiens
MGSLSSRVLRQPRPALAQQAQGARAGGSARRPDTGDDAAGHGFCYCAGSHKRKRSSGSFCYCHPDSETDEDEEEGDEQQRLLNTPRRKKLKSTSKYIYQTLFLNGENSDIKICALGEEWSLHKIYLCQSGYFSSMFSGSWKESSMNIIELEIPDQNIDVEALQVAFGSLYRDDVLIKPSRVVAILAAACLLQLDGLIQQCGETMKETVNVKTVCGYYTSAGTYGLDSVKKKCLEWLLNNLMTHQNVELFKELSINVMKQLIGSSNLFVMQVEMDIYTALKKWMFLQLVPSWNGSLKQLLTETDVWFSKQRKDFEGMAFLETEQGKPFVSVFRHLRLQYIISDLASARIIEQDAVVPSEWLSSVYKQQWFAMLRAEQDSEVGPQEINKEELEGNSMRCGRKLAKDGEYCWRWTGFNFGFDLLVTYTNRYIIFKRNTLNQPCSGSVSLQPRRSIAFRLRLASFDSSGKLICSRTTGYQILTLEKDQEQVVMNLDSRLLIFPLYICCNFLYISPEKKN

SEQ ID NO: 28117 - protein, 491 aa, Homo sapiens
MDTKGCTTTNSPSTPCQNCSRITNVSTISSNNGCHPGGLTVNNCQPAGHVLRIPWDQGCQPTPRFCRKPIYLMNNFNARFSLDDCSWYGEGINSNEKETMQILNERLANYLQKVRMLERENAELESKIQEESNKELPVLCPDYLSYYTTIEELQQKILCTKAENSRLVSQIDNTKLTADDLRAKYEAEVSLRQLVESDANGLKQILNVLTLGKADLEAQVQSLKEELLCLKNNHKEEINSLQCQLGERLDIEVTAAPSADLNQVLQEMRCQYEPIMETNRKDVEQWFNTQIEELNQQVVTSSQQQQCCQKEIIELRRSVNTLEVELQAQHRMRDSQECILTETEARYTALLTQIQSLIDNLEAQLAEIRCALERQNQEYEILLDVKSRLECEITTYRSLLESSDGKRPCYPRATKCEPSPWTSCKSGAIESTAPACTSSSPCSLKEHCSACGPLSRILVKICTITKEIKDGKVISSYEHVQPCFIIRPAKV

SEQ ID NO: 28118 - protein, 431 aa, Homo sapiens
MTSDCSSTHCSPESCGTASGCAPASSCSVETACLPGTCATSRCQTPSFLSRSRGLTGCLLPCYFTGSCNSPCLVGNCAWCEDGVFTSNEKETMQFLNDRLASYLEKVRSLEETNAELESRIQEQCEQDIPMVCPDYQRYFNTIEDLQQKILCTKAENSRLAVQLDNCKLATDDFKSKYESELSLRQLLEADISSLHGILEELTLCKSDLEAHVESLKEDLLCLKKNHEEEVNLLREQLGDRLSVELDTAPTLDLNRVLDEMRCQCETVLANNRREAEEWLAVQTEELNQQQLSSAEQLQGCQMEILELKRTASALEIELQAQQSLTESLECTVAETEAQYSSQLAQIQCLIDNLENQLAEIRCDLERQNQEYQVLLDVKARLEGEINTYWGLLDSEDSRLSCSPCSTTCTSSNTCEPCSAYVICTVENCCL

SEQ ID NO: 28119 - protein, 454 aa, Homo sapiens
MCAAQMPPLAHIFRGTFVHSTWTCPMEVLRDHLLGVSDSGKIVFLEEASQQEKLAKEWCFKPCEIRELSHHEFFMPGLVDTHIHASQYSFAGSSIDLPLLEWLTKYTFPAEHRFQNIDFAEEVYTRVVRRTLKNGTTTACYFATIHTDSSLLLADITDKFGQRAFVGKVCMDLNDTFPEYKETTEESIKETERFVSEMLQKNYSRVKPIVTPRFSLSCSETLMGELGNIAKTRDLHIQSHISENRDEVEAVKNLYPSYKNYTSVYDKNNLLTNKTVMAHGCYLSAEELNVFHERGASIAHCPNSNLSLSSGFLNVLEVLKHEVKIGLGTDVAGGYSYSMLDAIRRAVMVSNILLINKVNEKSLTLKEVFRLATLGGSQALGLDGEIGNFEVGKEFDAILINPKASDSPIDLFYGDFFGDISEAVIQKFLYLGDDRNIEEVYVGGKQVVPFSSSV

SEQ ID NO: 28120 - protein, 380 aa, Homo sapiens
MPGLVDTHIHASQYSFAGSSIDLPLLEWLTKYTFPAEHRFQNIDFAEEVYTRVVRRTLKNGTTTACYFATIHTDSSLLLADITDKFGQRAFVGKVCMDLNDTFPEYKETTEESIKETERFVSEMLQKNYSRVKPIVTPRFSLSCSETLMGELGNIAKTRDLHIQSHISENRDEVEAVKNLYPSYKNYTSVYDKNNLLTNKTVMAHGCYLSAEELNVFHERGASIAHCPNSNLSLSSGFLNVLEVLKHEVKIGLGTDVAGGYSYSMLDAIRRAVMVSNILLINKVNEKSLTLKEVFRLATLGGSQALGLDGEIGNFEVGKEFDAILINPKASDSPIDLFYGDFFGDISEAVIQKFLYLGDDRNIEEVYVGGKQVVPFSSSV

SEQ ID NO: 28121 - protein, 471 aa, Homo sapiens
MCAAQMPPLAHIFRGTFVHSTWTCPMEVLRDHLLGVSDSGKIVFLEEASQQEKLAKEWCFKPCEIRELSHHEFFMPGLVDTHIHASQYSFAGSSIDLPLLEWLTKYTFPAEHRFQNIDFAEEVYTRVVRRTLKNGTTTACYFATIHTDSSLLLADITDKFGQRAFVGKVCMDLNDTFPEYKETTEESIKETERFVSEMLQKNYSRVKPIVTPRFSLSCSETLMGELGNIAKTRDLHIQSHISENRDEVEAVKNLYPSYKNYTSVYDKNNLLTNKTVMAHGCYLSAEELNVFHERGASIAHCPNSNLSLSSGFLNVLEVLKHEVKIGLGTDVAGGYSYSMLDAIRRAVMVSNILLINKVNEKSLTLKEVFRLATLGGSQALGLDGEIGNFEVGKEFDAILINPKASDSPIDLFYGDFFGDISEAVIQKFLYLGDDRNIEEVYVGGKQVVPFSSSVKETIHLPASSPHPPPFP

SEQ ID NO: 28122 - protein, 128 aa, Homo sapiens
MAGGKAGKDSGKAKTKAVSRSQRAGLQFPVGRIHRHLKSRTTSHGRVGATAAVYSAAILEYLTAEVLELAGNASKDLKVKRITPRHLQLAIRGDEELDSLIKATIAGGGVIPHIHKSLIGKKGQQKTV

SEQ ID NO: 28123 - protein, 201 aa, Homo sapiens
MGNVMEGKSVEELSSTECHQWYKKFMTECPSGQLTLYEFRQFFGLKNLSPSASQYVEQMFETFDFNKDGYIDFMEYVAALSLVLKGKVEQKLRWYFKLYDVDGNGCIDRDELLTIIQAIRAINPCSDTTMTAEEFTDTVFSKIDVNGDGELSLEEFIEGVQKDQMLLDTLTRSLDLTRIVRRLQNGEQDEEGADEAAEAAG

SEQ ID NO: 28124 - protein, 1103 aa, Homo sapiens
MTACARRAGGLPDPGLCGPAWWAPSLPRLPRALPRLPLLLLLLLLQPPALSAVFTVGVLGPWACDPIFSRARPDLAARLAAARLNRDPGLAGGPRFEVALLPEPCRTPGSLGAVSSALARVSGLVGPVNPAACRPAELLAEEAGIALVPWGCPWTQAEGTTAPAVTPAADALYALLRAFGWARVALVTAPQDLWVEAGRSLSTALRARGLPVASVTSMEPLDLSGAREALRKVRDGPRVTAVIMVMHSVLLGGEEQRYLLEAAEELGLTDGSLVFLPFDTIHYALSPGPEALAALANSSQLRRAHDAVLTLTRHCPSEGSVLDSLRRAQERRELPSDLNLQQVSPLFGTIYDAVFLLARGVAEARAAAGGRWVSGAAVARHIRDAQVPGFCGDLGGDEEPPFVLLDTDAAGDRLFATYMLDPARGSFLSAGTRMHFPRGGSAPGPDPSCWFDPNNICGGGLEPGLVFLGFLLVVGMGLAGAFLAHYVRHRLLHMQMVSGPNKIILTVDDITFLHPHGGTSRKVAQGSRSSLGARSMSDIRSGPSQHLDSPNIGVYEGDRVWLKKFPGDQHIAIRPATKTAFSKLQELRHENVALYLGLFLARGAEGPAALWEGNLAVVSEHCTRGSLQDLLAQREIKLDWMFKSSLLLDLIKGIRYLHHRGVAHGRLKSRNCIVDGRFVLKITDHGHGRLLEAQKVLPEPPRAEDQLWTAPELLRDPALERRGTLAGDVFSLAIIMQEVVCRSAPYAMLELTPEEVVQRVRSPPPLCRPLVSMDQAPVECILLMKQCWAEQPELRPSMDHTFDLFKNINKGRKTNIIDSMLRMLEQYSSNLEDLIRERTEELELEKQKTDRLLTQMLPPSVAEALKTGTPVEPEYFEQVTLYFSDIVGFTTISAMSEPIEVVDLLNDLYTLFDAIIGSHDVYKVETIGDAYMVASGLPQRNGQRHAAEIANMSLDILSAVGTFRMRHMPEVPVRIRIGLHSGPCVAGVVGLTMPRYCLFGDTVNTASRMESTGLPYRIHVNLSTVGILRALDSGYQVELRGRTELKGKGAEDTFWLVGRRGFNKPIPKPPDLQPGSSNHGISLQEIPPERRRKLEKARPGQFS

SEQ ID NO: 28125 - protein, 578 aa, Homo sapiens
MSHQFSSQSAFSSMSRRVYSTSSSAGSGGGSPAVGSVCYARGRCGGGGYGIHGRGFGSRSLYNLGGSRSISINLMGRSTSGFCQGGGVGGFGGGRGFGVGSTGAGGFGGGGFGGAGFGTSNFGLGGFGPYCPPGGIQEVTINQSLLEPLHLEVDPEIQRIKTQEREQIMVLNNKFASFIDKVRFLEQQNQVLQTKWELLQQVNTSTGTNNLEPLLENYIGDLRRQVDLLSAEQMRQNAEVRSMQDVVEDYKSKYEDEINKRTGSENDFVVLKKDVDAAYVSKVDLESRVDTLTGEVNFLKYLFLTELSQVQTHISDTNVILSMDNNRSLDLDSIIDAVRTQYELIAQRSKDEAEALYQTKYQELQITAGRHGDDLKNSKMEIAELNRTVQRLQAEISNVKKQIEQMQSLISDAEERGEQALQDAWQKLQDLEEALQQSKEELARLLRDYQAMLGVKLSLDVEIATYRQLLEGEESRMSGELQSHVSISVQNSQVSVNGGAGGGGSYGSGGYGGGSGGGYGGGRSYRGGGARGRSGGGYGSGCGGGGGSYGGSGRSGRGSSRVQIIQTSTNTSHRRILE

SEQ ID NO: 28126 - protein, 720 aa, Homo sapiens
MDDPKKEDILLLADEKFDFDLSLSSSSANEDDEVFFGPFGHKERCIAASLELNNPVPEQPPLPTSESPFAWSPLAGEKFVEVYKEAHLLALHIESSSRNQAAQAAKPEDPRSQGVERFIQESKLKINLFEKEKEMKKSPTSLKRETYYLSDSPLLGPPVGEPRLLASSPALPSSGAQARLTRAPGPPHSAHALPRESCTAHAASQAATQRKPGTKLLLPRAASVRGRSIPGAAEKPKKEIPASPSRTKIPAEKESHRDVLPDKPAPGAVNVPAAGSHLGQGKRAIPVPNKLGLKKTLLKAPGSTSNLARKSSSGPVWSGASSACTSPAVGKAKSSEFASIPANSSRPLSNISKSGRMGPAMLRPALPAGPVGASSWQAKRVDVSELAAEQLTAPPSASPTQPQTPEGGGQWLNSSCAWSESSQLNKTRSIRRRDSCLNSKTKVMPTPTNQFKIPKFSIGDSPDSSTPKLSRAQRPQSCTSVGRVTVHSTPVRRSSGPAPQSLLSAWRVSALPTPASRRCSGLPPMTPKTMPRAVGSPLCVPARRRSSEPRKNSAMRTEPTRESNRKTDSRLVDVSPDRGSPPSRVPQALNFSPEESDSTFSKSTATEVAREEAKPGGDAAPSEALLVDIKLEPLAVTPDAASQPLIDLPLIDFCDTPEAHVAVGSESRPLIDLMTNTPDMNKNVAKPSPVVGQLIDLSSPLIQLSPEADKENVDSPLLKF

SEQ ID NO: 28127 - protein, 1279 aa, Homo sapiens
MSTDDQQKIQAAAFDKGDDRRLGKKPIFSSSQQRKQVSDSGDIKIKSWRGNNKKECWSYLSTNKKMKSDGLGASGHSSSTNRNSINKTLKQDDVKEKDGTKIASKITKELKTGGKNVSGKPKTVTKSKTENGDKARLENMSPRQVVERSATAAAAATGQKNLLNGKGVRNQEGQISGARPKVLTGNLNVQAKAKPLKKATGKDSPCLSIAGPSSRSTDSSMEFSISTECLDEPKENGSTEEEKPSGHKLSFCDSPGQMMKNSVDSVKNSTVAIKSRPVSRVTNGTSNKKSIHEQDTNVNNSVLKKVSGKGCSEPVPQAILKKRGTSNGCTAAQQRTKSTPSNLTKTQGSQGESPNSVKSSVSSRQSDENVAKLDHNTTTEKQAPKRKMVKQVHTALPKVNAKIVAMPKNLNQSKKGETLNNKDSKQKMPPGQVISKTQPSSQRPLKHETSTVQKSMFHDVRDNNNKDSVSEQKPHKPLINLASEISDAEALQSSCRPDPQKPLNDQEKEKLALECQNISKLDKSLKHELESKQICLDKSETKFPNHKETDDCDAANICCHSVGSDNVNSKFYSTTALKYMVSNPNENSLNSNPVCDLDSTSAGQIHLISDRENQVGRKDTNKQSSIKCVEDVSLCNPERTNGTLNSAQEDKKSKVPVEGLTIPSKLSDESAMDEDKHATADSDVSSKCFSGQLSEKNSPKNMETSESPESHETPETPFVGHWNLSTGVLHQRESPESDTGSATTSSDDIKPRSEDYDAGGSQDDDGSNDRGISKCGTMLCHDFLGRSSSDTSTPEELKIYDSNLRIEVKMKKQSNNDLFQVNSTSDDEIPRKRPEIWSRSAIVHSRERENIPRGSVQFAQEIDQVSSSADETEDERSEAENVAENFSISNPAPQQFQGIINLAFEDATENECREFSATKKFKRSVLLSVDECEELGSDEGEVHTPFQASVDSFSPSDVFDGISHEHHGRTCYSRFSRESEDNILECKQNKGNSVCKNESTVLDLSSIDSSRKNKQSVSATEKKNTIDVLSSRSRQLLREDKKVNNGSNVENDIQQRSKFLDSDVKSQERPCHLDLHQREPNSDIPKNSSTKSLDSFRSQVLPQEGPVKESHSTTTEKANIALSAGDIDDCDTLAQTRMYDHRPSKTLSPIYEMDVIEAFEQKVESETHVTDMDFEDDQHFAKQDWTLLKQLLSEQDSNLDVTNSVPEDLSLAQYLINQTLLLARDSSKPQGITHIDTLNRWSELTSPLDSSASITMASFSSEDCSPQGEWTILELETQH

SEQ ID NO: 28128 - protein, 1129 aa, Homo sapiens
MSTDDQQKIQAAAFDKGDDRRLGKKPIFSSSQQRKQVSDSGDIKIKSWRGNNKKECWSYLSTNKKMKSDGLGASGHSSSTNRNSINKTLKQDDVKEKDGTKIASKITKELKTGGKNVSGKPKTVTKSKTENGDKARLENMSPRQVVERSATAAAAATGQKNLLNGKGVRNQEGQISGARPKVLTGNLNVQAKAKPLKKATGKDSPCLSIAGPSSRSTDSSMEFSISTECLDEPKENGSTEEEKPSGHKLSFCDSPGQMMKNSVDSVKNSTVAIKSRPVSRVTNGTSNKKSIHEQDTNVNNSVLKKVSGKGCSEPVPQAILKKRGTSNGCTAAQQRTKSTPSNLTKTQGSQGESPNSVKSSVSSRQSDENVAKLDHNTTTEKQAPKRKMVKQVHTALPKVNAKIVAMPKNLNQSKKGETLNNKDSKQKMPPGQVISKTQPSSQRPLKHETSTVQKSMFHDVRDNNNKDSVSEQKPHKPLINLASEISDAEALQSSCRPDPQKPLNDQEKEKLALECQNISKLDKSLKHELESKQICLDKSETKFPNHKETDDCDAANICCHSVGSDNVNSKFYSTTALKYMVSNPNENSLNSNPVCDLDSTSAGQIHLISDRENQVGRKDTNKQSSIKCVEDVSLCNPERTNGTLNSAQEDKKSKVPVEGLTIPSKLSDESAMDEDKHATADSDVSSKCFSGQLSEKNSPKNMETSESPESHETPETPFVGHWNLSTGVLHQRESPESDTGSATTSSDDIKPRSEDYDAGGSQDDDGSNDRGISKCGTMLCHDFLGRSSSDTSTPEELKIYDSNLRIEVKMKKQSNNDLFQVNSTSDDEIPRKRPEIWSRSAIVHSRERENIPRGSVQFAQEIDQVSSSADETEDERSEAENVAENFSISNPAPQQFQGIINLAFEDATENECREFSATKKFKRSVLLSVDECEELGSDEGEVHTPFQASVDSFSPSDVFDGISHEHHGRTCYSRFSRESEDNILECKQNKGNSVCKNESTVLDLSSIDSSRKNKQSVSATEKKNTIDVLSSRSRQLLREDKKVNNGSNVENDIQQRSKFLDSDVKSQERPCHLDLHQREPNSDIPKNSSTKSLDSFRSQVLPQEGPVKESHSTTTEKANIALSAGNVQK

SEQ ID NO: 28129 - protein, 126 aa, Homo sapiens
MPELAKSAPAPKKGSKKAVTKAQKKDGKKRKRSRKESYSVYVYKVLKQVHPDTGISSKAMGIMNSFVNDIFERIASEASRLAHYNKRSTITSREIQTAVRLLLPGELAKHAVSEGTKAVTKYTSSK

SEQ ID NO: 28130 - protein, 632 aa, Homo sapiens
METPAAAAPAGSLFPSFLLLACGTLVAALLGAAHRLGLFYQLLHKVDKASVRHGGENVAAVLRAHGVRFIFTLVGGHISPLLVACEKLGIRVVDTRHEVTAVFAADAMARLSGTVGVAAVTAGPGLTNTVTAVKNAQMAQSPILLLGGAASTLLQNRGALQAVDQLSLFRPLCKFCVSVRRVRDIVPTLRAAMAAAQSGTPGPVFVELPVDVLYPYFMVQKEMVPAKPPKGLVGRVVSWYLENYLANLFAGAWEPQPEGPLPLDIPQASPQQVQRCVEILSRAKRPLMVLGSQALLTPTSADKLRAAVETLGVPCFLGGMARGLLGRNHPLHIRENRSAALKKADVIVLAGTVCDFRLSYGRVLSHSSKIIIVNRNREEMLLNSDIFWKPQEAVQGDVGSFVLKLVEGLQGQTWAPDWVEELREADRQKEQTFREKAAMPVAQHLNPVQVLQLVEETLPDNSILVVDGGDFVGTAAHLVQPRGPLRWLDPGAFGTLGVGAGFALGAKLCRPDAEVWCLFGDGAFGYSLIEFDTFVRHKIPVMALVGNDAGWTQISREQVPSLGSNVACGLAYTDYHKAAMGLGARGLLLSRENEDQVVKVLHDAQQQCRDGHPVVVNILIGRTDFRDGSIAV

SEQ ID NO: 28131 - protein, 1189 aa, Homo sapiens
MESTPSFLKGTPTWEKTAPENGIVRQEPGSPPRDGLHHGPLCLGEPAPFWRGVLSTPDSWLPPGFPQGPKDMLPLVEGEGPQNGERKVNWLGSKEGLRWKEAMLTHPLAFCGPACPPRCGPLMPEHSGGHLKSDPVAFRPWHCPFLLETKILERAPFWVPTCLPPYLVSGLPPEHPCDWPLTPHPWVYSGGQPKVPSAFSLGSKGFYYKDPSIPRLAKEPLAAAEPGLFGLNSGGHLQRAGEAERPSLHQRDGEMGAGRQQNPCPLFLGQPDTVPWTSWPACPPGLVHTLGNVWAGPGDGNLGYQLGPPATPRCPSPEPPVTQRGCCSSYPPTKGGGLGPCGKCQEGLEGGASGASEPSEEVNKASGPRACPPSHHTKLKKTWLTRHSEQFECPRGCPEVEERPVARLRALKRAGSPEVQGAMGSPAPKRPPDPFPGTAEQGAGGWQEVRDTSIGNKDVDSGQHDEQKGPQDGQASLQDPGLQDIPCLALPAKLAQCQSCAQAAGEGGGHACHSQQVRRSPLGGELQQEEDTATNSSSEEGPGSGPDSRLSTGLAKHLLSGLGDRLCRLLRREREALAWAQREGQGPAVTEDSPGIPRCCSRCHHGLFNTHWRCPRCSHRLCVACGRVAGTGRAREKAGFQEQSAEECTQEAGHAACSLMLTQFVSSQALAELSTAMHQVWVKFDIRGHCPCQADARVWAPGDAGQQKESTQKTPPTPQPSCNGDTHRTKSIKEETPDSAETPAEDRAGRGPLPCPSLCELLASTAVKLCLGHERIHMAFAPVTPALPSDDRITNILDSIIAQVVERKIQEKALGPGLRAGPGLRKGLGLPLSPVRPRLPPPGALLWLQEPQPCPRRGFHLFQEHWRQGQPVLVSGIQRTLQGNLWGTEALGALGGQVQALSPLGPPQPSSLGSTTFWEGFSWPELRPKSDEGSVLLLHRALGDEDTSRVENLAASLPLPEYCALHGKLNLASYLPPGLALRPLEPQLWAAYGVSPHRGHLGTKNLCVEVADLVSILVHADTPLPAWHRAQKDFLSGLDGEGLWSPGSQVSTVWHVFRAQDAQRIRRFLQMVCPAGAGALEPGAPGSCYLDAGLRRRLREEWGVSCWTLLQAPGEAVLVPAGAPHQVQGLVSTVSVTQHFLSPETSALSAQLCHQGPSLPPDCHLLYAQMDWAVFQAVKVAVGTLQEAK

SEQ ID NO: 28132 - protein, 1134 aa, Homo sapiens
MESTPSFLKGTPTWEKTAPENGIVRQEPGSPPRDGLHHGPLCLGEPAPFWRGVLSTPDSWLPPGFPQGPKDMLPLVEGEGPQNGERKVNWLGSKEGLRWKEAMLTHPLAFCGPACPPRCGPLMPEHSGGHLKSDPVAFRPWHCPFLLETKILERAPFWVPTCLPPYLVSGLPPEHPCDWPLTPHPWVYSGGQPKVPSAFSLGSKGFYYKDPSIPRLAKEPLAAAEPGLFGLNSGGHLQRAGEAERPSLHQRDGEMGAGRQQNPCPLFLGQPDTVPWTSWPACPPGLVHTLGNVWAGPGDGNLGYQLGPPATPRCPSPEPPVTQRGCCSSYPPTKGGGLGPCGKCQEGLEGGASGASEPSEEVNKASGPRACPPSHHTKLKKTWLTRHSEQFECPRGCPEVEERPVARLRALKRAGSPEVQGAMGSPAPKRPPDPFPGTAEQGAGGWQEVRDTSIGNKDVDSGQHDEQKGPQDGQASLQDPGLQDIPCLALPAKLAQCQSCAQAAGEGGGHACHSQQVRRSPLGGELQQEEDTATNSSSEEGPGSGPDSRLSTGLAKHLLSGLGDRLCRLLRREREALAWAQREGQGPAVTEDSPGIPRCCSRCHHGLFNTHWRCPRCSHRLCVACGRVAGTGRAREKAGFQEQSAEECTQEAGHAACSLMLTQFVSSQALAELSTAMHQVWVKFDIRGHCPCQADARVWAPGDAGQQKESTQKTPPTPQPSCNGDTHRTKSIKEETPDSAETPAEDRAGRGPLPCPSLCELLASTAVKLCLGHERIHMAFAPVTPALPSDDRITNILDSIIAQVVERKIQEKALGPGLRAGPGLRKGLGLPLSPVRPRLPPPGALLWLQEPQPCPRRGFHLFQEHWRQGQPVLVSGIQRTLQGNLWGTEALGALGGQVQALSPLGPPQPSSLGSTTFWEGFSWPELRPKSDEGSVLLLHRALGDEDTSRVENLAASLPLPEYCALHGKLNLASYLPPGLALRPLEPQLWAAYGVSPHRGHLGTKNLCVEVADLVSILVHADTPLPAWHRAQKDFLSGLDGEGLWSPGSQVSTVWHVFRAQDAQRIRRFLQMVQGLVSTVSVTQHFLSPETSALSAQLCHQGPSLPPDCHLLYAQMDWAVFQAVKVAVGTLQEAK

SEQ ID NO: 28133 - protein, 400 aa, Homo sapiens
MTSYSYRQSSATSSFGGLGGGSVRFGPGVAFRAPSIHGGSGGRGVSVSSARFVSSSSSGAYGGGYGGVLTASDGLLAGNEKLTMQNLNDRLASYLDKVRALEAANGELEVKIRDWYQKQGPGPSRDYSHYYTTIQDLRDKILGATIENSRIVLQIDNARLAADDFRTKFETEQALRMSVEADINGLRRVLDELTLARTDLEMQIEGLKEELAYLKKNHEEEISTLRGQVGGQVSVEVDSAPGTDLAKILSDMRSQYEVMAEQNRKDAEAWFTSRTEELNREVAGHTEQLQMSRSEVTDLRRTLQGLEIELQSQLSMKAALEDTLAETEARFGAQLAHIQALISGIEAQLGDVRADSERQNQEYQRLMDIKSRLEQEIATYRSLLEGQEDHYNNLSASKVL

SEQ ID NO: 28134 - protein, 946 aa, Homo sapiens
MKRLTCFFICFFLSEVSGFEIPINGLSEFVDYEDLVELAPGKFQLVAENRRYQRSLPGESEEMMEEVDQVTLYSYKVQSTITSRMATTMIQSKVVNNSPQPQNVVFDVQIPKGAFISNFSMTVDGKTFRSSIKEKTVGRALYAQARAKGKTAGLVRSSALDMENFRTEVNVLPGAKVQFELHYQEVKWRKLGSYEHRIYLQPGRLAKHLEVDVWVIEPQGLRFLHVPDTFEGHFDGVPVISKGQQKAHVSFKPTVAQQRICPNCRETAVDGELVVLYDVKREEKAGELEVFNGYFVHFFAPDNLDPIPKNILFVIDVSGSMWGVKMKQTVEAMKTILDDLRAEDHFSVIDFNQNIRTWRNDLISATKTQVADAKRYIEKIQPSGGTNINEALLRAIFILNEANNLGLLDPNSVSLIILVSDGDPTVGELKLSKIQKNVKENIQDNISLFSLGMGFDVDYDFLKRLSNENHGIAQRIYGNQDTSSQLKKFYNQVSTPLLRNVQFNYPHTSVTDVTQNNFHNYFGGSEIVVAGKFDPAKLDQIESVITATSANTQLVLETLAQMDDLQDFLSKDKHADPDFTRKLWAYLTINQLLAERSLAPTAAAKRRITRSILQMSLDHHIVTPLTSLVIENEAGDERMLADAPPQDPSCCSGALYYGSKVVPDSTPSWANPSPTPVISMLAQGSQVLESTPPPHVMRVENDPHFIIYLPKSQKNICFNIDSEPGKILNLVSDPESGIVVNGQLVGAKKPNNGKLSTYFGKLGFYFQSEDIKIEISTETITLSHGSSTFSLSWSDTAQVTNQRVQISVKKEKVVTITLDKEMSFSVLLHRVWKKHPVNVDFLGIYIPPTNKFSPKAHGLIGQFMQEPKIHIFNERPGKDPEKPEASMEVKGQKLIITRGLQKDYRTDLVFGTDVTCWFVHNSGKGFIDGHYKDYFVPQLYSFLKRP

SEQ ID NO: 28135 - protein, 424 aa, Homo sapiens
MDFSRRSFHRSLSSSLQAPVVSTVGMQRLGTTPSVYGGAGGRGIRISNSRHTVNYGSDLTGGGDLFVGNEKMAMQNLNDRLASYLEKVRTLEQSNSKLEVQIKQWYETNAPRAGRDYSAYYRQIEELRSQIKDAQLQNARCVLQIDNAKLAAEDFRLKYETERGIRLTVEADLQGLNKVFDDLTLHKTDLEIQIEELNKDLALLKKEHQEEVDGLHKHLGNTVNVEVDAAPGLNLGVIMNEMRQKYEVMAQKNLQEAKEQFERQTAVLQQQVTVNTEELKGTEVQLTELRRTSQSLEIELQSHLSMKESLEHTLEETKARYSSQLANLQSLLSSLEAQLMQIRSNMERQNNEYHILLDIKTRLEQEIATYRRLLEGEDVKTTEYQLSTLEERDIKKTRKIKTVVQEVVDGKVVSSEVKEVEENI

SEQ ID NO: 28136 - protein, 890 aa, Homo sapiens
MAFAWWPCLILALLSSLAASGFPRSPFRLLGKRSLPEGVANGIEVYSTKINSKVTSRFAHNVVTMRAVNRADTAKEVSFDVELPKTAFITNFTLTIDGVTYPGNVKEKEVAKKQYEKAVSQGKTAGLVKASGRKLEKFTVSVNVAAGSKVTFELTYEELLKRHKGKYEMYLKVQPKQLVKHFEIEVDIFEPQGISMLDAEASFITNDLLGSALTKSFSGKKGHVSFKPSLDQQRSCPTCTDSLLNGDFTITYDVNRESPGNVQIVNGYFVHFFAPQGLPVVPKNVAFVIDISGSMAGRKLEQTKEALLRILEDMQEEDYLNFILFSGDVSTWKEHLVQATPENLQEARTFVKSMEDKGMTNINDGLLRGISMLNKAREEHRIPERSTSIVIMLTDGDANVGESRPEKIQENVRNAIGGKFPLYNLGFGNNLNYNFLENMALENHGFARRIYEDSDADLQLQGFYEEVANPLLTGVEMEYPENAILDLTQNTYQHFYDGSEIVVAGRLVDEDMNSFKADVKGHGATNDLTFTEEVDMKEMEKALQERDYIFGNYIERLWAYLTIEQLLEKRKNAHGEEKENLTARALDLSLKYHFVTPLTSMVVTKPEDNEDERAIADKPGEDAEATPVSPAMSYLTSYQPPQNPYYYVDGDPHFIIQIPEKDDALCFNIDEAPGTVLRLIQDAVTGLTVNGQITGDKRGSPDSKTRKTYFGKLGIANAQMDFQVEVTTEKITLWNRAVPSTFSWLDTVTVTQDGLSMMINRKNMVVSFGDGVTFVVVLHQVWKKHPVHRDFLGFYVVDSHRMSAQTHGLLGQFFQPFDFKVSDIRPGSDPTKPDATLVVKNHQLIVTRGSQKDYRKDASIGTKVVCWFVHNNGEGLIDGVHTDYIVPNLF

SEQ ID NO: 28137 - protein, 886 aa, Homo sapiens
MVALSHLGSALQLGSLCFPRSPFRLLGKRSLPEGVANGIEVYSTKINSKVTSRFAHNVVTMRAVNRADTAKEVSFDVELPKTAFITNFTLTIDGVTYPGNVKEKEVAKKQYEKAVSQGKTAGLVKASGRKLEKFTVSVNVAAGSKVTFELTYEELLKRHKGKYEMYLKVQPKQLVKHFEIEVDIFEPQGISMLDAEASFITNDLLGSALTKSFSGKKGHVSFKPSLDQQRSCPTCTDSLLNGDFTITYDVNRESPGNVQIVNGYFVHFFAPQGLPVVPKNVAFVIDISGSMAGRKLEQTKEALLRILEDMQEEDYLNFILFSGDVSTWKEHLVQATPENLQEARTFVKSMEDKGMTNINDGLLRGISMLNKAREEHRIPERSTSIVIMLTDGDANVGESRPEKIQENVRNAIGGKFPLYNLGFGNNLNYNFLENMALENHGFARRIYEDSDADLQLQGFYEEVANPLLTGVEMEYPENAILDLTQNTYQHFYDGSEIVVAGRLVDEDMNSFKADVKGHGATNDLTFTEEVDMKEMEKALQERDYIFGNYIERLWAYLTIEQLLEKRKNAHGEEKENLTARALDLSLKYHFVTPLTSMVVTKPEDNEDERAIADKPGEDAEATPVSPAMSYLTSYQPPQNPYYYVDGDPHFIIQIPEKDDALCFNIDEAPGTVLRLIQDAVTGLTVNGQITGDKRGSPDSKTRKTYFGKLGIANAQMDFQVEVTTEKITLWNRAVPSTFSWLDTVTVTQDGLSMMINRKNMVVSFGDGVTFVVVLHQVWKKHPVHRDFLGFYVVDSHRMSAQTHGLLGQFFQPFDFKVSDIRPGSDPTKPDATLVVKNHQLIVTRGSQKDYRKDASIGTKVVCWFVHNNGEGLIDGVHTDYIVPNLF

SEQ ID NO: 28138 - protein, 422 aa, Homo sapiens
MNSGHSFSQTPSASFHGAGGGWGRPRSFPRAPTVHGGAGGARISLSFTTRSCPPPGGSWGSGRSSPLLGGNGKATMQNLNDRLASYLEKVRALEEANMKLESRILKWHQQRDPGSKKDYSQYEENITHLQEQIVDGKMTNAQIILLIDNARMAVDDFNLKYENEHSFKKDLEIEVEGLRRTLDNLTIVTTDLEQEVEGMRKELILMKKHHEQEMEKHHVPSDFNVNVKVDTGPREDLIKVLEDMRQEYELIIKKKHRDLDTWYKEQSAAMSQEAASPATVQSRQGDIHELKRTFQALEIDLQTQYSTKSALENMLSETQSRYSCKLQDMQEIISHYEEELTQLRHELERQNNEYQVLLGIKTHLEKEITTYRRLLEGESEGTREESKSSMKVSATPKIKAITQETINGRLVLCQVNEIQKHA

SEQ ID NO: 28139 - protein, 285 aa, Homo sapiens
MTNAQIILLIDNARMAVDDFNLKYENEHSFKKDLEIEVEGLRRTLDNLTIVTTDLEQEVEGMRKELILMKKHHEQEMEKHHVPSDFNVNVKVDTGPREDLIKVLEDMRQEYELIIKKKHRDLDTWYKEQSAAMSQEAASPATVQSRQGDIHELKRTFQALEIDLQTQYSTKSALENMLSETQSRYSCKLQDMQEIISHYEEELTQLRHELERQNNEYQVLLGIKTHLEKEITTYRRLLEGESEGTREESKSSMKVSATPKIKAITQETINGRLVLCQVNEIQKHA

SEQ ID NO: 28140 - protein, 1065 aa, Homo sapiens
MNKSENLLFAGSSLASQVHAAAVNGDKGALQRLIVGNSALKDKEDQFGRTPLMYCVLADRLDCADALLKAGADVNKTDHSQRTALHLAAQKGNYRFMKLLLTRRANWMQKDLEEMTPLHLTTRHRSPKCLALLLKFMAPGEVDTQDKNKQTALHWSAYYNNPEHVKLLIKHDSNIGIPDVEGKIPLHWAANHKDPSAVHTVRCILDAAPTESLLNWQDYEGRTPLHFAVADGNVTVVDVLTSYESCNITSYDNLFRTPLHWAALLGHAQIVHLLLERNKSGTIPSDSQGATPLHYAAQSNFAETVKVFLKHPSVKDDSDLEGRTSFMWAAGKGSDDVLRTMLSLKSDIDINMADKYGGTALHAAALSGHVSTVKLLLENNAQVDATDVMKHTPLFRACEMGHKDVIQTLIKGGARVDLVDQDGHSLLHWAALGGNADVCQILIENKINPNVQDYAGRTPLQCAAYGGYINCMAVLMENNADPNIQDKEGRTALHWSCNNGYLDAIKLLLDFAAFPNQMENNEERYTPLDYALLGERHEVIQFMLEHGALSIAAIQDIAAFKIQAVYKGYKVRKAFRDRKNLLMKHEQLRKDAAAKKREEENKRKEAEQQKGRRSPDSCRPQALPCLPSTQDVPSRQSRAPSKQPPAGNVAQGPEPRDSRGSPGGSLGGALQKEQHVSSDLQGTNSRRPNETAREHSKGQSACVHFRPNEGSDGSRHPGVPSVEKSRGETAGDERCAKGKGFVKQPSCIRVAGPDEKGEDSRRAAASLPPHDSHWKPSRRHDTEPKAKCAPQKRRTQELRGGRCSPAGSSRPGSARGEAVHAGQNPPHHRTPRNKVTQAKLTGGLYSHLPQSTEELRSGARRLETSTLSEDFQVSKETDPAPGPLSGQSVNIDLLPVELRLQIIQRERRRKELFRKKNKAAAVIQRAWRSYQLRKHLSHLRHMKQLGAGDVDRWRQESTALLLQVWRKELELKFPQTTAVSKAPKSPSKGTSGTKSTKHSVLKQIYGCSHEGKIHHPTRSVKASSVLRLNSVSNLQCIHLLENSGRSKNFSYNLQSATQPKNKTKP

SEQ ID NO: 28141 - protein, 895 aa, Homo sapiens
MNKSENLLFAGSSLASQVHAAAVNGDKGALQRLIVGNSALKDKEDQFGRTPLMYCVLADRLDCADALLKAGADVNKTDHSQRTALHLAAQKGNYRFMKLLLTRRANWMQKDLEEMTPLHLTTRHRSPKCLALLLKFMAPGEVDTQDKNKQTALHWSAYYNNPEHVKLLIKHDSNIGIPDVEGKIPLHWAANHKDPSAVHTVRCILDAAPTESLLNWQDYEGRTPLHFAVADGNVTVVDVLTSYESCNITSYDNLFRTPLHWAALLGHAQIVHLLLERNKSGTIPSDSQGATPLHYAAQSNFAETVKVFLKHPSVKDDSDLEGRTSFMWAAGKGSDDVLRTMLSLKSDIDINMADKYGGTALHAAALSGHVSTVKLLLENNAQVDATDVMKHTPLFRACEMGHKDVIQTLIKGGARVDLVDQDGHSLLHWAALGGNADVCQILIENKINPNVQDYAGRTPLQCAAYGGYINCMAVLMENNADPNIQDKEGRTALHWSCNNGYLDAIKLLLDFAAFPNQMENNEERYTPLDYALLGERHEVIQFMLEHGALSIAAIQDIAAFKIQAVYKGYKVRKAFRDRKNLLMKHEQLRKDAAAKKREEENKRKEAEQQKGRRSPDSCRPQALPCLPSTQDVPSRQSRAPSKQPPAGNVAQGPEPRDSRGSPGGSLGGALQKEQHVSSDLQGTNSRRPNETAREHSKGQSACVHFRPNEGSDGSRHPGVPSVEKSRELRLQIIQRERRRKELFRKKNKAAAVIQRAWRSYQLRKHLSHLRHMKQLGAGDVDRWRQESTALLLQVWRKELELKFPQTTAVSKAPKSPSKGTSGTKSTKHSVLKQIYGCSHEGKIHHPTRSVKASSVLRLNSVSNLQCIHLLENSGRSKNFSYNLQSATQPKNKTKP

SEQ ID NO: 28142 - protein, 101 aa, Homo sapiens
MNKSENLLFAGSSLASQVHAAAVNGDKGALQRLIVGNSALKDKEDQFGRTPLMYCVLADRLDCADALLKAGADVNKTDHSQRTALHLAAQKALRTISTGRI

SEQ ID NO: 28143 - protein, 266 aa, Homo sapiens
MVKVTFNSALAQKEAKKDEPKSGEEALIIPPDAVAVDCKDPDDVVPVGQRRAWCWCMCFGLAFMLAGVILGGAYLYKYFALQPDDVYYCGIKYIKDDVILNEPSADAPAALYQTIEENIKIFEEEEVEFISVPVPEFADSDPANIVHDFNKKLTAYLDLNLDKCYVIPLNTSIVMPPRNLLELLINIKAGTYLPQSYLIHEHMVITDRIENIDHLGFFIYRLCHDKETYKLQRRETIKGIQKREASNCFAIRHFENKFAVETLICS

SEQ ID NO: 28144 - protein, 160 aa, Homo sapiens
MVKVTFNSALAQKEAKKDEPKSGEEALIIPPDAVAVDCKDPDDVVPVGQRRAWCWCMCFGLAFMLAGVILGGAYLYKYFALQAGTYLPQSYLIHEHMVITDRIENIDHLGFFIYRLCHDKETYKLQRRETIKGIQKREASNCFAIRHFENKFAVETLICS

SEQ ID NO: 28145 - protein, 289 aa, Homo sapiens
MYFLTPILVAILCILVVWIFKNADRSMEKKKGEPRTRAEARPWVDEDLKDSSDLHQAEEDADEWQESEENVEHIPFSHNHYPEKEMVKRSQEFYELLNKRRSVRFISNEQVPMEVIDNVIRTAGTAPSGAHTEPWTFVVVKDPDVKHKIRKIIEEEEEINYMKRMGHRWVTDLKKLRTNWIKEYLDTAPILILIFKQVHGFAANGKKKVHYYNEISVSIACGILLAALQNAGLVTVTTTPLNCGPRLRVLLGRPAHEKLLMLLPVGYPSKEATVPDLKRKPLDQIMVTV

SEQ ID NO: 28146 - protein, 247 aa, Homo sapiens
MYFLTPILVAILCILVVWIFKNADRSMEKKKGEPRTRAEARPWVDEDLKDSSDLHQAEEDADEWQESEENVEHIPFSHNHYPEKEMVKRSQEFYELLNKRRSVRFISNEQVPMEVIDNVIRTAGTAPSGAHTEPWTFVVVKDPDVKHKIRKIIEEEEEINYMKRMGHRWVTDLKKLRTNWIKEYLDTAPILILIFKQVHGFAANGKKKVHYYNEISVSIACGILLAALQVFGKIILKELALISFLNL

SEQ ID NO: 28147 - protein, 293 aa, Homo sapiens
MYFLTPILVAILCILVVWIFKNADRSMEKKKGEPRTRAEARPWVDEDLKDSSDLHQAEEDADEWQESEENVEHIPFSHNHYPEKEMVKRSQEFYELLNKRRSVRFISNEQVPMEVIDNVIRTAGTAPSGAHTEPWTFVVVKDPDVKHKIRKIIEEEEEINYMKRMGHRWVTDLKKLRTNWIKEYLDTAPILILIFKQVHGFAANGKKKVHYYNEISVSIACGILLAALQVNNGITMRHQTARHRHLIEGPGRSSEACSKLSSQGCPECRSGDCHYHSSQLWPSTEGAPGPPRT

SEQ ID NO: 28148 - protein, 284 aa, Homo sapiens
MYFLTPILVAILCILVVWIFKNADRSMEKKKGEPRTRAEARPWVDEDLKDSSDLHQAEEDADEWQESEENVEHIPFSHNHYPEKEMVKRSQEFYELLNKRRSVRFISNEQVPMEVIDNVIRTAGTAPSGAHTEPWTFVVVKDPDVKHKIRKIIEEEEEINYMKRMGHRWVTDLKKLRTNWIKEYLDTAPILILIFKQVHGFAANGKKKVHYYNEISVSIACGILLAALQVNNGITMRHQTARHRHLIEGPGRSSEACSKLSSQGRPGASAAGSLFHFAIEFAAP

SEQ ID NO: 28149 - protein, 270 aa, Homo sapiens
MYFLTPILVAILCILVVWIFKNADRSMEKKKGEPRTRAEARPWVDEDLKDSSDLHQAEEDADEWQESEENVEHIPFSHNHYPEKEMVKRSQEFYELLNKRRSVRFISNEQVPMEVIDNVIRTAGTAPSGAHTEPWTFVVVKDPDVKHKIRKIIEEEEEINYMKRMGHRWVTDLKKLRTNWIKEYLDTAPILILIFKQVHGFAANGKKKVHYYNEISVSIACGILLAALQVNNGITMRHQTARHRHLIEGPGRSSEACSKLSSQGRPGFYC

SEQ ID NO: 28150 - protein, 192 aa, Homo sapiens
MKEADVDEWQESEENVEHIPFSHNHYPEKEMVKRSQEFYELLNKRRSVRFISNEQVPMEVIDNVIRTAGTAPSGAHTEPWTFVVVKDPDVKHKIRKIIEEEEEINYMKRMGHRWVTDLKKLRTNWIKEYLDTAPILILIFKQVHGFAANGKKKVHYYNEISVSIACGILLAALQVFGKIILKELALISFLNL

SEQ ID NO: 28151 - protein, 130 aa, Homo sapiens
MSGRGKQGGKARAKAKTRSSRAGLQFPVGRVHRLLRKGNYSERVGAGAPVYLAAVLEYLTAEILELAGNAARDNKKTRIIPRHLQLAIRNDEELNKLLGRVTIAQGGVLPNIQAVLLPKKTESHHKAKGK

SEQ ID NO: 28152 - protein, 483 aa, Homo sapiens
MSGGGPSGGGPGGSGRARTSSFAEPGGGGGGGGGGPGGSASGPGGTGGGKASVGAMGGGVGASSSGGGPGGSGGGGSGGPGAGTSFPPPGVKLGRDSGKVTTVVATLGQGPERSQEVAYTDIKVIGNGSFGVVYQARLAETRELVAIKKVLQDKRFKNRELQIMRKLDHCNIVRLRYFFYSSGEKKDELYLNLVLEYVPETVYRVARHFTKAKLTIPILYVKVYMYQLFRSLAYIHSQGVCHRDIKPQNLLVDPDTAVLKLCDFGSAKQLVRGEPNVSYICSRYYRAPELIFGATDYTSSIDVWSAGCVLAELLLGQPIFPGDSGVDQLVEIIKVLGTPTREQIREMNPNYTEFKFPQIKAHPWTKVFKSRTPPEAIALCSSLLEYTPSSRLSPLEACAHSFFDELRCLGTQLPNNRPLPPLFNFSAGELSIQPSLNAILIPPHLRSPAGTTTLTPSSQALTETPTSSDWQSTDATPTLTNSS

SEQ ID NO: 28153 - protein, 417 aa, Homo sapiens
MAGPFSRLLSARPGLRLLALAGAGSLAAGFLLRPEPVRAASERRRLYPPSAEYPDLRKHNNCMASHLTPAVYARLCDKTTPTGWTLDQCIQTGVDNPGHPFIKTVGMVAGDEETYEVFADLFDPVIQERHNGYDPRTMKHTTDLDASKIRSGYFDERYVLSSRVRTGRSIRGLSLPPACTRAERREVERVVVDALSGLKGDLAGRYYRLSEMTEAEQQQLIDDHFLFDKPVSPLLTAAGMARDWPDARGIWHNNEKSFLIWVNEEDHTRVISMEKGGNMKRVFERFCRGLKEVERLIQERGWEFMWNERLGYILTCPSNLGTGLRAGVHIKLPLLSKDSRFPKILENLRLQKRGTGGVDTAATGGVFDISNLDRLGKSEVELVQLVIDGVNYLIDCERRLERGQDIRIPTPVIHTKH

SEQ ID NO: 28154 - protein, 448 aa, Homo sapiens
MAGPFSRLLSARPGLRLLALAGAGSLAAGFLLRPEPVRAASERRRLYPPSQTWPTGQLPGNCTRSRRLCPPSMVTGYPLPSAEYPDLRKHNNCMASHLTPAVYARLCDKTTPTGWTLDQCIQTGVDNPGHPFIKTVGMVAGDEETYEVFADLFDPVIQERHNGYDPRTMKHTTDLDASKIRSGYFDERYVLSSRVRTGRSIRGLSLPPACTRAERREVERVVVDALSGLKGDLAGRYYRLSEMTEAEQQQLIDDHFLFDKPVSPLLTAAGMARDWPDARGIWHNNEKSFLIWVNEEDHTRVISMEKGGNMKRVFERFCRGLKEVERLIQERGWEFMWNERLGYILTCPSNLGTGLRAGVHIKLPLLSKDSRFPKILENLRLQKRGTGGVDTAATGGVFDISNLDRLGKSEVELVQLVIDGVNYLIDCERRLERGQDIRIPTPVIHTKH

SEQ ID NO: 28155 - protein, 488 aa, Homo sapiens
MAAGSEATTPVIVAAGAGGEEGEHVKPFKPEKAKEIIMSLQQPAIFCNMVFDWPARHWNAKYLSQVLHGKQIRFRMGMKSMSTVPQFETTCNYVEATLEEFLTWNCDQSSISGPFRDYDHSKFWAYADYKYFVSLFEDKTDLFQDVKWSDFGFPGRNGQESTLWIGSLGAHTPCHLDSYGCNLVFQVQGRKRWHLFPPEDTPFLYPTRIPYEESSVFSKINVVNPDLKRFPQFRKAQRHAVTLSPGQVLFVPRHWWHYVESIDPVTVSINSWIELEEDHLARVEEAITRMLVCALKTAENPQNTRAWLNPTEVEETSHAVNCCYLNAAVSAFFDRCRTSEVVEIQALRTDGEHMKKEELNVCNHMEVGQTGSQNLTTGTDKPEAASPFGPDLVPVAQRSEEPPSERGGIFGSDGKDFVDKDGEHFGKLHCAKRQQIMSNSENAIEEQIASNTTTTPQTFISTDDLLDCLVNPQVTRIVAQLLIQGRSL

SEQ ID NO: 28156 - protein, 225 aa, Homo sapiens
MAAGSEATTPVIVAAGAGGEEGEHVKPFKPEKAKEIIMSLQQPAIFCNMVFDWPARHWNAKYLSQVLHGKQIRFRMGMKSMSTVPQFETTCNYVEATLEEFLTWNCDQSSISGPFRDYDHSKFWAYADYKYFVSLFEDKTDLFQDVKWSDFGFPGRNGQESTLWIGSLGAHTPCHLDSYGCNLVFQVQGRLECNGMIIAPGPQAILLPQPLKYLGLQETMASLSS

SEQ ID NO: 28157 - protein, 280 aa, Homo sapiens
MAAGSEATTPVIVAAGAGGEEGEHVKPFKPEKAKEIIMSLQQPAIFCNMVFDWPARHWNAKYLSQVLHGKQIRFRMGMKSMSTVPQFETTCNYVEATLEEFLTWNCDQSSISGPFRDYDHSKFWAYADYKYFVSLFEDKTDLFQDVKWSDFGFPGRNGQESTLWIGSLGAHTPCHLDSYGCNLVFQVQGRKRWHLFPPEDTPFLYPTRIPYEESSVFSKINVVNPDLKRFPQFRKAQRHAVTLSPGQVLERKWQEGTQLLLLVKRRMDFGGRQSTRVIFI

SEQ ID NO: 28158 - protein, 130 aa, Homo sapiens
MSGRGKQGGKARAKAKTRSSRAGLQFPVGRVHRLLRKGNYSERVGAGAPVYLAAVLEYLTAEILELAGNAARDNKKTRIIPRHLQLAIRNDEELNKLLGKVTIAQGGVLPNIQAVLLPKKTESHHKAKGK

SEQ ID NO: 28159 - protein, 420 aa, Homo sapiens
MSGRPRTTSFAESCKPVQQPSAFGSMKVSRDKDGSKVTTVVATPGQGPDRPQEVSYTDTKVIGNGSFGVVYQAKLCDSGELVAIKKVLQDKRFKNRELQIMRKLDHCNIVRLRYFFYSSGEKKDEVYLNLVLDYVPETVYRVARHYSRAKQTLPVIYVKLYMYQLFRSLAYIHSFGICHRDIKPQNLLLDPDTAVLKLCDFGSAKQLVRGEPNVSYICSRYYRAPELIFGATDYTSSIDVWSAGCVLAELLLGQPIFPGDSGVDQLVEIIKVLGTPTREQIREMNPNYTEFKFPQIKAHPWTKVFRPRTPPEAIALCSRLLEYTPTARLTPLEACAHSFFDELRDPNVKLPNGRDTPALFNFTTQELSSNPPLATILIPPHARIQAAASTPTNATAASDANTGDRGQTNNAASASASNST

SEQ ID NO: 28160 - protein, 433 aa, Homo sapiens
MSGRPRTTSFAESCKPVQQPSAFGSMKVSRDKDGSKVTTVVATPGQGPDRPQEVSYTDTKVIGNGSFGVVYQAKLCDSGELVAIKKVLQDKRFKNRELQIMRKLDHCNIVRLRYFFYSSGEKKDEVYLNLVLDYVPETVYRVARHYSRAKQTLPVIYVKLYMYQLFRSLAYIHSFGICHRDIKPQNLLLDPDTAVLKLCDFGSAKQLVRGEPNVSYICSRYYRAPELIFGATDYTSSIDVWSAGCVLAELLLGQPIFPGDSGVDQLVEIIKVLGTPTREQIREMNPNYTEFKFPQIKAHPWTKDSSGTGHFTSGVRVFRPRTPPEAIALCSRLLEYTPTARLTPLEACAHSFFDELRDPNVKLPNGRDTPALFNFTTQELSSNPPLATILIPPHARIQAAASTPTNATAASDANTGDRGQTNNAASASASNST

SEQ ID NO: 28161 - protein, 574 aa, Homo sapiens
MSIQENISSLQLRSWVSKSQRDLAKSILIGAPGGPAGYLRRASVAQLTQELGTAFFQQQQLPAAMADTFLEHLCLLDIDSEPVAARSTSIIATIGPASRSVERLKEMIKAGMNIARLNFSHGSHEYHAESIANVREAVESFAGSPLSYRPVAIALDTKGPEIRTGILQGGPESEVELVKGSQVLVTVDPAFRTRGNANTVWVDYPNIVRVVPVGGRIYIDDGLISLVVQKIGPEGLVTQVENGGVLGSRKGVNLPGAQVDLPGLSEQDVRDLRFGVEHGVDIVFASFVRKASDVAAVRAALGPEGHGIKIISKIENHEGVKRFDEILEVSDGIMVARGDLGIEIPAEKVFLAQKMMIGRCNLAGKPVVCATQMLESMITKPRPTRAETSDVANAVLDGADCIMLSGETAKGNFPVEAVKMQHAIAREAEAAVYHRQLFEELRRAAPLSRDPTEVTAIGAVEAAFKCCAAAIIVLTTTGRSAQLLSRYRPRAAVIAVTRSAQAARQVHLCRGVFPLLYREPPEAIWADDVDRRVQFGIESGKLRGFLRVGDLVIVVTGWRPGSGYTNIMRVLSIS

SEQ ID NO: 28162 - protein, 543 aa, Homo sapiens
MEGPAGYLRRASVAQLTQELGTAFFQQQQLPAAMADTFLEHLCLLDIDSEPVAARSTSIIATIGPASRSVERLKEMIKAGMNIARLNFSHGSHEYHAESIANVREAVESFAGSPLSYRPVAIALDTKGPEIRTGILQGGPESEVELVKGSQVLVTVDPAFRTRGNANTVWVDYPNIVRVVPVGGRIYIDDGLISLVVQKIGPEGLVTQVENGGVLGSRKGVNLPGAQVDLPGLSEQDVRDLRFGVEHGVDIVFASFVRKASDVAAVRAALGPEGHGIKIISKIENHEGVKRFDEILEVSDGIMVARGDLGIEIPAEKVFLAQKMMIGRCNLAGKPVVCATQMLESMITKPRPTRAETSDVANAVLDGADCIMLSGETAKGNFPVEAVKMQHAIAREAEAAVYHRQLFEELRRAAPLSRDPTEVTAIGAVEAAFKCCAAAIIVLTTTGRSAQLLSRYRPRAAVIAVTRSAQAARQVHLCRGVFPLLYREPPEAIWADDVDRRVQFGIESGKLRGFLRVGDLVIVVTGWRPGSGYTNIMRVLSIS

SEQ ID NO: 28163 - protein, 1235 aa, Homo sapiens
MRSRSNSGVRLDGYARLVQQTILCYQNPVTGLLSASHEQKDAWVRDNIYSILAVWGLGMAYRKNADRDEDKAKAYELEQNVVKLMRGLLQCMMRQVAKVEKFKHTQSTKDSLHAKYNTATCGTVVGDDQWGHLQVDATSLFLLFLAQMTASGLRIIFTLDEVAFIQNLVFYIEAAYKVADYGMWERGDKTNQGIPELNASSVGMAKAALEAIDELDLFGAHGGRKSVIHVLPDEVEHCQSILFSMLPRASTSKEIDAGLLSIISFPAFAVEDVNLVNVTKNEIISKLQGRYGCCRFLRDGYKTPREDPNRLHYDPAELKLFENIECEWPVFWTYFIIDGVFSGDAVQVQEYREALEGILIRGKNGIRLVPELYAVPPNKVDEEYKNPHTVDRVPMGKVPHLWGQSLYILSSLLAEGFLAAGEIDPLNRRFSTSVKPDVVVQVTVLAENNHIKDLLRKHGVNVQSIADIHPIQVQPGRILSHIYAKLGRNKNMNLSGRPYRHIGVLGTSKLYVIRNQIFTFTPQFTDQHHFYLALDNEMIVEMLRIELAYLCTCWRMTGRPTLTFPISRTMLTNDGSDIHSAVLSTIRKLEDGYFGGARVKLGNLSEFLTTSFYTYLTFLDPDCDEKLFDNASEGTFSPDSDSDLVGYLEDTCNQESQDELDHYINHLLQSTSLRSYLPPLCKNTEDRHVFSAIHSTRDILSVMAKAKGLEVPFVPMTLPTKVLSAHRKSLNLVDSPQPLLEKVPESDFQWPRDDHGDVDCEKLVEQLKDCSNLQDQADILYILYVIKGPSWDTNLSGQHGVTVQNLLGELYGKAGLNQEWGLIRYISGLLRKKVEVLAEACTDLLSHQKQLTVGLPPEPREKIISAPLPPEELTKLIYEASGQDISIAVLTQEIVVYLAMYVRAQPSLFVEMLRLRIGLIIQVMATELARSLNCSGEEASESLMNLSPFDMKNLLHHILSGKEFGVERSVRPIHSSTSSPTISIHEVGHTGVTKTERSGINRLRSEMKQMTRRFSADEQFFSVGQAASSSAHSSKSARSSTPSSPTGTSSSDSGGHHIGWGERQGQWLRRRRLDGAINRVPVGFYQRVWKILQKCHGLSIDGYVLPSSTTREMTPHEIKFAVHVESVLNRVPQPEYRQLLVEAIMVLTLLSDTEMTSIGGIIHVDQIVQMASQLFLQDQVSIGAMDTLEKDQATGICHFFYDSAPSGAYGTMTYLTRAVASYLQELLPNSGCQMQ

SEQ ID NO: 28164 - protein, 282 aa, Homo sapiens
MAASTMSVCSSACSDSWQVDACPESCCEPHCCALSCCAPAPCLTLVCTPVSRVSSPCCQAACEPSPCQSGCTSSCTPSCCQQSSCQPACCTSSPCQQACCVPVCCKPVCCLPTCSKDSSSCCQQSSCQPTCCASSSSQQSCCVPVCCKPVCYVPTCSEDSSSCCQQSSCHPACCTSSPCQQACCVPVRCKPVCCKPICCVPVCSGASTSCCQQSSCQPACCTTSCCRPSSSVSLLCRPVCRPACCMPVSSCCAPASSCQASCCRPASCVSLLCRPACSRPAC

SEQ ID NO: 28165 - protein, 255 aa, Homo sapiens
MAASTMSICSSACTNSWQVDDCPESCCELPCGTPSCCAPAPCLTLVCTPVSCVSSPCCQAACEPSACQSGCTSSCTPSCCQQSSCQPACCTSSPCQQACCVPVCCKPVCCVPVCCGASSCCQQSSCQPACCASSSCQQSCRVPVCCKAVCCVPTCSESSSSCCQQSSCQPACCTSSPCQQSCCVSVCCKPVCCKSICCVPVCSGASSPCCQQSSCQPACCTSSCCRPSSSVSLLCRPVCSRPASCSFSSGQKSSC

SEQ ID NO: 28166 - protein, 221 aa, Homo sapiens
MATSTMSVCSSAYSDSWQVDACPESCCEPPCCATSCCAPAPCLTLVCTPVSCVSSPCCQAACEPSPCQSGCTSSCTPSCCQQSSCQPACCTSSPCQQACCVPVCCKPVCCVPVCCKPVCCKPICCVPVCSGASSSCCQQSSRQPACCTTSCCRPSSSVSLLCRPVCRSTCCVPIPSCCAPASTCQPSCCRPASCVSLLCRPTCSRLSSACCGLSSGQKSSC

SEQ ID NO: 28167 - protein, 401 aa, Homo sapiens
MSVCSSDLSYSSRVCLPGSCDSCSDSWQVDDCPESCCEPPCCAPSCCAPAPCLSLVCTPVSRVSSPCCPVTCEPSPCQSGCTSSCTPSCCQQSSCQLACCASSPCQQACCVPVCCKTVCCKPVCCVPVCCGDSSCCQQSSCQSACCTSSPCQQACCVPICCKPVCSGISSSCCQQSSCVSCVSSPCCQAVCEPSPCQSGCISSCTPSCCQQSSCQPACCTSSSCQQACCVPVCCKTVCCKPVCSEDSSSCCQQSSCQPACCTSSPCQQACCVPVCCKPVCCKPVGSVPICSGASSLCCQQSSCQPACCTSSQSQQGCCVPVCCKPVSCVPVCSGASSSCCQQSSCQPACCTTSCCRPSSSVSLLCRPVCRPACCVPVPSCCAPTSSCQPSCCRPASCVSLL

SEQ ID NO: 28168 - protein, 3969 aa, Homo sapiens
MAHSCRWRFPARPGTTGGGGGGGRRGLGGAPRQRVPALLLPPGPPVGGGGPGAPPSPPAVAAAAAAAGSSGAGVPGGAAAASAASSSSASSSSSSSSSASSGPALLRVGPGFDAALQVSAAIGTNLRRFRAVFGESGGGGGSGEDEQFLGFGSDEEVRVRSPTRSPSVKTSPRKPRGRPRSGSDRNSAILSDPSVFSPLNKSETKSGDKIKKKDSKSIEKKRGRPPTFPGVKIKITHGKDISELPKGNKEDSLKKIKRTPSATFQQATKIKKLRAGKLSPLKSKFKTGKLQIGRKGVQIVRRRGRPPSTERIKTPSGLLINSELEKPQKVRKDKEGTPPLTKEDKTVVRQSPRRIKPVRIIPSSKRTDATIAKQLLQRAKKGAQKKIEKEAAQLQGRKVKTQVKNIRQFIMPVVSAISSRIIKTPRRFIEDEDYDPPIKIARLESTPNSRFSAPSCGSSEKSSAASQHSSQMSSDSSRSSSPSVDTSTDSQASEEIQVLPEERSDTPEVHPPLPISQSPENESNDRRSRRYSVSERSFGSRTTKKLSTLQSAPQQQTSSSPPPPLLTPPPPLQPASSISDHTPWLMPPTIPLASPFLPASTAPMQGKRKSILREPTFRWTSLKHSRSEPQYFSSAKYAKEGLIRKPIFDNFRPPPLTPEDVGFASGFSASGTAASARLFSPLHSGTRFDMHKRSPLLRAPRFTPSEAHSRIFESVTLPSNRTSAGTSSSGVSNRKRKRKVFSPIRSEPRSPSHSMRTRSGRLSSSELSPLTPPSSVSSSLSISVSPLATSALNPTFTFPSHSLTQSGESAEKNQRPRKQTSAPAEPFSSSSPTPLFPWFTPGSQTERGRNKDKAPEELSKDRDADKSVEKDKSRERDREREKENKRESRKEKRKKGSEIQSSSALYPVGRVSKEKVVGEDVATSSSAKKATGRKKSSSHDSGTDITSVTLGDTTAVKTKILIKKGRGNLEKTNLDLGPTAPSLEKEKTLCLSTPSSSTVKHSTSSIGSMLAQADKLPMTDKRVASLLKKAKAQLCKIEKSKSLKQTDQPKAQGQESDSSETSVRGPRIKHVCRRAAVALGRKRAVFPDDMPTLSALPWEEREKILSSMGNDDKSSIAGSEDAEPLAPPIKPIKPVTRNKAPQEPPVKKGRRSRRCGQCPGCQVPEDCGVCTNCLDKPKFGGRNIKKQCCKMRKCQNLQWMPSKAYLQKQAKAVKKKEKKSKTSEKKDSKESSVVKNVVDSSQKPTPSAREDPAPKKSSSEPPPRKPVEEKSEEGNVSAPGPESKQATTPASRKSSKQVSQPALVIPPQPPTTGPPRKEVPKTTPSEPKKKQPPPPESGPEQSKQKKVAPRPSIPVKQKPKEKEKPPPVNKQENAGTLNILSTLSNGNSSKQKIPADGVHRIRVDFKEDCEAENVWEMGGLGILTSVPITPRVVCFLCASSGHVEFVYCQVCCEPFHKFCLEENERPLEDQLENWCCRRCKFCHVCGRQHQATKQLLECNKCRNSYHPECLGPNYPTKPTKKKKVWICTKCVRCKSCGSTTPGKGWDAQWSHDFSLCHDCAKLFAKGNFCPLCDKCYDDDDYESKMMQCGKCDRWVHSKCENLSDEMYEILSNLPESVAYTCVNCTERHPAEWRLALEKELQISLKQVLTALLNSRTTSHLLRYRQAAKPPDLNPETEESIPSRSSPEGPDPPVLTEVSKQDDQQPLDLEGVKRKMDQGNYTSVLEFSDDIVKIIQAAINSDGGQPEIKKANSMVKSFFIRQMERVFPWFSVKKSRFWEPNKVSSNSGMLPNAVLPPSLDHNYAQWQEREENSHTEQPPLMKKIIPAPKPKGPGEPDSPTPLHPPTPPILSTDRSREDSPELNPPPGIEDNRQCALCLTYGDDSANDAGRLLYIGQNEWTHVNCALWSAEVFEDDDGSLKNVHMAVIRGKQLRCEFCQKPGATVGCCLTSCTSNYHFMCSRAKNCVFLDDKKVYCQRHRDLIKGEVVPENGFEVFRRVFVDFEGISLRRKFLNGLEPENIHMMIGSMTIDCLGILNDLSDCEDKLFPIGYQCSRVYWSTTDARKRCVYTCKIVECRPPVVEPDINSTVEHDENRTIAHSPTSFTESSSKESQNTAEIISPPSPDRPPHSQTSGSCYYHVISKVPRIRTPSYSPTQRSPGCRPLPSAGSPTPTTHEIVTVGDPLLSSGLRSIGSRRHSTSSLSPQRSKLRIMSPMRTGNTYSRNNVSSVSTTGTATDLESSAKVVDHVLGPLNSSTSLGQNTSTSSNLQRTVVTVGNKNSHLDGSSSSEMKQSSASDLVSKSSSLKGEKTKVLSSKSSEGSAHNVAYPGIPKLAPQVHNTTSRELNVSKIGSFAEPSSVSFSSKEALSFPHLHLRGQRNDRDQHTDSTQSANSSPDEDTEVKTLKLSGMSNRSSIINEHMGSSSRDRRQKGKKSCKETFKEKHSSKSFLEPGQVTTGEEGNLKPEFMDEVLTPEYMGQRPCNNVSSDKIGDKGLSMPGVPKAPPMQVEGSAKELQAPRKRTVKVTLTPLKMENESQSKNALKESSPASPLQIESTSPTEPISASENPGDGPVAQPSPNNTSCQDSQSNNYQNLPVQDRNLMLPDGPKPQEDGSFKRRYPRRSARARSNMFFGLTPLYGVRSYGEEDIPFYSSSTGKKRGKRSAEGQVDGADDLSTSDEDDLYYYNFTRTVISSGGEERLASHNLFREEEQCDLPKISQLDGVDDGTESDTSVTATTRKSSQIPKRNGKENGTENLKIDRPEDAGEKEHVTKSSVGHKNEPKMDNCHSVSRVKTQGQDSLEAQLSSLESSRRVHTSTPSDKNLLDTYNTELLKSDSDNNNSDDCGNILPSDIMDFVLKNTPSMQALGESPESSSSELLNLGEGLGLDSNREKDMGLFEVFSQQLPTTEPVDSSVSSSISAEEQFELPLELPSDLSVLTTRSPTVPSQNPSRLAVISDSGEKRVTITEKSVASSESDPALLSPGVDPTPEGHMTPDHFIQGHMDADHISSPPCGSVEQGHGNNQDLTRNSSTPGLQVPVSPTVPIQNQKYVPNSTDSPGPSQISNAAVQTTPPHLKPATEKLIVVNQNMQPLYVLQTLPNGVTQKIQLTSSVSSTPSVMETNTSVLGPMGGGLTLTTGLNPSLPTSQSLFPSASKGLLPMSHHQHLHSFPAATQSSFPPNISNPPSGLLIGVQPPPDPQLLVSESSQRTDLSTTVATPSSGLKKRPISRLQTRKNKKLAPSSTPSNIAPSDVVSNMTLINFTPSQLPNHPSLLDLGSLNTSSHRTVPNIIKRSKSSIMYFEPAPLLPQSVGGTAATAAGTSTISQDTSHLTSGSVSGLASSSSVLNVVSMQTTTTPTSSASVPGHVTLTNPRLLGTPDIGSISNLLIKASQQSLGIQDQPVALPPSSGMFPQLGTSQTPSTAAITAASSICVLPSTQTTGITAASPSGEADEHYQLQHVNQLLASKTGIHSSQRDLDSASGPQVSNFTQTVDAPNSMGLEQNKALSSAVQASPTSPGGSPSSPSSGQRSASPSVPGPTKPKPKTKRFQLPLDKGNGKKHKVSHLRTSSSEAHIPDQETTSLTSGTGTPGAEAEQQDTASVEQSSQKECGQPAGQVAVLPEVQVTQNPANEQESAEPKTVEEEESNFSSPLMLWLQQEQKRKESITEKKPKKGLVFEISSDDGFQICAESIEDAWKSLTDKVQEARSNARLKQLSFAGVNGLRMLGILHDAVVFLIEQLSGAKHCRNYKFRFHKPEEANEPPLNPHGSARAEVHLRKSAFDMFNFLASKHRQPPEYNPNDEEEEEVQLKSARRATSMDLPMPMRFRHLKKTSKEAVGVYRSPIHGRGLFCKRNIDAGEMVIEYAGNVIRSIQTDKREKYYDSKGIGCYMFRIDDSEVVDATMHGNAARFINHSCEPNCYSRVINIDGQKHIVIFAMRKIYRGEELTYDYKFPIEDASNKLPCNCGAKKCRKFLN

SEQ ID NO: 28169 - protein, 3931 aa, Homo sapiens
MAHSCRWRFPARPGTTGGGGGGGRRGLGGAPRQRVPALLLPPGPPVGGGGPGAPPSPPAVAAAAAAAGSSGAGVPGGAAAASAASSSSASSSSSSSSSASSGPALLRVGPGFDAALQVSAAIGTNLRRFRAVFGESGGGGGSGEDEQFLGFGSDEEVRVRSPTRSPSVKTSPRKPRGRPRSGSDRNSAILSDPSVFSPLNKSETKSGDKIKKKDSKSIEKKRGRPPTFPGVKIKITHGKDISELPKGNKEDSLKKIKRTPSATFQQATKIKKLRAGKLSPLKSKFKTGKLQIGRKGVQIVRRRGRPPSTERIKTPSGLLINSELEKPQKVRKDKEGTPPLTKEDKTVVRQSPRRIKPVRIIPSSKRTDATIAKQLLQRAKKGAQKKIEKEAAQLQGRKVKTQVKNIRQFIMPVVSAISSRIIKTPRRFIEDEDYDPPIKIARLESTPNSRFSAPSCGSSEKSSAASQHSSQMSSDSSRSSSPSVDTSTDSQASEEIQVLPEERSDTPEVHPPLPISQSPENESNDRRSRRYSVSERSFGSRTTKKLSTLQSAPQQQTSSSPPPPLLTPPPPLQPASSISDHTPWLMPPTIPLASPFLPASTAPMQGKRKSILREPTFRWTSLKHSRSEPQYFSSAKYAKEGLIRKPIFDNFRPPPLTPEDVGFASGFSASGTAASARLFSPLHSGTRFDMHKRSPLLRAPRFTPSEAHSRIFESVTLPSNRTSAGTSSSGVSNRKRKRKVFSPIRSEPRSPSHSMRTRSGRLSSSELSPLTPPSSVSSSLSISVSPLATSALNPTFTFPSHSLTQSGESAEKNQRPRKQTSAPAEPFSSSSPTPLFPWFTPGSQTERGRNKDKAPEELSKDRDADKSVEKDKSRERDREREKENKRESRKEKRKKGSEIQSSSALYPVGRVSKEKVVGEDVATSSSAKKATGRKKSSSHDSGTDITSVTLGDTTAVKTKILIKKGRGNLEKTNLDLGPTAPSLEKEKTLCLSTPSSSTVKHSTSSIGSMLAQADKLPMTDKRVASLLKKAKAQLCKIEKSKSLKQTDQPKAQGQESDSSETSVRGPRIKHVCRRAAVALGRKRAVFPDDMPTLSALPWEEREKILSSMGNDDKSSIAGSEDAEPLAPPIKPIKPVTRNKAPQEPPVKKGRRSRRCGQCPGCQVPEDCGVCTNCLDKPKFGGRNIKKQCCKMRKCQNLQWMPSKAYLQKQAKAVKKKEKKSKTSEKKDSKESSVVKNVVDSSQKPTPSAREDPAPKKSSSEPPPRKPVEEKSEEGNVSAPGPESKQATTPASRKSSKQVSQPALVIPPQPPTTGPPRKEVPKTTPSEPKKKQPPPPESGPEQSKQKKVAPRPSIPVKQKPKEKEKPPPVNKQENAGTLNILSTLSNGNSSKQKIPADGVHRIRVDFKFVYCQVCCEPFHKFCLEENERPLEDQLENWCCRRCKFCHVCGRQHQATKQLLECNKCRNSYHPECLGPNYPTKPTKKKKVWICTKCVRCKSCGSTTPGKGWDAQWSHDFSLCHDCAKLFAKGNFCPLCDKCYDDDDYESKMMQCGKCDRWVHSKCENLSDEMYEILSNLPESVAYTCVNCTERHPAEWRLALEKELQISLKQVLTALLNSRTTSHLLRYRQAAKPPDLNPETEESIPSRSSPEGPDPPVLTEVSKQDDQQPLDLEGVKRKMDQGNYTSVLEFSDDIVKIIQAAINSDGGQPEIKKANSMVKSFFIRQMERVFPWFSVKKSRFWEPNKVSSNSGMLPNAVLPPSLDHNYAQWQEREENSHTEQPPLMKKIIPAPKPKGPGEPDSPTPLHPPTPPILSTDRSREDSPELNPPPGIEDNRQCALCLTYGDDSANDAGRLLYIGQNEWTHVNCALWSAEVFEDDDGSLKNVHMAVIRGKQLRCEFCQKPGATVGCCLTSCTSNYHFMCSRAKNCVFLDDKKVYCQRHRDLIKGEVVPENGFEVFRRVFVDFEGISLRRKFLNGLEPENIHMMIGSMTIDCLGILNDLSDCEDKLFPIGYQCSRVYWSTTDARKRCVYTCKIVECRPPVVEPDINSTVEHDENRTIAHSPTSFTESSSKESQNTAEIISPPSPDRPPHSQTSGSCYYHVISKVPRIRTPSYSPTQRSPGCRPLPSAGSPTPTTHEIVTVGDPLLSSGLRSIGSRRHSTSSLSPQRSKLRIMSPMRTGNTYSRNNVSSVSTTGTATDLESSAKVVDHVLGPLNSSTSLGQNTSTSSNLQRTVVTVGNKNSHLDGSSSSEMKQSSASDLVSKSSSLKGEKTKVLSSKSSEGSAHNVAYPGIPKLAPQVHNTTSRELNVSKIGSFAEPSSVSFSSKEALSFPHLHLRGQRNDRDQHTDSTQSANSSPDEDTEVKTLKLSGMSNRSSIINEHMGSSSRDRRQKGKKSCKETFKEKHSSKSFLEPGQVTTGEEGNLKPEFMDEVLTPEYMGQRPCNNVSSDKIGDKGLSMPGVPKAPPMQVEGSAKELQAPRKRTVKVTLTPLKMENESQSKNALKESSPASPLQIESTSPTEPISASENPGDGPVAQPSPNNTSCQDSQSNNYQNLPVQDRNLMLPDGPKPQEDGSFKRRYPRRSARARSNMFFGLTPLYGVRSYGEEDIPFYSSSTGKKRGKRSAEGQVDGADDLSTSDEDDLYYYNFTRTVISSGGEERLASHNLFREEEQCDLPKISQLDGVDDGTESDTSVTATTRKSSQIPKRNGKENGTENLKIDRPEDAGEKEHVTKSSVGHKNEPKMDNCHSVSRVKTQGQDSLEAQLSSLESSRRVHTSTPSDKNLLDTYNTELLKSDSDNNNSDDCGNILPSDIMDFVLKNTPSMQALGESPESSSSELLNLGEGLGLDSNREKDMGLFEVFSQQLPTTEPVDSSVSSSISAEEQFELPLELPSDLSVLTTRSPTVPSQNPSRLAVISDSGEKRVTITEKSVASSESDPALLSPGVDPTPEGHMTPDHFIQGHMDADHISSPPCGSVEQGHGNNQDLTRNSSTPGLQVPVSPTVPIQNQKYVPNSTDSPGPSQISNAAVQTTPPHLKPATEKLIVVNQNMQPLYVLQTLPNGVTQKIQLTSSVSSTPSVMETNTSVLGPMGGGLTLTTGLNPSLPTSQSLFPSASKGLLPMSHHQHLHSFPAATQSSFPPNISNPPSGLLIGVQPPPDPQLLVSESSQRTDLSTTVATPSSGLKKRPISRLQTRKNKKLAPSSTPSNIAPSDVVSNMTLINFTPSQLPNHPSLLDLGSLNTSSHRTVPNIIKRSKSSIMYFEPAPLLPQSVGGTAATAAGTSTISQDTSHLTSGSVSGLASSSSVLNVVSMQTTTTPTSSASVPGHVTLTNPRLLGTPDIGSISNLLIKASQQSLGIQDQPVALPPSSGMFPQLGTSQTPSTAAITAASSICVLPSTQTTGITAASPSGEADEHYQLQHVNQLLASKTGIHSSQRDLDSASGPQVSNFTQTVDAPNSMGLEQNKALSSAVQASPTSPGGSPSSPSSGQRSASPSVPGPTKPKPKTKRFQLPLDKGNGKKHKVSHLRTSSSEAHIPDQETTSLTSGTGTPGAEAEQQDTASVEQSSQKECGQPAGQVAVLPEVQVTQNPANEQESAEPKTVEEEESNFSSPLMLWLQQEQKRKESITEKKPKKGLVFEISSDDGFQICAESIEDAWKSLTDKVQEARSNARLKQLSFAGVNGLRMLGILHDAVVFLIEQLSGAKHCRNYKFRFHKPEEANEPPLNPHGSARAEVHLRKSAFDMFNFLASKHRQPPEYNPNDEEEEEVQLKSARRATSMDLPMPMRFRHLKKTSKEAVGVYRSPIHGRGLFCKRNIDAGEMVIEYAGNVIRSIQTDKREKYYDSKGIGCYMFRIDDSEVVDATMHGNAARFINHSCEPNCYSRVINIDGQKHIVIFAMRKIYRGEELTYDYKFPIEDASNKLPCNCGAKKCRKFLN

SEQ ID NO: 28170 - protein, 3972 aa, Homo sapiens
MAHSCRWRFPARPGTTGGGGGGGRRGLGGAPRQRVPALLLPPGPPVGGGGPGAPPSPPAVAAAAAAAGSSGAGVPGGAAAASAASSSSASSSSSSSSSASSGPALLRVGPGFDAALQVSAAIGTNLRRFRAVFGESGGGGGSGEDEQFLGFGSDEEVRVRSPTRSPSVKTSPRKPRGRPRSGSDRNSAILSDPSVFSPLNKSETKSGDKIKKKDSKSIEKKRGRPPTFPGVKIKITHGKDISELPKGNKEDSLKKIKRTPSATFQQATKIKKLRAGKLSPLKSKFKTGKLQIGRKGVQIVRRRGRPPSTERIKTPSGLLINSELEKPQKVRKDKEGTPPLTKEDKTVVRQSPRRIKPVRIIPSSKRTDATIAKQLLQRAKKGAQKKIEKEAAQLQGRKVKTQVKNIRQFIMPVVSAISSRIIKTPRRFIEDEDYDPPIKIARLESTPNSRFSAPSCGSSEKSSAASQHSSQMSSDSSRSSSPSVDTSTDSQASEEIQVLPEERSDTPEVHPPLPISQSPENESNDRRSRRYSVSERSFGSRTTKKLSTLQSAPQQQTSSSPPPPLLTPPPPLQPASSISDHTPWLMPPTIPLASPFLPASTAPMQGKRKSILREPTFRWTSLKHSRSEPQYFSSAKYAKEGLIRKPIFDNFRPPPLTPEDVGFASGFSASGTAASARLFSPLHSGTRFDMHKRSPLLRAPRFTPSEAHSRIFESVTLPSNRTSAGTSSSGVSNRKRKRKVFSPIRSEPRSPSHSMRTRSGRLSSSELSPLTPPSSVSSSLSISVSPLATSALNPTFTFPSHSLTQSGESAEKNQRPRKQTSAPAEPFSSSSPTPLFPWFTPGSQTERGRNKDKAPEELSKDRDADKSVEKDKSRERDREREKENKRESRKEKRKKGSEIQSSSALYPVGRVSKEKVVGEDVATSSSAKKATGRKKSSSHDSGTDITSVTLGDTTAVKTKILIKKGRGNLEKTNLDLGPTAPSLEKEKTLCLSTPSSSTVKHSTSSIGSMLAQADKLPMTDKRVASLLKKAKAQLCKIEKSKSLKQTDQPKAQGQESDSSETSVRGPRIKHVCRRAAVALGRKRAVFPDDMPTLSALPWEEREKILSSMGNDDKSSIAGSEDAEPLAPPIKPIKPVTRNKAPQEPPVKKGRRSRRCGQCPGCQVPEDCGVCTNCLDKPKFGGRNIKKQCCKMRKCQNLQWMPSKAYLQKQAKAVKKKEKKSKTSEKKDSKESSVVKNVVDSSQKPTPSAREDPAPKKSSSEPPPRKPVEEKSEEGNVSAPGPESKQATTPASRKSSKQVSQPALVIPPQPPTTGPPRKEVPKTTPSEPKKKQPPPPESGPEQSKQKKVAPRPSIPVKQKPKEKEKPPPVNKQENAGTLNILSTLSNGNSSKQKIPADGVHRIRVDFKEDCEAENVWEMGGLGILTSVPITPRVVCFLCASSGHVEFVYCQVCCEPFHKFCLEENERPLEDQLENWCCRRCKFCHVCGRQHQATKQLLECNKCRNSYHPECLGPNYPTKPTKKKKVWICTKCVRCKSCGSTTPGKGWDAQWSHDFSLCHDCAKLFAKGNFCPLCDKCYDDDDYESKMMQCGKCDRWVHSKCENLSGTEDEMYEILSNLPESVAYTCVNCTERHPAEWRLALEKELQISLKQVLTALLNSRTTSHLLRYRQAAKPPDLNPETEESIPSRSSPEGPDPPVLTEVSKQDDQQPLDLEGVKRKMDQGNYTSVLEFSDDIVKIIQAAINSDGGQPEIKKANSMVKSFFIRQMERVFPWFSVKKSRFWEPNKVSSNSGMLPNAVLPPSLDHNYAQWQEREENSHTEQPPLMKKIIPAPKPKGPGEPDSPTPLHPPTPPILSTDRSREDSPELNPPPGIEDNRQCALCLTYGDDSANDAGRLLYIGQNEWTHVNCALWSAEVFEDDDGSLKNVHMAVIRGKQLRCEFCQKPGATVGCCLTSCTSNYHFMCSRAKNCVFLDDKKVYCQRHRDLIKGEVVPENGFEVFRRVFVDFEGISLRRKFLNGLEPENIHMMIGSMTIDCLGILNDLSDCEDKLFPIGYQCSRVYWSTTDARKRCVYTCKIVECRPPVVEPDINSTVEHDENRTIAHSPTSFTESSSKESQNTAEIISPPSPDRPPHSQTSGSCYYHVISKVPRIRTPSYSPTQRSPGCRPLPSAGSPTPTTHEIVTVGDPLLSSGLRSIGSRRHSTSSLSPQRSKLRIMSPMRTGNTYSRNNVSSVSTTGTATDLESSAKVVDHVLGPLNSSTSLGQNTSTSSNLQRTVVTVGNKNSHLDGSSSSEMKQSSASDLVSKSSSLKGEKTKVLSSKSSEGSAHNVAYPGIPKLAPQVHNTTSRELNVSKIGSFAEPSSVSFSSKEALSFPHLHLRGQRNDRDQHTDSTQSANSSPDEDTEVKTLKLSGMSNRSSIINEHMGSSSRDRRQKGKKSCKETFKEKHSSKSFLEPGQVTTGEEGNLKPEFMDEVLTPEYMGQRPCNNVSSDKIGDKGLSMPGVPKAPPMQVEGSAKELQAPRKRTVKVTLTPLKMENESQSKNALKESSPASPLQIESTSPTEPISASENPGDGPVAQPSPNNTSCQDSQSNNYQNLPVQDRNLMLPDGPKPQEDGSFKRRYPRRSARARSNMFFGLTPLYGVRSYGEEDIPFYSSSTGKKRGKRSAEGQVDGADDLSTSDEDDLYYYNFTRTVISSGGEERLASHNLFREEEQCDLPKISQLDGVDDGTESDTSVTATTRKSSQIPKRNGKENGTENLKIDRPEDAGEKEHVTKSSVGHKNEPKMDNCHSVSRVKTQGQDSLEAQLSSLESSRRVHTSTPSDKNLLDTYNTELLKSDSDNNNSDDCGNILPSDIMDFVLKNTPSMQALGESPESSSSELLNLGEGLGLDSNREKDMGLFEVFSQQLPTTEPVDSSVSSSISAEEQFELPLELPSDLSVLTTRSPTVPSQNPSRLAVISDSGEKRVTITEKSVASSESDPALLSPGVDPTPEGHMTPDHFIQGHMDADHISSPPCGSVEQGHGNNQDLTRNSSTPGLQVPVSPTVPIQNQKYVPNSTDSPGPSQISNAAVQTTPPHLKPATEKLIVVNQNMQPLYVLQTLPNGVTQKIQLTSSVSSTPSVMETNTSVLGPMGGGLTLTTGLNPSLPTSQSLFPSASKGLLPMSHHQHLHSFPAATQSSFPPNISNPPSGLLIGVQPPPDPQLLVSESSQRTDLSTTVATPSSGLKKRPISRLQTRKNKKLAPSSTPSNIAPSDVVSNMTLINFTPSQLPNHPSLLDLGSLNTSSHRTVPNIIKRSKSSIMYFEPAPLLPQSVGGTAATAAGTSTISQDTSHLTSGSVSGLASSSSVLNVVSMQTTTTPTSSASVPGHVTLTNPRLLGTPDIGSISNLLIKASQQSLGIQDQPVALPPSSGMFPQLGTSQTPSTAAITAASSICVLPSTQTTGITAASPSGEADEHYQLQHVNQLLASKTGIHSSQRDLDSASGPQVSNFTQTVDAPNSMGLEQNKALSSAVQASPTSPGGSPSSPSSGQRSASPSVPGPTKPKPKTKRFQLPLDKGNGKKHKVSHLRTSSSEAHIPDQETTSLTSGTGTPGAEAEQQDTASVEQSSQKECGQPAGQVAVLPEVQVTQNPANEQESAEPKTVEEEESNFSSPLMLWLQQEQKRKESITEKKPKKGLVFEISSDDGFQICAESIEDAWKSLTDKVQEARSNARLKQLSFAGVNGLRMLGILHDAVVFLIEQLSGAKHCRNYKFRFHKPEEANEPPLNPHGSARAEVHLRKSAFDMFNFLASKHRQPPEYNPNDEEEEEVQLKSARRATSMDLPMPMRFRHLKKTSKEAVGVYRSPIHGRGLFCKRNIDAGEMVIEYAGNVIRSIQTDKREKYYDSKGIGCYMFRIDDSEVVDATMHGNAARFINHSCEPNCYSRVINIDGQKHIVIFAMRKIYRGEELTYDYKFPIEDASNKLPCNCGAKKCRKFLN

SEQ ID NO: 28171 - protein, 976 aa, Homo sapiens [sequence omitted]

SEQ ID NO: 28172 - protein, 972 aa, Homo sapiens
MRGARGAWDFLCVLLLLLRVQTGSSQPSVSPGEPSPPSIHPGKSDLIVRVGDEIRLLCTDPGFVKWTFEILDETNENKQNEWITEKAEATNTGKYTCTNKHGLSNSIYVFVRDPAKLFLVDRSLYGKEDNDTLVRCPLTDPEVTNYSLKGCQGKPLPKDLRFIPDPKAGIMIKSVKRAYHRLCLHCSVDQEGKSVLSEKFILKVRPAFKAVPVVSVSKASYLLREGEEFTVTCTIKDVSSSVYSTWKRENSQTKLQEKYNSWHHGDFNYERQATLTISSARVNDSGVFMCYANNTFGSANVTTTLEVVDKGFINIFPMINTTVFVNDGENVDLIVEYEAFPKPEHQQWIYMNRTFTDKWEDYPKSENESNIRYVSELHLTRLKGTEGGTYTFLVSNSDVNAAIAFNVYVNTKPEILTYDRLVNGMLQCVAAGFPEPTIDWYFCPGTEQRCSASVLPVDVQTLNSSGPPFGKLVVQSSIDSSAFKHNGTVECKAYNDVGKTSAYFNFAFKEQIHPHTLFTPLLIGFVIVAGMMCIIVMILTYKYLQKPMYEVQWKVVEEINGNNYVYIDPTQLPYDHKWEFPRNRLSFGKTLGAGAFGKVVEATAYGLIKSDAAMTVAVKMLKPSAHLTEREALMSELKVLSYLGNHMNIVNLLGACTIGGPTLVITEYCCYGDLLNFLRRKRDSFICSKQEDHAEAALYKNLLHSKESSCSDSTNEYMDMKPGVSYVVPTKADKRRSVRIGSYIERDVTPAIMEDDELALDLEDLLSFSYQVAKGMAFLASKNCIHRDLAARNILLTHGRITKICDFGLARDIKNDSNYVVKGNARLPVKWMAPESIFNCVYTFESDVWSYGIFLWELFSLGSSPYPGMPVDSKFYKMIKEGFRMLSPEHAPAEMYDIMKTCWDADPLKRPTFKQIVQLIEKQISESTNHIYSNLANCSPNRQKPVVDHSVRINSVGSTASSSQPLLVHDDV

SEQ ID NO: 28173 - protein, 257 aa, Homo sapiens
MSLPLSFPFLTFMVVIAKKNPLFLTGSYIERDVTPAIMEDDELALDLEDLLSFSYQVAKGMAFLASKNCIHRDLAARNILLTHGRITKICDFGLARDIKNDSNYVVKGNARLPVKWMAPESIFNCVYTFESDVWSYGIFLWELFSLGSSPYPGMPVDSKFYKMIKEGFRMLSPEHAPAEMYDIMKTCWDADPLKRPTFKQIVQLIEKQISESTNHIYSNLANCSPNRQKPVVDHSVRINSVGSTASSSQPLLVHDDV

SEQ ID NO: 28174 - protein, 271 aa, Homo sapiens
MAACTMSVCSSACSDSWRVDDCPESCCEPPCGTAPCLTLVCTPVSCVSSPCCQAACEPSPCQSGCTSSCTPSCCQPACCASSPCQQACCVPVCCKPVCCLPTCSKDSSSCCQQSSCQPTCCASSSCQQSCCVPVCCKPVCCVPTCSEDSSSCCQHSSCQPTCCTSSPCQQSCYVPVCCKPVCFKPICCVPVCSGASTSCCQQSSCQPACCTTSCCRPSSSVSLLCRPICRPACCVPISSCCAPASSYQASCCRPASCVSLLCRPACSRLAC

SEQ ID NO: 28175 - protein, 365 aa, Homo sapiens
MAASTMSVCSSDLSYGSRVCLPGSCDSCSDSWQVDDCPESCCEPPCCAPAPCLSLVCTPVSRVSSPCCPVTCEPSPCQSGCTSSCTPSCCQQSSCQLACCASSPCQQACCVPVCCKTVCCKPVCCVSVCCGDSSCCQQSSCQSACCTSSPCQQACCVPVCCKPVCSGISSSCCQQSSCVSCVSSPCCQAVCEPSPCQSGCTSSCTPSCCQQSSCQPTCCTSSPCQQACCVPVCCVPVCCVPTCSEDSSSCCQQSSCQPACCTSSPCQHACCVPVCSGASTSCCQQSSCQPACCTASCCRPSSSVSLLCHPVCKSTCCVPVPSCGASASSCQPSCCRTASCVSLLCRPMCSRPACYSLCSGQKSSC

SEQ ID NO: 28176 - protein, 1093 aa, Homo sapiens
MAGAAGLTAEVSWKVLERRARTKRSGSVYEPLKSINLPRPDNETLWDKLDHYYRIVKSTLLLYQSPTTGLFPTKTCGGDQKAKIQDSLYCAAGAWALALAYRRIDDDKGRTHELEHSAIKCMRGILYCYMRQADKVQQFKQDPRPTTCLHSVFNVHTGDELLSYEEYGHLQINAVSLYLLYLVEMISSGLQIIYNTDEVSFIQNLVFCVERVYRVPDFGVWERGSKYNNGSTELHSSSVGLAKAALEAINGFNLFGNQGCSWSVIFVDLDAHNRNRQTLCSLLPRESRSHNTDAALLPCISYPAFALDDEVLFSQTLDKVVRKLKGKYGFKRFLRDGYRTSLEDPNRCYYKPAEIKLFDGIECEFPIFFLYMMIDGVFRGNPKQVQEYQDLLTPVLHHTTEGYPVVPKYYYVPADFVEYEKNNPGSQKRFPSNCGRDGKLFLWGQALYIIAKLLADELISPKDIDPVQRYVPLKDQRNVSMRFSNQGPLENDLVVHVALIAESQRLQVFLNTYGIQTQTPQQVEPIQIWPQQELVKAYLQLGINEKLGLSGRPDRPIGCLGTSKIYRILGKTVVCYPIIFDLSDFYMSQDVFLLIDDIKNALQFIKQYWKMHGRPLFLVLIREDNIRGSRFNPILDMLAALKKGIIGGVKVHVDRLQTLISGAVVEQLDFLRISDTEELPEFKSFEELEPPKHSKVKRQSSTPSAPELGQQPDVNISEWKDKPTHEILQKLNDCSCLASQAILLGILLKREGPNFITKEGTVSDHIERVYRRAGSQKLWLAVRYGAAFTQKFSSSIAPHITTFLVHGKQVTLGAFGHEEEVISNPLSPRVIQNIIYYKCNTHDEREAVIQQELVIHIGWIISNNPELFSGMLKIRIGWIIHAMEYELQIRGGDKPALDLYQLSPSEVKQLLLDILQPQQNGRCWLNRRQIDGSLNRTPTGFYDRVWQILERTPNGIIVAGKHLPQQPTLSDMTMYEMNFSLLVEDTLGNIDQPQYRQIVVELLMVVSIVLERNPELEFQDKVDLDRLVKEAFNEFQKDQSRLKEIEKQDDMTSFYNTPPLGKRGTCSYLTKAVMNLLLEGEVKPNNDDPCLIS

SEQ ID NO: 28177 - protein, 1086 aa, Homo sapiens
MACSPDAVVSPSSAFLRSGSVYEPLKSINLPRPDNETLWDKLDHYYRIVKSTLLLYQSPTTGLFPTKTCGGDQKAKIQDSLYCAAGAWALALAYRRIDDDKGRTHELEHSAIKCMRGILYCYMRQADKVQQFKQDPRPTTCLHSVFNVHTGDELLSYEEYGHLQINAVSLYLLYLVEMISSGLQIIYNTDEVSFIQNLVFCVERVYRVPDFGVWERGSKYNNGSTELHSSSVGLAKAALEAINGFNLFGNQGCSWSVIFVDLDAHNRNRQTLCSLLPRESRSHNTDAALLPCISYPAFALDDEVLFSQTLDKVVRKLKGKYGFKRFLRDGYRTSLEDPNRCYYKPAEIKLFDGIECEFPIFFLYMMIDGVFRGNPKQVQEYQDLLTPVLHHTTEGYPVVPKYYYVPADFVEYEKNNPGSQKRFPSNCGRDGKLFLWGQALYIIAKLLADELISPKDIDPVQRYVPLKDQRNVSMRFSNQGPLENDLVVHVALIAESQRLQVFLNTYGIQTQTPQQVEPIQIWPQQELVKAYLQLGINEKLGLSGRPDRPIGCLGTSKIYRILGKTVVCYPIIFDLSDFYMSQDVFLLIDDIKNALQFIKQYWKMHGRPLFLVLIREDNIRGSRFNPILDMLAALKKGIIGGVKVHVDRLQTLISGAVVEQLDFLRISDTEELPEFKSFEELEPPKHSKVKRQSSTPSAPELGQQPDVNISEWKDKPTHEILQKLNDCSCLASQAILLGILLKREGPNFITKEGTVSDHIERVYRRAGSQKLWLAVRYGAAFTQKFSSSIAPHITTFLVHGKQVTLGAFGHEEEVISNPLSPRVIQNIIYYKCNTHDEREAVIQQELVIHIGWIISNNPELFSGMLKIRIGWIIHAMEYELQIRGGDKPALDLYQLSPSEVKQLLLDILQPQQNGRCWLNRRQIDGSLNRTPTGFYDRVWQILERTPNGIIVAGKHLPQQPTLSDMTMYEMNFSLLVEDTLGNIDQPQYRQIVVELLMVVSIVLERNPELEFQDKVDLDRLVKEAFNEFQKDQSRLKEIEKQDDMTSFYNTPPLGKRGTCSYLTKAVMNLLLEGEVKPNNDDPCLIS

SEQ ID NO: 28178 - protein, 1093 aa, Homo sapiens
MAGAAGLTAEVSWKVLERRARTKRSGSVYEPLKSINLPRPDNETLWDKLDHYYRIVKSTLLLYQSPTTGLFPTKTCGGDQKAKIQDSLYCAAGAWALALAYRRIDDDKGRTHELEHSAIKCMRGILYCYMRQADKVQQFKQDPRPTTCLHSVFNVHTGDELLSYEEYGHLQINAVSLYLLYLVEMISSGLQIIYNTDEVSFIQNLVFCVERVYRVPDFGVWERGSKYNNGSTELHSSSVGLAKAALEAINGFNLFGNQGCSWSVIFVDLDAHNRNRQTLCSLLPRESRSHNTDAALLPCISYPAFALDDEVLFSQTLDKVVRKLKGKYGFKRFLRDGYRTSLEDPNRCYYKPAEIKLFDGIECEFPIFFLYMMIDGVFRGNPKQVQEYQDLLTPVLHHTTEGYPVVPKYYYVPADFVEYEKNNPGSQKRFPSNCGRDGKLFLWGQALYIIAKLLADELISPKDIDPVQRYVPLKDQRNVSMRFSNQGPLENDLVVHVALIAESQRLQVFLNTYGIQTQTPQQVEPIQIWPQQELVKAYLQLGINEKLGLSGRPDRPIGCLGTSKIYRILGKTVVCYPIIFDLSDFYMSQDVFLLIDDIKNALQFIKQYWKMHGRPLFLVLIREDNIRGSRFNPILDMLAALKKGIIGGVKVHVDRLQTLISGAVVEQLDFLRISDTEELPEFKSFEELEPPKHSKVKRQSSTPSAPELGQQPDVNISEWKDKPTHEILQKLNDCSCLASQAILLGILLKREGPNFITKEGTVSDHIERVYRRAGSQKLWSVVRRAASLLSKVVDSLAPSITNVLVQGKQVTLGAFGHEEEVISNPLSPRVIQNIIYYKCNTHDEREAVIQQELVIHIGWIISNNPELFSGMLKIRIGWIIHAMEYELQIRGGDKPALDLYQLSPSEVKQLLLDILQPQQNGRCWLNRRQIDGSLNRTPTGFYDRVWQILERTPNGIIVAGKHLPQQPTLSDMTMYEMNFSLLVEDTLGNIDQPQYRQIVVELLMVVSIVLERNPELEFQDKVDLDRLVKEAFNEFQKDQSRLKEIEKQDDMTSFYNTPPLGKRGTCSYLTKAVMNLLLEGEVKPNNDDPCLIS

SEQ ID NO: 28179 - protein, 1086 aa, Homo sapiens
MACSPDAVVSPSSAFLRSGSVYEPLKSINLPRPDNETLWDKLDHYYRIVKSTLLLYQSPTTGLFPTKTCGGDQKAKIQDSLYCAAGAWALALAYRRIDDDKGRTHELEHSAIKCMRGILYCYMRQADKVQQFKQDPRPTTCLHSVFNVHTGDELLSYEEYGHLQINAVSLYLLYLVEMISSGLQIIYNTDEVSFIQNLVFCVERVYRVPDFGVWERGSKYNNGSTELHSSSVGLAKAALEAINGFNLFGNQGCSWSVIFVDLDAHNRNRQTLCSLLPRESRSHNTDAALLPCISYPAFALDDEVLFSQTLDKVVRKLKGKYGFKRFLRDGYRTSLEDPNRCYYKPAEIKLFDGIECEFPIFFLYMMIDGVFRGNPKQVQEYQDLLTPVLHHTTEGYPVVPKYYYVPADFVEYEKNNPGSQKRFPSNCGRDGKLFLWGQALYIIAKLLADELISPKDIDPVQRYVPLKDQRNVSMRFSNQGPLENDLVVHVALIAESQRLQVFLNTYGIQTQTPQQVEPIQIWPQQELVKAYLQLGINEKLGLSGRPDRPIGCLGTSKIYRILGKTVVCYPIIFDLSDFYMSQDVFLLIDDIKNALQFIKQYWKMHGRPLFLVLIREDNIRGSRFNPILDMLAALKKGIIGGVKVHVDRLQTLISGAVVEQLDFLRISDTEELPEFKSFEELEPPKHSKVKRQSSTPSAPELGQQPDVNISEWKDKPTHEILQKLNDCSCLASQAILLGILLKREGPNFITKEGTVSDHIERVYRRAGSQKLWSVVRRAASLLSKVVDSLAPSITNVLVQGKQVTLGAFGHEEEVISNPLSPRVIQNIIYYKCNTHDEREAVIQQELVIHIGWIISNNPELFSGMLKIRIGWIIHAMEYELQIRGGDKPALDLYQLSPSEVKQLLLDILQPQQNGRCWLNRRQIDGSLNRTPTGFYDRVWQILERTPNGIIVAGKHLPQQPTLSDMTMYEMNFSLLVEDTLGNIDQPQYRQIVVELLMVVSIVLERNPELEFQDKVDLDRLVKEAFNEFQKDQSRLKEIEKQDDMTSFYNTPPLGKRGTCSYLTKAVMNLLLEGEVKPNNDDPCLIS

SEQ ID NO: 28180 - protein, 370 aa, Homo sapiens
MAASTMSVCSSDLSYGSRVCLPGSCDSCSDSWQVDDCPESCCEPPCCAPAPCLSLVCTPVSYVSSPCCRVTCEPSPCQSGCTSSCTPSCCQQSSCQLACCASSPCQQACCVPVCCKTVCCKPVYCVPVCSGDSSCCQQSSCQSACCTSSPCQQACCVPICCKPVCSGISSSCCQQSSCVSCVSSPCCQAVCEPSPCQSGCISSCTPSCCQQSSCKPACCTSSPCQQACCVPVCCKPVCCVPTCSDDSGSCCQPACCTSSQSQQGCCVPVCCKPVCCVPVCSGASTSCCQQSSCQPACCTTSCCRPSSSVSLLCRPVCRPACCVPVPSCCAPTSSCQASCCRPASCVSLLCRPACSRPACCGPTSTQKSSC

SEQ ID NO: 28181 - protein, 2715 aa, Homo sapiens
MAAAAGGGSCPGPGSARGRFPGRPRGAGGGGGRGGRGNGAERVRVALRRGGGATGPGGAEPGEDTALLRLLGLRRGLRRLRRLWAGPRVQRGRGRGRGRGWGPSRGCVPEEESSDGESDEEEFQGFHSDEDVAPSSLRSALRSQRGRAPRGRGRKHKTTPLPPPRLADVAPTPPKTPARKRGEEGTERMVQALTELLRRAQAPQAPRSRACEPSTPRRSRGRPPGRPAGPCRRKQQAVVVAEAAVTIPKPEPPPPVVPVKHQTGSWKCKEGPGPGPGTPRRGGQSSRGGRGGRGRGRGGGLPFVIKFVSRAKKVKMGQLSLGLESGQGQGQHEESWQDVPQRRVGSGQGGSPCWKKQEQKLDDEEEEKKEEEEKDKEGEEKEERAVAEEMMPAAEKEEAKLPPPPLTPPAPSPPPPLPPPSTSPPPPLCPPPPPPVSPPPLPSPPPPPAQEEQEESPPPVVPATCSRKRGRPPLTPSQRAEREAARAGPEGTSPPTPTPSTATGGPPEDSPTVAPKSTTFLKNIRQFIMPVVSARSSRVIKTPRRFMDEDPPKPPKVEVSPVLRPPITTSPPVPQEPAPVPSPPRAPTPPSTPVPLPEKRRSILREPTFRWTSLTRELPPPPPAPPPPPAPSPPPAPATSSRRPLLLRAPQFTPSEAHLKIYESVLTPPPLGAPEAPEPEPPPADDSPAEPEPRAVGRTNHLSLPRFAPVVTTPVKAEVSPHGAPALSNGPQTQAQLLQPLQALQTQLLPQALPPPQPQLQPPPSPQQMPPLEKARIAGVGSLPLSGVEEKMFSLLKRAKVQLFKIDQQQQQKVAASMPLSPGGQMEEVAGAVKQISDRGPVRSEDESVEAKRERPSGPESPVQGPRIKHVCRHAAVALGQARAMVPEDVPRLSALPLRDRQDLATEDTSSASETESVPSRSRRGKVEAAGPGGESEPTGSGGTLAHTPRRSLPSHHGKKMRMARCGHCRGCLRVQDCGSCVNCLDKPKFGGPNTKKQCCVYRKCDKIEARKMERLAKKGRTIVKTLLPWDSDESPEASPGPPGPRRGAGAGGPREEVVAHPGPEEQDSLLQRKSARRCVKQRPSYDIFEDSDDSEPGGPPAPRRRTPRENELPLPEPEEQSRPRKPTLQPVLQLKARRRLDKDALAPGPFASFPNGWTGKQKSPDGVHRVRVDFKEDCDLENVWLMGGLSVLTSVPGGPPMVCLLCASKGLHELVFCQVCCDPFHPFCLEEAERPLPQHHDTWCCRRCKFCHVCGRKGRGSKHLLECERCRHAYHPACLGPSYPTRATRKRRHWICSACVRCKSCGATPGKNWDVEWSGDYSLCPRCTQLYEKGNYCPICTRCYEDNDYESKMMQCAQCDHWVHAKCEGLSDEDYEILSGLPDSVLYTCGPCAGAAQPRWREALSGALQGGLRQVLQGLLSSKVVGPLLLCTQCGPDGKQLHPGPCGLQAVSQRFEDGHYKSVHSFMEDMVGILMRHSEEGETPDRRAGGQMKGLLLKLLESAFGWFDAHDPKYWRRSTRLPNGVLPNAVLPPSLDHVYAQWRQQEPETPESGQPPGDPSAAFQGKDPAAFSHLEDPRQCALCLKYGDADSKEAGRLLYIGQNEWTHVNCAIWSAEVFEENDGSLKNVHAAVARGRQMRCELCLKPGATVGCCLSSCLSNFHFMCARASYCIFQDDKKVFCQKHTDLLDGKEIVNPDGFDVLRRVYVDFEGINFKRKFLTGLEPDAINVLIGSIRIDSLGTLSDLSDCEGRLFPIGYQCSRLYWSTVDARRRCWYRCRILEYRPWGPREEPAHLEAAEENQTIVHSPAPSSEPPGGEDPPLDTDVLVPGAPERHSPIQNLDPPLRPDSGSAPPPAPRSFSGARIKVPNYSPSRRPLGGVSFGPLPSPGSPSSLTHHIPTVGDPDFPAPPRRSRRPSPLAPRPPPSRWASPPLKTSPQLRVPPPTSVVTALTPTSGELAPPGPAPSPPPPEDLGPDFEDMEVVSGLSAADLDFAASLLGTEPFQEEIVAAGAMGSSHGGPGDSSEEESSPTSRYIHFPVTVVSAPGLAPSATPGAPRIEQLDGVDDGTDSEAEAVQQPRGQGTPPSGPGVVRAGVLGAAGDRARPPEDLPSEIVDFVLKNLGGPGDGGAGPREESLPPAPPLANGSQPSQGLTASPADPTRTFAWLPGAPGVRVLSLGPAPEPPKPATSKIILVNKLGQVFVKMAGEGEPVPPPVKQPPLPPTISPTAPTSWTLPPGPLLGVLPVVGVVRPAPPPPPPPLTLVLSSGPASPPRQAIRVKRVSTFSGRSPPAPPPYKAPRLDEDGEASEDTPQVPGLGSGGFSRVRMKTPTVRGVLDLDRPGEPAGEESPGPLQERSPLLPLPEDGPPQVPDGPPDLLLESQWHHYSGEASSSEEEPPSPDDKENQAPKRTGPHLRFEISSEDGFSVEAESLEGAWRTLIEKVQEARGHARLRHLSFSGMSGARLLGIHHDAVIFLAEQLPGAQRCQHYKFRYHQQGEGQEEPPLNPHGAARAEVYLRKCTFDMFNFLASQHRVLPEGATCDEEEDEVQLRSTRRATSLELPMAMRFRHLKKTSKEAVGVYRSAIHGRGLFCKRNIDAGEMVIEYSGIVIRSVLTDKREKFYDGKGIGCYMFRMDDFDVVDATMHGNAARFINHSCEPNCFSRVIHVEGQKHIVIFALRRILRGEELTYDYKFPIEDASNKLPCNCGAKRCRRFLN

SEQ ID NO: 28182 - protein, 259 aa, Homo sapiens
MADACCTRTYVIAASTMSVCSSDVGHVSRVSSPSTCTGSSWQVDNCQESCCEPRSCASSCCTPSCCAPAPCLALVCAPVSCEPSPCQSGCTDSCTPSCCQQSSCQPACCTSSPCQQACCVPVCCKSNCCKPVCCVSICSGASSPCCQQSSCQSACCTFSPCQQACCVPICCKPICCVPVCSGASSLCCQKSSCQPACCTTSCCRPSSSVSLLCRPVCRPACCVPVPSCCVPASSCQPSCCHPASCLSFLCRPACSRLAC

SEQ ID NO: 28183 - protein, 292 aa, Homo sapiens
MAASTMSIRSSAYSDSWQVDDCPESCCEPPCCATSCCAPAPCLTLVCTPVSRVSSPCCQVTCEPSPCQSGCTSSCTPSCCQQSSCQPAYCTSSPCQQACCVPVCCKPVCCVPVCCGASSCCQQSSYQPACCASSSCQPACCVPVCCKPVCCAPTCSEDSYSCCQQSSCQPACCTSSPCQQSYCVPVCCKPVCCKPICCVPVCSGASSLCCQQSGCQPACCTTSCCRPSSSVSLLCRPVCRPACCVPVSSCCAPTSSRQPSYCRQASCVSLLCRPVCSRPACYSFSSGQKSSC

SEQ ID NO: 28184 - protein, 588 aa, Homo sapiens
MSSCVSSQPSSNRAAPQDELGGRGSSSSESQKPCEALRGLSSLSIHLGMESFIVVTECEPGCAVDLGLARDRPLEADGQEVPLDTSGSQARPHLSGRKLSLQERSQGGLAAGGSLDMNGRCICPSLPYSPVSSPQSSPRLPRRPTVESHHVSITGMQDCVQLNQYTLKDEIGKGSYGVVKLAYNENDNTYYAMKVLSKKKLIRQAGFPRRPPPRGTRPAPGGCIQPRGPIEQVYQEIAILKKLDHPNVVKLVEVLDDPNEDHLYMVFELVNQGPVMEVPTLKPLSEDQARFYFQDLIKGIEYLHYQKIIHRDIKPSNLLVGEDGHIKIADFGVSNEFKGSDALLSNTVGTPAFMAPESLSETRKIFSGKALDVWAMGVTLYCFVFGQCPFMDERIMCLHSKIKSQALEFPDQPDIAEDLKDLITRMLDKNPESRIVVPEIKLHPWVTRHGAEPLPSEDENCTLVEVTEEEVENSVKHIPSLATVILVKTMIRKRSFGNPFEGSRREERSLSAPGNLLTKKPTRECESLSELKEARQRRQPPGHRPAPRGGGGSALVRGSPCVESCWAPAPGSPARMHPLRPEEAMEPE

SEQ ID NO: 28185 - protein, 533 aa, Homo sapiens
MSSCVSSQPSSNRAAPQDELGGRGSSSSESQKPCEALRGLSSLSIHLGMESFIVVTECEPGCAVDLGLARDRPLEADGQEVPLDTSGSQARPHLSGRKLSLQERSQGGLAAGGSLDMNGRCICPSLPYSPVSSPQSSPRLPRRPTVESHHVSITGMQDCVQLNQYTLKDEIGKGSYGVVKLAYNENDNTYYAMKVLSKKKLIRQAGFPRRPPPRGTRPAPGGCIQPRGPIEQVYQEIAILKKLDHPNVVKLVEVLDDPNEDHLYMVFELVNQGPVMEVPTLKPLSEDQARFYFQDLIKGIEYLHYQKIIHRDIKPSNLLVGEDGHIKIADFGVSNEFKGSDALLSNTVGTPAFMAPESLSETRKIFSGKALDVWAMGVTLYCFVFGQCPFMDERIMCLHSKIKSQALEFPDQPDIAEDLKDLITRMLDKNPESRIVVPEIKLHPWVTRHGAEPLPSEDENCTLVEVTEEEVENSVKHIPSLATVILVKTMIRKRSFGNPFEGSRREERSLSAPGNLLTKKPTRECESLSELKT

SEQ ID NO: 28186 - protein, 541 aa, Homo sapiens
MSSCVSSQPSSNRAAPQDELGGRGSSSSESQKPCEALRGLSSLSIHLGMESFIVVTECEPGCAVDLGLARDRPLEADGQEVPLDTSGSQARPHLSGRKLSLQERSQGGLAAGGSLDMNGRCICPSLPYSPVSSPQSSPRLPRRPTVESHHVSITGMQDCVQLNQYTLKDEIGKGSYGVVKLAYNENDNTYYAMKVLSKKKLIRQAGFPRRPPPRGTRPAPGGCIQPRGPIEQVYQEIAILKKLDHPNVVKLVEVLDDPNEDHLYMVFELVNQGPVMEVPTLKPLSEDQARFYFQDLIKGIEYLHYQKIIHRDIKPSNLLVGEDGHIKIADFGVSNEFKGSDALLSNTVGTPAFMAPESLSETRKIFSGKALDVWAMGVTLYCFVFGQCPFMDERIMCLHSKIKSQALEFPDQPDIAEDLKDLITRMLDKNPESRIVVPEIKLHPWVTRHGAEPLPSEDENCTLVEVTEEEVENSVKHIPSLATVILVKTMIRKRSFGNPFEGSRREERSLSAPGNLLTKQGSEDNLQGTDPPPVGEEEVLL

SEQ ID NO: 28187 - protein, 545 aa, Homo sapiens
MSSCVSSQPSSNRAAPQDELGGRGSSSSESQKPCEALRGLSSLSIHLGMESFIVVTECEPGCAVDLGLARDRPLEADGQEVPLDTSGSQARPHLSGRKLSLQERSQGGLAAGGSLDMNGRCICPSLPYSPVSSPQSSPRLPRRPTVESHHVSITGMQDCVQLNQYTLKDEIGKGSYGVVKLAYNENDNTYYAMKVLSKKKLIRQAGFPRRPPPRGTRPAPGGCIQPRGPIEQVYQEIAILKKLDHPNVVKLVEVLDDPNEDHLYMVFELVNQGPVMEVPTLKPLSEDQARFYFQDLIKGIEYLHYQKIIHRDIKPSNLLVGEDGHIKIADFGVSNEFKGSDALLSNTVGTPAFMAPESLSETRKIFSGKALDVWAMGVTLYCFVFGQCPFMDERIMCLHSKIKSQALEFPDQPDIAEDLKDLITRMLDKNPESRIVVPEIKILVKTMIRKRSFGNPFEGSRREERSLSAPGNLLTKKPTRECESLSELKEARQRRQPPGHRPAPRGGGGSALVRGSPCVESCWAPAPGSPARMHPLRPEEAMEPE

SEQ ID NO: 28188 - protein, 498 aa, Homo sapiens
MSSCVSSQPSSNRAAPQDELGGRGSSSSESQKPCEALRGLSSLSIHLGMESFIVVTECEPGCAVDLGLARDRPLEADGQEVPLDTSGSQARPHLSGRKLSLQERSQGGLAAGGSLDMNGRCICPSLPYSPVSSPQSSPRLPRRPTVESHHVSITGMQDCVQLNQYTLKDEIGKGSYGVVKLAYNENDNTYYAMKVLSKKKLIRQAGFPRRPPPRGTRPAPGGCIQPRGPIEQVYQEIAILKKLDHPNVVKLVEVLDDPNEDHLYMVFELVNQGPVMEVPTLKPLSEDQARFYFQDLIKGIEYLHYQKIIHRDIKPSNLLVGEDGHIKIADFGVSNEFKGSDALLSNTVGTPAFMAPESLSETRKIFSGKALDVWAMGVTLYCFVFGQCPFMDERIMCLHSKIKSQALEFPDQPDIAEDLKDLITRMLDKNPESRIVVPEIKILVKTMIRKRSFGNPFEGSRREERSLSAPGNLLTKQGSEDNLQGTDPPPVGEEEVLL

SEQ ID NO: 28189 - protein, 490 aa, Homo sapiens
MSSCVSSQPSSNRAAPQDELGGRGSSSSESQKPCEALRGLSSLSIHLGMESFIVVTECEPGCAVDLGLARDRPLEADGQEVPLDTSGSQARPHLSGRKLSLQERSQGGLAAGGSLDMNGRCICPSLPYSPVSSPQSSPRLPRRPTVESHHVSITGMQDCVQLNQYTLKDEIGKGSYGVVKLAYNENDNTYYAMKVLSKKKLIRQAGFPRRPPPRGTRPAPGGCIQPRGPIEQVYQEIAILKKLDHPNVVKLVEVLDDPNEDHLYMVFELVNQGPVMEVPTLKPLSEDQARFYFQDLIKGIEYLHYQKIIHRDIKPSNLLVGEDGHIKIADFGVSNEFKGSDALLSNTVGTPAFMAPESLSETRKIFSGKALDVWAMGVTLYCFVFGQCPFMDERIMCLHSKIKSQALEFPDQPDIAEDLKDLITRMLDKNPESRIVVPEIKILVKTMIRKRSFGNPFEGSRREERSLSAPGNLLTKKPTRECESLSELKT

SEQ ID NO: 28190 - protein, 556 aa, Homo sapiens
MSSCVSSQPSSNRAAPQDELGGRGSSSSESQKPCEALRGLSSLSIHLGMESFIVVTECEPGCAVDLGLARDRPLEADGQEVPLDTSGSQARPHLSGRKLSLQERSQGGLAAGGSLDMNGRCICPSLPYSPVSSPQSSPRLPRRPTVESHHVSITGMQDCVQLNQYTLKDEIGKGSYGVVKLAYNENDNTYYAMKVLSKKKLIRQAGFPRRPPPRGTRPAPGGCIQPRGPIEQVYQEIAILKKLDHPNVVKLVEVLDDPNEDHLYMVFELVNQGPVMEVPTLKPLSEDQARFYFQDLIKGIEYLHYQKIIHRDIKPSNLLVGEDGHIKIADFGVSNEFKGSDALLSNTVGTPAFMAPESLSETRKIFSGKALDVWAMGVTLYCFVFGQCPFMDERIMCLHSKIKSQALEFPDQPDIAEDLKDLITRMLDKNPESRIVVPEIKLHPWVTRHGAEPLPSEDENCTLVEVTEEEVENSVKHIPSLATVILVKTMIRKRSFGNPFEGSRREERSLSAPGNLLTKKPTRECESLSELKGTKKKKGLDSMTSTVAAGWLDRRV

SEQ ID NO: 28191 - protein, 90 aa, Homo sapiens
MSHYGSYYGGLGYSCGGFGGLGYGYGCGCGSFCRRGSGCGYGGYGYGSGFGSYGYGSGFGGYGYGSGFGGYGYGCCRPSYNGGYGFSGFY

SEQ ID NO: 28192 - protein, 234 aa, Homo sapiens
MAENHCELLSPARGGIGAGLGGGLCRRCSAGLGALAQRPGSVSKWVRLNVGGTYFLTTRQTLCRDPKSFLYRLCQADPDLDSDKDETGAYLIDRDPTYFGPVLNYLRHGKLVINKDLAEEGVLEEAEFYNITSLIKLVKDKIRERDSKTSQVPVKHVYRVLQCQEEELTQMVSTMSDGWKFEQLVSIGSSYNYGNEDQAEFLCVVSKELHNTPYGTASEPSEKAKILQERGSRM

SEQ ID NO: 28193 - protein, 52 aa, Homo sapiens
MCYGYGCGCGSFCRLGYGCGYEGCRYGCGHRGCGDGCCCPSCYRRYRFTGFY

SEQ ID NO: 28194 - protein, 672 aa, Homo sapiens
MADVFPGNDSTASQDVANRFARKGALRQKNVHEVKDHKFIARFFKQPTFCSHCTDFIWGFGKQGFQCQVCCFVVHKRCHEFVTFSCPGADKGPDTDDPRSKHKFKIHTYGSPTFCDHCGSLLYGLIHQGMKCDTCDMNVHKQCVINVPSLCGMDHTEKRGRIYLKAEVADEKLHVTVRDAKNLIPMDPNGLSDPYVKLKLIPDPKNESKQKTKTIRSTLNPQWNESFTFKLKPSDKDRRLSVEIWDWDRTTRNDFMGSLSFGVSELMKMPASGWYKLLNQEEGEYYNVPIPEGDEEGNMELRQKFEKAKLGPAGNKVISPSEDRKQPSNNLDRVKLTDFNFLMVLGKGSFGKVMLADRKGTEELYAIKILKKDVVIQDDDVECTMVEKRVLALLDKPPFLTQLHSCFQTVDRLYFVMEYVNGGDLMYHIQQVGKFKEPQAVFYAAEISIGLFFLHKRGIIYRDLKLDNVMLDSEGHIKIADFGMCKEHMMDGVTTRTFCGTPDYIAPEIIAYQPYGKSVDWWAYGVLLYEMLAGQPPFDGEDEDELFQSIMEHNVSYPKSLSKEAVSVCKGLMTKHPAKRLGCGPEGERDVREHAFFRRIDWEKLENREIQPPFKPKVCGKGAENFDKFFTRGQPVLTPPDQLVIANIDQSDFEGFSYVNPQFVHPILQSAV

SEQ ID NO: 28195 - protein, 81 aa, Homo sapiens
MSYYGSYYGGLGYGCGGFGGLGYGYGCGCGSFRRLGSGCGYGGYGYGSGFGGYGYGSGFGGYGYGCYRPSYYGGYGFSGFY

SEQ ID NO: 28196 - protein, 393 aa, Homo sapiens
MGEGGAAAALVAAAAAAAAAAAAVVAGQRRRRLGRRARCHGPGRAAGGKMSKPCAVEAAAAAVAATAPGPEMVERRGPGRPRTDGENVFTGQSKIYSYMSPNKCSGMRFPLQEENSVTHHEVKCQGKPLAGIYRKREEKRNAGNAVRSAMKSEEQKIKDARKGPLVPFPNQKSEAAEPPKTPPSSCDSTNAAIAKQALKKPIKGKQAPRKKAQGKTQQNRKLTDFYPVRRSSRKSKAELQSEERKRIDELIESGKEEGMKIDLIDGKGRGVIATKQFSRGDFVVEYHGDLIEITDAKKREALYAQDPSTGCYMYYFQYLSKTYCVDATRETNRLGRLINHSKCGNCQTKLHDIDGVPHLILIASRDIAAGEELLYDYGDRSKASIEAHPWLKH

SEQ ID NO: 28197 - protein, 352 aa, Homo sapiens
MARGRKMSKPRAVEAAAAAAAVAATAPGPEMVERRGPGRPRTDGENVFTGQSKIYSYMSPNKCSGMRFPLQEENSVTHHEVKCQGKPLAGIYRKREEKRNAGNAVRSAMKSEEQKIKDARKGPLVPFPNQKSEAAEPPKTPPSSCDSTNAAIAKQALKKPIKGKQAPRKKAQGKTQQNRKLTDFYPVRRSSRKSKAELQSEERKRIDELIESGKEEGMKIDLIDGKGRGVIATKQFSRGDFVVEYHGDLIEITDAKKREALYAQDPSTGCYMYYFQYLSKTYCVDATRETNRLGRLINHSKCGNCQTKLHDIDGVPHLILIASRDIAAGEELLYDYGDRSKASIEAHPWLKH

SEQ ID NO: 28198 - protein, 84 aa, Homo sapiens
MSYYGSYYRGLGYGCGGFGGLGYGYGCGCGSFRRLGYGCGFGGNGYGYCRPSCYGGYGFSILLKSYPEDTISEVIRRSFNLTKY

SEQ ID NO: 28199 - protein, 237 aa, Homo sapiens
MDNGDWGYMMTDPVTLNVGGHLYTTSLTTLTRYPDSMLGAMFGGDFPTARDPQGNYFIDRDGPLFRYVLNFLRTSELTLPLDFKEFDLLRKEADFYQIEPLIQCLNDPKPLYPMDTFEEVVELSSTRKLSKYSNPVAVIITQLTITTKVHSLLEGISNYFTKWNKHMMDTRDCQVSFTFGPCDYHQEVSLRVHLMEYITKQGFTIRNTRVHHMSERANENTVEHNWTFCRLARKTDD

SEQ ID NO: 28200 - protein, 202 aa, Homo sapiens
MGCCGCSGGCGSGCGGCGSGCGGCGSGCGGYGSGCGGCGSSCCVPVCCCKPVCCCVPACSCSSCGSCGGSKGDCGSCGGSKGGCGSCGGSKGGCGSCGGSKGGCGSCGGSKGGCGSCGGSKGGCGSCGGSKGGCGSCGCSQCNCCKPCCCSSGCGSCCQSSCCNPCCCQSSCCVPVCCQSSCCKPCCCQSSCCVPVCCQCKI

SEQ ID NO: 28201 - protein, 82 aa, Homo sapiens
MCLRSHFKVAFTQRKVELSKELRRSRSSRNGGLPLQEQPMGQKWGWHRGEPGHPRMEELNEWPQNGDHWSRKWPPPCAFTPG

SEQ ID NO: 28202 - protein, 156 aa, Homo sapiens
MGCCGCSGGCGSGCGGCGSGSGGCGSGCGGCGSSCCVPICCCKPVCCCVPACSCSSCGSCGGSKGGCGSCGSSKGGCGSCGCSQSNCCKPCCSSSGCGSFCCQSSCSKPCCCQSSCCQSSCCKPCCCQSSCCQSSCFKPCCCQSSCCVPVCCQCKI

SEQ ID NO: 28203 - protein, 912 aa, Homo sapiens
MSAPPVLRPPSPLLPVAAAAAAAAAALVPGSGPGPAPFLAPVAAPVGGISFHLQIGLSREPVLLLQDSSGDYSLAHVREMACSIVDQKFPECGFYGMYDKILLFRHDPTSENILQLVKAASDIQEGDLIEVVLSASATFEDFQIRPHALFVHSYRAPAFCDHCGEMLWGLVRQGLKCEGCGLNYHKRCAFKIPNNCSGVRRRRLSNVSLTGVSTIRTSSAELSTSAPDEPLLQKSPSESFIGREKRSNSQSYIGRPIHLDKILMSKVKVPHTFVIHSYTRPTVCQYCKKLLKGLFRQGLQCKDCRFNCHKRCAPKVPNNCLGEVTINGDLLSPGAESDVVMEEGSDDNDSERNSGLMDDMEEAMVQDAEMAMAECQNDSGEMQDPDPDHEDANRTISPSTSNNIPLMRVVQSVKHTKRKSSTVMKEGWMVHYTSKDTLRKRHYWRLDSKCITLFQNDTGSRYYKEIPLSEILSLEPVKTSALIPNGANPHCFEITTANVVYYVGENVVNPSSPSPNNSVLTSGVGADVARMWEIAIQHALMPVIPKGSSVGTGTNLHRDISVSISVSNCQIQENVDISTVYQIFPDEVLGSGQFGIVYGGKHRKTGRDVAIKIIDKLRFPTKQESQLRNEVAILQNLHHPGVVNLECMFETPERVFVVMEKLHGDMLEMILSSEKGRLPEHITKFLITQILVALRHLHFKNIVHCDLKPENVLLASADPFPQVKLCDFGFARIIGEKSFRRSVVGTPAYLAPEVLRNKGYNRSLDMWSVGVIIYVSLSGTFPFNEDEDIHDQIQNAAFMYPPNPWKEISHEAIDLINNLLQVKMRKRYSVDKTLSHPWLQDYQTWLDLRELECKIGERYITHESDDLRWEKYAGEQGLQYPTHLINPSASHSDTPETEETEMKALGERVSIL

SEQ ID NO: 28204 - protein, 255 aa, Homo sapiens
MEANSGRLASELNHVQEVLEGYKKKYEEEVALRATAENEFVALKKDVDCAYLRKSDLEANVEALTQEIDFLRRLYEEEIRVLQSHISDTSVVVKMDNSRDLNMHCVITEIKAQYDDIATRSRAEAESWYRSKCEEMKATVIRHGETLRRTKEEINELNRMIQRLTAEVENAKCQNSKLEAAVAQSEQQGEAALSDARCKLAELEGALQKAKQDMACLIREYQEVMNSKLAWTLRSPPTGACWRARSRGCVRALVL

SEQ ID NO: 28205 - protein, 573 aa, Homo sapiens
MYDNMSTMVYIKEDKLEKLTQDEIISKTKQVIQGLEALKNEHNSILQSLLETLKCLKKDDESNLVEEKSNMIRKSLEMLELGLSEAQVMMALSNHLNAVESEKQKLRAQVRRLCQENQWLRDELANTQQKLQKSEQSVAQLEEEKKHLEFMNQLKKYDDDISPSEDKDTDSTKEPLDDLFPNDEDDPGQGIQQQHSSAAAAAQQGGYEIPARLRTLHNLVIQYASQGRYEVAVPLCKQALEDLEKTSGHDHPDVATMLNILALVYRDQNKYKDAANLLNDALAIREKTLGKDHPAVAATLNNLAVLYGKRGKYKEAEPLCKRALEIREKVLGKDHPDVAKQLNNLALLCQNQGKYEEVEYYYQRALEIYQTKLGPDDPNVAKTKNNLASCYLKQGKFKQAETLYKEILTRAHEREFGSVDDENKPIWMHAEEREECKGKQKDGTSFGEYGGWYKACKVDSPTVTTTLKNLGALYRRQGKFEAAETLEEAAMRSRKQGLDNVHKQRVAEVLNDPENMEKRRSRESLNVDVVKYESGPDGGEEVSMSVEWNGGVSGRASFCGKRQQQQWPGRRHR

SEQ ID NO: 28206 - protein, 560 aa, Homo sapiens
MYDNMSTMVYIKEDKLEKLTQDEIISKTKQVIQGLEALKNEHNSILQSLLETLKCLKKDDESNLVEEKSNMIRKSLEMLELGLSEAQVMMALSNHLNAVESEKQKLRAQVRRLCQENQWLRDELANTQQKLQKSEQSVAQLEEEKKHLEFMNQLKKYDDDISPSEDKDTDSTKEPLDDLFPNDEDDPGQGIQQQHSSAAAAAQQGGYEIPARLRTLHNLVIQYASQGRYEVAVPLCKQALEDLEKTSGHDHPDVATMLNILALVYRDQNKYKDAANLLNDALAIREKTLGKDHPAVAATLNNLAVLYGKRGKYKEAEPLCKRALEIREKVLGKDHPDVAKQLNNLALLCQNQGKYEEVEYYYQRALEIYQTKLGPDDPNVAKTKNNLASCYLKQGKFKQAETLYKEILTRAHEREFGSVDDENKPIWMHAEEREECKGKQKDGTSFGEYGGWYKACKVDSPTVTTTLKNLGALYRRQGKFEAAETLEEAAMRSRKQGLDNVHKQRVAEVLNDPENMEKRRSRESLNVDVVKYESGPDGGEEVSMSVEWNGMRKMKLGLVN

SEQ ID NO: 28207 - protein, 564 aa, Homo sapiens
MYDNMSTMVYIKEDKLEKLTQDEIISKTKQVIQGLEALKNEHNSILQSLLETLKCLKKDDESNLVEEKSNMIRKSLEMLELGLSEAQVMMALSNHLNAVESEKQKLRAQVRRLCQENQWLRDELANTQQKLQKSEQSVAQLEEEKKHLEFMNQLKKYDDDISPSEDKDTDSTKEPLDDLFPNDEDDPGQGIQQQHSSAAAAAQQGGYEIPARLRTLHNLVIQYASQGRYEVAVPLCKQALEDLEKTSGHDHPDVATMLNILALVYRDQNKYKDAANLLNDALAIREKTLGKDHPAVAATLNNLAVLYGKRGKYKEAEPLCKRALEIREKVLGKDHPDVAKQLNNLALLCQNQGKYEEVEYYYQRALEIYQTKLGPDDPNVAKTKNNLASCYLKQGKFKQAETLYKEILTRAHEREFGSVDDENKPIWMHAEEREECKGKQKDGTSFGEYGGWYKACKVDSPTVTTTLKNLGALYRRQGKFEAAETLEEAAMRSRKQGLDNVHKQRVAEVLNDPENMEKRRSRESLNVDVVKYESGPDGGEEGVSGRASFCGKRQQQQWPGRRHR

SEQ ID NO: 28208 - protein, 637 aa, Homo sapiens
MYDNMSTMVYIKEDKLEKLTQDEIISKTKQVIQGLEALKNEHNSILQSLLETLKCLKKDDESNLVEEKSNMIRKSLEMLELGLSEAQVMMALSNHLNAVESEKQKLRAQVRRLCQENQWLRDELANTQQKLQKSEQSVAQLEEEKKHLEFMNQLKKYDDDISPSEDKDTDSTKEPLDDLFPNDEDDPGQGIQQQHSSAAAAAQQGGYEIPARLRTLHNLVIQYASQGRYEVAVPLCKQALEDLEKTSGHDHPDVATMLNILALVYRDQNKYKDAANLLNDALAIREKTLGKDHPAVAATLNNLAVLYGKRGKYKEAEPLCKRALEIREKVLGKDHPDVAKQLNNLALLCQNQGKYEEVEYYYQRALEIYQTKLGPDDPNVAKTKNNLASCYLKQGKFKQAETLYKEILTRAHEREFGSVDDENKPIWMHAEEREECKGKQKDGTSFGEYGGWYKACKVDSPTVTTTLKNLGALYRRQGKFEAAETLEEAAMRSRKQGLDNVHKQRVAEVLNDPENMEKRRSRESLNVDVVKYESGPDGGEEVSMSVEWNGDGTGSLKRSGSFSKLRASIRRSSEKLVRKLKGGSSRESEPKNPGMKRASSLNVLNVGGKAAEDRFQERNNCLADSRALSASHTDLAH

SEQ ID NO: 28209 - protein, 616 aa, Homo sapiens
MYDNMSTMVYIKEDKLEKLTQDEIISKTKQVIQGLEALKNEHNSILQSLLETLKCLKKDDESNLVEEKSNMIRKSLEMLELGLSEAQVMMALSNHLNAVESEKQKLRAQVRRLCQENQWLRDELANTQQKLQKSEQSVAQLEEEKKHLEFMNQLKKYDDDISPSEDKDTDSTKEPLDDLFPNDEDDPGQGIQQQHSSAAAAAQQGGYEIPARLRTLHNLVIQYASQGRYEVAVPLCKQALEDLEKTSGHDHPDVATMLNILALVYRDQNKYKDAANLLNDALAIREKTLGKDHPAVAATLNNLAVLYGKRGKYKEAEPLCKRALEIREKVLGKDHPDVAKQLNNLALLCQNQGKYEEVEYYYQRALEIYQTKLGPDDPNVAKTKNNLASCYLKQGKFKQAETLYKEILTRAHEREFGSVDDENKPIWMHAEEREECKGKQKDGTSFGEYGGWYKACKVDSPTVTTTLKNLGALYRRQGKFEAAETLEEAAMRSRKQGLDNVHKQRVAEVLNDPENMEKRRSRESLNVDVVKYESGPDGGEEVSMSVEWNGDGTGSLKRSGSFSKLRASIRRSSEKLVRKLKGGSSRESEPKNPGVSGRASFCGKRQQQQWPGRRHR

SEQ ID NO: 28210 - protein, 628 aa, Homo sapiens
MYDNMSTMVYIKEDKLEKLTQDEIISKTKQVIQGLEALKNEHNSILQSLLETLKCLKKDDESNLVEEKSNMIRKSLEMLELGLSEAQVMMALSNHLNAVESEKQKLRAQVRRLCQENQWLRDELANTQQKLQKSEQSVAQLEEEKKHLEFMNQLKKYDDDISPSEDKDTDSTKEPLDDLFPNDEDDPGQGIQQQHSSAAAAAQQGGYEIPARLRTLHNLVIQYASQGRYEVAVPLCKQALEDLEKTSGHDHPDVATMLNILALVYRDQNKYKDAANLLNDALAIREKTLGKDHPAVAATLNNLAVLYGKRGKYKEAEPLCKRALEIREKVLGKDHPDVAKQLNNLALLCQNQGKYEEVEYYYQRALEIYQTKLGPDDPNVAKTKNNLASCYLKQGKFKQAETLYKEILTRAHEREFGSVDDENKPIWMHAEEREECKGKQKDGTSFGEYGGWYKACKVDSPTVTTTLKNLGALYRRQGKFEAAETLEEAAMRSRKQGLDNVHKQRVAEVLNDPENMEKRRSRESLNVDVVKYESGPDGGEEDGTGSLKRSGSFSKLRASIRRSSEKLVRKLKGGSSRESEPKNPGMKRASSLNVLNVGGKAAEDRFQERNNCLADSRALSASHTDLAH

SEQ ID NO: 28211 - protein, 584 aa, Homo sapiens
MYDNMSTMVYIKEDKLEKLTQDEIISKTKQVIQGLEALKNEHNSILQSLLETLKCLKKDDESNLVEEKSNMIRKSLEMLELGLSEAQVMMALSNHLNAVESEKQKLRAQVRRLCQENQWLRDELANTQQKLQKSEQSVAQLEEEKKHLEFMNQLKKYDDDISPSEDKDTDSTKEPLDDLFPNDEDDPGQGIQQQHSSAAAAAQQGGYEIPARLRTLHNLVIQYASQGRYEVAVPLCKQALEDLEKTSGHDHPDVATMLNILALVYRDQNKYKDAANLLNDALAIREKTLGKDHPAVAATLNNLAVLYGKRGKYKEAEPLCKRALEIREKVLGKDHPDVAKQLNNLALLCQNQGKYEEVEYYYQRALEIYQTKLGPDDPNVAKTKNNLASCYLKQGKFKQAETLYKEILTRAHEREFGSVDDENKPIWMHAEEREECKGKQKDGTSFGEYGGWYKACKVDSPTVTTTLKNLGALYRRQGKFEAAETLEEAAMRSRKQGLDNVHKQRVAEVLNDPENMEKRRSRESLNVDVVKYESGPDGGEEMKRASSLNVLNVGGKAAEDRFQERNNCLADSRALSASHTDLAH

SEQ ID NO: 28212 - protein, 551 aa, Homo sapiens
MYDNMSTMVYIKEDKLEKLTQDEIISKTKQVIQGLEALKNEHNSILQSLLETLKCLKKDDESNLVEEKSNMIRKSLEMLELGLSEAQVMMALSNHLNAVESEKQKLRAQVRRLCQENQWLRDELANTQQKLQKSEQSVAQLEEEKKHLEFMNQLKKYDDDISPSEDKDTDSTKEPLDDLFPNDEDDPGQGIQQQHSSAAAAAQQGGYEIPARLRTLHNLVIQYASQGRYEVAVPLCKQALEDLEKTSGHDHPDVATMLNILALVYRDQNKYKDAANLLNDALAIREKTLGKDHPAVAATLNNLAVLYGKRGKYKEAEPLCKRALEIREKVLGKDHPDVAKQLNNLALLCQNQGKYEEVEYYYQRALEIYQTKLGPDDPNVAKTKNNLASCYLKQGKFKQAETLYKEILTRAHEREFGSVDDENKPIWMHAEEREECKGKQKDGTSFGEYGGWYKACKVDSPTVTTTLKNLGALYRRQGKFEAAETLEEAAMRSRKQGLDNVHKQRVAEVLNDPENMEKRRSRESLNVDVVKYESGPDGGEEMRKMKLGLVN

SEQ ID NO: 28213 - protein, 639 aa, Homo sapiens
MYDNMSTMVYIKEDKLEKLTQDEIISKTKQVIQGLEALKNEHNSILQSLLETLKCLKKDDESNLVEEKSNMIRKSLEMLELGLSEAQVMMALSNHLNAVESEKQKLRAQVRRLCQENQWLRDELANTQQKLQKSEQSVAQLEEEKKHLEFMNQLKKYDDDISPSEDKDTDSTKEPLDDLFPNDEDDPGQGIQQQHSSAAAAAQQGGYEIPARLRTLHNLVIQYASQGRYEVAVPLCKQALEDLEKTSGHDHPDVATMLNILALVYRDQNKYKDAANLLNDALAIREKTLGKDHPAVAATLNNLAVLYGKRGKYKEAEPLCKRALEIREKVLGKDHPDVAKQLNNLALLCQNQGKYEEVEYYYQRALEIYQTKLGPDDPNVAKTKNNLASCYLKQGKFKQAETLYKEILTRAHEREFGSVDDENKPIWMHAEEREECKGKQKDGTSFGEYGGWYKACKVDSPTVTTTLKNLGALYRRQGKFEAAETLEEAAMRSRKQGLDNVHKQRVAEVLNDPENMEKRRSRESLNVDVVKYESGPDGGEEVSMSVEWNGDGTGSLKRSGSFSKLRASIRRSSEKLVRKLKGGSSRESEPKNPGMKRASSLNVLNVGGKAAEDRFQGVSGRASFCGKRQQQQWPGRRHR

SEQ ID NO: 28214 - protein, 618 aa, Homo sapiens
MYDNMSTMVYIKEDKLEKLTQDEIISKTKQVIQGLEALKNEHNSILQSLLETLKCLKKDDESNLVEEKSNMIRKSLEMLELGLSEAQVMMALSNHLNAVESEKQKLRAQVRRLCQENQWLRDELANTQQKLQKSEQSVAQLEEEKKHLEFMNQLKKYDDDISPSEDKDTDSTKEPLDDLFPNDEDDPGQGIQQQHSSAAAAAQQGGYEIPARLRTLHNLVIQYASQGRYEVAVPLCKQALEDLEKTSGHDHPDVATMLNILALVYRDQNKYKDAANLLNDALAIREKTLGKDHPAVAATLNNLAVLYGKRGKYKEAEPLCKRALEIREKVLGKDHPDVAKQLNNLALLCQNQGKYEEVEYYYQRALEIYQTKLGPDDPNVAKTKNNLASCYLKQGKFKQAETLYKEILTRAHEREFGSVDDENKPIWMHAEEREECKGKQKDGTSFGEYGGWYKACKVDSPTVTTTLKNLGALYRRQGKFEAAETLEEAAMRSRKQGLDNVHKQRVAEVLNDPENMEKRRSRESLNVDVVKYESGPDGGEEVSMSVEWNGDGTGSLKRSGSFSKLRASIRRSSEKLVRKLKGGSSRESEPKNPGASLAEPLFVENDSSSSGLEDATAN

SEQ ID NO: 28215 - protein, 177 aa, Homo sapiens
MACCQTSFCGFPSCSTSGTCGSSCCQPSCCETSSCQPRCCETSCCQPSCCQTSFCGFPSFSTGGTCDSSCCQPSCCETSCCQPSCYQTSSCGTGCGIGGGIGYGQEGSSGAVSTRIRWCRPDCRVEGTCLPPCCVVSCTPPSCCQLHHAEASCCRPSYCGQSCCRPVCCCYCSEPTC

SEQ ID NO: 28216 - protein, 167 aa, Homo sapiens
MTCCQTSFCGYPSCSTSGTCGSSCCQPSCCETSCCQPSCCQTSFCGFPSFSTSGTCSSSCCQPSCCETSCCQPSCCQTSSCGTGCGIGGGIGYGQEGSSGAVSTRIRWCRPDCRVEGTCLPPCCVVSCTPPTCCQLHHAEASCCRPSYCGQSCCRPVCCCYSCEPTC

SEQ ID NO: 28217 - protein, 130 aa, Homo sapiens
MSGRGKQGGKARAKAKTRSSRAGLQFPVGRVHRLLRKGNYAERVGAGAPVYLAAVLEYLTAEILELAGNAARDNKKTRIIPRHLQLAIRNDEELNKLLGKVTIAQGGVLPNIQAVLLPKKTESHHKAKGK

SEQ ID NO: 28218 - protein, 778 aa, Homo sapiens
MKPFQLDLLFVCFFLFSQELGLQKRGCCLVLGYMAKDKFRRMNEGQVYSFSQQPQDQVVVSGQPVTLLCAIPEYDGFVLWIKDGLALGVGRDLSSYPQYLVVGNHLSGEHHLKILRAELQDDAVYECQAIQAAIRSRPARLTVLVPPDDPVILGGPVISLRAGDPLNLTCHADNAKPAASIIWLRKGEVINGATYSKTLLRDGKRESIVSTLFISPGDVENGQSIVCRATNKAIPGGKETSVTIDIQHPPLVNLSVEPQPVLEDNVVTFHCSAKANPAVTQYRWAKRGQIIKEASGEVYRTTVDYTYFSEPVSCEVTNALGSTNLSRTVDVYFGPRMTTEPQSLLVDLGSDAIFSCAWTGNPSLTIVWMKRGSGVVLSNEKTLTLKSVRQEDAGKYVCRAVVPRVGAGEREVTLTVNGPPIISSTQTQHALHGEKGQIKCFIRSTPPPDRIAWSWKENVLESGTSGRYTVETISTEEGVISTLTISNIVRADFQTIYNCTAWNSFGSDTEIIRLKEQGSEMKSGAGLEAESVPMAVIIGVAVGAGVAFLVLMATIVAFCCARSQRNLKGVVSAKNDIRVEIVHKEPASGREGEEHSTIKQLMMDRGEFQQDSVLKQLEVLKEEEKEFQNLKDPTNGYYSVNTFKEHHSTPTISLSSCQPDLRPAGKQRVPTGMSFTNIYSTLSGQGRLYDYGQRFVLGMGSSSIELCEREFQRGSLSDSSSFLDTQCDSSVSSSGKQDGYVQFDKASKASASSSHHSQSSSQNSDPSRPLQRRMQTHV

SEQ ID NO: 28219 - protein, 600 aa, Homo sapiens
MKPFQLDLLFVCFFLFSQELGLQKRGCCLVLGYMAKDKFRRMNEGQVYSFSQQPQDQVVVSGQPVTLLCAIPEYDGFVLWIKDGLALGVGRDLSSYPQYLVVGNHLSGEHHLKILRAELQDDAVYECQAIQAAIRSRPARLTVLVPPDDPVILGGPVISLRAGDPLNLTCHADNAKPAASIIWLRKGEVINGATYSKTLLRDGKRESIVSTLFISPGDVENGQSIVCRATNKAIPGGKETSVTIDIQHPPLVNLSVEPQPVLEDNVVTFHCSAKANPAVTQYRWAKRGQIIKEASGEVYRTTVDYTYFSEPVSCEVTNALGSTNLSRTVDVYFGPRMTTEPQSLLVDLGSDAIFSCAWTGNPSLTIVWMKRGSGVVLSNEKTLTLKSVRQEDAGKYVCRAVVPRVGAGEREVTLTVNGPPIISSTQTQHALHGEKGQIKCFIRSTPPPDRIAWSWKENVLESGTSGRYTVETISTEEGVISTLTISNIVRADFQTIYNCTAWNSFGSDTEIIRLKEQGSEMKSGAGLEAESVPMAVIIGVAVGAGVAFLVLMATIVAFCCARSQRSTGGRSGISGRGTEKKARLRLPRRASKQECNEQGS

SEQ ID NO: 28220 - protein, 139 aa, Homo sapiens
METDCNPMELSSMSGFEEGSELNGFEGTDMKDMRLEAEAVVNDVLFAVNNMFVSKSLRCADDVAYINVETKERNRYCLELTEAGLKVVGYAFDQVDDHLQTPYHETVYSLLDTLSPAYREAFGNALLQRLEALKRDGQS

SEQ ID NO: 28221 - protein, 181 aa, Homo sapiens
MPKGGRKGGHKGRARQYTSPEEIDAQLQAEKQKAREEEEQKEGGDGAAGDPKKEKKSLDSDESEDEEDDYQQKRKGVEGLIDIENPNRVAQTTKKVTQLDLDGPKELSRREREEIEKQKAKERYMKMHLAGKTEQAKADLARLAIIRKQREEAARKKEEERKAKDDATLSGKRMQSLSLNK

SEQ ID NO: 28222 - protein, 602 aa, Homo sapiens
MDSRVSELFGGCCRPGGGPAVGGTLKARGAGSSSGCGGPKGKKKNGRNRGGKANNPPYLPPEAEDGNIEYKLKLVNPSQYRFEHLVTQMKWRLQEGRGEAVYQIGVEDNGLLVGLAEEEMRASLKTLHRMAEKVGADITVLREREVDYDSDMPRKITEVLVRKVPDNQQFLDLRVAVLGNVDSGKSTLLGVLTQGELDNGRGRARLNLFRHLHEIQSGRTSSISFEILGFNSKGEVVNYSDSRTAEEICESSSKMITFIDLAGHHKYLHTTIFGLTSYCPDCALLLVSANTGIAGTTREHLGLALALKVPFFIVVSKIDLCAKTTVERTVRQLERVLKQPGCHKVPMLVTSEDDAVTAAQQFAQSPNVTPIFTLSSVSGESLDLLKVFLNILPPLTNSKEQEELMQQLTEFQVDEIYTVPEVGTVVGGTLSSGICREGDQLVVGPTDDGCFLELRVCSIQRNRSACRVLRAGQAATLALGDFDRALLRKGMVMVSPEMNPTICSVFEAEIVLLFHATTFRRGFQVTVHVGNVRQTAVVEKIHAKDKLRTGEKAVVRFRFLKHPEYLKVGAKLLFREGVTKGIGHVTDVQAITAGEAQANMGF

SEQ ID NO: 28223 - protein, 514 aa, Homo sapiens
MKWRLQEGRGEAVYQIGVEDNGLLVGLAEEEMRASLKTLHRMAEKVGADITVLREREVDYDSDMPRKITEVLVRKVPDNQQFLDLRVAVLGNVDSGKSTLLGVLTQGELDNGRGRARLNLFRHLHEIQSGRTSSISFEILGFNSKGEVVNYSDSRTAEEICESSSKMITFIDLAGHHKYLHTTIFGLTSYCPDCALLLVSANTGIAGTTREHLGLALALKVPFFIVVSKIDLCAKTTVERTVRQLERVLKQPGCHKVPMLVTSEDDAVTAAQQFAQSPNVTPIFTLSSVSGESLDLLKVFLNILPPLTNSKEQEELMQQLTEFQVDEIYTVPEVGTVVGGTLSSGICREGDQLVVGPTDDGCFLELRVCSIQRNRSACRVLRAGQAATLALGDFDRALLRKGMVMVSPEMNPTICSVFEAEIVLLFHATTFRRGFQVTVHVGNVRQTAVVEKIHAKDKLRTGEKAVVRFRFLKHPEYLKVGAKLLFREGVTKGIGHVTDVQAITAGEAQANMGF

SEQ ID NO: 28224 - protein, 244 aa, Homo sapiens
MKWRLQEGRGEAIFTLSSVSGESLDLLKVFLNILPPLTNSKEQEELMQQLTEFQVDEIYTVPEVGTVVGGTLSSGICREGDQLVVGPTDDGCFLELRVCSIQRNRSACRVLRAGQAATLALGDFDRALLRKGMVMVSPEMNPTICSVFEAEIVLLFHATTFRRGFQVTVHVGNVRQTAVVEKIHAKDKLRTGEKAVVRFRFLKHPEYLKVGAKLLFREGVTKGIGHVTDVQAITAGEAQANMGF

SEQ ID NO: 28225 - protein, 594 aa, Homo sapiens
MDSRVSELFGGCCRPGGGPAVGGTLKARGAGSSSGCGGPKGKKKNGRNRGGKANNPPYLPPEAEDGNIEYKYRFEHLVTQMKWRLQEGRGEAVYQIGVEDNGLLVGLAEEEMRASLKTLHRMAEKVGADITVLREREVDYDSDMPRKITEVLVRKVPDNQQFLDLRVAVLGNVDSGKSTLLGVLTQGELDNGRGRARLNLFRHLHEIQSGRTSSISFEILGFNSKGEVVNYSDSRTAEEICESSSKMITFIDLAGHHKYLHTTIFGLTSYCPDCALLLVSANTGIAGTTREHLGLALALKVPFFIVVSKIDLCAKTTVERTVRQLERVLKQPGCHKVPMLVTSEDDAVTAAQQFAQSPNVTPIFTLSSVSGESLDLLKVFLNILPPLTNSKEQEELMQQLTEFQVDEIYTVPEVGTVVGGTLSSGICREGDQLVVGPTDDGCFLELRVCSIQRNRSACRVLRAGQAATLALGDFDRALLRKGMVMVSPEMNPTICSVFEAEIVLLFHATTFRRGFQVTVHVGNVRQTAVVEKIHAKDKLRTGEKAVVRFRFLKHPEYLKVGAKLLFREGVTKGIGHVTDVQAITAGEAQANMGF

SEQ ID NO: 28226 - protein, 669 aa, Homo sapiens
MATERSRSAMDSPVPASMFAPEPSSPGAARAAAAAARLHGGFDSDCSEDGEALNGEPELDLTSKLVLVSPTSEQYDSLLRQMWERMDEGCGETIYVIGQGSDGTEYGLSEADMEASYATVKSMAEQIEADVILLRERQEAGGRVRDYLVRKRVGDNDFLEVRVAVVGNVDAGKSTLLGVLTHGELDNGRGFARQKLFRHKHEIESGRTSSVGNDILGFDSEGNVVNKPDSHGGSLEWTKICEKSTKVITFIDLAGHEKYLKTTVFGMTGHLPDFCMLMVGSNAGIVGMTKEHLGLALALNVPVFVVVTKIDMCPANILQETLKLLQRLLKSPGCRKIPVLVQSKDDVIVTASNFSSERMCPIFQISNVTGENLDLLKMFLNLLSPRTSYREEEPAEFQIDDTYSVPGVGTVVSGTTLRGLIKLNDTLLLGPDPLGNFLSIAVKSIHRKRMPVKEVRGGQTASFALKKIKRSSIRKGMVMVSPRLNPQASWEFEAEILVLHHPTTISPRYQAMVHCGSIRQTATILSMDKDCLRTGDKATVHFRFIKTPEYLHIDQRLVFREGRTKAVGTITKLLQTTNNSPMNSKPQQIKMQSTKKGPLTKRDEGGPSGGPAVGAPPPGDEASSVGAGQPAASSNLQPQPKPSSGGRRRGGQRHKVKSQGACVTPASGC

SEQ ID NO: 28227 - protein, 955 aa, Homo sapiens
MSSASVTAFEKEHLWMYLQALGFEPGPATIACGKIVSHTHLGVNMFDKLNRDAFHIISYFLFQVLDQSLTKEVFKFCWPPFDQKSDTEFRKHCCEWIKRISGECGSSFPQVVGSLFLSPGGPKFIHLMYHFARFVAMKYIKSNSKNSSHHFVETFNIKPQDLHKCIARCHFARSRFLQILQRQDCVTQKYQENAQLSVKQVRNLRSECIGLENQIKKMEPYDDHSNMEEKIQKVRSLWASVNETLMFLEKEREVVSSVLSLVNQYALDGTNVAINIPRLLLDKIEKQMFQLHIGNVYEAGKLNLLTVIQLLNEVLKVMKYERCQADQARLTVDLHYLEKETKFQKERLSDLKHMRYRIKDDLTTIRHSVVEKQGEWHKKWKEFLGLSPFSLIKGWTPSVDLLPPMSPLSFDPASEEVYAKSILCQYPASLPDAHKQHNQENGCRGDSDTLGALHDLANSPASFLSQSVSSSDRNSVTVLEKDTKMGTPKEKNEAISKKIPEFEVENSPLSDVAKNTESSAFGGSLPAKKSDPFQKEQDHLVEEVARAVLSDSPQLSEGKEIKLEELIDSLGSNPFLTRNQIPRTPENLITEIRSSWRKAIEMEENRTKEPIQMDAEHREVLPESLPVLHNQREFSMADFLLETTVSDFGQSHLTEEKVISDCECVPQKHVLTSHIDEPPTQNQSDLLNKKVICKQDLECLAFTKLSETSRMETFSPAVGNRIDVMGGSEEEFMKILDHLEVSCNKPSTNKTMLWNSFQISSGISSKSFKDNDFGILHETLPEEVGHLSFNSSSSSEANFKLEPNSPMHGGTLLEDVVGGRQTTPESDFNLQALRSRYEALKKSLSKKREESYLSNSQTPERHKPELSPTPQNVQTDDTLNFLDTCDLHTEHIKPSLRTSIGERKRSLSPLIKFSPVEQRLRTTIACSLGELPNLKEEDILNKSLDAKEPPSDLTR

SEQ ID NO: 28228 - protein, 606 aa, Homo sapiens
MSSASVTAFEKEHLWMYLQALGFEPGPATIACGKIVSHTHLGVNMFDKLNRDAFHIISYFLFQVLDQSLTKEVFKFCWPPFDQKSDTEFRKHCCEWIKRISGECGSSFPQVVGSLFLSPGGPKFIHLMYHFARFVAMKYIKSNSKNSSHHFVETFNIKPQDLHKCIARCHFARSRFLQILQRQDCVTQKYQENAQLSVKQVRNLRSECIGLENQIKKMEPYDDHSNMEEKIQKVRSLWASVNETLMFLEKEREVVSSVLSLVNQYALDGTNVAINIPRLLLDKIEKQMFQLHIGNVYEAGKLNLLTVIQLLNEVLKVMKYERCQADQARLTVDLHYLEKETKFQKERLSDLKHMRYRIKDDLTTIRHSVVEKQGEWHKKWKEFLGLSPFSLIKGWTPSVDLLPPMSPLSFDPASEEVYAKSILCQYPASLPDAHKQHNQENGCRGDSDTLGALHDLANSPASFLSQSVSSSDRNSVTVLEKDTKMGTPKEKNEAISKKIPEFEVENSPLSDVAKNTESSAFGGSLPAKKSDPFQKEQDHLVEEVARAVLSDSPQLSEGKEIKLEELIDSLGSNPFLTRNQIPRTPENLSKLIMLSVTFFFHRHNHC

SEQ ID NO: 28229 - protein, 920 aa, Homo sapiens
MSSASVTAFEKEHLWMYLQALGFEPGPATIACGKIVSHTHLGVNMFDKLNRDAFHIISYFLFQVLDQSLTKEVFKFCWPPFDQKSDTEFRKHCCEWIKRISGECGSSFPQVVGSLFLSPGGPKFIHLMYHFARFVAMKYIKSNSKNSSHHFVETFNIKPQDLHKCIARCHFARSRFLQILQRQDCVTQKYQENAQLSVKQVRNLRSECIGLENQIKKMEPYDDHSNMEEKIQKVRSLWASVNETLMFLEKEREVVSSVLSLVNQYALDGTNVAINIPRLLLDKIEKQMFQLHIGNVYEAGKLNLLTVIQLLNEVLKVMKYERCQADQARLTVDLHYLEKETKFQKERLSDLKHMSLIKGWTPSVDLLPPMSPLSFDPASEEVYAKSILCQYPASLPDAHKQHNQENGCRGDSDTLGALHDLANSPASFLSQSVSSSDRNSVTVLEKDTKMGTPKEKNEAISKKIPEFEVENSPLSDVAKNTESSAFGGSLPAKKSDPFQKEQDHLVEEVARAVLSDSPQLSEGKEIKLEELIDSLGSNPFLTRNQIPRTPENLITEIRSSWRKAIEMEENRTKEPIQMDAEHREVLPESLPVLHNQREFSMADFLLETTVSDFGQSHLTEEKVISDCECVPQKHVLTSHIDEPPTQNQSDLLNKKVICKQDLECLAFTKLSETSRMETFSPAVGNRIDVMGGSEEEFMKILDHLEVSCNKPSTNKTMLWNSFQISSGISSKSFKDNDFGILHETLPEEVGHLSFNSSSSSEANFKLEPNSPMHGGTLLEDVVGGRQTTPESDFNLQALRSRYEALKKSLSKKREESYLSNSQTPERHKPELSPTPQNVQTDDTLNFLDTCDLHTEHIKPSLRTSIGERKRSLSPLIKFSPVEQRLRTTIACSLGELPNLKEEDILNKSLDAKEPPSDLTR

SEQ ID NO: 28230 - protein, 512 aa, Homo sapiens
MATANGAVENGQPDRKPPALPRPIRNLEVKFTKIFINNEWHESKSGKKFATCNPSTREQICEVEEGDKPDVDKAVEAAQVAFQRGSPWRRLDALSRGRLLHQLADLVERDRATLAALETMDTGKPFLHAFFIDLEGCIRTLRYFAGWADKIQGKTIPTDDNVVCFTRHEPIGVCGAITPWNFPLLMLVWKLAPALCCGNTMVLKPAEQTPLTALYLGSLIKEAGFPPGVVNIVPGFGPTVGAAISSHPQINKIAFTGSTEVGKLVKEAASRSNLKRVTLELGGKNPCIVCADADLDLAVECAHQGVFFNQGQCCTAASRVFVEEQVYSEFVRRSVEYAKKRPVGDPFDVKTEQGPQIDQKQFDKILELIESGKKEGAKLECGGSAMEDKGLFIKPTVFSEVTDNMRIAKEEIFGPVQPILKFKSIEEVIKRANSTDYGLTAAVFTKNLDKALKLASALESGTVWINCYNALYAQAPFGGFKMSGNGRELGEYALAEYTEVKTVTIKLGDKNP

SEQ ID NO: 28231 - protein, 453 aa, Homo sapiens
MGVLGRVLLWLQLCALTQAVSKLWVPNTDFDVAANWSQNRTPCAGGAVEFPADKMVSVLVQEGHAVSDMLLPLDGELVLASGAGFGVSDVGSHLDCGAGEPAVFRDSDRFSWHDPHLWRSGDEAPGLFFVDAERVPCRHDDVFFPPSASFRVGLGPGASPVRVRSISALGRTFTRDEDLAVFLASRAGRLRFHGPGALSVGPEDCADPSGCVCGNAEAQPWICAALLQPLGGRCPQAACHSALRPQGQCCDLCGAVVLLTHGPAFDLERYRARILDTFLGLPQYHGLQVAVSKVPRSSRLREADTEIQVVLVENGPETGGAGRLARALLADVAENGEALGVLEATMRESGAHVWGSSAAGLAGGVAAAVLLALLVLLVAPPLLRRAGRLRWRRHEAAAPAGAPLGFRNPVFDVTASEELPLPRRLSLVPKAAADSTSHSYFVNPLFAGAEAEA

SEQ ID NO: 28232 - protein, 161 aa, Homo sapiens
MDQETVGNVVLLAIVTLISVVQNGFFAHKVEHESRTQNGRSFQRTGTLAFERVYTANQNCVDAYPTFLAVLWSAGLLCSQVPAAFAGLMYLFVRQKYFVGYLGERTQSTPGYIFGKRIILFLFLMSVAGIFNYYLIFFFGSDFENYIKTISTTISPLLLIP

SEQ ID NO: 28233 - protein, 518 aa, Homo sapiens
MTSSKIEMPGEVKADPAALMASLHLLPSPTPNLEIKYTKIFINNEWQNSESGRVFPVYNPATGEQVCEVQEADKADIDKAVQAARLAFSLGSVWRRMDASERGRLLDKLADLVERDRAVLATMESLNGGKPFLQAFYVDLQGVIKTFRYYAGWADKIHGMTIPVDGDYFTFTRHEPIGVCGQIIPWNFPLLMFAWKIAPALCCGNTVVIKPAEQTPLSALYMGALIKEAGFPPGVINILPGYGPTAGAAIASHIGIDKIAFTGSTEVGKLIQEAAGRSNLKRVTLELGGKSPNIIFADADLDYAVEQAHQGVFFNQGQCCTAGSRIFVEESIYEEFVRRSVERAKRRVVGSPFDPTTEQGPQIDKKQYNKILELIQSGVAEGAKLECGGKGLGRKGFFIEPTVFSNVTDDMRIAKEEIFGPVQEILRFKTMDEVIERANNSDFGLVAAVFTNDINKALTVSSAMQAGTVWINCYNALNAQSPFGGFKMSGNGREMGEFGLREYSEVKTVTVKIPQKNS

SEQ ID NO: 28234 - protein, 480 aa, Homo sapiens
MTSSKIEMPGEVKADPAALMASLHLLPSPTPNLEIKYTKIFINNEWQNSESGRVFPVYNPATGEQVCEVQEADKADIDKAVQAARLAFSLGSVWRRMDASERGRLLDKLADLVERDRAVLATMESLNGGKPFLQAFYVDLQGVIKTFRYYAGWADKIHGMTIPVDGDYFTFTRHEPIGVCGQIIPWNFPLLMFAWKIAPALCCGNTVVIKPAEQTPLSALYMGALIKEVGKLIQEAAGRSNLKRVTLELGGKSPNIIFADADLDYAVEQAHQGVFFNQGQCCTAGSRIFVEESIYEEFVRRSVERAKRRVVGSPFDPTTEQGPQIDKKQYNKILELIQSGVAEGAKLECGGKGLGRKGFFIEPTVFSNVTDDMRIAKEEIFGPVQEILRFKTMDEVIERANNSDFGLVAAVFTNDINKALTVSSAMQAGTVWINCYNALNAQSPFGGFKMSGNGREMGEFGLREYSEVKTVTVKIPQKNS

SEQ ID NO: 28235 - protein, 497 aa, Homo sapiens
MKNQCETVWLKSPIKLKLIFINNEWQNSESGRVFPVYNPATGEQVCEVQEADKADIDKAVQAARLAFSLGSVWRRMDASERGRLLDKLADLVERDRAVLATMESLNGGKPFLQAFYVDLQGVIKTFRYYAGWADKIHGMTIPVDGDYFTFTRHEPIGVCGQIIPWNFPLLMFAWKIAPALCCGNTVVIKPAEQTPLSALYMGALIKEAGFPPGVINILPGYGPTAGAAIASHIGIDKIAFTGSTEVGKLIQEAAGRSNLKRVTLELGGKSPNIIFADADLDYAVEQAHQGVFFNQGQCCTAGSRIFVEESIYEEFVRRSVERAKRRVVGSPFDPTTEQGPQIDKKQYNKILELIQSGVAEGAKLECGGKGLGRKGFFIEPTVFSNVTDDMRIAKEEIFGPVQEILRFKTMDEVIERANNSDFGLVAAVFTNDINKALTVSSAMQAGTVWINCYNALNAQSPFGGFKMSGNGREMGEFGLREYSEVKTVTVKIPQKNS

SEQ ID NO: 28236 - protein, 422 aa, Homo sapiens
MDASERGRLLDKLADLVERDRAVLATMESLNGGKPFLQAFYVDLQGVIKTFRYYAGWADKIHGMTIPVDGDYFTFTRHEPIGVCGQIIPWNFPLLMFAWKIAPALCCGNTVVIKPAEQTPLSALYMGALIKEAGFPPGVINILPGYGPTAGAAIASHIGIDKIAFTGSTEVGKLIQEAAGRSNLKRVTLELGGKSPNIIFADADLDYAVEQAHQGVFFNQGQCCTAGSRIFVEESIYEEFVRRSVERAKRRVVGSPFDPTTEQGPQIDKKQYNKILELIQSGVAEGAKLECGGKGLGRKGFFIEPTVFSNVTDDMRIAKEEIFGPVQEILRFKTMDEVIERANNSDFGLVAAVFTNDINKALTVSSAMQAGTVWINCYNALNAQSPFGGFKMSGNGREMGEFGLREYSEVKTVTVKIPQKNS

SEQ ID NO: 28237 - protein, 376 aa, Homo sapiens
MFNPHALDVPAVIFDNGSGLCKAGLSGEIGPRHVISSVLGHCKFNVPLARLNQKYFVGQEALYKYEALHLHYPIERGLVTGWDDMEKLWKHLFERELGVKPSQQPVLMTEPSLNPREIREKLAEMMFETFSVPGFYLSNHAVAALYASACVTGLVVDSGDGVTCTVPIFEGYSLPHAVTKLCMAGRDITEHLTRLLFASGFNFPCILNKAVVNNIKEKLCYIALEPEKELRKSRGEVLGAYRLPDGHVIHFGDELYQVPEVLFAPDQLGIHSPGLSKMVSSSIMKCDTDIQNKLYADIVLSGGTTLLPGLEERLMKEVEQLASKGTPIKITASPDRCFSAWIGASIMTSMSSFKQMWVTSADFKEYGTSVVQRRCF

SEQ ID NO: 28238 - protein, 316 aa, Homo sapiens
MATFVELSTKAKMPIVGLGTWRSLLGKVKEAVKVAIDAEYRHIDCAYFYENQHEVGEAIQEKIQEKAVMREDLFIVSKVWPTFFERPLVRKAFEKTLKDLKLSYLDVYLIHWPQGFKTGDDFFPKDDKGNMISGKGTFLDAWEAMEELVDEGLVKALGVSNFNHFQIERLLNKPGLKYKPVTNQVECHPYLTQEKLIQYCHSKGITVTAYSPLGSPDRPWAKPEDPSLLEDPKIKEIAAKHKKTTAQVLIRFHIQRNVTVIPKSMTPAHIVENIQVFDFKLSDEEMATILSFNRNWRAFDFKEFSHLEDFPFDAEY

SEQ ID NO: 28239 - protein, 344 aa, Homo sapiens
MVLQMEPQVNSTNNFHQGPLDQPVGPLTGLKSSLLKDTTSAGPLLRPYPASLLGKVKEAVKVAIDAEYRHIDCAYFYENQHEVGEAIQEKIQEKAVMREDLFIVSKVWPTFFERPLVRKAFEKTLKDLKLSYLDVYLIHWPQGFKTGDDFFPKDDKGNMISGKGTFLDAWEAMEELVDEGLVKALGVSNFNHFQIERLLNKPGLKYKPVTNQVECHPYLTQEKLIQYCHSKGITVTAYSPLGSPDRPWAKPEDPSLLEDPKIKEIAAKHKKTTAQVLIRFHIQRNVTVIPKSMTPAHIVENIQVFDFKLSDEEMATILSFNRNWRAFDFKEFSHLEDFPFDAEY

SEQ ID NO: 28240 - protein, 450 aa, Homo sapiens
MDHQDPYSVQATAAIAAAITFLILFTIFGNALVILAVLTSRSLRAPQNLFLVSLAAADILVATLIIPFSLANELLGYWYFRRTWCEVYLALDVLFCTSSIVHLCAISLDRYWAVSRALEYNSKRTPRRIKCIILTVWLIAAVISLPPLIYKGDQGPQPRGRPQCKLNQEAWYILASSIGSFFAPCLIMILVYLRIYLIAKRSNRRGPRAKGGPGQGESKQPRPDHGGALASAKLPALASVASAREVNGHSKSTGEKEEGETPEDTGTRALPPSWAALPNSGQGQKEGVCGASPEDEAEEEEEEEEEEEECEPQAVPVSPASACSPPLQQPQGSRVLATLRGQVLLGRGVGAIGGQWWRRRAQLTREKRFTFVLAVVIGVFVLCWFPFFFSYSLGAICPKHCKVPHGLFQFFFWIGYCNSSLNPVIYTIFNQDFRRAFRRILCRPWTQTAW

SEQ ID NO: 28241 - protein, 323 aa, Homo sapiens
MDSKHQCVKLNDGHFMPVLGFGTYAPPEVPRSKALEVTKLAIEAGFRHIDSAHLYNNEEQVGLAIRSKIADGSVKREDIFYTSKLWSTFHRPELVRPALENSLKKAQLDYVDLYLIHSPMSLKPGEELSPTDENGKVIFDIVDLCTTWEAMEKCKDAGLAKSIGVSNFNRRQLEMILNKPGLKYKPVCNQVECHPYFNRSKLLDFCKSKDIVLVAYSALGSQRDKRWVDPNSPVLLEDPVLCALAKKHKRTPALIALRYQLQRGVVVLAKSYNEQRIRQNVQVFEFQLTAEDMKAIDGLDRNLHYFNSDSFASHPNYPYSDEY

SEQ ID NO: 28242 - protein, 204 aa, Homo sapiens
MSLKPGEELSPTDENGKVIFDIVDLCTTWEAMEKCKDAGLAKSIGVSNFNRRQLEMILNKPGLKYKPVCNQVECHPYFNRSKLLDFCKSKDIVLVAYSALGSQRDKRWVDPNSPVLLEDPVLCALAKKHKRTPALIALRYQLQRGVVVLAKSYNEQRIRQNVQVFEFQLTAEDMKAIDGLDRNLHYFNSDSFASHPNYPYSDEY

SEQ ID NO: 28243 - protein, 394 aa, Homo sapiens
MAAASGYTDLREKLKSMTSRDNYKAGSREAAAAAAAAVAAAAAAAAAAEPYPVSGAKRKYQEDSDPERSDYEEQQLQKEEEARKVKSGIRQMRLFSQDECAKIEARIDEVVSRAEKGLYNEHTVDRAPLRNKYFFGEGYTYGAQLQKRGPGQERLYPPGDVDEIPEWVHQLVIQKLVEHRVIPEGFVNSAVINDYQPGGCIVSHVDPIHIFERPIVSVSFFSDSALCFGCKFQFKPIRVSEPVLSLPVRRGSVTVLSGYAADEITHCIRPQDIKERRAVIILRKTRLDAPRLETKSLSSSVLPPSYASDRLSGNNRDPALKPKRSHRKADPDAAHRPRILEMDKEENRRSVLLPTHRRRGSFSSENYWRKSYESSEDCSEAAGSPARKVKMRRH

SEQ ID NO: 28244 - protein, 467 aa, Homo sapiens
MAAASGYTDLREKLKSMTSRDNYKAGSREAAAAAAAAVAAAAAAAAAAEPYPVSGAKRKYQEDSDPERSDYEEQQLQKEEEARKVKSGIRQMRLFSQDECAKIEARIDEVVSRAEKGLYNEHTVDRAPLRNKYFFGEGYTYGAQLQKRGPGQERLYPPGDVDEIPEWVHQLVIQKLVEHRVIPEGFVNSAVINDYQPGGCIVSHVDPIHIFERPIVSVSFFSDSALCFGCKFQFKPIRVSEPVLSLPVRRGSVTVLSGYAADEITHCIRPQDIKERRAVIILRKTRLDAPRLETKSLSSSVLPPSYASDRLSGNNRDPALKPKRSHRKADPDAAHRPRILEMDKEENRRSVLLPTHRRRGSFSSENYWRKSYESSEDCSEAAGSPGNSGSSLRSGNSGSSLRSCPSFCFEGFVFVHWGVFVFCFLFFLILYIFPWFCCLLGLKNRIGQDLGSHILGIPPGWKGCWHQ

SEQ ID NO: 28245 - protein, 383 aa, Homo sapiens
MRRCWRPCPAGRGEGGGGRSPAAAAAVAAAAAAAAAAEPYPVSGAKRKYQEDSDPERSDYEEQQLQKEEEARKVKSGIRQMRLFSQDECAKIEARIDEVVSRAEKGLYNEHTVDRAPLRNKYFFGEGYTYGAQLQKRGPGQERLYPPGDVDEIPEWVHQLVIQKLVEHRVIPEGFVNSAVINDYQPGGCIVSHVDPIHIFERPIVSVSFFSDSALCFGCKFQFKPIRVSEPVLSLPVRRGSVTVLSGYAADEITHCIRPQDIKERRAVIILRKTRLDAPRLETKSLSSSVLPPSYASDRLSGNNRDPALKPKRSHRKADPDAAHRPRILEMDKEENRRSVLLPTHRRRGSFSSENYWRKSYESSEDCSEAAGSPARKVKMRRH

SEQ ID NO: 28246 - protein, 302 aa, Homo sapiens
MAAAAAETPEVLRECGCKGIRTCLICERQRGSDPPWELPPAKTYRFIYCSDTGWAVGTEESDFEGWAFPFPGVMLIEDFVTREEEAELVRLMDRDPWKLSQSGRRKQDYGPKVNFRKQKLKTEGFCGLPSFSREVVRRMGLYPGLEGFRPVEQCNLDYCPERGSAIDPHLDDAWLWGERLVSLNLLSPTVLSMCREAPGSLLLCSAPSAAPEALVDSVIAPSRSVLCQEVEVAIPLPARSLLVLTGAARHQWKHAIHRRHIEARRVCVTFRELSAEFGPGGRQQELGQELLRIALSFQGRPV

SEQ ID NO: 28247 - protein, 42 aa, Homo sapiens
MAAAAAETPEVLRECGCKGIRTCLICERQRGSDPPWELPPAE

SEQ ID NO: 28248 - protein, 326 aa, Homo sapiens
MDLSAASHRIPLSDGNSIPIIGLGTYSEPKSTPKGACATSVKVAIDTGYRHIDGAYIYQNEHEVGEAIREKIAEGKVRREDIFYCGKLWATNHVPEMVRPTLERTLRVLQLDYVDLYIIEVPMAFKPGDEIYPRDENGKWLYHKSNLCATWEAMEACKDAGLVKSLGVSNFNRRQLELILNKPGLKHKPVSNQVECHPYFTQPKLLKFCQQHDIVITAYSPLGTSRNPIWVNVSSPPLLKDALLNSLGKRYNKTAAQIVLRFNIQRGVVVIPKSFNLERIKENFQIFDFSLTEEEMKDIEALNKNVRFVELLMWRDHPEYPFHDEY

SEQ ID NO: 28249 - protein, 290 aa, Homo sapiens
MDLSAASHRIPLSDGNSIPIIGLGTYSEPKSTPKGACATSVKVAIDTGYRHIDGAYIYQNEHEVGEAIREKIAEGKVRREDIFYCGKLWATNHVPEMVRPTLERTLRVLQLDYVDLYIIEVPMAFKPGDEIYPRDENGKWLYHKSNLCATWEAMEACKDAGLVKSLGVSNFNRRQLELILNKPGLKHKPVSNQVECHPYFTQPKLLKFCQQHDIVITAYSPLGTSRNPIWVNVSSPPLLKDALLNSLGKRYNKTAAQIVLRFNIQRGVVVIPKSFNLERIKENFQVARSS

SEQ ID NO: 28250 - protein, 285 aa, Homo sapiens
MDLSAASHRIPLSDGNSIPIIGLGTYSEPKSTPKGACATSVKVAIDTGYRHIDGAYIYQNEHEVGEAIREKIAEGKVRREDIFYCGKLWATNHVPEMVRPTLERTLRVLQLDYVDLYIIEVPMAFKPGDEIYPRDENGKWLYHKSNLCATWEVECHPYFTQPKLLKFCQQHDIVITAYSPLGTSRNPIWVNVSSPPLLKDALLNSLGKRYNKTAAQIVLRFNIQRGVVVIPKSFNLERIKENFQIFDFSLTEEEMKDIEALNKNVRFVELLMWRDHPEYPFHDEY

SEQ ID NO: 28251 - protein, 313 aa, Homo sapiens
MTSCHIAEEHIQKVAIFGGTHGNELTGVFLVKHWLENGAEIQRTGLEVKPFITNPRAVKKCTRYIDCDLNRIFDLENLGKKMSEDLPYEVRRAQEINHLFGPKDSEDSYDIIFDLHNTTSNMGCTLILEDSRNNFLIQMFHYIKTSLAPLPCYVYLIEHPSLKYATTRSIAKYPVGIEVGPQPQGVLRADILDQMRKMIKHALDFIHHFNEGKEFPPCAIEVYKIIEKVDYPRDENGEIAAIIHPNLQDQDWKPLHPGDPMFLTLDGKTIPLGGDCTVYPVFVNEAAYYEKKEAFAKTTKLTLNAKSIRCCLH

SEQ ID NO: 28252 - protein, 790 aa, Homo sapiens
MRSVQIFLSQCRLLLLLVPTMLLKSLGEDVIFHPEGEFDSYEVTIPEKLSFRGEVQGVVSPVSYLLQLKGKKHVLHLWPKRLLLPRHLRVFSFTEHGELLEDHPYIPKDCNYMGSVKESLDSKATISTCMGGLRGVFNIDAKHYQIEPLKASPSFEHVVYLLKKEQFGNQVCGLSDDEIEWQMAPYENKARLRDFPGSYKHPKYLELILLFDQSRYRFVNNNLSQVIHDAILLTGIMDTYFQDVRMRIHLKALEVWTDFNKIRVGYPELAEVLGRFVIYKKSVLNARLSSDWAHLYLQRKYNDALAWSFGKVCSLEYAGSVSTLLDTNILAPATWSAHELGHAVGMSHDEQYCQCRGRLNCIMGSGRTGFSNCSYISFFKHISSGATCLNNIPGLGYVLKRCGNKIVEDNEECDCGSTEECQKDRCCQSNCKLQPGANCSIGLCCHDCRFRPSGYVCRQEGNECDLAEYCDGNSSSCPNDVYKQDGTPCKYEGRCFRKGCRSRYMQCQSIFGPDAMEAPSECYDAVNLIGDQFGNCEITGIRNFKKCESANSICGRLQCINVETIPDLPEHTTIISTHLQAENLMCWGTGYHLSMKPMGIPDLGMINDGTSCGEGRVCFKKNCVNSSVLQFDCLPEKCNTRGVCNNRKNCHCMYGWAPPFCEEVGYGGSIDSGPPGLLRGAIPSSIWVVSIIMFRLILLILSVVFVFFRQVIGNHLKPKQEKMPLSKAKTEQEESKTKTVQEESKTKTGQEESEAKTGQEESKAKTGQEESKANIESKRPKAKSVKKQKK

SEQ ID NO: 28253 - protein, 781 aa, Homo sapiens
MRSVQIFLSQCRLLLLLVPTMLLKSLGEDVIFHPEGEFDSYEVTIPEKLSFRGEVQGVVSPVSYLLQLKGKKHVLHLWPKRLLLPRHLRVFSFTEHGELLEDHPYIPKDCNYMGSVKESLDSKATISTCMGGLRGVFNIDAKHYQIEPLKASPSFEHVVYLLKKEQFGNQVCGLSDDEIEWQMAPYENKARLRDFPGSYKHPKYLELILLFDQSRYRFVNNNLSQVIHDAILLTGIMDTYFQDVRMRIHLKALEVWTDFNKIRVGYPELAEVLGRFVIYKKSVLNARLSSDWAHLYLQRKYNDALAWSFGKVCSLEYAGSVSTLLDTNILAPATWSAHELGHAVGMSHDEQYCQCRGRLNCIMGSGRTGFSNCSYISFFKHISSGATCLNNIPGLGYVLKRCGNKIVEDNEECDCGSTEECQKDRCCQSNCKLQPGANCSIGLCCHDCRFRPSGYVCRQEGNECDLAEYCDGNSSSCPNDVYKQDGTPCKYEGRCFRKGCRSRYMQCQSIFGPDAMEAPSECYDAVNLIGDQFGNCEITGIRNFKKCESANSICGRLQCINVETIPDLPEHTTIISTHLQAENLMCWGTGYHLSMKPMGIPDLGMINDGTSCGEGRVCFKKNCVNSSVLQFDCLPEKCNTRGVCNNRKNCHCMYGWAPPFCEEVGYGGSIDSGPPGLLRGAIPSSIWVVSIIMFRLILLILSVVFVFFRQVIGNHLKPKQEKMPLSKAKTEQEESKTKTVQEESKTKTGQEESEAKTGQEESKANIESKRPKAKSVKKQKK

SEQ ID NO: 28254 - protein, 470 aa, Homo sapiens
MLRGISQLPAVATMSWVLLPVLWLIVQTQAIAIKQTPELTLHEIVCPKKLHILHKREIKNNQTEKHGKEERYEPEVQYQMILNGEEIILSLQKTKHLLGPDYTETLYSPRGEEITTKPENMEHCYYKGNILNEKNSVASISTCDGLRGYFTHHHQRYQIKPLKSTDEKEHAVFTSNQEEQDPANHTCGVKSTDGKQGPIRISRSLKSPEKEDFLRAQKYIDLYLVLDNAFYKNYNENLTLIRSFVFDVMNLLNVIYNTIDVQVALVGMEIWSDGDKIKVVPSASTTFDNFLRWHSSNLGKKIHDHAQLLSGISFNNRRVGLAASNSLCSPSSVAVIEAKKKNNVALVGVMSHELGHVLGMPDVPFNTKCPSGSCVMNQYLSSKFPKDFSTSCRAHFERYLLSQKPKCLLQAPIPTNIMTTPVCGNHLLEVGEDCDCGSPKECTNLCCEALTCKLKPGTDCGGDAPNHTTE

SEQ ID NO: 28255 - protein, 391 aa, Homo sapiens
MILNGEEIILSLQKTKHLLGPDYTETLYSPRGEEITTKPENMEHCYYKGNILNEKNSVASISTCDGLRGYFTHHHQRYQIKPLKSTDEKEHAVFTSNQEEQDPANHTCGVKSTDGKQGPIRISRSLKSPEKEDFLRAQKYIDLYLVLDNAFYKNYNENLTLIRSFVFDVMNLLNVIYNTIDVQVALVGMEIWSDGDKIKVVPSASTTFDNFLRWHSSNLGKKIHDHAQLLSGISFNNRRVGLAASNSLCSPSSVAVIEAKKKNNVALVGVMSHELGHVLGMPDVPFNTKCPSGSCVMNQYLSSKFPKDFSTSCRAHFERYLLSQKPKCLLQAPIPTNIMTTPVCGNHLLEVGEDCDCGSPKECTNLCCEALTCKLKPGTDCGGDAPNHTTE

SEQ ID NO: 28256 - protein, 445 aa, Homo sapiens
MKNPEAQQDVSVSQGFRMLFYTMKPSETSFQTLEEVPDYVKKATPFFISLMLLELVVSWILKGKPPGRLDDALTSISAGVLSRLPSLFFRSIELTSYIYIWENYRLFNLPWDSPWTWYSAFLGVDFGYYWFHRMAHEVNIMWAGHQTHHSSEDYNLSTALRQSVLQIYTSWIFYSPLALFIPPSVYAVHLQFNLLYQFWIHTEVINNLGPLELILNTPSHHRVHHGRNRYCIDKNYAGVLIIWDKIFGTFEAENEKVVYGLTHPINTFEPIKVQFHHLFSIWTTFWATPGFFNKFSVIFKGPGWGPGKPRLGLSEEIPEVTGKEVPFSSSSSQLLKIYTVVQFALMLAFYEETFADTAALSQVTLLLRVCFIILTLTSIGFLLDQRPKAAIMETLRCLMFLMLYRFGHLKPLVPSLSSAFEIVFSICIAFWGVRSMKQLTSHPWK

SEQ ID NO: 28257 - protein, 129 aa, Homo sapiens
MRPLKPGAPLPALFLLALALSPHGAHGRPRGRRGARVTDKEPKPLLFLPAAGAGRTPSGSRSAEIFPRDSNLKDKFIKHFTGPVTFSPECSKHFHRLYYNTRECSTPAYYKRCARLLTRLAVSPLCSQT

SEQ ID NO: 28258 - protein, 111 aa, Homo sapiens
MRPLKPGAPLPALFLLALALSPHGAHGRPRGRRGARVTDKEPKPLLFLPAAGAGRTPSGSRSAEIFPRDSNLKDKFIKHFTGPVTFSPECSKHFHRLYYNTRECSTPAYIS

SEQ ID NO: 28259 - protein, 129 aa, Homo sapiens
MMTDLKQSHSVRLNDGPFMPVLGFGTYAPDHTPKSQAAEATKVAIDVGFRHIDSAYLYQNEEEVGQAIWEKIADGTVKREEIFYTIKLWATFFRAELVHPALERSLKKLGPDYVDLFIIHVPFAMKGSS

SEQ ID NO: 28260 - protein, 147 aa, Homo sapiens
MKQLFPPPPGTSLTHALGAWRGRERAQAATSLLASSASQFPTAVEDALMSVLTSHCAPSTPAATRAQQTGTRGHIHPACPCQQSCVGASRPPGRPQIFLPLTTALSLEAYAADTCSAADFLHNPSSWGKVWYLNEASFDLYSYHYFW

SEQ ID NO: 28261 - protein, 1163 aa, Homo sapiens
MNREDRNVLRMKERERRNQEIQQGEDAFPPSSPLFAEPYKVTSKEDKLSSRIQSMLGNYDEMKDFIGDRSIPKLVAIPKPTVPPSADEKSNPNFFEQRHGGSHQSSKWTPVGPAPSTSQSQKRSSGLQSGHSSQRTSAGSSSGTNSSGQRHDRESYNNSGSSSRKKGQHGSEHSKSRSSSPGKPQAVSSLNSSHSRSHGNDHHSKEHQRSKSPRDPDANWDSPSRVPFSSGQHSTQSFPPSLMSKSNSMLQKPTAYVRPMDGQESMEPKLSSEHYSSQSHGNSMTELKPSSKAHLTKLKIPSQPLDASASGDVSCVDEILKEMTHSWPPPLTAIHTPCKTEPSKFPFPTKESQQSNFGTGEQKRYNPSKTSNGHQSKSMLKDDLKLSSSEDSDGEQDCDKTMPRSTPGSNSEPSHHNSEGADNSRDDSSSHSGSESSSGSDSESESSSSDSEANEPSQSASPEPEPPPTNKWQLDNWLNKVNPHKVSPASSVDSNIPSSQGYKKEGREQGTGNSYTDTSGPKETSSATPGRDSKTIQKGSESGRGRQKSPAQSDSTTQRRTVGKKQPKKAEKAAAEEPRGGLKIESETPVDLASSMPSSRHKAATKGSRKPNIKKESKSSPRPTAEKKKYKSTSKSSQKSREIIETDTSSSDSDESESLPPSSQTPKYPESNRTPVKPSSVEEEDSFFRQRMFSPMEEKELLSPLSEPDDRYPLIVKIDLNLLTRIPGKPYKETEPPKGEKKNVPEKHTREAQKQASEKVSNKGKRKHKNEDDNRASESKKPKTEDKNSAGHKPSSNRESSKQSAAKEKDLLPSPAGPVPSKDPKTEHGSRKRTISQSSSLKSSSNSNKETSGSSKNSSSTSKQKKTEGKTSSSSKEVKEKAPSSSSNCPPSAPTLDSSKPRRTKLVFDDRNYSADHYLQEAKKLKHNADALSDRFEKAVYYLDAVVSFIECGNALEKNAQESKSPFPMYSETVDLIKYTMKLKNYLAPDATAADKRLTVLCLRCESLLYLRLFKLKKENALKYSKTLTEHLKNSYNNSQAPSPGLGSKAVGMPSPVSPKLSPGNSGNYSSGASSASASGSSVTIPQKIHQMAASYVQVTSNFLYATEIWDQAEQLSKEQKEFFAELDKVMGPLIFNASIMTDLVRYTRQGLHWLRQDAKLIS

SEQ ID NO: 28262 - protein, 900 aa, Homo sapiens
MNREDRNVLRMKERERRNQEIQQGEDAFPPSSPLFAEPYKVTSKEDKLSSRIQSMLGNYDEMKDFIGDRSIPKLVAIPKPTVPPSADEKSNPNFFEQRHGGSHQSSKWTPVGPAPSTSQSQKRSSGLQSGHSSQRTSAGSSSGTNSSGQRHDRESYNNSGSSSRKKGQHGSEHSKSRSSSPGKPQAVSSLNSSHSRSHGNDHHSKEHQRSKSPRDPDANWDSPSRVPFSSGQHSTQSFPPSLMSKSNSMLQKPTAYVRPMDGQESMEPKLSSEHYSSQSHGNSMTELKPSSKAHLTKLKIPSQPLDASASGDVSCVDEILKEMTHSWPPPLTAIHTPCKTEPSKFPFPTKESQQSNFGTGEQKRYNPSKTSNGHQSKSMLKDDLKLSSSEDSDGEQDCDKTMPRSTPGSNSEPSHHNSEGADNSRDDSSSHSGSESSSGSDSESESSSSDSEANEPSQSASPEPEPPPTNKWQLDNWLNKVNPHKVSPASSVDSNIPSSQGYKKEGREQGTGNSYTDTSGPKETSSATPGRDSKTIQKGSESGRGRQKSPAQSDSTTQRRTVGKKQPKKAEKAAAEEPRGGLKIESETPVDLASSMPSSRHKAATKGSRKPNIKKESKSSPRPTAEKKKYKSTSKSSQKSREIIETDTSSSDSDESESLPPSSQTPKYPESNRTPVKPSSVEEEDSFFRQRMFSPMEEKELLSPLSEPDDRYPLIVKIDLNLLTRIPGKPYKETEPPKGEKKNVPEKHTREAQKQASEKVSNKGKRKHKNEDDNRASESKKPKTEDKNSAGHKPSSNRESSKQSAAKEKDLLPSPAGPVPSKDPKTEHGSRKRTISQSSSLKSSSNSNKETSGSSKNSSSTSKQKKTEGKTSSSSKEVKVKCWGPGAFENHSTCHVTFPG

SEQ ID NO: 28263 - protein, 353 aa, Homo sapiens
MNREDRNVLRMKERERRNQEIQQGEDAFPPSSPLFAEPYKVTSKEDKLSSRIQSMLGNYDEMKDFIGDRSIPKLVAIPKPTVPPSADEKSNPNFFEQRHGGSHQSSKWTPVGPAPSTSQSQKRSSGLQSGHSSQRTSAGSSSGTNSSGQRHDRESYNNSGSSSRKKGQHGSEHSKSRSSSPGKPQAVSSLNSSHSRSHGNDHHSKEHQRSKSPRDPDANWDSPSRVPFSSGQHSTQSFPPSLMSKSNSMLQKPTAYVRPMDGQESMEPKLSSEHYSSQSHGNSMTELKPSSKAHLTKLKIPSQPLDASASGDVSCVDEILKEMTHSWPPPLTAIHTPCKTEPSKFPFPTKVSK

SEQ ID NO: 28264 - protein, 351 aa, Homo sapiens
MEPAPGLVEQPKCLEAGSPEPEPAPWQALPVLSEKQSGDVELVLAYAAPVLDKRQTSRLLKEVSALHPLPAQPHLKRVRPSRDAGSPHALEMLLCLAGPASGPRSLAELLPRPAVDPRGLGQPFLVPVPARPPLTRGQFEEARAHWPTSFHEDKQVTSALAGRLFSTQERAAMQSHMERAVWAARRAAARGLRAVGAVVVDPASDRVLATGHDCSCADNPLLHAVMVCVDLVARGQGRGTYDFRPFPACSFAPAAAPQAVRAGAVRKLDADEDGLPYLCTGYDLYVTREPCAMCAMALVHARILRVFYGAPSPDGALGTRFRIHARPDLNHRFQVFRGVLEEQCRWLDPDT

SEQ ID NO: 28265 - protein, 254 aa, Homo sapiens
MMCPLWRLLIFLGLLALPLAPHKQPWPGLAQAHRDNKSTLARIIAQGLIKHNAESRIQNIHFGDRLNASAQVAPGLVGWLISGRKHQQQQESSINITNIQLDCGGIQISFHKEWFSANISLEFDLELRPSFDNNIVKMCAHMSIVVEFWLEKDEFGRRDLVIGKCDAEPSSVHVAILTEAIPPKMNQFLYNLKENLQKVLPHMVESQVCPLIGEILGQLDVKLLKSLIEQEAAHEPTHHETSQPSACQAGESPS

SEQ ID NO: 28266 - protein, 218 aa, Homo sapiens
MMCPLWRLLIFLGLLALPLAPHKQPWPGLAQAHRDNKSTLARIIAQGLIKHNAESRIQNIHFGDRLNASAQVAPGLVGWLISGRKHQQQQESRSFDNNIVKMCAHMSIVVEFWLEKDEFGRRDLVIGKCDAEPSSVHVAILTEAIPPKMNQFLYNLKENLQKVLPHMVESQVCPLIGEILGQLDVKLLKSLIEQEAAHEPTHHETSQPSACQAGESPS

SEQ ID NO: 28267 - protein, 374 aa, Homo sapiens
MAKERRRAVLELLQRPGNARCADCGAPDPDWASYTLGVFICLSCSGIHRNIPQVSKVKSVRLDAWEEAQVEFMASHGNDAARARFESKVPSFYYRPTPSDCQLLREQWIRAKYERQEFIYPEKQEPYSAGYREGFLWKRGRDNGQFLSRKFVLTEREGALKYFNRNDAKEPKAVMKIEHLNATFQPAKIGHPHGLQVTYLKDNSTRNIFIYHEDGKEIVDWFNALRAARFHYLQVAFPGAGDADLVPKLSRNYLKEGYMEKTGPKQTEGFRKRWFTMDDRRLMYFKDPLDAFARGEVFIGSKESGYTVLHGFPPSTQGHHWPHGITIVTPDRKFLFACETESDQREWVAAFQKAVDRPMLPQEYAVEAHFKHKP

SEQ ID NO: 28268 - protein, 385 aa, Homo sapiens
MFQFVFSRVYCINPARRKWKEFEKMLGCAEEGHASLGRDPDWASYTLGVFICLSCSGIHRNIPQVSKVKSVRLDAWEEAQVEFMASHGNDAARARFESKVPSFYYRPTPSDCQLLREQWIRAKYERQEFIYPEKQEPYSAGYREGFLWKRGRDNGQFLSRKFVLTEREGALKYFNRNDAKEPKAVMKIEHLNATFQPAKIGHPHGLQVTYLKDNSTRNIFIYHEDGKEIVDWFNALRAARFHYLQVAFPGAGDADLVPKLSRNYLKEGYMEKTGPKQTEGFRKRWFTMDDRRLMYFKDPLDAFARGEVFIGSKESGYTVLHGFPPSTQGHHWPHGITIVTPDRKFLFACETESDQREWVAAFQKAVDRPMLPQEYAVEAHFKHKP

SEQ ID NO: 28269 - protein, 302 aa, Homo sapiens
MASHGNDAARARFESKVPSFYYRPTPSDCQLLREQWIRAKYERQEFIYPEKQEPYSAGYREGFLWKRGRDNGQFLSRKFVLTEREGALKYFNRNDAKEPKAVMKIEHLNATFQPAKIGHPHGLQVTYLKDNSTRNIFIYHEDGKEIVDWFNALRAARFHYLQVAFPGAGDADLVPKLSRNYLKEGYMEKTGPKQTEGFRKRWFTMDDRRLMYFKDPLDAFARGEVFIGSKESGYTVLHGFPPSTQGHHWPHGITIVTPDRKFLFACETESDQREWVAAFQKAVDRPMLPQEYAVEAHFKHKP

SEQ ID NO: 28270 - protein, 892 aa, Homo sapiens
MDHYDSQQTNDYMQPEEDWDRDLLLDPAWEKQQRKTFTAWCNSHLRKAGTQIENIEEDFRDGLKLMLLLEVISGERLAKPERGKMRVHKISNVNKALDFIASKGVKLVSIGAEEIVDGNVKMTLGMIWTIILRFAIQDISVEETSAKEGLLLWCQRKTAPYKNVNIQNFHISWKDGLGFCALIHRHRPELIDYGKLRKDDPLTNLNTAFDVAEKYLDIPKMLDAEDIVGTARPDEKAIMTYVSSFYHAFSGAQKAETAANRICKVLAVNQENEQLMEDYEKLASDLLEWIRRTIPWLENRVPENTMHAMQQKLEDFRDYRRLHKPPKVQEKCQLEINFNTLQTKLRLSNRPAFMPSEGRMVSDINNAWGCLEQVEKGYEEWLLNEIRRLERLDHLAEKFRQKASIHEAWTDGKEAMLRQKDYETATLSEIKALLKKHEAFESDLAAHQDRVEQIAAIAQELNELDYYDSPSVNARCQKICDQWDNLGALTQKRREALERTEKLLETIDQLYLEYAKRAAPFNNWMEGAMEDLQDTFIVHTIEEIQGLTTAHEQFKATLPDADKERLAILGIHNEVSKIVQTYHVNMAGTNPYTTITPQEINGKWDHVRQLVPRRDQALTEEHARQQHNERLRKQFGAQANVIGPWIQTKMEEIGRISIEMHGTLEDQLSHLRQYEKSIVNYKPKIDQLEGDHQLIQEALIFDNKHTNYTMEHIRVGWEQLLTTIARTINEVENQILTRDAKGISQEQMNEFRASFNHFDRDHSGTLGPEEFKACLISLGYDIGNDPQGEAEFARIMSIVDPNRLGVVTFQAFIDFMSRETADTDTADQVMASFKILAGDKNYITMDELRRELPPDQAEYCIARMAPYTGPDSVPGALDYMSFSTALYGESDL

SEQ ID NO: 28271 - protein, 887 aa, Homo sapiens
MDHYDSQQTNDYMQPEEDWDRDLLLDPAWEKQQRKTFTAWCNSHLRKAGTQIENIEEDFRDGLKLMLLLEVISGERLAKPERGKMRVHKISNVNKALDFIASKGVKLVSIGAEEIVDGNVKMTLGMIWTIILRFAIQDISVEETSAKEGLLLWCQRKTAPYKNVNIQNFHISWKDGLGFCALIHRHRPELIDYGKLRKDDPLTNLNTAFDVAEKYLDIPKMLDAEDIVGTARPDEKAIMTYVSSFYHAFSGAQKAETAANRICKVLAVNQENEQLMEDYEKLASDLLEWIRRTIPWLENRVPENTMHAMQQKLEDFRDYRRLHKPPKVQEKCQLEINFNTLQTKLRLSNRPAFMPSEGRMVSDINNAWGCLEQVEKGYEEWLLNEIRRLERLDHLAEKFRQKASIHEAWTDGKEAMLRQKDYETATLSEIKALLKKHEAFESDLAAHQDRVEQIAAIAQELNELDYYDSPSVNARCQKICDQWDNLGALTQKRREALERTEKLLETIDQLYLEYAKRAAPFNNWMEGAMEDLQDTFIVHTIEEIQGLTTAHEQFKATLPDADKERLAILGIHNEVSKIVQTYHVNMAGTNPYTTITPQEINGKWDHVRQLVPRRDQALTEEHARQQHNERLRKQFGAQANVIGPWIQTKMEEIGRISIEMHGTLEDQLSHLRQYEKSIVNYKPKIDQLEGDHQLIQEALIFDNKHTNYTMEHIRVGWEQLLTTIARTINEVENQILTRDAKGISQEQMNEFRASFNHFDRKKTGMMDTDDFRACLISMGYNMGEAEFARIMSIVDPNRLGVVTFQAFIDFMSRETADTDTADQVMASFKILAGDKNYITMDELRRELPPDQAEYCIARMAPYTGPDSVPGALDYMSFSTALYGESDL

SEQ ID NO: 28272 - protein, 914 aa, Homo sapiens
MDHYDSQQTNDYMQPEEDWDRDLLLDPAWEKQQRKTFTAWCNSHLRKAGTQIENIEEDFRDGLKLMLLLEVISGERLAKPERGKMRVHKISNVNKALDFIASKGVKLVSIGAEEIVDGNVKMTLGMIWTIILRFAIQDISVEETSAKEGLLLWCQRKTAPYKNVNIQNFHISWKDGLGFCALIHRHRPELIDYGKLRKDDPLTNLNTAFDVAEKYLDIPKMLDAEDIVGTARPDEKAIMTYVSSFYHAFSGAQKAETAANRICKVLAVNQENEQLMEDYEKLASDLLEWIRRTIPWLENRVPENTMHAMQQKLEDFRDYRRLHKPPKVQEKCQLEINFNTLQTKLRLSNRPAFMPSEGRMVSDINNAWGCLEQVEKGYEEWLLNEIRRLERLDHLAEKFRQKASIHEAWTDGKEAMLRQKDYETATLSEIKALLKKHEAFESDLAAHQDRVEQIAAIAQELNELDYYDSPSVNARCQKICDQWDNLGALTQKRREALERTEKLLETIDQLYLEYAKRAAPFNNWMEGAMEDLQDTFIVHTIEEIQGLTTAHEQFKATLPDADKERLAILGIHNEVSKIVQTYHVNMAGTNPYTTITPQEINGKWDHVRQLVPRRDQALTEEHARQQHNERLRKQFGAQANVIGPWIQTKMEEIGRISIEMHGTLEDQLSHLRQYEKSIVNYKPKIDQLEGDHQLIQEALIFDNKHTNYTMEHIRVGWEQLLTTIARTINEVENQILTRDAKGISQEQMNEFRASFNHFDRDHSGTLGPEEFKACLISLGYDIGNDPQKKTGMMDTDDFRACLISMGYNMGEAEFARIMSIVDPNRLGVVTFQAFIDFMSRETADTDTADQVMASFKILAGDKNYITMDELRRELPPDQAEYCIARMAPYTGPDSVPGALDYMSFSTALYGESDL

SEQ ID NO: 28273 - protein, 930 aa, Homo sapiens
MDHYDSQQTNDYMQPEEDWDRDLLLDPAWEKQQRKTFTAWCNSHLRKAGTQIENIEEDFRDGLKLMLLLEVISGERLAKPERGKMRVHKISNVNKALDFIASKGVKLVSIGAEEIVDGNVKMTLGMIWTIILRFAIQDISVEETSAKEGLLLWCQRKTAPYKNVNIQNFHISWKDGLGFCALIHRHRPELIDYGKLRKDDPLTNLNTAFDVAEKYLDIPKMLDAEDIVGTARPDEKAIMTYVSSFYHAFSGAQKAETAANRICKVLAVNQENEQLMEDYEKLASDLLEWIRRTIPWLENRVPENTMHAMQQKLEDFRDYRRLHKPPKVQEKCQLEINFNTLQTKLRLSNRPAFMPSEGRMVSDINNAWGCLEQVEKGYEEWLLNEIRRLERLDHLAEKFRQKASIHEAWTDGKEAMLRQKDYETATLSEIKALLKKHEAFESDLAAHQDRVEQIAAIAQELNELDYYDSPSVNARCQKICDQWDNLGALTQKRREALERTEKLLETIDQLYLEYAKRAAPFNNWMEGAMEDLQDTFIVHTIEEIQGLTTAHEQFKATLPDADKERLAILGIHNEVSKIVQTYHVNMAGTNPYTTITPQEINGKWDHVRQLVPRRDQALTEEHARQQHNERLRKQFGAQANVIGPWIQTKMEEIGRISIEMHGTLEDQLSHLRQYEKSIVNYKPKIDQLEGDHQLIQEALIFDNKHTNYTMEHIRVGWEQLLTTIARTINEVENQILTRDAKGISQEQMNEFRASFNHFDRKKTGMMDTDDFRACLISMGYNMGEAEFARIMSIVDPNRLGVVTFQAFIDFMSRETADTDTADQVMASFKILAGDKLQEGGKMQTAHAAFTPPGFAAVSGRAALRLLDFAAFLTTLSSQNYITMDELRRELPPDQAEYCIARMAPYTGPDSVPGALDYMSFSTALYGESDL

SEQ ID NO: 28274 - protein, 1144 aa, Homo sapiens
MPRNQGFSEPEYSAEYSAEYSVSLPSDPDRGVGRTHEISVRNSGSCLCLPRFMRLTFVPESLENLYQTYFKRQRHETLLVLVVFAALFDCYVVVMCAVVFSSDKLASLAVAGIGLVLDIILFVLCKKGLLPDRVTRRVLPYVLWLLITAQIFSYLGLNFARAHAASDTVGWQVFFVFSFFITLPLSLSPIVIISVVSCVVHTLVLGVTVAQQQQEELKGMQLLREILANVFLYLCAIAVGIMSYYMADRKHRKAFLEARQSLEVKMNLEEQSQQQENLMLSILPKHVADEMLKDMKKDESQKDQQQFNTMYMYRHENVSILFADIVGFTQLSSACSAQELVKLLNELFARFDKLAAKYHQLRIKILGDCYYCICGLPDYREDHAVCSILMGLAMVEAISYVREKTKTGVDMRVGVHTGTVLGGVLGQKRWQYDVWSTDVTVANKMEAGGIPGRVHISQSTMDCLKGEFDVEPGDGGSRCDYLEEKGIETYLIIASKPEVKKTATQNGLNGSALPNGAPASSKSSSPALIETKEPNGSAHSSGSTSEKPEEQDAQADNPSFPNPRRRLRLQDLADRVVDASEDEHELNQLLNEALLERESAQVVKKRNTFLLSMRFMDPEMETRYSVEKEKQSGAAFSCSCVVLLCTALVEILIDPWLMTNYVTFMVGEILLLILTICSLAAIFPRAFPKKLVAFSTWIDRTRWARNTWAMLAIFILVMANVVDMLSCLQYYTGPSNATAGMETEGSCLENPKYYNYVAVLSLIATIMLVQVSHMVKLTLMLLVAGAVATINLYAWRPVFDEYDHKRFREHDLPMVALEQMQGFNPGLNGTDRLPLVPSKYSMTVMVFLMMLSFYYFSRHVEKLARTLFLWKIEVHDQKERVYEMRRWNEALVTNMLPEHVARHFLGSKKRDEELYSQTYDEIGVMFASLPNFADFYTEESINNGGIECLRFLNEIISDFDSLLDNPKFRVITKIKTIGSTYMAASGVTPDVNTNGFASSNKEDKSERERWQHLADLADFALAMKDTLTNINNQSFNNFMLRIGMNKGGVLAGVIGARKPHYDIWGNTVNVASRMESTGVMGNIQVVEETQVILREYGFRFVRRGPIFVKGKGELLTFFLKGRDKLATFPNGPSVTLPHQVVDNS

SEQ ID NO: 28275 - protein, 731 aa, Homo sapiens
MGLAMVEAISYVREKTKTGVDMRVGVHTGTVLGGVLGQKRWQYDVWSTDVTVANKMEAGGIPGGSKIEERLYSCVVAPTLRLRWERVHISQSTMDCLKGEFDVEPGDGGSRCDYLEEKGIETYLIIASKPEVKKTATQNGLNGSALPNGAPASSKSSSPALIETKEPNGSAHSSGSTSEKPEEQDAQADNPSFPNPRRRLRLQDLADRVVDASEDEHELNQLLNEALLERESAQVVKKRNTFLLSMRFMDPEMETRYSVEKEKQSGAAFSCSCVVLLCTALVEILIDPWLMTNYVTFMVGEILLLILTICSLAAIFPRAFPKKLVAFSTWIDRTRWARNTWAMLAIFILVMANVVDMVSHMVKLTLMLLVAGAVATINLYAWRPVFDEYDHKRFREHDLPMVALEQMQGFNPGLNGTDRLPLVPSKYSMTVMVFLMMLSFYYFSRHVEKLARTLFLWKIEVHDQKERVYEMRRWNEALVTNMLPEHVARHFLGSKKRDEELYSQTYDEIGVMFASLPNFADFYTEESINNGGIECLRFLNEIISDFDSLLDNPKFRVITKIKTIGSTYMAASGVTPDVNTNGFASSNKEDKSERERWQHLADLADFALAMKDTLTNINNQSFNNFMLRIGMNKGGVLAGVIGARKPHYDIWGNTVNVASRMESTGVMGNIQVVEETQVILREYGFRFVRRGPIFVKGKGELLTFFLKGRDKLATFPNGPSVTLPHQVVDNS

SEQ ID NO: 28276 - protein, 480 aa, Homo sapiens
MLGRFQPFSLVRSFRLGFEACCYPNQKCATQTIRPPDSRCLVQAVSQNFNFAKDVLDQWSQLEKDGLRGPYPALWKVSAKGEEDKWSFERMTQLSKKAASILSDTCALSHGDRLMIILPPTPEAYWICLACVRLGITFVPGSPQLTAKKIRYQLRMSKAQCIVANEAMAPVVNSAVSDCPTLKTKLLVSDKSYDGWLDFKKLIQVAPPKQTYMRTKSQDPMAIFFTKGTTGAPKMVEYSQYGLGMGFSQASRRWMDLQPTDVLWSLGDAFGGSLSLSAVLGTWFQGACVFLCHMPTFCPETVLNVLSRFPITTLSANPEMYQELLQHKCFTSYRFKSLKQCVAAGGPISPGVIEDWKRITKLDIYEGYGQTETGLLCATSKTIKLKPSSLGKPLPPYIVQIVDENSNLLPPGEEGNIAIRIKLNQPASLYCPHMVSWEEYASARGHMLYLTGDRGIMDEDGYFWWSGRVDDVANALGQRL

SEQ ID NO: 28277 - protein, 186 aa, Homo sapiens
MSKAQCIVANEAMAPVVNSAVSDCPTLKTKLLVSDKSYDGWLDFKKLIQVAPPKQTYMRTKSQDPMAIFFTKGTTGAPKMVEYSQYGLGMGFSQASRRWMDLQPTDVLWSLGDAFGGSLSLSAVLGTWFQGACVFLCHMPTFCPETVLNVLSRFPITTLSANPEMYQELLQHKCFTRVYSVPLPKQ

SEQ ID NO: 28278 - protein, 506 aa, Homo sapiens
MLGRFQPFSLVRSFRLGFEACCYPNQKCATQTIRPPDSRCLVQAVSQNFNFAKDVLDQWSQLEKDNGLQLHPCCCKRQDFILFHGVIFHVDGLRGPYPALWKVSAKGEEDKWSFERMTQLSKKAASILSDTCALSHGDRLMIILPPTPEAYWICLACVRLGITFVPGSPQLTAKKIRYQLRMSKAQCIVANEAMAPVVNSAVSDCPTLKTKLLVSDKSYDGWLDFKKLIQVAPPKQTYMRTKSQDPMAIFFTKGTTGAPKMVEYSQYGLGMGFSQASRRWMDLQPTDVLWSLGDAFGGSLSLSAVLGTWFQGACVFLCHMPTFCPETVLNVLSRFPITTLSANPEMYQELLQHKCFTSYRFKSLKQCVAAGGPISPGVIEDWKRITKLDIYEGYGQTETGLLCATSKTIKLKPSSLGKPLPPYIVQIVDENSNLLPPGEEGNIAIRIKLNQPASLYCPHMVSWEEYASARGHMLYLTGDRGIMDEDGYFWWSGRVDDVANALGQRL

SEQ ID NO: 28279 - protein, 894 aa, Homo sapiens
MSRRKQGNPQHLSQRELITPEADHVEAAILEEDEGLEIEEPSGLGLMVGGPDPDLLTCGQCQMNFPLGDILVFIEHKRKQCGGSLGACYDKALDKDSPPPSSRSELRKVSEPVEIGIQVTPDEDDHLLSPTKGICPKQENIAGPCRPAQLPAVAPIAASSHPHSSVITSPLRALGALPPCLPLPCCSARPVSGDGTQGEGQTEAPFGCQCQLSGKDEPSSYICTTCKQPFNSAWFLLQHAQNTHGFRIYLEPGPASSSLTPRLTIPPPLGPEAVAQSPLMNFLGDSNPFNLLRMTGPILRDHPGFGEGRLPGTPPLFSPPPRHHLDPHRLSAEEMGLVAQHPSAFDRVMRLNPMAIDSPAMDFSRRLRELAGNSSTPPPVSPGRGNPMHRLLNPFQPSPKSPFLSTPPLPPMPPGGTPPPQPPAKSKSCEFCGKTFKFQSNLIVHRRSHTGEKPYKCQLCDHACSQASKLKRHMKTHMHKAGSLAGRSDDGLSAASSPEPGTSELAGEGLKAADGDFRHHESDPSLGHEPEEEDEEEEEEEEELLLENESRPESSFSMDSELSRNRENGGGGVPGVPGAGGGAAKALADEKALVLGKVMENVGLGALPQYGELLADKQKRGAFLKRAAGGGDAGDDDDAGGCGDAGAGGAVNGRGGGFAPGTEPFPGLFPRKPAPLPSPGLNSAAKRIKVEKDLELPPAALIPSENVYSQWLVGYAASRHFMKDPFLGFTDARQSPFATSSEHSSENGSLRFSTPPGDLLDGGLSGRSGTASGGSTPHLGGPGPGRPSSKEGRRSDTCEYCGKVFKNCSNLTVHRRSHTGERPYKCELCNYACAQSSKLTRHMKTHGQIGKEVYRCDICQMPFSVYSTLEKHMKKWHGEHLLTNDVKIEQAERS

SEQ ID NO: 28280 - protein, 823 aa, Homo sapiens
MSRRKQGNPQHLSQRELITPEADHVEAAILEEDEGLEIEEPSGLGLMVGGPDPDLLTCGQCQMNFPLGDILVFIEHKRKQCGGSLGACYDKALDKDSPPPSSRSELRKVSEPVEIGIQVTPDEDDHLLSPTKGICPKQENIAGKDEPSSYICTTCKQPFNSAWFLLQHAQNTHGFRIYLEPGPASSSLTPRLTIPPPLGPEAVAQSPLMNFLGDSNPFNLLRMTGPILRDHPGFGEGRLPGTPPLFSPPPRHHLDPHRLSAEEMGLVAQHPSAFDRVMRLNPMAIDSPAMDFSRRLRELAGNSSTPPPVSPGRGNPMHRLLNPFQPSPKSPFLSTPPLPPMPPGGTPPPQPPAKSKSCEFCGKTFKFQSNLIVHRRSHTGEKPYKCQLCDHACSQASKLKRHMKTHMHKAGSLAGRSDDGLSAASSPEPGTSELAGEGLKAADGDFRHHESDPSLGHEPEEEDEEEEEEEEELLLENESRPESSFSMDSELSRNRENGGGGVPGVPGAGGGAAKALADEKALVLGKVMENVGLGALPQYGELLADKQKRGAFLKRAAGGGDAGDDDDAGGCGDAGAGGAVNGRGGGFAPGTEPFPGLFPRKPAPLPSPGLNSAAKRIKVEKDLELPPAALIPSENVYSQWLVGYAASRHFMKDPFLGFTDARQSPFATSSEHSSENGSLRFSTPPGDLLDGGLSGRSGTASGGSTPHLGGPGPGRPSSKEGRRSDTCEYCGKVFKNCSNLTVHRRSHTGERPYKCELCNYACAQSSKLTRHMKTHGQIGKEVYRCDICQMPFSVYSTLEKHMKKWHGEHLLTNDVKIEQAERS

SEQ ID NO: 28281 - protein, 1346 aa, Homo sapiens
MKSPRRTTLCLMFIVIYSSKAALNWNYESTIHPLSLHEHEPAGEEALRQKRAVATKSPTAEEYTVNIEISFENASFLDPIKAYLNSLSFPIHGNNTDQITDILSINVTTVCRPAGNEIWCSCETGYGWPRERCLHNLICQERDVFLPGHHCSCLKELPPNGPFCLLQEDVTLNMRVRLNVGFQEDLMNTSSALYRSYKTDLETAFRKGYGILPGFKGVTVTGFKSGSVVVTYEVKTTPPSLELIHKANEQVVQSLNQTYKMDYNSFQAVTINESNFFVTPEIIFEGDTVSLVCEKEVLSSNVSWRYEEQQLEIQNSSRFSIYTALFNNMTSVSKLTIHNITPGDAGEYVCKLILDIFEYECKKKIDVMPIQILANEEMKVMCDNNPVSLNCCSQGNVNWSKVEWKQEGKINIPGTPETDIDSSCSRYTLKADGTQCPSGSSGTTVIYTCEFISAYGARGSANIKVTFISVANLTITPDPISVSEGQNFSIKCISDVSNYDEVYWNTSAGIKIYQRFYTTRRYLDGAESVLTVKTSTREWNGTYHCIFRYKNSYSIATKDVIVHPLPLKLNIMVDPLEATVSCSGSHHIKCCIEEDGDYKVTFHTGSSSLPAAKEVNKKQVCYKHNFNASSVSWCSKTVDVCCHFTNAANNSVWSPSMKLNLVPGENITCQDPVIGVGEPGKVIQKLCRFSNVPSSPESPIGGTITYKCVGSQWEEKRNDCISAPINSLLQMAKALIKSPSQDEMLPTYLKDLSISIDKAEHEISSSPGSLGAIINILDLLSTVPTQVNSEMMTHVLSTVNVILGKPVLNTWKVLQQQWTNQSSQLLHSVERFSQALQSGDSPPLSFSQTNVQMSSMVIKSSHPETYQQRFVFPYFDLWGNVVIDKSYLENLQSDSSIVTMAFPTLQAILAQDIQENNFAESLVMTTTVSHNTTMPFRISMTFKNNSPSGGETKCVFWNFRLANNTGGWDSSGCYVEEGDGDNVTCICDHLTSFSILMSPDSPDPSSLLGILLDIISYVGVGFSILSLAACLVVEAVVWKSVTKNRTSYMRHTCIVNIAASLLVANTWFIVVAAIQDNRYILCKTACVAATFFIHFFYLSVFFWMLTLGLMLFYRLVFILHETSRSTQKAIAFCLGYGCPLAISVITLGATQPREVYTRKNVCWLNWEDTKALLAFAIPALIIVVVNITITIVVITKILRPSIGDKPCKQEKSSLFQISKSIGVLTPLLGLTWGFGLTTVFPGTNLVFHIIFAILNVFQGLFILLFGCLWDLKVQEALLNKFSLSRWSSQHSKSTSLGSSTPVFSMSSPISRRFNNLFGKTGTYNVSTPEATSSSLENSSSASSLLN

SEQ ID NO: 28282 - protein, 1301 aa, Homo sapiens
MKSPRRTTLCLMFIVIYSSKAALNWNYESTIHPLSLHEHEPAGEEALRQKRAVATKSPTAEEYTVNIEISFENASFLDPIKAYLNSLSFPIHGNNTDQITDILSINVTTVCRPAGNEIWCSCETGYGWPRERCLHNLICQERDVFLPGHHCSCLKELPPNGPFCLLQEDVTLNMRVRLNVGFQEDLMNTSSALYRSYKTDLETAFRKGYGILPGFKGVTVTGFKSGSVVVTYEVKTTPPSLELIHKANEQVVQSLNQTYKMDYNSFQAVTINESNFFVTPEIIFEGDTVSLVCEKEVLSSNVSWRYEEQQLEIQNSSRFSIYTALFNNMTSVSKLTIHNITPGDAGEYVCKLILDIFEYECKKKIDVMPIQILANEEMKVMCDNNPVSLNCCSQGNVNWSKVEWKQEGKINIPGTPETDIDSSCSRYTLKADGTQCPSGSSGTTVIYTCEFISAYGARGSANIKVTFISVANLTITPDPISVSEGQNFSIKCISDVSNYDEVYWNTSAGIKIYQRFYTTRRYLDGAESVLTVKTSTREWNGTYHCIFRYKNSYSIATKDVIVHPLPLKLNIMVDPLEATVSCSGSHHIKCCIEEDGDYKVTFHTGSSSLPAAKEVNKKQVCYKHNFNASSVSWCSKTVDVCCHFTNAANNSVWSPSMKLNLVPGENITCQDPVIGVGEPGKVIQKLCRFSNVPSSPESPIGGTITYKCVGSQWEEKRNDCISAPINSLLQMAKALIKSPSQDEMLPTYLKDLSISIDKAEHEISSSPGSLGAIINILDLLSTVPTQVNSEMMTHVLSTVNVILGKPVLNTWKVLQQQWTNQSSQLLHSVERFSQALQSGDSPPLSFSQTNVQMSSMVIKSSHPETYQQRFVFPYFDLWGNVVIDKSYLENLQSDSSIVTMAFPTLQAILAQDIQENNFAESLVMTTTVSHNTTMPFRISMTFKNNSPSGGETKCVFWNFRLANNTGGWDSSGCYVEEGDGDNVTCICDHLTSFSILMSPDSPDPSSLLGILLDIISYVGVGFSILSLAACLVVEAVVWKSVTKNRTSYMRHTCIVNIAASLLVANTWFIVVAAIQDNRYILCKTACVAATFFIHFFYLSVFFWMLTLGLMLFYRLVFILHETSRSTQKAIAFCLGYGCPLAISVITLGATQPREVYTRKNVCWLNWEDTKALLAFAIPALIIVVVNITITIVVITKILRPSIGDKPCKQEKSSLFQISKSIGVLTPLLGLTWGFGLTTVFPGTNLVFHIIFAILNVFQGLFILLFGCLWDLKSTSLGSSTPVFSMSSPISRRFNNLFGKTG

SEQ ID NO: 28283 - protein, 1204 aa, Homo sapiens
MKSPRRTTLCLMFIVIYSSKAALNWNYESTIHPLSLHEHEPAGEEALRQKRAVATKSPTAEEYTVNIEISFENASFLDPIKAYLNSLSFPIHGNNTDQITDILSINVTTVCRPAGNEIWCSCETGYGWPRERCLHNLICQERDVFLPGHHCSCLKELPPNGPFCLLQEDVTLNMRVRLNVGFQEDLMNTSSALYRSYKTDLETAFRKGYGILPGFKGVTVTGFKSGSVVVTYEVKTTPPSLELIHKANEQVVQSLNQTYKMDYNSFQAVTIRTPETDIDSSCSRYTLKADGTQCPSGSSGTTVIYTCEFISAYGARGSANIKVTFISVANLTITPDPISVSEGQNFSIKCISDVSNYDEVYWNTSAGIKIYQRFYTTRRYLDGAESVLTVKTSTREWNGTYHCIFRYKNSYSIATKDVIVHPLPLKLNIMVDPLEATVSCSGSHHIKCCIEEDGDYKVTFHTGSSSLPAAKEVNKKQVCYKHNFNASSVSWCSKTVDVCCHFTNAANNSVWSPSMKLNLVPGENITCQDPVIGVGEPGKVIQKLCRFSNVPSSPESPIGGTITYKCVGSQWEEKRNDCISAPINSLLQMAKALIKSPSQDEMLPTYLKDLSISIDKAEHEISSSPGSLGAIINILDLLSTVPTQVNSEMMTHVLSTVNVILGKPVLNTWKVLQQQWTNQSSQLLHSVERFSQALQSGDSPPLSFSQTNVQMSSMVIKSSHPETYQQRFVFPYFDLWGNVVIDKSYLENLQSDSSIVTMAFPTLQAILAQDIQENNFAESLVMTTTVSHNTTMPFRISMTFKNNSPSGGETKCVFWNFRLANNTGGWDSSGCYVEEGDGDNVTCICDHLTSFSILMSPDSPDPSSLLGILLDIISYVGVGFSILSLAACLVVEAVVWKSVTKNRTSYMRHTCIVNIAASLLVANTWFIVVAAIQDNRYILCKTACVAATFFIHFFYLSVFFWMLTLGLMLFYRLVFILHETSRSTQKAIAFCLGYGCPLAISVITLGATQPREVYTRKNVCWLNWEDTKALLAFAIPALIIVVVNITITIVVITKILRPSIGDKPCKQEKSSLFQISKSIGVLTPLLGLTWGFGLTTVFPGTNLVFHIIFAILNVFQGLFILLFGCLWDLKVQEALLNKFSLSRWSSQHSKSTSLGSSTPVFSMSSPISRRFNNLFGKTGTYNVSTPEATSSSLENSSSASSLLN

SEQ ID NO: 28284 - protein, 464 aa, Homo sapiens
MAASCLVLLALCLLLPLLLLGGWKRWRRGRAARHVVAVVLGDVGRSPRMQYHALSLAMHGFSVTLLGFCNSKPHDELLQNNRIQIVGLTELQSLAVGPRVFQYGVKVVLQAMYLLWKLMWREPGAYIFLQNPPGLPSIAVCWFVGCLCGSKLVIDWHNYGYSIMGLVHGPNHPLVLLAKWYEKFFGRLSHLNLCVTNAMREDLADNWHIRAVTVYDKPASFFKETPLDLQHRLFMKLGSMHSPFRARSEPEDPVTERSAFTERDAGSGLVTRLRERPALLVSSTSWTEDEDFSILLAALEKFEQLTLDGHNLPSLVCVITGKGPLREYYSRLIHQKHFQHIQVCTPWLEAEDYPLLLGSADLGVCLHTSSSGLDLPMKVVDMFGCCLPVCAVNFKCLHELVKHEENGLVFEDSEELAAQLQMLFSNFPDPAGKLNQFRKNLRESQQLRWDESWVQTVLPLVMDT

SEQ ID NO: 28285 - protein, 353 aa, Homo sapiens
MYLLWKLMWREPGAYIFLQNPPGLPSIAVCWFVGCLCGSKLVIDWHNYGYSIMGLVHGPNHPLVLLAKWYEKFFGRLSHLNLCVTNAMREDLADNWHIRAVTVYDKPASFFKETPLDLQHRLFMKLGSMHSPFRARSEPEDPVTERSAFTERDAGSGLVTRLRERPALLVSSTSWTEDEDFSILLAALEKFEQLTLDGHNLPSLVCVITGKGPLREYYSRLIHQKHFQHIQVCTPWLEAEDYPLLLGSADLGVCLHTSSSGLDLPMKVVDMFGCCLPVCAVNFKCLHELVKHEENGLVFEDSEELAAQLQMLFSNFPDPAGKLNQFRKNLRESQQLRWDESWVQTVLPLVMDT

SEQ ID NO: 28286 - protein, 695 aa, Homo sapiens
MKMKSQATMICCLVFFLSTECSHYRSKIHLKAGDKLQSPEGKPKTGRIQEKCEGPCISSSNCSQPCAKDFHGEIGFTCNQKKWQKSAETCTSLSVEKLFKDSTGASRLSVAAPSIPLHILDFRAPETIESVAQGIRKNCPFDYACITDMVKSSETTSGNIAFIVELLKNISTDLSDNVTREKMKSYSEVANHILDTAAISNWAFIPNKNASSDLLQSVNLFARQLHIHNNSENIVNELFIQTKGFHINHNTSEKSLNFSMSMNNTTEDILGMVQIPRQELRKLWPNASQAISIAFPTLGAILREAHLQNVSLPRQVNGLVLSVVLPERLQEIILTFEKINKTRNARAQCVGWHSKKRRWDEKACQMMLDIRNEVKCRCNYTSVVMSFSILMSSKSMTDKVLDYITCIGLSVSILSLVLCLIIEATVWSRVVVTEISYMRHVCIVNIAVSLLTANVWFIIGSHFNIKAQDYNMCVAVTFFSHFFYLSLFFWMLFKALLIIYGILVIFRRMMKSRMMVIGFAIGYGCPLIIAVTTVAITEPEKGYMRPEACWLNWDNTKALLAFAIPAFVIVAVNLIVVLVVAVNTQRPSIGSSKSQDVVIIMRISKNVAILTPLLGLTWGFGIATLIEGTSLTFHIIFALLNAFQGFFILLFGTIMDHKIRDALRMRMSSLKGKSRAAENASLGPTNGSKLMNRQG

SEQ ID NO: 28287 - protein, 438 aa, Homo sapiens
MAAGLRKRGRSGSAAQAEGLCKQWLQRAWQERRLLLREPRYTLLVAACLCLAEVGITFWVIHRVAYTEIDWKAYMAEVEGVINGTYDYTQLQGDTGPLVYPAGFVYIFMGLYYATSRGTDIRMAQNIFAVLYLATLLLVFLIYHQTCKVPPFVFFFMCCASYRVHSIFVLRLFNDPVAMVLLFLSINLLLAQRWGWGCCFFSLAVSVKMNVLLFAPGLLFLLLTQFGFRGALPKLGICAGLQVVLGLPFLLENPSGYLSRSFDLGRQFLFHWTVNWRFLPEALFLHRAFHLALLTAHLTLLLLFALCRWHRTGESILSLLRDPSKRKVPPQPLTPNQIVSTLFTSNFIGICFSRSLHYQFYVWYFHTLPYLLWAMPARWLTHLLRLLVLGLIELSWNTYPSTSCSSAALHICHAVILLQLWLGPQPFPKSTQHSKKAH

SEQ ID NO: 28288 - protein, 390 aa, Homo sapiens
MFPAQAKENAGFSGCGGDTEIDWKAYMAEVEGVINGTYDYTQLQGDTGPLVYPAGFVYIFMGLYYATSRGTDIRMAQNIFAVLYLATLLLVFLIYHQTCKVPPFVFFFMCCASYRVHSIFVLRLFNDPVAMVLLFLSINLLLAQRWGWGCCFFSLAVSVKMNVLLFAPGLLFLLLTQFGFRGALPKLGICAGLQVVLGLPFLLENPSGYLSRSFDLGRQFLFHWTVNWRFLPEALFLHRAFHLALLTAHLTLLLLFALCRWHRTGESILSLLRDPSKRKVPPQPLTPNQIVSTLFTSNFIGICFSRSLHYQFYVWYFHTLPYLLWAMPARWLTHLLRLLVLGLIELSWNTYPSTSCSSAALHICHAVILLQLWLGPQPFPKSTQHSKKAH

SEQ ID NO: 28289 - protein, 1192 aa, Homo sapiens
MSRGAGALQRRTTTYLISLTLVKLESVPPPPPSPSAAAVGAPGARGSEPRDPGSPRGAEEPGKKRHERLFHRQDALWISTSSAGAGGAEPPALSPAPASPARPVSPAPGRRLSLWAAPPGPPLSGGLSPDSKPGGAPSSSRRPLLSSPSWGGPEPEGRTGGGVPGSSSPHPGTGSRRLKVAPPPPAPKPCKTVTTSGAKAGGGKGAGSRLSWPESEGKPRVKGSKSSAGTGASVSAAATAAAAGGGGSTASTSGGVGAGAGARGKLSPRKGKSKTLDNSDLHPGPPAGSPPPLTLPPTPSPATAVTAASAQPPGPAPPITLEPPAPGLKRGREGGRASTRDRKMLKFISGIFTKSTGGPPGSGPLPGPPSLSSGSGSRELLGAELRASPKAVINSQEWTLSRSIPELRLGVLGDARSGKSSLIHRFLTGSYQVLEKTESEQYKKEMLVDGQTHLVLIREEAGAPDAKFSGWADAVIFVFSLEDENSFQAVSRLHGQLSSLRGEGRGGLALALVGTQDRISASSPRVVGDARARALCADMKRCSYYETCATYGLNVDRVFQEVAQKVVTLRKQQQLLAACKSLPSSPSHSAASTPVAGQASNGGHTSDYSSSLPSSPNVGHRELRAEAAAVAGLSTPGSLHRAAKRRTSLFANRRGSDSEKRSLDSRGETTGSGRAIPIKQSFLLKRSGNSLNKEWKKKYVTLSSNGFLLYHPSINDYIHSTHGKEMDLLRTTVKVPGKRPPRAISAFGPSASINGLVKDMSTVQMGEGLEATTPMPSPSPSPSSLQPPPDQTSKHLLKPDRNLARALSTDCTPSGDLSPLSREPPPSPMVKKQRRKKLTTPSKTEGSAGQAEAKRKMWKLKSFGSLRNIYKAEENFEFLIVSSTGQTWHFEAASFEERDAWVQAIESQILASLQCCESSKVKLRTDSQSEAVAIQAIRNAKGNSICVDCGAPNPTWASLNLGALICIECSGIHRNLGTHLSRVRSLDLDDWPRELTLVLTAIGNDTANRVWESDTRGRAKPSRDSSREERESWIRAKYEQLLFLAPLSTSEEPLGRQLWAAVQAQDVATVLLLLAHARHGPLDTSVEDPQLRSPLHLAAELAHVVITQLLLWYGADVAARDAQGRTALFYARQAGSQLCADILLQHGCPGEGGSAATTPSAATTPSITATPSPRRRSSAASVGRADAPVALV

SEQ ID NO: 28290 - protein, 836 aa, Homo sapiens
MHAQRQFVVAAVRAEVRRHEVAKQALNRLRKLAERVDDPELQDSIQASLDSIREAVINSQEWTLSRSIPELRLGVLGDARSGKSSLIHRFLTGSYQVLEKTESEQYKKEMLVDGQTHLVLIREEAGAPDAKFSGWADAVIFVFSLEDENSFQAVSRLHGQLSSLRGEGRGGLALALVGTQDRISASSPRVVGDARARALCADMKRCSYYETCATYGLNVDRVFQEVAQKVVTLRKQQQLLAACKSLPSSPSHSAASTPVAGQASNGGHTSDYSSSLPSSPNVGHRELRAEAAAVAGLSTPGSLHRAAKRRTSLFANRRGSDSEKRSLDSRGETTGSGRAIPIKQSFLLKRSGNSLNKEWKKKYVTLSSNGFLLYHPSINDYIHSTHGKEMDLLRTTVKVPGKRPPRAISAFGPSASINGLVKDMSTVQMGEGLEATTPMPSPSPSPSSLQPPPDQTSKHLLKPDRNLARALSTDCTPSGDLSPLSREPPPSPMVKKQRRKKLTTPSKTEGSAGQAEEENFEFLIVSSTGQTWHFEAASFEERDAWVQAIESQILASLQCCESSKVKLRTDSQSEAVAIQAIRNAKGNSICVDCGAPNPTWASLNLGALICIECSGIHRNLGTHLSRVRSLDLDDWPRELTLVLTAIGNDTANRVWESDTRGRAKPSRDSSREERESWIRAKYEQLLFLAPLSTSEEPLGRQLWAAVQAQDVATVLLLLAHARHGPLDTSVEDPQLRSPLHLAAELAHVVITQLLLWYGADVAARDAQGRTALFYARQAGSQLCADILLQHGCPGEGGSAATTPSAATTPSITATPSPRRRSSAASVGRADAPVALV

SEQ ID NO: 28291 - protein, 857 aa, Homo sapiens
MNYQQQLANSAAIRAEIQRFESVHPNIYSIYELLERVEEPVLQNQIREHVIAIEDAFVNSQEWTLSRSVPELKVGIVGNLASGKSALVHRYLTGTYVQEESPEGGRFKKEIVVDGQSYLLLIRDEGGPPEAQFAMWVDAVIFVFSLEDEISFQTVYHYYSRMANYRNTSEIPLVLVGTQDAISSANPRVIDDARARKLSNDLKRCTYYETCATYGLNVERVFQDVAQKIVATRKKQQLSIGPCKSLPNSPSHSSVCSAQVSAVHISQTSNGGGSLSDYSSSVPSTPSTSQKELRIDVPPTANTPTPVRKQSKRRSNLFTSRKGSDPDKEKKGLESRADSIGSGRAIPIKQGMLLKRSGKSLNKEWKKKYVTLCDNGVLTYHPSLHDYMQNVHGKEIDLLRTTVKVPGKRPPRATSACAPISSPKTNGLSKDMSSLHISPNSGNVTSASGSQMASGISLVSFNSRPDGMHQRSYSVSSADQWSEATVIANSAISSDTGLGDSVCSSPSISSTTSPKLDPPPSPHANRKKHRRKKSTSNFKADGLSGTAEEQEENFEFIIVSLTGQTWHFEATTYEERDAWVQAIESQILASLQSCESSKNKSRLTSQSEAMALQSIRNMRGNSHCVDCETQNPNWASLNLGALMCIECSGIHRNLGTHLSRVRSLDLDDWPVELIKVMSSIGNELANSVWEESSQGRTKPSVDSTREEKERWIRAKYEQKLFLAPLPCTELSLGQHLLRATADEDLRTAILLLAHGSRDEVNETCGEGDGRTALHLACRKGNVVLAQLLIWYGVDVTARDAHGNTALAYARQASSQECIDVLLQYGCPDERFVLMATPNLSRRNNNRNNSSGRVPTII

SEQ ID NO: 28292 - protein, 804 aa, Homo sapiens
MNYQQQLANSAAIRAEIQRFESVHPNIYSIYELLERVEEPVLQNQIREHVIAIEDAFVNSQEWTLSRSVPELKVGIVGNLASGKSALVHRYLTGTYVQEESPEGGRFKKEIVVDGQSYLLLIRDEGGPPEAQFAMWVDAVIFVFSLEDEISFQTVYHYYSRMANYRNTSEIPLVLVGTQDAISSANPRVIDDARARKLSNDLKRCTYYETCATYGLNVERVFQDVAQKIVATRKKQQLSIGPCKSLPNSPSHSSVCSAQVSAVHISQTSNGGGSLSDYSSSVPSTPSTSQKELRIDVPPTANTPTPVRKQSKRRSNLFTSRKGSDPDKEKKGLESRADSIGSGRAIPIKQGMLLKRSGKSLNKEWKKKYVTLCDNGVLTYHPSLHDYMQNVHGKEIDLLRTTVKVPGKRPPRATSACAPISSPKTNGLSKDMSSLHISPNSDTGLGDSVCSSPSISSTTSPKLDPPPSPHANRKKHRRKKSTSNFKADGLSGTAEEQEENFEFIIVSLTGQTWHFEATTYEERDAWVQAIESQILASLQSCESSKNKSRLTSQSEAMALQSIRNMRGNSHCVDCETQNPNWASLNLGALMCIECSGIHRNLGTHLSRVRSLDLDDWPVELIKVMSSIGNELANSVWEESSQGRTKPSVDSTREEKERWIRAKYEQKLFLAPLPCTELSLGQHLLRATADEDLRTAILLLAHGSRDEVNETCGEGDGRTALHLACRKGNVVLAQLLIWYGVDVTARDAHGNTALAYARQASSQECIDVLLQYGCPDERFVLMATPNLSRRNNNRNNSSGRVPTII

SEQ ID NO: 28293 - protein, 405 aa, Homo sapiens
MNYQQQLANSAAIRAEIQRFESVHPNIYSIYELLERVEEPVLQNQIREHVIAIEDAFVNSQEWTLSRSVPELKVGIVGNLASGKSALVHRYLTGTYVQEESPEGGRFKKEIVVDGQSYLLLIRDEGGPPEAQFAMWVDAVIFVFSLEDEISFQTVYHYYSRMANYRNTSEIPLVLVGTQDAISSANPRVIDDARARKLSNDLKRCTYYETCATYGLNVERVFQDVAQKIVATRKKQQLSIGPCKSLPNSPSHSSVCSAQVSAVHISQTSNGGGSLSDYSSSVPSTPSTSQKELRIDVPPTANTPTPVRKQSKRRSNLFTSRKGSDPDKEKKGLESRADSIGSGRAIPIKQGLPFFVLALTASTYLRPAGARARQSSPWPGPRGGQTSPHCAEGPQSAQLSGAMMN

SEQ ID NO: 28294 - protein, 875 aa, Homo sapiens
MNFQAGGGQSPQQQQQLAGGPPQQFALSNSAAIRAEIQRFESVHPNIYAIYDLIERIEDLALQNQIREHVISIEDSFVNSQEWTLSRSVPELKVGIVGNLSSGKSALVHRYLTGTYVQEESPEGGRFKKEIVVDGQSYLLLIRDEGGPPELQFAAWVDAVVFVFSLEDEISFQTVYNYFLRLCSFRNASEVPMVLVGTQDAISAANPRVIDDSRARKLSTDLKRCTYYETCATYGLNVERVFQDVAQKVVALRKKQQLAIGPCKSLPNSPSHSAVSAASIPAVHINQATNGGGSAFSDYSSSVPSTPSISQRELRIETIAASSTPTPIRKQSKRRSNIFTSRKGADLDREKKAAECKVDSIGSGRAIPIKQGILLKRSGKSLNKEWKKKYVTLCDNGLLTYHPSLHDYMQNIHGKEIDLLRTTVKVPGKRLPRATPATAPGTSPRANGLSVERSNTQLGGGTGAPHSASSASLHSERPLSSSAWAGPRPEGLHQRSCSVSSADQWSEATTSLPPGMQHPASGPAEVLSSSPKLDPPPSPHSNRKKHRRKKSTGTPRPDGPSSATEEAEESFEFVVVSLTGQTWHFEASTAEERELWVQSVQAQILASLQGCRSAKDKTRLGNQNAALAVQAVRTVRGNSFCIDCDAPNPDWASLNLGALMCIECSGIHRHLGAHLSRVRSLDLDDWPPELLAVMTAMGNALANSVWEGALGGYSKPGPDACREEKERWIRAKYEQKLFLAPLPSSDVPLGQQLLRAVVEDDLRLLVMLLAHGSKEEVNETYGDGDGRTALHLSSAMANVVFTQLLIWYGVDVRSRDARGLTPLAYARRAGSQECADILIQHGCPGEGCGLAPTPNREPANGTNPSAELHRSPSLL

SEQ ID NO: 28295 - protein, 876 aa, Homo sapiens
MFGGAGPGAGGGGPSQQLAGGPPQQFALSNSAAIRAEIQRFESVHPNIYAIYDLIERIEDLALQNQIREHVISIEDSFVNSQEWTLSRSVPELKVGIVGNLSSGKSALVHRYLTGTYVQEESPEGGRFKKEIVVDGQSYLLLIRDEGGPPELQFAAWVDAVVFVFSLEDEISFQTVYNYFLRLCSFRNASEVPMVLVGTQDAISAANPRVIDDSRARKLSTDLKRCTYYETCATYGLNVERVFQDVAQKVVALRKKQQLAIGPCKSLPNSPSHSAVSAASIPAVHINQATNGGGSAFSDYSSSVPSTPSISQRELRIETIAASSTPTPIRKQSKRRSNIFTSRKGADLDREKKAAECKVDSIGSGRAIPIKQGILLKRSGKSLNKEWKKKYVTLCDNGLLTYHPSLHDYMQNIHGKEIDLLRTTVKVPGKRLPRATPATAPGTSPRANGLSVERSNTQLGGGTGAPHSASSASLHSERPLSSSAWAGPRPEGLHQRSCSVSSADQWSEATTSLPPGMQHPASGPAEVLSSSPKLDPPPSPHSNRKKHRRKKSTGTPRPDGPSSATEEAEESFEFVVVSLTGQTWHFEASTAEERELWVQSVQAQILASLQGCRSAKDKTRLGNQNAALAVQAVRTVRGNSFCIDCDAPNPDWASLNLGALMCIECSGIHRHLGAHLSRVRSLDLDDWPPELLAVMTAMGNALANSVWEGALGGYSKPGPDACREEKERWIRAKYEQKLFLAPLPSSDVPLGQQLLRAVVEDDLRLLVMLLAHGSKEEVNETYGDGDGRTALHLSSAMANVVFTQLLIWYGVDVRSRDARGLTPLAYARRAGSQECADILIQHGCPGEGCGLAPTPNREPANGTNPSAELHRSPSLL

SEQ ID NO: 28296 - protein, 360 aa, Homo sapiens
MNFQAGGGQSPQQQQQLAGGPPQQFALSNSAAIRAEIQRFESVHPNIYAIYDLIERIEDLALQNQIREHVISIEDSFVNSQEWTLSRSVPELKVGIVGNLSSGKSALVHRYLTGTYVQEESPEGGRFKKEIVVDGQSYLLLIRDEGGPPELQFAAWVDAVVFVFSLEDEISFQTVYNYFLRLCSFRNASEVPMVLVGTQDAISAANPRVIDDSRARKLSTDLKRCTYYETCATYGLNVERVFQDVAQKVVALRKKQQLAIGPCKSLPNSPSHSAVSAASIPAVHINQATNGGGSAFSDYSSSVPSTPSISQRELRIETIAASSTPTPIRKQSKRRSNIFTICATVSNFSSTKRPFQLLPN

SEQ ID NO: 28297 - protein, 911 aa, Homo sapiens
MNFQAGGGQSPQQQQSLAAPGGGGAAAQQLVCGGQFGGAGPGAGGGGGPSQQLAGGPPQQFALSNSAAIRAEIQRFESVHPNIYAIYDLIERIEDLALQNQIREHVISIEDSFVNSQEWTLSRSVPELKVGIVGNLSSGKSALVHRYLTGTYVQEESPEGGRFKKEIVVDGQSYLLLIRDEGGPPELQFAAWVDAVVFVFSLEDEISFQTVYNYFLRLCSFRNASEVPMVLVGTQDAISAANPRVIDDSRARKLSTDLKRCTYYETCATYGLNVERVFQDVAQKVVALRKKQQLAIGPCKSLPNSPSHSAVSAASIPAVHINQATNGGGSAFSDYSSSVPSTPSISQRELRIETIAASSTPTPIRKQSKRRSNIFTSRKGADLDREKKAAECKVDSIGSGRAIPIKQGILLKRSGKSLNKEWKKKYVTLCDNGLLTYHPSLHDYMQNIHGKEIDLLRTTVKVPGKRLPRATPATAPGTSPRANGLSVERSNTQLGGGTGAPHSASSASLHSERPLSSSAWAGPRPEGLHQRSCSVSSADQWSEATTSLPPGMQHPASGPAEVLSSSPKLDPPPSPHSNRKKHRRKKSTGTPRPDGPSSATEEAEESFEFVVVSLTGQTWHFEASTAEERELWVQSVQAQILASLQGCRSAKDKTRLGNQNAALAVQAVRTVRGNSFCIDCDAPNPDWASLNLGALMCIECSGIHRHLGAHLSRVRSLDLDDWPPELLAVMTAMGNALANSVWEGALGGYSKPGPDACREEKERWIRAKYEQKLFLAPLPSSDVPLGQQLLRAVVEDDLRLLVMLLAHGSKEEVNETYGDGDGRTALHLSSAMANVVFTQLLIWYGVDVRSRDARGLTPLAYARRAGSQECADILIQHGCPGEGCGLAPTPNREPANGTNPSAELHRSPSLL

SEQ ID NO: 28298 - protein, 580 aa, Homo sapiens
MVLVGTQDAISAANPRVIDDSRARKLSTDLKRCTYYETCATYGLNVERVFQDVAQKVVALRKKQQLAIGPCKSLPNSPSHSAVSAASIPAVHINQATNGGGSAFSDYSSSVPSTPSISQRELRIETIAASSTPTPIRKQSKRRSNIFTSRKGADLDREKKAAECKVDSIGSGRAIPIKQGILLKRSGKSLNKEWKKKYVTLCDNGLLTYHPSLHDYMQNIHGKEIDLLRTTVKVPGKRLPRATPATAPGTSPRANGLSVERSNTQLGGGTEAEESFEFVVVSLTGQTWHFEASTAEERELWVQSVQAQILASLQGCRSAKDKTRLGNQNAALAVQAVRTVRGNSFCIDCDAPNPDWASLNLGALMCIECSGIHRHLGAHLSRVRSLDLDDWPPELLAVMTAMGNALANSVWEGALGGYSKPGPDACREEKERWIRAKYEQKLFLAPLPSSDVPLGQQLLRAVVEDDLRLLVMLLAHGSKEEVNETYGDGDGRTALHLSSAMANVVFTQLLIWYGVDVRSRDARGLTPLAYARRAGSQECADILIQHGCPGEGCGLAPTPNREPANGTNPSAELHRSPSLL

SEQ ID NO: 28299 - protein, 396 aa, Homo sapiens
MNFQAGGGQSPQQQQSLAAPGGGGAAAQQLVCGGQFGGAGPGAGGGGGPSQQLAGGPPQQFALSNSAAIRAEIQRFESVHPNIYAIYDLIERIEDLALQNQIREHVISIEDSFVNSQEWTLSRSVPELKVGIVGNLSSGKSALVHRYLTGTYVQEESPEGGRFKKEIVVDGQSYLLLIRDEGGPPELQFAAWVDAVVFVFSLEDEISFQTVYNYFLRLCSFRNASEVPMVLVGTQDAISAANPRVIDDSRARKLSTDLKRCTYYETCATYGLNVERVFQDVAQKVVALRKKQQLAIGPCKSLPNSPSHSAVSAASIPAVHINQATNGGGSAFSDYSSSVPSTPSISQRELRIETIAASSTPTPIRKQSKRRSNIFTICATVSNFSSTKRPFQLLPN

SEQ ID NO: 28300 - protein, 703 aa, Homo sapiens
MFEDVFSDSGNTGNFDRGKKRRLTIIECGCDINMMIDLAKVADLVLMLIDASFGFEMEMFEFLNICQAHGFPKILGVLTHLDSFKHNKQLKKTKKRLKHRFWTEVYQDKVGLTHELVQSLISTYSTIDAKMASSRVTLLSNSKPLGSEAIDNQGVSLEFDQQQGSVCPSESEIYEAGAEDRMAGAPMAAAVQPAEVTVEVGEDLHMHQVRDREMPEVVEIRRSNCTNHCDLGDTSSYHTKVSTVHIMKKRNGGGSLNNYSSSIPPTPSTSQEDPQFSVPPTANTPTPVCKRSMRWSNLFTSEKGSDPDKERKAPENHADTIGSGRAIPIKQGMLLKRSGKWLKTWKKKYVTLCSNGVLTYYSSLGDYMKNIHKKEIDLRTSTIKVPGKWPSLATSACAPISSSKSNGLSKDMDTGLGDSICFSPGISSTTSPKLNPPPSPHANKKKHLKKKSTNNFMIVSATGQTWHFEATTYEERDAWVQAIQSQILASLQSCKSSKSKSQLTSQSEAMALQSIQNMRGNAHCVDCETQNPKWASLNLGVLMCIECSGIHRSFGTRLSRVRSLELDDWPVELRKVMSSIGNELANSIWEGSSQGQTKPSIKSTREEKEWWIRSKYEEKLFLAPLPCTELSLGQQLLRATTDEDLQTAILLLAHGSREEVNETCGEGDGCTALHLACRKGNVVLEQLLTGWTSWPEMPTGTQR

SEQ ID NO: 28301 - protein, 658 aa, Homo sapiens
MGNILTCRVHPSVSLEFDQQQGSVCPSESEIYEAGAEDRMAGAPMAAAVQPAEVTVEVGEDLHMHQVRDREMPEALEFNLSANPEASTIFQRNSQTDALEFNSSANPEASTIFQRNSQTDVVEIRRSNCTNHVSTERFSQQYSSCSTIFLDDSTAIQHYLTMTIISVTLEIPHHITQRDADRSLSIPDEQLHSFAVSTVHIMKKRNGGGSLNNYSSSIPPTPSTSQEDPQFSVPPTANTPTPVCKRSMRWSNLFTSEKGSDPDKERKAPENHADTIGSGRAIPIKQGMLLKRSGKWLKTWKKKYVTLCSNGVLTYYSSLGDYMKNIHKKEIDLRTSTIKVPGKWPSLATSACAPISSSKSNGLSKDMDTGLGDSICFSPGISSTTSPKLNPPPSPHANKKKHLKKKSTNNFMIVSATGQTWHFEATTYEERDAWVQAIQSQILASLQSCKSSKSKSQLTSQSEAMALQSIQNMRGNAHCVDCETQNPKWASLNLGVLMCIECSGIHRSFGTRLSRVRSLELDDWPVELRKVMSSIGNELANSIWEGSSQGQTKPSIKSTREEKEWWIRSKYEEKLFLAPLPCTELSLGQQLLRATTDEDLQTAILLLAHGSREEVNETCGEGDGCTALHLACRKGNVVLEQLLTGWTSWPEMPTGTQR

SEQ ID NO: 28302 - protein, 90 aa, Homo sapiens
MRDPVSSQYSSFLFWRMPIPELDLSELEGLGLSDTATYKVKDSSVGKMIGQATAADQEKNPEGDGLLEYSTFNFWRAPIASIHSFELDLL

SEQ ID NO: 28303 - protein, 302 aa, Homo sapiens
MERHMVRGQLYKHFDLERKNAKQAEARLDQRLQRLKVICLYHVKLLTWEQRQLQKELQRLQQAETMKKKFSSYLGNGFQKRPEDVLVFSPQGRQKHRAPQAKKMRALATRMAQDTCKSKSQVPPSHDAGLKDPMKSKKQPLSQNNRTACFIKEQPQAQEKDSVNPSKDVDPSKGISVPCQNQEVSTNTIEQGPSSSPASDSGMACADETRSKDVALKPDGNTGKQIPPKHMECAGSFEGEFTKPTFLELLSKARNAHYLRHRVPPESERLLSIGEIFGHGESSSSRAGKECENRVPSKFLPL

SEQ ID NO: 28304 - protein, 207 aa, Homo sapiens
MERHMVRGQLYKHFDLERKNAKQAEARLDQRLQRLKVICLYHVKLLTWEQRQLQKELQRLQQETMKKKFSSYLGNGFQKRPEDVLVFSPQGRQKHRAPQAKKMRALATRMAQDTCKSKSQVPPSHDAGLKDPMKSKKQPLSQNNRTACFIKEQPQAQEKDSVNPSKDVDPSKGISVPCQNQEVSTNTIEQGPSSSPASGLQWGDNTL

SEQ ID NO: 28305 - protein, 748 aa, Homo sapiens
MVLLRVLILLLSWAAGMGGQYGNPLNKYIRHYEGLSYNVDSLHQKHQRAKRAVSHEDQFLRLDFHAHGRHFNLRMKRDTSLFSDEFKVETSNKVLDYDTSHIYTGHIYGEEGSFSHGSVIDGRFEGFIQTRGGTFYVEPAERYIKDRTLPFHSVIYHEDDINYPHKYGPQGGCADHSVFERMRKYQMTGVEEVTQIPQEEHAANGPELLRKKRTTSAEKNTCQLYIQTDHLFFKYYGTREAVIAQISSHVKAIDTIYQTTDFSGIRNISFMVKRIRINTTADEKDPTNPFRFPNIGVEKFLELNSEQNHDDYCLAYVFTDRDFDDGVLGLAWVGAPSGSSGGICEKSKLYSDGKKKSLNTGIITVQNYGSHVPPKVSHITFAHEVGHNFGSPHDSGTECTPGESKNLGQKENGNYIMYARATSGDKLNNNKFSLCSIRNISQVLEKKRNNCFVESGQPICGNGMVEQGEECDCGYSDQCKDECCFDANQPEGRKCKLKPGKQCSPSQGPCCTAQCAFKSKSEKCRDDSDCAREGICNGFTALCPASDPKPNFTDCNRHTQVCINGQCAGSICEKYGLEECTCASSDGKDDKELCHVCCMKKMDPSTCASTGSVQWSRHFSGRTITLQPGSPCNDFRGYCDVFMRCRLVDADGPLARLKKAIFSPELYENIAEWIVAHWWAVLLMGIALIMLMAGFIKICSVHTPSSNPKLPPPKPLPGTLKRRRPPQPIQQPQRQRPRESYQMGHMRR

SEQ ID NO: 28306 - protein, 447 aa, Homo sapiens
MVLLRVLILLLSWAAGMGDRDFDDGVLGLAWVGAPSGSSGGICEKSKLYSDGKKKSLNTGIITVQNYGSHVPPKVSHITFAHEVGHNFGSPHDSGTECTPGESKNLGQKENGNYIMYARATSGDKLNNNKFSLCSIRNISQVLEKKRNNCFVESGQPICGNGMVEQGEECDCGYSDQCKDECCFDANQPEGRKCKLKPGKQCSPSQGPCCTAQCAFKSKSEKCRDDSDCAREGICNGFTALCPASDPKPNFTDCNRHTQVCINGQCAGSICEKYGLEECTCASSDGKDDKELCHVCCMKKMDPSTCASTGSVQWSRHFSGRTITLQPGSPCNDFRGYCDVFMRCRLVDADGPLARLKKAIFSPELYENIAEWIVAHWWAVLLMGIALIMLMAGFIKICSVHTPSSNPKLPPPKPLPGTLKRRRPPQPIQQPQRQRPRESYQMGHMRR

SEQ ID NO: 28307 - protein, 592 aa, Homo sapiens
MEGKWLLCMLLVLGTAIVEAHDGHDDDVIDIEDDLDDVIEEVEDSKPDTTAPPSSPKVTYKAPVPTGEVYFADSFDRGTLSGWILSKAKKDDTDDEIAKYDGKWEVEEMKESKLPGDKGLVLMSRAKHHAISAKLNKPFLFDTKPLIVQYEVNFQNGIECGGAYVKLLSKTPELNLDQFHDKTPYTIMFGPDKCGEDYKLHFIFRHKNPKTGIYEEKHAKRPDADLKTYFTDKKTHLYTLILNPDNSFEILVDQSVVNSGNLLNDMTPPVNPSREIEDPEDRKPEDWDERPKIPDPEAVKPDDWDEDAPAKIPDEEATKPEGWLDDEPEYVPDPDAEKPEDWDEDMDGEWEAPQIANPRCESAPGCGVWQRPVIDNPNYKGKWKPPMIDNPSYQGIWKPRKIPNPDFFEDLEPFRMTPFSAIGLELWSMTSDIFFDNFIICADRRIVDDWANDGWGLKKAADGAAEPGVVGQMIEAAEERPWLWVVYILTVALPVFLVILFCCSGKKQTSGMEYKKTDAPQPDVKEEEEEKEEEKDKGDEEEEGEEKLEEKQKSDAEEDGGTVSQEEEDRKPKAEEDEILNRSPRNRKPRRE

SEQ ID NO: 28308 - protein, 627 aa, Homo sapiens
MADRRTPTPFAGCRLPRQRRARDASQVSAPGTRRIMEGKWLLCMLLVLGTAIVEAHDGHDDDVIDIEDDLDDVIEEVEDSKPDTTAPPSSPKVTYKAPVPTGEVYFADSFDRGTLSGWILSKAKKDDTDDEIAKYDGKWEVEEMKESKLPGDKGLVLMSRAKHHAISAKLNKPFLFDTKPLIVQYEVNFQNGIECGGAYVKLLSKTPELNLDQFHDKTPYTIMFGPDKCGEDYKLHFIFRHKNPKTGIYEEKHAKRPDADLKTYFTDKKTHLYTLILNPDNSFEILVDQSVVNSGNLLNDMTPPVNPSREIEDPEDRKPEDWDERPKIPDPEAVKPDDWDEDAPAKIPDEEATKPEGWLDDEPEYVPDPDAEKPEDWDEDMDGEWEAPQIANPRCESAPGCGVWQRPVIDNPNYKGKWKPPMIDNPSYQGIWKPRKIPNPDFFEDLEPFRMTPFSAIGLELWSMTSDIFFDNFIICADRRIVDDWANDGWGLKKAADGAAEPGVVGQMIEAAEERPWLWVVYILTVALPVFLVILFCCSGKKQTSGMEYKKTDAPQPDVKEEEEEKEEEKDKGDEEEEGEEKLEEKQKSDAEEDGGTVSQEEEDRKPKAEEDEILNRSPRNRKPRRE

SEQ ID NO: 28309 - protein, 484 aa, Homo sapiens
MKESKLPGDKGLVLMSRAKHHAISAKLNKPFLFDTKPLIVQYEVNFQNGIECGGAYVKLLSKTPELNLDQFHDKTPYTIMFGPDKCGEDYKLHFIFRHKNPKTGIYEEKHAKRPDADLKTYFTDKKTHLYTLILNPDNSFEILVDQSVVNSGNLLNDMTPPVNPSREIEDPEDRKPEDWDERPKIPDPEAVKPDDWDEDAPAKIPDEEATKPEGWLDDEPEYVPDPDAEKPEDWDEDMDGEWEAPQIANPRCESAPGCGVWQRPVIDNPNYKGKWKPPMIDNPSYQGIWKPRKIPNPDFFEDLEPFRMTPFSAIGLELWSMTSDIFFDNFIICADRRIVDDWANDGWGLKKAADGAAEPGVVGQMIEAAEERPWLWVVYILTVALPVFLVILFCCSGKKQTSGMEYKKTDAPQPDVKEEEEEKEEEKDKGDEEEEGEEKLEEKQKSDAEEDGGTVSQEEEDRKPKAEEDEILNRSPRNRKPRRE

SEQ ID NO: 28310 - protein, 936 aa, Homo sapiens
MLLAPQGRSFSKKRMGLNRWKRFTRKPSPKPTFGPDSVEHWIKRVEKASEFAVSNAFFTRNSDLPRSPWGQITDLKTSEQIEDHDEIYAEAQELVNDWLDTKLKQELASEEEGDAKNTVSSVTIMPEANGHLKYDKFDDLCGYLEEEEESTTVQKFIDHLLHKNVVDSAMMEDLGRKENQDKKQQKDPRLTMEMRHKQVKENRLRREKELEYQRIEKTLKKSAFLEAQCLVQEEKKRKALEAKKEEEEIQREMVKLRREIIERRRTVKAAWKIEKKRQEENSQNSSEKVMFQSTHILPDEEKMVKERKRKLKEVLIQTFKENQQCQKRYFAAWHKLILDHRIKLGKAGTLSDWKIQLKVLRAWRDYTRFQKLERETQALENDLREENRKQQLATEYNRKQVLRHCFTEWQHWHGAELLKRELALTKEETRKKMDALLQAASLGKLSANGLSGISLPEEATAMVGPPVKNGQETAVPPLWEKPPLGSSGCMLSPPLGRTTTGNLQGSLQNVSLSAPGNKQHKTLGAEPSQQPGSNETLRTTSQKAEPLCLGHFHNRHVFQQQLIEKQKKKLQEQQKTILELKKNLQLAEAQWAAEHALAVTEAQSHLLSKPREEEPRTCQMLVNSPVASPGTEGRSDSRNSLSGLRRKPKQLMTPHPILKAMEERAIQRAECRRILAEKKKKQEEEKLAQLKAQEEERQKREAEEKEAQLERKREEKRLKKMKELEKQKRIKRNQQLEAIAKEHYERVLLRKKGLEPWKRLRMQSKQNIQVAEEHYSLFLQRKYMLTWFQRSQESLARKMAQADQFYSQILLKRVIQSWLQYVIDLQEEVRKFCVHFLQKKIFRAWFNMVREVKIDSQGKHEIAAEHSDRRILWITLRTWKKFVKFMKEERVKEERRQQLRRKVVEILPDFQVPGRYHELYQQSDTWSLSKTSLVNE

SEQ ID NO: 28311 - protein, 514 aa, Homo sapiens
MMEDLGRKENQDKKQQKDPRLTMEMRHKQVKENRLRREKELEYQRIEKTLKKSAFLEAQCLVQEEKKRKALEAKKEEEEIQREMVKLRREIIERRRTVKAAWKIEKKRQEENSQNSSEKVMFQSTHILPDEEKMVKERKRKLKEVLIQTFKENQQCQKRYFAAWHKLILDHRIKLGKAGTLSDWKIQLKVLRAWRDYTRFQKLERETQALENDLREENRKQQLATEYNRKQVLRHCFTEWQHWHGAELLKRELALTKEETRKKMDALLQAASLGKLSANGLSGISLPEEATAMVGPPVKNGQETAVPPLWEKPPLGSSGCMLSPPLGRTTTGNLQGSLQNVSLSAPGNKQHKTLGAEPSQQPGSNETLRTTSQKAEPLCLGHFHNRHVFQQQLIEKQKKKLQEQQKTILELKKNLQLAEAQWAAEHALAVTEAQSHLLSKPREEEPRTCQMLVNSPVASPGTEGRSDSRNSLSGLRRKPKQLMTPHPILKGRAVSVVALVVVIFSPRVECVHWD

SEQ ID NO: 28312 - protein, 185 aa, Homo sapiens
MKLVSVALMYLGSLAFLGADTARLDVASEFRKKWNKWALSRGKRELRMSSSYPTGLADVKAGPAQTLIRPQDMKGASRSPEDSSPDAARIRVKRYRQSMNNFQGLRSFGCRFGTCTVQKLAHQIYQFTDKDKDNVAPRSKISPQGYGRRRRRSLPEAGPGRTLVSSKPQAHGAPAPPSGSAPHFL

SEQ ID NO: 28313 - protein, 208 aa, Homo sapiens
MAGTARHDREMAIQAKKKLTTATDPIERLRLQCLARGSAGIKGLGRVFRIMDDDNNRTLDFKEFMKGLNDYAVVMEKEEVEELFRRFDKDGNGTIDFNEFLLTLRPPMSRARKEVIMQAFRKLDKTGDGVITIEDLREVYNAKHHPKYQNGEWSEEQVFRKFLDNFDSPYDKDGLVTPEEFMNYYAGVSASIDTDVYFIIMMRTAWKL

SEQ ID NO: 28314 - protein, 277 aa, Homo sapiens
MENTENSVDSKSIKNLEPKIIHGSESMDSGISLDNSYKMDYPEMGLCIIINNKNFHKSTGMTSRSGTDVDAANLRETFRNLKYEVRNKNDLTREEIVELMRDVSKEDHSKRSSFVCVLLSHGEEGIIFGTNGPVDLKKITNFFRGDRCRSLTGKPKLFIIQACRGTELDCGIETDSGVDDDMACHKIPVEADFLYAYSTAPGYYSWRNSKDGSWFIQSLCAMLKQYADKLEFMHILTRVNRKVATEFESFSFDATFHAKKQIPCIVSMLTKELYFYH

SEQ ID NO: 28315 - protein, 1131 aa, Homo sapiens
MFQIPVENLDNIRKVRKKVKGILVDIGLDSCKELLKDLKGFDPGEKYFHNTSWGDVSLWEPSGKKVRYRTKPYCCGLCKYSTKVLTSFKNHLHRYHEDEIDQELVIPCPNCVFASQPKVVGRHFRMFHAPVRKVQNYTVNILGETKSSRSDVISFTCLKCNFSNTLYYSMKKHVLVAHFHYLINSYFGLRTEEMGEQPKTNDTVSIEKIPPPDKYYCKKCNANASSQDALMYHILTSDIHRDLENKLRSVISEHIKRTGLLKQTHIAPKPAAHLAAPANGSAPSAPAQPPCFHLALPQNSPSPAAGQPVTVAQGAPGSLTHSPPAAGQSHMTLVSSPLPVGQNSLTLQPPAPQPVFLSHGVPLHQSVNPPVLPLSQPVGPVNKSVGTSVLPINQTVRPGVLPLTQPVGPINRPVGPGVLPVSPSVTPGVLQAVSPGVLSVSRAVPSGVLPAGQMTPAGQMTPAGVIPGQTATSGVLPTGQMVQSGVLPVGQTAPSRVLPPGQTAPLRVISAGQVVPSGLLSPNQTVSSSAVVPVNQGVNSGVLQLSQPVVSGVLPVGQPVRPGVLQLNQTVGTNILPVNQPVRPGASQNTTFLTSGSILRQLIPTGKQVNGIPTYTLAPVSVTLPVPPGGLATVAPPQMPIQLLPSGAAAPMAGSMPGMPSPPVLVNAAQSVFVQASSSAADTNQVLKQAKQWKTCPVCNELFPSNVYQVHMEVAHKHSESKSGEKLEPEKLAACAPFLKWMREKTVRCLSCKCLVSEEELIHHLLMHGLGCLFCPCTFHDIKGLSEHSRNRHLGKKKLPMDYSNRGFQLDVDANGNLLFPHLDFITILPKEKLGEREVYLAILAGIHSKSLVPVYVKVRPQAEGTPGSTGKRVSTCPFCFGPFVTTEAYELHLKERHHIMPTVHTVLKSPAFKCIHCCGVYTGNMTLAAIAVHLVRCRSAPKDSSSDLQAQPGFIHNSELLLVSGEVMHDSSFSVKRKLPDGHLGAEDQRHGEEQPPILNADAAPGPEKVTSVVPFKRQRNESRTEGPIVKDEALQILALDPKKYEGRSYEEKKQFLKDYFHKKPYPSKKEIELLSSLFWVWKIDVASFFGKRRYICMKAIKNHKPSVLLGFDMSELKNVKHRLNFEYEP

SEQ ID NO: 28316 - protein, 691 aa, Homo sapiens
MDGCKKELPRLQEPEEDEDCYILNVQSSSDDTSGSSVARRAPKRQASCILNVQSRSGDTSGSSVARRAPKRQASSVVVIDSDSDEECHTHEEKKAKLLEINSDDESPECCHVKPAIQEPPIVISDDDNDDDNGNDLEVPDDNSDDSEAPDDNSDDSEAPDDNSDDSEAPDDNSDDSEAPDDNSDDSDVPDDNSDDSSDDNSDDSSDDNSDDSDVPDDKSDDSDVPDDSSDDSDVPDDSSDDSEAPDDSSDDSEAPDDSSDDSEAPDDSSDDSEAPDDSSDDSEASDDSSDDSEASDDSSDDSEAPDDKSDDSDVPEDKSDDSDVPDDNSDDLEVPVPAEDLCNEGQIASDEEELVEAAAAVSQHDSSDDAGEQDLGENLSKPPSDPEANPEVSERKLPTEEEPAPVVEQSGKRKSKTKTIVEPPRKRQTKTKNIVEPPRKRQTKTKNIVEPLRKRKAKTKNVSVTPGHKKRGPSKKKPGAAKVEKRKTRTPKCKVPGCFLQDLEKSKKYSGKNLKRNKDELVQRIYDLFNRSVCDKKLPEKLRIGWNNKMVKTAGLCSTGEMWYPKWRRFAKIQIGLKVCDSADRIRDTLIHEMCHAASWLIDGIHDSHGDAWKYYARKSNRIHPELPRVTRCHNYKINYKVHYECTGCKTRIGCYTKSLDTSRFICAKCKGSLVMVPLTQKDGTRIVPHV

SEQ ID NO: 28317 - protein, 413 aa, Homo sapiens [sequence omitted]

SEQ ID NO: 28318 - protein, 252 aa, Homo sapiens
MRAPLLPPAPVVLSLLILGSGHYAAGLDLNDTYSGKREPFSGDHSADGFEVTSRSEMSSGSEISPVSEMPSSSEPSSGADYDYSEEYDNEPQIPGYIVDDSVRVEQVVKPPQNKTESENTSDKPKRKKKGGKNGKNRRNRKKKNPCNAEFQNFCIHGECKYIEHLEAVTCKCQQEYFGERCGEKSMKTHSMIDSSLSKIALAAIAAFMSAVILTAVAVITVQLRRQYVRKYEGEAEERKKLRQENGNVHAIA

SEQ ID NO: 28319 - protein, 399 aa, Homo sapiens
MKRTHLFIVGIYFLSSCRAEEGLNFPTYDGKDRVVSLSEKNFKQVLKKYDLLCLYYHEPVSSDKVTQKQFQLKEIVLELVAQVLEHKAIGFVMVDAKKEAKLAKKLGFDEEGSLYILKGDRTIEFDGEFAADVLVEFLLDLIEDPVEIISSKLEVQAFERIEDYIKLIGFFKSEDSEYYKAFEEAAEHFQPYIKFFATFDKGVAKKLSLKMNEVDFYEPFMDEPIAIPNKPYTEEELVEFVKEHQRPTLRRLRPEEMFETWEDDLNGIHIVAFAEKSDPDGYEFLEILKQVARDNTDNPDLSILWIDPDDFPLLVAYWEKTFKIDLFRPQIGVVNVTDADSVWMEIPDDDDLPTAEELEDWIEDVLSGKINTEDDDEDDDDDDNSDEEDNDDSDDDDDE

SEQ ID NO: 28320 - protein, 328 aa, Homo sapiens
MKRTHLFIVGIYFLSSCRAEEGLNFPTYDGKDRVVSLSEKNFKQVLKKYDLLCLYYHEPVSSDKVTQKQFQLKEIVLELVAQVLEHKAIGFVMVDAKKEAKLAKKLDYKAFEEAAEHFQPYIKFFATFDKGVAKKLSLKMNEVDFYEPFMDEPIAIPNKPYTEEELVEFVKEHQRPTLRRLRPEEMFETWEDDLNGIHIVAFAEKSDPDGYEFLEILKQVARDNTDNPDLSILWIDPDDFPLLVAYWEKTFKIDLFRPQIGVVNVTDADSVWMEIPDDDDLPTAEELEDWIEDVLSGKINTEDDDEDDDDDDNSDEEDNDDSDDDDDE

SEQ ID NO: 28321 - protein, 521 aa, Homo sapiens
MAAEPNKTEIQTLFKRLRAVPTNKACFDCGAKNPSWASITYGVFLCIDCSGVHRSLGVHLSFIRSTELDSNWNWFQLRCMQVGGNANATAFFRQHGCTANDANTKYNSRAAQMYREKIRQLGSAALARHGTDLWIDNMSSAVPNHSPEKKDSDFFTEHTQPPAWDAPATEPSGTQQPAPSTESSGLAQPEHGPNTDLLGTSPKASLELKSSIIGKKKPAAAKKGLGAKKGLGAQKVSSQSFSEIERQAQVAEKLREQQAADAKKQAEESMVASMRLAYQELQIDRKKEEKKLQNLEGKKREQAERLGMGLVSRSSVSHSVLSEMQVIEQETPVSAKSSRSQLDLFDDVGTFASGPPKYKDNPFSLGESFGSRWDTDAAWGMDRVEEKEPEVTISSIRPISERATNRREVESRSSGLESSEARQKFAGAKAISSDMFFGREVDAEYEARSRLQQLSGSSAISSSDLFGDMDGAHGAGSVSLGNVLPTADIAQFKQGVKSVAGKMAVLANGVMNSLQDRYGSY

SEQ ID NO: 28322 - protein, 414 aa, Homo sapiens
MQVGGNANATAFFRQHGCTANDANTKYNSRAAQMYREKIRQLGSAALARHGTDPPAWDAPATEPSGTQQPAPSTESSGLAQPEHGPNTDLLGTSPKASLELKSSIIGKKKPAAAKKGLGAKKGLGAQKVSSQSFSEIERQAQVAEKLREQQAADAKKQAEESMVASMRLAYQELQIDRKKEEKKLQNLEGKKREQAERLGMGLVSRSSVSHSVLSEMQVIEQETPVSAKSSRSQLDLFDDVGTFASGPPKYKDNPFSLGESFGSRWDTDAAWGMDRVEEKEPEVTISSIRPISERATNRREVESRSSGLESSEARQKFAGAKAISSDMFFGREVDAEYEARSRLQQLSGSSAISSSDLFGDMDGAHGAGSVSLGNVLPTADIAQFKQGVKSVAGKMAVLANGVMNSLQDRYGSY

SEQ ID NO: 28323 - protein, 252 aa, Homo sapiens
MVASMRLAYQELQIDRKKEEKKLQNLEGKKREQAERLGMGLVSRSSVSHSVLSEMQVIEQETPVSAKSSRSQLDLFDDVGTFASGPPKYKDNPFSLGESFGSRWDTDAAWGMDRVEEKEPEVTISSIRPISERATNRREVESRSSGLESSEARQKFAGAKAISSDMFFGREVDAEYEARSRLQQLSGSSAISSSDLFGDMDGAHGAGSVSLGNVLPTADIAQFKQGVKSVAGKMAVLANGVMNSLQDRYGSY

SEQ ID NO: 28324 - protein, 596 aa, Homo sapiens
MEPELAAQKQPRPRRRSRRASGLSTEGATGPSADTSGSELDGRCSLRRGSSFTFLTPGPNWDFTLKRKRREKDDDVVSLSSLDLKEPSNKRVRPLARVTSLANLISPVRNGAVRRFGQTIQSFTLRGDHRSPASAQKFSSRSTVPTPAKRRSSALWSEMLDITMKESLTTREIRRQEAIYEMSRGEQDLIEDLKLARKAYHDPMLKLSIMSEEELTHIFGDLDSYIPLHEDLLTRIGEATKPDGTVEQIGHILVSWLPRLNAYRGYCSNQLAAKALLDQKKQDPRVQDFLQRCLESPFSRKLDLWSFLDIPRSRLVKYPLLLKEILKHTPKEHPDVQLLEDAILIIQGVLSDINLKKGESECQYYIDKLEYLDEKQRDPRIEASKVLLCHGELRSKSGHKLYIFLFQDILVLTRPVTRNERHSYQVYRQPIPVQELVLEDLQDGDVRMGGSFRGAFSNSEKAKNIFRIRFHDPSPAQSHTLQANDVFHKQQWFNCIRAAIAPFQSAGSPPELQGLPELHEECEGNHPSARKLTAQRRASTVSSVTQVEVDENAYRCGSGMQMAEDSKSLKTHQTQPGIRRARDKALSGGKRKETLV

SEQ ID NO: 28325 - protein, 542 aa, Homo sapiens
MVAHDETGGLLPIKRTIRVLDVNNQSFREQEEPSNKRVRPLARVTSLANLISPVRNGAVRRFGQTIQSFTLRGDHRSPASAQKFSSRSTVPTPAKRRSSALWSEMLDITMKESLTTREIRRQEAIYEMSRGEQDLIEDLKLARKAYHDPMLKLSIMSEEELTHIFGDLDSYIPLHEDLLTRIGEATKPDGTVEQIGHILVSWLPRLNAYRGYCSNQLAAKALLDQKKQDPRVQDFLQRCLESPFSRKLDLWSFLDIPRSRLVKYPLLLKEILKHTPKEHPDVQLLEDAILIIQGVLSDINLKKGESECQYYIDKLEYLDEKQRDPRIEASKVLLCHGELRSKSGHKLYIFLFQDILVLTRPVTRNERHSYQVYRQPIPVQELVLEDLQDGDVRMGGSFRGAFSNSEKAKNIFRIRFHDPSPAQSHTLQANDVFHKQQWFNCIRAAIAPFQSAGSPPELQGLPELHEECEGNHPSARKLTAQRRASTVSSVTQVEVDENAYRCGSGMQMAEDSKSLKTHQTQPGIRRARDKALSGGKRKETLV

SEQ ID NO: 28326 - protein, 1544 aa, Homo sapiens
MSGTQSTITDRFPLKKPIRHGSILNRESPTDKKQKVERIASHDFDPTDSSSKKTKSSSEESRSEIYGLVQRCVIIQKDDNGFGLTVSGDNPVFVQSVKEDGAAMRAGVQTGDRIIKVNGTLVTHSNHLEVVKLIKSGSYVALTVQGRPPGSPQIPLADSEVEPSVIGHMSPIMTSPHSPGASGNMERITSPVLMGEENNVVHNQKVEILRKMLQKEQERLQLLQEDYNRTPAQRLLKEIQEAKKHIPQLQEQLSKATGSAQDGAVVTPSRPLGDTLTVSEAETDPGDVLGRTDCSSGDASRPSSDNADSPKSGPKERIYLEENPEKSETIQDTDTQSLVGSPSTRIAPHIIGAEDDDFGTEHEQINGQCSCFQSIELLKSRPAHLAVFLHHVVSQFDPATLLCYLYSDLYKHTNSKETRRIFLEFHQFFLDRSAHLKVSVPDEMSADLEKRRPELIPEDLHRHYIQTMQERVHPEVQRHLEDFRQKRSMGLTLAESELTKLDAERDKDRLTLEKERTCAEQIVAKIEEVLMTAQAVEEDKSSTMQYVILMYMKHLGVKVKEPRNLEHKRGRIGFLPKIKQSMKKDKEGEEKGKRRGFPSILGPPRRPSRHDNSAIGRAMELQKARHPKHLSTPSSVSPEPQDSAKLRQSGLANEGTDAGYLPANSMSSVASGASFSQEGGKENDTGSKQVGETSAPGDTLDGTPRTLNTVFDFPPPPLDQVQEEECEVERVTEHGTPKPFRKFDSVAFGESQSEDEQFENDLETDPPNWQQLVSREVLLGLKPCEIKRQEVINELFYTERAHVRTLKVLDQVFYQRVSREGILSPSELRKIFSNLEDILQLHIGLNEQMKAVRKRNETSVIDQIGEDLLTWFSGPGEEKLKHAAATFCSNQPFALEMIKSRQKKDSRFQTFVQDAESNPLCRRLQLKDIIPTQMQRLTKYPLLLDNIAKYTEWPTEREKVKKAADHCRQILNYVNQAVKEAENKQRLEDYQRRLDTSSLKLSEYPNVEELRNLDLTKRKMIHEGPLVWKVNRDKTIDLYTLLLEDILVLLQKQDDRLVLRCHSKILASTADSKHTFSPVIKLSTVLVRQVATDNKALFVISMSDNGAQIYELVAQTVSEKTVWQDLICRMAASVKEQSTKPIPLPQSTPGEGDNDEEDPSKLKEEQHGISVTGLQSPDRDLGLESTLISSKPQSHSLSTSGKSEVRDLFVAERQFAKEQHTDGTLKEVGEDYQIAIPDSHLPVSEERWALDALRNLGLLKQLLVQQLGLTEKSVQEDWQHFPRYRTASQGPQTDSVIQNSENIKAYHSGEGHMPFRTGTGDIATCYSPRTSTESFAPRDSVGLAPQDSQASNILVMDHMIMTPEMPTMEPEGGLDDSGEHFFDAREAHSDENPSEGDGAVNKEEKDVNLRISGNYLILDGYDPVQESSTDEEVASSLTLQPMTGIPAVESTHQQQHSPQNTHSDGAISPFTPEFLVQQRWGAMEYSCFEIQSPSSCADSQSQIMEYIHKIEADLEHLKKVEESYTILCQRLAGSALTDKHSDKS

SEQ ID NO: 28327 - protein, 1525 aa, Homo sapiens
MSGTQSTITDRFPLKKPIRHGSILNRESPTDKKQKVERIASHDFDPTGLVQRCVIIQKDDNGFGLTVSGDNPVFVQSVKEDGAAMRAGVQTGDRIIKVNGTLVTHSNHLEVVKLIKSGSYVALTVQGRPPGSPQIPLADSEVEPSVIGHMSPIMTSPHSPGASGNMERITSPVLMGEENNVVHNQKVEILRKMLQKEQERLQLLQEDYNRTPAQRLLKEIQEAKKHIPQLQEQLSKATGSAQDGAVVTPSRPLGDTLTVSEAETDPGDVLGRTDCSSGDASRPSSDNADSPKSGPKERIYLEENPEKSETIQDTDTQSLVGSPSTRIAPHIIGAEDDDFGTEHEQINGQCSCFQSIELLKSRPAHLAVFLHHVVSQFDPATLLCYLYSDLYKHTNSKETRRIFLEFHQFFLDRSAHLKVSVPDEMSADLEKRRPELIPEDLHRHYIQTMQERVHPEVQRHLEDFRQKRSMGLTLAESELTKLDAERDKDRLTLEKERTCAEQIVAKIEEVLMTAQAVEEDKSSTMQYVILMYMKHLGVKVKEPRNLEHKRGRIGFLPKIKQSMKKDKEGEEKGKRRGFPSILGPPRRPSRHDNSAIGRAMELQKARHPKHLSTPSSVSPEPQDSAKLRQSGLANEGTDAGYLPANSMSSVASGASFSQEGGKENDTGSKQVGETSAPGDTLDGTPRTLNTVFDFPPPPLDQVQEEECEVERVTEHGTPKPFRKFDSVAFGESQSEDEQFENDLETDPPNWQQLVSREVLLGLKPCEIKRQEVINELFYTERAHVRTLKVLDQVFYQRVSREGILSPSELRKIFSNLEDILQLHIGLNEQMKAVRKRNETSVIDQIGEDLLTWFSGPGEEKLKHAAATFCSNQPFALEMIKSRQKKDSRFQTFVQDAESNPLCRRLQLKDIIPTQMQRLTKYPLLLDNIAKYTEWPTEREKVKKAADHCRQILNYVNQAVKEAENKQRLEDYQRRLDTSSLKLSEYPNVEELRNLDLTKRKMIHEGPLVWKVNRDKTIDLYTLLLEDILVLLQKQDDRLVLRCHSKILASTADSKHTFSPVIKLSTVLVRQVATDNKALFVISMSDNGAQIYELVAQTVSEKTVWQDLICRMAASVKEQSTKPIPLPQSTPGEGDNDEEDPSKLKEEQHGISVTGLQSPDRDLGLESTLISSKPQSHSLSTSGKSEVRDLFVAERQFAKEQHTDGTLKEVGEDYQIAIPDSHLPVSEERWALDALRNLGLLKQLLVQQLGLTEKSVQEDWQHFPRYRTASQGPQTDSVIQNSENIKAYHSGEGHMPFRTGTGDIATCYSPRTSTESFAPRDSVGLAPQDSQASNILVMDHMIMTPEMPTMEPEGGLDDSGEHFFDAREAHSDENPSEGDGAVNKEEKDVNLRISGNYLILDGYDPVQESSTDEEVASSLTLQPMTGIPAVESTHQQQHSPQNTHSDGAISPFTPEFLVQQRWGAMEYSCFEIQSPSSCADSQSQIMEYIHKIEADLEHLKKVEESYTILCQRLAGSALTDKHSDKS

SEQ ID NO: 28328 - protein, 1353 aa, Homo sapiens
MLDPSSSEEESDEIVEEESGKEVLGSAPSGARLSPSRTSEGSAGSAGLGGGGAGAGAGVGAGGGGGSGASSGGGAGGLQPSSRAGGGRPSSPSPSVVSEKEKEELERLQKEEEERKKRLQLYVFVMRCIAYPFNAKQPTDMARRQQKISKQQLQTVKDRFQAFLNGETQIMADEAFMNAVQSYYEVFLKSDRVARMVQSGGCSANDSREVFKKHIEKRVRSLPEIDGLSKETVLSSWMAKFDAIYRGEEDPRKQQARMTASAASELILSKEQLYEMFQNILGIKKFEHQLLYNACQLDNPDEQAAQIRRELDGRLQMADQIARERKFPKFVSKEMENMYIEELKSSVNLLMANLESMPVSKGGEFKLQKLKRSHNASIIDMGEESENQLSKSDVVLSFSLEVVIMEVQGLKSLAPNRIVYCTMEVEGGEKLQTDQAEASKPTWGTQGDFSTTHALPAVKVKLFTESTGVLALEDKELGRVILHPTPNSPKQSEWHKMTVSKNCPDQDLKIKLAVRMDKPQNMKHSGYLWAIGKNVWKRWKKRFFVLVQVSQYTFAMCSYREKKAEPQELLQLDGYTVDYTDPQPGLEGGRAFFNAVKEGDTVIFASDDEQDRILWVQAMYRATGQSHKPVPPTQVQKLNAKGGNVPQLDAPISQFYADRAQKHGMDEFISSNPCNFDHASLFEMVQRLTLDHRLNDSYSCLGWFSPGQVFVLDEYCARNGVRGCHRHLCYLRDLLERAENGAMIDPTLLHYSFAFCASHVHGNRPDGIGTVTVEEKERFEEIKERLRVLLENQITHFRYCFPFGRPEGALKATLSLLERVLMKDIVTPVPQEEVKTVIRKCLEQAALVNYSRLSEYAKIEENQKDAENVGRLITPAKKLEDTIRLAELVIEVLQQNEEHHAEPHVDKGEAFAWWSDLMVEHAETFLSLFAVDMDAALEVQPPDTWDSFPLFQLLNDFLRTDYNLCNGKFHKHLQDLFAPLVVRYVDLMESSIAQSIHRGFERESWEPVKSLTSNLPNVNLPNVNLPKVPNLPVNIPLGIPQMPTFSAPSWMAAIYDADNGSGTSEDLFWKLDALQTFIRDLHWPEEEFGKHLEQRLKLMASDMIESCVKRTRIAFEVKLQKTSRSTDFRVPQSICTMFNVMVDAKAQSTKLCSMEMGQEHQYHSKIDELIEETVKEMITLLVAKFVTILEGVLAKLSRYDEGTLFSSFLSFTVKAASKYVDVPKPGMDVADAYVTFVRHSQDVLRDKVNEEMYIERLFDQWYNSSMNVICTWLTDRMDLQLHIYQLKTLIRMVKKTYRDFRLQGVLDSTLNSKTYETIRNRLTVEEATASVSEGGGLQGISMKDSDEEDEEDD

SEQ ID NO: 28329 - protein, 1274 aa, Homo sapiens
MLDPSSSEEESDEIVEEESGKEVLGSAPSGARLSPSRTSEGSAGSAGLGGGGAGAGAGVGAGGGGGSGASSGGGAGGLQPSSRAGGGRPSSPSPSVVSEKEKEELERLQKEEEERKKRLQLYVFVMRCIAYPFNAKQPTDMARRQQKISKQQLQTVKDRFQAFLNGETQIMADEAFMNAVQSYYEVFLKSDRVARMVQSGGCSANDSREVFKKHIEKRVRSLPEIDGLSKETVLSSWMAKFDAIYRGEEDPRKQQARMTASAASELILSKEQLYEMFQNILGIKKFEHQLLYNACQLDNPDEQAAQIRRELDGRLQMADQIARERKFPKFVSKEMENMYIEELKSSVNLLMANLESMPVSKGGEFKLQKLKRSHNASIIDMGEESENQLSKSDVVLSFSLEVVIMEVQGLKSLAPNRIVYCTMEVEGGEKLQTDQAEASKPTWGTQGDFSTTHALPAVKVKLFTESTGVLALEDKELGRVILHPTPNSPKQSEWHKMTVSKNCPDQDLKIKLAVRMDKPQNMKHSGYLWAIGKNVWKRWKKRFFVLVQVSQYTFAMCSYREKKAEPQELLQLDGYTVDYTDPQPGLEGGRAFFNAVKEGDTVIFASDDEQDRILWVQAMYRATGQSHKPVPPTQVQKLNAKGGNVPQLDAPISQFYADRAQKHGMDEFISSNPCNFDHASLFEMGWFSPGQVFVLDEYCARNGVRGCHRHLCYLRDLLERAENGAMIDPTLLHYSFAFCASHVHGNRPDGIGTVTVEEKERFEEIKERLRVLLENQITHFRYCFPFGRPEGALKATLSLLERVLMKDIVTPVPQEEVKTVIRKCLEQAALVNYSRLSEYAKIEENVGRLITPAKKLEDTIRLAELVIEVLQQNEEHHAEAFAWWSDLMVEHAETFLSLFAVDMDAALEVQPPDTWDSFPLFQLLNDFLRTDYNLCNGKFHKHLQDLFAPLVVRYVDLMESSIAQSIHRGFERESWEPVNNGSGTSEDLFWKLDALQTFIRDLHWPEEEFGKHLEQRLKLMASDMIESCVKRTRIAFEVKLQKTSRSTDFRVPQSICTMFNVMVDAKAQSTKLCSMEMGQEHQYHSKIDELIEETVKEMITLLVAKFVTILEGVLAKLSRYDEGTLFSSFLSFTVKAASKYVDVPKPGMDVADAYVTFVRHSQDVLRDKVNEEMYIERLFDQWYNSSMNVICTWLTDRMDLQLHIYQLKTLIRMVKKTYRDFRLQGVLDSTLNSKTYETIRNRLTVEEATASVSEGGGLQGISMKDSDEEDEEDD

SEQ ID NO: 28330 - protein, 1314 aa, Homo sapiens
MLDPSSSEEESDEIVEEESGKEVLGSAPSGARLSPSRTSEGSAGSAGLGGGGAGAGAGVGAGGGGGSGASSGGGAGGLQPSSRAGGGRPSSPSPSVVSEKEKEELERLQKEEEERKKRLQLYVFVMRCIAYPFNAKQPTDMARRQQKISKQQLQTVKDRFQAFLNGETQIMADEAFMNAVQSYYEVFLKSDRVARMVQSGGCSANDSREVFKKHIEKRVRSLPEIDGLSKETVLSSWMAKFDAIYRGEEDPRKQQARMTASAASELILSKEQLYEMFQNILGIKKFEHQLLYNACQLDNPDEQAAQIRRELDGRLQMADQIARERKFPKFVSKEMENMYIEELKSSVNLLMANLESMPVSKGGEFKLQKLKRSHNASIIDMGEESENQLSKSDVVLSFSLEVVIMEVQGLKSLAPNRIVYCTMEVEGGEKLQTDQAEASKPTWGTQGDFSTTHALPAVKVKLFTESTGVLALEDKELGRVILHPTPNSPKQSEWHKMTVSKNCPDQDLKIKLAVRMDKPQNMKHSGYLWAIGKNVWKRWKKRFFVLVQVSQYTFAMCSYREKKAEPQELLQLDGYTVDYTDPQPGLEGGRAFFNAVKEGDTVIFASDDEQDRILWVQAMYRATGQSHKPVPPTQVQKLNAKGGNVPQLDAPISQFYADRAQKHGMDEFISSNPCNFDHASLFEMVQRLTLDHRLNDSYSCLGWFSPGQVFVLDEYCARNGVRGCHRHLCYLRDLLERAENGAMIDPTLLHYSFAFCASHVHGNRPDGIGTVTVEEKERFEEIKERLRVLLENQITHFRYCFPFGRPEGALKATLSLLERVLMKDIVTPVPQEEVKTVIRKCLEQAALVNYSRLSEYAKIEGKKREMYEHPVFCLASQVMDLTIQNVGRLITPAKKLEDTIRLAELVIEVLQQNEEHHAEAFAWWSDLMVEHAETFLSLFAVDMDAALEVQPPDTWDSFPLFQLLNDFLRTDYNLCNGKFHKHLQDLFAPLVVRYVDLMESSIAQSIHRGFERESWEPVNNGSGTSEDLFWKLDALQTFIRDLHWPEEEFGKHLEQRLKLMASDMIESCVKRTRIAFEVKLQKTSRSTDFRVPQSICTMFNVMVDAKAQSTKLCSMEMGQEHQYHSKIDELIEETVKEMITLLVAKFVTILEGVLAKLSRYDEGTLFSSFLSFTVKAASKYVDVPKPGMDVADAYVTFVRHSQDVLRDKVNEEMYIERLFDQWYNSSMNVICTWLTDRMDLQLHIYQLKTLIRMVKKTYRDFRLQGVLDSTLNSKTYETIRNRLTVEEATASVSEGGGLQGISMKDSDEEDEEDD

SEQ ID NO: 28331 - protein, 1358 aa, Homo sapiens
MLDPSSSEEESDEIVEEESGKEVLGSAPSGARLSPSRTSEGSAGSAGLGGGGAGAGAGVGAGGGGGSGASSGGGAGGLQPSSRAGGGRPSSPSPSVVSEKEKEELERLQKEEEERKKRLQLYVFVMRCIAYPFNAKQPTDMARRQQKISKQQLQTVKDRFQAFLNGETQIMADEAFMNAVQSYYEVFLKSDRVARMVQSGGCSANDSREVFKKHIEKRVRSLPEIDGLSKETVLSSWMAKFDAIYRGEEDPRKQQARMTASAASELILSKEQLYEMFQNILGIKKFEHQLLYNACQLDNPDEQAAQIRRELDGRLQMADQIARERKFPKFVSKEMENMYIEELKSSVNLLMANLESMPVSKGGEFKLQKLKRSHNASIIDMGEESENQLSKSDVVLSFSLEVVIMEVQGLKSLAPNRIVYCTMEVEGGEKLQTDQAEASKPTWGTQGDFSTTHALPAVKVKLFTESTGVLALEDKELGRVILHPTPNSPKQSEWHKMTVSKNCPDQDLKIKLAVRMDKPQNMKHSGYLWAIGKNVWKRWKKRFFVLVQVSQYTFAMCSYREKKAEPQELLQLDGYTVDYTDPQPGLEGGRAFFNAVKEGDTVIFASDDEQDRILWVQAMYRATGQSHKPVPPTQVQKLNAKGGNVPQLDAPISQFYADRAQKHGMDEFISSNPCNFDHASLFEMVQRLTLDHRLNDSYSCLGWFSPGQVFVLDEYCARNGVRGCHRHLCYLRDLLERAENGAMIDPTLLHYSFAFCASHVHGNRPDGIGTVTVEEKERFEEIKERLRVLLENQITHFRYCFPFGRPEGALKATLSLLERVLMKDIVTPVPQEEVKTVIRKCLEQAALVNYSRLSEYAKIEENQKDAENVGRLITPAKKLEDTIRLAELVIEVLQQNEEHHAEPHVDKGEAFAWWSDLMVEHAETFLSLFAVDMDAALEVQPPDTWDSFPLFQLLNDFLRTDYNLCNGKFHKHLQDLFAPLVVRYVDLMESSIAQSIHRGFERESWEPVKSLTSNLPNVNLPNVNLPKVPNLPVNIPLGIPQMPTFSAPSWMAAIYDADNGSGTSEDLFWKLDALQTFIRDLHWPEEEFGKHLEQRLKLMASDMIESCVKRTRIAFEVKLQKTSRSTDFRVPQSICTMFNVMVDAKAQSTKLCSMEMGQEFAKMWHQYHSKIDELIEETVKEMITLLVAKFVTILEGVLAKLSRYDEGTLFSSFLSFTVKAASKYVDVPKPGMDVADAYVTFVRHSQDVLRDKVNEEMYIERLFDQWYNSSMNVICTWLTDRMDLQLHIYQLKTLIRMVKKTYRDFRLQGVLDSTLNSKTYETIRNRLTVEEATASVSEGGGLQGISMKDSDEEDEEDD

SEQ ID NO: 28332 - protein, 457 aa, Homo sapiens
MLDPSSSEEESDEIVEEESGKEVLGSAPSGARLSPSRTSEGSAGSAGLGGGGAGAGAGVGAGGGGGSGASSGGGAGGLQPSSRAGGGRPSSPSPSVVSEKEKEELERLQKEEEERKKRLQLYVFVMRCIAYPFNAKQPTDMARRQQKISKQQLQTVKDRFQAFLNGETQIMADEAFMNAVQSYYEVFLKSDRVARMVQSGGCSANDSREVFKKHIEKRVRSLPEIDGLSKETVLSSWMAKFDAIYRGEEDPRKQQARMTASAASELILSKEQLYEMFQNILGIKKFEHQLLYNACQLDNPDEQAAQIRRELDGRLQMADQIARERKFPKFVSKEMENMYIEELKSSVNLLMANLESMPVSKGGEFKLQKLKRSHNASIIDMGEESENQLSKSDVVLSFSLEVVIMEVQGLKSLAPNRIVYCTMEVEGGEKLQTDQAEASKPTVIRRNRREQLPHSAI

SEQ ID NO: 28333 - protein, 802 aa, Homo sapiens
MDCGPPATLQPHLTGPPGTAHHPVAVCQQESLSFAELPALKPPSPVCLDLFPVAPEELRAPGSRWSLGTPAPLQGLLWPLSPGGSDTEITSGGMRPSRAGSWPHCPGAQPPALEGPWSPRHTQPQRRASHGSEKKSAWRKMRVYQREEVPGCPEAHAVFLEPGQVVQEQALSTEEPRVELSGSTRVSLEGPERRRFSASELMTRLHSSLRLGRNSAARALISGSGTGAAREGKASGMEARSVEMSGDRVSRPAPGDSREGDWSEPRLDTQEEPPLGSRSTNERRQSRFLLNSVLYQEYSDVASARELRRQQREEEGPGDEAEGAEEGPGPPRANLSPSSSFRAQRSARGSTFSLWQDIPDVRGSGVLATLSLRDCKLQEAKFELITSEASYIHSLSVAVGHFLGSAELSECLGAQDKQWLFSKLPEVKSTSERFLQDLEQRLEADVLRFSVCDVVLDHCPAFRRVYLPYVTNQAYQERTYQRLLLENPRFPGILARLEESPVCQRLPLTSFLILPFQRITRLKMLVENILKRTAQGSEDEDMATKAFNALKELVQECNASVQSMKRTEELIHLSKKIHFEGKIFPLISQARWLVRHGELVELAPLPAAPPAKLKLSSKAVYLHLFNDCLLLSRRKELGKFAVFVHAKMAELQVRDLSLKLQGIPGHVFLLQLLHGQHMKHQFLLRARTESEKQRWISALCPSSPQEDKEVISEGEDCPQVQCVRTYKALHPDELTLEKTDILSVRTWTSDGWLEGVRLADGEKGWVPQAYVEEISSLSARLRNLRENKRVTSATSKLGEAPV

SEQ ID NO: 28334 - protein, 502 aa, Homo sapiens
MDCGPPATLQPHLTGPPGTAHHPVAVCQQESLSFAELPALKPPSPVCLDLFPVAPEELRAPGSRWSLGTPAPLQGLLWPLSPGGSDTEITSGGMRPSRAGSWPHCPGAQPPALEGPWSPRHTQPQRRASHGSEKKSAWRKMRVYQREEVPGCPEAHAVFLEPGQVVQEQALSTEEPRVELSGSTRVSLEGPERRRFSASELMTRLHSSLRLGRNSAARALISGSGTGAAREGKASGMEARSVEMSGDRVSRPAPGDSREGDWSEPRLDTQEEPPLGSRSTNERRQSRFLLNSVLYQEYSDVASARELRRQQREEEGPGDEAEGAEEGPGPPRANLSPSSSFRAQRSARGSTFSLWQDIPDVRGSGVLATLSLRDCKLQEAKFELITSEASYIHSLSVAVGHFLGSAELSECLGAQDKQWLFSKLPEVKSTSERFLQDLEQRLEADVLRFSVCDVVLDHCPAFRRVYLPYVTNQAYQERTYQRLLRENKRVTSATSKLGEAPV

SEQ ID NO: 28335 - protein, 821 aa, Homo sapiens
MPTVISASVAPRTAAEPRSPGPVPHPAQSKATEAGGGNPSGIYSAIISRNFPIIGVKEKTFEQLHKKCLEKKVLYVDPEFPPDETSLFYSQKFPIQFVWKRPPEICENPRFIIDGANRTDICQGELGDCWFLAAIACLTLNQHLLFRVIPHDQSFIENYAGIFHFQFWRYGEWVDVVIDDCLPTYNNQLVFTKSNHRNEFWSALLEKAYAKLHGSYEALKGGNTTEAMEDFTGGVAEFFEIRDAPSDMYKIMKKAIERGSLMGCSIDDGTNMTYGTSPSGLNMGELIARMVRNMDNSLLQDSDLDPRGSDERPTRTIIPVQYETRMACGLVRGHAYSVTGLDEVPFKGEKVKLVRLRNPWGQVEWNGSWSDRWKDWSFVDKDEKARLQHQVTEDGEFWMSYEDFIYHFTKLEICNLTADALQSDKLQTWTVSVNEGRWVRGCSAGGCRNFPDTFWTNPQYRLKLLEEDDDPDDSEVICSFLVALMQKNRRKDRKLGASLFTIGFAIYEVPKEMHGNKQHLQKDFFLYNASKARSKTYINMREVSQRFRLPPSEYVIVPSTYEPHQEGEFILRVFSEKRNLSEEVENTISVDRPVKKKKTKPIIFVSDRANSNKELGVDQESEEGKGKTSPDKQKQSPQPQPGSSDQESEEQQQFRNIFKQIAGDDMEICADELKKVLNTVVNKHKDLKTHGFTLESCRSMIALMDTDGSGKLNLQEFHHLWNKIKAWQKIFKHYDTDQSGTINSYEMRNAVNDAGFHLNNQLYDIITMRYADKHMNIDFDSFICCFVRLEGMFRAFHAFDKDGDGIIKLNVLEWLQLTMYA

SEQ ID NO: 28336 - protein, 729 aa, Homo sapiens
MPTVISASVAPRTAAEPRSPGPVPHPAQSKATEAGGGNPSGIYSAIISRNFPIIGVKEKTFEQLHKKCLEKKVLYVDPEFPPDETSLFYSQKFPIQFVWKRPPEICENPRFIIDGANRTDICQGELGDCWFLAAIACLTLNQHLLFRVIPHDQSFIENYAGIFHFQFWRYGEWVDVVIDDCLPTYNNQLVFTKSNHRNEFWSALLEKAYAKLHGSYEALKGGNTTEAMEDFTGGVAEFFEIRDAPSDMYKIMKKAIERGSLMGCSIDTIIPVQYETRMACGLVRGHAYSVTGLDEVPFKGEKVKLVRLRNPWGQVEWNGSWSDRWKDWSFVDKDEKARLQHQVTEDGEFWMSYEDFIYHFTKLEICNLTADALQSDKLQTWTVSVNEGRWVRGCSAGGCRNFPDTFWTNPQYRLKLLEEDDDPDDSEVICSFLVALMQKNRRKDRKLGASLFTIGFAIYEVPKEMHGNKQHLQKDFFLYNASKARSKTYINMREVSQRFRLPPSEYVIVPSTYEPHQEGEFILRVFSEKRNLSEEVENTISVDRPVPQPGSSDQESEEQQQFRNIFKQIAGDDMEICADELKKVLNTVVNKHKDLKTHGFTLESCRSMIALMDTDGSGKLNLQEFHHLWNKIKAWQKIFKHYDTDQSGTINSYEMRNAVNDAGFHLNNQLYDIITMRYADKHMNIDFDSFICCFVRLEGMFRAFHAFDKDGDGIIKLNVLEWLQLTMYA

SEQ ID NO: 28337 - protein, 815 aa, Homo sapiens
MPTVISASVAPRTAAEPRSPGPVPHPAQSKATEAGGGNPSGIYSAIISRNFPIIGVKEKTFEQLHKKCLEKKVLYVDPEFPPDETSLFYSQKFPIQFVWKRPPEICENPRFIIDGANRTDICQGELGDCWFLAAIACLTLNQHLLFRVIPHDQSFIENYAGIFHFQFWRYGEWVDVVIDDCLPTYNNQLVFTKSNHRNEFWSALLEKAYAKLHGSYEALKGGNTTEAMEDFTGGVAEFFEIRDAPSDMYKIMKKAIERGSLMGCSIDDGTNMTYGTSPSGLNMGELIARMVRNMDNSLLQDSDLDPRGSDERPTRTIIPVQYETRMACGLVRGHAYSVTGLDEVPFKGEKVKLVRLRNPWGQVEWNGSWSDRWKDWSFVDKDEKARLQHQVTEDGEFWMSYEDFIYHFTKLEICNLTADALQSDKLQTWTVSVNEGRWVRGCSAGGCRNFPDTFWTNPQYRLKLLEEDDDPDDSEVICSFLVALMQKNRRKDRKLGASLFTIGFAIYEVPKEMHGNKQHLQKDFFLYNASKARSKTYINMREVSQRFRLPPSEYVIVPSTYEPHQEGEFILRVFSEKRNLSEEVENTISVDRPVPIIFVSDRANSNKELGVDQESEEGKGKTSPDKQKQSPQPQPGSSDQESEEQQQFRNIFKQIAGDDMEICADELKKVLNTVVNKHKDLKTHGFTLESCRSMIALMDTDGSGKLNLQEFHHLWNKIKAWQKIFKHYDTDQSGTINSYEMRNAVNDAGFHLNNQLYDIITMRYADKHMNIDFDSFICCFVRLEGMFRAFHAFDKDGDGIIKLNVLEWLQLTMYA

SEQ ID NO: 28338 - protein, 309 aa, Homo sapiens
MHGNKQHLQKDFFLYNASKARSKTYINMREVSQRFRLPPSEYVIVPSTYEPHQEGEFILRVFSEKRNLSEEVENTISVDRPVKKKKTKPIIFVSDRANSNKELGVDQESEEGKGKTSPDKQKQSPQPQPGSSDQESEEQQQFRNIFKQIAGDDMEICADELKKVLNTVVNKHKDLKTHGFTLESCRSMIALMDTDGSGKLNLQEFHHLWNKIKAWQKIFKHYDTDQSGTINSYEMRNAVNDAGFHLNNQLYDIITMRYADKHMNIDFDSFICCFVRLEGMFRAFHAFDKDGDGIIKLNVLEWLQLTMYA

SEQ ID NO: 28339 - protein, 156 aa, Homo sapiens
MEICADELKKVLNTVVNKHKDLKTHGFTLESCRSMIALMDTDGSGKLNLQEFHHLWNKIKAWQKIFKHYDTDQSGTINSYEMRNAVNDAGFHLNNQLYDIITMRYADKHMNIDFDSFICCFVRLEGMFRAFHAFDKDGDGIIKLNVLEWLQLTMYA

SEQ ID NO: 28340 - protein, 286 aa, Homo sapiens
MADLEEQLSDEEKVRIAAKFIIHAPPGEFNEVFNDVRLLLNNDNLLREGAAHAFAQYNLDQFTPVKIEGYEDQVLITEHGDLGNGKFLDPKNRICFKFDHLRKEATDPRPCEVENAVESWRTSVETALRAYVKEHYPNGVCTVYGKKIDGQQTIIACIESHQFQAKNFWNGRWRSEWKFTITPSTTQVVGILKIQVHYYEDGNVQLVSHKDIQDSLTVSNEVQTAKEFIKIVEAAENEYQTAISENYQTMSDTTFKALRRQLPVTRTKIDWNKILSYKIGKEMQNA

SEQ ID NO: 28341 - protein, 172 aa, Homo sapiens
MADLEEQLSDEEKVRIAAKFIIHAPPGEFNEVFNDVRLLLNNDNLLREGAAHAFAQYNLDQFTPVKIEGYEDQVLITEHGDLGNGKFLDPKNRICFKFDHLRKEATDPRPCEVENAVESWRTSVETALRAYVKEHYPNGVCTEWSLEVRMEVYNHSFNHSSGWHLENSGSLL

SEQ ID NO: 28342 - protein, 574 aa, Homo sapiens
MEPNSLRTKVPAFLSDLGKATLRGIRKCPRCGTYNGTRGLSCKNKTCGTIFRYGARKQPSVEAVKIITGSDLQVYSVRQRDRGPDYRCFVELGVSETTIQTVDGTIITQLSSGRCYVPSCLKAATQGVVENQCQHIKLAVNCQAEATPLTLKSSVLNAMQASPETKQTIWQLATEPTGPLVQRITKNILVVKCKASQKHSLGYLHTSFVQKVSGKSLPERRFFCSCQTLKSHKSNASKDETAQRCIHFFACICAFASDETLAQEFSDFLNFDSSGLKEIIVPQLGCHSESTVSACESTASKSKKRRKDEVSGAQMNSSLLPQDAVSSNLRKSGLKKPVVASSLKRQACGQLLDEAQVTLSFQDWLASVTERIHQTMHYQFDGKPEPLVFHIPQSFFDALQQRISIGSAKKRLPNSTTAFVRKDALPLGTFSKYTWHITNILQVKQILDTPEMPLEITRSFIQNRDGTYELFKCPKVEVESIAETYGRIEKQPVLRPLELKTFLKVGNTSPDQKEPTPFIIEWIPDILPQSKIGELRIKFEYGHHRNGHVAEYQDQRPPLDQPLELAPLTTITFP

SEQ ID NO: 28343 - protein, 360 aa, Homo sapiens
MASATAPAAAVPTLASPLEQLRHLAEELRLLLPRVRVGEAQETTEEFNREMFWRRLNEAAVTVSREATTLTIVFSQLPLPSPQETQKFCEQVHAAIKAFIAVYYLLPKDQGITLRKLVRGATLDIVDGMAQLMEVLSVTPTQSPENNDLISYNSVWVACQQMPQIPRDNKAAALLMLTKNVDFVKDAHEEMEQAVEECDPYSGLLNDTEENNSDNHNHEDDVLGFPSNQDLYWSEDDQELIIPCLALVRASKACLKKIRMLVAENGKKDQVAQLDDIVDISDEISPSVDDLALSIYPPMCHLTVRINSAKLVSVLKKALEITKASHVTPQPEDSWIPLLINAIDHCMNRIKELTQSELEL

SEQ ID NO: 28344 - protein, 309 aa, Homo sapiens
MASATAPAAAVPTLASPLEQLRHLAEELRLLLPRVRVGEAQETTEEFNREMFWRRLNEAAVTVSREATTLTIVFSQLPLPSPQETQKFCEQVHAAIKAFIAVYYLLPKDQGITLRKLVRGATLDIVDGMAQLMEVLSVTPTQSPENNDLISYNSVWVACQQMPQIPRDNKAAALLMLTKNVDFVKDAHEEMEQAVEECDPYSGLLNDTEENNSDNHNHEDDVLGFPSNQDLYWSEDDQELIIPCLALVRASKACLKKIRMLVAENGKKDQVAQLDDIVDISDEISPSVDDLALSIYPPMCHLTVRINEP

SEQ ID NO: 28345 - protein, 232 aa, Homo sapiens
MAQLMEVLSVTPTQSPENNDLISYNSVWVACQQMPQIPRDNKAAALLMLTKNVDFVKDAHEEMEQAVEECDPYSGLLNDTEENNSDNHNHEDDVLGFPSNQDLYWSEDDQELIIPCLALVRASKACLKKIRMLVAENGKKDQVAQLDDIVDISDEISPSVDDLALSIYPPMCHLTVRINSAKLVSVLKKALEITKASHVTPQPEDSWIPLLINAIDHCMNRIKELTQSELEL

SEQ ID NO: 28346 - protein, 204 aa, Homo sapiens
MAQLMEVLSVTPTQSPENNDLISYNSVWVACQQMPQIPRDNKAAALLMLTKNVDFVKDAHEEMEQAVEECDPYSGLLNDTEENNSDNHNHEDDVLGFPSNQDLYWSEDDQELIIPCLALVRASKACLKKIRMLVAENGKKDQVAQLDDIVDISDEISPSVDDLALSIYPPMCHLTVRINVSTGFEGIATEQMGRISLITSISCK

SEQ ID NO: 28347 - protein, 117 aa, Homo sapiens
MIIDSSRIPSFTQLHSTMTRAPLLLLCVALVLLGHVNGATVRNEDKWKPLNNPRNRDLFFRRLQAYFKGRGLDLGTFPNPFPTNENPRPLSFQSELTASASADYEEQKNSFHNYLKG

SEQ ID NO: 28348 - protein, 474 aa, Homo sapiens
MADSASESDTDGAGGNSSSSAAMQSSCSSTSGGGGGGGGGGGGGKSGGIVISPFRLEELTNRLASLQQENKVLKIELETYKLKCKALQEENRDLRKASVTIQARAEQEEEFISNTLFKKIQALQKEKETLAVNYEKEEEFLTNELSRKLMQLQHEKAELEQHLEQEQEFQVNKLMKKIKKLENDTISKQLTLEQLRREKIDLENTLEQEQEALVNRLWKRMDKLEAEKRILQEKLDQPVSAPPSPRDISMEIDSPENMMRHIRFLKNEVERLKKQLRAAQLQHSEKMAQYLEEERHMREENLRLQRKLQREMERREALCRQLSESESSLEMDDERYFNEMSAQGLRPRTVSSPIPYTPSPSSSRPISPGLSYASHTVGFTPPTSLTRAGMSYYNSPGLHVQHMGTSHGITRPSPRRSNSPDKFKRPTPPPSPNTQTPVQPPPPPPPPPMQPTVPSAATSQPTPSQHSAHPSSQP

SEQ ID NO: 28349 - protein, 170 aa, Homo sapiens
MGNEASYPLEMCSHFDADEIKRLGKRFKKLDLDNSGSLSVEEFMSLPELQQNPLVQRVIDIFDTDGNGEVDFKEFIEGVSQFSVKGDKEQKLRFAFRIYDMDKDGYISNGELFQVLKMMVGNNLKDTQLQQIVDKTIINADKDGDGRISFEEFCAVVGGLDIHKKMVVDV

SEQ ID NO: 28350 - protein, 354 aa, Homo sapiens
MEKFKAAMLLGSVGDALGYRNVCKENSTVGMKIQEELQRSGGLDHLVLSPGEWPVSDNTIMHIATAEALTTDYWCLDDLYREMVRCYVEIVEKLPERRPDPATIEGCAQLKPNNYLLAWHTPFNEKGSGFGAATKAMCIGLRYWKPERLETLIEVSVECGRMTHNHPTGFLGSLCTALFVSFAAQGKPLVQWGRDMLRAVPLAEEYCRKTIRHTAEYQEHWFYFEAKWQFYLEERKISKDSENKAIFPDNYDAEEREKTYRKWSSEGRGGRRGHDAPMIAYDALLAAGNSWTELCHRAMFHGGESAATGTIAGCLFGLLYGLDLVPKGLYQDLEDKEKLEDLGAALYRLSTEEK

SEQ ID NO: 28351 - protein, 272 aa, Homo sapiens
MVRCYVEIVEKLPERRPDPATIEGCAQLKPNNYLLAWHTPFNEKGSGFGAATKAMCIGLRYWKPERLETLIEVSVECGRMTHNHPTGFLGSLCTALFVSFAAQGKPLVQWGRDMLRAVPLAEEYCRKTIRHTAEYQEHWFYFEAKWQFYLEERKISKDSENKAIFPDNYDAEEREKTYRKWSSEGRGGRRGHDAPMIAYDALLAAGNSWTELCHRAMFHGGESAATGTIAGCLFGLLYGLDLVPKGLYQDLEDKEKLEDLGAALYRLSTEEK

SEQ ID NO: 28352 - protein, 538 aa, Homo sapiens
MLQIGEDVDYLLIPREVRLAGGVWRVISKPATKEAEFRERLTQFLEEEGRTLEDVARIMEKSTPHPPQPPKKPKEPRVRRRVQQMVTPPPRLVVGTYDSSNASDSEFSDFETSRDKSRQGPRRGKKVRKMPVSYLGSKFLGSDLESEDDEELVEAFLRRQEKQPSAPPARRRVNLPVPMFEDNLGPQLSKADRWREYVSQVSWGKLKRRVKGWAPRAGPGVGEARLASTAVESAGVSSAPEGTSPGDRLGNAGDVCVPQASPRRWRPKINWASFRRRRKEQTAPTGQGADIEADQGGEAADSQREEAIADQREGAAGNQRAGAPADQGAEAADNQREEAADNQRAGAPAEEGAEAADNQREEAADNQRAEAPADQRSQGTDNHREEAADNQRAEAPADQGSEVTDNQREEAVHDQRERAPAVQGADNQRAQARAGQRAEAAHNQRAGAPGIQEAEVSAAQGTTGTAPGARARKQVKTVRFQTPGRFSWFCKRRRAFWHTPRLPTLPKRVPRAGEARNLRVLRAEARAEAEQGEQEDQL

SEQ ID NO: 28353 - protein, 660 aa, Homo sapiens
MKVTLSALDTSESSFTPLVVIELAQDVKEETKEWLKNRIIAKKKDGGAQLLFRPLLNKYEQETLENQNLYLVGASKIRMLLGAEAVGLVKECNDNTMRAFTYRTRQNFKGFDDNNDDFLTMAECQFIIKHELENLRAKDEKMIPGYPQAKLYPGKSLLRRLLTSGIVIQVFPLHDSEALKKLEDTWYTRFALKYQPIDSIRGYFGETIALYFGFLEYFTFALIPMAVIGLPYYLFVWEDYDKYVIFASFNLIWSTVILELWKRGCANMTYRWGTLLMKRKFEEPRPGFHGVLGINSITGKEEPLYPSYKRQLRIYLVSLPFVCLCLYFSLYVMMIYFDMEVWALGLHENSGSEWTSVLLYVPSIIYAIVIEIMNRLYRYAAEFLTSWENHRLESAYQNHLILKVLVFNFLNCFASLFYIAFVLKDMKLLRQSLATLLITSQILNQIMESFLPYWLQRKHGVRVKRKVQALKADIDATLYEQVILEKEMGTYLGTFDDYLELFLQFGYVSLFSCVYPLAAAFAVLNNFTEVNSDALKMCRVFKRPFSEPSANIGVWQLAFETMSVISVVTNCALIGMSPQVNAVFPESKADLILIVVAVEHALLALKFILAFAIPDKPRHIQMKLARLEFESLEALKQQQMKLVTENLKEEPMESGKEKAT

SEQ ID NO: 28354 - protein, 470 aa, Homo sapiens
MKVTLSALDTSESSFTPLVVIELAQDVKEETKEWLKNRIIAKKKDGGAQLLFRPLLNKYEQETLENQNLYLVGASKIRMLLGAEAVGLVKECNDNTMRAFTYRTRQNFKGFDDNNDDFLTMAECQFIIKHELENLRAKDEKMIPGYPQAKLYPGKSLLRRLLTSGIVIQVFPLHDSEALKKLEDTWYTRFALKYQPIENHRLESAYQNHLILKVLVFNFLNCFASLFYIAFVLKDMKLLRQSLATLLITSQILNQIMESFLPYWLQRKHGVRVKRKVQALKADIDATLYEQVILEKEMGTYLGTFDDYLELFLQFGYVSLFSCVYPLAAAFAVLNNFTEVNSDALKMCRVFKRPFSEPSANIGVWQLAFETMSVISVVTNCALIGMSPQVNAVFPESKADLILIVVAVEHALLALKFILAFAIPDKPRHIQMKLARLEFESLEALKQQQMKLVTENLKEEPMESGKEKAT

SEQ ID NO: 28355 - protein, 594 aa, Homo sapiens
MKVTLSALDTSESSFTPLVVIELAQDVKEETKEWLKNRIIAKKKDGDNNDDFLTMAECQFIIKHELENLRAKDEKMIPGYPQAKLYPGKSLLRRLLTSGIVIQVFPLHDSEALKKLEDTWYTRFALKYQPIDSIRGYFGETIALYFGFLEYFTFALIPMAVIGLPYYLFVWEDYDKYVIFASFNLIWSTVILELWKRGCANMTYRWGTLLMKRKFEEPRPGFHGVLGINSITGKEEPLYPSYKRQLRIYLVSLPFVCLCLYFSLYVMMIYFDMEVWALGLHENSGSEWTSVLLYVPSIIYAIVIEIMNRLYRYAAEFLTSWENHRLESAYQNHLILKVLVFNFLNCFASLFYIAFVLKDMKLLRQSLATLLITSQILNQIMESFLPYWLQRKHGVRVKRKVQALKADIDATLYEQVILEKEMGTYLGTFDDYLELFLQFGYVSLFSCVYPLAAAFAVLNNFTEVNSDALKMCRVFKRPFSEPSANIGVWQLAFETMSVISVVTNCALIGMSPQVNAVFPESKADLILIVVAVEHALLALKFILAFAIPDKPRHIQMKLARLEFESLEALKQQQMKLVTENLKEEPMESGKEKAT

SEQ ID NO: 28356 - protein, 549 aa, Homo sapiens
MKVTLSALDTSESSFTPLVVIELAQDVKEETKEWLKNRIIAKKKDGVRRLLTSGIVIQVFPLHDSEALKKLEDTWYTRFALKYQPIDSIRGYFGETIALYFGFLEYFTFALIPMAVIGLPYYLFVWEDYDKYVIFASFNLIWSTVILELWKRGCANMTYRWGTLLMKRKFEEPRPGFHGVLGINSITGKEEPLYPSYKRQLRIYLVSLPFVCLCLYFSLYVMMIYFDMEVWALGLHENSGSEWTSVLLYVPSIIYAIVIEIMNRLYRYAAEFLTSWENHRLESAYQNHLILKVLVFNFLNCFASLFYIAFVLKDMKLLRQSLATLLITSQILNQIMESFLPYWLQRKHGVRVKRKVQALKADIDATLYEQVILEKEMGTYLGTFDDYLELFLQFGYVSLFSCVYPLAAAFAVLNNFTEVNSDALKMCRVFKRPFSEPSANIGVWQLAFETMSVISVVTNCALIGMSPQVNAVFPESKADLILIVVAVEHALLALKFILAFAIPDKPRHIQMKLARLEFESLEALKQQQMKLVTENLKEEPMESGKEKAT

SEQ ID NO: 28357 - protein, 627 aa, Homo sapiens
MKVTLSALDTSESSFTPLVVIELAQDVKEETKEWLKNRIIAKKKDGGAQLLFRPLLNKYEQETLENQNLYLVGASKIRMLLGAEAVGLVKECNDNTMRAFTYRTRQNFKGFDDNNDDFLTMAECQFIIKHELENLRAKDEKMIPGYPQAKLYPGKSLLRRLLTSGIVIQVFPLHDSEALKKLEDTWYTRFALKYQPIDSIRGYFGETIALYFGFLEYFTFALIPMAVIGLPYYLFVWEDYDKYVIFASFNLIWSTVILELWKRGCANMTYRWGTLLMKRKFEEPRPGFHGVLGINSITGKEEPLYPSYKRQLRIYLVSLPFVCLCLYFSLYVMMIYFDMEVWALGLHENSGSEWTSVLLYVPSIIYAIVIEIMNRLYRYAAEFLTSWENHRLESAYQNHLILKVLVFNFLNCFASLFYIAFVLKDMKLLRQSLATLLITSQILNQIMESFLPYWLQRKHGVRVKRKVQALKADIDATLYEQVILEKEMGTYLGTFDDYLELFLQFGYVSLFSCVYPLAAAFAVLNNFTEVNSDALKMCRVFKRPFSEPSANIGVWQLAFETMSVISVVTNCALIGMSPQVNAVFPESKADLILIVVAVEAASCKLVSLPRYSWSTNSVPGTVIGPGV

SEQ ID NO: 28358 - protein, 582 aa, Homo sapiens
MAHEGSRQVRDRGVTRSKAEKVRPPTVPVPQVDIVPGRLSEAEWMALTALEEGEDVVGDILADLLARVMDSAFKVYLTQQCIPFTISQAREAMLQITEWRFLARDEGESAVAEDPTWGEDEEPSACTTDSWAQGSVPVLHASTSEGLENFQGEDPGGVDRIPLGRSWMGRGSQEQMESWEPSPQLRVTSAPPPTSELFQEAGPGGPVEEADGQSRGLSSAGSLSASFQLSVEEAPADDADPSLDPYLVASPQASTGRGHPLGFHLSLEDLYCCMPQLDAAGDRLELRSEGVPCIASGVLVSYPSVGGATRPSASCQQQRAGHSDVRLSAHHHRMRRKAAVKRLDPARLPCHWVRPLAEVLVPDSQTRPLEAYRGRQRGEKTKARAEPQALGPGTRVSPAAFFPLRPGIPFRDLDSGPALLFPTLNLGLSSPSLESKLPLPNSRIRFLTTHPVLPDVARSRSPKLWPSVRWPSGWEGKAELLGELWAGRTRVPPQGLELADREGQDPGRWPRTTPPVLEATSQVMWKPVLLPEALKLAPGVSMWNRSTQVLLSSGVPEQEDKEGSTFPPVEQHPIQTGAPKPR

SEQ ID NO: 28359 - protein, 986 aa, Homo sapiens
MRVNEKYSTLPAEDRSVHIINICAIEDIGYLPSEGTLLNSLSVDPDAECKYGLYFRDGRRKVDYILVYHHKRPSGNRTLVRRVQHSDTPSGARSVKQDHPLPGKGASLDAGSGEPPMDYHEDDKRFRREEYEGNLLEAGLELERDEDTKIHGVGFVKIHAPWNVLCREAEFLKLKMPTKKMYHINETRGLLKKINSVLQKITDPIQPKVAEHRPQTMKRLSYPFSREKQHLFDLSDKDSFFDSKTRSTIVYEILKRTTCTKAKYSMGITSLLANGVYAAAYPLHDGDYNGENVEFNDRKLLYEEWARYGVFYKYQPIDLVRKYFGEKIGLYFAWLGVYTQMLIPASIVGIIVFLYGCATMDENIPSMEMCDQRHNITMCPLCDKTCSYWKMSSACATARASHLFDNPATVFFSVFMALWAATFMEHWKRKQMRLNYRWDLTGFEEEEEAVKDHPRAEYEARVLEKSLKKESRNKEKRRHIPEESTNKWKQRVKTAMAGVKLTDKVKLTWRDRFPAYLTNLVSIIFMIAVTFAIVLGVIIYRISMAAALAMNSSPSVRSNIRVTVTATAVIINLVVIILLDEVYGCIARWLTKIEVPKTEKSFEERLIFKAFLLKFVNSYTPIFYVAFFKGRFVGRPGDYVYIFRSFRMEECAPGGCLMELCIQLSIIMLGKQLIQNNLFEIGIPKMKKLIRYLKLKQQSPPDHEECVKRKQRYEVDYNLEPFAGLTPEYMEMIIQFGFVTLFVASFPLAPLFALLNNIIEIRLDAKKFVTELRRPVAVRAKDIGIWYNILRGIGKLAVIINAFVISFTSDFIPRLVYLYMYSKNGTMHGFVNHTLSSFNVSDFQNGTAPNDPLDLGYEVQICRYKDYREPPWSENKYDISKDFWAVLAARLAFVIVFQNLVMFMSDFVDWVIPDIPKDISQQIHKEKVLMVELFMREEQDKQQLLETWMEKERQKDEPPCNHHNTKACPDSLGSPAPSHAYHGGVL

SEQ ID NO: 28360 - protein, 840 aa, Homo sapiens
MDYHEDDKRFRREEYEGNLLEAGLELERDEDTKIHGVGFVKIHAPWNVLCREAEFLKLKMPTKKMYHINETRGLLKKINSVLQKITDPIQPKVAEHRPQTMKRLSYPFSREKQHLFDLSDKDSFFDSKTRSTIVYEILKRTTCTKAKYSMGITSLLANGVYAAAYPLHDGDYNGENVEFNDRKLLYEEWARYGVFYKYQPIDLVRKYFGEKIGLYFAWLGVYTQMLIPASIVGIIVFLYGCATMDENIPSMEMCDQRHNITMCPLCDKTCSYWKMSSACATARASHLFDNPATVFFSVFMALWAATFMEHWKRKQMRLNYRWDLTGFEEEEDHPRAEYEARVLEKSLKKESRNKETDKVKLTWRDRFPAYLTNLVSIIFMIAVTFAIVLGVIIYRISMAAALAMNSSPSVRSNIRVTVTATAVIINLVVIILLDEVYGCIARWLTKIEVPKTEKSFEERLIFKAFLLKFVNSYTPIFYVAFFKGRFVGRPGDYVYIFRSFRMEECAPGGCLMELCIQLSIIMLGKQLIQNNLFEIGIPKMKKLIRYLKLKQQSPPDHEECVKRKQRYEVDYNLEPFAGLTPEYMEMIIQFGFVTLFVASFPLAPLFALLNNIIEIRLDAKKFVTELRRPVAVRAKDIGIWYNILRGIGKLAVIINAFVISFTSDFIPRLVYLYMYSKNGTMHGFVNHTLSSFNVSDFQNGTAPNDPLDLGYEVQICRYKDYREPPWSENKYDISKDFWAVLAARLAFVIVFQNLVMFMSDFVDWVIPDIPKDISQQIHKEKVLMVELFMREEQDKQQLLETWMEKERQKDEPPCNHHNTKACPDSLGSPAPSHAYHGGVL

SEQ ID NO: 28361 - protein, 642 aa, Homo sapiens
MLTRPSQVLLNSLSVDPDAECKYGLYFRDGRRKVDYILVYHHKRPSGNRTLVRRVQHSDTPSGARSVKQDHPLPGKGASLDAGSGEPPMDYHEDDKRFRREEYEGNLLEAGLELERDEDTKIHGVGFVKIHAPWNVLCREAEFLKLKMPTKKMYHINETRGLLKKINSVLQKITDPIQPKVAEHRPQTMKRLSYPFSREKQHLFDLSDKDSFFDSKTRSTIVYEILKRTTCTKAKYSMGITSLLANGVYAAAYPLHDGDYNGENVEFNDRKLLYEEWARYGVFYKYQPIDLVRKYFGEKIGLYFAWLGVYTQMLIPASIVGIIVFLYGCATMDENIPSMEMCDQRHNITMCPLCDKTCSYWKMSSACATARASHLFDNPATVFFSVFMALWAATFMEHWKRKQMRLNYRWDLTGFEEEEDHPRAEYEARVLEKSLKKESRNKETDKVKLTWRDRFPAYLTNLVSIIFMIAVTFAIVLGVIIYRISMAAALAMNSSPSVRSNIRVTVTATAVIINLVVIILLDEVYGCIARWLTKIEVPKTEKSFEERLIFKAFLLKFVNSYTPIFYVAFFKGRFVGRPGDYVYIFRSFRMEEVTEILFISGSPFCLAYDLSTPCTWEKQLQHICSAKSSRFLSFLLETFLFP

SEQ ID NO: 28362 - protein, 1003 aa, Homo sapiens
MATPGPRDIPLLPGSPRRLSPQAGSRGGQGPKHGQQCLKMPGPRAPGLQGGSNRDPGQPCGGESTRSSSVINNYLDANEPVSLEARLSRMHFHDSQRKVDYVLAYHYRKRGVHLAQGFPGHSLAIVSNGETGKEPHAGGPGDIELGPLDALEEERKEQREEFEHNLMEAGLELEKDLENKSQGSIFVRIHAPWQVLAREAEFLKIKVPTKKEMYEIKAGGSIAKKFSAALQKLSSHLQPRVPEHSNNKMKNLSYPFSREKMYLYNIQEKDTFFDNATRSRIVHEILKRTACSRANNTMGINSLIANNIYEAAYPLHDGEYDSPEDDMNDRKLLYQEWARYGVFYKFQPIDLIRKYFGEKIGLYFAWLGLYTSFLIPSSVIGVIVFLYGCATIEEDIPSREMCDQQNAFTMCPLCDKSCDYWNLSSACGTAQASHLFDNPATVFFSIFMALWATMFLENWKRLQMRLGYFWDLTGIEEEEERAQEHSRPEYETKVREKMLKESNQSAVQKLETNTTECGDEDDEDKLTWKDRFPGYLMNFASILFMIALTFSIVFGVIVYRITTAAALSLNKATRSNVRVTVTATAVIINLVVILILDEIYGAVAKWLTKIEVPKTEQTFEERLILKAFLLKFVNAYSPIFYVAFFKGRFVGRPGSYVYVFDGYRMEECAPGGCLMELCIQLSIIMLGKQLIQNNIFEIGVPKLKKLFRKLKDETEAGETDSAHSKHPEQWDLDYSLEPYTGLTPEYMEMIIQFGFVTLFVASFPLAPVFALLNNVIEVRLDAKKFVTELRRPDAVRTKDIGIWFDILSGIGKFSVISNAFVIAITSDFIPRLVYQYSYSHNGTLHGFVNHTLSFFNVSQLKEGTQPENSQFDQEVQFCRFKDYREPPWAPNPYEFSKQYWFILSARLAFVIIFQNLVMFLSVLVDWMIPDIPTDISDQIKKEKSLLVDFFLKEEHEKLKLMDEPALRSPGGGDRSRSRAASSAPSGQSQLGSMMSSGSQHTNV

SEQ ID NO: 28363 - protein, 999 aa, Homo sapiens
MPEDIPLLPGSPRRLSPQAGSRGGQGPKHGQQCLKMPGPRAPGLQGGSNRDPGQPCGGESTRSSSVINNYLDANEPVSLEARLSRMHFHDSQRKVDYVLAYHYRKRGVHLAQGFPGHSLAIVSNGETGKEPHAGGPGDIELGPLDALEEERKEQREEFEHNLMEAGLELEKDLENKSQGSIFVRIHAPWQVLAREAEFLKIKVPTKKEMYEIKAGGSIAKKFSAALQKLSSHLQPRVPEHSNNKMKNLSYPFSREKMYLYNIQEKDTFFDNATRSRIVHEILKRTACSRANNTMGINSLIANNIYEAAYPLHDGEYDSPEDDMNDRKLLYQEWARYGVFYKFQPIDLIRKYFGEKIGLYFAWLGLYTSFLIPSSVIGVIVFLYGCATIEEDIPSREMCDQQNAFTMCPLCDKSCDYWNLSSACGTAQASHLFDNPATVFFSIFMALWATMFLENWKRLQMRLGYFWDLTGIEEEEERAQEHSRPEYETKVREKMLKESNQSAVQKLETNTTECGDEDDEDKLTWKDRFPGYLMNFASILFMIALTFSIVFGVIVYRITTAAALSLNKATRSNVRVTVTATAVIINLVVILILDEIYGAVAKWLTKIEVPKTEQTFEERLILKAFLLKFVNAYSPIFYVAFFKGRFVGRPGSYVYVFDGYRMEECAPGGCLMELCIQLSIIMLGKQLIQNNIFEIGVPKLKKLFRKLKDETEAGETDSAHSKHPEQWDLDYSLEPYTGLTPEYMEMIIQFGFVTLFVASFPLAPVFALLNNVIEVRLDAKKFVTELRRPDAVRTKDIGIWFDILSGIGKFSVISNAFVIAITSDFIPRLVYQYSYSHNGTLHGFVNHTLSFFNVSQLKEGTQPENSQFDQEVQFCRFKDYREPPWAPNPYEFSKQYWFILSARLAFVIIFQNLVMFLSVLVDWMIPDIPTDISDQIKKEKSLLVDFFLKEEHEKLKLMDEPALRSPGGGDRSRSRAASSAPSGQSQLGSMMSSGSQHTNV

SEQ ID NO: 28364 - protein, 955 aa, Homo sapiens
MEASSSGITNGKTKVFHPEGGVDLQGYQLDMQILPDGPKSDVDFSEILNAIQEMAKDVNILFDELEAVSSPCKDDDSLLHPGNLTSTSDDASRLEAGGETVPERNKSNGLYFRDGKCRIDYILVYRKSNPQTEKREVFERNIRAEGLQMEKESSLINSDIIFVKLHAPWEVLGRYAEQMNVRMPFRRKIYYLPRRYKFMSRIDKQISRFRRWLPKKPMRLDKETLPDLEENDCYTAPFSQQRIHHFIIHNKETFFNNATRSRIVHHILQRIKYEEGKNKIGLNRLLTNGSYEAAFPLHEGSYRSKNSIRTHGAENHRHLLYECWASWGVWYKYQPLDLVRRYFGEKIGLYFAWLGWYTGMLFPAAFIGLFVFLYGVTTLDHSQVSKEVCQATDIIMCPVCDKYCPFMRLSDSCVYAKVTHLFDNGATVFFAVFMAVWATVFLEFWKRRRAVIAYDWDLIDWEEEEEEIRPQFEAKYSKKERMNPISGKPEPYQAFTDKCSRLIVSASGIFFMICVVIAAVFGIVIYRVVTVSTFAAFKWALIRNNSQVATTGTAVCINFCIIMLLNVLYEKVALLLTNLEQPRTESEWENSFTLKMFLFQFVNLNSSTFYIAFFLGRFTGHPGAYLRLINRWRLEECHPSGCLIDLCMQMGIIMVLKQTWNNFMELGYPLIQNWWTRRKVRQEHGPERKISFPQWEKDYNLQPMNAYGLFDEYLEMILQFGFTTIFVAAFPLAPLLALLNNIIEIRLDAYKFVTQWRRPLASRAKDIGIWYGILEGIGILSVITNAFVIAITSDFIPRLVYAYKYGPCAGQGEAGQKCMVGYVNASLSVFRISDFENRSEPESDGSEFSGTPLKYCRYRDYRDPPHSLVPYGYTLQFWHVLAARLAFIIVFEHLVFCIKHLISYLIPDLPKDLRDRMRREKYLIQEMMYEAELERLQKERKERKKNGKAHHNEWP

SEQ ID NO: 28365 - protein, 920 aa, Homo sapiens
MEASSSGITNGKTKVFHPVAKDVNILFDELEAVSSPCKDDDSLLHPGNLTSTSDDASRLEAGGETVPERNKSNGLYFRDGKCRIDYILVYRKSNPQTEKREVFERNIRAEGLQMEKESSLINSDIIFVKLHAPWEVLGRYAEQMNVRMPFRRKIYYLPRRYKFMSRIDKQISRFRRWLPKKPMRLDKETLPDLEENDCYTAPFSQQRIHHFIIHNKETFFNNATRSRIVHHILQRIKYEEGKNKIGLNRLLTNGSYEAAFPLHEGSYRSKNSIRTHGAENHRHLLYECWASWGVWYKYQPLDLVRRYFGEKIGLYFAWLGWYTGMLFPAAFIGLFVFLYGVTTLDHSQVSKEVCQATDIIMCPVCDKYCPFMRLSDSCVYAKVTHLFDNGATVFFAVFMAVWATVFLEFWKRRRAVIAYDWDLIDWEEEEEEIRPQFEAKYSKKERMNPISGKPEPYQAFTDKCSRLIVSASGIFFMICVVIAAVFGIVIYRVVTVSTFAAFKWALIRNNSQVATTGTAVCINFCIIMLLNVLYEKVALLLTNLEQPRTESEWENSFTLKMFLFQFVNLNSSTFYIAFFLGRFTGHPGAYLRLINRWRLEECHPSGCLIDLCMQMGIIMVLKQTWNNFMELGYPLIQNWWTRRKVRQEHGPERKISFPQWEKDYNLQPMNAYGLFDEYLEMILQFGFTTIFVAAFPLAPLLALLNNIIEIRLDAYKFVTQWRRPLASRAKDIGIWYGILEGIGILSVITNAFVIAITSDFIPRLVYAYKYGPCAGQGEAGQKCMVGYVNASLSVFRISDFENRSEPESDGSEFSGTPLKYCRYRDYRDPPHSLVPYGYTLQFWHVLAARLAFIIVFEHLVFCIKHLISYLIPDLPKDLRDRMRREKYLIQEMMYEAELERLQKERKERKKNGKAHHNEWP

SEQ ID NO: 28366 - protein, 475 aa, Homo sapiens
MAVWATVFLEFWKRRRAVIAYDWDLIDWEEEEICVVIAAVFGIVIYRVVTVSTFAAFKWALIRNNSQVATTGTAVCINFCIIMLLNVLYEKVALLLTNLEQPRTESEWENSFTLKMFLFQFVNLNSSTFYIAFFLGRFTGHPGAYLRLINRWRLEECHPSGCLIDLCMQMGIIMVLKQTWNNFMELGYPLIQNWWTRRKVRQEHGPERKISFPQWEKDYNLQPMNAYGLFDEYLEMILQFGFTTIFVAAFPLAPLLALLNNIIEIRLDAYKFVTQWRRPLASRAKDIGIWYGILEGIGILSVITNAFVIAITSDFIPRLVYAYKYGPCAGQGEAGQKCMVGYVNASLSVFRISDFENRSEPESDGSEFSGTPLKYCRYRDYRDPPHSLVPYGYTLQFWHVLAARLAFIIVFEHLVFCIKHLISYLIPDLPKDLRDRMRREKYLIQEMMYEAELERLQKERKERKKNGKAHHNEWP

SEQ ID NO: 28367 - protein, 981 aa, Homo sapiens
MVHHSGSIQSFKQQKGMNISKSEITKETSLKPSRRSLPCLAQSYAYSKSLSQSTSLFQSTESESQAPTSITLISTDKAEQVNTEENKNDSVLRCSFADLSDFCLALGKDKDYTDESEHATYDRSRLINDFVIKDKSEFKTKLSKNDMNYIASSGPLFKDGKKRIDYILVYRKTNIQYDKRNTFEKNLRAEGLMLEKEPAIASPDIMFIKIHIPWDTLCKYAERLNIRMPFRKKCYYTDGRSKSMGRMQTYFRRIKNWMAQNPMVLDKSAFPDLEESDCYTGPFSRARIHHFIINNKDTFFSNATRSRIVYHMLERTKYENGISKVGIRKLINNGSYIAAFPPHEGAYKSSQPIKTHGPQNNRHLLYERWARWGMWYKHQPLDLIRLYFGEKIGLYFAWLGWYTGMLIPAAIVGLCVFFYGLFTMNNSQVSQEICKATEVFMCPLCDKNCSLQRLNDSCIYAKVTYLFDNGGTVFFAIFMAIWATVFLEFWKRRRSILTYTWDLIEWEEEEETLRPQFEAKYYKMEIVNPITGKPEPHQPSSDKVTRLLVSVSGIFFMISLVITAVFGVVVYRLVVMEQFASFKWNFIKQYWQFATSAAAVCINFIIIMLLNLAYEKIAYLLTNLEYPRTESEWENSFALKMFLFQFVNLNSSIFYIAFFLGRFVGHPGKYNKLFDRWRLEECHPSGCLIDLCLQMGVIMFLKQIWNNFMELGYPLIQNWWSRHKIKRGIHDASIPQWENDWNLQPMNLHGLMDEYLEMVLQFGFTTIFVAAFPLAPLLALLNNIIEIRLDAYKFVTQWRRPLPARATDIGIWLGILEGIGILAVITNAFVIAITSDYIPRFVYEYKYGPCANHVEPSENCLKGYVNNSLSFFDLSELGMGKSGYCRYRDYRGPPWSSKPYEFTLQYWHILAARLAFIIVFEHLVFGIKSFIAYLIPDVPKGLHDRIRREKYLVQEMMYEAELEHLQQQRRKSGQPVHHEWP

SEQ ID NO: 28368 - protein, 835 aa, Homo sapiens
MNYIASSGPLFKDGKKRIDYILVYRKTNIQYDKRNTFEKNLRAEGLMLEKEPAIASPDIMFIKIHIPWDTLCKYAERLNIRMPFRKKCYYTDGRSKSMGRMQTYFRRIKNWMAQNPMVLDKSAFPDLEESDCYTGPFSRARIHHFIINNKDTFFSNATRSRIVYHMLERTKYENGISKVGIRKLINNGSYIAAFPPHEGAYKSSQPIKTHGPQNNRHLLYERWARWGMWYKHQPLDLIRLYFGEKIGLYFAWLGWYTGMLIPAAIVGLCVFFYGLFTMNNSQVSQEICKATEVFMCPLCDKNCSLQRLNDSCIYAKVTYLFDNGGTVFFAIFMAIWATVFLEFWKRRRSILTYTWDLIEWEEEEETLRPQFEAKYYKMEIVNPITGKPEPHQPSSDKVTRLLVSVSGIFFMISLVITAVFGVVVYRLVVMEQFASFKWNFIKQYWQFATSAAAVCINFIIIMLLNLAYEKIAYLLTNLEYPRTESEWENSFALKMFLFQFVNLNSSIFYIAFFLGRFVGHPGKYNKLFDRWRLEECHPSGCLIDLCLQMGVIMFLKQIWNNFMELGYPLIQNWWSRHKIKRGIHDASIPQWENDWNLQPMNLHGLMDEYLEMVLQFGFTTIFVAAFPLAPLLALLNNIIEIRLDAYKFVTQWRRPLPARATDIGIWLGILEGIGILAVITNAFVIAITSDYIPRFVYEYKYGPCANHVEPSENCLKGYVNNSLSFFDLSELGMGKSGYCRYRDYRGPPWSSKPYEFTLQYWHILAARLAFIIVFEHLVFGIKSFIAYLIPDVPKGLHDRIRREKYLVQEMMYEAELEHLQQQRRKSGQPVHHEWP

SEQ ID NO: 28369 - protein, 372 aa, Homo sapiens
MAYHSFLVEPISCHAWNKDRTQIAICPNNHEVHIYEKSGAKWTKVHELKEHNGQVTGIDWAPESNRIVTCGTDRNAYVWTLKGRTWKPTLVILRINRAARCVRWAPNENKFAVGSGSRVISICYFEQENDWWVCKHIKKPIRSTVLSLDWHPNNVLLAAGSCDFKCRIFSAYIKEVEERPAPTPWGSKMPFGELMFESSSSCGWVHGVCFSASGSRVAWVSHDSTVCLADADKKMAVATLASETLPLLALTFITDNSLVAAGHDCFPVLFTYDAAAGMLSFGGRLDVPKQSSQRGLTARERFQNLDKKASSEGGTAAGAGLDSLHKNSVSQISVLSGGKAKCSQFCTTGMDGGMSIWDVKSLESALKDLKIK

SEQ ID NO: 28370 - protein, 395 aa, Homo sapiens
MLPAVGSVDEEEDPAEEDCPELVPIETTQSEEEEKSGLGAKIPVTIITGYLGAGKTTLLNYILTEQHSKRVAVILNESGEGSALEKSLAVSQGGELYEEWLELRNGCLCCSVKDNGLRAIENLMQKKGKFDDILLETTGLADPGAVASMFWVDAELGSDIYLDGIITIVDSKYGLKHLTEEKPDGLINEATRQVALADIILINKTDLVPEEDVKKLRTTIRSINGLGQILETQRSRVDLSNVLDLHAFDSLSGISLQKKLQHVPGTQPHLDQSIVTITFEVPGNAKEEHLNMFIQNLLWEKNVRNKDNHCMEVIRLKGLVSIKDKSQQVIVQGVHELYDLEETPVSWKDDTERTNRLVLIGRNLDKDILKQLFIATVTETEKQWTTHFKEDQVCT

SEQ ID NO: 28371 - protein, 375 aa, Homo sapiens
MLPAVGSVDEEEDPAEEDCPELVPIETTQSEEEEKSGLGAKIPVTIITGYLGAGKTTLLNYILTEQHSKRVAVILNESGEGSALEKSLAVSQGGELYEEWLELRNGCLCCSVKDNGLRAIENLMQKKGKFDDILLETTGLADPGIITIVDSKYGLKHLTEEKPDGLINEATRQVALADIILINKTDLVPEEDVKKLRTTIRSINGLGQILETQRSRVDLSNVLDLHAFDSLSGISLQKKLQHVPGTQPHLDQSIVTITFEVPGNAKEEHLNMFIQNLLWEKNVRNKDNHCMEVIRLKGLVSIKDKSQQVIVQGVHELYDLEETPVSWKDDTERTNRLVLIGRNLDKDILKQLFIATVTETEKQWTTHFKEDQVCT

SEQ ID NO: 28372 - protein, 395 aa, Homo sapiens
MLPAVGSVDEEEDPAEEDCPELVPIETTQSEEEEKSGLGAKIPVTIITGYLGAGKTTLLNYILTEQHSKRVAVILNESGEGSALEKSLAVSQGGELYEEWLELRNGCLCCSVKDNGLRAIENLMQKKGKFDDILLETTGLADPGAVASMFWVDAELGSDIYLDGIITIVDSKYGLKHLTEEKPDGLINEATRQVALADIILINKTDLVPEEDVKKLRTTLRSINGLGQILETQRSRVDLSNVLDLHAFDSLSGISLQKKLQHVPGTQPHLDQSIVTITFDVPGNAKEEHLNMFIQNLLWEKNVRNKDNHCMEVIRLKGLVSIKDKSQQVIVQGVHELCDLEETPVSWKDDTERTNRLVLIGRNLDKDILKQLFIATVTETEKQWTTHFKEDQVCT

SEQ ID NO: 28373 - protein, 2542 aa, Homo sapiens
MLTDSGGGGTSFEEDLDSVAPRSAPAGASEPPPPGGVGLGIRTVRLFGEAGPASGVGSSGGGGSGSGTGGGDAALDFKLAAAVLRTGGGGGASGSDEDEVSEVESFILDQEDLDNPVLKTTSEIFLSSTAEGADLRTVDPETQARLEALLEAAGIGKLSTADGKAFADPEVLRRLTSSVSCALDEAAAALTRMKAENSHNAGQVDTRSLAEACSDGDVNAVRKLLDEGRSVNEHTEEGESLLCLACSAGYYELAQVLLAMHANVEDRGNKGDITPLMAASSGGYLDIVKLLLLHDADVNSQSATGNTALTYACAGGFVDIVKVLLNEGANIEDHNENGHTPLMEAASAGHVEVARVLLDHGAGINTHSNEFKESALTLACYKGHLDMVRFLLEAGADQEHKTDEMHTALMEACMDGHVEVARLLLDSGAQVNMPADSFESPLTLAACGGHVELAALLIERGANLEEVNDEGYTPLMEAAREGHEEMVALLLAQGANINAQTEETQETALTLACCGGFSEVADFLIKAGADIELGCSTPLMEASQEGHLELVKYLLASGANVHATTATGDTALTYACENGHTDVADVLLQAGADLEHESEGGRTPLMKAARAGHLCTVQFLISKGANVNRATANNDHTVVSLACAGGHLAVVELLLAHGADPTHRLKDGSTMLIEAAKGGHTNVVSYLLDYPNNVLSVPTTDVSQLPPPSQDQSQVPRVPTHTLAMVVPPQEPDRTSQENSPALLGVQKGTSKQKSSSLQVADQDLLPSFHPYQPLECIVEETEGKLNELGQRISAIEKAQLKSLELIQGEPLNKDKIEELKKNREEQVQKKKKILKELQKVERQLQMKTQQQFTKEYLETKGQKDTVSLHQQCSHRGVFPEGEGDGSLPEDHFSELPQVDTILFKDNDVDDEQQSPPSAEQIDFVPVQPLSSPQCNFSSDLGSNGTNSLELQKVSGNQQIVGQPQIAITGHDQGLLVQEPDGLMVATPAQTLTDTLDDLIAAVSTRVPTGSNSSSQTTECLTPESCSQTTSNVASQSMPPVYPSVDIDAHTESNHDTALTLACAGGHEELVSVLIARDAKIEHRDKKGFTPLILAATAGHVGVVEILLDKGGDIEAQSERTKDTPLSLACSGGRQEVVDLLLARGANKEHRNVSDYTPLSLAASGGYVNIIKILLNAGAEINSRTGSKLGISPLMLAAMNGHVPAVKLLLDMGSDINAQIETNRNTALTLACFQGRAEVVSLLLDRKANVEHRAKTGLTPLMEAASGGYAEVGRVLLDKGADVNAPPVPSSRDTALTIAADKGHYKFCELLIHRGAHIDVRNKKGNTPLWLASNGGHFDVVQLLVQAGADVDAADNRKITPLMSAFRKGHVKVVQYLVKEVNQFPSDIECMRYIATITDKELLKKCHQCVETIVKAKDQQAAEANKNASILLKELDLEKSREESRKQALAAKREKRKEKRKKKKEEQKRKQEEDEENKPKENSELPEDEDEEENDEDVEQEVPIEPPSATTTTTIGISATSATFTNVFGKKRANVVTTPSTNRKNKKNKTKETPPTAHLILPEQHMSLAQQKADKNKINGEPRGGGAGGNSDSDNLDSTDCNSESSSGGKSQELNFVMDVNSSKYPSLLLHSQEEKTSTATSKTQTRLEGEVTPNSLSTSYKTVSLPLSSPNIKLNLTSPKRGQKREEGWKEVVRRSKKLSVPASVVSRIMGRGGCNITAIQDVTGAHIDVDKQKDKNGERMITIRGGTESTRYAVQLINALIQDPAKELEDLIPKNHIRTPASTKSIHANFSSGVGTTAASSKNAFPLGAPTLVTSQATTLSTFQPANKLNKNVPTNVRSSFPVSLPLAYPHPHFALLAAQTMQQIRHPRLPMAQFGGTFSPSPNTWGPFPVRPVNPGNTNSSPKHNNTSRLPNQNGTVLPSESAGLATASCPITVSSVVAASQQLCVTNTRTPSSVRKQLFACVPKTSPPATVISSVTSTCSSLPSVSSAPITSGQAPTTFLPASTSQAQLSSQKMESFSAVPPTKEKVSTQDQPMANLCTPSSTANSCSSSASNTPGAPETHPSSSPTPTSSNTQEEAQPSSVSDLSPMSMPFASNSEPAPLTLTSPRMVAADNQDTSNLPQLAVPAPRVSHRMQPRGSFYSMVPNATIHQDPQSIFVTNPVTLTPPQGPPAAVQLSSAVNIMNGSQMHINPANKSLPPTFGPATLFNHFSSLFDSSQVPANQGWGDGPLSSRVATDASFTVQSAFLGNSVLGHLENMHPDNSKAPGFRPPSQRVSTSPVGLPSIDPSGSSPSSSSAPLASFSGIPGTRVFLQGPAPVGTPSFNRQHFSPHPWTSASNSSTSAPPTLGQPKGVSASQDRKIPPPIGTERLARIRQGGSVAQAPAGTSFVAPVGHSGIWSFGVNAVSEGLSGWSQSVMGNHPMHQQLSDPSTFSQHQPMERDDSGMVAPSNIFHQPMASGFVDFSKGLPISMYGGTIIPSHPQLADVPGGPLFNGLHNPDPAWNPMIKVIQNSTECTDAQQIWPGTWAPHIGNMHLKYVN

SEQ ID NO: 28374 - protein, 627 aa, Homo sapiens
MLTDSGGGGTSFEEDLDSVAPRSAPAGASEPPPPGGVGLGIRTVRLFGEAGPASGVGSSGGGGSGSGTGGGDAALDFKLAAAVLRTGGGGGASGSDEDEVSEVESFILDQEDLDNPVLKTTSEIFLSSTAEGADLRTVDPETQARLEALLEAAGIGKLSTADGKAFADPEVLRRLTSSVSCALDEAAAALTRMKAENSHNAGQVDTRSLAEACSDGDVNAVRKLLDEGRSVNEHTEEGESLLCLACSAGYYELAQVLLAMHANVEDRGNKGDITPLMAASSGGYLDIVKLLLLHDADVNSQSATGNTALTYACAGGFVDIVKVLLNEGANIEDHNENGHTPLMEAASAGHVEVARVLLDHGAGINTHSNEFKESALTLACYKGHLDMVRFLLEAGADQEHKTDEMHTALMEACMDGHVEVARLLLDSGAQVNMPADSFESPLTLAACGGHVELAALLIERGANLEEVNDEGYTPLMEAAREGHEEMVALLLAQGANINAQTEETQETALTLACCGGFSEVADFLIKAGADIELGCSTPLMEASQEGHLELVKYLLASGANVHATTATGDTALTYACENGHTDVADVLLQAGADLDKQEDMKTILEGIDPAKHQVRVAFDACKLLRKE

SEQ ID NO: 28375 - protein, 616 aa, Homo sapiens
MLTDSGGGGTSFEEDLDSVAPRSAPAGASEPPPPGGVGLGIRTVRLFGEAGPASGVGSSGGGGSGSGTGGGDAALDFKLAAAVLRTGGGGGASGSDEDEVSEVESFILDQEDLDNPVLKTTSEIFLSSTAEGADLRTVDPETQARLEALLEAAAFADPEVLRRLTSSVSCALDEAAAALTRMKAENSHNAGQVDTRSLAEACSDGDVNAVRKLLDEGRSVNEHTEEGESLLCLACSAGYYELAQVLLAMHANVEDRGNKGDITPLMAASSGGYLDIVKLLLLHDADVNSQSATGNTALTYACAGGFVDIVKVLLNEGANIEDHNENGHTPLMEAASAGHVEVARVLLDHGAGINTHSNEFKESALTLACYKGHLDMVRFLLEAGADQEHKTDEMHTALMEACMDGHVEVARLLLDSGAQVNMPADSFESPLTLAACGGHVELAALLIERGANLEEVNDEGYTPLMEAAREGHEEMVALLLAQGANINAQTEETQETALTLACCGGFSEVADFLIKAGADIELGCSTPLMEASQEGHLELVKYLLASGANVHATTATGDTALTYACENGHTDVADVLLQAGADLDKQEDMKTILEGIDPAKHQVRVAFDACKLLRKE

SEQ ID NO: 28376 - protein, 2544 aa, Homo sapiens
MLTDSGGGGTSFEEDLDSVAPRSAPAGASEPPPPGGVGLGIRTVRLFGEAGPASGVGSSGGGGSGSGTGGGDAALDFKLAAAVLRTGGGGGASGSDEDEVSEVESFILDQEDLDNPVLKTTSEIFLSSTAEGADLRTVDPETQARLEALLEAAGIGKLSTADGKAFADPEVLRRLTSSVSCALDEAAAALTRMKAENSHNAGQVDTRSLAEACSDGDVNAVRKLLDEGRSVNEHTEEGESLLCLACSAGYYELAQVLLAMHANVEDRGNKGDITPLMAASSGGYLDIVKLLLLHDADVNSQSATGNTALTYACAGGFVDIVKVLLNEGANIEDHNENGHTPLMEAASAGHVEVARVLLDHGAGINTHSNEFKESALTLACYKGHLDMVRFLLEAGADQEHKTDEMHTALMEACMDGHVEVARLLLDSGAQVNMPADSFESPLTLAACGGHVELAALLIERGANLEEVNDEGYTPLMEAAREGHEEMVALLLAQGANINAQTEETQETALTLACCGGFSEVADFLIKAGADIELGCSTPLMEASQEGHLELVKYLLASGANVHATTATGDTALTYACENGHTDVADVLLQAGADLEHESEGGRTPLMKAARAGHLCTVQFLISKGANVNRATANNDHTVVSLACAGGHLAVVELLLAHGADPTHRLKDGSTMLIEAAKGGHTNVVSYLLDYPNNVLSVPTTDVSQLPPPSQDQSQVPRVPTHTLAMVVPPQEPDRTSQENSPALLGVQKGTSKQKSSSLQVADQDLLPSFHPYQPLECIVEETEGKLNELGQRISAIEKAQLKSLELIQGEPLNKDKIEELKKNREEQVQKKKKILKELQKVERQLQMKTQQQFTKEYLETKGQKDTVSLHQQCSHRGVFPEGEGDGSLPEDHFSELPQVDTILFKDNDVDDEQQSPPSAEQIDFVPVQPLSSPQCNFSSDLGSNGTNSLELQKVSGNQQIVGQPQIAITGHDQGLLVQEPDGLMVATPAQTLTDTLDDLIAAVSTRVPTGSNSSSQTTECLTPESCSQTTSNVASQSMPPVYPSVDIDAHTESNHDTALTLACAGGHEELVSVLIARDAKIEHRDKKGFTPLILAATAGHVGVVEILLDKGGDIEAQSERTKDTPLSLACSGGRQEVVDLLLARGANKEHRNVSDYTPLSLAASGGYVNIIKILLNAGAEINSRTGSKLGISPLMLAAMNGHVPAVKLLLDMGSDINAQIETNRNTALTLACFQGRAEVVSLLLDRKANVEHRAKTGLTPLMEAASGGYAEVGRVLLDKGADVNAPPVPSSRDTALTIAADKGHYKFCELLIHRGAHIDVRNKKGNTPLWLASNGGHFDVVQLLVQAGADVDAADNRKITPLMSAFRKGHVKVVQYLVKEVNQFPSDIECMRYIATITDKELLKKCHQCVETIVKAKDQQAAEANKNASILLKELDLEKSREESRKQALAAKREKRKEKRKKKKEEQKRKQEEDEENKPKENSELPEDEDEEENDEDVEQEVPIEPPSATTTTTIGISATSATFTNVFGKKRANVVTTPSTNRKNKKNKTKETPPTAHLILPEQHMSLAQQKADKNKINGEPRGGGAGGNSDSDNLDSTDCNSESSSGGKSQELNFVMDVNSSKYPSLLLHSQEEKTSTATSKTQTRLEGEVTPNSLSTSYKTVSLPLSSPNIKLNLTSPKRGQKREEGWKEVVRRSKKLSVPASVVSRIMGRGGCNITAIQDVTGAHIDVDKQKDKNGERMITIRGGTESTRYAVQLINALIQDPAKELEDLIPKNHIRTPASTKSIHANFSSGVGTTAASSKNAFPLGAPTLVTSQATTLSTFQPANKLNKNVPTNVRSSFPVSLPLAYPHPHFALLAAQTMQQIRHPRLPMAQFGGTFSPSPNTWGPFPVRPVNPGNTNSSPKHNNTSRLPNQNGTVLPSESAGLATASCPITVSSVVAASQQLCVTNTRTPSSVRKQLFACVPKTSPPATVISSVTSTCSSLPSVSSAPITSGQAPTTFLPASTSQAQLSSQKMESFSAVPPTKEKVSTQDQPMANLCTPSSTANSCSSSASNTPGAPETHPSSSPTPTSSNTQEEAQPSSVSDLSPMSMPFASNSEPAPLTLTSPRMVAADNQDTSNLPQLAVPAPRVSHRMQPRGSFYSMVPNATIHQDPQSIFVTNPVTLTPPQGPPAAVQLSSAVNIMNGSQMHINPANKSLPPTFGPATLFNHFSSLFDSSQVPANQGWGDGPLSSRVATDASFTVQSAFLGNSVLGHLENMHPDNSKAPGFRPPSQRVSTSPVGLPSIDPSGSSPSSSSAPLASFSGIPGTRVFLQGPAPVGTPSFNRQHFSPHPWTSASNSCDSPIPSVSSGSSSPLSATSAPPTLGQPKGVSASQDRKIPPPIGTERLARIRQGGSVAQAPAGTSFVAPVGHSGIWSFGVNAVSEGLSGWSQSVMGNHPMHQQLSDPSTFSQHQPMERDDSGMVAPSNIFHQPMASGFVDFSKGLPISMYGGTIIPSHPQLADVPGGPLFNGLHNPDPAWNPMIKVIQNSTECTDAQQVKWA

SEQ ID NO: 28377 - protein, 581 aa, Homo sapiens
MLTDSGGGGTSFEEDLDSVAPRSAPAGASEPPPPGGVGLGIRTVRLFGEAGPASGVGSSGGGGSGSGTGGGDAALDFKLAAAVLRTGGGGGASGSDEDEVSEVESFILDQEDLDNPVLKTTSEIFLSSTAEGADLRTVDPETQARLEALLEAAGIGKLSTADGKAFADPEVLRRLTSSVSCALDEAAAALTRMKAENSHNAGQVDTRSLAEACSDGDVNAVRKLLDEGRSVNEHTEEGESLLCLACSAGYYELAQVLLAMHANVEDRGNKGDITPLMAASSGGYLDIVKLLLLHDADVNSQSATGNTALTYACAGGFVDIVKVLLNEGANIEDHNENGHTPLMEAASAGHVEVARVLLDHGAGINTHSNEFKESALTLACYKGHLDMVRFLLEAGADQEHKTDEMHTALMEACMDGHVEVARLLLDSGAQVNMPADSFESPLTLAACGGHVELAALLIERGANLEEVNDEGYTPLMEAAREGHEEMVALLLAQGANINAQTEETQETALTLACCGGFSEVADFLIKAGADIELGCSTPLMEASQEGHLELVKYLLASGQAGGHEDYFGGHRSGQASGEGGL

SEQ ID NO: 28378 - protein, 2617 aa, Homo sapiens
MLTDSGGGGTSFEEDLDSVAPRSAPAGASEPPPPGGVGLGIRTVRLFGEAGPASGVGSSGGGGSGSGTGGGDAALDFKLAAAVLRTGGGGGASGSDEDEVSEVESFILDQEDLDNPVLKTTSEIFLSSTAEGADLRTVDPETQARLEALLEAAGIGKLSTADGKAFADPEVLRRLTSSVSCALDEAAAALTRMKAENSHNAGQVDTRSLAEACSDGDVNAVRKLLDEGRSVNEHTEEGESLLCLACSAGYYELAQVLLAMHANVEDRGNKGDITPLMAASSGGYLDIVKLLLLHDADVNSQSATGNTALTYACAGGFVDIVKVLLNEGANIEDHNENGHTPLMEAASAGHVEVARVLLDHGAGINTHSNEFKESALTLACYKGHLDMVRFLLEAGADQEHKTDEMHTALMEACMDGHVEVARLLLDSGAQVNMPADSFESPLTLAACGGHVELAALLIERGANLEEVNDEGYTPLMEAAREGHEEMVALLLAQGANINAQTEETQETALTLACCGGFSEVADFLIKAGADIELGCSTPLMEASQEGHLELVKYLLASGANVHATTATGDTALTYACENGHTDVADVLLQAGADLEHESEGGRTPLMKAARAGHLCTVQFLISKGANVNRATANNDHTVVSLACAGGHLAVVELLLAHGADPTHRLKDGSTMLIEAAKGGHTNVVSYLLDYPNNVLSVPTTDVSQLPPPSQDQSQVPRVPTHTLAMVVPPQEPDRTSQENSPALLGVQKGTSKQKSSSLQVADQDLLPSFHPYQPLECIVEETEGKLNELGQRISAIEKAQLKSLELIQGEPLNKDKIEELKKNREEQVQKKKKILKELQKVERQLQMKTQQQFTKEYLETKGQKDTVSLHQQCSHRGVFPEGEGDGSLPEDHFSELPQVDTILFKDNDVDDEQQSPPSAEQIDFVPVQPLSSPQCNFSSDLGSNGTNSLELQKVSGNQQIVGQPQIAITGHDQGLLVQEPDGLMVATPAQTLTDTLDDLIAAVSTRVPTGSNSSSQTTECLTPESCSQTTSNVASQSMPPVYPSVDIDAHTESNHDTALTLACAGGHEELVSVLIARDAKIEHRDKKGFTPLILAATAGHVGVVEILLDKGGDIEAQSERTKDTPLSLACSGGRQEVVDLLLARGANKEHRNVSDYTPLSLAASGGYVNIIKILLNAGAEINSRTGSKLGISPLMLAAMNGHVPAVKLLLDMGSDINAQIETNRNTALTLACFQGRAEVVSLLLDRKANVEHRAKTGLTPLMEAASGGYAEVGRVLLDKGADVNAPPVPSSRDTALTIAADKGHYKFCELLIHRGAHIDVRNKKGNTPLWLASNGGHFDVVQLLVQAGADVDAADNRKITPLMSAFRKGHVKVVQYLVKEVNQFPSDIECMRYIATITDKELLKKCHQCVETIVKAKDQQAAEANKNASILLKELDLEKSREESRKQALAAKREKRKEKRKKKKEEQKRKQEEDEENKPKENSELPEDEDEEENDEDVEQEVPIEPPSATTTTTIGISATSATFTNVFGKKRANVVTTPSTNRKNKKNKTKETPPTAHLILPEQHMSLAQQKADKNKINGEPRGGGAGGNSDSDNLDSTDCNSESSSGGKSQELNFVMDVNSSKYPSLLLHSQEEKTSTATSKTQTRLEGEVTPNSLSTSYKTVSLPLSSPNIKLNLTSPKRGQKREEGWKEVVRRSKKLSVPASVVSRIMGRGGCNITAIQDVTGAHIDVDKQKDKNGERMITIRGGTESTRYAVQLINALIQDPAKELEDLIPKNHIRTPASTKSIHANFSSGVGTTAASSKNAFPLGAPTLVTSQATTLSTFQPANKLNKNVPTNVRSSFPVSLPLAYPHPHFALLAAQTMQQIRHPRLPMAQFGGTFSPSPNTWGPFPVRPVNPGNTNSSPKHNNTSRLPNQNGTVLPSESAGLATASCPITVSSVVAASQQLCVTNTRTPSSVRKQLFACVPKTSPPATVISSVTSTCSSLPSVSSAPITSGQAPTTFLPASTSQAQLSSQKMESFSAVPPTKEKVSTQDQPMANLCTPSSTANSCSSSASNTPGAPETHPSSSPTPTSSNTQEEAQPSSVSDLSPMSMPFASNSEPAPLTLTSPRMVAADNQDTSNLPQLAVPAPRVSHRMQPRGSFYSMVPNATIHQDPQSIFVTNPVTLTPPQGPPAAVQLSSAVNIMNGSQMHINPANKSLPPTFGPATLFNHFSSLFDSSQVPANQGWGDGPLSSRVATDASFTVQSAFLGNSVLGHLENMHPDNSKAPGFRPPSQRVSTSPVGLPSIDPSGSSPSSSSAPLASFSGIPGTRVFLQGPAPVGTPSFNRQHFSPHPWTSASNSSTSAPPTLGQPKGVSASQDRKIPPPIGTERLARIRQGGSVAQAPAGTSFVAPVGHSGIWSFGVNAVSEGLSGWSQSVMGNHPMHQQLSDPSTFSQHQPMERDDSGMVAPSNIFHQPMASGFVDFSKGLPISMYGGTIIPSHPQLADVPGGPLFNGLHNPDPAWNPMIKVIQNSTECTDAQQASLLPSVPALKGEIPSPQLTRPKKRIGRPMVASPNQRHQDHLRPKVPAGVQELTHCPDTPLLPPSDSRGHNSSNSPSLQAGGAEGAGDRGRDTR

SEQ ID NO: 28379 - protein, 776 aa, Homo sapiens
MALADKRLENLQIYKVLQCVRNKDKKQIEKLTKLGYPELINYTEPINGLSALHLASVSNDIDMVSFLLDLGAHPDVQDRMGCTPTMRAAELGHELSMEILAKAKADMTIVDNEGKGVLFYCILPTKRHYRCALIALEHGADVNNSTYEGKPIFLRACEDAHDVKDVCLTFLEKGANPNAINSSTGRTALMEASREGVVEIVRGILERGGEVNAFDNDRHHAAHFAAKGGFFDILKLLFAYNGDVGLISINGNTPLHYAAMGGFADCCKYIAQRGCDLKWKNLDHKTPRAVAKEGGFKAASKEIRRAERIANKLARPGAKNPNPLWALRLHDWSVEREAFLREAFAVLDRGDGSISKNDFVMVLEERQDYASSEQLAAIAHLHEKTRGGGVNINEFFKGTRYLNKSFVLGSYGPKKKEKGMGKKGKKGKFVLPLPICVIPEYAFPRRQDGGPPYYMIETYKNVTDSSRFNRDHPPEHPIQDDSVWYIDDSEKVFSNINIITKAGDLASLKKAFESGIPVDMKDNYYKTPLMTACASGNIDVVKFLLEKGANVNATDNFLWTPLHFACHAGQQDIVELLVESGALIDAASINNSTPLNRAIESCRLDTVKYLLDIGAKFQLENRKGHSAMDVAKAYADYRIIDLIKEKLDNLPKPAENQKLKGKTPPILKTEGPEIKKEEELLSSIYGVPTTSEGKKVQKGNVVHLNSLITSGYTKKVDITFIPRRIWSPEATTAELIRKRELRRERFTHEVDFDDFMMPFQKNITEKARALEAALKT

SEQ ID NO: 28380 - protein, 2843 aa, Homo sapiens
MAAASYDQLLKQVEALKMENSNLRQELEDNSNHLTKLETEASNMKEVLKQLQGSIEDEAMASSGQIDLLERLKELNLDSSNFPGVKLRSKMSLRSYGSREGSVSSRSGECSPVPMGSFPRRGFVNGSRESTGYLEELEKERSLLLADLDKEEKEKDWYYAQLQNLTKRIDSLPLTENFSLQTDMTRRQLEYEARQIRVAMEEQLGTCQDMEKRAQRRIARIQQIEKDILRIRQLLQSQATEAERSSQNKHETGSHDAERQNEGQGVGEINMATSGNGQGSTTRMDHETASVLSSSSTHSAPRRLTSHLGTKVEMVYSLLSMLGTHDKDDMSRTLLAMSSSQDSCISMRQSGCLPLLIQLLHGNDKDSVLLGNSRGSKEARARASAALHNIIHSQPDDKRGRREIRVLHLLEQIRAYCETCWEWQEAHEPGMDQDKNPMPAPVEHQICPAVCVLMKLSFDEEHRHAMNELGGLQAIAELLQVDCEMYGLTNDHYSITLRRYAGMALTNLTFGDVANKATLCSMKGCMRALVAQLKSESEDLQQVIASVLRNLSWRADVNSKKTLREVGSVKALMECALEVKKESTLKSVLSALWNLSAHCTENKADICAVDGALAFLVGTLTYRSQTNTLAIIESGGGILRNVSSLIATNEDHRQILRENNCLQTLLQHLKSHSLTIVSNACGTLWNLSARNPKDQEALWDMGAVSMLKNLIHSKHKMIAMGSAAALRNLMANRPAKYKDANIMSPGSSLPSLHVRKQKALEAELDAQHLSETFDNIDNLSPKASHRSKQRHKQSLYGDYVFDTNRHDDNRSDNFNTGNMTVLSPYLNTTVLPSSSSSRGSLDSSRSEKDRSLERERGIGLGNYHPATENPGTSSKRGLQISTTAAQIAKVMEEVSAIHTSQEDRSSGSTTELHCVTDERNALRRSSAAHTHSNTYNFTKSENSNRTCSMPYAKLEYKRSSNDSLNSVSSSDGYGKRGQMKPSIESYSEDDESKFCSYGQYPADLAHKIHSANHMDDNDGELDTPINYSLKYSDEQLNSGRQSPSQNERWARPKHIIEDEIKQSEQRQSRNQSTTYPVYTESTDDKHLKFQPHFGQQECVSPYRSRGANGSETNRVGSNHGINQNVSQSLCQEDDYEDDKPTNYSERYSEEEQHEEEERPTNYSIKYNEEKRHVDQPIDYSLKYATDIPSSQKQSFSFSKSSSGQSSKTEHMSSSSENTSTPSSNAKRQNQLHPSSAQSRSGQPQKAATCKVSSINQETIQTYCVEDTPICFSRCSSLSSLSSAEDEIGCNQTTQEADSANTLQIAEIKEKIGTRSAEDPVSEVPAVSQHPRTKSSRLQGSSLSSESARHKAVEFSSGAKSPSKSGAQTPKSPPEHYVQETPLMFSRCTSVSSLDSFESRSIASSVQSEPCSGMVSGIISPSDLPDSPGQTMPPSRSKTPPPPPQTAQTKREVPKNKAPTAEKRESGPKQAAVNAAVQRVQVLPDADTLLHFATESTPDGFSCSSSLSALSLDEPFIQKDVELRIMPPVQENDNGNETESEQPKESNENQEKEAEKTIDSEKDLLDDSDDDDIEILEECIISAMPTKSSRKAKKPAQTASKLPPPVARKPSQLPVYKLLPSQNRLQPQKHVSFTPGDDMPRVYCVEGTPINFSTATSLSDLTIESPPNELAAGEGVRGGAQSGEFEKRDTIPTEGRSTDEAQGGKTSSVTIPELDDNKAEEGDILAECINSAMPKGKSHKPFRVKKIMDQVQQASASSSAPNKNQLDGKKKKPTSPVKPIPQNTEYRTRVRKNADSKNNLNAERVFSDNKDSKKQNLKNNSKVFNDKLPNNEDRVRGSFAFDSPHHYTPIEGTPYCFSRNDSLSSLDFDDDDVDLSREKAELRKAKENKESEAKVTSHTELTSNQQSANKTQAIAKQPINRGQPKPILQKQSTFPQSSKDIPDRGAATDEKLQNFAIENTPVCFSHNSSLSSLSDIDQENNNKENEPIKETEPPDSQGEPSKPQASGYAPKSFHVEDTPVCFSRNSSLSSLSIDSEDDLLQECISSAMPKKKKPSRLKGDNEKHSPRNMGGILGEDLTLDLKDIQRPDSEHGLSPDSENFDWKAIQEGANSIVSSLHQAAAAACLSRQASSDSDSILSLKSGISLGSPFHLTPDQEEKPFTSNKGPRILKPGEKSTLETKKIESESKGIKGGKKVYKSLITGKVRSNSEISGQMKQPLQANMPSISRGRTMIHIPGVRNSSSSTSPVSKKGPPLKTPASKSPSEGQTATTSPRGAKPSVKSELSPVARQTSQIGGSSKAPSRSGSRDSTPSRPAQQPLSRPIQSPGRNSISPGRNGISPPNKLSQLPRTSSPSTASTKSSGSGKMSYTSPGRQMSQQNLTKQTGLSKNASSIPRSESASKGLNQMNNGNGANKKVELSRMSSTKSSGSESDRSERPVLVRQSTFIKEAPSPTLRRKLEESASFESLSPSSRPASPTRSQAQTPVLSPSLPDMSLSTHSSVQAGGWRKLPPNLSPTIEYNDGRPAKRHDIARSHSESPSRLPINRSGTWKREHSKHSSSLPRVSTWRRTGSSSSILSASSESSEKAKSEDEKHVNSISGTKQSKENQVSAKGTWRKIKENEFSPTNSTSQTVSSGATNGAESKTLIYQMAPAVSKTEDVWVRIEDCPINNPRSGRSPTGNTPPVIDSVSEKANPNIKDSKDNQAKQNVGNGSVPMRTVGLENRLNSFIQVDAPDQKGTEIKPGQNNPVPVSETNESSIVERTPFSSSSSSKHSSPSGTVAARVTPFNYNPSPRKSSADSTSARPSQIPTPVNNNTKKRDSKTDSTESSGTQSPKRHSGSYLVTSV

SEQ ID NO: 28381 - protein, 2742 aa, Homo sapiens
MAAASYDQLLKQVEALKMENSNLRQELEDNSNHLTKLETEASNMKEVLKQLQGSIEDEAMASSGQIDLLERLKELNLDSSNFPGVKLRSKMSLRSYGSREGSVSSRSGECSPVPMGSFPRRGFVNGSRESTGYLEELEKERSLLLADLDKEEKEKDWYYAQLQNLTKRIDSLPLTENFSLQTDMTRRQLEYEARQIRVAMEEQLGTCQDMEKRAQRRIARIQQIEKDILRIRQLLQSQATEAERSSQNKHETGSHDAERQNEGQGVGEINMATSGNGQGSTTRMDHETASVLSSSSTHSAPRRLTSHLGTKIRAYCETCWEWQEAHEPGMDQDKNPMPAPVEHQICPAVCVLMKLSFDEEHRHAMNELGGLQAIAELLQVDCEMYGLTNDHYSITLRRYAGMALTNLTFGDVANKATLCSMKGCMRALVAQLKSESEDLQQVIASVLRNLSWRADVNSKKTLREVGSVKALMECALEVKKESTLKSVLSALWNLSAHCTENKADICAVDGALAFLVGTLTYRSQTNTLAIIESGGGILRNVSSLIATNEDHRQILRENNCLQTLLQHLKSHSLTIVSNACGTLWNLSARNPKDQEALWDMGAVSMLKNLIHSKHKMIAMGSAAALRNLMANRPAKYKDANIMSPGSSLPSLHVRKQKALEAELDAQHLSETFDNIDNLSPKASHRSKQRHKQSLYGDYVFDTNRHDDNRSDNFNTGNMTVLSPYLNTTVLPSSSSSRGSLDSSRSEKDRSLERERGIGLGNYHPATENPGTSSKRGLQISTTAAQIAKVMEEVSAIHTSQEDRSSGSTTELHCVTDERNALRRSSAAHTHSNTYNFTKSENSNRTCSMPYAKLEYKRSSNDSLNSVSSSDGYGKRGQMKPSIESYSEDDESKFCSYGQYPADLAHKIHSANHMDDNDGELDTPINYSLKYSDEQLNSGRQSPSQNERWARPKHIIEDEIKQSEQRQSRNQSTTYPVYTESTDDKHLKFQPHFGQQECVSPYRSRGANGSETNRVGSNHGINQNVSQSLCQEDDYEDDKPTNYSERYSEEEQHEEEERPTNYSIKYNEEKRHVDQPIDYSLKYATDIPSSQKQSFSFSKSSSGQSSKTEHMSSSSENTSTPSSNAKRQNQLHPSSAQSRSGQPQKAATCKVSSINQETIQTYCVEDTPICFSRCSSLSSLSSAEDEIGCNQTTQEADSANTLQIAEIKEKIGTRSAEDPVSEVPAVSQHPRTKSSRLQGSSLSSESARHKAVEFSSGAKSPSKSGAQTPKSPPEHYVQETPLMFSRCTSVSSLDSFESRSIASSVQSEPCSGMVSGIISPSDLPDSPGQTMPPSRSKTPPPPPQTAQTKREVPKNKAPTAEKRESGPKQAAVNAAVQRVQVLPDADTLLHFATESTPDGFSCSSSLSALSLDEPFIQKDVELRIMPPVQENDNGNETESEQPKESNENQEKEAEKTIDSEKDLLDDSDDDDIEILEECIISAMPTKSSRKAKKPAQTASKLPPPVARKPSQLPVYKLLPSQNRLQPQKHVSFTPGDDMPRVYCVEGTPINFSTATSLSDLTIESPPNELAAGEGVRGGAQSGEFEKRDTIPTEGRSTDEAQGGKTSSVTIPELDDNKAEEGDILAECINSAMPKGKSHKPFRVKKIMDQVQQASASSSAPNKNQLDGKKKKPTSPVKPIPQNTEYRTRVRKNADSKNNLNAERVFSDNKDSKKQNLKNNSKVFNDKLPNNEDRVRGSFAFDSPHHYTPIEGTPYCFSRNDSLSSLDFDDDDVDLSREKAELRKAKENKESEAKVTSHTELTSNQQSANKTQAIAKQPINRGQPKPILQKQSTFPQSSKDIPDRGAATDEKLQNFAIENTPVCFSHNSSLSSLSDIDQENNNKENEPIKETEPPDSQGEPSKPQASGYAPKSFHVEDTPVCFSRNSSLSSLSIDSEDDLLQECISSAMPKKKKPSRLKGDNEKHSPRNMGGILGEDLTLDLKDIQRPDSEHGLSPDSENFDWKAIQEGANSIVSSLHQAAAAACLSRQASSDSDSILSLKSGISLGSPFHLTPDQEEKPFTSNKGPRILKPGEKSTLETKKIESESKGIKGGKKVYKSLITGKVRSNSEISGQMKQPLQANMPSISRGRTMIHIPGVRNSSSSTSPVSKKGPPLKTPASKSPSEGQTATTSPRGAKPSVKSELSPVARQTSQIGGSSKAPSRSGSRDSTPSRPAQQPLSRPIQSPGRNSISPGRNGISPPNKLSQLPRTSSPSTASTKSSGSGKMSYTSPGRQMSQQNLTKQTGLSKNASSIPRSESASKGLNQMNNGNGANKKVELSRMSSTKSSGSESDRSERPVLVRQSTFIKEAPSPTLRRKLEESASFESLSPSSRPASPTRSQAQTPVLSPSLPDMSLSTHSSVQAGGWRKLPPNLSPTIEYNDGRPAKRHDIARSHSESPSRLPINRSGTWKREHSKHSSSLPRVSTWRRTGSSSSILSASSESSEKAKSEDEKHVNSISGTKQSKENQVSAKGTWRKIKENEFSPTNSTSQTVSSGATNGAESKTLIYQMAPAVSKTEDVWVRIEDCPINNPRSGRSPTGNTPPVIDSVSEKANPNIKDSKDNQAKQNVGNGSVPMRTVGLENRLNSFIQVDAPDQKGTEIKPGQNNPVPVSETNESSIVERTPFSSSSSSKHSSPSGTVAARVTPFNYNPSPRKSSADSTSARPSQIPTPVNNNTKKRDSKTDSTESSGTQSPKRHSGSYLVTSV

SEQ ID NO: 28382 - protein, 2825 aa, Homo sapiens
MYASLGSGPVAPLPASVPPSVLGSWSTGGSRSCVRQETKSPGGARTSGHWASVWQEVLKQLQGSIEDEAMASSGQIDLLERLKELNLDSSNFPGVKLRSKMSLRSYGSREGSVSSRSGECSPVPMGSFPRRGFVNGSRESTGYLEELEKERSLLLADLDKEEKEKDWYYAQLQNLTKRIDSLPLTENFSLQTDMTRRQLEYEARQIRVAMEEQLGTCQDMEKRAQRSSQNKHETGSHDAERQNEGQGVGEINMATSGNGQGSTTRMDHETASVLSSSSTHSAPRRLTSHLGTKVEMVYSLLSMLGTHDKDDMSRTLLAMSSSQDSCISMRQSGCLPLLIQLLHGNDKDSVLLGNSRGSKEARARASAALHNIIHSQPDDKRGRREIRVLHLLEQIRAYCETCWEWQEAHEPGMDQDKNPMPAPVEHQICPAVCVLMKLSFDEEHRHAMNELGGLQAIAELLQVDCEMYGLTNDHYSITLRRYAGMALTNLTFGDVANKATLCSMKGCMRALVAQLKSESEDLQQVIASVLRNLSWRADVNSKKTLREVGSVKALMECALEVKKESTLKSVLSALWNLSAHCTENKADICAVDGALAFLVGTLTYRSQTNTLAIIESGGGILRNVSSLIATNEDHRQILRENNCLQTLLQHLKSHSLTIVSNACGTLWNLSARNPKDQEALWDMGAVSMLKNLIHSKHKMIAMGSAAALRNLMANRPAKYKDANIMSPGSSLPSLHVRKQKALEAELDAQHLSETFDNIDNLSPKASHRSKQRHKQSLYGDYVFDTNRHDDNRSDNFNTGNMTVLSPYLNTTVLPSSSSSRGSLDSSRSEKDRSLERERGIGLGNYHPATENPGTSSKRGLQISTTAAQIAKVMEEVSAIHTSQEDRSSGSTTELHCVTDERNALRRSSAAHTHSNTYNFTKSENSNRTCSMPYAKLEYKRSSNDSLNSVSSSDGYGKRGQMKPSIESYSEDDESKFCSYGQYPADLAHKIHSANHMDDNDGELDTPINYSLKYSDEQLNSGRQSPSQNERWARPKHIIEDEIKQSEQRQSRNQSTTYPVYTESTDDKHLKFQPHFGQQECVSPYRSRGANGSETNRVGSNHGINQNVSQSLCQEDDYEDDKPTNYSERYSEEEQHEEEERPTNYSIKYNEEKRHVDQPIDYSLKYATDIPSSQKQSFSFSKSSSGQSSKTEHMSSSSENTSTPSSNAKRQNQLHPSSAQSRSGQPQKAATCKVSSINQETIQTYCVEDTPICFSRCSSLSSLSSAEDEIGCNQTTQEADSANTLQIAEIKEKIGTRSAEDPVSEVPAVSQHPRTKSSRLQGSSLSSESARHKAVEFSSGAKSPSKSGAQTPKSPPEHYVQETPLMFSRCTSVSSLDSFESRSIASSVQSEPCSGMVSGIISPSDLPDSPGQTMPPSRSKTPPPPPQTAQTKREVPKNKAPTAEKRESGPKQAAVNAAVQRVQVLPDADTLLHFATESTPDGFSCSSSLSALSLDEPFIQKDVELRIMPPVQENDNGNETESEQPKESNENQEKEAEKTIDSEKDLLDDSDDDDIEILEECIISAMPTKSSRKAKKPAQTASKLPPPVARKPSQLPVYKLLPSQNRLQPQKHVSFTPGDDMPRVYCVEGTPINFSTATSLSDLTIESPPNELAAGEGVRGGAQSGEFEKRDTIPTEGRSTDEAQGGKTSSVTIPELDDNKAEEGDILAECINSAMPKGKSHKPFRVKKIMDQVQQASASSSAPNKNQLDGKKKKPTSPVKPIPQNTEYRTRVRKNADSKNNLNAERVFSDNKDSKKQNLKNNSKVFNDKLPNNEDRVRGSFAFDSPHHYTPIEGTPYCFSRNDSLSSLDFDDDDVDLSREKAELRKAKENKESEAKVTSHTELTSNQQSANKTQAIAKQPINRGQPKPILQKQSTFPQSSKDIPDRGAATDEKLQNFAIENTPVCFSHNSSLSSLSDIDQENNNKENEPIKETEPPDSQGEPSKPQASGYAPKSFHVEDTPVCFSRNSSLSSLSIDSEDDLLQECISSAMPKKKKPSRLKGDNEKHSPRNMGGILGEDLTLDLKDIQRPDSEHGLSPDSENFDWKAIQEGANSIVSSLHQAAAAACLSRQASSDSDSILSLKSGISLGSPFHLTPDQEEKPFTSNKGPRILKPGEKSTLETKKIESESKGIKGGKKVYKSLITGKVRSNSEISGQMKQPLQANMPSISRGRTMIHIPGVRNSSSSTSPVSKKGPPLKTPASKSPSEGQTATTSPRGAKPSVKSELSPVARQTSQIGGSSKAPSRSGSRDSTPSRPAQQPLSRPIQSPGRNSISPGRNGISPPNKLSQLPRTSSPSTASTKSSGSGKMSYTSPGRQMSQQNLTKQTGLSKNASSIPRSESASKGLNQMNNGNGANKKVELSRMSSTKSSGSESDRSERPVLVRQSTFIKEAPSPTLRRKLEESASFESLSPSSRPASPTRSQAQTPVLSPSLPDMSLSTHSSVQAGGWRKLPPNLSPTIEYNDGRPAKRHDIARSHSESPSRLPINRSGTWKREHSKHSSSLPRVSTWRRTGSSSSILSASSESSEKAKSEDEKHVNSISGTKQSKENQVSAKGTWRKIKENEFSPTNSTSQTVSSGATNGAESKTLIYQMAPAVSKTEDVWVRIEDCPINNPRSGRSPTGNTPPVIDSVSEKANPNIKDSKDNQAKQNVGNGSVPMRTVGLENRLNSFIQVDAPDQKGTEIKPGQNNPVPVSETNESSIVERTPFSSSSSSKHSSPSGTVAARVTPFNYNPSPRKSSADSTSARPSQIPTPVNNNTKKRDSKTDSTESSGTQSPKRHSGSYLVTSV

SEQ ID NO: 28383 - protein, 532 aa, Homo sapiens
MEELSSVGEQVFAAECILSKRLRKGKLEYLVKWRGWSSKHNSWEPEENILDPRLLLAFQKKEHEKEVQNRKRGKRPRGRPRKLTAMSSCSRRSKLKEPDAPSKSKSSSSSSSSTSSSSSSDEEDDSDLDAKRGPRGRETHPVPQKKAQILVAKPELKDPIRKKRGRKPLPPEQKATRRPVSLAKVLKTARKDLGAPASKLPPPLSAPVAGLAALKAHAKEACGGPSAMATPENLASLMKGMASSPGRGGISWQSSIVHYMNRMTQSQAQAASRLALKAQATNKCGLGLDLKVRTQKGELGMSPPGSKIPKAPSGGAVEQKVGNTGGPPHTHGASRVPAGCPGPQPAPTQELSLQVLDLQSVKNGMPGVGLLARHATATKGVPATNPAPGKGTGSGLIGASGATMPTDTSKSEKLASRAVAPPTPASKRDCVKGSATPSGQESRTAPGEARKAATLPEMSAGEESSSSDSDPDSASPPSTGQNPSVSVQTSQDWKPTRSLIEHVFVTDVTANLITVTVKESPTSVGFFNLRHY

SEQ ID NO: 28384 - protein, 211 aa, Homo sapiens
MEELSSVGEQVFAAECILSKRLRKGKLEYLVKWRGWSSKHNSWEPEENILDPRLLLAFQKKEHEKEVQNRKRGKRPRGRPRKLTAMSSCSRRSKLKVGGCAGYADPTSQHPLGVGGRQREGLGPSGRGWHFCQQSVPLLGKQEPPFFLSLSFCCQGPQPAESSSPPLPGASCFSLSCTPLCWVAGSNCCRQALFPPRGSLGDGKEQEACVQ

SEQ ID NO: 28385 - protein, 396 aa, Homo sapiens
MELDHRTSGGLHAYPGPRGGQVAKPNVILQIGKCRAEMLEHVRRTHRHLLAEVSKQVERELKGLHRSVGKLESNLDGYVPTSDSQRWKKSIKACLCRCQETIANLERWVKREMHVWREVFYRLERWADRLESTGGKYPVGSESARHTVSVGVGGPESYCHEADGYDYTVSPYAITPPPAAGELPGQEPAEAQQYQPWVPGEDGQPSPGVDTQIFEDPREFLSHLEEYLRQVGGSEEYWLSQIQNHMNGPAKKWWEFKQGSVKNWVEFKKEFLQYSEGTLSREAIQRELDLPQKQGEPLDQFLWRKRDLYQTLYVDADEEEIIQYVVGTLQPKLKRFLRHPLPKTLEQLIQRGMEVQDDLEQAAEPAGPHLPVEDEAETLTPAPNSESVASDRTQPE

SEQ ID NO: 28386 - protein, 1454 aa, Homo sapiens
MESSSSDYYNKDNEEESLLANVASLRHELKITEWSLQSLGEELSSVSPSENSDYAPNPSRSEKLILDVQPSHPGLLNYSPYENVCKISGSSTDFQKKPRDKMFSSSAPVDQEIKSLREKLNKLRQQNACLVTQNHSLMTKFESIHFELTQSRAKVSMLESAQQQAASVPILEEQIINLEAEVSAQDKVLREAENKLEQSQKMVIEKEQSLQESKEECIKLKVDLLEQTKQGKRAERQRNEALYNAEELSKAFQQYKKKVAEKLEKVQAEEEILERNLTNCEKENKRLQERCGLYKSELEILKEKLRQLKEENNNGKEKLRIMAVKNSEVMAQLTESRQSILKLESELENKDEILRDKFSLMNENRELKVRVAAQNERLDLCQQEIESSRVELRSLEKIISQLPLKRELFGFKSYLSKYQMSSFSNKEDRCIGCCEANKLVISELRIKLAIKEAEIQKLHANLTANQLSQSLITCNDSQESSKLSSLETEPVKLGGHQVESVKDQNQHTMNKQYEKERQRLVTGIEELRTKLIQIEAENSDLKVNMAHRTSQFQLIQEELLEKASNSSKLESEMTKKCSQLLTLEKQLEEKIVAYSSIAAKNAELEQELMEKNEKIRSLETNINTEHEKICLAFEKAKKIHLEQHKEMEKQIERLEAQLEKKDQQFKEQEKTMSMLQQDIICKQHHLESLDRLLTESKGEMKKENMKKDEALKALQNQVSEETIKVRQLDSALEICKEELVLHLNQLEGNKEKFEKQLKKKSEEVYCLQKELKIKNHSLQETSEQNVILQHTLQQQQQMLQQETIRNGELEDTQTKLEKQVSKLEQELQKQRESSAEKLRKMEEKCESAAHEADLKRQKVIELTGTARQVKIEMDQYKEELSKMEKEIMHLKRDGENKAMHLSQLDMILDQTKTELEKKTNAVKELEKLQHSTETELTEALQKREVLETELQNAHGELKSTLRQLQELRDVLQKAQLSLEEKYTTIKDLTAELRECKMEIEDKKQELLEMDQALKERNWELKQRAAQVTHLDMTIREHRGEMEQKIIKLEGTLEKSELELKECNKQIESLNDKLQNAKEQLREKEFIMLQNEQEISQLKKEIERTQQRMKEMESVMKEQEQYIATQYKEAIDLGQELRLTREQVQNSHTELAEARHQQVQAQREIERLSSELEDMKQLSKEKDAHGNHLAEELGASKVREAHLEARMQAEIKKLSAEVESLKEAYHMEMISHQENHAKWKISADSQKSSVQQLNEQLEKAKLELEEAQDTVSNLHQQVQDRNEVIEAANEALLTKESELTRLQAKISGHEKAEDIKFLPAPFTSPTEIMPDVQDPKFAKCFHTSFSKCTKLRRSISASDLTFKIHGDEDLSEELLQDLKKMQLEQPSTLEESHKNLTYTQPDSFKPLTYNLEADSSENNDFNTLSGMLRYINKEVRLLKKSSMQTGAGLNQGENV

SEQ ID NO: 28387 - protein, 1298 aa, Homo sapiens
MESSSSDYYNKDNEEESLLANVASLRHELKITEWSLQSLGEELSSVSPSENSDYAPNPSRSEKLILDVQPSHPGLLNYSPYENVCKISGSSTDFQKKPRDKMFSSSAPVDQEIKSLREKLNKLRQQNACLVTQNHSLMTKFESIHFELTQSRAKVSMLESAQQQAASVPILEEQIINLEAEVSAQDKVLREAENKLEQSQKMVIEKEQSLQESKEECIKLKVDLLEQTKQGKRAERQRNEALYNAEELSKAFQQYKKKVAEKLEKVQAEEEILERNLTNCEKENKRLQERCGLYKSELEILKEKLRQLKEENNNGKEKLRIMAVKNSEVMAQLTESRQSILKLESELENKDEILRDKFSLMNENRELKVRVAAQNERLDLCQQEIESSRVELRSLEKIISQLPLKRELFGFKSYLSKYQMSSFSNKEDRCIGCCEANKLVISELRIKLAIKEAEIQKLHANLTANQLSQSLITCNDSQESSKLSSLETEPVKLGGHQVESVKDQNQHTMNKQYEKERQRLVTGIEELRTKLIQIEAENSDLKVNMAHRTSQFQLIQEELLEKASNSSKLESEMTKKCSQLLTLEKQLEEKIVAYSSIAAKNAELEQELMEKNEKIRSLETNINTEHEKICLAFEKAKKIHLEQHKEMEKQIERLEAQLEKKDQQFKEQEKTMSMLQQDIICKQHHLESLDRLLTESKGEMKKENMKKDEALKALQNQVSEETIKVRQLDSALEICKEELVLHLNQLEGNKEKFEKQLKKKSEEVYCLQKELKIKNHSLQETSEQNVILQHTLQQQQQMLQQETIRNGELEDTQTKLEKQVSKLEQELQKQRESSAEKLRKMEEKCESAAHEADLKRQKVIELTGTARQVKIEMDQYKEELSKMEKEIMHLKRDGENKAMHLSQLDMILDQTKTELEKKTNAVKELEKLQHSTETELTEALQKREVLETELQNAHGELKSTLRQLQELRDVLQKAQLSLEEKYTTIKDLTAELRECKMEIEDKKQELLEMDQALKERNWELKQRAAQVTHLDMTIREHRGEMEQKIIKLEGTLEKSELELKECNKQIESLNDKLQNAKEQLREKEFIMLQNEQEISQLKKEIERTQQRMKEMESVMKEQEQYIATQYKEAIDLGQELRLTREQVQNSHTELAEARHQQVQAQREIERLSSELEDMKQLSKEKDAHGNHLAEELGASKVREAHLEARMQAEIKKLSAEVESLKEAYHMEMISHQENHAKWKISADSQKSSVQQLNEQLEKAKLELEEAQDTVSNLHQQVQDRNEVIEAANEALLTKGENV

SEQ ID NO: 28388 - protein, 204 aa, Homo sapiens
MSDLRITEAFLYMDYLCFRALCCKGPPPARPEYDLVCIGLTGSGKTSLLSKLCSESPDNVVSTTGFSIKAVPFQNAILNVKELGGADNIRKYWSRYYQGSQGVIFVLDSASSEDDLEAARNELHSALQHPQLCTLPFLILANHQDKPAARSVQEIKKYFELEPLARGKRWILQPCSLDDMDALKDSFSQLINLLEEKDHEAVRM

SEQ ID NO: 28389 - protein, 250 aa, Homo sapiens
MSAAASPASERGWKSEKLDEAQALARSCAARRPDFQPCDGLSICATHSHGKCFKLHWCCHLGWCHCKYMYQPMTPVEQLPSTEIPARPREPTNTIQISVSLTEHFLKFASVFQPPLPPDSPRYCMISDLFIDNYQVKCINGKMCYVQKQPAPHSHRMSPEEVSAHDALISKESNTPKIDHCSSPSSSEDSGINAIGAHYVESCDEDTEEGAELSSEEDYSPESSWEPDECTLLSPSQSDLEVIETIETTV

SEQ ID NO: 28390 - protein, 273 aa, Homo sapiens
MGRSRSRSSSRSKHTKSSKHNKKRSRSRSRSRDKERVRKRSKSRESKRNRRRESRSRSRSTNTAVSRRERDRERASSPPDRIDIFGRTVSKRSSLDEKQKREEEEKKAEFERQRKIRQQEIEEKLIEEETARRVEELVAKRVEEELEKRKDEIEREVLRRVEEAKRIMEKQLLEELERQRQAELAAQKAREEEERAKREELERILEENNRKIAEAQAKLAEEQLRIVEEQRKIHEERMKLEQERQRQQKEEQKIILGKGKSRPKLSFSLKTQD

SEQ ID NO: 28391 - protein, 273 aa, Homo sapiens
MGRSRSRSSSRSKHTKSSKHNKKRSRSRSRSRDKERVRKRSKSRESKRNRRRESRSRSRSTNTAVSRRERDRERASSPPDRIDIFGRTVSKRSSLDEKQKREEEEKKAEFERQRKIRQQEIEEKLIEEETARRVEELVAKRVEEELEKRKDEIEREVLRRVEEAKRIMEKQLLEELERQRQAELAAQKAREVTLGRLESRDSPWQNFQCWVLPPAQFRKRWNTDYLIPFSSKLNIAAKVNFLAYSEVLTDNLKVGSFYKTYSRILFDLMELAI

SEQ ID NO: 28392 - protein, 198 aa, Homo sapiens
MGRSRSRSSSRSKHTKRSSLDEKQKREEEEKKAEFERQRKIRQQEIEEKLIEEETARRVEELVAKRVEEELEKRKDEIEREVLRRVEEAKRIMEKQLLEELERQRQAELAAQKAREVTLGRLESRDSPWQNFQCWVLPPAQFRKRWNTDYLIPFSSKLNIAAKVNFLAYSEVLTDNLKVGSFYKTYSRILFDLMELAI

SEQ ID NO: 28393 - protein, 941 aa, Homo sapiens
MYQGEFGLNMKLGYGKFSWPTGESYHGQFYRDHCHGLGTYMWPDGSSFTGTFYLSHREGYGTMYMKTRLFQGLYKADQRFGPGVETYPDGSQDVGLWFREQLIKLCTQIPSGFSLLRYPEFSSFITHSPARISLSEEEKTEWGLQEGQDPFFYDYKRFLLNDNLTLPPEMYVYSTNSDHLPMTSSFRKELDARIFLNEIPPFVEDGEPWFIINETPLLVKIQKQTYKFRNKPAHTSWNMGAILEGKRSGFAPCGPKEQLSMEMILKAEEGNHEWICRILKDNFASADVADAKGYTVLAAAATHCHNDIVNLLLDCGADVNKCSDEGLTALSMCFLLHYPAQSFKPNVAERTIPEPQEPPKFPVVPILSSSFMDTNLESLYYEVNVPSQGSYELRPPPAPLLLPRVSGSHEGGHFQDTGQCGGSIDHRSSSLKGDSPLVKGSLGHVESGLEDVLGNTDRGSLCSAETKFESNVCVCDFSIELSQAMLERSAQSHSLLKMASPSPCTSSFDKGTMRRMALSMIERRKRWRTIKLLLRRGADPNLCCVPMQVLFLAVKAGDVDGVRLLLEHGARTDICFPPQLSTLTPLHIAAALPGEEGVQIVELLLHAITDVDAKASDEDDTYKPGKLDLLPSSLKLSNEPGPPQAYYSTDTALPEEGGRTALHMACEREDDNKCARDIVRLLLSHGANPNLLWSGHSPLSLSIASGNELVVKELLTQGADPNLPLTKGLGSALCVACDLTYEHQRNMDSKLALIDRLISHGADILKPVMLRQGEKEAVGTAVDYGYFRFFQDRRIARCPFHTLMPAERETFLARKRLLEYMGLQLRQAVFAKESQWDPTWLYLCKRAELIPSHRMKKKGPSLPRGLDVKEQGQIPFFKFCYQCGRSIGVRLLPCPRCYGILTCSKYCKTKAWTEFHKKDCGDLVAIVTQLEQVSRRREEFQ

SEQ ID NO: 28394 - protein, 717 aa, Homo sapiens
MEGAHASLSLEDEVSGAGSRQRPLEGKGGETPAAEEPGSLKNYAVFATRDVSAAPEKEEEEAEGPLRAQDLRESYIQLVQGVQEWQDGCMYQGEFGLNMKLGYGKFSWPTGESYHGQFYRDHCHGLGTYMWPDGSSFTGTFYLSHREGYGTMYMKTRLFQTHCHNDIVNLLLDCGADVNKCSDEGLTALSMCFLLHYPAQSFKPNVAERTIPEPQEPPKFPVVPILSSSFMDTNLESLYYEVNVPSQGSYELRPPPAPLLLPRVSGSHEGGHFQDTGQCGGSIDHRSSSLKGDSPLVKGSLGHVESGLEDVLGNTDRGSLCSAETKFESNVCVCDFSIELSQAMLERSAQSHSLLKMASPSPCTSSFDKGTMRRMALSMIERRKRWRTIKLLLRRGADPNLCCVPMQVLFLAVKAGDVDGVRLLLEHGARTDICFPPQLSTLTPLHIAAALPGEEGVQIVELLLHAITDVDAKASDEDDTYKPGKVVKELLTQGADPNLPLTKGLGSALCVACDLTYEHQRNMDSKLALIDRLISHGADILKPVMLRQGEKEAVGTAVDYGYFRFFQDRRIARCPFHTLMPAERETFLARKRLLEYMGLQLRQAVFAKESQWDPTWLYLCKRAELIPSHRMKKKGPSLPRGLDVKEQGQIPFFKFCYQCGRSIGVRLLPCPRCYGILTCSKYCKTKAWTEFHKKDCGDLVAIVTQLEQVSRRREEFQ

SEQ ID NO: 28395 - protein, 439 aa, Homo sapiens
MEGAHASLSLEDEVSGAGSRQRPLEGKGGETPAAEEPGSLKNYAVFATRDVSAAPEKEEEEAEGPLRAQDLRESYIQLVQGVQEWQDGCMYQGEFGLNMKLGYGKFSWPTGESYHGQFYRDHCHGLGTYMWPDGSSFTGTFYLSHREGYGTMYMKTRLFQTHCHNDIVNLLLDCGADVNKCSDEGLTALSMCFLLHYPAQSFKPNVAERTIPEPQEPPKFPVVPILSSSFMDTNLESLYYEVNVPSQGSYELRPPPAPLLLPRVSGSHEGGHFQDTGQCGGSIDHRSSSLKGDSPLVKGSLGHVESGLEDVLGNTDRGSLCSAETKFESNVCVCDFSIELSQAMLERSAQSHSLLKMASPSPCTSSFDKGTMRRMALSMIERRKRWRTIKLLLRRGADPNLCCVPMQVLFLAVKAGDVDGVRLLLEHGARTDICFPPQC

SEQ ID NO: 28396 - protein, 711 aa, Homo sapiens
MYQGEFGLNMKLGYGKFSWPTGESYHGQFYRDHCHGLGTYMWPDGSSFTGTFYLSHREGYGTMYMKTRLFQTHCHNDIVNLLLDCGADVNKCSDEGLTALSMCFLLHYPAQSFKPNVAERTIPEPQEPPKFPVVPILSSSFMDTNLESLYYEVNVPSQGSYELRPPPAPLLLPRVSGSHEGGHFQDTGQCGGSIDHRSSSLKGDSPLVKGSLGHVESGLEDVLGNTDRGSLCSAETKFESNVCVCDFSIELSQAMLERSAQSHSLLKMASPSPCTSSFDKGTMRRMALSMIERRKRWRTIKLLLRRGADPNLCCVPMQVLFLAVKAGDVDGVRLLLEHGARTDICFPPQLSTLTPLHIAAALPGEEGVQIVELLLHAITDVDAKASDEDDTYKPGKLDLLPSSLKLSNEPGPPQAYYSTDTALPEEGGRTALHMACEREDDNKCARDIVRLLLSHGANPNLLWSGHSPLSLSIASGNELVVKELLTQGADPNLPLTKGLGSALCVACDLTYEHQRNMDSKLALIDRLISHGADILKPVMLRQGEKEAVGTAVDYGYFRFFQDRRIARCPFHTLMPAERETFLARKRLLEYMGLQLRQAVFAKESQWDPTWLYLCKRAELIPSHRMKKKGPSLPRGLDVKEQGQIPFFKFCYQCGRSIGVRLLPCPRCYGILTCSKYCKTKAWTEFHKKDCGDLVAIVTQLEQVSRRREEFQ

SEQ ID NO: 28397 - protein, 483 aa, Homo sapiens
MKAFHTFCVVLLVFGSVSEAKFDDFEDEEDIVEYDDNDFAEFEDVMEDSVTESPQRVIITEDDEDETTVELEGQDENQEGDFEDADTQEGDTESEPYDDEEFEGYEDKPDTSSSKNKDPITIVDVPAHLQNSWESYYLEILMVTGLLAYIMNYIIGKNKNSRLAQAWFNTHRELLESNFTLVGDDGTNKEATSTGKLNQENEHIYNLWCSGRVCCEGMLIQLRFLKRQDLLNVLARMMRPVSDQVQIKVTMNDEDMDTYVFAVGTRKALVRLQKEMQDLSEFCSDKPKSGAKYGLPDSLAILSEMGEVTDGMMDTKMVHFLTHYADKIESVHFSDQFSGPKIMQEEGQPLKLPDTKRTLLFTFNVPGSGNTYPKDMEALLPLMNMVIYSIDKAKKFRLNREGKQKADKNRARVEENFLKLTHVQRQEAAQSRREEKKRAEKERIMNEEDPEKQRRLEEAALRREQKKLEKKQMKMKQIKVKAM

SEQ ID NO: 28398 - protein, 480 aa, Homo sapiens
MKAFHTFCVVLLVFGSVSEAKFDDFEDEEDIVEYDDNDFAEFEDVMEDSVTESPQRVIITEDDEDETTVELEGQDENQEGDFEDADTQEGDTESEPYDDEEFEGYEDKPDTSSSKNKDPITIVDVPAHLQNSWESYYLEILMVTGLLAYIMNYIIGKNKNSRLAQAWFNTHRELLESNFTLVGDDGTNKEATSTGKLNQENEHIYNLWCSGRVCCEGMLIQLRFLKRQDLLNVLARMMRPVSDQVQIKVTMNDEDMDTYVFAVGTRKALVRLQKEMQDLSEFCSDKPKSGAKYGLPDSLAILSEMGEVTDGMMDTKMVHFLTHYADKIESVHFSDQFSGPKIMQEEGQPLKLPDTKRTLLFTFNVPGSGNTYPKDMEALLPLMNMVIYSIDKAKKFRLNREGKQKADKNRARVEENFLKLTHVQRQEAAQSRREEKKRAEKERIMNEEDPEKQRRLEVRQTYHWGKTTICKDDCLCSVGC

SEQ ID NO: 28399 - protein, 174 aa, Homo sapiens
MEAPGPRALRTALCGGCCCLLLCAQLAVAGKGARGFGRGALIRLNIWPAVQGACKQLEVCEHCVEGDGARNLSSCVWEQCRPEEPGHCVAQSEVVKEGCSIYNRSEACPAAHHHPTYEPKTVTTGSPPVPEAHSPGFDGASFIGGVVLVLSLQAVAFFVLHFLKAKDSTYQTLI

SEQ ID NO: 28400 - protein, 173 aa, Homo sapiens
MEAPGPRALRTALCGGCCCLLLCAQLAVAGKGARGFGRGALIRLNIWPAVQGACKQLEVCEHCVEGDGARNLSSCVWEQCRPEEPGHCVAQSEVVKEGCSIYNRSEACPAAHHHPTYEPKTVTTGSPPVPEAHSPGFDGASFIGGVVLVLSLQAVAFFVLHFLKAKDSTYQTL

SEQ ID NO: 28401 - protein, 446 aa, Homo sapiens
MEKDKHSHFYNQKSDFRIEHSMLEELENKLIHSRKTERAKIQQQLAKIHNNVKKLQHQLKDVKPTPDFVEKLREMMEEIENAINTFKEEQRLIYEELIKEEKTTNNELSAISRKIDTWALGNSETEKAFRAISSKVPVDKVTPSTLPEEVLDFEKFLQQTGGRQGAWDDYDHQNFVKVRNKHKGKPTFMEEVLEHLPGKTQDEVQQHEKWYQKFLALEERKKESIQIWKTKKQQKREEIFKLKEKADNTPVLFHNKQEDNQKQKEEQRKKQKLAVEAWKKQKSIEMSMKCASQLKEEEEKEKKHQKERQRQFKLKLLLESYTQQKKEQEEFLRLEKEIREKAEKAEKRKNAADEISRFQERDLHKLELKILDRQAKEDEKSQKQRRLAKLKEKVENNVSRDPSRLYKPTKGWEERTKKIGPTGSGPLLHIPHRAIPTWRQGIQRRV

SEQ ID NO: 28402 - protein, 529 aa, Homo sapiens
MAALTTVVVAAAATAVAGAVAGAGAATGTGVGATPAPQQSDGCFSTSGGIRPFHLQNWKQKVNQTKKAEFVRTAEKFKNQVINMEKDKHSHFYNQKSDFRIEHSMLEELENKLIHSRKTERAKIQQQLAKIHNNVKKLQHQLKDVKPTPDFVEKLREMMEEIENAINTFKEEQRLIYEELIKEEKTTNNELSAISRKIDTWALGNSETEKAFRAISSKVPVDKVTPSTLPEEVLDFEKFLQQTGGRQGAWDDYDHQNFVKVRNKHKGKPTFMEEVLEHLPGKTQDEVQQHEKWYQKFLALEERKKESIQIWKTKKQQKREEIFKLKEKADNTPVLFHNKQEDNQKQKEEQRKKQKLAVEAWKKQKSIEMSMKCASQLKEEEEKEKKHQKERQRQFKLKLLLESYTQQKKEQEEFLRLEKEIREKAEKAEKRKNAADEISRFQERDLHKLELKILDRQAKEDEKSQKQRRLAKLKEKVENNVSRDPSRLYKPTKGWEERTKKIGPTGSGPLLHIPHRAIPTWRQGIQRRV

SEQ ID NO: 28403 - protein, 318 aa, Homo sapiens
MLSESSSFLKGVMLGSIFCALITMLGHIRIGHGNRMHHHEHHHLQAPNKEDILKISEDERMELSKSFRVYCIILVKPKDVSLWAAVKETWTKHCDKAEFFSSENVKVFESINMDTNDMWLMMRKAYKYAFDKYRDQYNWFFLARPTTFAIIENLKYFLLKKDPSQPFYLGHTIKSGDLEYVGMEGGIVLSVESMKRLNSLLNIPEKCPEQGGMIWKISEDKQLAVCLKYAGVFAENAEDADGKDVFNTKSVGLSIKEAMTYHPNQVVEGCCSDMAVTFNGLTPNQMHVMMYGVYRLRAFGHIFNDALVFLPPNGSDND

SEQ ID NO: 28404 - protein, 948 aa, Homo sapiens
MNLGDGLKLETELLDGKTKLILSPYEHKSKISVKMGNKAKIAKCPLRTKTGHILKSTQDTCIGSEKLLQKKPVGSETSQAKGEKNGMTFSSTKDLCKQCIDKDCLHIQKEISPATPNMQKTRNTVNTSLVGKQKPHKKHITAENMKSSLVCLTQDQLQQILMTVNQGNRSLSLTENGKEAKSQYSLYLNSISNQPKDENIMGLFKKTEMVSSVPAENKSVLNEHQETSKQCEQKIAIENEWKPADIFSTLGERECDRSSLEAKKAQWRKELDEQVALKKKEKEVSEKWNDPWKKSESDKIIWEKHQILDQSRETVLLEHPFSAVKQELQRKWIEELNKQIEDDRQRKIEEKIIYSKGEEHDRWAMHFDSLKSYPGSQSQLFSQSTHKQPEYFCVSPDTQELADVSSVCTPTTGSQVEPSEEEHIAKPIKDVVMANSKKTNFLRSMTALLDPAQIEERDRRRQKQLEHQKAITAQVEEKRRKKQLEEEQRKKEEQEEELRLAQEREEMQKQYEEDILKQKQKEEIMTLKTNELFQTMQRAQELAQRLKQEQRIRELAQKGHDTSRLIKNLGVDTIQMEYNASNISNSRHDSDEISGKMNTYMNSTTSKKDTGVQTDDLNIGIFTNAESHCGSLMERDITNCSSPEISAELIGQFSTKKNKQELTQDKGASLEKENNRCNDQCNQFTRIEKQTKHMKKYPKRPDWNINKPPKRYIPASEKYPKQLQKQREEKKVRRQMELLHLVEKNNPGHLSQNRGISPEIFHSSHQETESKLRWHLVKKEEEPLNIHSFSKERSPSSPVPVVKNRTQQTQNTLHLPLKNSSYERENLISGSNQTELSSGISESSHFIPYVRTNEIYYLDPDAPLSGPSTQDPQYQNSQDCGQKRQLFDSDCVRDPLLNPNMVKNRDRQQAILKGLSELRQGLLQKQKELESSLLPLAENQEESFGSSF

SEQ ID NO: 28405 - protein, 287 aa, Homo sapiens
MNLGDGLKLETELLDGKTKLILSPYEHKSKISVKMGNKAKIAKCPLRTKTGHILKSTQDTCIGSEKLLQKKPVGSETSQAKGEKNGMTFSSTKDLCKQCIDKDCLHIQKEISPATPNMQKTRNTVNTSLVGKQKPHKKHITAENMKSSLVCLTQDQLQQILMTVNQGNRSLSLTENGKEAKSQYSLYLNSISNQPKDENIMGLFKKTEMVSSVPAENKSVLNEHQETSKQCEQKIAIENEWKPADIFSTLGERECDRSSLEAKKAQWRKELVLQTVQAWYQHLLGFW

SEQ ID NO: 28406 - protein, 914 aa, Homo sapiens
MGNKAKIAKCPLRTKTGHILKSTQDTCIGSEKLLQKKPVGSETSQAKGEKNGMTFSSTKDLCKQCIDKDCLHIQKEISPATPNMQKTRNTVNTSLVGKQKPHKKHITAENMKSSLVCLTQDQLQQILMTVNQGNRSLSLTENGKEAKSQYSLYLNSISNQPKDENIMGLFKKTEMVSSVPAENKSVLNEHQETSKQCEQKIAIENEWKPADIFSTLGERECDRSSLEAKKAQWRKELDEQVALKKKEKEVSEKWNDPWKKSESDKIIWEKHQILDQSRETVLLEHPFSAVKQELQRKWIEELNKQIEDDRQRKIEEKIIYSKGEEHDRWAMHFDSLKSYPGSQSQLFSQSTHKQPEYFCVSPDTQELADVSSVCTPTTGSQVEPSEEEHIAKPIKDVVMANSKKTNFLRSMTALLDPAQIEERDRRRQKQLEHQKAITAQVEEKRRKKQLEEEQRKKEEQEEELRLAQEREEMQKQYEEDILKQKQKEEIMTLKTNELFQTMQRAQELAQRLKQEQRIRELAQKGHDTSRLIKNLGVDTIQMEYNASNISNSRHDSDEISGKMNTYMNSTTSKKDTGVQTDDLNIGIFTNAESHCGSLMERDITNCSSPEISAELIGQFSTKKNKQELTQDKGASLEKENNRCNDQCNQFTRIEKQTKHMKKYPKRPDWNINKPPKRYIPASEKYPKQLQKQREEKKVRRQMELLHLVEKNNPGHLSQNRGISPEIFHSSHQETESKLRWHLVKKEEEPLNIHSFSKERSPSSPVPVVKNRTQQTQNTLHLPLKNSSYERENLISGSNQTELSSGISESSHFIPYVRTNEIYYLDPDAPLSGPSTQDPQYQNSQDCGQKRQLFDSDCVRDPLLNPNMVKNRDRQQAILKGLSELRQGLLQKQKELESSLLPLAENQEESFGSSF

SEQ ID NO: 28407 - protein, 196 aa, Homo sapiens
MGNKAKIAKCPLRTKTGHILKSTQDTCIGSEKLLQKKPVGSETSQAKGEKNGMTFSSTKDLCKQCIDKDCLHIQKEISPATPNMQKTRNTVNTSLVGKQKPHKKHITAENMKSSLVCLTQDQLQQILMTVNQGNRSLSLTENGKEAKSQYSLYLNSISNQPKDENIMGLFKKTEMVSSVPAENKSVLNEHQETSKQ

SEQ ID NO: 28408 - protein, 1873 aa, Homo sapiens
MEPSSPQDEGLRKKQPKKPVPEILPRPPRALFCLTLENPLRKACISIVEWKPFETIILLTIFANCVALAVYLPMPEDDNNSLNLGLEKLEYFFLIVFSIEAAMKIIAYGFLFHQDAYLRSGWNVLDFTIVFLGVFTVILEQVNVIQSHTAPMSSKGAGLDVKALRAFRVLRPLRLVSGVPSLQVVLNSIFKAMLPLFHIALLVLFMVIIYAIIGLELFKGKMHKTCYFIGTDIVATVENEEPSPCARTGSGRRCTINGSECRGGWPGPNHGITHFDNFGFSMLTVYQCITMEGWTDVLYWVNDAIGNEWPWIYFVTLILLGSFFILNLVLGVLSGEFTKEREKAKSRGTFQKLREKQQLDEDLRGYMSWITQGEVMDVEDFREGKLSLDEGGSDTESLYEIAGLNKIIQFIRHWRQWNRIFRWKCHDIVKSKVFYWLVILIVALNTLSIASEHHNQPLWLTRLQDIANRVLLSLFTTEMLMKMYGLGLRQYFMSIFNRFDCFVVCSGILEILLVESGAMTPLGISVLRCIRLLRIFKITKYWTSLSNLVASLLNSIRSIASLLLLLFLFIVIFALLGMQLFGGRYDFEDTEVRRSNFDNFPQALISVFQVLTGEDWTSMMYNGIMAYGGPSYPGMLVCIYFIILFVCGNYILLNVFLAIAVDNLAEAESLTSAQKAKAEEKKRRKMSKGLPDKSEEEKSTMAKKLEQKPKGEGIPTTAKLKIDEFESNVNEVKDPYPSADFPGDDEEDEPEIPLSPRPRPLAELQLKEKAVPIPEASSFFIFSPTNKIRVLCHRIVNATWFTNFILLFILLSSAALAAEDPIRADSMRNQILKHFDIGFTSVFTVEIVLKMTTYGAFLHKGSFCRNYFNMLDLLVVAVSLISMGLESSAISVVKILRVLRVLRPLRAINRAKGLKHVVQCMFVAISTIGNIVLVTTLLQFMFACIGVQLFKGKFFRCTDLSKMTEEECRGYYYVYKDGDPMQIELRHREWVHSDFHFDNVLSAMMSLFTVSTFEGWPQLLYKAIDSNAEDVGPIYNNRVEMAIFFIIYIILIAFFMMNIFVGFVIVTFQEQGETEYKNCELDKNQRQCVQYALKARPLRCYIPKNPYQYQVWYIVTSSYFEYLMFALIMLNTICLGMQHYNQSEQMNHISDILNVAFTIIFTLEMILKLMAFKARGYFGDPWNVFDFLIVIGSIIDVILSEIDTFLASSGGLYCLGGGCGNVDPDESARISSAFFRLFRVMRLIKLLSRAEGVRTLLWTFIKSFQALPYVALLIVMLFFIYAVIGMQMFGKIALVDGTQINRNNNFQTFPQAVLLLFRCATGEAWQEILLACSYGKLCDPESDYAPGEEYTCGTNFAYYYFISFYMLCAFLVINLFVAVIMDNFDYLTRDWSILGPHHLDEFKAIWAEYDPEAKGRIKHLDVVTLLRRIQPPLGFGKFCPHRVACKRLVGMNMPLNSDGTVTFNATLFALVRTALKIKTEGNFEQANEELRAIIKKIWKRTSMKLLDQVIPPIGDDEVTVGKFYATFLIQEHFRKFMKRQEEYYGYRPKKDIVQIQAGLRTIEEEAAPEICRTVSGDLAAEEELERAMVEAAMEEGIFRRTGGLFGQVDNFLERTNSLPPVMANQRPLQFAEIEMEEMESPVFLEDFPQDPRTNPLARANTNNANANVAYGNSNHSNSHVFSSVHYEREFPEETETPATRGRALGQPCRVLGPHSKPCVEMLKGLLTQRAMPRGQAPPAPCQCPRVESSMPEDRKSSTPGSLHEETPHSRSTRENTSRCSAPATALLIQKALVRGGLGTLAADANFIMATGQALADACQMEPEEVEIMATELLKGREAPEGMASSLGCLNLGSSLGSLDQHQGSQETLIPPRL

SEQ ID NO: 28409 - protein, 460 aa, Homo sapiens
MHSPPRDQAAIMLWKLVENVKYEDIYEDRHDGVPSHSSRLSQLGSVSQGPYSSAPPLSHTPSSDFQPPYFPPPYQPLPYHQSQDPYSHVNDPYSLNPLHQPQQHPWGQRQRQEVGSEAGSLLPQPRAALPQLSGLDPRRDYHSVRRPDVLLHSAHHGLDAGMGDSLSLHGLGHPGMEDVQSVEDANNSGMNLLDQSVIKKVPVPPKSVTSLMMNKDGFLGGMSVNTGEVFCSVPGRLSLLSSTSKYKVTVGEVQRRLSPPECLNASLLGGVLRRAKSKNGGRSLRERLEKIGLNLPAGRRKAANVTLLTSLVEGEAVHLARDFGYICETEFPAKAVSEYLNRQHTDPSDLHSRKNMLLATKQLCKEFTDLLAQDRTPIGNSRPSPILEPGIQSCLTHFSLITHGFGAPAICAALTALQNYLTEALKGMDKMFLNNTTTNRHTSGEGPGSKTGDKEEKHRK

SEQ ID NO: 28410 - protein, 469 aa, Homo sapiens
MHSPPRDQAAIMLWKLVENVKYEDIYEMLVHTYSSMDRHDGVPSHSSRLSQLGSVSQGPYSSAPPLSHTPSSDFQPPYFPPPYQPLPYHQSQDPYSHVNDPYSLNPLHQPQQHPWGQRQRQEVGSEAGSLLPQPRAALPQLSGLDPRRDYHSVRRPDVLLHSAHHGLDAGMGDSLSLHGLGHPGMEDVQSVEDANNSGMNLLDQSVIKKVPVPPKSVTSLMMNKDGFLGGMSVNTGEVFCSVPGRLSLLSSTSKYKVTVGEVQRRLSPPECLNASLLGGVLRRAKSKNGGRSLRERLEKIGLNLPAGRRKAANVTLLTSLVEGEAVHLARDFGYICETEFPAKAVSEYLNRQHTDPSDLHSRKNMLLATKQLCKEFTDLLAQDRTPIGNSRPSPILEPGIQSCLTHFSLITHGFGAPAICAALTALQNYLTEALKGMDKMFLNNTTTNRHTSGEGPGSKTGDKEEKHRK

SEQ ID NO: 28411 - protein, 203 aa, Homo sapiens
MAEGDNRSTNLLAAETASLEEQLQGWGEVMLMADKVLRWERAWFPPAIMGVVSLVFLIIYYLDPSVLSGVSCFVMFLCLADYLVPILAPRIFGSNKWTTEQQQRFHEICSNLVKTRRRAVGWWKRLFTLKEEKPKMYFMTMIVSLAAVAWVGQQVHNLLLTYLIVTSLLLLPGLNQHGIILKYIGMAKREINKLLKQKEKKNE

SEQ ID NO: 28412 - protein, 174 aa, Homo sapiens
MLMADKVLRWERAWFPPAIMGVVSLVFLIIYYLDPSVLSGVSCFVMFLCLADYLVPILAPRIFGSNKWTTEQQQRFHEICSNLVKTRRRAVGWWKRLFTLKEEKPKMYFMTMIVSLAAVAWVGQQVHNLLLTYLIVTSLLLLPGLNQHGIILKYIGMAKREINKLLKQKEKKNE

SEQ ID NO: 28413 - protein, 151 aa, Homo sapiens
MAEGDNRSTNLLAAETASLEEQLQGWGEVMLMADKVLRWERAWFPPAIMGVVSLVFLIIYYLDPSVLSGVSCFVMFLCLADYLVPILAPRIFGSNKWTTEQQQRNLLLTYLIVTSLLLLPGLNQHGIILKYIGMAKREINKLLKQKEKKNE

SEQ ID NO: 28414 - protein, 454 aa, Homo sapiens
MLAENLVEEFEMKEDEPWYDHQDLQQDLQLAAELGKTLLDRNTELEDSVQQMYTTNQEQLQEIEYLTKQVELLRQMNEQHAKVYEQLDVTARELEETNQKLVADSKASQQKILSLTETIECLQTNIDHLQSQVEELKSSGQGRRSPGKCDQEKPAPSFACLKELYDLRQHFVYDHVFAEKITSLQGQPSPDEEENEHLKKTVTMLQAQLSLERQKRVTMEEEYGLVLKENSELEQQLGATGAYRARALELEAEVAEMRQMLQSEHPFVNGVEKLVPDSLYVPFKEPSQSLLEEMFLTVPESHRKPLKRSSSETILSSLAGSDIVKGHEETCIRRAKAVKQRGISLLHEVDTQYSALKVKYEELLKKCQEEQDSLSHKAVQTSRAAAKDLTGVNAQSEPVASGWELASVNPEPVSSPTTPPEYKALFKEIFSCIKKTKQEIDEQRTKYRSLSSHS

SEQ ID NO: 28415 - protein, 152 aa, Homo sapiens
MDARRMKKEEGLTENTGLPRKLLEKHDPWPAYVTYTSQTVKRLIEKSKTRELECMRALEERPWASRQNKPSSVIQPKRRKSSKSSGKAVFRDTLSESTLSMWGAYSVLAMAPTMIPEPTHLHADSRDCPTENYNKIIFARKPMMRMLPTVRY

SEQ ID NO: 28416 - protein, 392 aa, Homo sapiens
MATAAQGPLSLLWGWLWSERFWLPENVSWADLEGPADGYGYPRGRHILSVFPLAAGIFFVRLLFERFIAKPCALCIGIEDSGPYQAQPNAILEKVFISITKYPDKKRLEGLSKQLDWNVRKIQCWFRHRRNQDKPPTLTKFCESMWRFTFYLCIFCYGIRFLWSSPWFWDIRQCWHNYPFQPLSSGLYHYYIMELAFYWSLMFSQFTDIKRKDFLIMFVHHLVTIGLISFSYINNMVRVGTLIMCLHDVSDFLLEAAKLANYAKYQRLCDTLFVIFSAVFMVTRLGIYPFWILNTTLFESWEIIGPYASWWLLNGLLLTLQLLHVIWSYLIARIALKALIRGKVSKDDRSDVESSSEEEDVTTCTKSPCDSSSSNGANRVNGHMGGSYWAEE

SEQ ID NO: 28417 - protein, 334 aa, Homo sapiens
MMKPRPKRFIAKPCALCIGIEDSGPYQAQPNAILEKVFISITKYPDKKRLEGLSKQLDWNVRKIQCWFRHRRNQDKPPTLTKFCESMWRFTFYLCIFCYGIRFLWSSPWFWDIRQCWHNYPFQPLSSGLYHYYIMELAFYWSLMFSQFTDIKRKDFLIMFVHHLVTIGLISFSYINNMVRVGTLIMCLHDVSDFLLEAAKLANYAKYQRLCDTLFVIFSAVFMVTRLGIYPFWILNTTLFESWEIIGPYASWWLLNGLLLTLQLLHVIWSYLIARIALKALIRGKVSKDDRSDVESSSEEEDVTTCTKSPCDSSSSNGANRVNGHMGGSYWAEE

SEQ ID NO: 28418 - protein, 265 aa, Homo sapiens
MYVGYVLDKDSPVYPGPARPASLGLGPQAYGPPAPPPAPPQYPDFSSYSHVEPAPAPPTAWGAPFPAPKDDWAAAYGPGPAAPAASPASLAFGPPPDFSPVPAPPGPGPGLLAQPLGGPGTPSSPGAQRPTPYEWMRRSVAAGGGGGSGKTRTKDKYRVVYTDHQRLELEKEFHYSRYITIRRKSELAANLGLTERQVKIWFQNRRAKERKVNKKKQQQQQPPQPPMAHDITATPAGPSLGGLCPSNTSLLATSSPMPVKEEFLP

SEQ ID NO: 28419 - protein, 130 aa, Homo sapiens
MRRSVAAGGGGGSGKTRTKDKYRVVYTDHQRLELEKEFHYSRYITIRRKSELAANLGLTERQVKIWFQNRRAKERKVNKKKQQQQQPPQPPMAHDITATPAGPSLGGLCPSNTSLLATSSPMPVKEEFLP

SEQ ID NO: 28420 - protein, 177 aa, Homo sapiens
MQVEVQSLSLEECPWRLPGPQCECEALLPSGARRRIDLRLSGRAVAVWVHVRGGPGQFNLSYATGRHKKPNPHQNMNRGMEFIAPVSAPTKSGAPWHFLSQGPTDAQRAVRIRPGTRMGLSSDPVVGTLSSSYLDLLTLSYKPGRTVTSSYLNVRGHEVRKLQNSVEATRISRTDSS

SEQ ID NO: 28421 - protein, 194 aa, Homo sapiens
MAKQKRKVPEVTEKKNKKLKKASAEGPLLGPEAAPSGEGAGSKGEAVLRPGLDAEPELSPEEQRVLERKLKKERKKEERQRLREAGLVAQHPPARRSGAELALDYLCRWAQKHKNWRFQKTRQTWLLLHMYDSDKVPDEHFSTLLAYLEGLQGRARELTVQKAEALMRELDEEGSDPPLPGRAQRIRQVLQLLS

SEQ ID NO: 28422 - protein, 295 aa, Homo sapiens
MRNTSKELQGATHRYAPCDWYYHVPVKRSEKAVDAPPASQIPGLSNLGDSHSENLPGTRRYWIKETDSEYVKLAKQGGRPDLLKHFAPGTRKGSPVAYSLPDWYIHHSKPPTASQQEVRAVSMPDYMVHEEFNPDQANGSYASRRGPFDFDMKTVWQREAEELEKEKKKLRLPAIDSKYLSKAGTPLGPKNPAGSRLSFPPVPGQKNSSPTNFSKLISNGYKDEWLQQQQRADSDKRTPKTSRASVLSQSPRDLEGPQDAARLQDAEASEGPEDTPESSQSPEESVSASTPAELK

SEQ ID NO: 28423 - protein, 153 aa, Homo sapiens
MPDYMVHEEFNPDQANGSYASRRGPFDFDMKTVWQREAEELEKEKKKLRLPAIDSKYLSKAGTPLGPKNPAGSRLSFPPVNGYKDEWLQQQQRADSDKRTPKTSRASVLSQSPRDLEGPQDAARLQDAEASEGPEDTPGPEESVSASTPAELK

SEQ ID NO: 28424 - protein, 907 aa, Homo sapiens
MSGQTLTDRIAAAQYSVTGSAVARAVCKATTHEVMGPKKKHLDYLIQATNETNVNIPQMADTLFERATNSSWVVVFKALVTTHHLMVHGNERFIQYLASRNTLFNLSNFLDKSGSHGYDMSTFIRRYSRYLNEKAFSYRQMAFDFARVKKGADGVMRTMAPEKLLKSMPILQGQIDALLEFDVHPNELTNGVINAAFMLLFKDLIKLFACYNDGVINLLEKFFEMKKGQCKDALEIYKRFLTRMTRVSEFLKVAEQVGIDKGDIPDLTQAPSSLMETLEQHLNTLEGKKPGNNEGSGAPSPLSKSSPATTVTSPNSTPAKTIDTSPPVDLFATASAAVPVSTSKPSSDLLDLQPDFSSGGAAAAAAPAPPPPAGGATAWGDLLGEDSLAALSSVPSEAQISDPFAPEPTPPTTTAEIATASASASTTTTVTAVTAEVDLFGDAFAASPGEAPAASEGAAAPATPTPVAAALDACSGNDPFAPSEGSAEAAPELDLFAMKPPETSVPVVTPTASTAPPVPATAPSPAPAVAAAAAATTAATAAATTTTTTSAATATTAPPALDIFGDLFESTPEVAAAPKPDAAPSIDLFSTDAFSSPPQGASPVPESSLTADLLSVDAFAAPSPATTASPAKVDSSGVIDLFGDAFGSSASEPQPASQAASSSSASADLLAGFGGSFMAPSPSPVTPAQNNLLQPNFEAAFGTTPSTSSSSSFDPSVFDGLGDLLMPTMAPAGQPAPVSMVPPSPAMAASKALGSDLDSSLASLVGNLGISGTTTKKGDLQWNAGEKKLTGGANWQPKVAPATWSAGVPPSAPLQGAVPPTSSVPPVAGAPSVGQPGAGFGMPPAGTGMPMMPQQPVMFAQPMMRPPFGAAAVPGTQLSPSPTPASQSPKKPPAKDPLADLNIKDFL

SEQ ID NO: 28425 - protein, 58 aa, Homo sapiens
MSGQTLTDRIAAAQYSVTGSAVARAVCKATTHEVMGPKKKHLDYLIQATNETNVNIPQ

SEQ ID NO: 28426 - protein, 600 aa, Homo sapiens
MSGQTLTDRIAAAQYSVTGSAVARAVCKATTHEVMGPKKKHLDYLIQATNETNVNIPQMADTLFERATNSSWVVVFKALVTTHHLMVHGNERFIQYLASRNTLFNLSNFLDKSGSHGYDMSTFIRRYSRYLNEKAFSYRQMAFDFARVKKGADGVMRTMAPEKLLKSMPILQGQIDALLEFDVHPNELTNGVINAAFMLLFKDLIKLFACYNDGVINLLEKFFEMKKGQCKDALEIYKRFLTRMTRVSEFLKVAEAPSSLMETLEQHLNTLEGKKPGNKSGAPSPLSKSSPATTVTSPNSTPAKTIDTSPPVDLFATASAAVPVSTSKPSSDLLDLQPDFSSGGAAAAAAPAPPPPAGGATAWGGFGGSFMAPSPSPVTPAQNNLLQPNFEAAFGTTPSTSSSSSFDPSVFDGLGDLLMPTMAPAGQPAPVSMVPPSPAMAASKALGSDLDSSLASLVGNLGISGTTTKKGDLQWNAGEKKLTGGANWQPKVAPATWSAGVPPSAPLQGAVPPTSSVPPVAGAPSVGQPGAGFGMPPAGTGMPMMPQQPVMFAQPMMRPPFGAAAVPGTQLSPSPTPASQSPKKPPAKDPLADLNIKDFL

SEQ ID NO: 28427 - protein, 877 aa, Homo sapiens
MSGQTLTDRIAAAQYSVTGSAVARAVCKATTHEVMGPKKKHLDYLIQATNETNVNIPQMADTLFERATNSSWVVVFKALVTTHHLMVHGNERFIQYLASRNTLFNLSNFLDKSGSHGYDMSTFIRRYSRYLNEKAFSYRQMAFDFARVKKGADGVMRTMAPEKLLKSMPILQGQIDALLEFDVHPNELTNGVINAAFMLLFKDLIKLFACYNDGVINLLEKFFEMKKGQCKDALEIYKRFLTRMTRVSEFLKVAEQVGIDKGDIPDLTQAPSSLMETLEQHLNTLEGKKPGNKSGAPSPLSKSSPATTVTSPNSTPAKTIDTSPPVDLFATASAAVPVSTSKPSSDLLDLQPDFSSGGAAAAAAPAPPPPAGGATAWGDLLGEDSLAALSSVPSEAQISDPFAPEPTPPTTTAEIATASASASTTTTVTAVTAEVDLFGDAFAASPGEAPAASEGAAAPATPTPVAAALDACSGNDPFAPSEGSAEAAPELDLFAMKPPETSVPVVTPTASTAPPVPATAPSPAPAVAAAAAATTAATAAATTTTTTSAATATTAPPALDIFGDLFESTPEVAAAPKPDAAPSIDLFSTDAFSSPPQGASPVPESSLTADLLSDAFGSSASEPQPASQAASSSSASADLLAGFGGSFMAPSPSPVTPAQNNLLQPNFEAAFGTTPSTSSSSSFDPSVFDGLGDLLMPTMAPAGQPAPVSMVPPSPAMAASKALGSDLDSSLASLVGNLGISGTTTKKGDLQWNAGEKKLTGGANWQPKVAPATWSAGVPPSAPLQGAVPPTSSVPPVAGAPSVGQPGAGFGMPPAGTGMPMMPQQPVMFAQPMMRPPFGAAAVPGTQLSPSPTPASQSPKKPPAKDPLADLNIKDFL

SEQ ID NO: 28428 - protein, 249 aa, Homo sapiens
MEMGRRIHLELRNRTPSDVKELVLDNSRSNEGKLEGLTDEFEELEFLSTINVGLTSIANLPKLNKLKKLELSDNRVSGGLEVLAEKCPNLTHLNLSGNKIKDLSTIEPLKKLENLKSLDLFNCEVTNLNDYRENVFKLLPQLTYLDGYDRDDKEAPDSDAEGYVEGLDDEEEDEDEEEYDEDAQVVEDEEDEDEEEEGEEEDVSGEEEEDEEGYNDGEVDDEEDEEELGEEERGQKRKREPEDEGEDDD

SEQ ID NO: 28429 - protein, 490 aa, Homo sapiens
MAQRAVWLISHEPGTPLCGTVRFSRRYPTVEKRARVFNGASYVPVPEDGPFLKALLFELRLLDDDKDFVESRDSCSRINKTSIYGLLIGGEELWPVVAFLKNDMIYACVPLVEQTLSPRPPLISVSGVSQGFEFLFGIQDFLYSGQKNDSELNTKLSQLPDLLLQACPFGTLLDANLQNSLDNTNFASVTQPQKQPAWKTGTYKGKPQVSISITEKVKSMQYDKQGIADTWQVVGTVTCKCDLEGIMPNVTISLSLPTNGSPLQDILVHPCVTSLDSAILTSSSIDAMDDSAFSGPYKFPFTPPLESFNLCFYTSQVPVPPILGFYQMKEEEVQLRITINLKLHESVKNNFEFCEAHIPFYNRGPITHLEYKTSFGQLEVFREKSLLIWIIGQKFPKSMEISLSGTVTFGAKSHEKQPFDPICTGETAYLKLHFRILDYTLTGCYADQHSVQVFASGKPKISAHRKLISSDYYIWNSKAPAPVTYGSLLL

SEQ ID NO: 28430 - protein, 284 aa, Homo sapiens
MAQRAVWLISHEPGTPLCGTVRFSRRYPTVEKRARVFNGASYVPVPEDGPFLKALLFELRLLDDDKDFVESRDSCSRINKTSIYGLLIGGEELWPVVAFLKNDMIYACVPLVEQTLSPRPPLISVSGVSQGFEFLFGIQDFLYSGQKNDSELNTKLSQLPDLLLQACPFGTLLDANLQNSLDNTNFASVTQPQKQPAWKTGTYKGKPQVSISITEKVKSMQYDKQGIADTWQVVGTVTCKVRFFSGTCFIVLFNIWRKVKFASCILNNIFYFHLKQQFLNGRVM

SEQ ID NO: 28431 - protein, 453 aa, Homo sapiens
MISQFFILSSKGDPLIYKDFRGDSGGRDVAELFYRKLTGLPGDESPVVMHHHGRHFIHIRHSGLYLVVTTSENVSPFSLLELLSRLATLLGDYCGSLGEGTISRNVALVYELLDEVLDYGYVQTTSTEMLRNFIQTEAVVSKPFSLFDLSSVGLFGAETQQSKVAPSSAASRPVLSSRSDQSQKNEVFLDVVERLSVLIASNGSLLKVDVQGEIRLKSFLPSGSEMRIGLTEEFCVGKSELRGYGPGIRVDEVSFHSSVNLDEFESHRILRLQPPQGELTVMRYQLSDDLPSPLPFRLFPSVQWDRGSGRLQVYLKLRCDLLSKSQALNVRLHLPLPRGVVSLSQELSSPEQKAELAEGALRWDLPRVQGGSQLSGLFQMDVPGPPGPPSHGLSTSASPLGLGPASLSFELPRHTCSGLQVRFLRLAFRPCGNANPHKWVRHLSHSDAYVIRI

SEQ ID NO: 28432 - protein, 872 aa, Homo sapiens
MAEEKGGKQVLEESAFEEMERDFQGVLHELSGDKSLEKFRIEYERLHAVMKKSYDNEKRLMAKCRELNAEIVVNSAKVATALKLSQDDQTTIASLKKEIEKAWKMVDSAYDKEQKAKETILALKEEIVNLTKLVEQGSGLSMDQHSNIRDLLRFKEEVTKERDQLLSEVVKLRESLAQTTEQQQETERSKEEAEHAISQFQQEIQQRQNEASREFRKKEKLEKELKQIQADMDSRQTEIKALQQYVQKSKEELQKLEQQLKEQKILNERAAKELEQFQMRNAKLQQENEQHSLVCEQLSQENQQKALELKAKEEEVHQMRLDIGKLNKIREQIHKKLHHTEDQKAEVEQHKETLKNQIVGLEREVEASKKQAELDRKAMDELLRERDILNKNMLKAVNATQKQTDLVKLHEQAKRNLEGEIQNYKDEAQKQRKIIFHLEKERDRYINQASDLTQKVLMNMEDIKVRETQIFDYRKKIAESEIKLKQQQNLYEAVRSDRNLYSKNLVEAQDEITDMKRKLKIMIHQVDELKEDISAKESALVKLHLEQQRIEKEKETLKAELQKLRQQALETKHFIEKQEAEERKLLRIIAEADGERLRQKKELDQVISERDILGSQLVRRNDELALLYEKIKIQQSVLNKGESQYNQRLEDMRILRLEIKKLRREKGILARSMANVEELRQEFFHMQRELLKERTRCRALEEELENPLNVHRWRKLEASDPNAYELIQKIHTLQKRLISKTEEVVEKELLLQEKEKLYMELKHVLARQPGPEAAEQLKLYRRTLHDKKQQLKVLSSELNMYEVQSKEYKYEVEKLTNELQNLKKKYLAQKRKEQLQKNKDTAPMDNTFLMVKPNGPGFTGGGFPLRSTKMTF

SEQ ID NO: 28433 - protein, 101 aa, Homo sapiens
MGTRLLPALFLVLLVLGFEVQGTQQPQQDEMPSPTFLTQVKESLSSYWESAKTAAQNLYEKTYLPAVDEKLRDLYSKSTAAMSTYTGIFTDQVLSVLKGEE

SEQ ID NO: 28434 - protein, 302 aa, Homo sapiens
MGNCCWTQCFGLLRKEAGRLQRVGGGGGSKYFRTCSRGEHLTIEFENLVESDEGESPGSSHRPLTEEEIVDLRERHYDSIAEKQKDLDKKIQKELALQEEKLRLEEEALYAAQREAARAAKQRKLLEQERQRIVQQYHPSNNGEYQSSGPEDDFESCLRNMKSQYEVFRSSRLSSDATVLTPNTESSCDLMTKTKSTSGNDDSTSLDLEWEDEEGMNRMLPMRERSKTEEDILRAALKYSNKKTGSNPTSASDDSNGLEWENDFVSAEMDDNGNSEYSGFVNPVLELSDSGIRHSDTDQQTR

SEQ ID NO: 28435 - protein, 269 aa, Homo sapiens
MGNCCWTQCFGLLRKEAGRLQRVGGGGGSKYFRTCSRGEHLTIEFENLVESDEGESPGSSHRPLTEEEIVDLRERHYDSIAEKQKDLDKKIQKEQERQRIVQQYHPSNNGEYQSSGPEDDFESCLRNMKSQYEVFRSSRLSSDATVLTPNTESSCDLMTKTKSTSGNDDSTSLDLEWEDEEGMNRMLPMRERSKTEEDILRAALKYSNKKTGSNPTSASDDSNGLEWENDFVSAEMDDNGNSEYSGFVNPVLELSDSGIRHSDTDQQTR

SEQ ID NO: 28436 - protein, 535 aa, Homo sapiens
MMDDDTELRTDGNSLLKAVWLGRLRLTRLLLEGGAYINESNDKGETALMVACITKHVDQQSISKSKMVKYLLDNRADPNIQDKSGKTALIHACIRRAGGEVVSLLLENGADPSLEDRTGASALVYAINADDKDALKHLLDACKAKGKEVIIITTDKSSSGTKTTKQYLNVPPSPKVEDRHSPPLCASPSDIELKALGLDSPLTEKEDDFFSLQAGHPSSCNTSKAVNEPGSPTRKVSNLKRARLPQLKRLQSEPWGLIAPSVLAASTRQDETHGASTDNEVIKSISDISFPKRGPLSRTNSIDSKDPTLFHTVTEQVLKIPVSSAPASWKAAYEKGQAPHPRLARRGTLPVDQEKCGMGPSGPSALKEPASLKWLENDLYDLDIQPGPDPPNSISLESGKGPLDRKKLNSSHLSLFHGSRESLDTVPSTSPSSARRRPPHLLERRGSGTLLLDRISHTRPGFLPPLNVNLNPPIPDIRSSSKPSCSLASGLKSMVPVAPSSPKRVDLRSKKKLLRRHSMQIEQMKQLSDFEEIMT

SEQ ID NO: 28437 - protein, 785 aa, Homo sapiens; identical to SEQ ID NO: 225

SEQ ID NO: 28438 - protein, 767 aa, Homo sapiens
MPRQFPKLNISEVDEQVRLLAEKVFAKVLREEDSKDALSLFTVPEDCPIGQKEAKERELQKELAEQKSVETAKRKKSFKMIRSQSLSLQMPPQQDWKGPPAASPAMSPTTPVVTGATSLPTPAPYAMPEFQRVTISGDYCAGITLEDYEQAAKSLAKALMIREKYARLAYHRFPRITSQYLGHPRADTAPPEEGLPDFHPPPLPQEDPYCLDDAPPNLDYLVHMQGGILFVYDNKKMLEHQEPHSLPYPDLETYTVDMSHILALITDGPTKTYCHRRLNFLESKFSLHEMLNEMSEFKELKSNPHRDFYNVRKVDTHIHAAACMNQKHLLRFIKHTYQTEPDRTVAEKRGRKITLRQVFDGLHMDPYDLTVDSLDVHAGRQTFHRFDKFNSKYNPVGASELRDLYLKTENYLGGEYFARMVKEVARELEESKYQYSEPRLSIYGRSPEEWPNLAYWFIQHKVYSPNMRWIIQVPRIYDIFRSKKLLPNFGKMLENIFLPLFKATINPQDHRELHLFLKYVTGFDSVDDESKHSDHMFSDKSPNPDVWTSEQNPPYSYYLYYMYANIMVLNNLRRERGLSTFLFRPHCGEAGSITHLVSAFLTADNISHGLLLKKSPVLQYLYYLAQIPIAMSPLSNNSLFLEYSKNPLREFLHKGLHVSLSTDDPMQFHYTKEALMEEYAIAAQVWKLSTCDLCEIARNSVLQSGLSHQEKQKFLGQNYYKEGPEGNDIRKTNVAQIRMAFRYETLCNELSFLSDAMKSEEITALTN

SEQ ID NO: 28439 - protein, 216 aa, Homo sapiens
MALSSEPAEMPRQFPKLNISEVDEQVRLLAEKVFAKVLREEDSKDALSLFTVPEDCPIGQKEAKERELQKELAEQKSVETAKRKKSFKMIRSQSLSLQMPPQQDWKGPPAASPAMSPTTPVVTGATSLPTPAPYAMPEFQRVTISGDYCAGITLEDYEQAAKSLAKALMIREKYARLAYHRFPRITSQYLGHPRADTAPPEEGLPDFHPPPLPQED

SEQ ID NO: 28440 - protein, 658 aa, Homo sapiens
MEPGSAEMPRQFPKLNISEVDEQVRLLAEKVFAKVLREEDSKDALSLFTVPEDCPIGQKEAKERELQKELAEQKSVETAKRKKSFKMIRSQSLSLQMPPQQDWKGPPAASPAMSPTTPVVTGATSLPTPAPYAMPEFQRVTISGDYCAGITLEDYEQAAKSLAKALMIREKYARLAYHRFPRITSQYLGHPRADTAPPEEGLPDFHPPPLPQEDPYCLDDAPPNLDYLVHMQGGILFVYDNKKMLEHQEPHSLPYPDLETYTVDMSHILALITDGPTKTYCHRRLNFLESKFSLHEMLNEMSEFKELKSNPHRDFYNVRKVDTHIHAAACMNQKHLLRFIKHTYQTEPDRTVAEKRGRKITLRQVFDGLHMDPYDLTVDSLDVHAGRQTFHRFDKFNSKYNPVGASELRDLYLKTENYLGGEYFARMVKEVARELEESKYQYSEPRLSIYGRSPEEWPNLAYWFIQHKVYSPNMRWIIQVPRIYDIFRSKKLLPNFGKMLENIFLPLFKATINPQDHRELHLFLKYVTGFDSVDDESKHSDHMFSDKSPNPDVWTSEQNPPYSYYLYYMYANIMVLNNLRRERGLSTFLFRPHCGEAGSITHLVSAFLTADNISHGLLLKKSPVLQYLYYLAQIPIAMSPLSNNSLFLEYSKNPLREF

SEQ ID NO: 28441 - protein, 776 aa, Homo sapiens
MALSSEPAEMPRQFPKLNISEVDEQVRLLAEKVFAKVLREEDSKDALSLFTVPEDCPIGQKEAKERELQKELAEQKSVETAKRKKSFKMIRSQSLSLQMPPQQDWKGPPAASPAMSPTTPVVTGATSLPTPAPYAMPEFQRVTISGDYCAGITLEDYEQAAKSLAKALMIREKYARLAYHRFPRITSQYLGHPRADTAPPEEGLPDFHPPPLPQEDPYCLDDAPPNLDYLVHMQGGILFVYDNKKMLEHQEPHSLPYPDLETYTVDMSHILALITDGPTKTYCHRRLNFLESKFSLHEMLNEMSEFKELKSNPHRDFYNVRKVDTHIHAAACMNQKHLLRFIKHTYQTEPDRTVAEKRGRKITLRQVFDGLHMDPYDLTVDSLDVHAGRQTFHRFDKFNSKYNPVGASELRDLYLKTENYLGGEYFARMVKEVARELEESKYQYSEPRLSIYGRSPEEWPNLAYWFIQHKVYSPNMRWIIQVPRIYDIFRSKKLLPNFGKMLENIFLPLFKATINPQDHRELHLFLKYVTGFDSVDDESKHSDHMFSDKSPNPDVWTSEQNPPYSYYLYYMYANIMVLNNLRRERGLSTFLFRPHCGEAGSITHLVSAFLTADNISHGLLLKKSPVLQYLYYLAQIPIAMSPLSNNSLFLEYSKNPLREFLHKGLHVSLSTDDPMQFHYTKEALMEEYAIAAQVWKLSTCDLCEIARNSVLQSGLSHQEKQKFLGQNYYKEGPEGNDIRKTNVAQIRMAFRYETLCNELSFLSDAMKSEEITALTN

SEQ ID NO: 28442 - protein, 774 aa, Homo sapiens
MEPGSAEMPRQFPKLNISEVDEQVRLLAEKVFAKVLREEDSKDALSLFTVPEDCPIGQKEAKERELQKELAEQKSVETAKRKKSFKMIRSQSLSLQMPPQQDWKGPPAASPAMSPTTPVVTGATSLPTPAPYAMPEFQRVTISGDYCAGITLEDYEQAAKSLAKALMIREKYARLAYHRFPRITSQYLGHPRADTAPPEEGLPDFHPPPLPQEDPYCLDDAPPNLDYLVHMQGGILFVYDNKKMLEHQEPHSLPYPDLETYTVDMSHILALITDGPTKTYCHRRLNFLESKFSLHEMLNEMSEFKELKSNPHRDFYNVRKVDTHIHAAACMNQKHLLRFIKHTYQTEPDRTVAEKRGRKITLRQVFDGLHMDPYDLTVDSLDVHAGRQTFHRFDKFNSKYNPVGASELRDLYLKTENYLGGEYFARMVKEVARELEESKYQYSEPRLSIYGRSPEEWPNLAYWFIQHKVYSPNMRWIIQVPRIYDIFRSKKLLPNFGKMLENIFLPLFKATINPQDHRELHLFLKYVTGFDSVDDESKHSDHMFSDKSPNPDVWTSEQNPPYSYYLYYMYANIMVLNNLRRERGLSTFLFRPHCGEAGSITHLVSAFLTADNISHGLLLKKSPVLQYLYYLAQIPIAMSPLSNNSLFLEYSKNPLREFLHKGLHVSLSTDDPMQFHYTKEALMEEYAIAAQVWKLSTCDLCEIARNSVLQSGLSHQEKQKFLGQNYYKEGPEGNDIRKTNVAQIRMAFRYETLCNELSFLSDAMKSEEITALTN

SEQ ID NO: 28443 - protein, 608 aa, Homo sapiens
MIREKYARLAYHRFPRITSQYLGHPRADTAPPEEGLPDFHPPPLPQEDPYCLDDAPPNLDYLVHMQGGILFVYDNKKMLEHQEPHSLPYPDLETYTVDMSHILALITDGPTKTYCHRRLNFLESKFSLHEMLNEMSEFKELKSNPHRDFYNVRKVDTHIHAAACMNQKHLLRFIKHTYQTEPDRTVAEKRGRKITLRQVFDGLHMDPYDLTVDSLDVHAGRQTFHRFDKFNSKYNPVGASELRDLYLKTENYLGGEYFARMVKEVARELEESKYQYSEPRLSIYGRSPEEWPNLAYWFIQHKVYSPNMRWIIQVPRIYDIFRSKKLLPNFGKMLENIFLPLFKATINPQDHRELHLFLKYVTGFDSVDDESKHSDHMFSDKSPNPDVWTSEQNPPYSYYLYYMYANIMVLNNLRRERGLSTFLFRPHCGEAGSITHLVSAFLTADNISHGLLLKKSPVLQYLYYLAQIPIAMSPLSNNSLFLEYSKNPLREFLHKGLHVSLSTDDPMQFHYTKEALMEEYAIAAQVWKLSTCDLCEIARNSVLQSGLSHQEKQKFLGQNYYKEGPEGNDIRKTNVAQIRMAFRYETLCNELSFLSDAMKSEEITALTN

SEQ ID NO: 28444 - protein, 955 aa, Homo sapiens
MPSLPAPPAPLLLLGLLLLGSRPARGAGPEPPVLPIRSEKEPLPVRGAAGCTFGGKVYALDETWHPDLGEPFGVMRCVLCACEAPQWGRRTRGPGRVSCKNIKPECPTPACGQPRQLPGHCCQTCPQERSSSERQPSGLSFEYPRDPEHRSYSDRGEPGAEERARGDGHTDFVALLTGPRSQAVARARVSLLRSSLRFSISYRRLDRPTRIRFSDSNGSVLFEHPAAPTQDGLVCGVWRAVPRLSLRLLRAEQLHVALVTLTHPSGEVWGPLIRHRALAAETFSAILTLEGPPQQGVGGITLLTLSDTEDSLHFLLLFRGLLEPRSGGLTQVPLRLQILHQGQLLRELQANVSAQEPGFAEVLPNLTVQEMDWLVLGELQMALEWAGRPGLRISGHIAARKSCDVLQSVLCGADALIPVQTGAAGSASLTLLGNGSLIYQVQVVGTSSEVVAMTLETKPQRRDQRTVLCHMAGLQPGGHTAVGICPGLGARGAHMLLQNELFLNVGTKDFPDGELRGHVAALPYCGHSARHDTLPVPLAGALVLPPVKSQAAGHAWLSLDTHCHLHYEVLLAGLGGSEQGTVTAHLLGPPGTPGPRRLLKGFYGSEAQGVVKDLEPELLRHLAKGMASLMITTKGSPRGELRGQVHIANQCEVGGLRLEAAGAEGVRALGAPDTASAAPPVVPGLPALAPAKPGGPGRPRDPNTCFFEGQQRPHGARWAPNYDPLCSLCTCQRRTVICDPVVCPPPSCPHPVQAPDQCCPVCPEKQDVRDLPGLPRSRDPGEGCYFDGDRSWRAAGTRWHPVVPPFGLIKCAVCTCKGGTGEVHCEKVQCPRLACAQPVRVNPTDCCKQCPVGSGAHPQLGDPMQADGPRGCRFAGQWFPESQSWHPSVPPFGEMSCITCRCGAGVPHCERDDCSLPLSCGSGKESRCCSRCTAHRRPAPETRTDPELEKEAEGS

SEQ ID NO: 28445 - protein, 86 aa, Homo sapiens
MPSLPAPPAPLLLLGLLLLGSRPARGAGPEPPVLPIRSEKEPLPVRGAAGCTFGGKVYALDETWHPDLGEPFGVMRCVLCACEAGP

SEQ ID NO: 28446 - protein, 94 aa, Homo sapiens
MPSLPAPPAPLLLLGLLLLGSRPARGAGPEPPVLPIRSEKEPLPVRGAAGCTFGGKVYALDETWHPDLGEPFGVMRCVLCACEATGTLRPREMK

SEQ ID NO: 28447 - protein, 350 aa, Homo sapiens
MPSLPAPPAPLLLLGLLLLGSRPARGAGPEPPVLPIRSEKEPLPVRGAAGCTFGGKVYALDETWHPDLGEPFGVMRCVLCACEAPQWGRRTRGPGRVSCKNIKPECPTPACGQPRQLPGHCCQTCPQERSSSERQPSGLSFEYPRDPEHRSYSDRGEPGAEERARGDGHTDFVALLTGPRSQAVARARVSLLRSSLRFSISYRRLDRPTRIRFSDSNGSVLFEHPAAPTQDGLVCGVWRAVPRLSLRLLRAEQLHVALVTLTHPSGEVWGPLIRHRALAAETFSAILTLEGPPQQGVGGITLLTLSDTEDSLHFLLLFRGLLEPRSGDSTPGAATARTSGQCLSPGTRLC

SEQ ID NO: 28448 - protein, 915 aa, Homo sapiens
MPSLPAPPAPLLLLGLLLLGSRPARGAGPEPPVLPIRSEKEPLPVRGAAGCTFGGKVYALDETWHPDLGEPFGVMRCVLCACEAPQWGRRTRGPGRVSCKNIKPECPTPACGQPRQLPGHCCQTCPQERSSSERQPSGLSFEYPRDPEHRSYSDRGEPGAEERARGDGHTDFVALLTGPRSQAVARARVSLLRSSLRFSISYRRLDRPTRIRFSDSNGSVLFEHPAAPTQDGLVCGVWRAVPRLSLRLLRAEQLHVALVTLTHPSGEVWGPLIRHRALAAETFSAILTLEGPPQQGVGGITLLTLSDTEDSLHFLLLFRGLLEPRSGGLTQVPLRLQILHQGQLLRELQANVSAQEPGFAEVLPNLTVQEMDWLVLGELQMALEWAGRPGLRISGHIAARKSCDVLQSVLCGADALIPVQTGAAGSASLTLLGNGSLIYQAVGICPGLGARGAHMLLQNELFLNVGTKDFPDGELRGHVAALPYCGHSARHDTLPVPLAGALVLPPVKSQAAGHAWLSLDTHCHLHYEVLLAGLGGSEQGTVTAHLLGPPGTPGPRRLLKGFYGSEAQGVVKDLEPELLRHLAKGMASLMITTKGSPRGELRGQVHIANQCEVGGLRLEAAGAEGVRALGAPDTASAAPPVVPGLPALAPAKPGGPGRPRDPNTCFFEGQQRPHGARWAPNYDPLCSLCTCQRRTVICDPVVCPPPSCPHPVQAPDQCCPVCPEKQDVRDLPGLPRSRDPGEGCYFDGDRSWRAAGTRWHPVVPPFGLIKCAVCTCKGGTGEVHCEKVQCPRLACAQPVRVNPTDCCKQCPVGSGAHPQLGDPMQADGPRGCRFAGQWFPESQSWHPSVPPFGEMSCITCRCGAGVPHCERDDCSLPLSCGSGKESRCCSRCTAHRRPAPETRTDPELEKEAEGS

SEQ ID NO: 28449 - protein, 1353 aa, Homo sapiens
MERLCSDGFAFPHYYIKPYHLKRIHRAVLRGNLEKLKYLLLTYYDANKRDRKERTALHLACATGQPEMVHLLVSRRCELNLCDREDRTPLIKAVQLRQEACATLLLQNGADPNITDVFGRTALHYAVYNEDTSMIEKLLSHGTNIEECSKNEYQPLLLAVSRRKVKMVEFLLKKKANVNAIDYLGRSALILAVTLGEKDIVILLLQHNIDVFSRDVYGKLAEDYASEAENRVIFDLIYEYKRKRYEDLPINSNPVSPQKQRAEKATSDDKDSVSNIATEIKEGPISGTVSSQKQPAEKATSDEKDSVSNIATEIKEGQQSGTVSPQKQSAQKVIFKKKVSLLNIATRIMGGGKSGTVSSQKQPASKTASDKTDSALNTATEIKDGLQCGTVSSQKQQALKATTDEEGSVSNIATEIKDGEKSGTVSSQKKPALKATSDEKDSFSNITREKKDGEISRTVSSQKPPALKATSVKEDSVLNIAREKKDGEKSRTVSFEQPPGLKATRDEKDSLLNIARGKKDGEKTRRVSSHKQPSLKATSDKEDSVPNMATETKDEQISGTVSCQKQPALKATSDKKDSVSNIPTEIKDGQQSGTVSSQKQPAWKATSVKKDSVSNIATEIKDGQIRGTVSSQRRPALKTTGDEKDSVSNIAREIKDGEKSGTVSPQKQSAQKVIFKKKVSLLNIATRITGGGKSGTEYPENLRTLKATIENKDSVLNTATKMKEVQTSTPAEQDLEMASEGEQKRLEEYENNQPQVKNQIHSRDDLDDIIQSSQTVSEDGDSLCCNCKNVILLIDQHEMKCKDCVHLLKIKNTFCLWKRLIKLKDNHCEQLRVKIRKLKNKASVLQKRISEKEEIKSQLKHEILELEKELCSLRFAIQQEKKKRRNVEELHQKVREKLRITEEQYRIEADVTKPIKPALKSAEVELKTGGNNSNQVSETDEKEDLLHENRLMQDEIARLRLEKDTIKNQNLEKKYLKDFEIVKRKHEDLQKALKRNGETLAKTIACYSGQLAALTDENTTLRSKLEKQRESRQRLETEMQSYRCRLNAARCDHDQSHSSKRDQELAFQGTVDKCRHLQENLNSHVLILSLQLSKAESKSRVLKTELHYTGEALKEKALVFEHVQSELKQKQSQMKDIEKMYKSGYNTMEKCIEKQERFCQLKKQNMLLQQQLDDARNKADNQEKAILNIQARCDARVQNLQAECRKHRLLLEEDNKMLVNELNHSKEKECQYEKEKAEREVAVRQLQQKRDDVLNKGSATKALLDASSRHCTYLENGMQDSRKKLDQMRSQFQEIQDQLTATIRCTKEMEGDTQKLEVEHVMMRKIIKKQDDQIERLEKILQHSSLMLQVFES

SEQ ID NO: 28450 - protein, 1304 aa, Homo sapiens
MERLCSDGFAFPHYYIKPYHLKRIHRAVLRGNLEKLKYLLLTYYDANKRDRKERTALHLACATGQPEMVHLLVSRRCELNLCDREDRTPLIKAVQLRQEACATLLLQNGADPNITDVFGRTALHYAVYNEDTSMIEKLLSHGTNIEECSKNEYQPLLLAVSRRKVKMVEFLLKKKANVNAIDYLGRSALILAVTLGEKDIVILLLQHNIDVFSRDVYGKLAEDYASEAENRVIFDLIYEYKRKRYEDLPINSNPVSPQKQRAEKATSDDKDSVSNIATEIKEGPISGTVSSQKQPAEKATSDEKDSVSNIATEIKEGQQSGTVSPQKQSAQKVIFKKKVSLLNIATRIMGGGKSGTVSSQKQPASKTASDKTDSALNTATEIKDGLQCGTVSSQKQQALKATTDEEGSVSNIATEIKDGEKSGTVSSQKKPALKATSDEKDSFSNITREKKDGEISRTVSSQKPPALKATSVKEDSVLNIAREKKDGEKSRTVSFEQPPGLKATRDEKDSLLNIARGKKDGEKTRRVSSHKQPSLKATSDKEDSVPNMATETKDEQISGTVSCQKQPALKATSDKKDSVSNIPTEIKDGQQSGTVSSQKQPAWKATSVKKDSVSNIATEIKDGQIRGTVSSQRRPALKTTGDEKDSVSNIAREIKDGEKSGTVSPQKQSAQKVIFKKKVSLLNIATRITGGGKSGTEYPENLRTLKATIENKDSVLNTATKMKEVQTSTPAEQDLEMASEGEQKRLEEYENNQPQVKNQIHSRDDLDDIIQSSQTVSEDGDSLCCNCKNVILLIDQHEMKCKDCVHLLKIKNTFCLWKRLIKLKDNHCEQLRVKIRKLKNKASVLQKRISEKEEIKSQLKHEILELEKELCSLRFAIQQEKKKRRNVEELHQKVREKLRITEEQYRIEADVTKPIKPALKSAEVELKTGGNNSNQVSETDEKEDLLHENRLMQDEIARLRLEKDTIKNQNLEKKYLKDFEIVKRKHEDLQKALKRNGETLAKTIACYSGQLAALTDENTTLRSKLEKQRESRQRLETEMQSYRCRLNAARCDHDQSHSSKRDQELAFQGTVDKCRHLQENLNSHVLILSLQLSKAESKSRVLKTELHYTGEALKEKALVFEHVQSELKQKQSQMKDIEKMYKSGYNTMEKCIEKQERFCQLKKQNMLLQQQLDDARNKADNQEKAILNIQARCDARVQNLQAECRKHRLLLEEDNKMLVNELNHSKEKECQYEKEKAEREVAVRQLQQKRDDVLNKGSATKALLDASSRHCTYLENGMQDSRKKLDQMRSQVCMQLCTPTTVNL

SEQ ID NO: 28451 - protein, 1292 aa, Homo sapiens
MERLCSDGFAFPHYYIKPYHLKRIHRAVLRGNLEKLKYLLLTYYDANKRDRKERTALHLACATGQPEMVHLLVSRRCELNLCDREDRTPLIKAVQLRQEACATLLLQNGADPNITDVFGRTALHYAVYNEDTSMIEKLLSHGTNIEECSKNEYQPLLLAVSRRKVKMVEFLLKKKANVNAIDYLGRSALILAVTLGEKDIVILLLQHNIDVFSRDVYGKLAEDYASEAENRVIFDLIYEYKRKRYEDLPINSNPVSPQKQRAEKATSDDKDSVSNIATEIKEGPISGTVSSQKQPAEKATSDEKDSVSNIATEIKEGQQSGTVSPQKQSAQKVIFKKKVSLLNIATRIMGGGKSGTVSSQKQPASKTASDKTDSALNTATEIKDGLQCGTVSSQKQQALKATTDEEGSVSNIATEIKDGEKSGTVSSQKKPALKATSDEKDSFSNITREKKDGEISRTVSSQKPPALKATSVKEDSVLNIAREKKDGEKSRTVSFEQPPGLKATRDEKDSLLNIARGKKDGEKTRRVSSHKQPSLKATSDKEDSVPNMATETKDEQISGTVSCQKQPALKATSDKKDSVSNIPTEIKDGQQSGTVSSQKQPAWKATSVKKDSVSNIATEIKDGQIRGTVSSQRRPALKTTGDEKDSVSNIAREIKDGEKSGTVSPQKQSAQKVIFKKKVSLLNIATRITGGGKSGTEYPENLRTLKATIENKDSVLNTATKMKEVQTSTPAEQDLEMASEGEQKRLEEYENNQPQVKNQIHSRDDLDDIIQSSQTVSEDGDSLCCNCKNVILLIDQHEMKCKDCVHLLKIKNTFCLWKRLIKLKDNHCEQLRVKIRKLKNKASVLQKRISEKEEIKSQLKHEILELEKELCSLRFAIQQEKKKRRNVEELHQKVREKLRITEEQYRIEADVTKPIKPALKSAEVELKTGGNNSNQVSETDEKEDLLHENRLMQDEIARLRLEKDTIKNQNLEKKYLKDFEIVKRKHEDLQKALKRNGETLAKTIACYSGQLAALTDENTTLRSKLEKQRESRQRLETEMQSYRCRLNAARCDHDQSHSSKRDQELAFQGTVDKCRHLQENLNSHVLILSLQLSKAESKSRVLKTELHYTGEALKEKALVFEHVQSELKQKQSQMKDIEKMYKSGYNTMEKCIEKQERFCQLKKQNMLLQQQLDDARNKADNQEKAILNIQARCDARVQNLQAECRKHRLLLEEDNKMLVNELNHSKEKECQYEKEKAEREVAVRQLQQKRDDVLNKGSATKALLDASSRHCTYLENGMQDSRKKLDQMRSQA

SEQ ID NO: 28452 - protein, 239 aa, Homo sapiens
MERLCSDGFAFPHYYIKPYHLKRIHRAVLRGNLEKLKYLLLTYYDANKRDRKERTALHLACATGQPEMVHLLVSRRCELNLCDREDRTPLIKAVQLRQEACATLLLQNGADPNITDVFGRTALHYAVYNEDTSMIEKLLSHGTNIEECSKNEYQPLLLAVSRRKVKMVEFLLKKKANVNAIDYLGRSALILAVTLGEKDIVILLLQHNIDVFSRDVYGKLAEDYASEAENRVVSSETTS

SEQ ID NO: 28453 - protein, 435 aa, Homo sapiens
MGQELCAKTVQPGCSCYHCSEGGEAHSCRRSQPETTEAAFKLTDLKEASCSMTSFHPRGLQAARAQKFKSKRPRSNSDCFQEEDLRQGFQWRKSLPFGAASSYLNLEKLGEGSYATVYKGISRINGQLVALKVISMNAEEGVPFTAIREASLLKGLKHANIVLLHDIIHTKETLTFVFEYMHTDLAQYMSQHPGGLHPHNVRLFMFQLLRGLAYIHHQHVLHRDLKPQNLLISHLGELKLADFGLARAKSIPSQTYSSEVVTLWYRPPDALLGATEYSSELDIWGAGCIFIEMFQGQPLFPGVSNILEQLEKIWEVLGVPTEDTWPGVSKLPNYNPEWFPLPTPRSLHVVWNRLGRVPEAEDLASQMLKGFPRDRVSAQEALVHDYFSALPSQLYQLPDEESLFTVSGVRLKPEMCDLLASYQKGHHPAQFSKCW

SEQ ID NO: 28454 - protein, 400 aa, Homo sapiens
MGQELCAKTVQPGCSCYHCSEGGEAHSCRRSQPETTEAAFKLTDLKEASCSMTSFHPRGLQAARAQKFKSKRPRSNSDCFQEEDLRQGFQWRKSLPFGAASSYLNLEKLGEGSYATVYKGISRINGQLVALKVISMNAEEGVPFTAIREASLLKGLKHANIVLLHDIIHTKETLTFVFEYMHTDLAQYMSQHPGGLHPHNVRLFMFQLLRGLAYIHHQHVLHRDLKPQNLLISHLGELKLADFGLARAKSIPSQTYSSEVVTLWYRPPDALLGATEYSSELDIWGAGCIFIEMFQGQPLFPGVSNILEQLEKIWEVLGVPTEDTWPGVSKLPNYNPEWFPLPTPRSLHVVWNRLGRVPEAEDLASQMLKGFPRDRVSAQEALVHDYFSALPSQLYQLPDE

SEQ ID NO: 28455 - protein, 384 aa, Homo sapiens
MTSFHPRGLQAARAQKFKSKRPRSNSDCFQEEDLRQGFQWRKSLPFGAASSYLNLEKLGEGSYATVYKGISRINGQLVALKVISMNAEEGVPFTAIREASLLKGLKHANIVLLHDIIHTKETLTFVFEYMHTDLAQYMSQHPGGLHPHNVRLFMFQLLRGLAYIHHQHVLHRDLKPQNLLISHLGELKLADFGLARAKSIPSQTYSSEVVTLWYRPPDALLGATEYSSELDIWGAGCIFIEMFQGQPLFPGVSNILEQLEKIWEVLGVPTEDTWPGVSKLPNYNPEWFPLPTPRSLHVVWNRLGRVPEAEDLASQMLKGFPRDRVSAQEALVHDYFSALPSQLYQLPDEESLFTVSGVRLKPEMCDLLASYQKGHHPAQFSKCW

SEQ ID NO: 28456 - protein, 429 aa, Homo sapiens
MGQELCAKTVQPGCSCYHCSEGGEAHSCRRSQPETTEAAFKLTDLKEASCSMTSFHPRGLQAARAQKFKSKRPRSNSDCFQEEDLRQGFQWRKSLPFGAASSYLNLEKLGEGSYATVYKGISRINGQLVALKVISMNAEEGVPFTAIREASLLKGLKHANIVLLHDIIHTKETLTFVFEYMHTDLAQYMSQHPGGLHPHNVRLFMFQLLRGLAYIHHQHVLHRDLKPQNLLISHLGELKLADFGLARAKSIPSQTYSSEVVTLWYRPPDALLGATEYSSELDIWGAGCIFIEMFQGQPLFPGVSNILEQLEKIWEVLGVPTEDTWPGVSKLPNYNPEWFPLPTPRSLHVVWNRLGRVPEAEDLASQMLKGFPRDRVSAQEALVHDYFSALPSQLYQLPDVSGVRLKPEMCDLLASYQKGHHPAQFSKCW

SEQ ID NO: 28457 - protein, 345 aa, Homo sapiens
MGQELCAKTVQPGCSCYHCSEGGEAHSCRRSQPETTEAAFKLTDLKEASCSMTSFHPRGLQAARAQKFKSKRPRSNSDCFQEEDLRQGFQWRKSLPFGAASSYLNLEKLGEGSYATVYKGISRINGQLVALKVISMNAEEGVPFTAIREASLLKGLKHANIVLLHDIIHTKETLTFVFEYMLFMFQLLRGLAYIHHQHVLHRDLKPQNLLISHLGELKLADFGLARAKSIPSQTYSSEVVTLWYRPPDALLGATEYSSELDIWGAGCIFIEMFQGQPLFPGVSNILEQLEKIWEVLGVPTEDTWPGVSKLPNYNPGGSKKQHGWHTDIGQHRTAAMQPCSRNVSF

SEQ ID NO: 28458 - protein, 1361 aa, Homo sapiens
MGAAGRQDFLFKAMLTISWLTLTCFPGATSTVAAGCPDQSPELQPWNPGHDQDHHVHIGQGKTLLLTSSATVYSIHISEGGKLVIKDHDEPIVLRTRHILIDNGGELHAGSALCPFQGNFTIILYGRADEGIQPDPYYGLKYIGVGKGGALELHGQKKLSWTFLNKTLHPGGMAEGGYFFERSWGHRGVIVHVIDPKSGTVIHSDRFDTYRSKKESERLVQYLNAVPDGRILSVAVNDEGSRNLDDMARKAMTKLGSKHFLHLGFRHPWSFLTVKGNPSSSVEDHIEYHGHRGSAAARVFKLFQTEHGEYFNVSLSSEWVQDVEWTEWFDHDKVSQTKGGEKISDLWKAHPGKICNRPIDIQATTMDGVNLSTEVVYKKGQDYRFACYDRGRACRSYRVRFLCGKPVRPKLTVTIDTNVNSTILNLEDNVQSWKPGDTLVIASTDYSMYQAEEFQVLPCRSCAPNQVKVAGKPMYLHIGEEIDGVDMRAEVGLLSRNIIVMGEMEDKCYPYRNHICNFFDFDTFGGHIKFALGFKAAHLEGTELKHMGQQLVGQYPIHFHLAGDVDERGGYDPPTYIRDLSIHHTFSRCVTVHGSNGLLIKDVVGYNSLGHCFFTEDGPEERNTFDHCLGLLVKSGTLLPSDRDSKMCKMITEDSYPGYIPKPRQDCNAVSTFWMANPNNNLINCAAAGSEETGFWFIFHHVPTGPSVGMYSPGYSEHIPLGKFYNNRAHSNYRAGMIIDNGVKTTEASAKDKRPFLSIISARYSPHQDADPLKPREPAIIRHFIAYKNQDHGAWLRGGDVWLDSCRFADNGIGLTLASGGTFPYDDGSKQEIKNSLFVGESGNVGTEMMDNRIWGPGGLDHSGRTLPIGQNFPIRGIQLYDGPINIQNCTFRKFVALEGRHTSALAFRLNNAWQSCPHNNVTGIAFEDVPITSRVFFGEPGPWFNQLDMDGDKTSVFHDVDGSVSEYPGSYLTKNDNWLVRHPDCINVPDWRGAICSGCYAQMYIQAYKTSNLRMKIIKNDFPSHPLYLEGALTRSTHYQQYQPVVTLQKGYTIHWDQTAPAELAIWLINFNKGDWIRVGLCYPRGTTFSILSDVHNRLLKQTSKTGVFVRTLQMDKVEQSYPGRSHYYWDEDSGLLFLKLKAQNEREKFAFCSMKGCERIKIKALIPKNAGVSDCTATAYPKFTERAVVDVPMPKKLFGSQLKTKDHFLEVKMESSKQHFFHLWNDFAYIEVDGKKYPSSEDGIQVVVIDGNQGRVVSHTSFRNSILQGIPWQLFNYVATIPDNSIVLMASKGRYVSRGPWTRVLEKLGADRGLKLKEQMAFVGFKGSFRPIWVTLDTEDHKAKIFQVVPIPVVKKKKL

SEQ ID NO: 28459 - protein, 992 aa, Homo sapiens
MGAAGRQDFLFKAMLTISWLTLTCFPGATSTVAAGCPDQSPELQPWNPGHDQDHHVHIGQGKTLLLTSSATVYSIHISEGGKLVIKDHDEPIVLRTRHILIDNGGELHAGSALCPFQGNFTIILYGRADEGIQPDPYYGLKYIGVGKGGALELHGQKKLSWTFLNKTLHPGGMAEGGYFFERSWGHRGVIVHVIDPKSGTVIHSDRFDTYRSKKESERLVQYLNAVPDGRILSVAVNDEGSRNLDDMARKAMTKLGSKHFLHLGFRHPWSFLTVKGNPSSSVEDHIEYHGHRGSAAARVFKLFQTEHGEYFNVSLSSEWVQDVEWTEWFDHDKVSQTKGGEKISDLWKAHPGKICNRPIDIQATTMDGVNLSTEVVYKKGQDYRFACYDRGRACRSYRVRFLCGKPVRPKLTVTIDTNVNSTILNLEDNVQSWKPGDTLVIASTDYSMYQAEEFQVLPCRSCAPNQVKVAGKPMYLHIGEEIDGVDMRAEVGLLSRNIIVMGEMEDKCYPYRNHICNFFDFDTFGGHIKFALGFKAAHLEGTELKHMGQQLVGQYPIHFHLAGDVDERGGYDPPTYIRDLSIHHTFSRCVTVHGSNGLLIKDVVGYNSLGHCFFTEDGPEERNTFDHCLGLLVKSGTLLPSDRDSKMCKMITEDSYPGYIPKPRQDCNAVSTFWMANPNNNLINCAAAGSEETGFWFIFHHVPTGPSVGMYSPGYSEHIPLGKFYNNRAHSNYRAGMIIDNGVKTTEASAKDKRPFLSIISARYSPHQDADPLKPREPAIIRHFIAYKNQDHGAWLRGGDVWLDSCRFADNGIGLTLASGGTFPYDDGSKQEIKNSLFVGESGNVGTEMMDNRIWGPGGLDHSGRTLPIGQNFPIRGIQLYDGPINIQNCTFRKFVALEGRHTSALAFRLNNAWQSCPHNNVTGIAFEDVPITSRVFFGEPGPWFNQLDMDGDKTSVFHDVDGSVSEYPGSYLTKNDKWHSLASKAASGPSG

SEQ ID NO: 28460 - protein, 380 aa, Homo sapiens
MLKPKDLCPRAGTRTFLEAMQAGKVHLARFVLDALDRSIIDCRAEQGRTPLMVAVGLPDPALRARFVRLLLEQGAAVNLRDERGRTALSLACERGHLDAVQLLVQFSGDPEAADSAGNSPVMWAAACGHGAVLEFLVRSFRRLGLRLDRTNRAGLTALQLAAARGHGTCVQALTGPWGRAAAAAAARGSNSDSPPGRPAPAASPEHRRPSPRRLPRPLLARFARAAGGHGGEAGSAGKNSGRHRAQGSERPELGRSMSLALGAVTEEEAARLRAGALMALPNSPQSSGTGRWRSQEVLEGAPPTLAQAPIGLSPHPEGGPGSGRLGLRRRSTAPDIPSLVGEAPGPESGPELEANALSVSVPGPNPWQAGTEAVVLRAQR

SEQ ID NO: 28461 - protein, 399 aa, Homo sapiens
MDSQRPEPREEEEEEQELRWMELDSEEALGTRTEGPSVVQGWGHLLQAVWRGPAGLVTQLLRQGASVEERDHAGRTPLHLAVLRGHAPLVRLLLQRGAPVGAVDRAGRTALHEAAWHGHSRVAELLLQRGASAAARSGTGLTPLHWAAALGHTLLAARLLEAPGPGPAAAEAEDARGWTAAHWAAAGGRLAVLELLAAGGAGLDGALLVAAAAGRGAALRFLLARGARVDARDGAGATALGLAAALGRSQDIEVLLGHGADPGIRDRHGRSALHRAAARGHLLAVQLLVTQGAEVDARDTLGLTPLHHASREGHVEVAGCLLDRGAQVDATGWLRKTPLHLAAERGHGPTVGLLLSRGASPTLRTQWAEVAQMPEGDLPQALPELGGGEKECEGIESTG

SEQ ID NO: 28462 - protein, 174 aa, Homo sapiens
MDSQRPEPREEEEEEQELRWMELDSEEALGTRTEGPSVVQGWGHLLQAVWRGPAGLVTQLLRQGASVEERTLRCCWATGQTQASGTGMAALRCTGLPPEDTCLPSSCWSPRGPRWMRGTPWASHPCITPLGKATWRLPAACWTGVPRWMLPAGSERPPYTWLQSEGMGLPWGFC

SEQ ID NO: 28463 - protein, 65 aa, Homo sapiens
MDSQRPEPREEEEEEQELRWMELDSEEALGTRTEGPSVVQGWGHLLQAVWRGPAGLVTQLLRQGH

SEQ ID NO: 28464 - protein, 266 aa, Homo sapiens
MESEGPPESESSEFFSQQEEENEEEEAQEPEETGPKNPLLQPALTGDVEGLQKIFEDPENPHHEQAMQLLLEEDIVGRNLLYAACMAGQSDVIRALAKYGVNLNEKTTRGYTLLHCAAAWGRLETLKALVELDVDIEALNFREERARDVAARYSQTECVEFLDWADARLTLKKYIAKVSLAVTDTEKGSGKLLKEDKNTILSACRAKNEWLETHTEASINELFEQRQQLEDIVTPIFTKMTTPCQVKSAKSVTSHDQKRSQDDTSN

SEQ ID NO: 28465 - protein, 282 aa, Homo sapiens
MVTEEAGARVWVFLELMESEGPPESESSEFFSQQEEENEEEEAQEPEETGPKNPLLQPALTGDVEGLQKIFEDPENPHHEQAMQLLLEEDIVGRNLLYAACMAGQSDVIRALAKYGVNLNEKTTRGYTLLHCAAAWGRLETLKALVELDVDIEALNFREERARDVAARYSQTECVEFLDWADARLTLKKYIAKVSLAVTDTEKGSGKLLKEDKNTILSACRAKNEWLETHTEASINELFEQRQQLEDIVTPIFTKMTTPCQVKSAKSVTSHDQKRSQDDTSN

SEQ ID NO: 28466 - protein, 54 aa, Homo sapiens
MPGKKARKNAQPSPARAPAELEVECATQLRRFGDKLNFRQKLLNLISKLFCSGT

SEQ ID NO: 28467 - protein, 136 aa, Homo sapiens
MPGKKARKNAQPSPARAPAGPAGTAGTARDQAGFAIGMQLRFTRGKKLLSSSLSSSPLALPRGHEEQVQVAGSRVCYSTQEIWRQTELPAETSESDIQTLLLRNLTASKTCMRGLLQKSFLRRCTFHQFEERLHCN

SEQ ID NO: 28468 - protein, 4548 aa, Homo sapiens
MEHKEVVLLLLLFLKSAAPEQSHVVQDCYHGDGQSYRGTYSTTVTGRTCQAWSSMTPHQHNRTTENYPNAGLIMNYCRNPDAVAAPYCYTRDPGVRWEYCNLTQCSDAEGTAVAPPTVTPVPSLEAPSEQAPTEQRPGVQECYHGNGQSYRGTYSTTVTGRTCQAWSSMTPHSHSRTPEYYPNAGLIMNYCRNPDAVAAPYCYTRDPGVRWEYCNLTQCSDAEGTAVAPPTVTPVPSLEAPSEQAPTEQRPGVQECYHGNGQSYRGTYSTTVTGRTCQAWSSMTPHSHSRTPEYYPNAGLIMNYCRNPDAVAAPYCYTRDPGVRWEYCNLTQCSDAEGTAVAPPTVTPVPSLEAPSEQAPTEQRPGVQECYHGNGQSYRGTYSTTVTGRTCQAWSSMTPHSHSRTPEYYPNAGLIMNYCRNPDAVAAPYCYTRDPGVRWEYCNLTQCSDAEGTAVAPPTVTPVPSLEAPSEQAPTEQRPGVQECYHGNGQSYRGTYSTTVTGRTCQAWSSMTPHSHSRTPEYYPNAGLIMNYCRNPDAVAAPYCYTRDPGVRWEYCNLTQCSDAEGTAVAPPTVTPVPSLEAPSEQAPTEQRPGVQECYHGNGQSYRGTYSTTVTGRTCQAWSSMTPHSHSRTPEYYPNAGLIMNYCRNPDAVAAPYCYTRDPGVRWEYCNLTQCSDAEGTAVAPPTVTPVPSLEAPSEQAPTEQRPGVQECYHGNGQSYRGTYSTTVTGRTCQAWSSMTPHSHSRTPEYYPNAGLIMNYCRNPDAVAAPYCYTRDPGVRWEYCNLTQCSDAEGTAVAPPTVTPVPSLEAPSEQAPTEQRPGVQECYHGNGQSYRGTYSTTVTGRTCQAWSSMTPHSHSRTPEYYPNAGLIMNYCRNPDAVAAPYCYTRDPGVRWEYCNLTQCSDAEGTAVAPPTVTPVPSLEAPSEQAPTEQRPGVQECYHGNGQSYRGTYSTTVTGRTCQAWSSMTPHSHSRTPEYYPNAGLIMNYCRNPDAVAAPYCYTRDPGVRWEYCNLTQCSDAEGTAVAPPTVTPVPSLEAPSEQAPTEQRPGVQECYHGNGQSYRGTYSTTVTGRTCQAWSSMTPHSHSRTPEYYPNAGLIMNYCRNPDAVAAPYCYTRDPGVRWEYCNLTQCSDAEGTAVAPPTVTPVPSLEAPSEQAPTEQRPGVQECYHGNGQSYRGTYSTTVTGRTCQAWSSMTPHSHSRTPEYYPNAGLIMNYCRNPDAVAAPYCYTRDPGVRWEYCNLTQCSDAEGTAVAPPTVTPVPSLEAPSEQAPTEQRPGVQECYHGNGQSYRGTYSTTVTGRTCQAWSSMTPHSHSRTPEYYPNAGLIMNYCRNPDAVAAPYCYTRDPGVRWEYCNLTQCSDAEGTAVAPPTVTPVPSLEAPSEQAPTEQRPGVQECYHGNGQSYRGTYSTTVTGRTCQAWSSMTPHSHSRTPEYYPNAGLIMNYCRNPDAVAAPYCYTRDPGVRWEYCNLTQCSDAEGTAVAPPTVTPVPSLEAPSEQAPTEQRPGVQECYHGNGQSYRGTYSTTVTGRTCQAWSSMTPHSHSRTPEYYPNAGLIMNYCRNPDAVAAPYCYTRDPGVRWEYCNLTQCSDAEGTAVAPPTVTPVPSLEAPSEQAPTEQRPGVQECYHGNGQSYRGTYSTTVTGRTCQAWSSMTPHSHSRTPEYYPNAGLIMNYCRNPDAVAAPYCYTRDPGVRWEYCNLTQCSDAEGTAVAPPTVTPVPSLEAPSEQAPTEQRPGVQECYHGNGQSYRGTYSTTVTGRTCQAWSSMTPHSHSRTPEYYPNAGLIMNYCRNPDAVAAPYCYTRDPGVRWEYCNLTQCSDAEGTAVAPPTVTPVPSLEAPSEQAPTEQRPGVQECYHGNGQSYRGTYSTTVTGRTCQAWSSMTPHSHSRTPEYYPNAGLIMNYCRNPDAVAAPYCYTRDPGVRWEYCNLTQCSDAEGTAVAPPTVTPVPSLEAPSEQAPTEQRPGVQECYHGNGQSYRGTYSTTVTGRTCQAWSSMTPHSHSRTPEYYPNAGLIMNYCRNPDAVAAPYCYTRDPGVRWEYCNLTQCSDAEGTAVAPPTVTPVPSLEAPSEQAPTEQRPGVQECYHGNGQSYRGTYSTTVTGRTCQAWSSMTPHSHSRTPEYYPNAGLIMNYCRNPDAVAAPYCYTRDPGVRWEYCNLTQCSDAEGTAVAPPTVTPVPSLEAPSEQAPTEQRPGVQECYHGNGQSYRGTYSTTVTGRTCQAWSSMTPHSHSRTPEYYPNAGLIMNYCRNPDAVAAPYCYTRDPGVRWEYCNLTQCSDAEGTAVAPPTVTPVPSLEAPSEQAPTEQRPGVQECYHGNGQSYRGTYSTTVTGRTCQAWSSMTPHSHSRTPEYYPNAGLIMNYCRNPDAVAAPYCYTRDPGVRWEYCNLTQCSDAEGTAVAPPTVTPVPSLEAPSEQAPTEQRPGVQECYHGNGQSYRGTYSTTVTGRTCQAWSSMTPHSHSRTPEYYPNAGLIMNYCRNPDAVAAPYCYTRDPGVRWEYCNLTQCSDAEGTAVAPPTVTPVPSLEAPSEQAPTEQRPGVQECYHGNGQSYRGTYSTTVTGRTCQAWSSMTPHSHSRTPEYYPNAGLIMNYCRNPDAVAAPYCYTRDPGVRWEYCNLTQCSDAEGTAVAPPTVTPVPSLEAPSEQAPTEQRPGVQECYHGNGQSYRGTYSTTVTGRTCQAWSSMTPHSHSRTPEYYPNAGLIMNYCRNPDAVAAPYCYTRDPGVRWEYCNLTQCSDAEGTAVAPPTVTPVPSLEAPSEQAPTEQRPGVQECYHGNGQSYRGTYSTTVTGRTCQAWSSMTPHSHSRTPEYYPNAGLIMNYCRNPDAVAAPYCYTRDPGVRWEYCNLTQCSDAEGTAVAPPTVTPVPSLEAPSEQAPTEQRPGVQECYHGNGQSYRGTYSTTVTGRTCQAWSSMTPHSHSRTPEYYPNAGLIMNYCRNPDAVAAPYCYTRDPGVRWEYCNLTQCSDAEGTAVAPPTVTPVPSLEAPSEQAPTEQRPGVQECYHGNGQSYRGTYSTTVTGRTCQAWSSMTPHSHSRTPEYYPNAGLIMNYCRNPDAVAAPYCYTRDPGVRWEYCNLTQCSDAEGTAVAPPTVTPVPSLEAPSEQAPTEQRPGVQECYHGNGQSYRGTYSTTVTGRTCQAWSSMTPHSHSRTPEYYPNAGLIMNYCRNPDAVAAPYCYTRDPGVRWEYCNLTQCSDAEGTAVAPPTVTPVPSLEAPSEQAPTEQRPGVQECYHGNGQSYRGTYSTTVTGRTCQAWSSMTPHSHSRTPEYYPNAGLIMNYCRNPDAVAAPYCYTRDPGVRWEYCNLTQCSDAEGTAVAPPTVTPVPSLEAPSEQAPTEQRPGVQECYHGNGQSYRGTYSTTVTGRTCQAWSSMTPHSHSRTPEYYPNAGLIMNYCRNPDPVAAPYCYTRDPSVRWEYCNLTQCSDAEGTAVAPPTITPIPSLEAPSEQAPTEQRPGVQECYHGNGQSYQGTYFITVTGRTCQAWSSMTPHSHSRTPAYYPNAGLIKNYCRNPDPVAAPWCYTTDPSVRWEYCNLTRCSDAEWTAFVPPNVILAPSLEAFFEQALTEETPGVQDCYYHYGQSYRGTYSTTVTGRTCQAWSSMTPHQHSRTPENYPNAGLTRNYCRNPDAEIRPWCYTMDPSVRWEYCNLTQCLVTESSVLATLTVVPDPSTEASSEEAPTEQSPGVQDCYHGDGQSYRGSFSTTVTGRTCQSWSSMTPHWHQRTTEYYPNGGLTRNYCRNPDAEISPWCYTMDPNVRWEYCNLTQCPVTESSVLATSTAVSEQAPTEQSPTVQDCYHGDGQSYRGSFSTTVTGRTCQSWSSMTPHWHQRTTEYYPNGGLTRNYCRNPDAEIRPWCYTMDPSVRWEYCNLTQCPVMESTLLTTPTVVPVPSTELPSEEAPTENSTGVQDCYRGDGQSYRGTLSTTITGRTCQSWSSMTPHWHRRIPLYYPNAGLTRNYCRNPDAEIRPWCYTMDPSVRWEYCNLTRCPVTESSVLTTPTVAPVPSTEAPSEQAPPEKSPVVQDCYHGDGRSYRGISSTTVTGRTCQSWSSMIPHWHQRTPENYPNAGLTENYCRNPDSGKQPWCYTTDPCVRWEYCNLTQCSETESGVLETPTVVPVPSMEAHSEAAPTEQTPVVRQCYHGNGQSYRGTFSTTVTGRTCQSWSSMTPHRHQRTPENYPNDGLTMNYCRNPDADTGPWCFTMDPSIRWEYCNLTRCSDTEGTVVAPPTVIQVPSLGPPSEQDCMFGNGKGYRGKKATTVTGTPCQEWAAQEPHRHSTFIPGTNKWAGLEKNYCRNPDGDINGPWCYTMNPRKLFDYCDIPLCASSSFDCGKPQVEPKKCPGSIVGGCVAHPHSWPWQVSLRTRFGKHFCGGTLISPEWVLTAAHCLKKSSRPSSYKVILGAHQEVNLESHVQEIEVSRLFLEPTQADIALLKLSRPAVITDKVMPACLPSPDYMVTARTECYITGWGETQGTFGTGLLKEAQLLVIENEVCNHYKYICAEHLARGTDSCQGDSGGPLVCFEKDKYILQGVTSWGLGCARPNKPGVYARVSRFVTWIEGMMRNN

SEQ ID NO: 28469 - protein, 343 aa, Homo sapiens
MGSPGASLGIKKALQSEQATALPASAPAVSQPTAPAPSCLPKAGQVIPTLLREAPFSSVIAPTLLCGFLFLAWVAAEVPEESSRMAGSGARSEEGRRQHAFVPEPFDGANVVPNLWLHSFEVINDLNHWDHITKLRFLKESLRGEALGVYNRLSPQDQGDYGTVKEALLKAFGVPGAAPSHLPKEIVFANSMGKGYYLKGKIGKVPVRFLVDSGAQVSVVHPNLWEEVTDGDLDTLQPFENVVKVANGAEMKILGVWDTAVSLGKLKLKAQFLVANASAEEAIIGTDVLQDHNAILDFEHRTCTLKGKKFRLLPVGGSLEDEFDLELIEEDPSSEEGRQELSH

SEQ ID NO: 28470 - protein, 323 aa, Homo sapiens
MASIWVGHRGTVRDYPDFSPSVDAEAIQKAIRGIGTDEKMLISILTERSNAQRQLIVKEYQAAYGKELKDDLKGDLSGHFEHLMVALVTPPAVFDAKQLKKSMKGAGTNEDALIEILTTRTSRQMKDISQAYYTVYKKSLGDDISSETSGDFRKALLTLADGRRDESLKVDEHLAKQDAQILYKAGENRWGTDEDKFTEILCLRSFPQLKLTFDEYRNISQKDIVDSIKGELSGHFEDLLLAIVNCVRNTPAFLAERLHRALKGIGTDEFTLNRIMVSRSEIDLLDIRTEFKKHYGYSLYSAIKSDTSGDYEITLLKICGGDD

SEQ ID NO: 28471 - protein, 345 aa, Homo sapiens
MSVTGGKMAPSLTQEILSHLGLASKTAAWGTLGTLRTFLNFSVDKDAQRLLRAITGQGVDRSAIVDVLTNRSREQRQLISRNFQERTQQDLMKSLQAALSGNLERIVMALLQPTAQFDAQELRTALKASDSAVDVAIEILATRTPPQLQECLAVYKHNFQVEAVDDITSETSGILQDLLLALAKGGRDSYSGIIDYNLAEQDVQALQRAEGPSREETWVPVFTQRNPEHLIRVFDQYQRSTGQELEEAVQNRFHGDAQVALLGLASVIKNTPLYFADKLHQALQETEPNYQVLIRILISRCETDLLSIRAEFRKKFGKSLYSSLQDAVKGDCQSALLALCRAEDM

SEQ ID NO: 28472 - protein, 388 aa, Homo sapiens
MMSPSQASLLFLNVCIFICGEAVQGNCVHHSTDSSVVNIVEDGSNAKDESKSNDTVCKEDCEESCDVKTKITREEKHFMCRNLQNSIVSYTRSTKKLLRNMMDEQQASLDYLSNQVNELMNRVLLLTTEVFRKQLDPFPHRPVQSHGLDCTDIKDTIGSVTKTPSGLYIIHPEGSSYPFEVMCDMDYRGGGRTVIQKRIDGIIDFQRLWCDYLDGFGDLLGEFWLGLKKIFYIVNQKNTSFMLYVALESEDDTLAYASYDNFWLEDETRFFKMHLGRYSGNAGDAFRGLKKEDNQNAMPFSTSDVDNDGCRPACLVNGQSVKSCSHLHNKTGWWFNECGLANLNGIHHFSGKLLATGIQWGTWTKNNSPVKIKSVSMKIRRMYNPYFK

SEQ ID NO: 28473 - protein, 470 aa, Homo sapiens
MGKPWLRALQLLLLLGASWARAGAPRCTYTFVLPPQKFTGAVCWSGPASTRATPEAANASELAALRMRVGRHEELLRELQRLAAADGAVAGEVRALRKESRGLSARLGQLRAQLQHEAGPGAGPGADLGAEPAAALALLGERVLNASAEAQRAAARFHQLDVKFRELAQLVTQQSSLIARLERLCPGGAGGQQQVLPPPPLVPVVPVRLVGSTSDTSRMLDPAPEPQRDQTQRQQEPMASPMPAGHPAVPTKPVGPWQDCAEARQAGHEQSGVYELRVGRHVVSVWCEQQLEGGGWTVIQRRQDGSVNFFTTWQHYKAGFGRPDGEYWLGLEPVYQLTSRGDHELLVLLEDWGGRGARAHYDGFSLEPESDHYRLRLGQYHGDAGDSLSWHNDKPFSTVDRDRDSYSGNCALYQRGGWWYHACAHSNLNGVWHHGGHYRSRYQDGVYWAEFRGGAYSLRKAAMLIRPLKL

SEQ ID NO: 28474 - protein, 346 aa, Homo sapiens
MLKKPLSAVTWLCIFIVAFVSHPAWLQKLSKHKTPAQPQLKAANCCEEVKELKAQVANLSSLLSELNKKQERDWVSVVMQVMELESNSKRMESRLTDAESKYSEMNNQIDIMQLQAAQTVTQTSADAIYDCSSLYQKNYRISGVYKLPPDDFLGSPELEVFCDMETSGGGWTIIQRRKSGLVSFYRDWKQYKQGFGSIRGDFWLGNEHIHRLSRQPTRLRVEMEDWEGNLRYAEYSHFVLGNELNSYRLFLGNYTGNVGNDALQYHNNTAFSTKDKDNDNCLDKCAQLRKGGYWYNCCTDSNLNGVYYRLGEHNKHLDGITWYGWHGSTYSLKRVEMKIRPEDFKP

SEQ ID NO: 28475 - protein, 822 aa, Homo sapiens
MAAAVVVAEGDSDSRPGQELLVAWNTVSTGLVPPAALGLVSSRTSGAVPPKEEELRAAVEVLRGHGLHSVLEEWFVEVLQNDLQANISPEFWNAISQCENSADEPQCLLLLLDAFGLLESRLDPYLRSLELLEKWTRLGLLMGTGAQGLREEVHTMLRGVLFFSTPRTFQEMIQRLYGCFLRVYMQSKRKGEGGTDPELEGELDSRYARRRYYRLLQSPLCAGCSSDKQQCWCRQALEQFHQLSQVLHRLSLLERVSAEAVTTTLHQVTRERMEDRCRGEYERSFLREFHKWIERVVGWLGKVFLQDGPARPASPEAGNTLRRWRCHVQRFFYRIYASLRIEELFSIVRDFPDSRPAIEDLKYCLERTDQRQQLLVSLKAALETRLLHPGVNTCDIITLYISAIKALRVLDPSMVILEVACEPIRRYLRTREDTVRQIVAGLTGDSDGTGDLAVELSKTDPASLETGQDSEDDSGEPEDWVPDPVDADPGKSSSKRRSSDIISLLVSIYGSKDLFINEYRSLLADRLLHQFSFSPEREIRNVELLKLRFGEAPMHFCEVMLKDMADSRRINANIREEDEKRPAEEQPPFGVYAVILSSEFWPPFKDEKLEVPEDIRAALEAYCKKYEQLKAMRTLSWKHTLGLVTMDVELADRTLSVAVTPVQAVILLYFQDQASWTLEELSKAVKMPVALLRRRMSVWLQQGVLREEPPGTFSVIEEERPQDRDNMVLIDSDDESDSGMASQADQKEEELLLFWTYIQAMLTNLESLSLDRIYNMLRMFVVTGPALAEIDLQELQGYLQKKVRDQQLVYSAGVYRLPKNCS

SEQ ID NO: 28476 - protein, 819 aa, Homo sapiens
MAAAVVVAEGDSDSRPGQELLVAWNTVSTGLVPPAALGLVSSRTSGAVPPKEEELRAAVEVLRGHGLHSVLEEWFVEVLQNDLQANISPEFWNAISQCENSADEPQCLLLLLDAFGLLESRLDPYLRSLELLEKWTRLGLLMGTGAQGLREEVHTMLRGVLFFSTPRTFQEMIQRLYGCFLRVYMQSKRKGEGGTDPELEGELDSRYARRRYYRLLQSPLCAGCSSDKQQCWCRQALEQFHQLSQVLHRLSLLERVSAEAVTTTLHQVTRERMEDRCRGEYERSFLREFHKWIERVVGWLGKVFLQDGPARPASPEAGNTLRRWRCHVQRFFYRIYASLRIEELFSIVRDSRPAIEDLKYCLERTDQRQQLLVSLKAALETRLLHPGVNTCDIITLYISAIKALRVLDPSMVILEVACEPIRRYLRTREDTVRQIVAGLTGDSDGTGDLAVELSKTDPASLETGQDSEDDSGEPEDWVPDPVDADPGKSSSKRRSSDIISLLVSIYGSKDLFINEYRSLLADRLLHQFSFSPEREIRNVELLKLRFGEAPMHFCEVMLKDMADSRRINANIREEDEKRPAEEQPPFGVYAVILSSEFWPPFKDEKLEVPEDIRAALEAYCKKYEQLKAMRTLSWKHTLGLVTMDVELADRTLSVAVTPVQAVILLYFQDQASWTLEELSKAVKMPVALLRRRMSVWLQQGVLREEPPGTFSVIEEERPQDRDNMVLIDSDDESDSGMASQADQKEEELLLFWTYIQAMLTNLESLSLDRIYNMLRMFVVTGPALAEIDLQELQGYLQKKVRDQQLVYSAGVYRLPKNCS

SEQ ID NO: 28477 - protein, 544 aa, Homo sapiens
MEAWRCVRKGYGHCVVGRGRYPMFPHHSRSLGRDWTTPWENLQRCCWNRHISSCMRWPGHYSRAPYPYFSSRHFSLNWRPPCLFESRTQFQYCNWRPDNLSQTSLIHLSSYVMNAEGDEPSSKRRKHQGVIKRNWEYICSHDKEKTKILGDKNVDPKCEDSENKFDFSVMSYNILSQDLLEDNSHLYRHCRRPVLHWSFRFPNILKEIKHFDADVLCLQEVQEDHYGAEIRPSLESLGYHCEYKMRTGRKPDGCAICFKHSKFSLLSVNPVEFFRPDISLLDRDNVGLVLLLQPKIPYAACPAICVANTHLLYNPRRGDIKLTQLAMLLAEISSVAHQKDGSFCPIVMCGDFNSVPGSPLYSFIKEGKLNYEGLPIGKVSGQEQSSRGQRILSIPIWPPNLGISQNCVYEVQQVPKVEKTDSDLTQTQLKQTEVLVTAEKLSSNLQHHFSLSSVYSHYFPDTGIPEVTTCHSRSAITVDYIFYSAEKEDVAGHPGAEVALVGGLKLLARLSLLTEQDLWTVNGLPNENNSSDHLPLLAKFRLEL

SEQ ID NO: 28478 - protein, 375 aa, Homo sapiens
MSYNILSQDLLEDNSHLYRHCRRPVLHWSFRFPNILKEIKHFDADVLCLQEVQEDHYGAEIRPSLESLGYHCEYKMRTGRKPDGCAICFKHSKFSLLSVNPVEFFRPDISLLDRDNVGLVLLLQPKIPYAACPAICVANTHLLYNPRRGDIKLTQLAMLLAEISSVAHQKDGSFCPIVMCGDFNSVPGSPLYSFIKEGKLNYEGLPIGKVSGQEQSSRGQRILSIPIWPPNLGISQNCVYEVQQVPKVEKTDSDLTQTQLKQTEVLVTAEKLSSNLQHHFSLSSVYSHYFPDTGIPEVTTCHSRSAITVDYIFYSAEKEDVAGHPGAEVALVGGLKLLARLSLLTEQDLWTVNGLPNENNSSDHLPLLAKFRLEL

SEQ ID NO: 28479 - protein, 498 aa, Homo sapiens
MTVFLSFAFLAAILTHIGCSNQRRSPENSGRRYNRIQHGQCAYTFILPEHDGNCRESTTDQYNTNALQRDAPHVEPDFSSQKLQHLEHVMENYTQWLQKLENYIVENMKSEMAQIQQNAVQNHTATMLEIGTSLLSQTAEQTRKLTDVETQVLNQTSRLEIQLLENSLSTYKLEKQLLQQTNEILKIHEKNSLLEHKILEMEGKHKEELDTLKEEKENLQGLVTRQTYIIQELEKQLNRATTNNSVLQKQQLELMDTVHNLVNLCTKEGVLLKGGKREEEKPFRDCADVYQAGFNKSGIYTIYINNMPEPKKVFCNMDVNGGGWTVIQHREDGSLDFQRGWKEYKMGFGNPSGEYWLGNEFIFAITSQRQYMLRIELMDWEGNRAYSQYDRFHIGNEKQNYRLYLKGHTGTAGKQSSLILHGADFSTKDADNDNCMCKCALMLTGGWWFDACGPSNLNGMFYTAGQNHGKLNGIKWHYFKGPSYSLRSTTMMIRPLDF

SEQ ID NO: 28480 - protein, 497 aa, Homo sapiens
MTVFLSFAFLAAILTHIGCSNQRRSPENSGRRYNRIQHGQCAYTFILPEHDGNCRESTTDQYNTNALQRDAPHVEPDFSSQKLQHLEHVMENYTQWLQKLENYIVENMKSEMAQIQQNAVQNHTATMLEIGTSLLSQTAEQTRKLTDVETQVLNQTSRLEIQLLENSLSTYKLEKQLLQQTNEILKIHEKNSLLEHKILEMEGKHKEELDTLKEEKENLQGLVTRQTYIIQELEKQLNRATTNNSVLQKQQLELMDTVHNLVNLCTKEVLLKGGKREEEKPFRDCADVYQAGFNKSGIYTIYINNMPEPKKVFCNMDVNGGGWTVIQHREDGSLDFQRGWKEYKMGFGNPSGEYWLGNEFIFAITSQRQYMLRIELMDWEGNRAYSQYDRFHIGNEKQNYRLYLKGHTGTAGKQSSLILHGADFSTKDADNDNCMCKCALMLTGGWWFDACGPSNLNGMFYTAGQNHGKLNGIKWHYFKGPSYSLRSTTMMIRPLDF

SEQ ID NO: 28481 - protein, 1881 aa, Homo sapiens
MPYSVGFREADAATSFLRAARSGNLDKALDHLRNGVDINTCNQNGLNGLHLASKEGHVKMVVELLHKEIILETTTKKGNTALHIAALAGQDEVVRELVNYGANVNAQSQKGFTPLYMAAQENHLEVVKFLLENGANQNVATEDGFTPLAVALQQGHENVVAHLINYGTKGKVRLPALHIAARNDDTRTAAVLLQNDPNPDVLSKTGFTPLHIAAHYENLNVAQLLLNRGASVNFTPQNGITPLHIASRRGNVIMVRLLLDRGAQIETKTKDELTPLHCAARNGHVRISEILLDHGAPIQAKTKNGLSPIHMAAQGDHLDCVRLLLQYDAEIDDITLDHLTPLHVAAHCGHHRVAKVLLDKGAKPNSRALNGFTPLHIACKKNHVRVMELLLKTGASIDAVTESGLTPLHVASFMGHLPIVKNLLQRGASPNVSNVKVETPLHMAARAGHTEVAKYLLQNKAKVNAKAKDDQTPLHCAARIGHTNMVKLLLENNANPNLATTAGHTPLHIAAREGHVETVLALLEKEASQACMTKKGFTPLHVAAKYGKVRVAELLLERDAHPNAAGKNGLTPLHVAVHHNNLDIVKLLLPRGGSPHSPAWNGYTPLHIAAKQNQVEVARSLLQYGGSANAESVQGVTPLHLAAQEGHAEMVALLLSKQANGNLGNKSGLTPLHLVAQEGHVPVADVLIKHGVMVDATTRMGYTPLHVASHYGNIKLVKFLLQHQADVNAKTKLGYSPLHQAAQQGHTDIVTLLLKNGASPNEVSSDGTTPLAIAKRLGYISVTDVLKVVTDETSFVLVSDKHRMSFPETVDEILDVSEDEGEELISFKAERRDSRDVDEEKELLDFVPKLDQVVESPAIPRIPCAMPETVVIRSEEQEQASKEYDEDSLIPSSPATETSDNISPVASPVHTGFLVSFMVDARGGSMRGSRHNGLRVVIPPRTCAAPTRITCRLVKPQKLSTPPPLAEEEGLASRIIALGPTGAQFLSPVIVEIPHFASHGRGDRELVVLRSENGSVWKEHRSRYGESYLDQILNGMDEELGSLEELEKKRVCRIITTDFPLYFVIMSRLCQDYDTIGPEGGSLKSKLVPLVQATFPENAVTKRVKLALQAQPVPDELVTKLLGNQATFSPIVTVEPRRRKFHRPIGLRIPLPPSWTDNPRDSGEGDTTSLRLLCSVIGGTDQAQWEDITGTTKLVYANECANFTTNVSARFWLSDCPRTAEAVNFATLLYKELTAVPYMAKFVIFAKMNDPREGRLRCYCMTDDKVDKTLEQHENFVEVARSRDIEVLEGMSLFAELSGNLVPVKKAAQQRSFHFQSFRENRLAMPVKVRDSSREPGGSLSFLRKAMKYEDTQHILCHLNITMPPCAKGSGAEDRRRTPTPLALRYSILSESTPGSLSGTEQAEMKMAVISEHLGLSWAELARELQFSVEDINRIRVENPNSLLEQSVALLNLWVIREGQNANMENLYTALQSIDRGEIVNMLEGSGRQSRNLKPDRRHTDRDYSLSPSQMNGYSSLQDELLSPASLGCALSSPLRADQYWNEVAVLDAIPLAATEHDTMLEMSDMQVWSAGLTPSLVTAEDSSLECSKAEDSDATGHEWKLEGALSEEPRGPELGSLELVEDDTVDSDATNGLIDLLEQEEGQRSEEKLPGSKRQDDATGAGQDSENEVSLVSGHQRGQARITHSPTVSQVTERSQDRLQDWDADGSIVSYLQDAAQGSWQEEVTQGPHSFQGTSTMTEGLEPGGSQEYEKVLVSVSEHTWTEQPEAESSQADRDRRQQGQEEQVQEAKNTFTQVVQGNEFQNIPGEQVTEEQFTDEQGNIVTKKIIRKVVRQIDLSSADAAQEHEEVTVEGPLEDPSELEVDIDYFMKHSKDHTSTPNP

SEQ ID NO: 28482 - protein, 1719 aa, Homo sapiens
MPYSVGFREADAATSFLRAARSGNLDKALDHLRNGVDINTCNQNGLNGLHLASKEGHVKMVVELLHKEIILETTTKKGNTALHIAALAGQDEVVRELVNYGANVNAQSQKGFTPLYMAAQENHLEVVKFLLENGANQNVATEDGFTPLAVALQQGHENVVAHLINYGTKGKVRLPALHIAARNDDTRTAAVLLQNDPNPDVLSKTGFTPLHIAAHYENLNVAQLLLNRGASVNFTPQNGITPLHIASRRGNVIMVRLLLDRGAQIETKTKDELTPLHCAARNGHVRISEILLDHGAPIQAKTKNGLSPIHMAAQGDHLDCVRLLLQYDAEIDDITLDHLTPLHVAAHCGHHRVAKVLLDKGAKPNSRALNGFTPLHIACKKNHVRVMELLLKTGASIDAVTESGLTPLHVASFMGHLPIVKNLLQRGASPNVSNVKVETPLHMAARAGHTEVAKYLLQNKAKVNAKAKDDQTPLHCAARIGHTNMVKLLLENNANPNLATTAGHTPLHIAAREGHVETVLALLEKEASQACMTKKGFTPLHVAAKYGKVRVAELLLERDAHPNAAGKNGLTPLHVAVHHNNLDIVKLLLPRGGSPHSPAWNGYTPLHIAAKQNQVEVARSLLQYGGSANAESVQGVTPLHLAAQEGHAEMVALLLSKQANGNLGNKSGLTPLHLVAQEGHVPVADVLIKHGVMVDATTRMGYTPLHVASHYGNIKLVKFLLQHQADVNAKTKLGYSPLHQAAQQGHTDIVTLLLKNGASPNEVSSDGTTPLAIAKRLGYISVTDVLKVVTDETSFVLVSDKHRMSFPETVDEILDVSEDEGEELISFKAERRDSRDVDEEKELLDFVPKLDQVVESPAIPRIPCAMPETVVIRSEEQEQASKEYDEDSLIPSSPATETSDNISPVASPVHTGFLVSFMVDARGGSMRGSRHNGLRVVIPPRTCAAPTRITCRLVKPQKLSTPPPLAEEEGLASRIIALGPTGAQFLSPVIVEIPHFASHGRGDRELVVLRSENGSVWKEHRSRYGESYLDQILNGMDEELGSLEELEKKRVCRIITTDFPLYFVIMSRLCQDYDTIGPEGGSLKSKLVPLVQATFPENAVTKRVKLALQAQPVPDELVTKLLGNQATFSPIVTVEPRRRKFHRPIGLRIPLPPSWTDNPRDSGEGDTTSLRLLCSVIGGTDQAQWEDITGTTKLVYANECANFTTNVSARFWLSDCPRTAEAVNFATLLYKELTAVPYMAKFVIFAKMNDPREGRLRCYCMTDDKVDKTLEQHENFVEVARSRDIEVLEGMSLFAELSGNLVPVKKAAQQRSFHFQSFRENRLAMPVKVRDSSREPGGSLSFLRKAMKYEDTQHILCHLNITMPPCAKGSGAEDRRRTPTPLALRYSILSESTPGSLSGTEQAEMKMAVISEHLGLSWAELARELQFSVEDINRIRVENPNSLLEQSVALLNLWVIREGQNANMENLYTALQSIDRGEIVNMLEGSGRQSRNLKPDRRHTDRDYSLSPSQMNGHQRGQARITHSPTVSQVTERSQDRLQDWDADGSIVSYLQDAAQGSWQEEVTQGPHSFQGTSTMTEGLEPGGSQEYEKVLVSVSEHTWTEQPEAESSQADRDRRQQGQEEQVQEAKNTFTQVVQGNEFQNIPGEQVTEEQFTDEQGNIVTKKIIRKVVRQIDLSSADAAQEHEEVTVEGPLEDPSELEVDIDYFMKHSKDHTSTPNP

SEQ ID NO: 28483 - protein, 1856 aa, Homo sapiens
MPYSVGFREADAATSFLRAARSGNLDKALDHLRNGVDINTCNQNGLNGLHLASKEGHVKMVVELLHKEIILETTTKKGNTALHIAALAGQDEVVRELVNYGANVNAQSQKGFTPLYMAAQENHLEVVKFLLENGANQNVATEDGFTPLAVALQQGHENVVAHLINYGTKGKVRLPALHIAARNDDTRTAAVLLQNDPNPDVLSKTGFTPLHIAAHYENLNVAQLLLNRGASVNFTPQNGITPLHIASRRGNVIMVRLLLDRGAQIETKTKDELTPLHCAARNGHVRISEILLDHGAPIQAKTKNGLSPIHMAAQGDHLDCVRLLLQYDAEIDDITLDHLTPLHVAAHCGHHRVAKVLLDKGAKPNSRALNGFTPLHIACKKNHVRVMELLLKTGASIDAVTESGLTPLHVASFMGHLPIVKNLLQRGASPNVSNVKVETPLHMAARAGHTEVAKYLLQNKAKVNAKAKDDQTPLHCAARIGHTNMVKLLLENNANPNLATTAGHTPLHIAAREGHVETVLALLEKEASQACMTKKGFTPLHVAAKYGKVRVAELLLERDAHPNAAGKNGLTPLHVAVHHNNLDIVKLLLPRGGSPHSPAWNGYTPLHIAAKQNQVEVARSLLQYGGSANAESVQGVTPLHLAAQEGHAEMVALLLSKQANGNLGNKSGLTPLHLVAQEGHVPVADVLIKHGVMVDATTRMGYTPLHVASHYGNIKLVKFLLQHQADVNAKTKLGYSPLHQAAQQGHTDIVTLLLKNGASPNEVSSDGTTPLAIAKRLGYISVTDVLKVVTDETSFVLVSDKHRMSFPETVDEILDVSEDEGEELISFKAERRDSRDVDEEKELLDFVPKLDQVVESPAIPRIPCAMPETVVIRSEEQEQASKEYDEDSLIPSSPATETSDNISPVASPVHTGFLVSFMVDARGGSMRGSRHNGLRVVIPPRTCAAPTRITCRLVKPQKLSTPPPLAEEEGLASRIIALGPTGAQFLSPVIVEIPHFASHGRGDRELVVLRSENGSVWKEHRSRYGESYLDQILNGMDEELGSLEELEKKRVCRIITTDFPLYFVIMSRLCQDYDTIGPEGGSLKSKLVPLVQATFPENAVTKRVKLALQAQPVPDELVTKLLGNQATFSPIVTVEPRRRKFHRPIGLRIPLPPSWTDNPRDSGEGDTTSLRLLCSVIGGTDQAQWEDITGTTKLVYANECANFTTNVSARFWLSDCPRTAEAVNFATLLYKELTAVPYMAKFVIFAKMNDPREGRLRCYCMTDDKVDKTLEQHENFVEVARSRDIEVLEGMSLFAELSGNLVPVKKAAQQRSFHFQSFRENRLAMPVKVRDSSREPGGSLSFLRKAMKYEDTQHILCHLNITMPPCAKGSGAEDRRRTPTPLALRYSILSESTPGSLSGTEQAEMKMAVISEHLGLSWAELARELQFSVEDINRIRVENPNSLLEQSVALLNLWVIREGQNANMENLYTALQSIDRGEIVNMLEGSGRQSRNLKPDRRHTDRDYSLSPSQMNGYSSLQDELLSPASLGCALSSPLRADQYWNEVAVLDAIPLAATEHDTMLEMSDMQVWSAGLTPSLVTAEDSSLECSKAEDSDATGHEWKLEGALSEEPRGPELGSLELVEDDTVDSDATNGLIDLLEQEEGQRSEEKLPGSKRQDDATGAGQDSENEVSLVSGHQRGQARITHSPTVSQVTERSQDRLQDWDADGSIVSYLQDAAQGSWQEEVTQGPHSFQGTSTMTEGLEPGGSQEYEKVLVSVSEHTWTEQPEAESSQADRDRRQQGQEEQVQEAKNTFTQVVQGNEFQNIPGEQVTEEQFTDEQGNIVTKKIIRKVVRQIDLSSADAAQEHEEDHTSTPNP

SEQ ID NO: 28484 - protein, 1694 aa, Homo sapiens
MPYSVGFREADAATSFLRAARSGNLDKALDHLRNGVDINTCNQNGLNGLHLASKEGHVKMVVELLHKEIILETTTKKGNTALHIAALAGQDEVVRELVNYGANVNAQSQKGFTPLYMAAQENHLEVVKFLLENGANQNVATEDGFTPLAVALQQGHENVVAHLINYGTKGKVRLPALHIAARNDDTRTAAVLLQNDPNPDVLSKTGFTPLHIAAHYENLNVAQLLLNRGASVNFTPQNGITPLHIASRRGNVIMVRLLLDRGAQIETKTKDELTPLHCAARNGHVRISEILLDHGAPIQAKTKNGLSPIHMAAQGDHLDCVRLLLQYDAEIDDITLDHLTPLHVAAHCGHHRVAKVLLDKGAKPNSRALNGFTPLHIACKKNHVRVMELLLKTGASIDAVTESGLTPLHVASFMGHLPIVKNLLQRGASPNVSNVKVETPLHMAARAGHTEVAKYLLQNKAKVNAKAKDDQTPLHCAARIGHTNMVKLLLENNANPNLATTAGHTPLHIAAREGHVETVLALLEKEASQACMTKKGFTPLHVAAKYGKVRVAELLLERDAHPNAAGKNGLTPLHVAVHHNNLDIVKLLLPRGGSPHSPAWNGYTPLHIAAKQNQVEVARSLLQYGGSANAESVQGVTPLHLAAQEGHAEMVALLLSKQANGNLGNKSGLTPLHLVAQEGHVPVADVLIKHGVMVDATTRMGYTPLHVASHYGNIKLVKFLLQHQADVNAKTKLGYSPLHQAAQQGHTDIVTLLLKNGASPNEVSSDGTTPLAIAKRLGYISVTDVLKVVTDETSFVLVSDKHRMSFPETVDEILDVSEDEGEELISFKAERRDSRDVDEEKELLDFVPKLDQVVESPAIPRIPCAMPETVVIRSEEQEQASKEYDEDSLIPSSPATETSDNISPVASPVHTGFLVSFMVDARGGSMRGSRHNGLRVVIPPRTCAAPTRITCRLVKPQKLSTPPPLAEEEGLASRIIALGPTGAQFLSPVIVEIPHFASHGRGDRELVVLRSENGSVWKEHRSRYGESYLDQILNGMDEELGSLEELEKKRVCRIITTDFPLYFVIMSRLCQDYDTIGPEGGSLKSKLVPLVQATFPENAVTKRVKLALQAQPVPDELVTKLLGNQATFSPIVTVEPRRRKFHRPIGLRIPLPPSWTDNPRDSGEGDTTSLRLLCSVIGGTDQAQWEDITGTTKLVYANECANFTTNVSARFWLSDCPRTAEAVNFATLLYKELTAVPYMAKFVIFAKMNDPREGRLRCYCMTDDKVDKTLEQHENFVEVARSRDIEVLEGMSLFAELSGNLVPVKKAAQQRSFHFQSFRENRLAMPVKVRDSSREPGGSLSFLRKAMKYEDTQHILCHLNITMPPCAKGSGAEDRRRTPTPLALRYSILSESTPGSLSGTEQAEMKMAVISEHLGLSWAELARELQFSVEDINRIRVENPNSLLEQSVALLNLWVIREGQNANMENLYTALQSIDRGEIVNMLEGSGRQSRNLKPDRRHTDRDYSLSPSQMNGHQRGQARITHSPTVSQVTERSQDRLQDWDADGSIVSYLQDAAQGSWQEEVTQGPHSFQGTSTMTEGLEPGGSQEYEKVLVSVSEHTWTEQPEAESSQADRDRRQQGQEEQVQEAKNTFTQVVQGNEFQNIPGEQVTEEQFTDEQGNIVTKKIIRKVVRQIDLSSADAAQEHEEDHTSTPNP

SEQ ID NO: 28485 - protein, 1880 aa, Homo sapiens
MPYSVGFREADAATSFLRAARSGNLDKALDHLRNGVDINTCNQNGLNGLHLASKEGHVKMVVELLHKEIILETTTKKGNTALHIAALAGQDEVVRELVNYGANVNAQSQKGFTPLYMAAQENHLEVVKFLLENGANQNVATEDGFTPLAVALQQGHENVVAHLINYGTKGKVRLPALHIAARNDDTRTAAVLLQNDPNPDVLSKTGFTPLHIAAHYENLNVAQLLLNRGASVNFTPQNGITPLHIASRRGNVIMVRLLLDRGAQIETKTKDELTPLHCAARNGHVRISEILLDHGAPIQAKTKNGLSPIHMAAQGDHLDCVRLLLQYDAEIDDITLDHLTPLHVAAHCGHHRVAKVLLDKGAKPNSRALNGFTPLHIACKKNHVRVMELLLKTGASIDAVTESGLTPLHVASFMGHLPIVKNLLQRGASPNVSNVKVETPLHMAARAGHTEVAKYLLQNKAKVNAKAKDDQTPLHCAARIGHTNMVKLLLENNANPNLATTAGHTPLHIAAREGHVETVLALLEKEASQACMTKKGFTPLHVAAKYGKVRVAELLLERDAHPNAAGKNGLTPLHVAVHHNNLDIVKLLLPRGGSPHSPAWNGYTPLHIAAKQNQVEVARSLLQYGGSANAESVQGVTPLHLAAQEGHAEMVALLLSKQANGNLGNKSGLTPLHLVAQEGHVPVADVLIKHGVMVDATTRMGYTPLHVASHYGNIKLVKFLLQHQADVNAKTKLGYSPLHQAAQQGHTDIVTLLLKNGASPNEVSSDGTTPLAIAKRLGYISVTDVLKVVTDETSFVLVSDKHRMSFPETVDEILDVSEDEGEELISFKAERRDSRDVDEEKELLDFVPKLDQVVESPAIPRIPCAMPETVVIRSEEQEQASKEYDEDSLIPSSPATETSDNISPVASPVHTGFLVSFMVDARGGSMRGSRHNGLRVVIPPRTCAAPTRITCRLVKPQKLSTPPPLAEEEGLASRIIALGPTGAQFLSPVIVEIPHFASHGRGDRELVVLRSENGSVWKEHRSRYGESYLDQILNGMDEELGSLEELEKKRVCRIITTDFPLYFVIMSRLCQDYDTIGPEGGSLKSKLVPLVQATFPENAVTKRVKLALQAQPVPDELVTKLLGNQATFSPIVTVEPRRRKFHRPIGLRIPLPPSWTDNPRDSGEGDTTSLRLLCSVIGGTDQAQWEDITGTTKLVYANECANFTTNVSARFWLSDCPRTAEAVNFATLLYKELTAVPYMAKFVIFAKMNDPREGRLRCYCMTDDKVDKTLEQHENFVEVARSRDIEVLEGMSLFAELSGNLVPVKKAAQQRSFHFQSFRENRLAMPVKVRDSSREPGGSLSFLRKAMKYEDTQHILCHLNITMPPCAKGSGAEDRRRTPTPLALRYSILSESTPGSLSGTEQAEMKMAVISEHLGLSWAELARELQFSVEDINRIRVENPNSLLEQSVALLNLWVIREGQNANMENLYTALQSIDRGEIVNMLEGSGRQSRNLKPDRRHTDRDYSLSPSQMNGYSSLQDELLSPASLGCALSSPLRADQYWNEVAVLDAIPLAATEHDTMLEMSDMQVWSAGLTPSLVTAEDSSLECSKAEDSDATGHEWKLEGALSEEPRGPELGSLELVEDDTVDSDATNGLIDLLEQEEGQRSEEKLPGSKRQDDATGAGQDSENEVSLVSGHQRGQARITHSPTVSQVTERSQDRLQDWDADGSIVSYLQDAAQGSWQEEVTQGPHSFQGTSTMTEGLEPGGSQEYEKVLVSVSEHTWTEQPEAESSQADRDRRQQGQEEQVQEAKNTFTQVVQGNEFQNIPGEQVTEEQFTDEQGNIVTKKIIRKVVRQIDLSSADAAQEHEEVELRGSGLQPDLIEGRKGAQIVKRASLKRGKQ

SEQ ID NO: 28486 - protein, 1718 aa, Homo sapiens
MPYSVGFREADAATSFLRAARSGNLDKALDHLRNGVDINTCNQNGLNGLHLASKEGHVKMVVELLHKEIILETTTKKGNTALHIAALAGQDEVVRELVNYGANVNAQSQKGFTPLYMAAQENHLEVVKFLLENGANQNVATEDGFTPLAVALQQGHENVVAHLINYGTKGKVRLPALHIAARNDDTRTAAVLLQNDPNPDVLSKTGFTPLHIAAHYENLNVAQLLLNRGASVNFTPQNGITPLHIASRRGNVIMVRLLLDRGAQIETKTKDELTPLHCAARNGHVRISEILLDHGAPIQAKTKNGLSPIHMAAQGDHLDCVRLLLQYDAEIDDITLDHLTPLHVAAHCGHHRVAKVLLDKGAKPNSRALNGFTPLHIACKKNHVRVMELLLKTGASIDAVTESGLTPLHVASFMGHLPIVKNLLQRGASPNVSNVKVETPLHMAARAGHTEVAKYLLQNKAKVNAKAKDDQTPLHCAARIGHTNMVKLLLENNANPNLATTAGHTPLHIAAREGHVETVLALLEKEASQACMTKKGFTPLHVAAKYGKVRVAELLLERDAHPNAAGKNGLTPLHVAVHHNNLDIVKLLLPRGGSPHSPAWNGYTPLHIAAKQNQVEVARSLLQYGGSANAESVQGVTPLHLAAQEGHAEMVALLLSKQANGNLGNKSGLTPLHLVAQEGHVPVADVLIKHGVMVDATTRMGYTPLHVASHYGNIKLVKFLLQHQADVNAKTKLGYSPLHQAAQQGHTDIVTLLLKNGASPNEVSSDGTTPLAIAKRLGYISVTDVLKVVTDETSFVLVSDKHRMSFPETVDEILDVSEDEGEELISFKAERRDSRDVDEEKELLDFVPKLDQVVESPAIPRIPCAMPETVVIRSEEQEQASKEYDEDSLIPSSPATETSDNISPVASPVHTGFLVSFMVDARGGSMRGSRHNGLRVVIPPRTCAAPTRITCRLVKPQKLSTPPPLAEEEGLASRIIALGPTGAQFLSPVIVEIPHFASHGRGDRELVVLRSENGSVWKEHRSRYGESYLDQILNGMDEELGSLEELEKKRVCRIITTDFPLYFVIMSRLCQDYDTIGPEGGSLKSKLVPLVQATFPENAVTKRVKLALQAQPVPDELVTKLLGNQATFSPIVTVEPRRRKFHRPIGLRIPLPPSWTDNPRDSGEGDTTSLRLLCSVIGGTDQAQWEDITGTTKLVYANECANFTTNVSARFWLSDCPRTAEAVNFATLLYKELTAVPYMAKFVIFAKMNDPREGRLRCYCMTDDKVDKTLEQHENFVEVARSRDIEVLEGMSLFAELSGNLVPVKKAAQQRSFHFQSFRENRLAMPVKVRDSSREPGGSLSFLRKAMKYEDTQHILCHLNITMPPCAKGSGAEDRRRTPTPLALRYSILSESTPGSLSGTEQAEMKMAVISEHLGLSWAELARELQFSVEDINRIRVENPNSLLEQSVALLNLWVIREGQNANMENLYTALQSIDRGEIVNMLEGSGRQSRNLKPDRRHTDRDYSLSPSQMNGHQRGQARITHSPTVSQVTERSQDRLQDWDADGSIVSYLQDAAQGSWQEEVTQGPHSFQGTSTMTEGLEPGGSQEYEKVLVSVSEHTWTEQPEAESSQADRDRRQQGQEEQVQEAKNTFTQVVQGNEFQNIPGEQVTEEQFTDEQGNIVTKKIIRKVVRQIDLSSADAAQEHEEVELRGSGLQPDLIEGRKGAQIVKRASLKRGKQ

SEQ ID NO: 28487 - protein, 1834 aa, Homo sapiens
MPYSVGFREADAATSFLRAARSGNLDKALDHLRNGVDINTCNQNGLNGLHLASKEGHVKMVVELLHKEIILETTTKKGNTALHIAALAGQDEVVRELVNYGANVNAQSQKGFTPLYMAAQENHLEVVKFLLENGANQNVATEDGFTPLAVALQQGHENVVAHLINYGTKGKVRLPALHIAARNDDTRTAAVLLQNDPNPDVLSKTGFTPLHIAAHYENLNVAQLLLNRGASVNFTPQNGITPLHIASRRGNVIMVRLLLDRGAQIETKTKDELTPLHCAARNGHVRISEILLDHGAPIQAKTKNGLSPIHMAAQGDHLDCVRLLLQYDAEIDDITLDHLTPLHVAAHCGHHRVAKVLLDKGAKPNSRALNGFTPLHIACKKNHVRVMELLLKTGASIDAVTESGLTPLHVASFMGHLPIVKNLLQRGASPNVSNVKVETPLHMAARAGHTEVAKYLLQNKAKVNAKAKDDQTPLHCAARIGHTNMVKLLLENNANPNLATTAGHTPLHIAAREGHVETVLALLEKEASQACMTKKGFTPLHVAAKYGKVRVAELLLERDAHPNAAGKNGLTPLHVAVHHNNLDIVKLLLPRGGSPHSPAWNGYTPLHIAAKQNQVEVARSLLQYGGSANAESVQGVTPLHLAAQEGHAEMVALLLSKQANGNLGNKSGLTPLHLVAQEGHVPVADVLIKHGVMVDATTRMGYTPLHVASHYGNIKLVKFLLQHQADVNAKTKLGYSPLHQAAQQGHTDIVTLLLKNGASPNEVSSDGTTPLAIAKRLGYISVTDVLKVVTDETSFVLVSDKHRMSFPETVDEILDVSEDEGEELISFKAERRDSRDVDEEKELLDFVPKLDQVVESPAIPRIPCAMPETVVIRSEEQEQASKEYDEDSLIPSSPATETSDNISPVASPVHTGFLVSFMVDARGGSMRGSRHNGLRVVIPPRTCAAPTRITCRLVKPQKLSTPPPLAEEEGLASRIIALGPTGAQFLSPVIVEIPHFASHGRGDRELVVLRSENGSVWKEHRSRYGESYLDQILNGMDEELGSLEELEKKRVCRIITTDFPLYFVIMSRLCQDYDTIGPEGGSLKSKLVPLVQATFPENAVTKRVKLALQAQPVPDELVTKLLGNQATFSPIVTVEPRRRKFHRPIGLRIPLPPSWTDNPRDSGEGDTTSLRLLCSVIGGTDQAQWEDITGTTKLVYANECANFTTNVSARFWLSDCPRTAEAVNFATLLYKELTAVPYMAKFVIFAKMNDPREGRLRCYCMTDDKVDKTLEQHENFVEVARSRDIEVLEGMSLFAELSGNLVPVKKAAQQRSFHFQSFRENRLAMPVKVRDSSREPGGSLSFLRKAMKYEDTQHILCHLNITMPPCAKGSGAEDRRRTPTPLALRYSILSESTPGSLSGTEQAEMKMAVISEHLGLSWAELARELQFSVEDINRIRVENPNSLLEQSVALLNLWVIREGQNANMENLYTALQSIDRGEIVNMLEGSGRQSRNLKPDRRHTDRDYSLSPSQMNGYSSLQDELLSPASLGCALSSPLRADQYWNEVAVLDAIPLAATEHDTMLEMSDMQVWSAGLTPSLVTAEDSSLECSKAEDSDATGHEWKLEGALSEEPRGPELGSLELVEDDTVDSDATNGLIDLLEQEEGQRSEEKLPGSKRQDDATGAGQDSENEVSLVSGHQRGQARITHSPTVSQVTERSQDRLQDWDADGSIVSYLQDAAQGSWQEEVTQGPHSFQGTSTMTEGLEPGGSQEYEKVLVSVSEHTWTEQPEAESSQADRDRRQQGQEEQVQEAKNTFTQVVQGNEFQNIPGEQVTEEQFTDEQGNIVTKKDHTSTPNP

SEQ ID NO: 28488 - protein, 1672 aa, Homo sapiens
MPYSVGFREADAATSFLRAARSGNLDKALDHLRNGVDINTCNQNGLNGLHLASKEGHVKMVVELLHKEIILETTTKKGNTALHIAALAGQDEVVRELVNYGANVNAQSQKGFTPLYMAAQENHLEVVKFLLENGANQNVATEDGFTPLAVALQQGHENVVAHLINYGTKGKVRLPALHIAARNDDTRTAAVLLQNDPNPDVLSKTGFTPLHIAAHYENLNVAQLLLNRGASVNFTPQNGITPLHIASRRGNVIMVRLLLDRGAQIETKTKDELTPLHCAARNGHVRISEILLDHGAPIQAKTKNGLSPIHMAAQGDHLDCVRLLLQYDAEIDDITLDHLTPLHVAAHCGHHRVAKVLLDKGAKPNSRALNGFTPLHIACKKNHVRVMELLLKTGASIDAVTESGLTPLHVASFMGHLPIVKNLLQRGASPNVSNVKVETPLHMAARAGHTEVAKYLLQNKAKVNAKAKDDQTPLHCAARIGHTNMVKLLLENNANPNLATTAGHTPLHIAAREGHVETVLALLEKEASQACMTKKGFTPLHVAAKYGKVRVAELLLERDAHPNAAGKNGLTPLHVAVHHNNLDIVKLLLPRGGSPHSPAWNGYTPLHIAAKQNQVEVARSLLQYGGSANAESVQGVTPLHLAAQEGHAEMVALLLSKQANGNLGNKSGLTPLHLVAQEGHVPVADVLIKHGVMVDATTRMGYTPLHVASHYGNIKLVKFLLQHQADVNAKTKLGYSPLHQAAQQGHTDIVTLLLKNGASPNEVSSDGTTPLAIAKRLGYISVTDVLKVVTDETSFVLVSDKHRMSFPETVDEILDVSEDEGEELISFKAERRDSRDVDEEKELLDFVPKLDQVVESPAIPRIPCAMPETVVIRSEEQEQASKEYDEDSLIPSSPATETSDNISPVASPVHTGFLVSFMVDARGGSMRGSRHNGLRVVIPPRTCAAPTRITCRLVKPQKLSTPPPLAEEEGLASRIIALGPTGAQFLSPVIVEIPHFASHGRGDRELVVLRSENGSVWKEHRSRYGESYLDQILNGMDEELGSLEELEKKRVCRIITTDFPLYFVIMSRLCQDYDTIGPEGGSLKSKLVPLVQATFPENAVTKRVKLALQAQPVPDELVTKLLGNQATFSPIVTVEPRRRKFHRPIGLRIPLPPSWTDNPRDSGEGDTTSLRLLCSVIGGTDQAQWEDITGTTKLVYANECANFTTNVSARFWLSDCPRTAEAVNFATLLYKELTAVPYMAKFVIFAKMNDPREGRLRCYCMTDDKVDKTLEQHENFVEVARSRDIEVLEGMSLFAELSGNLVPVKKAAQQRSFHFQSFRENRLAMPVKVRDSSREPGGSLSFLRKAMKYEDTQHILCHLNITMPPCAKGSGAEDRRRTPTPLALRYSILSESTPGSLSGTEQAEMKMAVISEHLGLSWAELARELQFSVEDINRIRVENPNSLLEQSVALLNLWVIREGQNANMENLYTALQSIDRGEIVNMLEGSGRQSRNLKPDRRHTDRDYSLSPSQMNGHQRGQARITHSPTVSQVTERSQDRLQDWDADGSIVSYLQDAAQGSWQEEVTQGPHSFQGTSTMTEGLEPGGSQEYEKVLVSVSEHTWTEQPEAESSQADRDRRQQGQEEQVQEAKNTFTQVVQGNEFQNIPGEQVTEEQFTDEQGNIVTKKDHTSTPNP

SEQ ID NO: 28489 - protein, 1806 aa, Homo sapiens
MPYSVGFREADAATSFLRAARSGNLDKALDHLRNGVDINTCNQNGLNGLHLASKEGHVKMVVELLHKEIILETTTKKGNTALHIAALAGQDEVVRELVNYGANVNAQSQKGFTPLYMAAQENHLEVVKFLLENGANQNVATEDGFTPLAVALQQGHENVVAHLINYGTKGKVRLPALHIAARNDDTRTAAVLLQNDPNPDVLSKTGFTPLHIAAHYENLNVAQLLLNRGASVNFTPQNGITPLHIASRRGNVIMVRLLLDRGAQIETKTKDELTPLHCAARNGHVRISEILLDHGAPIQAKTKNGLSPIHMAAQGDHLDCVRLLLQYDAEIDDITLDHLTPLHVAAHCGHHRVAKVLLDKGAKPNSRALNGFTPLHIACKKNHVRVMELLLKTGASIDAVTESGLTPLHVASFMGHLPIVKNLLQRGASPNVSNVKVETPLHMAARAGHTEVAKYLLQNKAKVNAKAKDDQTPLHCAARIGHTNMVKLLLENNANPNLATTAGHTPLHIAAREGHVETVLALLEKEASQACMTKKGFTPLHVAAKYGKVRVAELLLERDAHPNAAGKNGLTPLHVAVHHNNLDIVKLLLPRGGSPHSPAWNGYTPLHIAAKQNQVEVARSLLQYGGSANAESVQGVTPLHLAAQEGHAEMVALLLSKQANGNLGNKSGLTPLHLVAQEGHVPVADVLIKHGVMVDATTRMGYTPLHVASHYGNIKLVKFLLQHQADVNAKTKLGYSPLHQAAQQGHTDIVTLLLKNGASPNEVSSDGTTPLAIAKRLGYISVTDVLKVVTDETSFVLVSDKHRMSFPETVDEILDVSEDEGEELISFKAERRDSRDVDEEKELLDFVPKLDQVVESPAIPRIPCAMPETVVIRSEEQEQASKEYDEDSLIPSSPATETSDNISPVASPVHTGFLVSFMVDARGGSMRGSRHNGLRVVIPPRTCAAPTRITCRLVKPQKLSTPPPLAEEEGLASRIIALGPTGAQFLSPVIVEIPHFASHGRGDRELVVLRSENGSVWKEHRSRYGESYLDQILNGMDEELGSLEELEKKRVCRIITTDFPLYFVIMSRLCQDYDTIGPEGGSLKSKLVPLVQATFPENAVTKRVKLALQAQPVPDELVTKLLGNQATFSPIVTVEPRRRKFHRPIGLRIPLPPSWTDNPRDSGEGDTTSLRLLCSVIGGTDQAQWEDITGTTKLVYANECANFTTNVSARFWLSDCPRTAEAVNFATLLYKELTAVPYMAKFVIFAKMNDPREGRLRCYCMTDDKVDKTLEQHENFVEVARSRDIEVLEGMSLFAELSGNLVPVKKAAQQRSFHFQSFRENRLAMPVKVRDSSREPGGSLSFLRKAMKYEDTQHILCHLNITMPPCAKGSGAEDRRRTPTPLALRYSILSESTPGSLSGTEQAEMKMAVISEHLGLSWAELARELQFSVEDINRIRVENPNSLLEQSVALLNLWVIREGQNANMENLYTALQSIDRGEIVNMLEGSGRQSRNLKPDRRHTDRDYSLSPSQMNGYSSLQDELLSPASLGCALSSPLRADQYWNEVAVLDAIPLAATEHDTMLEMSDMQVWSAGLTPSLVTAEDSSLECSKAEDSDATGHEWKLEGALSEEPRGPELGSLELVEDDTVDSDATNGLIDLLEQEEGQRSEEKLPGSKRQDDATGAGQDSENEVSLVSGHQRGQARITHSPTVSQVTERSQDRLQDWDADGSIVSYLQDAAQGSWQEEVTQGPHSFQGTSTMTEGLEPGGSQEYEKVLVSVSEHTWTEQPEAESSQADRDRRQQGQEEQVQEAKNTFTQVVQDHTSTPNP

SEQ ID NO: 28490 - protein, 1644 aa, Homo sapiens
MPYSVGFREADAATSFLRAARSGNLDKALDHLRNGVDINTCNQNGLNGLHLASKEGHVKMVVELLHKEIILETTTKKGNTALHIAALAGQDEVVRELVNYGANVNAQSQKGFTPLYMAAQENHLEVVKFLLENGANQNVATEDGFTPLAVALQQGHENVVAHLINYGTKGKVRLPALHIAARNDDTRTAAVLLQNDPNPDVLSKTGFTPLHIAAHYENLNVAQLLLNRGASVNFTPQNGITPLHIASRRGNVIMVRLLLDRGAQIETKTKDELTPLHCAARNGHVRISEILLDHGAPIQAKTKNGLSPIHMAAQGDHLDCVRLLLQYDAEIDDITLDHLTPLHVAAHCGHHRVAKVLLDKGAKPNSRALNGFTPLHIACKKNHVRVMELLLKTGASIDAVTESGLTPLHVASFMGHLPIVKNLLQRGASPNVSNVKVETPLHMAARAGHTEVAKYLLQNKAKVNAKAKDDQTPLHCAARIGHTNMVKLLLENNANPNLATTAGHTPLHIAAREGHVETVLALLEKEASQACMTKKGFTPLHVAAKYGKVRVAELLLERDAHPNAAGKNGLTPLHVAVHHNNLDIVKLLLPRGGSPHSPAWNGYTPLHIAAKQNQVEVARSLLQYGGSANAESVQGVTPLHLAAQEGHAEMVALLLSKQANGNLGNKSGLTPLHLVAQEGHVPVADVLIKHGVMVDATTRMGYTPLHVASHYGNIKLVKFLLQHQADVNAKTKLGYSPLHQAAQQGHTDIVTLLLKNGASPNEVSSDGTTPLAIAKRLGYISVTDVLKVVTDETSFVLVSDKHRMSFPETVDEILDVSEDEGEELISFKAERRDSRDVDEEKELLDFVPKLDQVVESPAIPRIPCAMPETVVIRSEEQEQASKEYDEDSLIPSSPATETSDNISPVASPVHTGFLVSFMVDARGGSMRGSRHNGLRVVIPPRTCAAPTRITCRLVKPQKLSTPPPLAEEEGLASRIIALGPTGAQFLSPVIVEIPHFASHGRGDRELVVLRSENGSVWKEHRSRYGESYLDQILNGMDEELGSLEELEKKRVCRIITTDFPLYFVIMSRLCQDYDTIGPEGGSLKSKLVPLVQATFPENAVTKRVKLALQAQPVPDELVTKLLGNQATFSPIVTVEPRRRKFHRPIGLRIPLPPSWTDNPRDSGEGDTTSLRLLCSVIGGTDQAQWEDITGTTKLVYANECANFTTNVSARFWLSDCPRTAEAVNFATLLYKELTAVPYMAKFVIFAKMNDPREGRLRCYCMTDDKVDKTLEQHENFVEVARSRDIEVLEGMSLFAELSGNLVPVKKAAQQRSFHFQSFRENRLAMPVKVRDSSREPGGSLSFLRKAMKYEDTQHILCHLNITMPPCAKGSGAEDRRRTPTPLALRYSILSESTPGSLSGTEQAEMKMAVISEHLGLSWAELARELQFSVEDINRIRVENPNSLLEQSVALLNLWVIREGQNANMENLYTALQSIDRGEIVNMLEGSGRQSRNLKPDRRHTDRDYSLSPSQMNGHQRGQARITHSPTVSQVTERSQDRLQDWDADGSIVSYLQDAAQGSWQEEVTQGPHSFQGTSTMTEGLEPGGSQEYEKVLVSVSEHTWTEQPEAESSQADRDRRQQGQEEQVQEAKNTFTQVVQDHTSTPNP

SEQ ID NO: 28491 - protein, 1905 aa, Homo sapiens
MPYSVGFREADAATSFLRAARSGNLDKALDHLRNGVDINTCNQNGLNGLHLASKEGHVKMVVELLHKEIILETTTKKGNTALHIAALAGQDEVVRELVNYGANVNAQSQKGFTPLYMAAQENHLEVVKFLLENGANQNVATEDGFTPLAVALQQGHENVVAHLINYGTKGKVRLPALHIAARNDDTRTAAVLLQNDPNPDVLSKTGFTPLHIAAHYENLNVAQLLLNRGASVNFTPQNGITPLHIASRRGNVIMVRLLLDRGAQIETKTKDELTPLHCAARNGHVRISEILLDHGAPIQAKTKNGLSPIHMAAQGDHLDCVRLLLQYDAEIDDITLDHLTPLHVAAHCGHHRVAKVLLDKGAKPNSRALNGFTPLHIACKKNHVRVMELLLKTGASIDAVTESGLTPLHVASFMGHLPIVKNLLQRGASPNVSNVKVETPLHMAARAGHTEVAKYLLQNKAKVNAKAKDDQTPLHCAARIGHTNMVKLLLENNANPNLATTAGHTPLHIAAREGHVETVLALLEKEASQACMTKKGFTPLHVAAKYGKVRVAELLLERDAHPNAAGKNGLTPLHVAVHHNNLDIVKLLLPRGGSPHSPAWNGYTPLHIAAKQNQVEVARSLLQYGGSANAESVQGVTPLHLAAQEGHAEMVALLLSKQANGNLGNKSGLTPLHLVAQEGHVPVADVLIKHGVMVDATTRMGYTPLHVASHYGNIKLVKFLLQHQADVNAKTKLGYSPLHQAAQQGHTDIVTLLLKNGASPNEVSSDGTTPLAIAKRLGYISVTDVLKVVTDETSFVLVSDKHRMSFPETVDEILDVSEDEGEELISFKAERRDSRDVDEEKELLDFVPKLDQVVESPAIPRIPCAMPETVVIRSEEQEQASKEYDEDSLIPSSPATETSDNISPVASPVHTGFLVSFMVDARGGSMRGSRHNGLRVVIPPRTCAAPTRITCRLVKPQKLSTPPPLAEEEGLASRIIALGPTGAQFLSPVIVEIPHFASHGRGDRELVVLRSENGSVWKEHRSRYGESYLDQILNGMDEELGSLEELEKKRVCRIITTDFPLYFVIMSRLCQDYDTIGPEGGSLKSKLVPLVQATFPENAVTKRVKLALQAQPVPDELVTKLLGNQATFSPIVTVEPRRRKFHRPIGLRIPLPPSWTDNPRDSGEGDTTSLRLLCSVIGGTDQAQWEDITGTTKLVYANECANFTTNVSARFWLSDCPRTAEAVNFATLLYKELTAVPYMAKFVIFAKMNDPREGRLRCYCMTDDKVDKTLEQHENFVEVARSRDIEVLEGMSLFAELSGNLVPVKKAAQQRSFHFQSFRENRLAMPVKVRDSSREPGGSLSFLRKAMKYEDTQHILCHLNITMPPCAKGSGAEDRRRTPTPLALRYSILSESTPGSLSGTEQAEMKMAVISEHLGLSWAELARELQFSVEDINRIRVENPNSLLEQSVALLNLWVIREGQNANMENLYTALQSIDRGEIVNMLEGSGRQSRNLKPDRRHTDRDYSLSPSQMNGYSSLQDELLSPASLGCALSSPLRADQYWNEVAVLDAIPLAATEHDTMLEMSDMQVWSAGLTPSLVTAEDSSLECSKAEDSDATGHEWKLEGALSEEPRGPELGSLELVEDDTVDSDATNGLIDLLEQEEGQRSEEKLPGSKRQDDATGAGQDSENEVSLVSGHQRGQARITHSPTVSQVTERSQDRLQDWDADGSIVSYLQDAAQGSWQEEVTQGPHSFQGTSTMTEGLEPGGSQEYEKVLVSVSEHTWTEQPEAESSQADRDRRQQGQEEQVQEAKNTFTQVVQGNEFQNIPGEQVTEEQFTDEQGNIVTKKIIRKVVRQIDLSSADAAQEHEEVTVEGPLEDPSELEVDIDYFMKHSKVELRGSGLQPDLIEGRKGAQIVKRASLKRGKQ

SEQ ID NO: 28492 - protein, 1743 aa, Homo sapiens
MPYSVGFREADAATSFLRAARSGNLDKALDHLRNGVDINTCNQNGLNGLHLASKEGHVKMVVELLHKEIILETTTKKGNTALHIAALAGQDEVVRELVNYGANVNAQSQKGFTPLYMAAQENHLEVVKFLLENGANQNVATEDGFTPLAVALQQGHENVVAHLINYGTKGKVRLPALHIAARNDDTRTAAVLLQNDPNPDVLSKTGFTPLHIAAHYENLNVAQLLLNRGASVNFTPQNGITPLHIASRRGNVIMVRLLLDRGAQIETKTKDELTPLHCAARNGHVRISEILLDHGAPIQAKTKNGLSPIHMAAQGDHLDCVRLLLQYDAEIDDITLDHLTPLHVAAHCGHHRVAKVLLDKGAKPNSRALNGFTPLHIACKKNHVRVMELLLKTGASIDAVTESGLTPLHVASFMGHLPIVKNLLQRGASPNVSNVKVETPLHMAARAGHTEVAKYLLQNKAKVNAKAKDDQTPLHCAARIGHTNMVKLLLENNANPNLATTAGHTPLHIAAREGHVETVLALLEKEASQACMTKKGFTPLHVAAKYGKVRVAELLLERDAHPNAAGKNGLTPLHVAVHHNNLDIVKLLLPRGGSPHSPAWNGYTPLHIAAKQNQVEVARSLLQYGGSANAESVQGVTPLHLAAQEGHAEMVALLLSKQANGNLGNKSGLTPLHLVAQEGHVPVADVLIKHGVMVDATTRMGYTPLHVASHYGNIKLVKFLLQHQADVNAKTKLGYSPLHQAAQQGHTDIVTLLLKNGASPNEVSSDGTTPLAIAKRLGYISVTDVLKVVTDETSFVLVSDKHRMSFPETVDEILDVSEDEGEELISFKAERRDSRDVDEEKELLDFVPKLDQVVESPAIPRIPCAMPETVVIRSEEQEQASKEYDEDSLIPSSPATETSDNISPVASPVHTGFLVSFMVDARGGSMRGSRHNGLRVVIPPRTCAAPTRITCRLVKPQKLSTPPPLAEEEGLASRIIALGPTGAQFLSPVIVEIPHFASHGRGDRELVVLRSENGSVWKEHRSRYGESYLDQILNGMDEELGSLEELEKKRVCRIITTDFPLYFVIMSRLCQDYDTIGPEGGSLKSKLVPLVQATFPENAVTKRVKLALQAQPVPDELVTKLLGNQATFSPIVTVEPRRRKFHRPIGLRIPLPPSWTDNPRDSGEGDTTSLRLLCSVIGGTDQAQWEDITGTTKLVYANECANFTTNVSARFWLSDCPRTAEAVNFATLLYKELTAVPYMAKFVIFAKMNDPREGRLRCYCMTDDKVDKTLEQHENFVEVARSRDIEVLEGMSLFAELSGNLVPVKKAAQQRSFHFQSFRENRLAMPVKVRDSSREPGGSLSFLRKAMKYEDTQHILCHLNITMPPCAKGSGAEDRRRTPTPLALRYSILSESTPGSLSGTEQAEMKMAVISEHLGLSWAELARELQFSVEDINRIRVENPNSLLEQSVALLNLWVIREGQNANMENLYTALQSIDRGEIVNMLEGSGRQSRNLKPDRRHTDRDYSLSPSQMNGHQRGQARITHSPTVSQVTERSQDRLQDWDADGSIVSYLQDAAQGSWQEEVTQGPHSFQGTSTMTEGLEPGGSQEYEKVLVSVSEHTWTEQPEAESSQADRDRRQQGQEEQVQEAKNTFTQVVQGNEFQNIPGEQVTEEQFTDEQGNIVTKKIIRKVVRQIDLSSADAAQEHEEVTVEGPLEDPSELEVDIDYFMKHSKVELRGSGLQPDLIEGRKGAQIVKRASLKRGKQ

SEQ ID NO: 28493 - protein, 1983 aa, Homo sapiens
MPYSVGFREADAATSFLRAARSGNLDKALDHLRNGVDINTCNQNGLNGLHLASKEGHVKMVVELLHKEIILETTTKKGNTALHIAALAGQDEVVRELVNYGANVNAQSQKGFTPLYMAAQENHLEVVKFLLENGANQNVATEDGFTPLAVALQQGHENVVAHLINYGTKGKVRLPALHIAARNDDTRTAAVLLQNDPNPDVLSKTGFTPLHIAAHYENLNVAQLLLNRGASVNFTPQNGITPLHIASRRGNVIMVRLLLDRGAQIETKTKDELTPLHCAARNGHVRISEILLDHGAPIQAKTKNGLSPIHMAAQGDHLDCVRLLLQYDAEIDDITLDHLTPLHVAAHCGHHRVAKVLLDKGAKPNSRALNGFTPLHIACKKNHVRVMELLLKTGASIDAVTESGLTPLHVASFMGHLPIVKNLLQRGASPNVSNVKVETPLHMAARAGHTEVAKYLLQNKAKVNAKAKDDQTPLHCAARIGHTNMVKLLLENNANPNLATTAGHTPLHIAAREGHVETVLALLEKEASQACMTKKGFTPLHVAAKYGKVRVAELLLERDAHPNAAGKNGLTPLHVAVHHNNLDIVKLLLPRGGSPHSPAWNGYTPLHIAAKQNQVEVARSLLQYGGSANAESVQGVTPLHLAAQEGHAEMVALLLSKQANGNLGNKSGLTPLHLVAQEGHVPVADVLIKHGVMVDATTRMGYTPLHVASHYGNIKLVKFLLQHQADVNAKTKLGYSPLHQAAQQGHTDIVTLLLKNGASPNEVSSDGTTPLAIAKRLGYISVTDVLKVVTDETSFVLVSDKHRMSFPETVDEILDVSEDEGEELISFKAERRDSRDVDEEKELLDFVPKLDQVVESPAIPRIPCAMPETVVIRSEEQEQASKEYDEDSLIPSSPATETSDNISPVASPVHTGFLVSFMVDARGGSMRGSRHNGLRVVIPPRTCAAPTRITCRLVKPQKLSTPPPLAEEEGLASRIIALGPTGAQFLSPVIVEIPHFASHGRGDRELVVLRSENGSVWKEHRSRYGESYLDQILNGMDEELGSLEELEKKRVCRIITTDFPLYFVIMSRLCQDYDTIGPEGGSLKSKLVPLVQATFPENAVTKRVKLALQAQPVPDELVTKLLGNQATFSPIVTVEPRRRKFHRPIGLRIPLPPSWTDNPRDSGEGDTTSLRLLCSVIGGTDQAQWEDITGTTKLVYANECANFTTNVSARFWLSDCPRTAEAVNFATLLYKELTAVPYMAKFVIFAKMNDPREGRLRCYCMTDDKVDKTLEQHENFVEVARSRDIEVLEGMSLFAELSGNLVPVKKAAQQRSFHFQSFRENRLAMPVKVRDSSREPGGSLSFLRKAMKYEDTQHILCHLNITMPPCAKGSGAEDRRRTPTPLALRYSILSESTPGSLSGTEQAEMKMAVISEHLGLSWAELARELQFSVEDINRIRVENPNSLLEQSVALLNLWVIREGQNANMENLYTALQSIDRGEIVNMLEGSGRQSRNLKPDRRHTDRDYSLSPSQMNGYSSLQDELLSPASLGCALSSPLRADQYWNEVAVLDAIPLAATEHDTMLEMSDMQVWSAGLTPSLVTAEDSSLECSKAEDSDATGHEWKLEGALSEEPRGPELGSLELVEDDTVDSDATNGLIDLLEQEEGQRSEEKLPGSKRQDDATGAGQDSENEVSLVSGHQRGQARITHSPTVSQVTERSQDRLQDWDADGSIVSYLQDAAQGSWQEEVTQGPHSFQGTSTMTEGLEPGGSQEYEKVLVSVSEHTWTEQPEAESSQADRDRRQQGQEEQVQEAKNTFTQVVQGNEFQNIPGEQVTEEQFTDEQGNIVTKKIIRKVVRQIDLSSADAAQEHEEVTVEGPLEDPSELEVDIDYFMKHSKVLRRPRPWGTQRHHCCLALPGRLHDTSLHSPLYELSLQSLFSLVGSVSAPPCRSFRSSACVLPVFAICPAFCLCCCLQVELRGSGLQPDLIEGRKGAQIVKRASLKRGKQ

SEQ ID NO: 28494 - protein, 1821 aa, Homo sapiens
MPYSVGFREADAATSFLRAARSGNLDKALDHLRNGVDINTCNQNGLNGLHLASKEGHVKMVVELLHKEIILETTTKKGNTALHIAALAGQDEVVRELVNYGANVNAQSQKGFTPLYMAAQENHLEVVKFLLENGANQNVATEDGFTPLAVALQQGHENVVAHLINYGTKGKVRLPALHIAARNDDTRTAAVLLQNDPNPDVLSKTGFTPLHIAAHYENLNVAQLLLNRGASVNFTPQNGITPLHIASRRGNVIMVRLLLDRGAQIETKTKDELTPLHCAARNGHVRISEILLDHGAPIQAKTKNGLSPIHMAAQGDHLDCVRLLLQYDAEIDDITLDHLTPLHVAAHCGHHRVAKVLLDKGAKPNSRALNGFTPLHIACKKNHVRVMELLLKTGASIDAVTESGLTPLHVASFMGHLPIVKNLLQRGASPNVSNVKVETPLHMAARAGHTEVAKYLLQNKAKVNAKAKDDQTPLHCAARIGHTNMVKLLLENNANPNLATTAGHTPLHIAAREGHVETVLALLEKEASQACMTKKGFTPLHVAAKYGKVRVAELLLERDAHPNAAGKNGLTPLHVAVHHNNLDIVKLLLPRGGSPHSPAWNGYTPLHIAAKQNQVEVARSLLQYGGSANAESVQGVTPLHLAAQEGHAEMVALLLSKQANGNLGNKSGLTPLHLVAQEGHVPVADVLIKHGVMVDATTRMGYTPLHVASHYGNIKLVKFLLQHQADVNAKTKLGYSPLHQAAQQGHTDIVTLLLKNGASPNEVSSDGTTPLAIAKRLGYISVTDVLKVVTDETSFVLVSDKHRMSFPETVDEILDVSEDEGEELISFKAERRDSRDVDEEKELLDFVPKLDQVVESPAIPRIPCAMPETVVIRSEEQEQASKEYDEDSLIPSSPATETSDNISPVASPVHTGFLVSFMVDARGGSMRGSRHNGLRVVIPPRTCAAPTRITCRLVKPQKLSTPPPLAEEEGLASRIIALGPTGAQFLSPVIVEIPHFASHGRGDRELVVLRSENGSVWKEHRSRYGESYLDQILNGMDEELGSLEELEKKRVCRIITTDFPLYFVIMSRLCQDYDTIGPEGGSLKSKLVPLVQATFPENAVTKRVKLALQAQPVPDELVTKLLGNQATFSPIVTVEPRRRKFHRPIGLRIPLPPSWTDNPRDSGEGDTTSLRLLCSVIGGTDQAQWEDITGTTKLVYANECANFTTNVSARFWLSDCPRTAEAVNFATLLYKELTAVPYMAKFVIFAKMNDPREGRLRCYCMTDDKVDKTLEQHENFVEVARSRDIEVLEGMSLFAELSGNLVPVKKAAQQRSFHFQSFRENRLAMPVKVRDSSREPGGSLSFLRKAMKYEDTQHILCHLNITMPPCAKGSGAEDRRRTPTPLALRYSILSESTPGSLSGTEQAEMKMAVISEHLGLSWAELARELQFSVEDINRIRVENPNSLLEQSVALLNLWVIREGQNANMENLYTALQSIDRGEIVNMLEGSGRQSRNLKPDRRHTDRDYSLSPSQMNGHQRGQARITHSPTVSQVTERSQDRLQDWDADGSIVSYLQDAAQGSWQEEVTQGPHSFQGTSTMTEGLEPGGSQEYEKVLVSVSEHTWTEQPEAESSQADRDRRQQGQEEQVQEAKNTFTQVVQGNEFQNIPGEQVTEEQFTDEQGNIVTKKIIRKVVRQIDLSSADAAQEHEEVTVEGPLEDPSELEVDIDYFMKHSKVLRRPRPWGTQRHHCCLALPGRLHDTSLHSPLYELSLQSLFSLVGSVSAPPCRSFRSSACVLPVFAICPAFCLCCCLQVELRGSGLQPDLIEGRKGAQIVKRASLKRGKQ

SEQ ID NO: 28495 - protein, 1858 aa, Homo sapiens
MPYSVGFREADAATSFLRAARSGNLDKALDHLRNGVDINTCNQNGLNGLHLASKEGHVKMVVELLHKEIILETTTKKGNTALHIAALAGQDEVVRELVNYGANVNAQSQKGFTPLYMAAQENHLEVVKFLLENGANQNVATEDGFTPLAVALQQGHENVVAHLINYGTKGKVRLPALHIAARNDDTRTAAVLLQNDPNPDVLSKTGFTPLHIAAHYENLNVAQLLLNRGASVNFTPQNGITPLHIASRRGNVIMVRLLLDRGAQIETKTKDELTPLHCAARNGHVRISEILLDHGAPIQAKTKNGLSPIHMAAQGDHLDCVRLLLQYDAEIDDITLDHLTPLHVAAHCGHHRVAKVLLDKGAKPNSRALNGFTPLHIACKKNHVRVMELLLKTGASIDAVTESGLTPLHVASFMGHLPIVKNLLQRGASPNVSNVKVETPLHMAARAGHTEVAKYLLQNKAKVNAKAKDDQTPLHCAARIGHTNMVKLLLENNANPNLATTAGHTPLHIAAREGHVETVLALLEKEASQACMTKKGFTPLHVAAKYGKVRVAELLLERDAHPNAAGKNGLTPLHVAVHHNNLDIVKLLLPRGGSPHSPAWNGYTPLHIAAKQNQVEVARSLLQYGGSANAESVQGVTPLHLAAQEGHAEMVALLLSKQANGNLGNKSGLTPLHLVAQEGHVPVADVLIKHGVMVDATTRMGYTPLHVASHYGNIKLVKFLLQHQADVNAKTKLGYSPLHQAAQQGHTDIVTLLLKNGASPNEVSSDGTTPLAIAKRLGYISVTDVLKVVTDETSFVLVSDKHRMSFPETVDEILDVSEDEGEELISFKAERRDSRDVDEEKELLDFVPKLDQVVESPAIPRIPCAMPETVVIRSEEQEQASKEYDEDSLIPSSPATETSDNISPVASPVHTGFLVSFMVDARGGSMRGSRHNGLRVVIPPRTCAAPTRITCRLVKPQKLSTPPPLAEEEGLASRIIALGPTGAQFLSPVIVEIPHFASHGRGDRELVVLRSENGSVWKEHRSRYGESYLDQILNGMDEELGSLEELEKKRVCRIITTDFPLYFVIMSRLCQDYDTIGPEGGSLKSKLVPLVQATFPENAVTKRVKLALQAQPVPDELVTKLLGNQATFSPIVTVEPRRRKFHRPIGLRIPLPPSWTDNPRDSGEGDTTSLRLLCSVIGGTDQAQWEDITGTTKLVYANECANFTTNVSARFWLSDCPRTAEAVNFATLLYKELTAVPYMAKFVIFAKMNDPREGRLRCYCMTDDKVDKTLEQHENFVEVARSRDIEVLEGMSLFAELSGNLVPVKKAAQQRSFHFQSFRENRLAMPVKVRDSSREPGGSLSFLRKAMKYEDTQHILCHLNITMPPCAKGSGAEDRRRTPTPLALRYSILSESTPGSLSGTEQAEMKMAVISEHLGLSWAELARELQFSVEDINRIRVENPNSLLEQSVALLNLWVIREGQNANMENLYTALQSIDRGEIVNMLEGSGRQSRNLKPDRRHTDRDYSLSPSQMNGYSSLQDELLSPASLGCALSSPLRADQYWNEVAVLDAIPLAATEHDTMLEMSDMQVWSAGLTPSLVTAEDSSLECSKAEDSDATGHEWKLEGALSEEPRGPELGSLELVEDDTVDSDATNGLIDLLEQEEGQRSEEKLPGSKRQDDATGAGQDSENEVSLVSGHQRGQARITHSPTVSQVTERSQDRLQDWDADGSIVSYLQDAAQGSWQEEVTQGPHSFQGTSTMTEGLEPGGSQEYEKVLVSVSEHTWTEQPEAESSQADRDRRQQGQEEQVQEAKNTFTQVVQGNEFQNIPGEQVTEEQFTDEQGNIVTKKVELRGSGLQPDLIEGRKGAQIVKRASLKRGKQ

SEQ ID NO: 28496 - protein, 1519 aa, Homo sapiens
MPYSVGFREADAATSFLRAARSGNLDKALDHLRNGVDINTCNQNGLNGLHLASKEGHVKMVVELLHKEIILETTTKKGNTALHIAALAGQDEVVRELVNYGANVNAQSQKGFTPLYMAAQENHLEVVKFLLENGANQNVATEDGFTPLAVALQQGHENVVAHLINYGTKGKVRLPALHIAARNDDTRTAAVLLQNDPNPDVLSKTGFTPLHIAAHYENLNVAQLLLNRGASVNFTPQNGITPLHIASRRGNVIMVRLLLDRGAQIETKTKDELTPLHCAARNGHVRISEILLDHGAPIQAKTKNGLSPIHMAAQGDHLDCVRLLLQYDAEIDDITLDHLTPLHVAAHCGHHRVAKVLLDKGAKPNSRALNGFTPLHIACKKNHVRVMELLLKTGASIDAVTESGLTPLHVASFMGHLPIVKNLLQRGASPNVSNVKVETPLHMAARAGHTEVAKYLLQNKAKVNAKAKDDQTPLHCAARIGHTNMVKLLLENNANPNLATTAGHTPLHIAAREGHVETVLALLEKEASQACMTKKGFTPLHVAAKYGKVRVAELLLERDAHPNAAGKNGLTPLHVAVHHNNLDIVKLLLPRGGSPHSPAWNGYTPLHIAAKQNQVEVARSLLQYGGSANAESVQGVTPLHLAAQEGHAEMVALLLSKQANGNLGNKSGLTPLHLVAQEGHVPVADVLIKHGVMVDATTRMGYTPLHVASHYGNIKLVKFLLQHQADVNAKTKLGYSPLHQAAQQGHTDIVTLLLKNGASPNEVSSDGTTPLAIAKRLGYISVTDVLKVVTDETSFVLVSDKHRMSFPETVDEILDVSEDEGEELISFKAERRDSRDVDEEKELLDFVPKLDQVVESPAIPRIPCAMPETVVIRSEEQEQASKEYDEDSLIPSSPATETSDNISPVASPVHTGFLVSFMVDARGGSMRGSRHNGLRVVIPPRTCAAPTRITCRLVKPQKLSTPPPLAEEEGLASRIIALGPTGAQFLSPVIVEIPHFASHGRGDRELVVLRSENGSVWKEHRSRYGESYLDQILNGMDEELGSLEELEKKRVCRIITTDFPLYFVIMSRLCQDYDTIGPEGGSLKSKLVPLVQATFPENAVTKRVKLALQAQPVPDELVTKLLGNQATFSPIVTVEPRRRKFHRPIGLRIPLPPSWTDNPRDSGEGDTTSLRLLCSVIGGTDQAQWEDITGTTKLVYANECANFTTNVSARFWLSDCPRTAEAVNFATLLYKELTAVPYMAKFVIFAKMNDPREGRLRCYCMTDDKVDKTLEQHENFVEVARSRDIEVLEGMSLFAELSGNLVPVKKAAQQRSFHFQSFRENRLAMPVKVRDSSREPGGSLSFLRKAMKYEDTQHILCHLNITMPPCAKGSGAEDRRRTPTPLALRYSILSESTPGSLSGTEQAEMKMAVISEHLGLSWAELARELQFSVEDINRIRVENPNSLLEQSVALLNLWVIREGQNANMENLYTALQSIDRGEIVNMLEGSGRQSRNLKPDRRHTDRDYSLSPSQMNDTSTPNP

SEQ ID NO: 28497 - protein, 155 aa, Homo sapiens
MWTFVTQLLVTLVLLSFFLVSCQNVMHIVRGSLCFVLKHIHQELDKELGESEGLSDDEETISTRVVRRRVFLKGNEFQNIPGEQVTEEQFTDEQGNIVTKKIIRKVVRQIDLSSADAAQEHEEVELRGSGLQPDLIEGRKGAQIVKRASLKRGKQ

SEQ ID NO: 28498 - protein, 133 aa, Homo sapiens
MWTFVTQLLVTLVLLSFFLVSCQNVMHIVRGSLCFVLKHIHQELDKELGESEGLSDDEETISTRVVRRRVFLKGNEFQNIPGEQVTEEQFTDEQGNIVTKKVELRGSGLQPDLIEGRKGAQIVKRASLKRGKQ

SEQ ID NO: 28499 - protein, 81 aa, Homo sapiens
MWTFVTQLLVTLVLLSFFLVSCQNVMHIVRGSLCFVLKHIHQELDKELGESEGLSDDEETISTRVVRRRVFLKDHTSTPNP

SEQ ID NO: 28500 - protein, 74 aa, Homo sapiens
MWTFVTQLLVTLVLLSFFLVSCQNVMHIVRGSLCFVLKHIHQVELRGSGLQPDLIEGRKGAQIVKRASLKRGKQ

SEQ ID NO: 28501 - protein, 1897 aa, Homo sapiens
MAQAAKQLKKIKDIEAQALQEQKEKEESNRKRRNRSRDRKKKADAATSFLRAARSGNLDKALDHLRNGVDINTCNQNGLNGLHLASKEGHVKMVVELLHKEIILETTTKKGNTALHIAALAGQDEVVRELVNYGANVNAQSQKGFTPLYMAAQENHLEVVKFLLENGANQNVATEDGFTPLAVALQQGHENVVAHLINYGTKGKVRLPALHIAARNDDTRTAAVLLQNDPNPDVLSKTGFTPLHIAAHYENLNVAQLLLNRGASVNFTPQNGITPLHIASRRGNVIMVRLLLDRGAQIETKTKDELTPLHCAARNGHVRISEILLDHGAPIQAKTKNGLSPIHMAAQGDHLDCVRLLLQYDAEIDDITLDHLTPLHVAAHCGHHRVAKVLLDKGAKPNSRALNGFTPLHIACKKNHVRVMELLLKTGASIDAVTESGLTPLHVASFMGHLPIVKNLLQRGASPNVSNVKVETPLHMAARAGHTEVAKYLLQNKAKVNAKAKDDQTPLHCAARIGHTNMVKLLLENNANPNLATTAGHTPLHIAAREGHVETVLALLEKEASQACMTKKGFTPLHVAAKYGKVRVAELLLERDAHPNAAGKNGLTPLHVAVHHNNLDIVKLLLPRGGSPHSPAWNGYTPLHIAAKQNQVEVARSLLQYGGSANAESVQGVTPLHLAAQEGHAEMVALLLSKQANGNLGNKSGLTPLHLVAQEGHVPVADVLIKHGVMVDATTRMGYTPLHVASHYGNIKLVKFLLQHQADVNAKTKLGYSPLHQAAQQGHTDIVTLLLKNGASPNEVSSDGTTPLAIAKRLGYISVTDVLKVVTDETSFVLVSDKHRMSFPETVDEILDVSEDEGTAHITIMGEELISFKAERRDSRDVDEEKELLDFVPKLDQVVESPAIPRIPCAMPETVVIRSEEQEQASKEYDEDSLIPSSPATETSDNISPVASPVHTGFLVSFMVDARGGSMRGSRHNGLRVVIPPRTCAAPTRITCRLVKPQKLSTPPPLAEEEGLASRIIALGPTGAQFLSPVIVEIPHFASHGRGDRELVVLRSENGSVWKEHRSRYGESYLDQILNGMDEELGSLEELEKKRVCRIITTDFPLYFVIMSRLCQDYDTIGPEGGSLKSKLVPLVQATFPENAVTKRVKLALQAQPVPDELVTKLLGNQATFSPIVTVEPRRRKFHRPIGLRIPLPPSWTDNPRDSGEGDTTSLRLLCSVIGGTDQAQWEDITGTTKLVYANECANFTTNVSARFWLSDCPRTAEAVNFATLLYKELTAVPYMAKFVIFAKMNDPREGRLRCYCMTDDKVDKTLEQHENFVEVARSRDIEVLEGMSLFAELSGNLVPVKKAAQQRSFHFQSFRENRLAMPVKVRDSSREPGGSLSFLRKAMKYEDTQHILCHLNITMPPCAKGSGAEDRRRTPTPLALRYSILSESTPGSLSGTEQAEMKMAVISEHLGLSWAELARELQFSVEDINRIRVENPNSLLEQSVALLNLWVIREGQNANMENLYTALQSIDRGEIVNMLEGSGRQSRNLKPDRRHTDRDYSLSPSQMNGYSSLQDELLSPASLGCALSSPLRADQYWNEVAVLDAIPLAATEHDTMLEMSDMQVWSAGLTPSLVTAEDSSLECSKAEDSDATGHEWKLEGALSEEPRGPELGSLELVEDDTVDSDATNGLIDLLEQEEGQRSEEKLPGSKRQDDATGAGQDSENEVSLVSGHQRGQARITHSPTVSQVTERSQDRLQDWDADGSIVSYLQDAAQGSWQEEVTQGPHSFQGTSTMTEGLEPGGSQEYEKVLVSVSEHTWTEQPEAESSQADRDRRQQGQEEQVQEAKNTFTQVVQGNEFQNIPGEQVTEEQFTDEQGNIVTKKIIRKVVRQIDLSSADAAQEHEEDHTSTPNP

SEQ ID NO: 28502 - protein, 109 aa, Homo sapiens
MWTFVTQLLVTLVLLSFFLVSCQNVMHIVRGSLCFVLKHIHQELDKELGESEGLSDDEETISTRVVRRRVFLKGNEFQNIPGEQVTEEQFTDEQGNIVTKKDHTSTPNP

SEQ ID NO: 28503 - protein, 156 aa, Homo sapiens
MWTFVTQLLVTLVLLSFFLVSCQNVMHIVRGSLCFVLKHIHQELDKELGESEGLSDDEETISTRVVRRRVFLKGNEFQNIPGEQVTEEQFTDEQGNIVTKKIIRKVVRQIDLSSADAAQEHEEVTVEGPLEDPSELEVDIDYFMKHSKDHTSTPNP

SEQ ID NO: 28504 - protein, 496 aa, Homo sapiens
MWQIVFFTLSCDLVLAAAYNNFRKSMDSIGKKQYQVQHGSCSYTFLLPEMDNCRSSSSPYVSNAVQRDAPLEYDDSVQRLQVLENIMENNTQWLMKLENYIQDNMKKEMVEIQQNAVQNQTAVMIEIGTNLLNQTAEQTRKLTDVEAQVLNQTTRLELQLLEHSLSTNKLEKQILDQTSEINKLQDKNSFLEKKVLAMEDKHIIQLQSIKEEKDQLQVLVSKQNSIIEELEKKIVTATVNNSVLQKQQHDLMETVNNLLTMMSTSNSAKDPTVAKEEQISFRDCAEVFKSGHTTNGIYTLTFPNSTEEIKAYCDMEAGGGGWTIIQRREDGSVDFQRTWKEYKVGFGNPSGEYWLGNEFVSQLTNQQRYVLKIHLKDWEGNEAYSLYEHFYLSSEELNYRIHLKGLTGTAGKISSISQPGNDFSTKDGDNDKCICKCSQMLTGGWWFDACGPSNLNGMYYPQRQNTNKFNGIKWYYWKGSGYSLKATTMMIRPADF

SEQ ID NO: 28505 - protein, 444 aa, Homo sapiens
MWQIVFFTLSCDLVLAAAYNNFRKSMDSIGKKQYQVQHGSCSYTFLLPEMDNCRSSSSPYVSNAVQRDAPLEYDDSVQRLQVLENIMENNTQWLMKVLNQTTRLELQLLEHSLSTNKLEKQILDQTSEINKLQDKNSFLEKKVLAMEDKHIIQLQSIKEEKDQLQVLVSKQNSIIEELEKKIVTATVNNSVLQKQQHDLMETVNNLLTMMSTSNSAKDPTVAKEEQISFRDCAEVFKSGHTTNGIYTLTFPNSTEEIKAYCDMEAGGGGWTIIQRREDGSVDFQRTWKEYKVGFGNPSGEYWLGNEFVSQLTNQQRYVLKIHLKDWEGNEAYSLYEHFYLSSEELNYRIHLKGLTGTAGKISSISQPGNDFSTKDGDNDKCICKCSQMLTGGWWFDACGPSNLNGMYYPQRQNTNKFNGIKWYYWKGSGYSLKATTMMIRPADF

SEQ ID NO: 28506 - protein, 495 aa, Homo sapiens
MWQIVFFTLSCDLVLAAAYNNFRKSMDSIGKKQYQVQHGSCSYTFLLPEMDNCRSSSSPYVSNAVQRDAPLEYDDSVQRLQVLENIMENNTQWLMKLENYIQDNMKKEMVEIQQNAVQNQTAVMIEIGTNLLNQTAEQTRKLTDVEAQVLNQTTRLELQLLEHSLSTNKLEKQILDQTSEINKLQDKNSFLEKKVLAMEDKHIIQLQSIKEEKDQLQVLVSKQNSIIEELEKKIVTATVNNSVLQKQQHDLMETVNNLLTMMSTSNSKDPTVAKEEQISFRDCAEVFKSGHTTNGIYTLTFPNSTEEIKAYCDMEAGGGGWTIIQRREDGSVDFQRTWKEYKVGFGNPSGEYWLGNEFVSQLTNQQRYVLKIHLKDWEGNEAYSLYEHFYLSSEELNYRIHLKGLTGTAGKISSISQPGNDFSTKDGDNDKCICKCSQMLTGGWWFDACGPSNLNGMYYPQRQNTNKFNGIKWYYWKGSGYSLKATTMMIRPADF

SEQ ID NO: 28507 - protein, 219 aa, Homo sapiens
MGMSSLKLLKYVLFFFNLLFWICGCCILGFGIYLLIHNNFGVLFHNLPSLTLGNVFVIVGSIIMVVAFLGCMGSIKENKCLLMSFFILLLIILLAEVTLAILLFVYEQKLNEYVAKGLTDSIHRYHSDNSTKAAWDSIQSFLQCCGINGTSDWTSGPPASCPSDRKVEGCYAKARLWFHSNFLYIGIITICVCVIEVLGMSFALTLNCQIDKTSQTIGL

SEQ ID NO: 28508 - protein, 562 aa, Homo sapiens
MSNQYQEEGCSERPECKSKSPTLLSSYCIDSILGRRSPCKMRLLGAAQSLPAPLTSRADPEKAVQGSPKSSSAPFEAELHLPPKLRRLYGPGGGRLLQGAAAAAAAAAAAAAAAATATAGPRGEAPPPPPPTARPGERPDGAGAAAAAAAAAAAAWDTLKISQAPQVSISRSKSYRENGAPFVPPPPALDELGGPGGVTHPEERLGVAGGPGSAPAAGGGTGTEDDEEELLEDEEDEDEEEELLEDDEEELLEDDARALLKEPRRCPVAATGAVAAAAAAAVATEGGELSPKEELLLHPEDAEGKDGEDSVCLSAGSDSEEGLLKRKQRRYRTTFTSYQLEELERAFQKTHYPDVFTREELAMRLDLTEARVQVWFQNRRAKWRKREKAGAQTHPPGLPFPGPLSATHPLSPYLDASPFPPHHPALDSAWTAAAAAAAAAFPSLPPPPGSASLPPSGAPLGLSTFLGAAVFRHPAFISPAFGRLFSTMAPLTSASTAAALLRQPTPAVEGAVASGALADPATAAADRRASSIAALRLKAKEHAAQLTQLNILPGTSTGKEVC

SEQ ID NO: 28509 - protein, 643 aa, Homo sapiens
MCGICCSVNFSAEHFSQDLKEDLLYNLKQRGPNSSKQLLKSDVNYQCLFSAHVLHLRGVLTTQPVEDERGNVFLWNGEIFSGIKVEAEENDTQILFNYLSSCKNESEILSLFSEVQGPWSFIYYQASSHYLWFGRDFFGRRSLLWHFSNLGKSFCLSSVGTQTSGLANQWQEVPASGLFRIDLKSTVISGCIILQLYPWKYISRENIIEENVNSLSQISADLPAFVSVVANEAKLYLEKPVVPLNMMLPQAALETHCSNISNVPPTREILQVFLTDVHMKEVIQQFIDVLSVAVKKRVLCLPRDENLTANEVLKTCDRKANVAILFSGGIDSMVIATLADRHIPLDEPIDLLNVAFIAEEKTMPTTFNREGNKQKNKCEIPSEEFSKDVAAAAADSPNKHVSVPDRITGRAGLKELQAVSPSRIWNFVEINVSMEELQKLRRTRICHLIRPLDTVLDDSIGCAVWFASRGIGWLVAQEGVKSYQSNAKVVLTGIGADEQLAGYSRHRVRFQSHGLEGLNKEIMMELGRISSRNLGRDDRVIGDHGKEARFPFLDENVVSFLNSLPIWEKANLTLPRGIGEKLLLRLAAVELGLTASALLPKRAMQFGSRIAKMEKINEKASDKCGRLQIMSLENLSIEKETKL

SEQ ID NO: 28510 - protein, 703 aa, Homo sapiens
MAELMLLSEIADPTRFFTDNLLSPEDWGLQNSTLYSGLDEVAEEQTQLFRCPEQDVPFDGSSLDVGMDVSPSEPPWELLPIFPDLQVKSEPSSPCSSSSLSSESSRLSTEPSSEALGVGEVLHVKTESLAPPLCLLGDDPTSSFETVQINVIPTSDDSSDVQTKIEPVSPCSSVNSEASLLSADSSSQAFIGEEVLEVKTESLSPSGCLLWDVPAPSLGAVQISMGPSLDGSSGKALPTRKPPLQPKPVVLTTVPMPSRAVPPSTTVLLQSLVQPPPVSPVVLIQGAIRVQPEGPAPSLPRPERKSIVPAPMPGNSCPPEVDAKLLKRQQRMIKNRESACQSRRKKKEYLQGLEARLQAVLADNQQLRRENAALRRRLEALLAENSELKLGSGNRKVVCIMVFLLFIAFNFGPVSISEPPSAPISPRMNKGEPQPRRHLLGFSEQEPVQGVEPLQGSSQGPKEPQPSPTDQPSFSNLTAFPGGAKELLLRDLDQLFLSSDCRHFNRTESLRLADELSGWVQRHQRGRRKIPQRAQERQKSQPRKKSPPVKAVPIQPPGPPERDSVGQLQLYRHPDRSQPAFLDAIDRREDTFYVVSFRRDHLLLPAISHNKTSRPKMSLVMPAMAPNETLSGRGAPGDYEEMMQIECEVMDTRVIHIKTSTVPPSLRKQPSPTPGNATGGPLPVSAASQAHQASHQPLYLNHP

SEQ ID NO: 28511 - protein, 700 aa, Homo sapiens
MAELMLLSEIADPTRFFTDNLLSPEDWDSTLYSGLDEVAEEQTQLFRCPEQDVPFDGSSLDVGMDVSPSEPPWELLPIFPDLQVKSEPSSPCSSSSLSSESSRLSTEPSSEALGVGEVLHVKTESLAPPLCLLGDDPTSSFETVQINVIPTSDDSSDVQTKIEPVSPCSSVNSEASLLSADSSSQAFIGEEVLEVKTESLSPSGCLLWDVPAPSLGAVQISMGPSLDGSSGKALPTRKPPLQPKPVVLTTVPMPSRAVPPSTTVLLQSLVQPPPVSPVVLIQGAIRVQPEGPAPSLPRPERKSIVPAPMPGNSCPPEVDAKLLKRQQRMIKNRESACQSRRKKKEYLQGLEARLQAVLADNQQLRRENAALRRRLEALLAENSELKLGSGNRKVVCIMVFLLFIAFNFGPVSISEPPSAPISPRMNKGEPQPRRHLLGFSEQEPVQGVEPLQGSSQGPKEPQPSPTDQPSFSNLTAFPGGAKELLLRDLDQLFLSSDCRHFNRTESLRLADELSGWVQRHQRGRRKIPQRAQERQKSQPRKKSPPVKAVPIQPPGPPERDSVGQLQLYRHPDRSQPAFLDAIDRREDTFYVVSFRRDHLLLPAISHNKTSRPKMSLVMPAMAPNETLSGRGAPGDYEEMMQIECEVMDTRVIHIKTSTVPPSLRKQPSPTPGNATGGPLPVSAASQAHQASHQPLYLNHP

SEQ ID NO: 28512 - protein, 220 aa, Homo sapiens
MEEDEFIGEKTFQRYCAEFIKHSQQIGDSWEWRPSKDCSDGYMCKIHFQIKNGSVMSHLGASTHGQTCLPMEEAFELPLDDCEVIETAAASEVIKYEYHVLYSCSYQVPVLYFRASFLDGRPLTLKDIWEGVHECYKMRLLQGPWDTITQQEHPILGQPFFVLHPCKTNEFMTPVLKNSQKINKNVNYITSWLSIVGPVVGLNLPLSYAKATSQDERNVP

SEQ ID NO: 28513 - protein, 125 aa, Homo sapiens
MEEDEFIGEKTFQRYCAEFIKHSQQIGDSWEWRPSKDCSDGYMCKIHFQIKNGSVMSHLGASTHGQTCLPMEVKSCSVTQAGVQLRDLSSLQPPPSGFKQFSCLSLPSNWDYRGSPLHLANFLYF

SEQ ID NO: 28514 - protein, 141 aa, Homo sapiens
MFACSKFVSTPSLVKSTSQLLSRPLSAVVLKRPEILTDESLSSLAVSCPLTSLVSSRSFQTSAISRDIDTAAKFIGAGAATVGVAGSGAGIGTVFGSLIIGYARNPSLKQQLFSYAILGFALSEAMGLFCLMVAFLILFAM

SEQ ID NO: 28515 - protein, 198 aa, Homo sapiens
MPELILYVAITLSVAERLVGPGHACAEPSFRSSRCSAPLCLLCSGSSSPATAPHPLKMFACSKFVSTPSLVKSTSQLLSRPLSAVVLKRPEILTDESLSSLAVSCPLTSLVSSRSFQTSAISRDIDTAAKFIGAGAATVGVAGSGAGIGTVFGSLIIGYARNPSLKQQLFSYAILGFALSEAMGLFCLMVAFLILFAM

SEQ ID NO: 28516 - protein, 157 aa, Homo sapiens
MPELILSPATAPHPLKMFACSKFVSTPSLVKSTSQLLSRPLSAVVLKRPEILTDESLSSLAVSCPLTSLVSSRSFQTSAISRDIDTAAKFIGAGAATVGVAGSGAGIGTVFGSLIIGYARNPSLKQQLFSYAILGFALSEAMGLFCLMVAFLILFAM

SEQ ID NO: 28517 - protein, 1339 aa, Homo sapiens
MAAAGARLSPGPGSGLRGRPRLCFHPGPPPLLPLLLLFLLLLPPPPLLAGATAAASREPDSPCRLKTVTVSTLPALRESDIGWSGARAGAGAGTGAGAAAAAASPGSPGSAGTAAESRLLLFVRNELPGRIAVQDDLDNTELPFFTLEMSGTAADISLVHWRQQWLENGTLYFHVSMSSSGQLAQATAPTLQEPSEIVEEQMHILHISVMGGLIALLLLLLVFTVALYAQRRWQKRRRIPQKSASTEATHEIHYIPSVLLGPQARESFRSSRLQTHNSVIGVPIRETPILDDYDCEEDEEPPRRANHVSREDEFGSQVTHTLDSLGHPGEEKVDFEKKAAAEATQETVESLMQKFKESFRANTPIEIGQLQPPLRSTSAGKRKRRSKSRGGISFGRAKGTSGSEADDETQLTFYTEQYRSRRRSKGLLKSPVNKTALTLIAVSSCILAMVCGSQMSCPLTVKVTLHVPEHFIADGSSFVVSEGSYLDISDWLNPAKLSLYYQINATSPWVRDLCGQRTTDACEQLCDPETGECSCHEGYAPDPVHRHLCVRSDWGQSEGPWPYTTLERGYDLVTGEQAPEKILRSTFSLGQGLWLPVSKSFVVPPVELSINPLASCKTDVLVTEDPADVREEAMLSTYFETINDLLSSFGPVRDCSRNNGGCTRNFKCVSDRQVDSSGCVCPEELKPMKDGSGCYDHSKGIDCSDGFNGGCEQLCLQQTLPLPYDATSSTIFMFCGCVEEYKLAPDGKSCLMLSDVCEGPKCLKPDSKFNDTLFGEMLHGYNNRTQHVNQGQVFQMTFRENNFIKDFPQLADGLLVIPLPVEEQCRGVLSEPLPDLQLLTGDIRYDEAMGYPMVQQWRVRSNLYRVKLSTITLAAGFTNVLKILTKESSREELLSFIQHYGSHYIAEALYGSELTCIIHFPSKKVQQQLWLQYQKETTELGSKKELKSMPFITYLSGLLTAQMLSDDQLISGVEIRCEEKGRCPSTCHLCRRPGKEQLSPTPVLLEINRVVPLYTLIQDNGTKEAFKSALMSSYWCSGKGDVIDDWCRCDLSAFDANGLPNCSPLLQPVLRLSPTVEPSSTVVSLEWVDVQPAIGTKVSDYILQHKKVDEYTDTDLYTGEFLSFADDLLSGLGTSCVAAGRSHGEVPEVSIYSVIFKCLEPDGLYKFTLYAVDTRGRHSELSTVTLRTACPLVDDNKAEEIADKIYNLYNGYTSGKEQQMAYNTLMEVSASMLFRVQHHYNSHYEKFGDFVWRSEDELGPRKAHLILRRLERVSSHCSSLLRSAYIQSRVETVPYLFCRSEEVRPAGMVWYSILKDTKITCEEKMVSMARNTYGESKGR

SEQ ID NO: 28518 - protein, 1288 aa, Homo sapiens
MAAAGARLSPGPGSGLRGRPRLCFHPGPPPLLPLLLLFLLLLPPPPLLAGATAAASREPDSPCRLKTVTVSTLPALRESDIGWSGARAGAGAGTGAGAAAAAASPGSPGSAGTAAESRLLLFVRNELPGRIAVQDDLDNTELPFFTLEMSGTAADISLVHWRQQWLENGTLYFHVSMSSSGQLAQATAPTLQEPSEIVEEQMHILHISVMGGLIALLLLLLVFTVALYAQRRWQKRRRIPQKSASTEATHEIHYIPSVLLGPQARESFRSSRLQTHNSVIGVPIRETPILDDYDCEEDEEPPRRANHVSREDEFGSQVTHTLDSLGHPGEEKVDFEKKGGISFGRAKGTSGSEADDETQLTFYTEQYRSRRRSKGLLKSPVNKTALTLIAVSSCILAMVCGSQMSCPLTVKVTLHVPEHFIADGSSFVVSEGSYLDISDWLNPAKLSLYYQINATSPWVRDLCGQRTTDACEQLCDPETGECSCHEGYAPDPVHRHLCVRSDWGQSEGPWPYTTLERGYDLVTGEQAPEKILRSTFSLGQGLWLPVSKSFVVPPVELSINPLASCKTDVLVTEDPADVREEAMLSTYFETINDLLSSFGPVRDCSRNNGGCTRNFKCVSDRQVDSSGCVCPEELKPMKDGSGCYDHSKGIDCSDGFNGGCEQLCLQQTLPLPYDATSSTIFMFCGCVEEYKLAPDGKSCLMLSDVCEGPKCLKPDSKFNDTLFGEMLHGYNNRTQHVNQGQVFQMTFRENNFIKDFPQLADGLLVIPLPVEEQCRGVLSEPLPDLQLLTGDIRYDEAMGYPMVQQWRVRSNLYRVKLSTITLAAGFTNVLKILTKESSREELLSFIQHYGSHYIAEALYGSELTCIIHFPSKKVQQQLWLQYQKETTELGSKKELKSMPFITYLSGLLTAQMLSDDQLISGVEIRCEEKGRCPSTCHLCRRPGKEQLSPTPVLLEINRVVPLYTLIQDNGTKEAFKSALMSSYWCSGKGDVIDDWCRCDLSAFDANGLPNCSPLLQPVLRLSPTVEPSSTVVSLEWVDVQPAIGTKVSDYILQHKKVDEYTDTDLYTGEFLSFADDLLSGLGTSCVAAGRSHGEVPEVSIYSVIFKCLEPDGLYKFTLYAVDTRGRHSELSTVTLRTACPLVDDNKAEEIADKIYNLYNGYTSGKEQQMAYNTLMEVSASMLFRVQHHYNSHYEKFGDFVWRSEDELGPRKAHLILRRLERVSSHCSSLLRSAYIQSRVETVPYLFCRSEEVRPAGMVWYSILKDTKITCEEKMVSMARNTYGESKGR

SEQ ID NO: 28519 - protein, 1335 aa, Homo sapiens
MAAAGARLSPGPGSGLRGRPRLCFHPGPPPLLPLLLLFLLLLPPPPLLAGATAAASREPDSPCRLKTVTVSTLPALRESDIGWSGARAGAGAGTGAGAAAAAASPGSPGSAGTAAESRLLLFVRNELPGRIAVQDDLDNTELPFFTLEMSGTAADISLVHWRQQWLENGTLYFHVSMSSSGQLAQATAPTLQEPSEIVEEQMHILHISVMGGLIALLLLLLVFTVALYAQRRWQKRRRIPQKSASTEATHEIHYIPSVLLGPQARESFRSSRLQTHNSVIGVPIRETPILDDYDCEEDEEPPRRANHVSREDEFGSQVTHTLDSLGHPGEEKVDFEKKAAAEATQETVESLMQKFKESFRANTPIEIGQLQPPLRSTSAGKRKRRSKSRGGISFGRAKGTSGSEADDETQLTFYTEQYRSRRRSKGLLKSPVNKTALTLIAVSSCILAMVCGSQMSCPLTVKVTLHVPEHFIADGSSFVVSEGSYLDISDWLNPAKLSLYYQINATSPWVRDLCGQRTTDACEQLCDPETGECSCHEGYAPDPVHRHLCVRSDWGQSEGPWPYTTLERGYDLVTGEQAPEKILSLGQGLWLPVSKSFVVPPVELSINPLASCKTDVLVTEDPADVREEAMLSTYFETINDLLSSFGPVRDCSRNNGGCTRNFKCVSDRQVDSSGCVCPEELKPMKDGSGCYDHSKGIDCSDGFNGGCEQLCLQQTLPLPYDATSSTIFMFCGCVEEYKLAPDGKSCLMLSDVCEGPKCLKPDSKFNDTLFGEMLHGYNNRTQHVNQGQVFQMTFRENNFIKDFPQLADGLLVIPLPVEEQCRGVLSEPLPDLQLLTGDIRYDEAMGYPMVQQWRVRSNLYRVKLSTITLAAGFTNVLKILTKESSREELLSFIQHYGSHYIAEALYGSELTCIIHFPSKKVQQQLWLQYQKETTELGSKKELKSMPFITYLSGLLTAQMLSDDQLISGVEIRCEEKGRCPSTCHLCRRPGKEQLSPTPVLLEINRVVPLYTLIQDNGTKEAFKSALMSSYWCSGKGDVIDDWCRCDLSAFDANGLPNCSPLLQPVLRLSPTVEPSSTVVSLEWVDVQPAIGTKVSDYILQHKKVDEYTDTDLYTGEFLSFADDLLSGLGTSCVAAGRSHGEVPEVSIYSVIFKCLEPDGLYKFTLYAVDTRGRHSELSTVTLRTACPLVDDNKAEEIADKIYNLYNGYTSGKEQQMAYNTLMEVSASMLFRVQHHYNSHYEKFGDFVWRSEDELGPRKAHLILRRLERVSSHCSSLLRSAYIQSRVETVPYLFCRSEEVRPAGMVWYSILKDTKITCEEKMVSMARNTYGESKGR

SEQ ID NO: 28520 - protein, 440 aa, Homo sapiens
MNTLLCKGMFCLLSWEADSRGRLGEYTLQPLSLQTEETTELGSKKELKSMPFITYLSGLLTAQMLSDDQLISGVEIRCEEKGRCPSTCHLCRRPGKEQLSPTPVLLEINRVVPLYTLIQDNGTKEAFKSALMSSYWCSGKGDVIDDWCRCDLSAFDANGLPNCSPLLQPVLRLSPTVEPSSTVVSLEWVDVQPAIGTKVSDYILQHKKVDEYTDTDLYTGEFLSFADDLLSGLGTSCVAAGRSHGEVPEVSIYSVIFKCLEPDGLYKFTLYAVDTRGRHSELSTVTLRTACPLVDDNKAEEIADKIYNLYNGYTSGKEQQMAYNTLMEVSASMLFRVQHHYNSHYEKFGDFVWRSEDELGPRKAHLILRRLERVSSHCSSLLRSAYIQSRVETVPYLFCRSEEVRPAGMVWYSILKDTKITCEEKMVSMARNTYGESKGR

SEQ ID NO: 28521 - protein, 395 aa, Homo sapiens
MPFITYLSGLLTAQMLSDDQLISGVEIRCEEKGRCPSTCHLCRRPGKEQLSPTPVLLEINRVVPLYTLIQDNGTKEAFKSALMSSYWCSGKGDVIDDWCRCDLSAFDANGLPNCSPLLQPVLRLSPTVEPSSTVVSLEWVDVQPAIGTKVSDYILQHKKVDEYTDTDLYTGEFLSFADDLLSGLGTSCVAAGRSHGEVPEVSIYSVIFKCLEPDGLYKFTLYAVDTRGRHSELSTVTLRTACPLVDDNKAEEIADKIYNLYNGYTSGKEQQMAYNTLMEVSASMLFRVQHHYNSHYEKFGDFVWRSEDELGPRKAHLILRRLERVSSHCSSLLRSAYIQSRVETVPYLFCRSEEVRPAGMVWYSILKDTKITCEEKMVSMARNTYYLTLSKVSPF

SEQ ID NO: 28522 - protein, 395 aa, Homo sapiens
MPGRSCVALVLLAAAVSCAVAQHAPPWTEDCRKSTYPPSGPTYRGAVPWYTINLDLPPYKRWHELMLDKAPVLKVIVNSLKNMINTFVPSGKIMQVVDEKLPGLLGNFPGPFEEEMKGIAAVTDIPLGEIISFNIFYELFTICTSIVAEDKKGHLIHGRNMDFGVFLGWNINNDTWVITEQLKPLTVNLDFQRNNKTVFKASSFAGYVGMLTGFKPGLFSLTLNERFSINGGYLGILEWILGKKDVMWIGFLTRTVLENSTSYEEAKNLLTKTKILAPAYFILGGNQSGEGCVITRDRKESLDVYELDAKQGRWYVVQTNYDRWKHPFFLDDRRTPAKMCLNRTSQENISFETMYDVLSTKPVLNKLTVYTTLIDVTKGQFETYLRDCPDPCIGW

SEQ ID NO: 28523 - protein, 411 aa, Homo sapiens
MNCCIGLGEKARGSHRASYPSLSALFTEASILGFGSFAVKAQWTEDCRKSTYPPSGPTYRGAVPWYTINLDLPPYKRWHELMLDKAPVLKVIVNSLKNMINTFVPSGKIMQVVDEKLPGLLGNFPGPFEEEMKGIAAVTDIPLGEIISFNIFYELFTICTSIVAEDKKGHLIHGRNMDFGVFLGWNINNDTWVITEQLKPLTVNLDFQRNNKTVFKASSFAGYVGMLTGFKPGLFSLTLNERFSINGGYLGILEWILGKKDVMWIGFLTRTVLENSTSYEEAKNLLTKTKILAPAYFILGGNQSGEGCVITRDRKESLDVYELDAKQGRWYVVQTNYDRWKHPFFLDDRRTPAKMCLNRTSQENISFETMYDVLSTKPVLNKLTVYTTLIDVTKGQFETYLRDCPDPCIGW

SEQ ID NO: 28524 - protein, 389 aa, Homo sapiens
MNCCIGLGEKARGSHRASYPSLSALFTEASILGFGSFAVKAQWTEDCRKSTYPPSGPTVFPAVIRYRGAVPWYTINLDLPPYKRWHELMLDKAPVPGLLGNFPGPFEEEMKGIAAVTDIPLGEIISFNIFYELFTICTSIVAEDKKGHLIHGRNMDFGVFLGWNINNDTWVITEQLKPLTVNLDFQRNNKTVFKASSFAGYVGMLTGFKPGLFSLTLNERFSINGGYLGILEWILGKKDVMWIGFLTRTVLENSTSYEEAKNLLTKTKILAPAYFILGGNQSGEGCVITRDRKESLDVYELDAKQGRWYVVQTNYDRWKHPFFLDDRRTPAKMCLNRTSQENISFETMYDVLSTKPVLNKLTVYTTLIDVTKGQFETYLRDCPDPCIGW

SEQ ID NO: 28525 - protein, 1302 aa, Homo sapiens
MALAGLCALLACCWGPAAVLATAAGDVDPSKELECKLKSITVSALPFLRENDLSIMHSPSASEPKLLFSVRNDFPGEMVVVDDLENTELPYFVLEISGNTEDIPLVRWRQQWLENGTLLFHIHHQDGAPSLPGQDPTEEPQHESAEEELRILHISVMGGMIALLLSILCLVMILYTRRRWCKRRRVPQPQKSASAEAANEIHYIPSVLIGGHGRESLRNARVQGHNSSGTLSIRETPILDGYEYDITDLRHHLQRECMNGGEDFASQVTRTLDSLQGCNEKSGMDLTPGSDNAKLSLMNKYKDNIIATSPVDSNHQQATLLSHTSSSQRKRINNKARAGSAFLNPEGDSGTEAENDPQLTFYTDPSRSRRRSRVGSPRSPVNKTTLTLISITSCVIGLVCSSHVNCPLVVKITLHVPEHLIADGSRFILLEGSQLDASDWLNPAQVVLFSQQNSSGPWAMDLCARRLLDPCEHQCDPETGRREHRAAGECLCYEGYMKDPVHKHLCIRNEWGTNQGPWPYTIFQRGFDLVLGEQPSDKIFRFTYTLGEGMWLPLSKSFVIPPAELAINPSAKCKTDMTVMEDAVEVREELMTSSSFDSLEVLLDSFGPVRDCSKDNGGCSKNFRCISDRKLDSTGCVCPSGLSPMKDSSGCYDRHIGVDCSDGFNGGCEQLCLQQMAPFPDDPTLYNILMFCGCIEDYKLGVDGRSCQLITETCPEGSDCGESRELPMNQTLFGEMFFGYNNHSKEVAAGQVLKGTFRQNNFARGLDQQLPDGLVVATVPLENQCLEEISEPTPDPDFLTGMVNFSEVSGYPVLQHWKVRSVMYHIKLNQVAISQALSNALHSLDGATSRADFVALLDQFGNHYIQEAIYGFEESCSIWYPNKQVQRRLWLEYEDISKGNSPSDESEERERDPKVLTFPEYITSLSDSGTKHMAAGVRMECHSKGRCPSSCPLCHVTSSPDTPAEPVLLEVTKAAPIYELVTNNQTQRLLQEATMSSLWCSGTGDVIEDWCRCDSTAFGADGLPTCAPLPQPVLRLSTVHEPSSTLVVLEWEHSEPPIGVQIVDYLLRQEKVTDRMDHSKVETETVLSFVDDIISGAKSPCAMPSQVPDKQLTTISLIIRCLEPDTIYMFTLWGVDNTGRRSRPSDVIVKTPCPVVDDVKAQEIADKIYNLFNGYTSGKEQQTAYNTLLDLGSPTLHRVLYHYNQHYESFGEFTWRCEDELGPRKAGLILSQLGDLSSWCNGLLQEPKISLRRSSLKYLGCRYSEIKPYGLDWAELSRDLRKTCEEQTLSIPYNDYGDSKEI

SEQ ID NO: 28526 - protein, 1294 aa, Homo sapiens
MALAGLCALLACCWGPAAVLATAAGDVDPSKELECKLKSITVSALPFLRENDLSIMHSPSASEPKLLFSVRNDFPGEMVVVDDLENTELPYFVLEISGNTEDIPLVRWRQQWLENGTLLFHIHHQDGAPSLPGQDPTEEPQHESAEEELRILHISVMGGMIALLLSILCLVMILYTRRRWCKRRRVPQPQKSASAEAANEIHYIPSVLIGGHGRESLRNARVQGHNSSGTLSIRETPILDGYEYDITDLRHHLQRECMNGGEDFASQVTRTLDSLQGCNEKSGMDLTPGSDNAKLSLMNKYKDNIIATSPVDSNHQQATLLSHTSSSQRKRINNKARAGSAFLNPEGDSGTEAENDPQLTFYTDPSRSRRRSRVGSPRSPVNKTTLTLISITSCVIGLVCSSHVNCPLVVKITLHVPEHLIADGSRFILLEGSQLDASDWLNPAQVVLFSQQNSSGPWAMDLCARRLLDPCEHQCDPETGECLCYEGYMKDPVHKHLCIRNEWGTNQGPWPYTIFQRGFDLVLGEQPSDKIFRFTYTLGEGMWLPLSKSFVIPPAELAINPSAKCKTDMTVMEDAVEVREELMTSSSFDSLEVLLDSFGPVRDCSKDNGGCSKNFRCISDRKLDSTGCVCPSGLSPMKDSSGCYDRHIGVDCSDGFNGGCEQLCLQQMAPFPDDPTLYNILMFCGCIEDYKLGVDGRSCQLITETCPEGSDCGESRELPMNQTLFGEMFFGYNNHSKEVAAGQVLKGTFRQNNFARGLDQQLPDGLVVATVPLENQCLEEISEPTPDPDFLTGMVNFSEVSGYPVLQHWKVRSVMYHIKLNQVAISQALSNALHSLDGATSRADFVALLDQFGNHYIQEAIYGFEESCSIWYPNKQVQRRLWLEYEDISKGNSPSDESEERERDPKVLTFPEYITSLSDSGTKHMAAGVRMECHSKGRCPSSCPLCHVTSSPDTPAEPVLLEVTKAAPIYELVTNNQTQRLLQEATMSSLWCSGTGDVIEDWCRCDSTAFGADGLPTCAPLPQPVLRLSTVHEPSSTLVVLEWEHSEPPIGVQIVDYLLRQEKVTDRMDHSKVETETVLSFVDDIISGAKSPCAMPSQVPDKQLTTISLIIRCLEPDTIYMFTLWGVDNTGRRSRPSDVIVKTPCPVVDDVKAQEIADKIYNLFNGYTSGKEQQTAYNTLLDLGSPTLHRVLYHYNQHYESFGEFTWRCEDELGPRKAGLILSQLGDLSSWCNGLLQEPKISLRRSSLKYLGCRYSEIKPYGLDWAELSRDLRKTCEEQTLSIPYNDYGDSKEI

SEQ ID NO: 28527 - protein, 1216 aa, Homo sapiens
MALAGLCALLACCWGPAAVLATAAGDVDPSKELECKLKSITVSALPFLRENDLSIMHSPSASEPKLLFSVRNDFPGEMVVVDDLENTELPYFVLEISGNTEDIPLVRWRQQWLENGTLLFHIHHQDGAPSLPGQDPTEEPQHESAEEELRILHISVMGGMIALLLSILCLVMILYTRRRWCKRRRVPQPQKSASAEAANEIHYIPSVLIGGHGRESLRNARVQGHNSSGTLSIRETPILDGYEYDITDLRHHLQRECMNGGEDFASQVTRTLDSLQGCNEKSGMDLTPGSDNAKLSLMNKYKDNIIATSPVDSNHQQATLLSHTSSSQRKRINNKARAGSAFLNPEGDSGTEAENDPQLTFYTDPSRSRRRSRVGSPRSPVNKTTLTLISITSCVIGLVCSSHVNCPLVVKITLHVPEHLIADGSRFILLEGSQLDASDWLNPAQVVLFSQQNSSGPWAMDLCARRLLDPCEHQCDPETGECLCYEGYMKDPVHKHLCIRNEWGTNQGPWPYTIFQRGFDLVLGEQPSDKIFRFTYTLGEGMWLPLSKSFVIPPAELAINPSAKCKTDMTVMEDAVEVREELMTSSSFDSLEVLLDSFGPVRDCSKDNGGCSKNFRCISDRKLDSTGCVCPSGLSPMKDSSGCYDRHIGVDCSDGFNGGCEQLCLQQMAPFPDDPTLYNILMFCGCIEDYKLGVDGRSCQLITETCPEGSDCGESRELPMNQTLFGEMFFGYNNHSKEVAAGQVLKGTFRQNNFARGLDQQLPDGLVVATVPLENQCLEEISEPTPDPDFLTGMVNFSEVSGYPVLQHWKVRSVMYHIKLNQVAISQALSNALHSLDGATSRADFVALLDQFGNHYIQEAIYGFEESCSIWYPNKQVQRRLWLEYEDISKGNSPSDESEERERDPKVLTFPEYITSLSDSGTKHMAAGVRMECHSKGRCPSSCPLCHVTSSPDTPAEPVLLEVTKAAPIYELVTNNQTQRLLQEATMSSLWCSGTGDVIEDWCRCDSTAFGADGLPTCAPLPQPVLRLSTVHEPSSTLVVLEWEHSEPPIGVQIVDYLLRQEKVTDRMDHSKVETETVLSFVDDIISGAKSPCAMPSQVPDKQLTTISLIIRCLEPDTIYMFTLWGVDNTGRRSRPSDVIVKTPCPVVDDVKAQEIADKIYNLFNGYTSGKEQQTAYNTLLDLGSPTLHRVLYHYNQHYESFGEFTWRCEDELGPR

SEQ ID NO: 28528 - protein, 223 aa, Homo sapiens
MLWVQRKRRRKETSECPSDKDKSPESHKAKNESWIKSHFSRLSEEKLALDNNASASGNATQTESGSEEVSSTVHIETFTTRHGEVGSALHRESFTSRQKTSGPSVIQEIHQESGKAPSTDEATWAAVAACTKEIDTQGRHLAHSMLQRAIAYQHSGHLESKDINQEELRALEEVEMKLQKNFLTQRENTIAGANHTHTFYGHSHHSHHGHPSHQSHSLPNRRH

SEQ ID NO: 28529 - protein, 453 aa, Homo sapiens
MALVRALVCCLLTAWHCRSGLGLPVAPAGGRNPPPAIGQFWHVTDLHLDPTYHITDDHTKVCASSKGANASNPGPFGDVLCDSPYQLILSAFDFIKNSGQEASFMIWTGDSPPHVPVPELSTDTVINVITNMTTTIQSLFPNLQVFPALGNHDYWPQDQLPVVTSKVYNAVANLWKPWLDEEAISTLRKGGFYSQKVTTNPNLRIISLNTNLYYGPNIMTLNKTDPANQFEWLESTLNNSQQNKEKVYIIAHVPVGYLPSSQNITAMREYYNEKLIDIFQKYSDVIAGQFYGHTHRDSIMVLSDKKGSPVNSLFVAPAVTPVKSVLEKQTNNPGIRLFQYDPRDYKLLDMLQYYLNLTEANLKGESIWKLEYILTQTYDIEDLQPESLYGLAKQFTILDSKQFIKYYNYFFVSYDSSVTCDKTCKAFQICAIMNLDNISYADCLKQLYIKHNY

SEQ ID NO: 28530 - protein, 322 aa, Homo sapiens
MTTTIQSLFPNLQVFPALGNHDYWPQDQLPVVTSKVYNAVANLWKPWLDEEAISTLRKGGFYSQKVTTNPNLRIISLNTNLYYGPNIMTLNKTDPANQFEWLESTLNNSQQNKEKVYIIAHVPVGYLPSSQNITAMREYYNEKLIDIFQKYSDVIAGQFYGHTHRDSIMVLSDKKGSPVNSLFVAPAVTPVKSVLEKQTNNPGIRLFQYDPRDYKLLDMLQYYLNLTEANLKGESIWKLEYILTQTYDIEDLQPESLYGLAKQFTILDSKQFIKYYNYFFVSYDSSVTCDKTCKAFQICAIMNLDNISYADCLKQLYIKHNY

SEQ ID NO: 28531 - protein, 96 aa, Homo sapiens
MPSRGTRPEDSSVLIPTDNSTPHKEDLSSKIKEQKIVVDELSNLKKNRKVYRQQQNSNIFFLADRTEMLSESKNILDELKKEYQEIENLDKTKIKK

SEQ ID NO: 28532 - protein, 635 aa, Homo sapiens
MATQISTRGSQCTIGQEEYSLYSSLSEDELVQMAIEQSLADKTRGPTTAEATASACTNRQPAHFYPWTRSTAPPESSPARAPMGLFQGVMQKYSSSLFKTSQLAPADPLIKAIKDGDEEALKTMIKEGKNLAEPNKEGWLPLHEAAYYGQVGCLKVLQRAYPGTIDQRTLQEETAVYLATCRGHLDCLLSLLQAGAEPDISNKSRETPLYKACERKNAEAVKILVQHNADTNHRCNRGWTALHESVSRNDLEVMQILVSGGAKVESKNAYGITPLFVAAQSGQLEALRFLAKYGADINTQASDNASALYEACKNEHEEVVEFLLSQGADANKTNKDGLLPLHIASKKGNYRIVQMLLPVTSRTRIRRSGVSPLHLAAERNHDEVLEALLSARFDVNTPLAPERARLYEDRRSSALYFAVVNNNVYATELLLQHGADPNRDVISPLLVAIRHGCLRTMQLLLDHGANIDAYIATHPTAFPATIMFAMKCLSLLKFLMDLGCDGEPCFSCLYGNGPHPPAPQPSSRFNDAPAADKEPSVVQFCEFVSAPEVSRWAGPIIDVLLDYVGNVQLCSRLKEHIDSFEDWAVIKEKAEPPRPLAHLCRLRVRKAIGKYRIKLLDTLPLPGRLIRYLKYENTQ

SEQ ID NO: 28533 - protein, 587 aa, Homo sapiens
MTRFSYAEYFSLFHSCSAPSRSTAPPESSPARAPMGLFQGVMQKYSSSLFKTSQLAPADPLIKAIKDGDEEALKTMIKEGKNLAEPNKEGWLPLHEAAYYGQVGCLKVLQRAYPGTIDQRTLQEETAVYLATCRGHLDCLLSLLQAGAEPDISNKSRETPLYKACERKNAEAVKILVQHNADTNHRCNRGWTALHESVSRNDLEVMQILVSGGAKVESKNAYGITPLFVAAQSGQLEALRFLAKYGADINTQASDNASALYEACKNEHEEVVEFLLSQGADANKTNKDGLLPLHIASKKGNYRIVQMLLPVTSRTRIRRSGVSPLHLAAERNHDEVLEALLSARFDVNTPLAPERARLYEDRRSSALYFAVVNNNVYATELLLQHGADPNRDVISPLLVAIRHGCLRTMQLLLDHGANIDAYIATHPTAFPATIMFAMKCLSLLKFLMDLGCDGEPCFSCLYGNGPHPPAPQPSSRFNDAPAADKEPSVVQFCEFVSAPEVSRWAGPIIDVLLDYVGNVQLCSRLKEHIDSFEDWAVIKEKAEPPRPLAHLCRLRVRKAIGKYRIKLLDTLPLPGRLIRYLKYENTQ

SEQ ID NO: 28534 - protein, 100 aa, Homo sapiens
MAPFVRNLVEKTPALVNAAVTYLKPRLAAFWYYTTVELVPPTPAEIPRAIQSLKKIVSSAQTGSFKQLTVKEALLNGLVATEVSTWFYVREITGKRGIIG

SEQ ID NO: 28535 - protein, 1180 aa, Homo sapiens
MSADSSPLVGSTPTGYGTLTIGTSIDPLSSSVSSVRLSGYCGSPWRVIGYHVVVWMMAGIPLLLFRWKPLWGVRLRLRPCNLAHAETLVIEIRDKEDSSWQLFTVQVQTEAIGEGSLEPSPQSQAEDGRSQAAVGAVPEGAWKDTAQLHKSEEAVSVGQKRVLRYYLFQGQRYIWIETQQAFYQVSLLDHGRSCDDVHRSRHGLSLQDQMVRKAIYGPNVISIPVKSYPQLLVDEALNPYYGFQAFSIALWLADHYYWYALCIFLISSISICLSLYKTRKQSQTLRDMVKLSMRVCVCRPGGEEEWVDSSELVPGDCLVLPQEGGLMPCDAALVAGECMVNESSLTGESIPVLKTALPEGLGPYCAETHRRHTLFCGTLILQARAYVGPHVLAVVTRTGFCTAKGGLVSSILHPRPINFKFYKHSMKFVAALSVLALLGTIYSIFILYRNRVPLNEIVIRALDLVTVVVPPALPAAMTVCTLYAQSRLRRQGIFCIHPLRINLGGKLQLVCFDKTGTLTEDGLDVMGVVPLKGQAFLPLVPEPRRLPVGPLLRALATCHALSRLQDTPVGDPMDLKMVESTGWVLEEEPAADSAFGTQVLAVMRPPLWEPQLQAMEEPPVPVSVLHRFPFSSALQRMSVVVAWPGATQPEAYVKGSPELVAGLCNPETVPTDFAQMLQSYTAAGYRVVALASKPLPTVPSLEAAQQLTRDTVEGDLSLLGLLVMRNLLKPQTTPVIQALRRTRIRAVMVTGDNLQTAVTVARGCGMVAPQEHLIIVHATHPERGQPASLEFLPMESPTAVNGVKDPDQAASYTVEPDPRSRHLALSGPTFGIIVKHFPKLLPKVLVQGTVFARMAPEQKTELVCELQKLQYCVGMCGDGANDCGALKAADVGISLSQAEASVVSPFTSSMASIECVPMVIREGRCSLDTSFSVFKYMALYSLTQFISVLILYTINTNLGDLQFLAIDLVITTTVAVLMSRTGPALVLGRVRPPGALLSVPVLSSLLLQMVLVTGVQLGGYFLTLAQPWFVPLNRTVAAPDNLPNYENTVVFSLSSFQYLILAAAVSKGAPFRRPLYTNVPFLVALALLSSVLVGLVLVPGLLQGPLALRNITDTGFKLLLLGLVTLNFVGAFMLESVLDQCLPACLRRLRPKRASKKRFKQLERELAEQPWPPLPAGPLR

SEQ ID NO: 28536 - protein, 1158 aa, Homo sapiens
MSADSSPLVGSTPTGYGTLTIGTSIDPLSSSVSSVRLSGYCGSPWRVIGYHVVVWMMAGIPLLLFRWKPLWGVRLRLRPCNLAHAETLVIEIRDKEDSSWQLFTVQVQTEAIGEGSLEPSPQSQAEDGRSQAAVGAVPEGAWKDTAQLHKSEEAKRVLRYYLFQGQRYIWIETQQAFYQVSLLDHGRSCDDVHRSRHGLSLQDQMVRKAIYGPNVISIPVKSYPQLLVDEALNPYYGFQAFSIALWLADHYYWYALCIFLISSISICLSLYKTRKQSQTLRDMVKLSMRVCVCRPGGEEEWVDSSELVPGDCLVLPQEGGLMPCDAALVAGECMVNESSLTGESIPVLKTALPEGLGPYCAETHRRHTLFCGTLILQARAYVGPHVLAVVTRTGFCTAKGGLVSSILHPRPINFKFYKHSMKFVAALSVLALLGTIYSIFILYRNRVPLNEIVIRALDLVTVVVPPALPAAMTVCTLYAQSRLRRQGIFCIHPLRINLGGKLQLVCFDKTGTLTEDGLDVMGVVPLKGQAFLPLVPEPRRLPVGPLLRALATCHALSRLQDTPVGDPMDLKMVESTGWVLEEEPAADSAFGTQVLAVMRPPLWEPQLQAMEEPPVPVSVLHRFPFSSALQRMSVVVAWPGATQPEAYVKGSPELVAGLCNPETVPTDFAQMLQSYTAAGYRVVALASKPLPTVPSLEAAQQLTRDTVEGDLSLLGLLVMRNLLKPQTTPVIQALRRTRIRAVMVTGDNLQTAVTVARGCGMVAPQEHLIIVHATHPERGQPASLEFLPMESPTAVNGVKVLVQGTVFARMAPEQKTELVCELQKLQYCVGMCGDGANDCGALKAADVGISLSQAEASVVSPFTSSMASIECVPMVIREGRCSLDTSFSVFKYMALYSLTQFISVLILYTINTNLGDLQFLAIDLVITTTVAVLMSRTGPALVLGRVRPPGALLSVPVLSSLLLQMVLVTGVQLGGYFLTLAQPWFVPLNRTVAAPDNLPNYENTVVFSLSSFQYLILAAAVSKGAPFRRPLYTNERARPVPPRLPAPPPAQAGLQEALQAAGTRAGRAALAAAARRPPEVVQAHGHPRHWNSLPLSHQLDPSPATPPPPPPTSLRLATVYTPPPRPPPPWGSVDYCPLPWTIPRRGGSPQLPSVLLSV

SEQ ID NO: 28537 - protein, 1175 aa, Homo sapiens
MSADSSPLVGSTPTGYGTLTIGTSIDPLSSSVSSVRLSGYCGSPWRVIGYHVVVWMMAGIPLLLFRWKPLWGVRLRLRPCNLAHAETLVIEIRDKEDSSWQLFTVQVQTEAIGEGSLEPSPQSQAEDGRSQAAVGAVPEGAWKDTAQLHKSEEAKRVLRYYLFQGQRYIWIETQQAFYQVSLLDHGRSCDDVHRSRHGLSLQDQMVRKAIYGPNVISIPVKSYPQLLVDEALNPYYGFQAFSIALWLADHYYWYALCIFLISSISICLSLYKTRKQSQTLRDMVKLSMRVCVCRPGGEEEWVDSSELVPGDCLVLPQEGGLMPCDAALVAGECMVNESSLTGESIPVLKTALPEGLGPYCAETHRRHTLFCGTLILQARAYVGPHVLAVVTRTGFCTAKGGLVSSILHPRPINFKFYKHSMKFVAALSVLALLGTIYSIFILYRNRVPLNEIVIRALDLVTVVVPPALPAAMTVCTLYAQSRLRRQGIFCIHPLRINLGGKLQLVCFDKTGTLTEDGLDVMGVVPLKGQAFLPLVPEPRRLPVGPLLRALATCHALSRLQDTPVGDPMDLKMVESTGWVLEEEPAADSAFGTQVLAVMRPPLWEPQLQAMEEPPVPVSVLHRFPFSSALQRMSVVVAWPGATQPEAYVKGSPELVAGLCNPETVPTDFAQMLQSYTAAGYRVVALASKPLPTVPSLEAAQQLTRDTVEGDLSLLGLLVMRNLLKPQTTPVIQALRRTRIRAVMVTGDNLQTAVTVARGCGMVAPQEHLIIVHATHPERGQPASLEFLPMESPTAVNGVKDPDQAASYTVEPDPRSRHLALSGPTFGIIVKHFPKLLPKVLVQGTVFARMAPEQKTELVCELQKLQYCVGMCGDGANDCGALKAADVGISLSQAEASVVSPFTSSMASIECVPMVIREGRCSLDTSFSVFKYMALYSLTQFISVLILYTINTNLGDLQFLAIDLVITTTVAVLMSRTGPALVLGRVRPPGALLSVPVLSSLLLQMVLVTGVQLGGYFLTLAQPWFVPLNRTVAAPDNLPNYENTVVFSLSSFQYLILAAAVSKGAPFRRPLYTNVPFLVALALLSSVLVGLVLVPGLLQGPLALRNITDTGFKLLLLGLVTLNFVGAFMLESVLDQCLPACLRRLRPKRASKKRFKQLERELAEQPWPPLPAGPLR

SEQ ID NO: 28538 - protein, 279 aa, Homo sapiens
MTKNEKKSLNQSLAEWKLFIYNPTTGEFLGRTAKSWGLILLFYLVFYGFLAALFSFTMWVMLQTLNDEVPKYRDQIPSPGLMVFPKPVTALEYTFSRSDPTSYAGYIEDLKKFLKPYTLEEQKNLTVCPDGALFEQKGPVYVACQFPISLLQACSGMNDPDFGYSQGNPCILVKMNRIIGLKPEGVPRIDCVSKNEDIPNVAVYPHNGMIDLKYFPYYGKKLHVGYLQPLVAVQVSFAPNNTGKEVTVECKIDGSANLKSQDDRDKFLGRVMFKITARA

SEQ ID NO: 28539 - protein, 193 aa, Homo sapiens
MLSEGDILFSSLLSSPSLFWPPGLILLFYLVFYGFLAALFSFTMWVMLQTLNDEVPKYRDQIPSPGLMVFPKPVTALEYTFSRSDPTSYAGYIEDLKKFLKPYTLEEQKNLTVCPDGALFEQKGPVYVACQFPISLLQACSGMNDPDFGYSQGNPCILVKMNRIIGLKPEGVPRIDCVSKTNNVKDGMKIYQM

SEQ ID NO: 28540 - protein, 149 aa, Homo sapiens [sequence omitted]

SEQ ID NO: 28541 - protein, 870 aa, Homo sapiens
MNHLNVLAKALYDNVAESPDELSFRKGDIMTVLEQDTQGLDGWWLCSLHGRQGIVPGNRLKILVGMYDKKPAGPGPGPPATPAQPQPGLHAPAPPASQYTPMLPNTYQPQPDSVYLVPTPSKAQQGLYQVPGPSPQFQSPPAKQTSTFSKQTPHHPFPSPATDLYQVPPGPGGPAQDIYQVPPSAGMGHDIYQVPPSMDTRSWEGTKPPAKVVVPTRVGQGYVYEAAQPEQDEYDIPRHLLAPGPQDIYDVPPVRGLLPSQYGQEVYDTPPMAVKGPNGRDPLLEVYDVPPSVEKGLPPSNHHAVYDVPPSVSKDVPDGPLLREETYDVPPAFAKAKPFDPARTPLVLAAPPPDSPPAEDVYDVPPPAPDLYDVPPGLRRPGPGTLYDVPRERVLPPEVADGGVVDSGVYAVPPPAEREAPAEGKRLSASSTGSTRSSQSASSLEVAGPGREPLELEVAVEALARLQQGVSATVAHLLDLAGSAGATGSWRSPSEPQEPLVQDLQAAVAAVQSAVHELLEFARSAVGNAAHTSDRALHAKLSRQLQKMEDVHQTLVAHGQALDAGRGGSGATLEDLDRLVACSRAVPEDAKQLASFLHGNASLLFRRTKATAPGPEGGGTLHPNPTDKTSSIQSRPLPSPPKFTSQDSPDGQYENSEGGWMEDYDYVHLQGKEEFEKTQKELLEKGSITRQGKSQLELQQLKQFERLEQEVSRPIDHDLANWTPAQPLAPGRTGGLGPSDRQLLLFYLEQCEANLTTLTNAVDAFFTAVATNQPPKIFVAHSKFVILSAHKLVFIGDTLSRQAKAADVRSQVTHYSNLLCDLLRGIVATTKAAALQYPSPSAAQDMVERVKELGHSTQQFRRVLGQLAAA

SEQ ID NO: 28542 - protein, 888 aa, Homo sapiens
MLTHRPQEAEQRGRTPGPSFEWNVLAKALYDNVAESPDELSFRKGDIMTVLEQDTQGLDGWWLCSLHGRQGIVPGNRLKILVGMYDKKPAGPGPGPPATPAQPQPGLHAPAPPASQYTPMLPNTYQPQPDSVYLVPTPSKAQQGLYQVPGPSPQFQSPPAKQTSTFSKQTPHHPFPSPATDLYQVPPGPGGPAQDIYQVPPSAGMGHDIYQVPPSMDTRSWEGTKPPAKVVVPTRVGQGYVYEAAQPEQDEYDIPRHLLAPGPQDIYDVPPVRGLLPSQYGQEVYDTPPMAVKGPNGRDPLLEVYDVPPSVEKGLPPSNHHAVYDVPPSVSKDVPDGPLLREETYDVPPAFAKAKPFDPARTPLVLAAPPPDSPPAEDVYDVPPPAPDLYDVPPGLRRPGPGTLYDVPRERVLPPEVADGGVVDSGVYAVPPPAEREAPAEGKRLSASSTGSTRSSQSASSLEVAGPGREPLELEVAVEALARLQQGVSATVAHLLDLAGSAGATGSWRSPSEPQEPLVQDLQAAVAAVQSAVHELLEFARSAVGNAAHTSDRALHAKLSRQLQKMEDVHQTLVAHGQALDAGRGGSGATLEDLDRLVACSRAVPEDAKQLASFLHGNASLLFRRTKATAPGPEGGGTLHPNPTDKTSSIQSRPLPSPPKFTSQDSPDGQYENSEGGWMEDYDYVHLQGKEEFEKTQKELLEKGSITRQGKSQLELQQLKQFERLEQEVSRPIDHDLANWTPAQPLAPGRTGGLGPSDRQLLLFYLEQCEANLTTLTNAVDAFFTAVATNQPPKIFVAHSKFVILSAHKLVFIGDTLSRQAKAADVRSQVTHYSNLLCDLLRGIVATTKAAALQYPSPSAAQDMVERVKELGHSTQQFRRVLGQLAAA

SEQ ID NO: 28543 - protein, 888 aa, Homo sapiens
MNHLNVLAKALYDNVAESPDELSFRKGDIMTVLEQDTQGLDGWWLCSLHGRQGIVPGNRLKILVGMYDKKPAGPGPGPPATPAQPQPGLHAPAPPASQYTPMLPNTYQPQPDSVYLVPTPSKAQQGLYQVPGPSPQFQSPPAKQTSTFSKQTPHHPFPSPATDLYQVPPGPGGPAQDIYQVPPSAGMGHDIYQVPPSMDTRSWEGTKPPAKVVVPTRVGQGYVYEAAQPEQDEYDIPRHLLAPGPQDIYDVPPVRGLLPSQYGQEVYDTPPMAVKGPNGRDPLLEVYDVPPSVEKGLPPSNHHAVSKCQGNARARLRLWGVWVYDVPPSVSKDVPDGPLLREETYDVPPAFAKAKPFDPARTPLVLAAPPPDSPPAEDVYDVPPPAPDLYDVPPGLRRPGPGTLYDVPRERVLPPEVADGGVVDSGVYAVPPPAEREAPAEGKRLSASSTGSTRSSQSASSLEVAGPGREPLELEVAVEALARLQQGVSATVAHLLDLAGSAGATGSWRSPSEPQEPLVQDLQAAVAAVQSAVHELLEFARSAVGNAAHTSDRALHAKLSRQLQKMEDVHQTLVAHGQALDAGRGGSGATLEDLDRLVACSRAVPEDAKQLASFLHGNASLLFRRTKATAPGPEGGGTLHPNPTDKTSSIQSRPLPSPPKFTSQDSPDGQYENSEGGWMEDYDYVHLQGKEEFEKTQKELLEKGSITRQGKSQLELQQLKQFERLEQEVSRPIDHDLANWTPAQPLAPGRTGGLGPSDRQLLLFYLEQCEANLTTLTNAVDAFFTAVATNQPPKIFVAHSKFVILSAHKLVFIGDTLSRQAKAADVRSQVTHYSNLLCDLLRGIVATTKAAALQYPSPSAAQDMVERVKELGHSTQQFRRVLGQLAAA

SEQ ID NO: 28544 - protein, 722 aa, Homo sapiens
MQGKNVLAKALYDNVAESPDELSFRKGDIMTVLEQDTQGLDGWWLCSLHGRQGIVPGNRLKILVVVPTRVGQGYVYEAAQPEQDEYDIPRHLLAPGPQDIYDVPPVRGLLPSQYGQEVYDTPPMAVKGPNGRDPLLEVYDVPPSVEKGLPPSNHHAVYDVPPSVSKDVPDGPLLREETYDVPPAFAKAKPFDPARTPLVLAAPPPDSPPAEDVYDVPPPAPDLYDVPPGLRRPGPGTLYDVPRERVLPPEVADGGVVDSGVYAVPPPAEREAPAEGKRLSASSTGSTRSSQSASSLEVAGPGREPLELEVAVEALARLQQGVSATVAHLLDLAGSAGATGSWRSPSEPQEPLVQDLQAAVAAVQSAVHELLEFARSAVGNAAHTSDRALHAKLSRQLQKMEDVHQTLVAHGQALDAGRGGSGATLEDLDRLVACSRAVPEDAKQLASFLHGNASLLFRRTKATAPGPEGGGTLHPNPTDKTSSIQSRPLPSPPKFTSQDSPDGQYENSEGGWMEDYDYVHLQGKEEFEKTQKELLEKGSITRQGKSQLELQQLKQFERLEQEVSRPIDHDLANWTPAQPLAPGRTGGLGPSDRQLLLFYLEQCEANLTTLTNAVDAFFTAVATNQPPKIFVAHSKFVILSAHKLVFIGDTLSRQAKAADVRSQVTHYSNLLCDLLRGIVATTKAAALQYPSPSAAQDMVERVKELGHSTQQFRRVLGQLAAA

SEQ ID NO: 28545 - protein, 868 aa, Homo sapiens
MENVLAKALYDNVAESPDELSFRKGDIMTVLEQDTQGLDGWWLCSLHGRQGIVPGNRLKILVGMYDKKPAGPGPGPPATPAQPQPGLHAPAPPASQYTPMLPNTYQPQPDSVYLVPTPSKAQQGLYQVPGPSPQFQSPPAKQTSTFSKQTPHHPFPSPATDLYQVPPGPGGPAQDIYQVPPSAGMGHDIYQVPPSMDTRSWEGTKPPAKVVVPTRVGQGYVYEAAQPEQDEYDIPRHLLAPGPQDIYDVPPVRGLLPSQYGQEVYDTPPMAVKGPNGRDPLLEVYDVPPSVEKGLPPSNHHAVYDVPPSVSKDVPDGPLLREETYDVPPAFAKAKPFDPARTPLVLAAPPPDSPPAEDVYDVPPPAPDLYDVPPGLRRPGPGTLYDVPRERVLPPEVADGGVVDSGVYAVPPPAEREAPAEGKRLSASSTGSTRSSQSASSLEVAGPGREPLELEVAVEALARLQQGVSATVAHLLDLAGSAGATGSWRSPSEPQEPLVQDLQAAVAAVQSAVHELLEFARSAVGNAAHTSDRALHAKLSRQLQKMEDVHQTLVAHGQALDAGRGGSGATLEDLDRLVACSRAVPEDAKQLASFLHGNASLLFRRTKATAPGPEGGGTLHPNPTDKTSSIQSRPLPSPPKFTSQDSPDGQYENSEGGWMEDYDYVHLQGKEEFEKTQKELLEKGSITRQGKSQLELQQLKQFERLEQEVSRPIDHDLANWTPAQPLAPGRTGGLGPSDRQLLLFYLEQCEANLTTLTNAVDAFFTAVATNQPPKIFVAHSKFVILSAHKLVFIGDTLSRQAKAADVRSQVTHYSNLLCDLLRGIVATTKAAALQYPSPSAAQDMVERVKELGHSTQQFRRVLGQLAAA

SEQ ID NO: 28546 - protein, 916 aa, Homo sapiens
MPAKPFLSSVLLSWKVLDFSGPGPQGTGQPCSCGHWAEGQGGPPEPAGGPNVLAKALYDNVAESPDELSFRKGDIMTVLEQDTQGLDGWWLCSLHGRQGIVPGNRLKILVGMYDKKPAGPGPGPPATPAQPQPGLHAPAPPASQYTPMLPNTYQPQPDSVYLVPTPSKAQQGLYQVPGPSPQFQSPPAKQTSTFSKQTPHHPFPSPATDLYQVPPGPGGPAQDIYQVPPSAGMGHDIYQVPPSMDTRSWEGTKPPAKVVVPTRVGQGYVYEAAQPEQDEYDIPRHLLAPGPQDIYDVPPVRGLLPSQYGQEVYDTPPMAVKGPNGRDPLLEVYDVPPSVEKGLPPSNHHAVYDVPPSVSKDVPDGPLLREETYDVPPAFAKAKPFDPARTPLVLAAPPPDSPPAEDVYDVPPPAPDLYDVPPGLRRPGPGTLYDVPRERVLPPEVADGGVVDSGVYAVPPPAEREAPAEGKRLSASSTGSTRSSQSASSLEVAGPGREPLELEVAVEALARLQQGVSATVAHLLDLAGSAGATGSWRSPSEPQEPLVQDLQAAVAAVQSAVHELLEFARSAVGNAAHTSDRALHAKLSRQLQKMEDVHQTLVAHGQALDAGRGGSGATLEDLDRLVACSRAVPEDAKQLASFLHGNASLLFRRTKATAPGPEGGGTLHPNPTDKTSSIQSRPLPSPPKFTSQDSPDGQYENSEGGWMEDYDYVHLQGKEEFEKTQKELLEKGSITRQGKSQLELQQLKQFERLEQEVSRPIDHDLANWTPAQPLAPGRTGGLGPSDRQLLLFYLEQCEANLTTLTNAVDAFFTAVATNQPPKIFVAHSKFVILSAHKLVFIGDTLSRQAKAADVRSQVTHYSNLLCDLLRGIVATTKAAALQYPSPSAAQDMVERVKELGHSTQQFRRVLGQLAAA

SEQ ID NO: 28547 - protein, 888 aa, Homo sapiens
MHCPGEAPLAAPRPTPKDPCLRNVLAKALYDNVAESPDELSFRKGDIMTVLEQDTQGLDGWWLCSLHGRQGIVPGNRLKILVGMYDKKPAGPGPGPPATPAQPQPGLHAPAPPASQYTPMLPNTYQPQPDSVYLVPTPSKAQQGLYQVPGPSPQFQSPPAKQTSTFSKQTPHHPFPSPATDLYQVPPGPGGPAQDIYQVPPSAGMGHDIYQVPPSMDTRSWEGTKPPAKVVVPTRVGQGYVYEAAQPEQDEYDIPRHLLAPGPQDIYDVPPVRGLLPSQYGQEVYDTPPMAVKGPNGRDPLLEVYDVPPSVEKGLPPSNHHAVYDVPPSVSKDVPDGPLLREETYDVPPAFAKAKPFDPARTPLVLAAPPPDSPPAEDVYDVPPPAPDLYDVPPGLRRPGPGTLYDVPRERVLPPEVADGGVVDSGVYAVPPPAEREAPAEGKRLSASSTGSTRSSQSASSLEVAGPGREPLELEVAVEALARLQQGVSATVAHLLDLAGSAGATGSWRSPSEPQEPLVQDLQAAVAAVQSAVHELLEFARSAVGNAAHTSDRALHAKLSRQLQKMEDVHQTLVAHGQALDAGRGGSGATLEDLDRLVACSRAVPEDAKQLASFLHGNASLLFRRTKATAPGPEGGGTLHPNPTDKTSSIQSRPLPSPPKFTSQDSPDGQYENSEGGWMEDYDYVHLQGKEEFEKTQKELLEKGSITRQGKSQLELQQLKQFERLEQEVSRPIDHDLANWTPAQPLAPGRTGGLGPSDRQLLLFYLEQCEANLTTLTNAVDAFFTAVATNQPPKIFVAHSKFVILSAHKLVFIGDTLSRQAKAADVRSQVTHYSNLLCDLLRGIVATTKAAALQYPSPSAAQDMVERVKELGHSTQQFRRVLGQLAAA

SEQ ID NO: 28548 - protein, 870 aa, Homo sapiens
MSVPNVLAKALYDNVAESPDELSFRKGDIMTVLEQDTQGLDGWWLCSLHGRQGIVPGNRLKILVGMYDKKPAGPGPGPPATPAQPQPGLHAPAPPASQYTPMLPNTYQPQPDSVYLVPTPSKAQQGLYQVPGPSPQFQSPPAKQTSTFSKQTPHHPFPSPATDLYQVPPGPGGPAQDIYQVPPSAGMGHDIYQVPPSMDTRSWEGTKPPAKVVVPTRVGQGYVYEAAQPEQDEYDIPRHLLAPGPQDIYDVPPVRGLLPSQYGQEVYDTPPMAVKGPNGRDPLLEVYDVPPSVEKGLPPSNHHAVYDVPPSVSKDVPDGPLLREETYDVPPAFAKAKPFDPARTPLVLAAPPPDSPPAEDVYDVPPPAPDLYDVPPGLRRPGPGTLYDVPRERVLPPEVADGGVVDSGVYAVPPPAEREAPAEGKRLSASSTGSTRSSQSASSLEVAGPGREPLELEVAVEALARLQQGVSATVAHLLDLAGSAGATGSWRSPSEPQEPLVQDLQAAVAAVQSAVHELLEFARSAVGNAAHTSDRALHAKLSRQLQKMEDVHQTLVAHGQALDAGRGGSGATLEDLDRLVACSRAVPEDAKQLASFLHGNASLLFRRTKATAPGPEGGGTLHPNPTDKTSSIQSRPLPSPPKFTSQDSPDGQYENSEGGWMEDYDYVHLQGKEEFEKTQKELLEKGSITRQGKSQLELQQLKQFERLEQEVSRPIDHDLANWTPAQPLAPGRTGGLGPSDRQLLLFYLEQCEANLTTLTNAVDAFFTAVATNQPPKIFVAHSKFVILSAHKLVFIGDTLSRQAKAADVRSQVTHYSNLLCDLLRGIVATTKAAALQYPSPSAAQDMVERVKELGHSTQQFRRVLGQLAAA

SEQ ID NO: 28549 - protein, 182 aa, Homo sapiens
MAAEEKDPLSYFAAYGSSSSGSSDEEDNIEPEETSRRTPDPAKSAGGCRNKAEKRLPGPDELFRSVTRPAFLYNPLNKQIDWERHVVKAPEEPPKEFKIWKSNYVPPPETYTTEKKPPPPELDMAIKWSNIYEDNGDDAPQNAKKARLLPEGEETLESDDEKDEHTSKKRKVEPGEPAKKKK

SEQ ID NO: 28550 - protein, 167 aa, Homo sapiens
MAAEEKDPLSYFAAYGSSSSGSSDEEDNIEPEETSRRTPDPAKSAGGCRNKAEKRLPGPDELFRSVTRPAFLYNPLNKQIDWERHVVKAPEEPPKEFKIWKSNYVPPPETYTTEKKPPPPELDMAIKWSNIYEDNGDDAPQNAKKARLLPEGEETLESALEDLEIQN

SEQ ID NO: 28551 - protein, 100 aa, Homo sapiens
MAAEEKDPLSYFAAYGSSSSGSSDEEDNIEPEETSRRTPDPAKSAGGCRNKAEKRLPGPDELFRSVTRPAFLYNPLNKQIDWERHVVKAPEELLPETPSL

SEQ ID NO: 28552 - protein, 1091 aa, Homo sapiens
MAGPGSPRRASRGASALLAAALLYAALGDVVRSEQQIPLSVVKLWASAFGGEIKSIAAKYSGSQLLQKKYKEYEKDVAIEEIDGLQLVKKLAKNMEEMFHKKSEAVRRLVEAAEEAHLKHEFDADLQYEYFNAVLINERDKDGNFLELGKEFILAPNDHFNNLPVNISLSDVQVPTNMYNKDPAIVNGVYWSESLNKVFVDNFDRDPSLIWQYFGSAKGFFRQYPGIKWEPDENGVIAFDCRNRKWYIQAATSPKDVVILVDVSGSMKGLRLTIAKQTVSSILDTLGDDDFFNIIAYNEELHYVEPCLNGTLVQADRTNKEHFREHLDKLFAKGIGMLDIALNEAFNILSDFNHTGQGSICSQAIMLITDGAVDTYDTIFAKYNWPDRKVRIFTYLIGREAAFADNLKWMACANKGFFTQISTLADVQENVMEYLHVLSRPKVIDQEHDVVWTEAYIDSTLPQAQKLTDDQGPVLMTTVAMPVFSKQNETRSKGILLGVVGTDVPVKELLKTIPKYKLGIHGYAFAITNNGYILTHPELRLLYEEGKKRRKPNYSSVDLSEVEWEDRDDVLRNAMVNRKTGKFSMEVKKTVDKGKRVLVMTNDYYYTDIKGTPFSLGVALSRGHGKYFFRGNVTIEEGLHDLEHPDVSLADEWSYCNTDLHPEHRHLSQLEAIKLYLKGKEPLLQCDKELIQEVLFDAVVSAPIEAYWTSLALNKSENSDKGVEVAFLGTRTGLSRINLFVGAEQLTNQDFLKAGDKENIFNADHFPLWYRRAAEQIPGSFVYSIPFSTGPVNKSNVVTASTSIQLLDERKSPVVAAVGIQMKLEFFQRKFWTASRQCASLDGKCSISCDDETVNCYLIDNNGFILVSEDYTQTGDFFGEIEGAVMNKLLTMGSFKRITLYDYQAMCRANKESSDGAHGLLDPYNAFLSAVKWIMTELVLFLVEFNLCSWWHSDMTAKAQKLKQTLEPCDTEYPAFVSERTIKETTGNIACEDCSKSFVIQQIPSSNLFMVVVDSSCLCESVAPITMAPIEIRYNESLKCERLKAQKIRRRPESCHGFHPEENARECGGAPSLQAQTVLLLLPLLLMLFSR

SEQ ID NO: 28553 - protein, 997 aa, Homo sapiens
MEEMFHKKSEAVRRLVEAAEEAHLKHEFDADLQYEYFNAVLINERDKDGNFLELGKEFILAPNDHFNNLPVNISLSDVQVPTNMYNKDPAIVNGVYWSESLNKVFVDNFDRDPSLIWQYFGSAKGFFRQYPGIKWEPDENGVIAFDCRNRKWYIQAATSPKDVVILVDVSGSMKGLRLTIAKQTVSSILDTLGDDDFFNIIAYNEELHYVEPCLNGTLVQADRTNKEHFREHLDKLFAKGIGMLDIALNEAFNILSDFNHTGQGSICSQAIMLITDGAVDTYDTIFAKYNWPDRKVRIFTYLIGREAAFADNLKWMACANKGFFTQISTLADVQENVMEYLHVLSRPKVIDQEHDVVWTEAYIDSTLPQAQKLTDDQGPVLMTTVAMPVFSKQNETRSKGILLGVVGTDVPVKELLKTIPKYKLGIHGYAFAITNNGYILTHPELRLLYEEGKKRRKPNYSSVDLSEVEWEDRDDVLRNAMVNRKTGKFSMEVKKTVDKGKRVLVMTNDYYYTDIKGTPFSLGVALSRGHGKYFFRGNVTIEEGLHDLEHPDVSLADEWSYCNTDLHPEHRHLSQLEAIKLYLKGKEPLLQCDKELIQEVLFDAVVSAPIEAYWTSLALNKSENSDKGVEVAFLGTRTGLSRINLFVGAEQLTNQDFLKAGDKENIFNADHFPLWYRRAAEQIPGSFVYSIPFSTGPVNKSNVVTASTSIQLLDERKSPVVAAVGIQMKLEFFQRKFWTASRQCASLDGKCSISCDDETVNCYLIDNNGFILVSEDYTQTGDFFGEIEGAVMNKLLTMGSFKRITLYDYQAMCRANKESSDGAHGLLDPYNAFLSAVKWIMTELVLFLVEFNLCSWWHSDMTAKAQKLKQTLEPCDTEYPAFVSERTIKETTGNIACEDCSKSFVIQQIPSSNLFMVVVDSSCLCESVAPITMAPIEIRYNESLKCERLKAQKIRRRPESCHGFHPEENARECGGAPSLQAQTVLLLLPLLLMLFSR

SEQ ID NO: 28554 - protein, 519 aa, Homo sapiens
MEEMFHKKSEAVRRLVEAAEEAHLKHEFDADLQYEYFNAVLINERDKDGNFLELGKEFILAPNDHFNNLPVNISLSDVQVPTNMYNKDPAIVNGVYWSESLNKVFVDNFDRDPSLIWQYFGSAKGFFRQYPGIKWEPDENGVIAFDCRNRKWYIQAATSPKDVVILVDVSGSMKGLRLTIAKQTVSSILDTLGDDDFFNIIAYNEELHYVEPCLNGTLVQADRTNKEHFREHLDKLFAKGIGMLDIALNEAFNILSDFNHTGQGSICSQAIMLITDGAVDTYDTIFAKYNWPDRKVRIFTYLIGREAAFADNLKWMACANKGFFTQISTLADVQENVMEYLHVLSRPKVIDQEHDVVWTEAYIDSTLTDDQGPVLMTTVAMPVFSKQNETRSKGILLGVVGTDVPVKELLKTIPKYKLGIHGYAFAITNNGYILTHPELRLLYEEGKKRRKPNYSSVDLSEVEWEDRDDVLRNAMVNRKTGKFSMEVKKTVDKGFRCGAFQRSWEIFLPRECNHRRRPA

SEQ ID NO: 28555 - protein, 281 aa, Homo sapiens
MFSCCFPTSRGCCFRNGGSESLFRQCRRRLIPHPRRLWPFVRRRTQVPQDSPGQALAGQATPEIPSGLPLHIVLVQEEIREPMEAQTHAPGPYADIAALAAPAVEPKPAWEEPPPERALEVEGAPAKDQPSQELPEIMAPTVATGLNAGAENVAGERSGREGVTSTAPASRSHAAPSPGHGGKHGGGDQGIQTGLLYLAGERLLSFAGTTALLLQGLFIVLILVGYISVKVMLKSIKTRLGRRVPAAPPALRRNLLLQAWKCVCNWASRLFAPNVLPRTGS

SEQ ID NO: 28556 - protein, 123 aa, Homo sapiens
MASHVECRPLGVFECELCTLTAPYSYVGQKPPNTQSMVLLEESYVMKDPFTSDKDRFLVLGSCCSLCSRLVCVGPECSLFYSKRFCLPCVRENINAFPQEIRQDLEKRKAPSKRTPSQPGSRT

SEQ ID NO: 28557 - protein, 543 aa, Homo sapiens
MSRESDVEAQQSHGSSACSQPHGSVTQSQGSSSQSQGISSSSTSTMPNSSQSSHSSSGTLSSLETVSTQELYSIPEDQEPEDQEPEEPTPAPWARLWALQDGFANLECVNDNYWFGRDKSCEYCFDEPLLKRTDKYRTYSKKHFRIFREVGPKNSYIAYIEDHSGNGTFVNTELVGKGKRRPLNNNSEIALSLSRNKVFVFFDLTVDDQSVYPKALRDEYIMSKTLGSGACGEVKLAFERKTCKKVAIKIISKRKFAIGSAREADPALNVETEIEILKKLNHPCIIKIKNFFDAEDYYIVLELMEGGELFDKVVGNKRLKEATCKLYFYQMLLAVQYLHENGIIHRDLKPENVLLSSQEEDCLIKITDFGHSKILGETSLMRTLCGTPTYLAPEVLVSVGTAGYNRAVDCWSLGVILFICLSGYPPFSEHRTQVSLKDQITSGKYNFIPEVWAEVSEKALDLVKKLLVVDPKARFTTEEALRHPWLQDEDMKRKFQDLLSEENESTALPQVLAQPSTSRKRPREGEAEGAETTKRPAVCAAVL

SEQ ID NO: 28558 - protein, 234 aa, Homo sapiens
MSRESDVEAQQSHGSSACSQPHGSVTQSQGSSSQSQGISSSSTSTMPNSSQSSHSSSGTLSSLETVSTQELYSIPEDQEPEDQEPEEPTPAPWARLWALQDGFANLECVNDNYWFGRDKSCEYCFDEPLLKRTDKYRTYSKKHFRIFREVGPKNSYIAYIEDHSGNGTFVNTELVGKGKRRPLNNNSEIALSLSRNKEKILKIYSLSRFSKIRRGAVAHVFNPSTLGGRGWQIT

SEQ ID NO: 28559 - protein, 162 aa, Homo sapiens
MSRESDVEAQQSHGSSACSQPHGSVTQSQGSSSQSQGISSSSTSTMPNSSQSSHSSSGTLSSLETVSTQELYSIPEDQEPEDQEPEEPTPAPWARLWALQDGFANLDEDMKRKFQDLLSEENESTALPQVLAQPSTSRKRPREGEAEGAETTKRPAVCAAVL

SEQ ID NO: 28560 - protein, 452 aa, Homo sapiens
MSRESDVEAQQSHGSSACSQPHGSVTQSQGSSSQSQGISSSSTSTMPNSSQSSHSSSGTLSSLETVSTQELYSIPEDQEPEDQEPEEPTPAPWARLWALQDGFANLVFVFFDLTVDDQSVYPKALRDEYIMSKTLGSGACGEVKLAFERKTCKKVAIKIISKRKFAIGSAREADPALNVETEIEILKKLNHPCIIKIKNFFDAEDYYIVLELMEGGELFDKVVGNKRLKEATCKLYFYQMLLAVQYLHENGIIHRDLKPENVLLSSQEEDCLIKITDFGHSKILGETSLMRTLCGTPTYLAPEVLVSVGTAGYNRAVDCWSLGVILFICLSGYPPFSEHRTQVSLKDQITSGKYNFIPEVWAEVSEKALDLVKKLLVVDPKARFTTEEALRHPWLQDEDMKRKFQDLLSEENESTALPQVLAQPSTSRKRPREGEAEGAETTKRPAVCAAVL

SEQ ID NO: 28561 - protein, 203 aa, Homo sapiens
MSRESDVEAQQSHGSSACSQPHGSVTQSQGSSSQSQGISSSSTSTMPNSSQSSHSSSGTLSSLETVSTQELYSIPEDQEPEDQEPEEPTPAPWARLWALQDGFANLECVNDNYWFGRDKSCEYCFDEPLLKRTDKYRTYSKKHFRIFREVGPKNSYIAYIEDHSGNGTFVNTELVGKGKRRPLNNNSEIALSLSRNKVVPVER

SEQ ID NO: 28562 - protein, 165 aa, Homo sapiens
MSRESDVEAQQSHGSSACSQPHGSVTQSQGSSSQSQGISSSSTSTMPNSSQSSHSSSGTLSSLETVSTQELYSIPEDQEPEDQEPEEPTPAPWARLWALQDGFANLECVNDNYWFGRDKSCEYCFDEPLLKRTDKYRTYSKKHFRIFREENLSCPYRIWFNFCLF

SEQ ID NO: 28563 - protein, 339 aa, Homo sapiens
MSRESDVEAQQSHGSSACSQPHGSVTQSQGSSSQSQGISSSSTSTMPNSSQSSHSSSGTLSSLETVSTQELYSIPEDQEPEDQEPEEPTPAPWARLWALQDGFANLECVNDNYWFGRDKSCEYCFDEPLLKRTDKYRTYSKKHFRIFREVGPKNSYIAYIEDHSGNGTFVNTELVGKGKRRPLNNNSEIALSLSRNKVFVFFDLTVDDQSVYPKALRDEYIMSKTLGSGACGEVKLAFERKTCKKVAIKIISKRKFAIGSAREADPALNVETEIEILKKLNHPCIIKIKNFFDAEDYYIVLELMEGGELFDKVVGNKRLKEATCKLYFYQMLLAVQMKT

SEQ ID NO: 28564 - protein, 289 aa, Homo sapiens
MSRESDVEAQQSHGSSACSQPHGSVTQSQGSSSQSQGISSSSTSTMPNSSQSSHSSSGTLSSLETVSTQELYSIPEDQEPEDQEPEEPTPAPWARLWALQDGFANLECVNDNYWFGRDKSCEYCFDEPLLKRTDKYRTYSKKHFRIFREVGPKNSYIAYIEDHSGNGTFVNTELVGKGKRRPLNNNSEIALSLSRNKVFVFFDLTVDDQSVYPKALRDEYIMSKTLGSGACGEVKLAFERKTCKKVAIKIISKRKFAIGSAREADPALNVETEIEILKKLNHDGRGRAV

SEQ ID NO: 28565 - protein, 586 aa, Homo sapiens
MSRESDVEAQQSHGSSACSQPHGSVTQSQGSSSQSQGISSSSTSTMPNSSQSSHSSSGTLSSLETVSTQELYSIPEDQEPEDQEPEEPTPAPWARLWALQDGFANLETESGHVTQSDLELLLSSDPPASASQSAGIRGVRHHPRPVCSLKCVNDNYWFGRDKSCEYCFDEPLLKRTDKYRTYSKKHFRIFREVGPKNSYIAYIEDHSGNGTFVNTELVGKGKRRPLNNNSEIALSLSRNKVFVFFDLTVDDQSVYPKALRDEYIMSKTLGSGACGEVKLAFERKTCKKVAIKIISKRKFAIGSAREADPALNVETEIEILKKLNHPCIIKIKNFFDAEDYYIVLELMEGGELFDKVVGNKRLKEATCKLYFYQMLLAVQYLHENGIIHRDLKPENVLLSSQEEDCLIKITDFGHSKILGETSLMRTLCGTPTYLAPEVLVSVGTAGYNRAVDCWSLGVILFICLSGYPPFSEHRTQVSLKDQITSGKYNFIPEVWAEVSEKALDLVKKLLVVDPKARFTTEEALRHPWLQDEDMKRKFQDLLSEENESTALPQVLAQPSTSRKRPREGEAEGAETTKRPAVCAAVL

SEQ ID NO: 28566 - protein, 140 aa, Homo sapiens
MSRESDVEAQQSHGSSACSQPHGSVTQSQGSSSQSQGISSSSTSTMPNSSQSSHSSSGTLSSLETVSTQELYSIPEDQEPEDQEPEEPTPAPWARLWALQDGFANLECVNDNYWFGRDKSCEYCFDEPLLEFRSYSFYLP

SEQ ID NO: 28567 - protein, 225 aa, Homo sapiens
MSRESDVEAQQSHGSSACSQPHGSVTQSQGSSSQSQGISSSSTSTMPNSSQSSHSSSGTLSSLETVSTQELYSIPEVLVSVGTAGYNRAVDCWSLGVILFICLSGYPPFSEHRTQVSLKDQITSGKYNFIPEVWAEVSEKALDLVKKLLVVDPKARFTTEEALRHPWLQDEDMKRKFQDLLSEENESTALPQVLAQPSTSRKRPREGEAEGAETTKRPAVCAAVL

SEQ ID NO: 28568 - protein, 514 aa, Homo sapiens
MSRESDVEAQQSHGSSACSQPHGSVTQSQGSSSQSQGISSSSTSTMPNSSQSSHSSSGTLSSLETVSTQELYSIPEDQEPEDQEPEEPTPAPWARLWALQDGFANLECVNDNYWFGRDKSCEYCFDEPLLKRTDKYRTYSKKHFRIFREVGPKNSYIAYIEDHSGNGTFVNTELVGKGKRRPLNNNSEIALSLSRNKVFVFFDLTVDDQSVYPKALRDEYIMSKTLGSGACGEVKLAFERKTCKKVAIKIISKRKFAIGSAREADPALNVETEIEILKKLNHPCIIKIKNFFDAEDYYIVLELMEGGELFDKVVGNKRLKEATCKLYFYQMLLAVQITDFGHSKILGETSLMRTLCGTPTYLAPEVLVSVGTAGYNRAVDCWSLGVILFICLSGYPPFSEHRTQVSLKDQITSGKYNFIPEVWAEVSEKALDLVKKLLVVDPKARFTTEEALRHPWLQDEDMKRKFQDLLSEENESTALPQVLAQPSTSRKRPREGEAEGAETTKRPAVCAAVL

SEQ ID NO: 28569 - protein, 322 aa, Homo sapiens
MSKTLGSGACGEVKLAFERKTCKKVAIKIISKRKFAIGSAREADPALNVETEIEILKKLNHPCIIKIKNFFDAEDYYIVLELMEGGELFDKVVGNKRLKEATCKLYFYQMLLAVQYLHENGIIHRDLKPENVLLSSQEEDCLIKITDFGHSKILGETSLMRTLCGTPTYLAPEVLVSVGTAGYNRAVDCWSLGVILFICLSGYPPFSEHRTQVSLKDQITSGKYNFIPEVWAEVSEKALDLVKKLLVVDPKARFTTEEALRHPWLQDEDMKRKFQDLLSEENESTALPQVLAQPSTSRKRPREGEAEGAETTKRPAVCAAVL

SEQ ID NO: 28570 - protein, 523 aa, Homo sapiens
MAAVGRVGSFGSSPPGLSSTYTGGPLGNEIASGNGGAAAGDDEDGQNLWSCILSEVSTRSRSKLPAGKNVLLLGEDGAGKTSLIRKIQGIEEYKKGRGLEYLYLNVHDEDRDDQTRCNVWILDGDLYHKGLLKFSLDAVSLKDTLVMLVVDMSKPWTALDSLQKWASVVREHVDKLKIPPEEMKQMEQKLIRDFQEYVEPGEDFPASPQRRNTASQEDKDDSVVLPLGADTLTHNLGIPVLVVCTKCDAISVLEKEHDYRDEHFDFIQSHIRKFCLQYGAALIYTSVKENKNIDLVYKYIVQKLYGFPYKIPAVVVEKDAVFIPAGWDNDKKIGILHENFQTLKAEDNFEDIITKPPVRKFVHEKEIMAEDDQVFLMKLQSLLAKQPPTAAGRPVDASPRVPGGSPRTPNRSVSSNVASVSPIPAGSKKIDPNMKAGATSEGVLANFFNSLLSKKTGSPGGPGVSGGSPAGGAGGGSSGLPPSTKKSGQKPVLDVHAELDRITRKPVTVSPTTPTSPTEGEAS

SEQ ID NO: 28571 - protein, 303 aa, Homo sapiens
MKGKEEKEGGARLGAGGGSPEKSPSAQELKEQGNRLFVGRKYPEAAACYGRAITRNPLVAVYYTNRALCYLKMQQHEQALADCRRALELDGQSVKAHFFLGQCQLEMESYDEAIANLQRAYSLAKEQRLNFGDDIPSALRIAKKKRWNSIEERRIHQESELHSYLSRLIAAERERELEECQRNHEGDEDDSHVRAQQACIEAKHDKYMADMDELFSQVDEKRKKRDIPDYLCGKISFELMREPCITPSGITYDRKDIEEHLQRVGHFDPVTRSPLTQEQLIPNLAMKEVIDAFISENGWVEDY

SEQ ID NO: 28572 - protein, 231 aa, Homo sapiens
MQQHEQALADCRRALELDGQSVKAHFFLGQCQLEMESYDEAIANLQRAYSLAKEQRLNFGDDIPSALRIAKKKRWNSIEERRIHQESELHSYLSRLIAAERERELEECQRNHEGDEDDSHVRAQQACIEAKHDKYMADMDELFSQVDEKRKKRDIPDYLCGKISFELMREPCITPSGITYDRKDIEEHLQRVGHFDPVTRSPLTQEQLIPNLAMKEVIDAFISENGWVEDY

SEQ ID NO: 28573 - protein, 1793 aa, Homo sapiens
MLSFHFWKSRGQPTDAASSVADGIQTPRCCRRCQANNWTGQLSYRTLATVSAGAAAPQPQTTSTASSRSLPTSLRLAAAPPQGLKNWEVVAAVAAVPTALGPVQIRGTLLRATLQPLRGQRRTQDFPSDHHCLFLSLKPGQGLIMEAAPPELNSKARQAEVGDGVSSAQDSQELKQQLWPLPKPSASSQREAKYVDMCASAEVQRESPQTMKLTLGHCPGGQRASRSPKEKAQDEPSSKTPSPQNNPASSQLSRSQHSASEEGGNFSSSSSSSPMNKAEEDGLSKMEDSTTSTGALATSSSSLGFESESGESEGCQAVGGEGEKISGGGGGGKGGGGGGAGDGTECRDIIAKSQGSRDPPKVEEAHYITTHEIQLSEVEQDMDFDVGLASRWDFEDNNVIYSFVDYASFGGSDETPGDITSLTEEDDDNSCYLSTTPSTNTTRTPSPTSSDLARPNAGRSGRDTSSTEVGSGPSDSGPTPPPTGPGTAPLTEPLPETPEAASGAAAAAASSCGSAASQILLSIKPASRAINEPSNVRAKQNIIYAAKHEGDMSLRVSTAAEHNSSSLKQNPAAAVAQDHAKKFIAVPARLQTRCGAIRAKELVDYSSGASSAVSELDDADKEVRNLTSRAFRSLAYPYFEALNISSRESSTTLSEVGFGRWSTFLDLKCGGVGARVEQSLLRSSAASVAAGLRKGSGARATADQLYIQSKKSQTKALEFVVSKVEGEIKHVETPLCFQKQVQTGSRVVTLLEPLNVRSESKASSAPGPGRATKGPGKGPGSAYTDDGSETSEGSKPTSRADGPQKSKFASSLLKNVISKKMQREHEFKMERGEVMDTSHHLSGTSKETEGARGSERQRERGLQRQSSRHSEAGSEYTVVSMSDAGGEGSVAGSKSPVFKASTPRERNAGPGRNFTDGHTEVCEIKKSASETVKGIFLRSQNSAFRSWKEKEAEKREEQAPIGKLKLPKGGDWRADLGEISASKNTIMSRLFVPNIQQTPKDKQPRKQATKYPAAQATSTAVIRPKAPEIKIRLGSVQQPSSDFNIAKLLTPKLAGGSASNLFKTIEDNSRAQQKLFRGDNLEKVPHFQVRDIRDKSKAQGPLHQVRDVRKLIKGSGDSSDKGSVTPEQGLTGPKPRQLSAAAGGSGSLSPMVITCQAVVNQREDSMDREPRESMGKGGGSRVLNSSSPEGTVLVHRASGRLPVATIAPNKPEQGSYLPVLKIVSKASTQKTPEKLKEEEVKEEGKATKPARNALEKLTAAVRSMEELYSFNRNEWKRKSDPLPMMMDSHVLSLIASEEREGVVVADGDHDKLSKRLGEVEERGTGNKAGVVLRGAPIERLQRRNSNPSAESVSARAAAFENLARERPRSLYIPPVHKDVERTQPLQPLPPLPSNRNVFTVSASSIQKTGGVAGKFPQGPSPESPSAAKGIKSQGLRSLKISPATRAPPDEVTNRKSGSNLEKSNSDCENYLTIPLKGSSAAGELLSRPGASREGPPNSSAATLCSLPPLSARSQVPSSSKGSQVSGTSRPAWRTKPDNPRETVAAPPGPQSPEHPPTTIYHQPPLPFTLQGAQPQVLCFSPPSMPAPAPAASAPVPTDPFQQAQPQQTQRKMLLDVTTGQYYLVDTPVQPMTRRLFDPETGQYVDVPMTSQQQAVAPMSISVPPLALSPGAYGPTYMIYPGFLPTVLPTNALQPTPIARAPRGSELSPMVAEPSSKEAAATFTEAPYFMASGQSPASSTSSAPAATSQLLGAKAFAQLHGKPVISITSQPLGPRIIAPPSFDGTTMSFVVEHR

SEQ ID NO: 28574 - protein, 573 aa, Homo sapiens
MLRLPTVFRQMRPVSRVLAPHLTRAYAKDVKFGADARALMLQGVDLLADAVAVTMGPKGRTVIIEQSWGSPKVTKDGVTVAKSIDLKDKYKNIGAKLVQDVANNTNEEAGDGTTTATVLARSIAKEGFEKISKGANPVEIRRGVMLAVDAVIAELKKQSKPVTTPEEIAQVATISANGDKEIGNIISDAMKKVGRKGVITVKDGKTLNDELEIIEGMKFDRGYISPYFINTSKGQKCEFQDAYVLLSEKKISSIQSIVPALEIANAHRKPLVIIAEDVDGEALSTLVLNRLKVGLQVVAVKAPGFGDNRKNQLKDMAIATGGAVFGEEGLTLNLEDVQPHDLGKVGEVIVTKDDAMLLKGKGDKAQIEKRIQEIIEQLDVTTSEYEKEKLNERLAKLSDGVAVLKVGGTSDVEVNEKKDRVTDALNATRAAVEEGIVLGGGCALLRCIPALDSLTPANEDQKIGIEIIKRTLKIPAMTIAKNAGVEGSLIVEKIMQSSSEVGYDAMAGDFVNMVEKGIIDPTKVVRTALLDAAGVASLLTTAEVVVTEIPKEEKDPGMGAMGGMGGGMGGGMF

SEQ ID NO: 28575 - protein, 158 aa, Homo sapiens
MLRLPTVFRQMRPVSRVLAPHLTRAYAKDVKFGADARALMLQGVDLLADAVAVTMGPKGRTVIIEQSWGSPKVTKDGVTVAKSIDLKDKYKNIGAKLVQDVANNTNEEAGDGTTTATVLARSIAKEGFEKISKGANPVEIRRGRNVCCHHSVLNFSVL

SEQ ID NO: 28576 - protein, 199 aa, Homo sapiens
MACNIPNQRQRTLSTTGEALYEILGLHKGASNEEIKKTYRKLALKHHPDKNPDDPAATEKFKEINNAHAILTDISKRSIYDKYGSLGLYVAEQFGDENVNTYFMLSSWWAKALFVIVGLLTGCYFCCCLCCCCNCCCGHCRPESSVPEEDFYVSPEDLEEQIKSDMEKDVDFPVFLQPTNANEKTQLIKEGSRSYCTDS

SEQ ID NO: 28577 - protein, 602 aa, Homo sapiens
MHSKVTIICIRFLFWFLLLCMLIGKSHTEDDIIIATKNGKVRGMNLTVFGGTVTAFLGIPYAQPPLGRLRFKKPQSLTKWSDIWNATKYANSCCQNIDQSFPGFHGSEMWNPNTDLSEDCLYLNVWIPAPKPKNATVLIWIYGGGFQTGTSSLHVYDGKFLARVERVIVVSMNYRVGALGFLALPGNPEAPGNMGLFDQQLALQWVQKNIAAFGGNPKSVTLFGESAGAASVSLHLLSPGSHSLFTRAILQSGSFNAPWAVTSLYEARNRTLNLAKLTGCSRENETEIIKCLRNKDPQEILLNEAFVVPYGTPLSVNFGPTVDGDFLTDMPDILLELGQFKKTQILVGVNKDEGTAFLVYGAPGFSKDNNSIITRKEFQEGLKIFFPGVSEFGKESILFHYTDWVDDQRPENYREALGDVVGDYNFICPALEFTKKFSEWGNNAFFYYFEHRSSKLPWPEWMGVMHGYEIEFVFGLPLERRDNYTKAEEILSRSIVKRWANFAKYGNPNETQNNSTSWPVFKSTEQKYLTLNTESTRIMTKLRAQQCRFWTSFFPKVLEMTGNIDEAEWEWKAGFHRWNNYMMDWKNQFNDYTSKKESCVGL

SEQ ID NO: 28578 - protein, 494 aa, Homo sapiens
MAAAAECDVVMAATEPELLDDQEAKREAETFKEQGNAYYAKKDYNEAYNYYTKAIDMCPKNASYYGNRAATLMMLGRFREALGDAQQSVRLDDSFVRGHLREGKCHLSLGNAMAACRSFQRALELDHKNAQAQQEFKNANAVMEYEKIAETDFEKRDFRKVVFCMDRALEFAPACHRFKILKAECLAMLGRYPEAQSVASDILRMDSTNADALYVRGLCLYYEDCIEKAVQFFVQALRMAPDHEKACIACRNAKALKAKKEDGNKAFKEGNYKLAYELYTEALGIDPNNIKTNAKLYCNRGTVNSKLRKLDDAIEDCTNAVKLDDTYIKAYLRRAQCYMDTEQYEEAVRDYEKVYQTEKTKEHKQLLKNAQLELKKSKRKDYYKILGVDKNASEDEIKKAYRKRALMHHPDRHSGASAEVQKEEEKKFKEVGEAFTILSDPKKKTRYDSGQDLDEEGMNMGDFDPNNIFKAFFGGPGGFSFEASGPGNFFFQFG

SEQ ID NO: 28579 - protein, 438 aa, Homo sapiens
MCPKNASYYGNRAATLMMLGRFREALGDAQQSVRLDDSFVRGHLREGKCHLSLGNAMAACRSFQRALELDHKNAQAQQEFKNANAVMEYEKIAETDFEKRDFRKVVFCMDRALEFAPACHRFKILKAECLAMLGRYPEAQSVASDILRMDSTNADALYVRGLCLYYEDCIEKAVQFFVQALRMAPDHEKACIACRNAKALKAKKEDGNKAFKEGNYKLAYELYTEALGIDPNNIKTNAKLYCNRGTVNSKLRKLDDAIEDCTNAVKLDDTYIKAYLRRAQCYMDTEQYEEAVRDYEKVYQTEKTKEHKQLLKNAQLELKKSKRKDYYKILGVDKNASEDEIKKAYRKRALMHHPDRHSGASAEVQKEEEKKFKEVGEAFTILSDPKKKTRYDSGQDLDEEGMNMGDFDPNNIFKAFFGGPGGFSFEASGPGNFFFQFG

SEQ ID NO: 28580 - protein, 337 aa, Homo sapiens
MEQPWPPPGPWSLPRAEGEAEEESDFDVFPSSPRCPQLPGGGAQMYSHGIELACQKQKEFVKSSVACKWNLAEAQQKLGSLALHNSESLDQEHAKAQTAVSELRQREEEWRQKEEALVQREKMCLWSTDAISKDVFNKSFINQDKRKDTEDEDKSESFMQKYEQKIRHFGMLSRWDDSQRFLSDHPYLVCEETAKYLILWCFHLEAEKKGALMEQIAHQAVVMQFIMEMAKNCNVDPRGCFRLFFQKAKAEEEGYFEAFKNELEAFKSRVRLYSQSQSFQPMTVQNHVPHSGVGSIGLLESLPQNPDYLQYSISTALCSLNSVVHKEDDEPKMMDTV

SEQ ID NO: 28581 - protein, 558 aa, Homo sapiens
MPWRRRRNRVSALEGGREEEAPPEAAAVPPALLTSPQQTEAAAERILLRGIFEIGRDSCDVVLSERALRWRPIQPERPAGDSKYDLLCKEEFIELKDIFSVKLKRRCSVKQQRSGTLLGITLFICLKKEQNKLKNSTLDLINLSEDHCDIWFRQFKKILAGFPNRPKSLKILLNPQSHKKEATQVYYEKVEPLLKLAGIKTDVTIMEYEGHALSLLKECELQGFDGGHRKPLFAIHWSVQRLFTGMQTLEPSVVCVGGDGSASEVAHALLLRAQKNAGMETDRILTPVRAQLPLGLIPAGSTNVLAHSLHGVPHVITATLHIIMGHVQLVDVCTFSTAGKLLRFGFSAMFGFGGRTLALAEKYRWMSPNQRRDFAVVKALAKLKAEDCEISFLPFNSSDDVQERRAQGSPKSDCNDQWQMIQGQFLNVSIMAIPCLCSVAPRGLAPNTRLNNGSMALIIARNTSRPEFIKHLKRYASVKNQFNFPFVETYTVEEVKVHPRNNTGGYNPEEEEDETASENCFPWNVDGDLMEVASEVHIRLHPRLISLYGGSMEEMIPK

SEQ ID NO: 28582 - protein, 532 aa, Homo sapiens
MPWRRRRNRVSALEGGREEEAPPEAAAVPPALLTSPQQTEAAAERILLRGIFEIGRDSCDVVLSERALRWRPIQPERPAGDSKYDLLCKEEFIELKDIFSVKLKRRCSVKQQRSGTLLGITLFICLKKEQNKLKNSTLDLINLSEDHCDIWFRQFKKILAGFPNRPKSLKILLNPQSHKKEATQVYYEKVEPLLKLAGIKTDVTIMEYEGHALSLLKECELQGFDGVVCVGGDGSASEVAHALLLRAQKNAGMETDRILTPVRAQLPLGLIPAGSTNVLAHSLHGVPHVITATLHIIMGHVQLVDVCTFSTAGKLLRFGFSAMFGFGGRTLALAEKYRWMSPNQRRDFAVVKALAKLKAEDCEISFLPFNSSDDVQERRAQGSPKSDCNDQWQMIQGQFLNVSIMAIPCLCSVAPRGLAPNTRLNNGSMALIIARNTSRPEFIKHLKRYASVKNQFNFPFVETYTVEEVKVHPRNNTGGYNPEEEEDETASENCFPWNVDGDLMEVASEVHIRLHPRLISLYGGSMEEMIPK

SEQ ID NO: 28583 - protein, 463 aa, Homo sapiens
MPWRRRRNRVSALEGGREEEAPPEAAAVPPALLTSPQQTEAAAERILLRGIFEIGRDSCDVVLSERALRWRPIQPERPAGDSKYDLLCKEEFIELKDIFSVKLKRRCSVKQQRSGTLLGITLFICLKKEQNKLKNSTLDLINLSEDHCDIWFRQFKKILAGFPNRPKSLKILLNPQSHKKEATQVYYEKVEPLLKLAGIKTDVTRSTNVLAHSLHGVPHVITATLHIIMGHVQLVDVCTFSTAGKLLRFGFSAMFGFGGRTLALAEKYRWMSPNQRRDFAVVKALAKLKAEDCEISFLPFNSSDDVQERRAQGSPKSDCNDQWQMIQGQFLNVSIMAIPCLCSVAPRGLAPNTRLNNGSMALIIARNTSRPEFIKHLKRYASVKNQFNFPFVETYTVEEVKVHPRNNTGGYNPEEEEDETASENCFPWNVDGDLMEVASEVHIRLHPRLISLYGGSMEEMIPK

SEQ ID NO: 28584 - protein, 419 aa, Homo sapiens
MPWRRRRNRVSALEGGREEEAPPEAAAVPPALLTSPQQTEAAAERILLRGIFEIGRDSCDVVLSERALRWRPIQPERPAGDSKYDLLCKEEFIELKDIFSVKLKRRCSVKQQRSGTLLGITLFICLKKEQNKLKNSTLDLINLSEDHCDIWFRQFKKILAGSTNVLAHSLHGVPHVITATLHIIMGHVQLVDVCTFSTAGKLLRFGFSAMFGFGGRTLALAEKYRWMSPNQRRDFAVVKALAKLKAEDCEISFLPFNSSDDVQERRAQGSPKSDCNDQWQMIQGQFLNVSIMAIPCLCSVAPRGLAPNTRLNNGSMALIIARNTSRPEFIKHLKRYASVKNQFNFPFVETYTVEEVKVHPRNNTGGYNPEEEEDETASENCFPWNVDGDLMEVASEVHIRLHPRLISLYGGSMEEMIPK

SEQ ID NO: 28585 - protein, 378 aa, Homo sapiens
MPWRRRRNRVSALEGGREEEAPPEAAAVPPALLTSPQQTEAAAERILLRGIFEIGRDSCDVVLSERALRWRPIQPERPAGDSKYDLLCKEEFIELKDIFSVKLKRRCSVKQQRSGTLLGITLFICLKKEQNKLKNSTLDLINLSEDHCDIWFRQFKKILAGFPNRPKSLKILLNPQSHKKEATQVYYEKVEPLLKLAGIKTDVTIMEYEGHALSLLKECELQGFDGVVCVGGDGSASEVAHALLLRAQKNAGMETDRILTPVRAQLPLGLIPAGSTNVLAHSLHGVPHVITATLHIIMGHVQLVDVCTFSTAGKLLRFGFSAMFGFGGRTLALAEKYRWMSPNQRRDFAVVKALAKLKAEDCEISFLPFNSSDDVQER

SEQ ID NO: 28586 - protein, 217 aa, Homo sapiens
MPWRRRRNRVSALEGGREEEAPPEAAAVPPALLTSPQQTEAAAERILLRGIFEIGRDSCDVVLSERALRWRPIQPERPAGDSKYDLLCKEEFIELKDIFSVKLKRRCSVKQQRSGTLLGITLFICLKKEQNKLKNSTLDLINLSEDHCDIWFRQFKKILAGFPNRPKSLKILLNPQSHKKEATQVYYEKVEPLLKLAGIKTDVTMLSVLVEMDLLAK

SEQ ID NO: 28587 - protein, 173 aa, Homo sapiens
MPWRRRRNRVSALEGGREEEAPPEAAAVPPALLTSPQQTEAAAERILLRGIFEIGRDSCDVVLSERALRWRPIQPERPAGDSKYDLLCKEEFIELKDIFSVKLKRRCSVKQQRSGTLLGITLFICLKKEQNKLKNSTLDLINLSEDHCDIWFRQFKKILAVLSVLVEMDLLAK

SEQ ID NO: 28588 - protein, 514 aa, Homo sapiens
MPWRRRRNRVSALEGGREEEAPPEAAAVPPALLTSPQQTEAAAERILLRGIFEIGRDSCDVVLSERALRWRPIQPERPAGDSKYDLLCKEEFIELKDIFSVKLKRRCSVKQQRSGTLLGITLFICLKKEQNKLKNSTLDLINLSEDHCDIWFRQFKKILAVMEYEGHALSLLKECELQGFDGGHRKPLFAIHWSVQRLFTGMQTLEPSVVCVGGDGSASEVAHALLLRAQKNAGMETDRILTPVRAQLPLGLIPAGSTNVLAHSLHGVPHVITATLHIIMGHVQLVDVCTFSTAGKLLRFGFSAMFGFGGRTLALAEKYRWMSPNQRRDFAVVKALAKLKAEDCEISFLPFNSSDDVQERRAQGSPKSDCNDQWQMIQGQFLNVSIMAIPCLCSVAPRGLAPNTRLNNGSMALIIARNTSRPEFIKHLKRYASVKNQFNFPFVETYTVEEVKVHPRNNTGGYNPEEEEDETASENCFPWNVDGDLMEVASEVHIRLHPRLISLYGGSMEEMIPK

SEQ ID NO: 28589 - protein, 546 aa, Homo sapiens
MEQRRVTDFFARRRPGPPRIAPPKLACRTPSPARPALRAPASATSGSRKRARPPAAPGRDQARPPARRRLRLSVDEVSSPSTPEAPDIPACPSPGQKIKKSTPAAGQPPHLTSAQDQDTISELASCLQRARELGARVRALKASAQDAGESCTPEAEGRPEEPCGEKAPAYQRFHALAQPGLPGLVLPYKYQVLAEMFRSMDTIVGMLHNRSETPTFAKVQRGVQDMMRRRFEECNVGQIKTVYPASYRFRQERSVPTFKDGTRRSDYQLTIEPLLEQEADGAAPQLTASRLLQRRQIFSQKLVEHVKEHHKAFLASLSPAMVVPEDQLTRWHPRFNVDEVPDIEPAALPQPPATEKLTTAQEVLARARNLISPRMEKALSQLALRSAAPSSPGSPRPALPATPPATPPAASPSALKGVSQDLLERIRAKEAQKQLAQMTRCPEQEQRLQRLERLPELARVLRSVFVSERKPALSMEVACARMVGSCCTIMSPGEMEKHLLLLSELLPDWLSLHRIRTDTYVKLDKAADLAHITARLAHQTRAEEGL

SEQ ID NO: 28590 - protein, 201 aa, Homo sapiens
MTQRAGAAMLPSALLLLCVPGCLTVSGPSTVMGAVGESLSVQCRYEEKYKTFNKYWCRQPCLPIWHEMVETGGSEGVVRSDQVIITDHPGDLTFTVTLENLTADDAGKYRCGIATILQEDGLSGFLPDPFFQVQVLVSSASSTENSVKTPASPTRPSQCQGSLPSSTCFLLLPLLKVPLLLSILGAILWVNRPWRTPWTES

SEQ ID NO: 28591 - protein, 153 aa, Homo sapiens
MTQRAGAAMLPSALLLLCVPGCLTVSGPSTVMGAVGESLSVQCRYEEKYKTFNKYWCRQPCLPIWHEMVETGGSEGVVRSDQVIITDHPGDLTFTVTLENLTADDAGKYRCGIATILQEDGLSGFLPDPFFQVQVLVSSGPCPAAPASCFSHS

SEQ ID NO: 28592 - protein, 1287 aa, Homo sapiens
MHPDLGPLCTLLYVTLTILCSSVSSDLAPYFTSEPLSAVQKLGGPVVLHCSAQPVTTRISWLHNGKTLDGNLEHVKIHQGTLTILSLNSSLLGYYQCLANNSIGAIVSGPATVSVAVLGDFGSSTKHVITAEEKSAGFIGCRVPESNPKAEVRYKIRGKWLEHSTENYLILPSGNLQILNVSLEDKGSYKCAAYNPVTHQLKVEPIGRKLLVSRPSSDDVHILHPTHSQALAVLSRSPVTLECVVSGVPAPQVYWLKDGQDIAPGSNWRRLYSHLATDSVDPADSGNYSCMAGNKSGDVKYVTYMVNVLEHASISKGLQDQIVSLGATVHFTCDVHGNPAPNCTWFHNAQPIHPSARHLTAGNGLKISGVTVEDVGMYQCVADNGIGFMHSTGRLEIENDGGFKPVIITAPVSAKVADGDFVTLSCNASGLPVPVIRWYDSHGLITSHPSQVLRSKSRKSQLSRPEGLNLEPVYFVLSQAGASSLHIQAVTQEHAGKYICEAANEHGTTQAEASLMVVPFETNTKAETVTLPDAAQNDDRSKRDGSETGLLSSFPVKVHPSAVESAPEKNASGISVPDAPIILSPPQTHTPDTYNLVWRAGKDGGLPINAYFVKYRKLDDGVGMLGSWHTVRVPGSENELHLAELEPSSLYEVLMVARSAAGEGQPAMLTFRTSKEKTASSKNTQASSPPVGIPKYPVVSEAANNNFGVVLTDSSRHSGVPEAPDRPTISTASETSVYVTWIPRANGGSPITAFKVEYKRMRTSNWLVAAEDIPPSKLSVEVRSLEPGSTYKFRVIAINHYGESFRSSASRPYQVVGFPNRFSSRPITGPHIAYTEAVSDTQIMLKWTYIPSSNNNTPIQGFYIYYRPTDSDNDSDYKRDVVEGSKQWHMIGHLQPETSYDIKMQCFNEGGESEFSNVMICETKVKRVPGASEYPVKDLSTPPNSLGSGGNVGPATSPARSSDMLYLIVGCVLGVMVLILMVFIAMCLWKNRQQNTIQKYDPPGYLYQGSDMNGQMVDYTTLSGASQINGNVHGGFLTNGGLSSGYSHLHHKVPNAVNGIVNGSLNGGLYSGHSNSLTRTHVDFEHPHHLVNGGGMYTAVPQIDPLECVNCRNCRNNNRCFTKTNSTFSSSPPPVVPVVAPYPQDGLEMKPLSHVKVPVCLTSAVPDCGQLPEESVKDNVEPVPTQRTCCQDIVNDVSSDGSEDPAEFSRGQEGMINLRIPDHLQLAKSCVWEGDSCAHSETEINIVSWNALILPPVPEGCAEKTMWSPPGIPLDSPTEVLQQPRET

SEQ ID NO: 28593 - protein, 1264 aa, Homo sapiens
MHPDLGPLCTLLYVTLTILCSSVSSDLAPYFTSEPLSAVQKLGGPVVLHCSAQPVTTRISWLHNGKTLDGNLEHVKIHQGTLTILSLNSSLLGYYQCLANNSIGAIVSGPATVSVAVLGDFGSSTKHVITAEEKSAGFIGCRVPESNPKAEVRYKIRGKWLEHSTENYLILPSGNLQILNVSLEDKGSYKCAAYNPVTHQLKVEPIGRKLLVSRPSSDDVHILHPTHSQALAVLSRSPVTLECVVSGVPAPQVYWLKDGQDIAPGSNWRRLYSHLATDSVDPADSGNYSCMAGNKSGDVKYVTYMVNVLEHASISKGLQDQIVSLGATVHFTCDVHGNPAPNCTWFHNAQPIHPSARHLTAGNGLKISGVTVEDVGMYQCVADNGIGFMHSTGRLEIENDGGFKPVIITAPVSAKVADGDFVTLSCNASGLPVPVIRWYDSHGLITSHPSQVLRSKSRKSQLSRPEGLNLEPVYFVLSQAGASSLHIQAVTQEHAGKYICEAANEHGTTQAEASLMVVPFETNTKAETVTLPDAAQNDDRSKRDGSETGLLSSFPVKVHPSAVESAPEKNASGISVPDAPIILSPPQTHTPDTYNLVWRAGKDGGLPINAYFVKYRKLDDGVGMLGSWHTVRVPGSENELHLAELEPSSLYEVLMVARSAAGEGQPAMLTFRTSKEKTASSKNTQASSPPVGIPKYPVVSEAANNNFGVVLTDSSRHSGVPEAPDRPTISTASETSVYVTWIPRANGGSPITAFKVEYKRMRTSNWLVAAEDIPPSKLSVEVRSLEPGSTYKFRVIAINHYGESFRSSASRPYQVVGFPNRFSSRPITGPHIAYTEAVSDTQIMLKWTYIPSSNNNTPIQGFYIYYRPTDSDNDSDYKRDVVEGSKQWHMIGHLQPETSYDIKMQCFNEGGESEFSNVMICETKVKRVPGASEYPVKDLSTPPNSLGSGGNVGPATSPARSSDMLYLIVGCVLGVMVLILMVFIAMCLWKNRQQNTIQKYDPPGYLYQGSDMNGQMVDYTTLSGASQINGNVHGGFLTNGGLSSGYSHLHHKVPNAVNGIVNGSLNGGLYSGHSNSLTRTHVDFEHPHHLVNGGGMYTAVPQIDPLECVNCRNCRNNNRCFTKTNSTFSSSPPPVVPVVAPYPQDGLEMKPLSHVKVPVCLTSAVPDCGQLPEESVKDNVEPVPTQRTCCQDIVNDVSSDGSEDPAEFSRGDSCAHSETEINIVSWNALILPPVPEGCAEKTMWSPPGIPLDSPTEVLQQPRET

SEQ ID NO: 28594 - protein, 147 aa, Homo sapiens
MEDDEEETTASTLRGKPRPPPVSAQSAFSYIPPRRLDPKEHSYYYRPARTGIISLYDCIFKRRLDYDQKLHRDDREHAKSLGLHVNEEEQERPVGVLTSSVYGKRINQPIEPLNRDFGRANHVQADFYRKNDIPSLKEPGFGHIAPS

SEQ ID NO: 28595 - protein, 127 aa, Homo sapiens
MKRIFYKHRKRRAPVFKEPEHGYQSLPELVLVPAQPLVCLGDYRTPDPGGLFPWSLRLMMPGAWTKLPGDGGSVPEKGKHGILGAQGQEHPGLNVSSPFSSPWTCYLSGHQPQNNNSPELQVKEILL

SEQ ID NO: 28596 - protein, 516 aa, Homo sapiens
MEPAVSLAVCALLFLLWVRLKGLEFVLIHQRWVFVCLFLLPLSLIFDIYYYVRAWVVFKLSSAPRLHEQRVRDIQKQVREWKEQGSKTFMCTGRPGWLTVSLRVGKYKKTHKNIMINLMDILEVDTKKQIVRVEPLVTMGQVTALLTSIGWTLPVLPELDDLTVGGLIMGTGIESSSHKYGLFQHICTAYELVLADGSFVRCTPSENSDLFYAVPWSCGTLGFLVAAEIRIIPAKKYVKLRFEPVRGLEAICAKFTHESQRQENHFVEGLLYSLDEAVIMTGVMTDEAEPSKLNSIGNYYKPWFFKHVENYLKTNREGLEYIPLRHYYHRHTRSIFWELQDIIPFGNNPIFRYLFGWMVPPKISLLKLTQGETLRKLYEQHHVVQDMLVPMKCLQQALHTFQNDIHVYPIWLCPFILPSQPGLVHPKGNEAELYIDIGAYGEPRVKHFEARSCMRQLEKFVRSVHGFQMLYADCYMNREEFWEMFDGSLYHKLREKLGCQDAFPEVYDKICKAARH

SEQ ID NO: 28597 - protein, 475 aa, Homo sapiens
MGAGEQNRQSAHCVQGICGYLEGDEEGEEGEVRSTQVREWKEQGSKTFMCTGRPGWLTVSLRVGKYKKTHKNIMINLMDILEVDTKKQIVRVEPLVTMGQVTALLTSIGWTLPVLPELDDLTVGGLIMGTGIESSSHKYGLFQHICTAYELVLADGSFVRCTPSENSDLFYAVPWSCGTLGFLVAAEIRIIPAKKYVKLRFEPVRGLEAICAKFTHESQRQENHFVEGLLYSLDEAVIMTGVMTDEAEPSKLNSIGNYYKPWFFKHVENYLKTNREGLEYIPLRHYYHRHTRSIFWELQDIIPFGNNPIFRYLFGWMVPPKISLLKLTQGETLRKLYEQHHVVQDMLVPMKCLQQALHTFQNDIHVYPIWLCPFILPSQPGLVHPKGNEAELYIDIGAYGEPRVKHFEARSCMRQLEKFVRSVHGFQMLYADCYMNREEFWEMFDGSLYHKLREKLGCQDAFPEVYDKICKAARH

SEQ ID NO: 28598 - protein, 172 aa, Homo sapiens
MASNFKKANMASSSQRKRMSPKPELTEEQKQEIREAFDLFDADGTGTIDVKELKVAMRALGFEPKKEEIKKMISEIDKEGTGKMNFGDFLTVMTQKMSEKDTKEEILKAFKLFDDDETGKISFKNLKRVAKELGENLTDEELQEMIDEADRDGDGEVSEQEFLRIMKKTSLY

SEQ ID NO: 28599 - protein, 393 aa, Homo sapiens
MRTLFNLLWLALACSPVHTTLSKSDAKKAASKTLLEKSQFSDKPVQDRGLVVTDLKAESVVLEHRSYCSAKARDRHFAGDVLGYVTPWNSHGYDVTKVFGSKFTQISPVWLQLKRRGREMFEVTGLHDVDQGWMRAVRKHAKGLHIVPRLLFEDWTYDDFRNVLDSEDEIEELSKTVVQVAKNQHFDGFVVEVWNQLLSQKRVGLIHMLTHLAEALHQARLLALLVIPPAITPGTDQLGMFTHKEFEQLAPVLDGFSLMTYDYSTAHQPGPNAPLSWVRACVQVLDPKSKWRSKILLGLNFYGMDYATSKDAREPVVGARYIQTLKDHRPRMVWDSQASEHFFEYKKSRSGRHVVFYPTLKSLQVRLELARELGVGVSIWELGQGLDYFYDLL

SEQ ID NO: 28600 - protein, 418 aa, Homo sapiens
MRTLFNLLWLALACSPVHTTLSKSDAKKAASKTLLEKVKFCSCCPGWSAMARSWLTATSATQSQFSDKPVQDRGLVVTDLKAESVVLEHRSYCSAKARDRHFAGDVLGYVTPWNSHGYDVTKVFGSKFTQISPVWLQLKRRGREMFEVTGLHDVDQGWMRAVRKHAKGLHIVPRLLFEDWTYDDFRNVLDSEDEIEELSKTVVQVAKNQHFDGFVVEVWNQLLSQKRVGLIHMLTHLAEALHQARLLALLVIPPAITPGTDQLGMFTHKEFEQLAPVLDGFSLMTYDYSTAHQPGPNAPLSWVRACVQVLDPKSKWRSKILLGLNFYGMDYATSKDAREPVVGARYIQTLKDHRPRMVWDSQASEHFFEYKKSRSGRHVVFYPTLKSLQVRLELARELGVGVSIWELGQGLDYFYDLL

SEQ ID NO: 28601 - protein, 362 aa, Homo sapiens
MRTLFNLLWLALACSPVHTTLSKSDAKKAASKTLLEKSQFSDKPVQDRGLVVTDLKAESVVLEHRSYCSAKARDRHFAGDVLGYVTPWNSHGYDVTKVFGSKFTQISPVWLQLKRRGREMFEVTGLHDVDQGWMRAVRKHAKGLHIVPRLLFEDWTYDDFRNVLDSEDEIEELSKTVVQVAKNQHFDGFVVEVWNQLLSQKRVTDQLGMFTHKEFEQLAPVLDGFSLMTYDYSTAHQPGPNAPLSWVRACVQVLDPKSKWRSKILLGLNFYGMDYATSKDAREPVVGARYIQTLKDHRPRMVWDSQASEHFFEYKKSRSGRHVVFYPTLKSLQVRLELARELGVGVSIWELGQGLDYFYDLL

SEQ ID NO: 28602 - protein, 845 aa, Homo sapiens
MGSWALLWPPLLFTGLLVRPPGTMAQAQYCSVNKDIFEVEENTNVTEPLVDIHVPEGQEVTLGALSTPFAFRIQGNQLFLNVTPDYEEKSLLEAQLLCQSGGTLVTQLRVFVSVLDVNDNAPEFPFKTKEIRVEEDTKVNSTVIPETQLQAEDRDKDDILFYTLQEMTAGASDYFSLVSVNRPALRLDRPLDFYERPNMTFWLLVRDTPGENVEPSHTATATLVLNVVPADLRPPWFLPCTFSDGYVCIQAQYHGAVPTGHILPSPLVLRPGPIYAEDGDRGINQPIIYSIFRGNVNGTFIIHPDSGNLTVARSVPSPMTFLLLVKGQQADLARYSVTQVTVEAVAAAGSPPRFPQRLYRGTVARGAGAGVVVKDAAAPSQPLRIQAQDPEFSDLNSAITYRITNHSHFRMEGEVVLTTTTLAQAGAFYAEVEAHNTVTSGTATTVIEIQVSEQEPPSTDVPPSPEAGGTTGPWTSTTSEVPRPPEPSQGPSTTSSGGGTGPHPPSGTTLRPPTSSTPGGPPGAENSTSHQPATPGGDTAQTPKPGTSQPMPPGVGTSTSHQPATPSGGTAQTPEPGTSQPMPPSMGTSTSHQPATPGGGTAQTPEAGTSQPMPPGMGTSTSHQPTTPGGGTAQTPEPGTSQPMPLSKSTPSSGGGPSEDKRFSVVDMAALGGVLGALLLLALLGLAVLVHKHYGPRLKCCCGKAPEPQPQGFDNQAFLPDHKANWAPVPSPTHDPKPAEAPMPAEPAPPGPASPGGAPEPPAAARAGGSPTAVRSILTKERRPEGGYKAVWFGEDIGTEADVVVLNAPTLDVDGASDSGSGDEGEGAGRGGGPYDAPGGDDSYI

SEQ ID NO: 28603 - protein, 651 aa, Homo sapiens
MGSWALLWPPLLFTGLLVRPPGTMAQAQYCSVNKDIFEVEENTNVTEPLVDIHVPEGQEVTLGALSTPFAFRIQGNQLFLNVTPDYEEKSLLEAQLLCQSGGTLVTQLRVFVSVLDVNDNAPEFPFKTKEIRVEEDTKVNSTVIPETQLQAEDRDKDDILFYTLQEMTAGASDYFSLVSVNRPALRLDRPLDFYERPNMTFWLLVRDTPGENVEPSHTATATLVLNVVPADLRPPWFLPCTFSDGYVCIQAQYHGAVPTGHILPSPLVLRPGPIYAEDGDRGINQPIIYSIFRGNVNGTFIIHPDSGNLTVARSVPSPMTFLLLVKGQQADLARYSVTQVTVEAVAAAGSPPRFPQRLYRGTVARGAGAGVVVKDAAAPSQPLRIQAQDPEFSDLNSAITYRITNHSHFRMEGEVVLTTTTLAQAGAFYAEVEAHNTVTSGTATTVIEIQVSEQEPPSTGGGPSEDKRFSVVDMAALGGVLGALLLLALLGLAVLVHKHYGPRLKCCCGKAPEPQPQGFDNQAFLPDHKANWAPVPSPTHDPKPAEAPMPAEPAPPGPASPGGAPEPPAAARAGGSPTAVRSILTKERRPEGGYKAVWFGEDIGTEADVVVLNAPTLDVDGASDSGSGDEGEGAGRGGGPYDAPGGDDSYI

SEQ ID NO: 28604 - protein, 839 aa, Homo sapiens
MGSWALLWPPLLFTGLLVRPPGTMAQAQYCSVNKDIFEVEENTNVTEPLVDIHVPEGQEVTLGALSTPFAFRIQGNQLFLNVTPDYEEKSLLEAQLLCQSGGTLVTQLRVFVSVLDVNDNAPEFPFKTKEIRVEEDTKVNSTVIPETQLQAEDRDKDDILFYTLQEMTAGASDYFSLVSVNRPALRLDRPLDFYERPNMTFWLLVRDTPGENVEPSHTATATLVLNVVPADLRPPWFLPCTFSDGYVCIQAQYHGAVPTGHILPSPLVLRPGPIYAEDGDRGINQPIIYSIFRGNVNGTFIIHPDSGNLTVARSVPSPMTFLLLVKGQQADLARYSVTQVTVEAVAAAGSPPRFPQRLYRGTVARGAGAGVVVKDAAAPSQPLRIQAQDPEFSDLNSAITYRITNHSHFRMEGEVVLTTTTLAQAGAFYAEVEAHNTVTSGTATTVIEIQVSEQEPPSTEAGGTTGPWTSTTSEVPRPPEPSQGPSTTSSGGGTGPHPPSGTTLRPPTSSTPGGPPGAENSTSHQPATPGGDTAQTPKPGTSQPMPPGVGTSTSHQPATPSGGTAQTPEPGTSQPMPPSMGTSTSHQPATPGGGTAQTPEAGTSQPMPPGMGTSTSHQPTTPGGGTAQTPEPGTSQPMPLSKSTPSSGGGPSEDKRFSVVDMAALGGVLGALLLLALLGLAVLVHKHYGPRLKCCCGKAPEPQPQGFDNQAFLPDHKANWAPVPSPTHDPKPAEAPMPAEPAPPGPASPGGAPEPPAAARAGGSPTAVRSILTKERRPEGGYKAVWFGEDIGTEADVVVLNAPTLDVDGASDSGSGDEGEGAGRGGGPYDAPGGDDSYI

SEQ ID NO: 28605 - protein, 596 aa, Homo sapiens
MGPADSWGHHWMGILLSASLCTVWSPPAAAQLTLNANPLDATQSEDVVLPVFGTPRTPQIHGRSRELAKPSIAVSPGTAIEQKDMVTFYCTTKDVNITIHWVSNNLSIVFHERMQLSKDGKILTILIVQREDSGTYQCEARDALLSQRSDPIFLDVKYGPDPVEIKLESGVASGEVVEVMEGSSMTFLAETKSHPPCAYTWFLLDSILSHTTRTFTIHAVSREHEGLYRCLVSNSATHLSSLGTLKVRVLETLTMPQVVPSSLNLVENARSVDLTCQTVNQSVNVQWFLSGQPLLPSEHLQLSADNRTLIIHGLQRNDTGPYACEVWNWGSRARSEPLELTINYGPDQVHITRESASEMISTIEAELNSSLTLQCWAESKPGAEYRWTLEHSTGEHLGEQLIIRALTWEHDGIYNCTASNSLTGLARSTSVLVKVVGPQSSSLSSGAIAGIVIGILAVIAVASELGYFLCIRNARRPSRKTTEDPSHETSQPIPKEEHPTEPSSESLSPEYRNISQLQGRIRVELMQPPDLPEETYETKLPSASRRGNSFSPWKPPPKPLMPPLRLVSTVPKNMESIYEELVNPEPNTYIQINPSV

SEQ ID NO: 28606 - protein, 584 aa, Homo sapiens
MGPADSWGHHWMGILLSASLCTVWSPPAAAQLTLNANPLDATQSEDVVLPVFGTPRTPQIHGRSRELAKPSIAVSPGTAIEQKDMVTFYCTTKDVNITIHWVSNNLSIVFHERMQLSKDGKILTILIVQREDSGTYQCEARDALLSQRSDPIFLDVKYGPDPVEIKLESGVASGEVVEVMEGSSMTFLAETKSHPPCAYTWFLLDSILSHTTRTFTIHAVSREHEGLYRCLVSNSATHLSSLGTLKVRVLETLTMPQVVPSSLNLVENARSVDLTCQTVNQSVNVQWFLSGQPLLPSEHLQLSADNRTLIIHGLQRNDTGPYACEVWNWGSRARSEPLELTINYGPDQVHITRESASEMISTIEAELNSSLTLQCWAESKPGAEYRWTLEHSTGEHLGEQLIIRALTWEHDGIYNCTASNSLTGLARSTSVLVKVVGPQSSSLSSGAIAGIVIGILAVIAVASELGYFLCIRNARRPSRKTTEDPSHETSQPIPKEEHPTEPSSESLSPEYRNISQLQGRIRVELTKLPSASRRGNSFSPWKPPPKPLMPPLRLVSTVPKNMESIYEELVNPEPNTYIQINPSV

SEQ ID NO: 28607 - protein, 503 aa, Homo sapiens
MGPADSWGHHWMGILLSASLCTVWSPPAAAQLTLNANPLDATQSEDVVLPVFGTPRTPQIHGRSRELAKPSIAVSPGTAIEQKDMVTFYCTTKDVNITIHWVSNNLSIVFHERMQLSKDGKILTILIVQREDSGTYQCEARDALLSQRSDPIFLDVKYGPDPVEIKLESGVASGEVVEVMEGSSMTFLAETKSHPPCAYTWFLLDSILSHTTRTFTIHAVSREHEGLYRCLVSNSATHLSSLGTLKVRVLETLTMPQVVPSSLNLVENARSVDLTCQTVNQSVNVQWFLSGQPLLPSEHLQLSADNRTLIIHGLQRNDTGPYACEVWNWGSRARSEPLELTINCPQSSSLSSGAIAGIVIGILAVIAVASELGYFLCIRNARRPSRKTTEDPSHETSQPIPKEEHPTEPSSESLSPEYRNISQLQGRIRVELMQPPDLPEETYETKLPSASRRGNSFSPWKPPPKPLMPPLRLVSTVPKNMESIYEELVNPEPNTYIQINPSV

SEQ ID NO: 28608 - protein, 491 aa, Homo sapiens
MGPADSWGHHWMGILLSASLCTVWSPPAAAQLTLNANPLDATQSEDVVLPVFGTPRTPQIHGRSRELAKPSIAVSPGTAIEQKDMVTFYCTTKDVNITIHWVSNNLSIVFHERMQLSKDGKILTILIVQREDSGTYQCEARDALLSQRSDPIFLDVKYGPDPVEIKLESGVASGEVVEVMEGSSMTFLAETKSHPPCAYTWFLLDSILSHTTRTFTIHAVSREHEGLYRCLVSNSATHLSSLGTLKVRVLETLTMPQVVPSSLNLVENARSVDLTCQTVNQSVNVQWFLSGQPLLPSEHLQLSADNRTLIIHGLQRNDTGPYACEVWNWGSRARSEPLELTINCPQSSSLSSGAIAGIVIGILAVIAVASELGYFLCIRNARRPSRKTTEDPSHETSQPIPKEEHPTEPSSESLSPEYRNISQLQGRIRVELTKLPSASRRGNSFSPWKPPPKPLMPPLRLVSTVPKNMESIYEELVNPEPNTYIQINPSV

SEQ ID NO: 28609 - protein, 585 aa, Homo sapiens
MGPADSWGHHWMGILLSASLCTVWSPPAAAQLTLNANPLDATQSEDVVLPVFGTPRTPQIHGRSRELAKPSIAVSPGTAIEQKDMVTFYCTTKDVNITIHWVSNNLSIVFHERMQLSKDGKILTILIVQREDSGTYQCEARDALLSQRSDPIFLDVKYGPDPVEIKLESGVASGEVVEVMEGSSMTFLAETKSHPPCAYTWFLLDSILSHTTRTFTIHAVSREHEGLYRCLVSNSATHLSSLGTLKVRVLETLTMPQVVPSSLNLVENARSVDLTCQTVNQSVNVQWFLSGQPLLPSEHLQLSADNRTLIIHGLQRNDTGPYACEVWNWGSRARSEPLELTINYGPDQVHITRESASEMISTIEAELNSSLTLQCWAESKPGAEYRWTLEHSTGEHLGEQLIIRALTWEHDGIYNCTASNSLTGLARSTSVLVKVVGPQSSSLSSGAIAGIVIGILAVIAVASELGYFLCIRNARRPSRKTTEDPSHETSQPIPKEEHPTEPSSESLSPEYRNISQLQGRIRVELMQPPDLPEETYETKLPSASRRGNSFSPWKPPPKPLMPPLRLVSTVPKNMESIYEVLGMQQ

SEQ ID NO: 28610 - protein, 273 aa, Homo sapiens
MSRVVSLLLGAALLCGHGAFCRRVVSGQKVCFADFKHPCYKMAYFHELSSRVSFQEARLACESEGGVLLSLENEAEQKLIESMLQNLTKPGTGISDGDFWIGLWRNGDGQTSGACPDLYQWSDGSNSQYRNWYTDEPSCGSEKCVVMYHQPTANPGLGGPYLYQWNDDRCNMKHNYICKYEPEINPTAPVEKPYLTNQPGDTHQNVVVTEAGIIPNLIYVVIPTIPLLLLILVAFGTCCFQMLHKSKGRTKTSPNQSTLWISKSTRKESGMEV

SEQ ID NO: 28611 - protein, 232 aa, Homo sapiens
MAYFHELSSRVSFQEARLACESEGGVLLSLENEAEQKLIESMLQNLTKPGTGISDGDFWIGLWRNGDGQTSGACPDLYQWSDGSNSQYRNWYTDEPSCGSEKCVVMYHQPTANPGLGGPYLYQWNDDRCNMKHNYICKYEPEINPTAPVEKPYLTNQPGDTHQNVVVTEAGIIPNLIYVVIPTIPLLLLILVAFGTCCFQMLHKSKGRTKTSPNQSTLWISKSTRKESGMEV

SEQ ID NO: 28612 - protein, 236 aa, Homo sapiens
MAYFHELSSRVSFQEARLACESEGGVLLSLENEAEQKLIESMLQNLTKPGTGISDGDFWIGLWRNGDGQTSGACPDLYQWSDGSNSQYRNWYTDEPSCGSEKCVVMYHQPTANPGLGGPYLYQWNDDRCNMKHNYICKYEPEINPTAPVEKPYLTNQPGDTHQNVVVTEAVKEEQKLVQTSLHCGFQRVPEKKAAWKYNNSLTWFQNFVILDLYKEWHQNNSLEWLEITKDLQDEL

SEQ ID NO: 28613 - protein, 254 aa, Homo sapiens
MTAGSAHSQKVCFADFKHPCYKMAYFHELSSRVSFQEARLACESEGGVLLSLENEAEQKLIESMLQNLTKPGTGISDGDFWIGLWRNGDGQTSGACPDLYQWSDGSNSQYRNWYTDEPSCGSEKCVVMYHQPTANPGLGGPYLYQWNDDRCNMKHNYICKYEPEINPTAPVEKPYLTNQPGDTHQNVVVTEAGIIPNLIYVVIPTIPLLLLILVAFGTCCFQMLHKSKGRTKTSPNQSTLWISKSTRKESGMEV

SEQ ID NO: 28614 - protein, 281 aa, Homo sapiens
MILTKAQYDEIAQCLVSVPPTRQSLRKLKQRFPSQSQATLLSIFSQEYQKHIKRTHAKHHTSEAIESYYQRYLNGVVKNGAAPVLLDLANEVDYAPSLMARLILERFLQEHEETPPSKSIINSMLRDPSQIPDGVLANQVYQCIVNDCCYGPLVDCIKHAIGHEHEVLLRDLLLEKNLSFLDEDQLRAKGYDKTPDFILQVPVAVEGHIIHWIESKASFGDECSHHAYLHDQFWSYWNRFGPGLVIYWYGFIQELDCNRERGILLKACFPTNIVTLCHSIA

SEQ ID NO: 28615 - protein, 183 aa, Homo sapiens
MARLILERFLQEHEETPPSKSIINSMLRDPSQIPDGVLANQVYQCIVNDCCYGPLVDCIKHAIGHEHEVLLRDLLLEKNLSFLDEDQLRAKGYDKTPDFILQVPVAVEGHIIHWIESKASFGDECSHHAYLHDQFWSYWNRFGPGLVIYWYGFIQELDCNRERGILLKACFPTNIVTLCHSIA

SEQ ID NO: 28616 - protein, 256 aa, Homo sapiens
MKLTRKMVLTRAKASELHSVRKLNCWGSRLTDISICQEMPSLEVITLSVNSISTLEPVSRCQRLSELYLRRNRIPSLAELFYLKGLPRLRVLWLAENPCCGTSPHRYRMTVLRTLPRLQKLDNQAVTEEELSRALSEGEEITAAPEREGTGHGGPKLCCTLSSLSSAAETGRDPLDSEEEATSGAQDERGLKPPSRGQFPSLSARDASSSHRGRNVLTAILLLLRELDAEGLEAVQQTVGSRLQALRGEEVQEHAE

SEQ ID NO: 28617 - protein, 215 aa, Homo sapiens
MPSLEVITLSISTLEPVSRCQRLSELYLRRNRIPSLAELFYLKGLPRLRVLWLAENPCCGTSPHRYRMTVLRTLPRLQKLDNQAVTEEELSRALSEGEEITAAPEREGTGHGGPKLCCTLSSLSSAAETGRDPLDSEEEATSGAQDERGLKPPSRGQFPSLSARDASSSHRGRNVLTAILLLLRELDAEGLEAVQQTVGSRLQALRGEEVQEHAE

SEQ ID NO: 28618 - protein, 255 aa, Homo sapiens
MKLTRKMVLTRAKASELHSVRKLNCWGSRLTDISICQEMPSLEVITLSVNSISTLEPVSRCQRLSELYLRRNRIPSLAELFYLKGLPRLRVLWLAENPCCGTSPHRYRMTVLRTLPRLQKLDNQAVTEEELSRALSEGEEITAAPEREGTGHGGPKLCCTLSSLSSAAETGRDPLDSEEEATGAQDERGLKPPSRGQFPSLSARDASSSHRGRNVLTAILLLLRELDAEGLEAVQQTVGSRLQALRGEEVQEHAE

SEQ ID NO: 28619 - protein, 375 aa, Homo sapiens
MKLTRKMVLTRAKASELHSVRKLNCWGSRLTDISICQEMPSLEVITLSVNSISTLEPVSRCQRLSELYLRRNRIPSLAELFYLKGLPRLRVLWLAENPCCGTSPHRYRMTVLRTLPRLQKLDNQAVTEEELSRALSEGEEITAAPEREGTGHGGPKLCCTLSSLSSAAETGRDPLDSEEEATGAQDERGLKPPSRGQFPSLSARDASSSHRGRVSGGPLGAAAASAHCTHCTETVGREHGASQGPVGREHGASQGLEELCPRGSCVCGSVNAHTRVTRAPHGAVLAPQPLLLSWSVECGPGPCWAEGNRSHVEEVPHTRPQAGLLCSDSPSVPNVLTAILLLLRELDAEGLEAVQQTVGSRLQALRGEEVQEHAE

SEQ ID NO: 28620 - protein, 342 aa, Homo sapiens
MAAEEEDEVEWVVESIAGFLRGPDWSIPILDFVEQKCEVFDDEEESKLTYTEIHQEYKELVEKLLEGYLKEIGINEDQFQEACTSPLAKTHTSQAILQPVLAAEDFTIFKAMMVQKNIEMQLQAIRIIQERNGVLPDCLTDGSDVVSDLEHEEMKILREVLRKSKEEYDQEEERKRKKQLSEAKTEEPTVHSSEAAIMNNSQGDGEHFAHPPSEVKMHFANQSIEPLGRKVERSETSSLPQKDLKIPGLEHASIEGPIANLSVLGTEELRQREHYLKQKRDKLMSMRKDMRTKQIQNMEQKGKPTGEVEEMTEKPEMTAEEKQTLLKRRLLAEKLKEEVINK

SEQ ID NO: 28621 - protein, 367 aa, Homo sapiens
MAAEEEDEVEWVVESIAGFLRGPDWSIPILDFVEQKCEVNCKGGHVITPGSPEPVILVACVPLVFDDEEESKLTYTEIHQEYKELVEKLLEGYLKEIGINEDQFQEACTSPLAKTHTSQAILQPVLAAEDFTIFKAMMVQKNIEMQLQAIRIIQERNGVLPDCLTDGSDVVSDLEHEEMKILREVLRKSKEEYDQEEERKRKKQLSEAKTEEPTVHSSEAAIMNNSQGDGEHFAHPPSEVKMHFANQSIEPLGRKVERSETSSLPQKDLKIPGLEHASIEGPIANLSVLGTEELRQREHYLKQKRDKLMSMRKDMRTKQIQNMEQKGKPTGEVEEMTEKPEMTAEEKQTLLKRRLLAEKLKEEVINK

SEQ ID NO: 28622 - protein, 267 aa, Homo sapiens
MATGELGDLGGYYFRFLPQKTFQSLSSKEITSRLRQWSMLGRIKAQAFGFDQTFQSYRKDDFVMAFFKDPNVIPNLKLLSDSSGQWIILGTEVKKIEAINVPCTQLSMSFFHRLYDEDIVRDSGHIVKCLDSFCDPFLISDELRRVLLVEDSEKYEIFSQPDREEFLFCLFKHLCLGGALCQYEDVISPYLETTKLIYKDLVSVRKNPQTKKIQITSSVFKVSAYDSAGMCYPSAKNHEQTFSYFIVDPIRRHLHVLYHCYGVGDMS

SEQ ID NO: 28623 - protein, 229 aa, Homo sapiens
MLGRIKAQAFGFDQTFQSYRKDDFVMAFFKDPNVIPNLKLLSDSSGQWIILGTEVKKIEAINVPCTQLSMSFFHRLYDEDIVRDSGHIVKCLDSFCDPFLISDELRRVLLVEDSEKYEIFSQPDREEFLFCLFKHLCLGGALCQYEDVISPYLETTKLIYKDLVSVRKNPQTKKIQITSSVFKVSAYDSAGMCYPSAKNHEQTFSYFIVDPIRRHLHVLYHCYGVGDMS

SEQ ID NO: 28624 - protein, 99 aa, Homo sapiens
MATGELGDLGGYYFRFLPQKTFQSLSSKEITSRLRQWSMLGRIKAQAFGFDQTFQSYRKDDFVMAFFKDPNVIPNLKLLSDSSGQWIILGFASGRLRKI

SEQ ID NO: 28625 - protein, 244 aa, Homo sapiens
MGPPSAAPRGGHRPWQGLLITASLLTFWHPPTTVQFTIEALPSSAAEGKDVLLLACNISETIQAYYWHKGKTAEGSPLIAGYITDIQANIPGAAYSGRETVYPNGSLLFQNITLEDAGSYTLRTINASYDSDQATGQLHVHQNNVPGLPVGAVAGIVTGVLVGVALVAALVCFLLLSRTGRASIQRDLREQPPPASTPGHGPSHRSTFSAPLPSPRTATPIYEELLYSDANIYCQIDHKADVVS

SEQ ID NO: 28626 - protein, 229 aa, Homo sapiens
MAALGHLAGEAAAAPGPGTPCASRGARLPGPVSSARNPSTVCLCPEQPTCSNADSRAHPLGDEGGTASKKQKNKKKTRNRASVANGGEKASEKLAPEEVPLSAEAQAQQLAQELAWCVEQLELGLKRQKPTPKQKEQAIGAIRTLRSKRTPLPRKRQLMHSLFGDYRAQMEAEWREALRALRAAAYSAQVQPVDGATRKKSQRVCRPRSIWRAKATLDMPDEEFRFNFF

SEQ ID NO: 28627 - protein, 242 aa, Homo sapiens
MAALGHLAGEAAAAPGPGTPCASRGARLPGPVSSARNPSTVCLCPEQPTCSNADSRAHPLGDEGGTASKKQKNKKKTRNRASVANGGEKASEKLAPEEVPLSAEAQARAGFGREGWNPRAQQLAQELAWCVEQLELGLKRQKPTPKQKEQAIGAIRTLRSKRTPLPRKRQLMHSLFGDYRAQMEAEWREALRALRAAAYSAQVQPVDGATRKKSQRVCRPRSIWRAKATLDMPDEEFRFNFF

SEQ ID NO: 28628 - protein, 834 aa, Homo sapiens
MEEKTQIKTFLGSKLPKYGTKSVRSTLQPMPNGTPVNLLGTSKNSNVKSYIKNNGSDCPSSHSFNWRKANKYQLCAQGVEEPNNTQNSHDKIIDPEKRVPTQGMFDKNGIKGGLKSVSLFTSKLAKPSTMFVSSTEELNQKSFSGPSNLGKFTKGTLLGRTSYSSINTPKSQLNGFYGNRSAGSMQRPRANSCATRSSSGESLAQSPDSSKSINCEKMVRSQSFSHSIQNSFLPPSSITRSHSFNRAVDLTKPYQNQQLSIRVPLRSSMLTRNSRQPEVLNGNEHLGYGFNRPYAAGGKKLALPNGPGVTSTLGYRMVHPSLLKSSRSPFSGTMTVDGNKNSPADTCVEEDATVLAKDRAANKDQELIENESYRTKNNQTMKHDAKMRYLSDDVDDISLSSLSSSDKNDLSEDFSDDFIDIEDSNRTRITPEEMSLKEEKHENGPPQDMFDSPKENEKAFSKTDEWIDISVSDRSECTKHTSGNNLVSPDTDYRAGSSFELSPSDSSDGTYMWDEEGLEPIGNVHPVGSYESSEMNSIDILNNLESCDLEDDDLMLDVDLPEDAPLENVECDNMNRFDRPDRNVRQPQEGFWKRPPQRWSGQEHYHLSHPDHYHHHGKSDLSRGSPYRESPLGHFESYGGMPFFQAQKMFVDVPENTVILDEMTLRHMVQDCTAVKTQLLKLKRLLHQHDGSGSLHDIQLSLPSSPEPEDGDKVYKNEDLLNEIKQLKDEIKKKDEKIQLLELQLATQHICHQKCKEEKCTYADKYTQTPWRRIPGGYSAPSFSPWQGSFQGIPRTVPPHRRQTSSTTAFQQPSQTHRSHPGKTNKATTYRGPQ

SEQ ID NO: 28629 - protein, 567 aa, Homo sapiens
MEEKTQIKTFLGSKLPKYGTKSVRSTLQPMPNGTPVNLLGTSKNSNVKSYIKNNGSDCPSSHSFNWRKANKYQLCAQGVEEPNNTQNSHDKIIDPEKRVPTQGMFDKNGIKGGLKSVSLFTSKLAKPSTMFVSSTEELNQKSFSGPSNLGKFTKGTLLGRTSYSSINTPKSQLNGFYGNRSAGSMQRPRANSCATRSSSGESLAQSPDSSKSINCEKMVRSQSFSHSIQNSFLPPSSITRSHSFNRAVDLTKPYQNQQLSIRVPLRSSMLTRNSRQPEVLNGNEHLGYGFNRPYAAGGKKLALPNGPGVTSTLGYRMVHPSLLKSSRSPFSGTMTVDGNKNSPADTCVEEDATVLAKDRAANKDQELIENESYRTKNNQTMKHDAKMRYLSDDVDDISLSSLSSSDKNDLSEDFSDDFIDIEDSNRTRITPEEMSLKEEKHENGPPQDMFDSPKENEKAFSKTDEWIDISVSDRSECTKHTSGNNLVSPDTDYRAGSSFELSPSDSSDGTYMWDEEGLEPIGNVHPVGSYESSEMNSIVCMDLYTLGIFCLPYYRETCDMIDFVKNL

SEQ ID NO: 28630 - protein, 1047 aa, Homo sapiens
MEEKTQIKTFLGSKLPKYGTKSVRSTLQPMPNGTPVNLLGTSKNSNVKSYIKNNGSDCPSSHSFNWRKANKYQLCAQGVEEPNNTQNSHDKIIDPEKRVPTQGMFDKNGIKGGLKSVSLFTSKLAKPSTMFVSSTEELNQKSFSGPSNLGKFTKGTLLGRTSYSSINTPKSQLNGFYGNRSAGSMQRPRANSCATRSSSGESLAQSPDSSKSINCEKMVRSQSFSHSIQNSFLPPSSITRSHSFNRAVDLTKPYQNQQLSIRVPLRSSMLTRNSRQPEVLNGNEHLGYGFNRPYAAGGKKLALPNGPGVTSTLGYRMVHPSLLKSSRSPFSGTMTVDGNKNSPADTCVEEDATVLAKDRAANKDQELIENESYRTKNNQTMKHDAKMRYLSDDVDDISLSSLSSSDKNDLSEDFSDDFIDIEDSNRTRITPEEMSLKEEKHENGPPQDMFDSPKENEKAFSKTDEWIDISVSDRSECTKHTSGNNLVSPDTDYRAGSSFELSPSDSSDGTYMWDEEGLEPIGNVHPVGSYESSEMNSIDILNNLESCDLEDDDLMLDVDLPEDAPLENVECDNMNRFDRPDRNVRQPQEGFWKRPPQRWSGQEHYHLSHPDHYHHHGKSDLSRGSPYRESPLGHFESYGGMPFFQAQKMFVDVPENTVILDEMTLRHMVQDCTAVKTQLLKLKRLLHQHDGSGSLHDIQLSLPSSPEPEDGDKVYKNEDLLNEIKQLKDEIKKKDEKIQLLELQLATQHICHQKCKEEKCTYADKYTQTPWRRIPPQVLQPSSSLPRPTDHTQGKLIKPQRIEARSECSIQDMHQGGAHPEESFTHVLHQESNYGLEEQPFSSGPQLTMDVAKSTPSEANLNITVNAQEPYHLANNQISDMQFIPTSLQTPPESSTVDQAKRVGRNQSPPVGYMSQPKSLQLLKPSILSSLVPPPVSESSPSRTPTCKKSPIITTCNSAKLQPTSSQTNLANNQNLKASKLRPPSGSFKQKQTNSPQLEPQSFQAKTSIPRPLTQRKEIMQNPNGNLHSGDCLASNRYSRLPKPKIH

SEQ ID NO: 28631 - protein, 261 aa, Homo sapiens
MNRFDRPDRNVRQPQEGFWKRPPQRWSGQEHYHLSHPDHYHHHGKSDLSRGSPYRESPLGHFESYGGMPFFQAQKMFVDVPENTVILDEMTLRHMVQDCTAVKTQLLKLKRLLHQHDGSGSLHDIQLSLPSSPEPEDGDKVYKNEDLLNEIKQLKDEIKKKDEKIQLLELQLATQHICHQKCKEEKCTYADKYTQTPWRRIPGGYSAPSFSPWQGSFQGIPRTVPPHRRQTSSTTAFQQPSQTHRSHPGKTNKATTYRGPQ

SEQ ID NO: 28632 - protein, 118 aa, Homo sapiens
MDSSDETGSSFMSFWPHLQSDDLARNGITGFPYFSFIILNESDQILELDGTLVKIWLLVPSHQPATHFKFEETKTHGPYVITGDYPRSLWQKSASSLPASPPCLWYFLPTLGCFCDHT

SEQ ID NO: 28633 - protein, 702 aa, Homo sapiens
MESPSAPPHRWCIPWQRLLLTASLLTFWNPPTTAKLTIESTPFNVAEGKEVLLLVHNLPQHLFGYSWYKGERVDGNRQIIGYVIGTQQATPGPAYSGREIIYPNASLLIQNIIQNDTGFYTLHVIKSDLVNEEATGQFRVYPELPKPSISSNNSKPVEDKDAVAFTCEPETQDATYLWWVNNQSLPVSPRLQLSNGNRTLTLFNVTRNDTASYKCETQNPVSARRSDSVILNVLYGPDAPTISPLNTSYRSGENLNLSCHAASNPPAQYSWFVNGTFQQSTQELFIPNITVNNSGSYTCQAHNSDTGLNRTTVTTITVYAEPPKPFITSNNSNPVEDEDAVALTCEPEIQNTTYLWWVNNQSLPVSPRLQLSNDNRTLTLLSVTRNDVGPYECGIQNKLSVDHSDPVILNVLYGPDDPTISPSYTYYRPGVNLSLSCHAASNPPAQYSWLIDGNIQQHTQELFISNITEKNSGLYTCQANNSASGHSRTTVKTITVSAELPKPSISSNNSKPVEDKDAVAFTCEPEAQNTTYLWWVNGQSLPVSPRLQLSNGNRTLTLFNVTRNDARAYVCGIQNSVSANRSDPVTLDVLYGPDTPIISPPDSSYLSGANLNLSCHSASNPSPQYSWRINGIPQQHTQVLFIAKITPNNNGTYACFVSNLATGRNNSIVKSITVSASGTSPGLSAGATVGIMIGVLVGVALI

SEQ ID NO: 28634 - protein, 701 aa, Homo sapiens [sequence omitted]

SEQ ID NO: 28635 - protein, 252 aa, Homo sapiens
MGPPSASPHRECIPWQGLLLTASLLNFWNPPTTAKLTIESMPLSVAEGKEVLLLVHNLPQHLFGYSWYKGERVDGNSLIVGYVIGTQQATPGAAYSGRETIYTNASLLIQNVTQNDIGFYTLQVIKSDLVNEEATGQFHVYQENAPGLPVGAVAGIVTGVLVGVALVAALVCFLLLAKTGRTSIQRDLKEQQPQALAPGRGPSHSSAFSMSPLSTAQAPLPNPRTAASIYEELLKHDTNIYCRMDHKAEVAS

SEQ ID NO: 28636 - protein, 177 aa, Homo sapiens
MGPPSASPHRECIPWQGLLLTASLLNFWNPPTTAKLTIESMPLSVAEGKEVLLLVHNLPQHLFGYSWYKGERVDGNSLIVGYVIGTQQATPGAAYSGRETIYTNASLLIQNVTQNDIGFYTLQVIKSDLVNEEATGQFHVYPELPKPSISSNNSNPKEDKDAVAFTCEPEIHSTTCL

SEQ ID NO: 28637 - protein, 212 aa, Homo sapiens
MGPPSASPHRECIPWQGLLLTASLLNFWNPPTTAKLTIESMPLSVAEGKEVLLLVHNLPQHLFGYSWYKGERVDGNSLIVGYVIGTQQATPGAAYSGRETIYTNASLLIQNVTQNDIGFYTLQVIKSDLVNEEATGQFHVYQENAPGLPVGAVAGIVTGVLVGVALVAALVCFLLLAKTGRPWSLPQLCLLDVPSLHCPGPPTQPQDSSFHL

SEQ ID NO: 28638 - protein, 409 aa, Homo sapiens
MSLHAWEWEEDPASIEPISSITSFYQSTSECDVEEHLKAKARAQESDSDRPCSSIESSSEPASTFSSDVPHVVPCKFTISLAFPVNMGQKGKYASLIEKYKKHPKTDSSVTKMRRFYHIEYFLLPDDEEPKKVDILLFPMVAKVFLESGVKTVKPWHEGDKAWVSWEQTFNITVTKELLKKINFHKITLRLWNTKDKMSRKVRYYRLKTAGFTDDVGAFHKSEVRHLVLNQRKLSEQGIENTNIVREESNQEHPPGKQEKTEKHPKSLQGSHQAEPETSSKNSEEYEKSLKMDDSSTIQWSVSRTPTISLAGASMMEIKELIESESLSSLTNILDRQRSQIKGKDSEGRRKIQRRHKKPLAEEEADPTLTGPRKQSAFSIQLAVMPLLAGTHCLPCSQQLLLVLWPERP

SEQ ID NO: 28639 - protein, 297 aa, Homo sapiens
MRRFYHIEYFLLPDDEEPKKVDILLFPMVAKVFLESGVKTVKPWHEGDKAWVSWEQTFNITVTKELLKKINFHKITLRLWNTKDKMSRKVRYYRLKTAGFTDDVGAFHKSEVRHLVLNQRKLSEQGIENTNIVREESNQEHPPGKQEKTEKHPKSLQGSHQAEPETSSKNSEEYEKSLKMDDSSTIQWSVSRTPTISLAGASMMEIKELIESESLSSLTNILDRQRSQIKGKDSEGRRKIQRRHKKPLAEEEADPTLTGPRKQSAFSIQLAVMPLLAGTHCLPCSQQLLLVLWPERP

SEQ ID NO: 28640 - protein, 897 aa, Homo sapiens
MERAGATSRGGQAPGFLLRLHTEGRAEAARVQEQDLRQWGLTGIHLRSYQLEGVNWLAQRFHCQNGCILGDEMGLGKTCQTIALFIYLAGRLNDEGPFLILCPLSVLSNWKEEMQRFAPGLSCVTYAGDKEERACLQQDLKQESRFHVLLTTYEICLKDASFLKSFPWSVLVVDEAHRLKNQSSLLHKTLSEFSVVFSLLLTGTPIQNSLQELYSLLSFVEPDLFSKEEVGDFIQRYQDIEKESESASELHKLLQPFLLRRVKAEVATELPKKTEVVIYHGMSALQKKYYKAILMKDLDAFENETAKKVKLQNILSQLRKCVDHPYLFDGVEPEPFEVGDHLTEASGKLHLLDKLLAFLYSGGHRVLLFSQMTQMLDILQDYMDYRGYSYERVDGSVRGEERHLAIKNFGQQPIFVFLLSTRAGGVGMNLTAADTVIFVDSDFNPQNDLQAAARAHRIGQNKSVKVIRLIGRDTVEEIVYRKAASKLQLTNMIIEGGHFTLGAQKPAADADLQLSEILKFGLDKLLASEGSTMDEIDLESILGETKDGQWVSDALPAAEGGSRDQEEGKNHMYLFEGKDYSKEPSKEDRKSFEQLVNLQKTLLEKASQEGRSLRNKGSVLIPGLVEGSTKRKRVLSPEELEDRQKKRQEAAAKRRRLIEEKKRQKEEAEHKKKMAWWESNNYQSFCLPSEESEPEDLENGEESSAELDYQDPDATSLKYVSGDVTHPQAGAEDALIVHCVDDSGHWGRGGLFTALEKRSAEPRKIYELAGKMKDLSLGGVLLFPVDDKESRNKGQDLLALIVAQHRDRSNVLSGIKMAALEEGLKKIFLAAKKKKASVHLPRIGHATKGFNWYGTERLIRKHLAARGIPTYIYYFPRSKSAVLHSQSSSSSSRQLVP

SEQ ID NO: 28641 - protein, 803 aa, Homo sapiens
MERAGATSRGGQAPGFLLRLHTEGRAEAARVQEQDLRQWGLTGIHLRSYQLEGVNWLAQRFHCQNGCILGDEMGLGKTCQTIALFIYLAGRLNDEGPFLILCPLSVLSNWKEEMQRFAPGLSCVTYAGDKEERACLQQDLKQESRFHVLLTTYEICLKDASFLKSFPWSVLVVDEAHRLKNQSSLLHKTLSEFSVVFSLLLTGTPIQNSLQELYSLLSFVEPDLFSKEEVGDFIQRYQDIEKESESASELHKLLQPFLLRRVKAEVATELPKKTEVVIYHGMSALQKKYYKAILMKDLDAFENETAKKVKLQNILSQLRKCVDHPYLFDGGVGMNLTAADTVIFVDSDFNPQNDLQAAARAHRIGQNKSVKVIRLIGRDTVEEIVYRKAASKLQLTNMIIEGGHFTLGAQKPAADADLQLSEILKFGLDKLLASEGSTMDEIDLESILGETKDGQWVSDALPAAEGGSRDQEEGKNHMYLFEGKDYSKEPSKEDRKSFEQLVNLQKTLLEKASQEGRSLRNKGSVLIPGLVEGSTKRKRVLSPEELEDRQKKRQEAAAKRRRLIEEKKRQKEEAEHKKKMAWWESNNYQSFCLPSEESEPEDLENGEESSAELDYQDPDATSLKYVSGDVTHPQAGAEDALIVHCVDDSGHWGRGGLFTALEKRSAEPRKIYELAGKMKDLSLGGVLLFPVDDKESRNKGQDLLALIVAQHRDRSNVLSGIKMAALEEGLKKIFLAAKKKKASVHLPRIGHATKGFNWYGTERLIRKHLAARGIPTYIYYFPRSKSAVLHSQSSSSSSRQLVP

SEQ ID NO: 28642 - protein, 693 aa, Homo sapiens
MERAGATSRGGQAPGFLLRLHTEGRAEAARVQEQDLRQWGLTASELHKLLQPFLLRRVKAEVATELPKKTEVVIYHGMSALQKKYYKAILMKDLDAFENETAKKVKLQNILSQLRKCVDHPYLFDGVEPEPFEVGDHLTEASGKLHLLDKLLAFLYSGGHRVLLFSQMTQMLDILQDYMDYRGYSYERVDGSVRGEERHLAIKNFGQQPIFVFLLSTRAGGVGMNLTAADTVIFVDSDFNPQNDLQAAARAHRIGQNKSVKVIRLIGRDTVEEIVYRKAASKLQLTNMIIEGGHFTLGAQKPAADADLQLSEILKFGLDKLLASEGSTMDEIDLESILGETKDGQWVSDALPAAEGGSRDQEEGKNHMYLFEGKDYSKEPSKEDRKSFEQLVNLQKTLLEKASQEGRSLRNKGSVLIPGLVEGSTKRKRVLSPEELEDRQKKRQEAAAKRRRLIEEKKRQKEEAEHKKKMAWWESNNYQSFCLPSEESEPEDLENGEESSAELDYQDPDATSLKYVSGDVTHPQAGAEDALIVHCVDDSGHWGRGGLFTALEKRSAEPRKIYELAGKMKDLSLGGVLLFPVDDKESRNKGQDLLALIVAQHRDRSNVLSGIKMAALEEGLKKIFLAAKKKKASVHLPRIGHATKGFNWYGTERLIRKHLAARGIPTYIYYFPRSKSAVLHSQSSSSSSRQLVP

SEQ ID NO: 28643 - protein, 784 aa, Homo sapiens
MQRFAPGLSCVTYAGDKEERACLQQDLKQESRFHVLLTTYEICLKDASFLKSFPWSVLVVDEAHRLKNQSSLLHKTLSEFSVVFSLLLTGTPIQNSLQELYSLLSFVEPDLFSKEEVGDFIQRYQDIEKESESASELHKLLQPFLLRRVKAEVATELPKKTEVVIYHGMSALQKKYYKAILMKDLDAFENETAKKVKLQNILSQLRKCVDHPYLFDGVEPEPFEVGDHLTEASGKLHLLDKLLAFLYSGGHRVLLFSQMTQMLDILQDYMDYRGYSYERVDGSVRGEERHLAIKNFGQQPIFVFLLSTRAGGVGMNLTAADTVIFVDSDFNPQNDLQAAARAHRIGQNKSVKVIRLIGRDTVEEIVYRKAASKLQLTNMIIEGGHFTLGAQKPAADADLQLSEILKFGLDKLLASEGSTMDEIDLESILGETKDGQWVSDALPAAEGGSRDQEEGKNHMYLFEGKDYSKEPSKEDRKSFEQLVNLQKTLLEKASQEGRSLRNKGSVLIPGLVEGSTKRKRVLSPEELEDRQKKRQEAAAKRRRLIEEKKRQKEEAEHKKKMAWWESNNYQSFCLPSEESEPEDLENGEESSAELDYQDPDATSLKYVSGDVTHPQAGAEDALIVHCVDDSGHWGRGGLFTALEKRSAEPRKIYELAGKMKDLSLGGVLLFPVDDKESRNKGQDLLALIVAQHRDRSNVLSGIKMAALEEGLKKIFLAAKKKKASVHLPRIGHATKGFNWYGTERLIRKHLAARGIPTYIYYFPRSKSAVLHSQSSSSSSRQLVP

SEQ ID NO: 28644 - protein, 616 aa, Homo sapiens
MSALQKKYYKAILMKDLDAFENETAKKVKLQNILSQLRKCVDHPYLFDGVEPEPFEVGDHLTEASGKLHLLDKLLAFLYSGGHRVLLFSQMTQMLDILQDYMDYRGYSYERVDGSVRGEERHLAIKNFGQQPIFVFLLSTRAGGVGMNLTAADTVIFVDSDFNPQNDLQAAARAHRIGQNKSVKVIRLIGRDTVEEIVYRKAASKLQLTNMIIEGGHFTLGAQKPAADADLQLSEILKFGLDKLLASEGSTMDEIDLESILGETKDGQWVSDALPAAEGGSRDQEEGKNHMYLFEGKDYSKEPSKEDRKSFEQLVNLQKTLLEKASQEGRSLRNKGSVLIPGLVEGSTKRKRVLSPEELEDRQKKRQEAAAKRRRLIEEKKRQKEEAEHKKKMAWWESNNYQSFCLPSEESEPEDLENGEESSAELDYQDPDATSLKYVSGDVTHPQAGAEDALIVHCVDDSGHWGRGGLFTALEKRSAEPRKIYELAGKMKDLSLGGVLLFPVDDKESRNKGQDLLALIVAQHRDRSNVLSGIKMAALEEGLKKIFLAAKKKKASVHLPRIGHATKGFNWYGTERLIRKHLAARGIPTYIYYFPRSKSAVLHSQSSSSSSRQLVP

SEQ ID NO: 28645 - protein, 482 aa, Homo sapiens; identical to SEQ ID NO: 19670

SEQ ID NO: 28646 - protein, 250 aa, Homo sapiens
MRGTPKTHLLAFSLLCLLSKVRTQLCPTPCTCPWPPPRCPLGVPLVLDGCGCCRVCARRLGEPCDQLHVCDASQGLVCQPGAGPGGRGALCLLAEDDSSCEVNGRLYREGETFQPHCSIRCRCEDGGFTCVPLCSEDVRLPSWDCPHPRRVEVLGKCCPEWVCGQGGGLGTQPLPAQGPQFSGLVSSLPPGVPCPEWSTAWGPCSTTCGLGMATRVSNQNRFCRLETQRRLCLSRPCPPSRGRSPQNSAF

SEQ ID NO: 28647 - protein, 218 aa, Homo sapiens
MRGTPKTHLLAFSLLCLLSKVRTQLCPTPCTCPWPPPRCPLGVPLVLDGCGCCRVCARRLGEPCDQLHVCDASQGLVCQPGAGPGGRGALCLCKQDPSFLALSLPCPLVSPAQNGARPGDPARPPVGWAWPPGCPTRTASADWRPSAACACPGPAHPPGVAVHKTVPSRAGLGMGTRCPPSPAGGPVPGPWADGRWSVPRPLAAGNTLAWVHHAEHQY

SEQ ID NO: 28648 - protein, 824 aa, Homo sapiens
MTVLQEPVQAAIWQALNHYAYRDAVFLAERLYAEVHSEEALFLLATCYYRSGKAYKAYRLLKGHSCTTPQCKYLLAKCCVDLSKLAEGEQILSGGVFNKQKSHDDIVTEFGDSACFTLSLLGHVYCKTDRLAKGSECYQKSLSLNPFLWSPFESLCEIGEKPDPDQTFKFTSLQNFSNCLPNSCTTQVPNHSLSHRQPETVLTETPQDTIELNRLNLESSNSKYSLNTDSSVSYIDSAVISPDTVPLGTGTSILSKQVQNKPKTGRSLLGGPAALSPLTPSFGILPLETPSPGDGSYLQNYTNTPPVIDVPSTGAPSKKSVARIGQTGTKSVFSQSGNSREVTPILAQTQSSGPQTSTTPQVLSPTITSPPNALPRRSSRLFTSDSSTTKENSKKLKMKFPPKIPNRKTKSKTNKGGITQPNINDSLEITKLDSSIISEGKISTITPQIQAFNLQKAAAEGLMSLLREMGKGYLALCSYNCKEAINILSHLPSHHYNTGWVLCQIGRAYFELSEYMQAERIFSEVRRIENYRVEGMEIYSTTLWHLQKDVALSVLSKDLTDMDKNSPEAWCAAGNCFSLQREHDIAIKFFQRAIQVDPNYAYAYTLLGHEFVLTEELDKALACFRNAIRVNPRHYNAWYGLGMIYYKQEKFSLAEMHFQKALDINPQSSVLLCHIGVVQHALKKSEKALDTLNKAIVIDPKNPLCKFHRASVLFANEKYKSALQELEELKQIVPKESLVYFLIGKVYKKLGQTHLALMNFSWAMDLDPKGANNQIKEAIDKRYLPDDEEPITQEEQIMGTDESQESSMTDADDTQLHAAESDEF

SEQ ID NO: 28649 - protein, 830 aa, Homo sapiens
MTVLQEPVQAAIWQALNHYAYRDAVFLAERLYAEVHSEEALFLLATCYYRSGKAYKAYRLLKGHSCTTPQCKYLLAKCCVDLSKLAEGEQILSGGVFNKQKSHDDIVTEFGDSACFTLSLLGHVYCKTDRLAKGSECYQKSLSLNPFLWSPFESLCEIGEKPDPDQTFKFTSLQNFSNCLPNSCTTQVPNHSLSHRQPETVLTETPQDTIELNRLNLESSNSKYSLNTDSSVSYIDSAVISPDTVPLGTGTSILSKQVQNKPKTGRSLLGGPAALSPLTPSFGILPLETPSPGDGSYLQNYTNTPPVIDVPSTGAPSKKTFRVLQSVARIGQTGTKSVFSQSGNSREVTPILAQTQSSGPQTSTTPQVLSPTITSPPNALPRRSSRLFTSDSSTTKENSKKLKMKFPPKIPNRKTKSKTNKGGITQPNINDSLEITKLDSSIISEGKISTITPQIQAFNLQKAAAEGLMSLLREMGKGYLALCSYNCKEAINILSHLPSHHYNTGWVLCQIGRAYFELSEYMQAERIFSEVRRIENYRVEGMEIYSTTLWHLQKDVALSVLSKDLTDMDKNSPEAWCAAGNCFSLQREHDIAIKFFQRAIQVDPNYAYAYTLLGHEFVLTEELDKALACFRNAIRVNPRHYNAWYGLGMIYYKQEKFSLAEMHFQKALDINPQSSVLLCHIGVVQHALKKSEKALDTLNKAIVIDPKNPLCKFHRASVLFANEKYKSALQELEELKQIVPKESLVYFLIGKVYKKLGQTHLALMNFSWAMDLDPKGANNQIKEAIDKRYLPDDEEPITQEEQIMGTDESQESSMTDADDTQLHAAESDEF

SEQ ID NO: 28650 - protein, 270 aa, Homo sapiens
MSPGSGVKSEYMKRYQEPRWEEYGPCYRELLHYRLGRRLLEQAHAPWLWDDWGPAGSSEDSASSESSGAGGPAPRCAPPSPPPPVEPATQEEAERRARGAPEEQDAEAGDAEAEDAEDAALPALPVKDVEDKPEQQTRTRETDKSPTSTEPRQQPSALFARGNRKAVKSPQRSSSKIKENKHPFALYGWGEKQTDTGSQKTHNVCASAPVHEIHESALRAKNRRQVEKRKLVAQRQRAHSVDVEKNRKMKASSSENPWMTEYMRCYSARA

SEQ ID NO: 28651 - protein, 156 aa, Homo sapiens
MVPVFTSSALPVKDVEDKPEQQTRTRETDKSPTSTEPRQQPSALFARGNRKAVKSPQRSSSKIKENKHPFALYGWGEKQTDTGSQKTHNVCASAPVHEIHESALRAKNRRQVEKRKLVAQRQRAHSVDVEKNRKMKASSSENPWMTEYMRCYSARA

SEQ ID NO: 28652 - protein, 129 aa, Homo sapiens
MSPGSGVKSEYMKRYQEPRWEEYGPCYRELLHYRLGRRLLEQAHAPWLWDDWGPAGSSEDSASSESSGAGGPAPRCAPPSPPPPVEPATQEEAERRARGAPEEQDAEAGDAEAEDAEDAALPGNAWLRT

SEQ ID NO: 28653 - protein, 140 aa, Homo sapiens
MSPGSGVKSEYMKRYQEPRWEEYGPCYRELLHYRLGRRLLEQAHAPWLWDDWGPAGSSEDSASSESSGAGGPAPRCAPPSPPPPVEPATQEEAERRARGAPEEQDAEAGDAEAEDAEDAALPGTRPGGEREGPARRDGLL

SEQ ID NO: 28654 - protein, 369 aa, Homo sapiens
MTPTDFTSPIPNMADDYGSESTSSMEDYVNFNFTDFYCEKNNVRQFASHFLPPLYWLVFIVGALGNSLVILVYWYCTRVKTMTDMFLLNLAIADLLFLVTLPFWAIAAADQWKFQTFMCKVVNSMYKMNFYSCVLLIMCISVDRYIAIAQAMRAHTWREKRLLYSKMVCFTIWVLAAALCIPEILYSQIKEESGIAICTMVYPSDESTKLKSAVLTLKVILGFFLPFVVMACCYTIIIHTLIQAKKSSKHKALKVTITVLTVFVLSQFPYNCILLVQTIDAYAMFISNCAVSTNIDICFQVTQTIAFFHSCLNPVLYVFVGERFRRDLVKTLKNLGCISQAQWVSFTRREGSLKLSSMLLETTSGALSL

SEQ ID NO: 28655 - protein, 357 aa, Homo sapiens
MADDYGSESTSSMEDYVNFNFTDFYCEKNNVRQFASHFLPPLYWLVFIVGALGNSLVILVYWYCTRVKTMTDMFLLNLAIADLLFLVTLPFWAIAAADQWKFQTFMCKVVNSMYKMNFYSCVLLIMCISVDRYIAIAQAMRAHTWREKRLLYSKMVCFTIWVLAAALCIPEILYSQIKEESGIAICTMVYPSDESTKLKSAVLTLKVILGFFLPFVVMACCYTIIIHTLIQAKKSSKHKALKVTITVLTVFVLSQFPYNCILLVQTIDAYAMFISNCAVSTNIDICFQVTQTIAFFHSCLNPVLYVFVGERFRRDLVKTLKNLGCISQAQWVSFTRREGSLKLSSMLLETTSGALSL

SEQ ID NO: 28656 - protein, 82 aa, Homo sapiens
MSATWTLSPEPLPPSTGPPVGAGLDAEQRTVFAFVLCLLVVLVLLMVRCVRILLDPYSRMPASSWTDHKEALERGQFDYALV

SEQ ID NO: 28657 - protein, 1830 aa, Homo sapiens
MAPWRKADKERHGVAIYNFQGSGAPQLSLQIGDVVRIQETCGDWYRGYLIKHKMLQGIFPKSFIHIKEVTVEKRRNTENIIPAEIPLAQEVTTTLWEWGSIWKQLYVASKKERFLQVQSMMYDLMEWRSQLLSGTLPKDELKELKQKVTSKIDYGNKILELDLIVRDEDGNILDPDNTSVISLFHAHEEATDKITERIKEEMSKDQPDYAMYSRISSSPTHSLYVFVRNFVCRIGEDAELFMSLYDPNKQTVISENYLVRWGSRGFPKEIEMLNNLKVVFTDLGNKDLNRDKIYLICQIVRVGKMDLKDTGAKKCTQGLRRPFGVAVMDITDIIKGKAESDEEKQHFIPFHPVTAENDFLHSLLGKVIASKGDSGGQGLWVTMKMLVGDIIQIRKDYPHLVDRTTVVARKLGFPEIIMPGDVRNDIYITLLQGDFDKYNKTTQRNVEVIMCVCAEDGKTLPNAICVGAGDKPMNEYRSVVYYQVKQPRWMETVKVAVPIEDMQRIHLRFMFRHRSSLESKDKGEKNFAMSYVKLMKEDGTTLHDGFHDLVVLKGDSKKMEDASAYLTLPSYRHHVENKGATLSRSSSSVGGLSVSSRDVFSISTLVCSTKLTQNVGLLGLLKWRMKPQLLQENLEKLKIVDGEEVVKFLQDTLDALFNIMMEHSQSDEYDILVFDALIYIIGLIADRKFQHFNTVLEAYIQQHFSATLAYKKLMTVLKTYLDTSSRGEQCEPILRTLKALEYVFKFIVRSRTLFSQLYEGKEQMEFEESMRRLFESINNLMKSQYKTTILLQVAALKYIPSVLHDVEMVFDAKLLSQLLYEFYTCIPPVKLQKQKVQSMNEIVQSNLFKKQECRDILLPVITKELKELLEQKDDMQHQVLERKYCVELLNSILEVLSYQDAAFTYHHIQEIMVQLLRTVNRTVITMGRDHILISHFVACMTAILNQMGDQHYSFYIETFQTSSELVDFLMETFIMFKDLIGKNVYPGDWMAMSMVQNRVFLRAINKFAETMNQKFLEHTNFEFQLWNNYFHLAVAFITQDSLQLEQFSHAKYNKILNKYGDMRRLIGFSIRDMWYKLGQNKICFIPGMVGPILEMTLIPEAELRKATIPIFFDMMLCEYQRSGDFKKFENEIILKLDHEVEGGRGDEQYMQLLESILMECAAEHPTIAKSVENFVNLVKGLLEKLLDYRGVMTDESKDNRMSCTVNLLNFYKDNNREEMYIRYLYKLRDLHLDCDNYTEAAYTLLLHTWLLKWSDEQCASQVMQTGQQHPQTHRQLKETLYETIIGYFDKGKMWEEAISLCKELAEQYEMEIFDYELLSQNLIQQAKFYESIMKILRPKPDYFAVGYYGQGFPSFLRNKVFIYRGKEYERREDFQMQLMTQFPNAEKMNTTSAPGDDVKNAPGQYIQCFTVQPVLDEHPRFKNKPVPDQIINFYKSNYVQRFHYSRPVRRGTVDPENEFASMWIERTSFVTAYKLPGILRWFEVVHMSQTTISPLENAIETMSTANEKILMMINQYQSDETLPINPLSMLLNGIVDPAVMGGFAKYEKAFFTEEYVRDHPEDQDKLTHLKDLIAWQIPFLGAGIKIHEKRVSDNLRPFHDRMEECFKNLKMKVEKEYGVREMPDFDDRRVGRPRSMLRSYRQMSIISLASMNSDCSTPSKPTSESFDLELASPKTPRVEQEEPISPGSTLPEVKLRRSKKRTKRSSVVFADEKAAAESDLKRLSRKHEFMSDTNLSEHAAIPLKASVLSQMSFASQSMPTIPALALSVAGIPGLDEANTSPRLSQTFLQLSDGDKKTLTRKKVNQFFKTMLASKSAEEGKQIPDSLSTDL

SEQ ID NO: 28658 - protein, 336 aa, Homo sapiens
MCVCAEDGKTLPVAVPIEDMQRIHLRFMFRHRSSLESKDKGEKNFAMSYVKLMKEDGTTLHDGFHDLVVLKGDSKKMEDASAYLTLPSYRHHVENKGATLSRSSSSVGGLSVSSRDVFSISTLVCSTKLTQNVGLLGLLKWRMKPQLEESMRRLFESINNLMKSQYKTTILLQVAALKYIPSVLHDVEMVFDAKLLSQLLYEFYTCIPPVKLQKQKVQSMNEIVQSNLFKKQECRDILLPVITKELKELLEQKDDMQHQVLERKYCVELLNSILEVLSYQDAAFTYHHIQEIMVQLLRTVNRTVITMGRDHILIGACCNCGFPSSTPHSLIQWLWG

SEQ ID NO: 28659 - protein, 621 aa, Homo sapiens
MAALKEDRSYGLSCGRVSDGSKVSVFHVKLTDSALRAFESYRARQDSVSLRPSIRFQGSQGHISIPQPDCPAEARTFSFYLSNIGRDNPQGSFDCIQQYVSSHGEVHLDCLGSIQDKITVCATDDSYQKARQSMAQAEEETRSRSAIVIKAGGRYLGKKVQFRKPAPGATDAVPSRKRATPINLASAIRKSGASAVSGGSGVSQRPFRDRVLHLLALRPYRKAELLLRLQKDGLTQADKDALDGLLQQVANMSAKDGTCTLQDCMYKDVQKDWPGYSEGDQQLLKRVLVRKLCQPQSTGSLLGDPAASSPPGERGRSASPPQKRLQPPDFIDPLANKKPRISHFTQRAQPAVNGKLGVPNGREALLPTPGPPASTDTLSSSTHLPPRLEPPRAHDPLADVSNDLGHSGRDCEHGEAAAPAPTVRLGLPLLTDCAQPSRPHGSPSRSKPKKKSKKHKDKERAAEDKPRAQLPDCAPATHATPGAPADTPGLNGTCSVSSVPTSTSETPDYLLKYAAISSSEQRQSYKNDFNAEYSEYRDLHARIERITRRFTQLDAQLRQLSQGSEEYETTRGQILQEYRKIKKTNTNYSQEKHRCEYLHSKLAHIKRLIAEYDQRQLQAWP

SEQ ID NO: 28660 - protein, 753 aa, Homo sapiens
MAAGSTTLHAVEKLQVRLATKTEPKKLEKYLQKLSALPMTADILAETGIRKTVKRLRKHQHVGDFARDLAARWKKLVLVDRNTRPGPQDPEESASRQRFGEALQDQEKAWGFPENATAPRSPSHSPEHRRTARRTPPGQQRPHPRSHSREPRAERKCPRIAPADSGRYRASPTRTAPLRMPEGPEPAAPGKQPGRGHTHAAQGGPLLCPGCQGQPQGKAVVSHSKGHKSSRQEKRPLCAQGDWHSPTLIREKSCGACLREETPRMPSWASARDRQPSDFKTDKEGGQAGSGQRVPALEEAPDSHQKRPQHSHSNKKRPSLDGRDPGNGTHGLSPEEKEQLSNDRETQEGKPPTAHLDRTSVSSLSEVEEVDMAEEFEQPTLSCEKYLTYDQLRKQKKKTGKSATTALGDKQRKANESKGTRESWDSAKKLPPVQESQSERLQAAGADSAGPKTVPSHVFSELWDLSEAWMQANYDPLSDSDSMTSQAKPEALSSPKFREEAAFPGRRVNAKMPVYSGSRPACQLQVPTLRQQCAQVLRNNPDALSDVGEVPYWVLEPVLEGWRPDQLYRRKKDNHALVRETDELRRNHCFQDFKEEKPQENKTWREQYLRLPDAPEQRLRVMTTNIRSARGNNPNGREAKMICFKSVAKTPYDTSRRQEKSAGDADPENGEIKPASKPAGSSHTPSSQSSSGGGRDSSSSILRWLPEKRANPCLSSSNEHAAPAAKTRKQAAKKVAPLMAKAIRDYKRRFSRR

SEQ ID NO: 28661 - protein, 546 aa, Homo sapiens
MAAGSTTLRAVGKLQVRLATKTEPKKLEKYLQKLSALPMTADILAETGIRKTVKRLRKHQHVGDFARDLAARWKKLVLVDRNTGPDPQDPEESASRQRFGEALQEREKAWGFPENATAPRSPSHSPEHRRTARRTPPGQQRPHPRSPSREPRAERKRPRMAPADSGPHRDPPTRTAPLPMPEGPEPAVPGEQPGRGHAHAAQGGPLLGQGCQGQPQGEAVGSHSKGHKSSRGASAQKSPPVQESQSERLQAAGADSAGPKTVPSHVFSELWDPSEAWMQANYDLLSAFEAMTSQANPEALSAPALQEEAAFPGRRVNAKMPVYSGSRPACQLQVPTLRQQCLRVPRNNPDALGDVEGVPYSVLEPVLEGWTPDQLYRTEKDNAALARETDELWRIHCLQDFKEEKPQEHESWRELYLRLRDAREQRLRVVTTKIRSARENKPSGRQTKMICFNSVAKTPYDASRRQEKSAGAADPGNGEMEPAPKPAGSSQAPSGLGDGDGGSVSGGGSSNRHAAPADKTRKQAAKKVAPLMAKAIRDYKGRFSRR

SEQ ID NO: 28662 - protein, 290 aa, Homo sapiens
MCLAGCTPRKAAAPGRGALPRARLPRTAPAAATMFQPAAKRGFTIESLVAKDGGTGGGTGGGGAGSHLLAAAASEEPLRPTALNYPHPSAAEAAFVSGFPAAAAAGAGRSLYGGPELVFPEAMNHPALTVHPAHQLGASPLQPPHSFFGAQHRDPLHFYPWVLRNRFFGHRFQASDVPQDGLLLHGPFARKPKRIRTAFSPSQLLRLERAFEKNHYVVGAERKQLAGSLSLSETQVKVWFQNRRTKYKRQKLEEEGPESEQKKKGSHHINRWRIATKQANGEDIDVTSND

SEQ ID NO: 28663 - protein, 119 aa, Homo sapiens
MVASDVPQDGLLLHGPFARKPKRIRTAFSPSQLLRLERAFEKNHYVVGAERKQLAGSLSLSETQVKVWFQNRRTKYKRQKLEEEGPESEQKKKGSHHINRWRIATKQANGEDIDVTSND

SEQ ID NO: 28664 - protein, 112 aa, Homo sapiens
MDGEEKTYGGCEGPDAMYVKLISSDGHEFIVKREHALTSGTIKAMLSGPGQFAENETNEVNFREIPSHVLSKVCMYFTYKVRYTNSSTEIPEFPIAPEIALELLMAANFLDC

SEQ ID NO: 28665 - protein, 96 aa, Homo sapiens
MYVKLISSDGHEFIVKREHALTSGTIKAMLSGPGQFAENETNEVNFREIPSHVLSKVCMYFTYKVRYTNSSTEIPEFPIAPEIALELLMAANFLDC

SEQ ID NO: 28666 - protein, 625 aa, Homo sapiens
MEEEGGGRSCGTTRELQKLKQQAMEYYRENDVPRRLEELLNSTFYLQPADVYGHLANCFSKLAKPPTICKIVGKDVLDGLGLPTLQVDIFCTIQNFPKNVCSVVISTHFEVHENALPELAKAEEAERASAVSTAVQWVNSTITHELQGMAPSDQAEVDHLLRIFFASKVQEDKGRKELEKSLEYSTVPTPLPPVPPPPPPPPPTKKKGQKPGRKDTITEKPIAPAEPVEPVLSGSMAIGAVSLAVAKACAMLLNKPLYLNIALLKHNQEQPTTLSMPLLMVSLVSCGKSSSGKLNLMKEVICIPHPELTTKQGVEMLMEMQKHINKIIEMPSPPKAETKKGHDGSKRGQQQITGKMSHLGCLTINCDSIEQPLLLIQEICANLGLELGTNLHLAINCAGHELMDYNKGKYEVIMGTYKNAAEMVDLYVDLINKYPSIIALIDPFRKEDSEQWDSIYHALGSRCYIIAGTASKSISKLLEQGNISIPKSNGLIIKHTNQTTMSDLVEITNLIDSKKHITVFGSTEGESSDDSLVDLAVGLGVRFIKLGGLSRGERVTKYNRLLTIEEELVQNGTLGFKEEHTFFYFNEEAEKAAEALEAAAAREPLVPTFPTQGVEESAETGASSG

SEQ ID NO: 28667 - protein, 308 aa, Homo sapiens
MEEEGGGRSCGTTRELQKLKQQAMEYYRENDVPRRLEELLNSTFYLQPADVYGHLPSPPKAETKKGHDGSKRGQQQITGKMSHLGCLTINCDSIEQPLLLIQEICANLGLELGTNLHLAINCAGHELMDYDSEQWDSIYHALGSRCYIIAGTASKSISKLLEQGNISIPKSNGLIIKHTNQTTMSDLVEITNLIDSKKHITVFGSTEGESSDDSLVDLAVGLGVRFIKLGGLSRGERVTKYNRLLTIEEELVQNGTLGFKEEHTFFYFNEEAEKAAEALEAAAAREPLVPTFPTQGVEESAETGASSG

SEQ ID NO: 28668 - protein, 363 aa, Homo sapiens
MAIGAVSLAVAKACAMLLNKPLYLNIALLKHNQEQPTTLSMPLLMVSLVSCGKSSSGKLNLMKEVICIPHPELTTKQGVEMLMEMQKHINKIIEMPSPPKAETKKGHDGSKRGQQQITGKMSHLGCLTINCDSIEQPLLLIQEICANLGLELGTNLHLAINCAGHELMDYNKGKYEVIMGTYKNAAEMVDLYVDLINKYPSIIALIDPFRKEDSEQWDSIYHALGSRCYIIAGTASKSISKLLEQGNISIPKSNGLIIKHTNQTTMSDLVEITNLIDSKKHITVFGSTEGESSDDSLVDLAVGLGVRFIKLGGLSRGERVTKYNRLLTIEEELVQNGTLATSSSSCDARIGGQEQETMTLVKV

SEQ ID NO: 28669 - protein, 118 aa, Homo sapiens
MDVFLMIRRHKTTIFTDAKESSTVFELKRIVEGILKRPPDEQRLYKDDQLLDDGKTLGECGFTSQTARPQAPATVGLAFRADDTFEALCIEPFSSPPELPDVMKPQDSGSSANEQAVQ

SEQ ID NO: 28670 - protein, 161 aa, Homo sapiens
MDVFLMIRRHKTTIFTDAKESSTVFELKRIVEGILKRPPDEQRLYKDDQLLDDGKTLGECGFTSQTARPQAPATVGLAFRADDTFEALCIEPFSSPPELPDVMKPQDSGSSANEQAVHLHVHSQTMAKSRNTSWSQCPGLTACSTREPQDGPTQVHPRWGL

SEQ ID NO: 28671 - protein, 279 aa, Homo sapiens
MEAVVNLYQEVMKHADPRIQGYPLMGSPLLMTSILLTYVYFVLSLGPRIMANRKPFQLRGFMIVYNFSLVALSLYIVYEFLMSGWLSTYTWRCDPVDYSNSPEALRMVRVAWLFLFSKFIELMDTVIFILRKKDGQVTFLHVFHHSVLPWSWWWGVKIAPGGMGSFHAMINSSVHVIMYLYYGLSAFGPVAQPYLWWKKHMTAIQLIQFVLVSLHISQYYFMSSCNYQYPVIIHLIWMYGTIFFMLFSNFWYHSYTKGKRLPRALQQNGAPGIAKVKAN

SEQ ID NO: 28672 - protein, 252 aa, Homo sapiens
MEAVVNLYQEVMKHADPRIQGYPLMGSPLLMTSILLTYVYFVLSLGPRIMANRKPFQLRGFMIVYNFSLVALSLYIVYEMVRVAWLFLFSKFIELMDTVIFILRKKDGQVTFLHVFHHSVLPWSWWWGVKIAPGGMGSFHAMINSSVHVIMYLYYGLSAFGPVAQPYLWWKKHMTAIQLIQFVLVSLHISQYYFMSSCNYQYPVIIHLIWMYGTIFFMLFSNFWYHSYTKGKRLPRALQQNGAPGIAKVKAN

SEQ ID NO: 28673 - protein, 2241 aa, Homo sapiens
MLPCKKRRTTVTESLQHKGNQEENNVDLESAVKPESDQVKDLSSVSLSWDPSHGRVAGFEVQSLQDAGNQLGMEDTSLSSGMLTQNTNVPILEGVDVAISQGITLPSLESFHPLNIHIGKGKLHATGSKRGKKMTLRPGPVTQEDRCDHLTLKEPFSGEPSEEVKEEGGKPQMNSEGEIPSLPSGSQSAKPVSQPRKSTQPDVCASPQEKPLRTLFHQPEEEIEDGGLFIPMEEQDNEESEKRRKKKKGTKRKRDGRGQEGTLAYDLKLDDMLDRTLEDGAKQHNLTAVNVRNILHEVITNEHVVAMMKAAISETEDMPMFEPKMTRSKLKEVVEKGVVIPTWNISPIKKANEIKPPQFVDIHLEEDDSSDEEYQPDDEEEDETAEESLLESDVESTASSPRGAKKSRLRQSSEMTETDEESGILSEAEKVTTPAIRHISAEVVPMGPPPPPKPKQTRDSTFMEKLHAVDEELASSPVCMDSFQPMDDSLIAFRTRSKMPLKDVPLGQLEAELQAPDITPDMYDPNTADDEDWKMWLGGLMNDDVGNEDEADDDDDPEYNFLEDLDEPDTEDFRTDRAVRITKKEVNELMEELFETFQDEMGFSNMEDDGPEEEECVAEPRPNFNTPQALRFEEPLANLLNEQHRTVKELFEQLKMKKSSAKQLQEVEKVKPQSEKVHQTLILDPAQRKRLQQQMQQHVQLLTQIHLLATCNPNLNPEATTTRIFLKELGTFAQSSIALHHQYNPKFQTLFQPCNLMGAMQLIEDFSTHVSIDCSPHKTVKKTANEFPCLPKQVAWILATSKVFMYPELLPVCSLKAKNPQDKIVFTKAEDNLLALGLKHFEGTEFPNPLISKYLLTCKTAHQLTVRIKNLNMNRAPDNIIKFYKKTKQLPVLGKCCEEIQPHQWKPPIEREEHRLPFWLKASLPSIQEELRHMADGAREVGNMTGTTEINSDRSLEKDNLELGSESRYPLLLPKGVVLKLKPVATRFPRKAWRQKRSSVLKPLLIQPSPSLQPSFNPGKTPARSTHSEAPPSKMVLRIPHPIQPATVLQTVPGVPPLGVSGGESFESPAALPAVPPEARTSFPLSESQTLLSSAPVPKVMLPSLAPSKFRKPYVRRRPSKRRGVKASPCMKPAPVIHHPASVIFTVPATTVKIVSLGGGCNMIQPVNAAVAQSPQTIPITTLLVNPTSFPCPLNQSLVASSVSPLIVSGNSVNLPIPSTPEDKAHVNVDIACAVADGENAFQGLEPKLEPQELSPLSATVFPKVEHSPGPPLADAECQEGLSENSACRWTVVKTEEGRQALEPLPQGIQESLNNPTPGDLEEIVKMEPEEAREEISGSPERDICDDIKVEHAVELDTGAPSEELSSAGEVTKQTVLQKEEERSQPTKTPSSSQEPPDEGTSGTDVNKGSSKNALSSMDPEVRLSSPPGKPEDSSSVDGQSVGTPVGPETGGEKNGPEEEEEEDFDDLTQDEEDEMSSASEESVLSVPELQETMEKLTWLASERRMSQEGESEEENSQEENSEPEEEEEEEAEGMESLQKEDEMTDEAVGDSAEKPPTFASPETAPEVETSRTPPGESIKAAGKGRNNHRARNKRGSRARASKDTSKLLLLYDEDILERDPLREQKDLAFAQAYLTRVREALQHIPGKYEDFLQVIYEFESSTQRRTAVDLYKSLQILLQDWPQLLKDFAAFLLPEQALACGLFEEQQAFEKSRKFLRQLEICFAENPSHHQKIIKVLQGCADCLPQEITELKTQMWQLLKGHDHLQDEFSIFFDHLRPAASRMGDFEEINWTEEKEYEFDGFEEVALPDVEEEEEPPKIPTASKNKRKKEIGVQNHDKETEWPDGAKDCACSCHEGGPDSKLKKSKRRSCSHCSSKVCDSKSYKSKEPHELVGSSPHREASPMPGAKEAGQGKDMMEEEAPEERESTEATQSRTVRTTRKGEMPVSAGLAVGSTLPSPREVTVTERLLLDGPPPHSPETPQFPPTTGAVLYTVKRNQVGPEVRSCPKASPRLQKEREGQKAVSESEALMLVWDASETEKLPGTVEPPASFLSPVSSKTRDAGRRHVSGKPDTQERWLPSSRARVKTRDRTCPVHESPSGIDTSETSPKAPRGGLAKDSGTQAKGPEGEQQPKAAEATVCANNSKVSSTGEKVVLWTREADRVILTMCQEQGAQPQTFNIISQQLGNKTPAEVSHRFRELMQLFHTACEASSEDEDDATSTSNADQLSDHGDLLSEEELDE

SEQ ID NO: 28674 - protein, 1529 aa, Homo sapiens
MLPCKKRRTTVTESLQHKGNQEENNVDLESAVKPESDQVKDLSSVSLSWDPSHGRVAGFEVQSLQDAGNQLGMEDTSLSSGMLTQNTNVPILEGVDVAISQGITLPSLESFHPLNIHIGKGKLHATGSKRGKKMTLRPGPVTQEDRCDHLTLKEPFSGEPSEEVKEEGGKPQMNSEGEIPSLPSGSQSAKPVSQPRKSTQPDVCASPQEKPLRTLFHQPEEEIEDGGLFIPMEEQDNEESEKRRKKKKGTKRKRDGRGQEGTLAYDLKLDDMLDRTLEDGAKQHNLTAVNVRNILHEVITNEHVVAMMKAAISETEDMPMFEPKMTRSKLKEVVEKGVVIPTWNISPIKKANEIKPPQFVDIHLEEDDSSDEEYQPDDEEEDETAEESLLESDVESTASSPRGAKKSRLRQSSEMTETDEESGILSEAEKVTTPAIRHISAEVVPMGPPPPPKPKQTRDSTFMEKLHAVDEELASSPVCMDSFQPMDDSLIAFRTRSKMPLKDVPLGQLEAELQAPDITPDMYDPNTADDEDWKMWLGGLMNDDVGNEDEADDDDDPEYNFLEDLDEPDTEDFRTDRAVRITKKEVNELMEELFETFQDEMGFSNMEDDGPEEEECVAEPRPNFNTPQALRFEEPLANLLNEQHRTVKELFEQLKMKKSSAKQLQEVEKVKPQSEKVHQTLILDPAQRKRLQQQMQQHVQLLTQIHLLATCNPNLNPEATTTRIFLKELGTFAQSSIALHHQYNPKFQTLFQPCNLMGAMQLIEDFSTHVSIDCSPHKTVKKTANEFPCLPKQVAWILATSKVFMYPELLPVCSLKAKNPQDKIVFTKAEDNLLALGLKHFEGTEFPNPLISKYLLTCKTAHQLTVRIKNLNMNRAPDNIIKFYKKTKQLPVLGKCCEEIQPHQWKPPIEREEHRLPFWLKASLPSIQEELRHMADGAREVGNMTGTTEINSDRSLEKDNLELGSESRYPLLLPKGVVLKLKPVATRFPRKAWRQKRSSVLKPLLIQPSPSLQPSFNPGKTPARSTHSEAPPSKMVLRIPHPIQPATVLQTVPGVPPLGVSGGESFESPAALPAVPPEARTSFPLSESQTLLSSAPVPKVMLPSLAPSKFRKPYVRRRPSKRRGVKASPCMKPAPVIHHPASVIFTVPATTVKIVSLGGGCNMIQPVNAAVAQSPQTIPITTLLVNPTSFPCPLNQSLVASSVSPLIVSGNSVNLPIPSTPEDKAHVNVDIACAVADGENAFQGLEPKLEPQELSPLSATVFPKVEHSPGPPLADAECQEGLSENSACRWTVVKTEEGRQALEPLPQGIQESLNNPTPGDLEEIVKMEPEEAREEISGSPERDICDDIKVEHAVELDTGAPSEELSSAGEVTKQTVLQKEEERSQPTKTPSSSQEPPDEGTSGTDVNKGSSKNALSSMDPEVRLSSPPGKPEDSSSVDGQSVGTPVGPETGGEKNGPEEEEEEDFDDLTQDEEDEMSSASEESVLSVPELQVRAGEYSQVFRGLSNMYHLLICHLLACCTMDSPKIICI

SEQ ID NO: 28675 - protein, 2240 aa, Homo sapiens
MLPCKKRRTTVTESLQHKGNQEENNVDLESAVKPESDQVKDLSSVSLSWDPSHGRVAGFEVQSLQDAGNQLGMEDTSLSSGMLTQNTNVPILEGVDVAISQGITLPSLESFHPLNIHIGKGKLHATGSKRGKKMTLRPGPVTQEDRCDHLTLKEPFSGEPSEEVKEEGGKPQMNSEGEIPSLPSGSQSAKPVSQPRKSTQPDVCASPQEKPLRTLFHQPEEEIEDGGLFIPMEEQDNEESEKRRKKKKGTKRKRDGRGQEGTLAYDLKLDDMLDRTLEDGAKQHNLTAVNVRNILHEVITNEHVVAMMKAAISETEDMPMFEPKMTRSKLKEVVEKGVVIPTWNISPIKKANEIKPPQFVDIHLEEDDSSDEEYQPDDEEEDETAEESLLESDVESTASSPRGAKKSRLRQSSEMTETDEESGILSEAEKVTTPAIRHISAEVVPMGPPPPPKPKQTRDSTFMEKLHAVDEELASSPVCMDSFQPMDDSLIAFRTRSKMPLKDVPLGQLEAELQAPDITPDMYDPNTADDEDWKMWLGGLMNDDVGNEDEADDDDDPEYNFLEDLDEPDTEDFRTDRAVRITKKEVNELMEELFETFQDEMGFSNMEDDGPEEEECVAEPRPNFNTPQALRFEEPLANLLNEQHRTVKELFEQLKMKKSSAKQLQEVEKVKPQSEKVHQTLILDPAQRKRLQQQMQQHVQLLTQIHLLATCNPNLNPEATTTRIFLKELGTFAQSSIALHHQYNPKFQTLFQPCNLMGAMQLIEDFSTHVSIDCSPHKTVKKTANEFPCLPKQVAWILATSKVFMYPELLPVCSLKAKNPQDKIVFTKAEDNLLALGLKHFEGTEFPNPLISKYLLTCKTAHQLTVRIKNLNMNRAPDNIIKFYKKTKQLPVLGKCCEEIQPHQWKPPIEREEHRLPFWLKASLPSIQEELRHMADGAREVGNMTGTTEINSDRSLEKDNLELGSESRYPLLLPKGVVLKLKPVATRFPRKAWRQKRSSVLKPLLIQPSPSLQPSFNPGKTPARSTHSEAPPSKMVLRIPHPIQPATVLQTVPGVPPLGVSGGESFESPAALPAVPPEARTSFPLSESQTLLSSAPVPKVMLPSLAPSKFRKPYVRRRPSKRRGVKASPCMKPAPVIHHPASVIFTVPATTVKIVSLGGGCNMIQPVNAAVAQSPQTIPITTLLVNPTSFPCPLNQSLVASSVSPLIVSGNSVNLPIPSTPEDKAHVNVDIACAVADGENAFQGLEPKLEPQELSPLSATVFPKVEHSPGPPLADAECQEGLSENSACRWTVVKTEEGRQALEPLPQGIQESLNNPTPGDLEEIVKMEPEEAREEISGSPERDICDDIKVEHAVELDTGAPSEELSSAGEVTKQTVLQKEEERSQPTKTPSSSQEPPDEGTSGTDVNKGSSKNALSSMDPEVRLSSPPGKPEDSSSVDGQSVGTPVGPETGGEKNGPEEEEEEDFDDLTQDEEDEMSSASEESVLSVPELQETMEKLTWLASERRMSQEGESEEENSQEENSEPEEEEEEEAEGMESLQKEDEMTDEAVGDSAEKPPTFASPETAPEVETSRTPPGESIKAAGKGRNNHRARNKRGSRARASKDTSKLLLLYDEDILERDPLREQKDLAFAQAYLTRVREALQHIPGKYEDFLQVIYEFESSTQRRTAVDLYKSLQILLQDWPQLLKDFAAFLLPEQALACGLFEEQQAFEKSRKFLRQLEICFAENPSHHQKIIKVLQGCADCLPQEITELKTQMWQLLKGHDHLQDEFSIFFDHLRPAASRMGDFEEINWTEEKEYEFDGFEEVALPDVEEEEEPPKIPTASKNKRKKEIGVQNHDKETEWPDGAKDCACSCHEGGPDSKLKKSKRRSCSHCSSKVCDSKSYKSKEPHELVGSSPHREASPMPGAKEAGQGKDMMEEEAPEERESTEATQSRTVRTTRKGEMPVSGLAVGSTLPSPREVTVTERLLLDGPPPHSPETPQFPPTTGAVLYTVKRNQVGPEVRSCPKASPRLQKEREGQKAVSESEALMLVWDASETEKLPGTVEPPASFLSPVSSKTRDAGRRHVSGKPDTQERWLPSSRARVKTRDRTCPVHESPSGIDTSETSPKAPRGGLAKDSGTQAKGPEGEQQPKAAEATVCANNSKVSSTGEKVVLWTREADRVILTMCQEQGAQPQTFNIISQQLGNKTPAEVSHRFRELMQLFHTACEASSEDEDDATSTSNADQLSDHGDLLSEEELDE

SEQ ID NO: 28676 - protein, 265 aa, Homo sapiens
MNMSVLTLQEYEFEKQFNENEAIQWMQENWKKSFLFSALYAAFIFGGRHLMNKRAKFELRKPLVLWSLTLAVFSIFGALRTGAYMVYILMTKGLKQSVCDQGFYNGPVSKFWAYAFVLSKAPELGDTIFIILRKQKLIFLHWYHHITVLLYSWYSYKDMVAGGGWFMTMNYGVHAVMYSYYALRAAGFRVSRKFAMFITLSQITQMLMGCVVNYLVFCWMQHDQCHSHFQNIFWSSLMYLSYLVLFCHFFFEAYIGKMRKTTKAE

SEQ ID NO: 28677 - protein, 83 aa, Homo sapiens
MASTPMGNEGEKKSSWPSQAAPSLRGGPASLSRSEEYLSQISAELMEEALCTACCHLNPVPIKKKQSQDQATQISKRAFFTKT

SEQ ID NO: 28678 - protein, 434 aa, Homo sapiens
MSIEKIWAREILDSRGNPTVEVDLYTAKGLFRAAVPSGASTGIYEALELRDGDKQRYLGKGVLKAVDHINSTIAPALISSGLSVVEQEKLDNLMLELDGTENKSKFGANAILGVSLAVCKAGAAERELPLYRHIAQLAGNSDLILPVPAFNVINGGSHAGNKLAMQEFMILPVGAESFRDAMRLGAEVYHTLKGVIKDKYGKDATNVGDEGGFAPNILENSEALELVKEAIDKAGYTEKIVIGMDVAASEFYRDGKYDLDFKSPTDPSRYITGDQLGALYQDFVRDYPVVSIEDPFDQDDWAAWSKFTANVGIQIVGDDLTVTNPKRIERAVEEKACNCLLLKVNQIGSVTEAIQACKLAQENGWGVMVSHRSGETEDTFIADLVVGLCTGQIKTGAPCRSERLAKYNQLMRIEEELGDEARFAGHNFRNPSVL

SEQ ID NO: 28679 - protein, 391 aa, Homo sapiens
MSIEKIWAREILDSRGNPTVEVDLYTAKGLFRAAVPSGASTGIYEALELRDGDKQRYLGKAKFGANAILGVSLAVCKAGAAERELPLYRHIAQLAGNSDLILPVPAFNVINGGSHAGNKLAMQEFMILPVGAESFRDAMRLGAEVYHTLKGVIKDKYGKDATNVGDEGGFAPNILENSEALELVKEAIDKAGYTEKIVIGMDVAASEFYRDGKYDLDFKSPTDPSRYITGDQLGALYQDFVRDYPVVSIEDPFDQDDWAAWSKFTANVGIQIVGDDLTVTNPKRIERAVEEKACNCLLLKVNQIGSVTEAIQACKLAQENGWGVMVSHRSGETEDTFIADLVVGLCTGQIKTGAPCRSERLAKYNQLMRIEEELGDEARFAGHNFRNPSVL

SEQ ID NO: 28680 - protein, 2266 aa, Homo sapiens
MRDLRAQVTSGLLPFPEVTLQALGEDEITLESVLRGKFAAGKNGLACLACGPQLEVVNSITGERLSAYRFSGVNEQPPVVLAVKEFSWQKRTGLLIGLEETEGSVLCLYDLGISKVVKAVVLPGRVTAIEPIINHGGASASTQHLHPSLRWLFGVAAVVTDVGQILLVDLCLDDLSCNQNEVEASDLEVLTGIPAEVPHIRESVMRQGRHLCFQLVSPTGTAVSTLSYISRTNQLAVGFSDGYLALWNMKSMKREYYIQLESGQVPVYAVTFQEPENDPRNCCYLWAVQSTQDSEGDVLSLHLLQLAFGNRKCLASGQILYEGLEYCEERYTLDLTGGMFPLRGQTSNTKLLGCQSIEKFRSHGDREEGVNEALSPDTSVSVFTWQVNIYGQGKPSVYLGLFDINRWYHAQMPDSLRSGEYLHNCSYFALWSLESVVSRTSPHGILDILVHERSLNRGVPPSYPPPEQFFNPSTYNFDATCLLNSGVVHLTCTGFQKETLTFLKKSGPSLNELIPDGYNRCLVAGLLSPRFVDVQPSSLSQEEQLEAILSAAIQTSSLGLLTGYIRRWITEEQPNSATNLRFVLEWTWNKVVLTKEEFDRLCVPLFDGSCHFMDPQTIQSIQQCYLLLSNLNIVLSCFASEAREITERGLIDLSNKFVVSHLICQYAQVVLWFSHSGLLPEGIDDSVQLSRLCYNYPVIQNYYTSRRQKFERLSRGKWNPDCLMIDGLVSQLGERIEKLWKRDEGGTGKYPPASLHAVLDMYLLDGVTEAAKHSITIYLLLDIMYSFPNKTDTPIESFPTVFAISWGQVKLIQGFWLIDHNDYESGLDLLFHPATAKPLSWQHSKIIQAFMSQGEHRQALRYIQTMKPTVSSGNDVILHLTVLLFNRCMVEAWNFLRQHCNRLNIEELLKHMYEVCQEMGLMEDLLKLPFTDTEQECLVKFLQSSASVQNHEFLLVHHLQRANYVPALKLNQTLKINVMNDRDPRLRERSLARNSILDQYGKILPRVHRKLAIERAKPYHLSTSSVFRLVSRPKPLSAVPKQVVTGTVLTRSVFINNVLSKIGEVWASKEPINSTTPFNSSKIEEPSPIVYSLPAPELPEAFFGTPISKASQKISRLLDLVVQPVPRPSQCSEFIQQSSMKSPLYLVSRSLPSSSQLKGSPQAISRASELHLLETPLVVKKAKSLAMSVTTSGFSEFTPQSILRSTLRSTPLASPSPSPGRSPQRLKETRISFVEEDVHPKWIPGAADDSKLEVFTTPKKCAVPVETEWLKSKDRTTSFFLNSPEKEHQEMDEGSQSLEKLDVSKGNSSVSITSDETTLEYQDAPSPEDLEETVFTASKPKSSSTALTTNVTEQTEKDGDKDVFASEVTPSDLQKQMGNLEDAETKDLLVAAEAFSELNHLSPVQGTEASLCAPSVYEGKIFTQKSKVPVLDEGLTSVETYTPAIRANDNKSMADVLGDGGNSSLTISEGPIVSERRLNQEVALNLKEDHEVEVGVLKESVDLPEEKLPISDSPPDTQEIHVIEQEKLEAQDSGEEARNLSFNELYPSGTLKLQYNFDTIDQQFCDLADNKDTAECDIAEVDGELFVAQSNFTLILEGEEGEVEPGDFASSDVLPKAANTATEEKLVCSGENDNHGQIANLPSAVTSDQKSQKVDTLPYVPEPIKVAIAENLLDVIKDTRSKEITSDTMEQSIHETIPLVSQNIMCPTKLVKSAFKTAQETSTMTMNVSQVDDVVSSKTRTRGQRIQNVNVKSAQQEASADVATPKMPGQSVRKKTRKAKEISEASENIYSDVRGLSQNQQIPQNSVTPRRGRRKKEVNQDILENTSSVEQELQITTGRESKRLKSSQLLEPAVEETTKKEVKVSSVTKRTPRRIKRSVENQESVEIINDLKVSTVTSPSRMIRKLRSTNLDASENTGNKQDDKSSDKQLRIKHVRRVRGREVSPSDVREDSNLESSQLTVQAEFDMSAIPRKRGRPRKINPSEDVGSKAVKEERSPKKKEAPSIRRRSTRNTPAKSENVDVGKPALGKSILVPNEELSMVMSSKKKLTKKTESQSQKRSLHSVSEERTDEMTHKETNEQEERLLATASFTKSSRSSRTRSSKAILLPDLSEPNNEPLFSPASEVPRKAKAKKIEVPAQLKELVSDLSSQFVISPPALRSRQKNTSNKNKLEDELKDDAQSVETLGKPKAKRIRTSKTKQASKNTEKESAWSPPPIEIRLISPLASPADGVKSKPRKTTEVTGTGLGRNRKKLSSYPKQILRRKML

SEQ ID NO: 28681 - protein, 2301 aa, Homo sapiens
MDSLAGLSPREAAGVLSLSCVGVCSTCAWAWPHGSMRDLRAQVTSGLLPFPEVTLQALGEDEITLESVLRGKFAAGKNGLACLACGPQLEVVNSITGERLSAYRFSGVNEQPPVVLAVKEFSWQKRTGLLIGLEETEGSVLCLYDLGISKVVKAVVLPGRVTAIEPIINHGGASASTQHLHPSLRWLFGVAAVVTDVGQILLVDLCLDDLSCNQNEVEASDLEVLTGIPAEVPHIRESVMRQGRHLCFQLVSPTGTAVSTLSYISRTNQLAVGFSDGYLALWNMKSMKREYYIQLESGQVPVYAVTFQEPENDPRNCCYLWAVQSTQDSEGDVLSLHLLQLAFGNRKCLASGQILYEGLEYCEERYTLDLTGGMFPLRGQTSNTKLLGCQSIEKFRSHGDREEGVNEALSPDTSVSVFTWQVNIYGQGKPSVYLGLFDINRWYHAQMPDSLRSGEYLHNCSYFALWSLESVVSRTSPHGILDILVHERSLNRGVPPSYPPPEQFFNPSTYNFDATCLLNSGVVHLTCTGFQKETLTFLKKSGPSLNELIPDGYNRCLVAGLLSPRFVDVQPSSLSQEEQLEAILSAAIQTSSLGLLTGYIRRWITEEQPNSATNLRFVLEWTWNKVVLTKEEFDRLCVPLFDGSCHFMDPQTIQSIQQCYLLLSNLNIVLSCFASEAREITERGLIDLSNKFVVSHLICQYAQVVLWFSHSGLLPEGIDDSVQLSRLCYNYPVIQNYYTSRRQKFERLSRGKWNPDCLMIDGLVSQLGERIEKLWKRDEGGTGKYPPASLHAVLDMYLLDGVTEAAKHSITIYLLLDIMYSFPNKTDTPIESFPTVFAISWGQVKLIQGFWLIDHNDYESGLDLLFHPATAKPLSWQHSKIIQAFMSQGEHRQALRYIQTMKPTVSSGNDVILHLTVLLFNRCMVEAWNFLRQHCNRLNIEELLKHMYEVCQEMGLMEDLLKLPFTDTEQECLVKFLQSSASVQNHEFLLVHHLQRANYVPALKLNQTLKINVMNDRDPRLRERSLARNSILDQYGKILPRVHRKLAIERAKPYHLSTSSVFRLVSRPKPLSAVPKQVVTGTVLTRSVFINNVLSKIGEVWASKEPINSTTPFNSSKIEEPSPIVYSLPAPELPEAFFGTPISKASQKISRLLDLVVQPVPRPSQCSEFIQQSSMKSPLYLVSRSLPSSSQLKGSPQAISRASELHLLETPLVVKKAKSLAMSVTTSGFSEFTPQSILRSTLRSTPLASPSPSPGRSPQRLKETRISFVEEDVHPKWIPGAADDSKLEVFTTPKKCAVPVETEWLKSKDRTTSFFLNSPEKEHQEMDEGSQSLEKLDVSKGNSSVSITSDETTLEYQDAPSPEDLEETVFTASKPKSSSTALTTNVTEQTEKDGDKDVFASEVTPSDLQKQMGNLEDAETKDLLVAAEAFSELNHLSPVQGTEASLCAPSVYEGKIFTQKSKVPVLDEGLTSVETYTPAIRANDNKSMADVLGDGGNSSLTISEGPIVSERRLNQEVALNLKEDHEVEVGVLKESVDLPEEKLPISDSPPDTQEIHVIEQEKLEAQDSGEEARNLSFNELYPSGTLKLQYNFDTIDQQFCDLADNKDTAECDIAEVDGELFVAQSNFTLILEGEEGEVEPGDFASSDVLPKAANTATEEKLVCSGENDNHGQIANLPSAVTSDQKSQKVDTLPYVPEPIKVAIAENLLDVIKDTRSKEITSDTMEQSIHETIPLVSQNIMCPTKLVKSAFKTAQETSTMTMNVSQVDDVVSSKTRTRGQRIQNVNVKSAQQEASADVATPKMPGQSVRKKTRKAKEISEASENIYSDVRGLSQNQQIPQNSVTPRRGRRKKEVNQDILENTSSVEQELQITTGRESKRLKSSQLLEPAVEETTKKEVKVSSVTKRTPRRIKRSVENQESVEIINDLKVSTVTSPSRMIRKLRSTNLDASENTGNKQDDKSSDKQLRIKHVRRVRGREVSPSDVREDSNLESSQLTVQAEFDMSAIPRKRGRPRKINPSEDVGSKAVKEERSPKKKEAPSIRRRSTRNTPAKSENVDVGKPALGKSILVPNEELSMVMSSKKKLTKKTESQSQKRSLHSVSEERTDEMTHKETNEQEERLLATASFTKSSRSSRTRSSKAILLPDLSEPNNEPLFSPASEVPRKAKAKKIEVPAQLKELVSDLSSQFVISPPALRSRQKNTSNKNKLEDELKDDAQSVETLGKPKAKRIRTSKTKQASKNTEKESAWSPPPIEIRLISPLASPADGVKSKPRKTTEVTGTGLGRNRKKLSSYPKQILRRKML

SEQ ID NO: 28682 - protein, 2275 aa, Homo sapiens
MAAERRCGSMRDLRAQVTSGLLPFPEVTLQALGEDEITLESVLRGKFAAGKNGLACLACGPQLEVVNSITGERLSAYRFSGVNEQPPVVLAVKEFSWQKRTGLLIGLEETEGSVLCLYDLGISKVVKAVVLPGRVTAIEPIINHGGASASTQHLHPSLRWLFGVAAVVTDVGQILLVDLCLDDLSCNQNEVEASDLEVLTGIPAEVPHIRESVMRQGRHLCFQLVSPTGTAVSTLSYISRTNQLAVGFSDGYLALWNMKSMKREYYIQLESGQVPVYAVTFQEPENDPRNCCYLWAVQSTQDSEGDVLSLHLLQLAFGNRKCLASGQILYEGLEYCEERYTLDLTGGMFPLRGQTSNTKLLGCQSIEKFRSHGDREEGVNEALSPDTSVSVFTWQVNIYGQGKPSVYLGLFDINRWYHAQMPDSLRSGEYLHNCSYFALWSLESVVSRTSPHGILDILVHERSLNRGVPPSYPPPEQFFNPSTYNFDATCLLNSGVVHLTCTGFQKETLTFLKKSGPSLNELIPDGYNRCLVAGLLSPRFVDVQPSSLSQEEQLEAILSAAIQTSSLGLLTGYIRRWITEEQPNSATNLRFVLEWTWNKVVLTKEEFDRLCVPLFDGSCHFMDPQTIQSIQQCYLLLSNLNIVLSCFASEAREITERGLIDLSNKFVVSHLICQYAQVVLWFSHSGLLPEGIDDSVQLSRLCYNYPVIQNYYTSRRQKFERLSRGKWNPDCLMIDGLVSQLGERIEKLWKRDEGGTGKYPPASLHAVLDMYLLDGVTEAAKHSITIYLLLDIMYSFPNKTDTPIESFPTVFAISWGQVKLIQGFWLIDHNDYESGLDLLFHPATAKPLSWQHSKIIQAFMSQGEHRQALRYIQTMKPTVSSGNDVILHLTVLLFNRCMVEAWNFLRQHCNRLNIEELLKHMYEVCQEMGLMEDLLKLPFTDTEQECLVKFLQSSASVQNHEFLLVHHLQRANYVPALKLNQTLKINVMNDRDPRLRERSLARNSILDQYGKILPRVHRKLAIERAKPYHLSTSSVFRLVSRPKPLSAVPKQVVTGTVLTRSVFINNVLSKIGEVWASKEPINSTTPFNSSKIEEPSPIVYSLPAPELPEAFFGTPISKASQKISRLLDLVVQPVPRPSQCSEFIQQSSMKSPLYLVSRSLPSSSQLKGSPQAISRASELHLLETPLVVKKAKSLAMSVTTSGFSEFTPQSILRSTLRSTPLASPSPSPGRSPQRLKETRISFVEEDVHPKWIPGAADDSKLEVFTTPKKCAVPVETEWLKSKDRTTSFFLNSPEKEHQEMDEGSQSLEKLDVSKGNSSVSITSDETTLEYQDAPSPEDLEETVFTASKPKSSSTALTTNVTEQTEKDGDKDVFASEVTPSDLQKQMGNLEDAETKDLLVAAEAFSELNHLSPVQGTEASLCAPSVYEGKIFTQKSKVPVLDEGLTSVETYTPAIRANDNKSMADVLGDGGNSSLTISEGPIVSERRLNQEVALNLKEDHEVEVGVLKESVDLPEEKLPISDSPPDTQEIHVIEQEKLEAQDSGEEARNLSFNELYPSGTLKLQYNFDTIDQQFCDLADNKDTAECDIAEVDGELFVAQSNFTLILEGEEGEVEPGDFASSDVLPKAANTATEEKLVCSGENDNHGQIANLPSAVTSDQKSQKVDTLPYVPEPIKVAIAENLLDVIKDTRSKEITSDTMEQSIHETIPLVSQNIMCPTKLVKSAFKTAQETSTMTMNVSQVDDVVSSKTRTRGQRIQNVNVKSAQQEASADVATPKMPGQSVRKKTRKAKEISEASENIYSDVRGLSQNQQIPQNSVTPRRGRRKKEVNQDILENTSSVEQELQITTGRESKRLKSSQLLEPAVEETTKKEVKVSSVTKRTPRRIKRSVENQESVEIINDLKVSTVTSPSRMIRKLRSTNLDASENTGNKQDDKSSDKQLRIKHVRRVRGREVSPSDVREDSNLESSQLTVQAEFDMSAIPRKRGRPRKINPSEDVGSKAVKEERSPKKKEAPSIRRRSTRNTPAKSENVDVGKPALGKSILVPNEELSMVMSSKKKLTKKTESQSQKRSLHSVSEERTDEMTHKETNEQEERLLATASFTKSSRSSRTRSSKAILLPDLSEPNNEPLFSPASEVPRKAKAKKIEVPAQLKELVSDLSSQFVISPPALRSRQKNTSNKNKLEDELKDDAQSVETLGKPKAKRIRTSKTKQASKNTEKESAWSPPPIEIRLISPLASPADGVKSKPRKTTEVTGTGLGRNRKKLSSYPKQILRRKML

SEQ ID NO: 28683 - protein, 534 aa, Homo sapiens
MFSWVSKDARRKKEPELFQTVAEGLRQLYAQKLLPLEEHYRFHEFHSPALEDADFDNKPMVLLVGQYSTGKTTFIRHLIEQDFPGMRIGPEPTTDSFIAVMHGPTEGVVPGNALVVDPRRPFRKLNAFGNAFLNRFMCAQLPNPVLDSISIIDTPGILSGEKQRISRGYDFAAVLEWFAERVDRIILLFDAHKLDISDEFSEVIKALKNHEDKIRVVLNKADQIETQQLMRVYGALMWSLGKIINTPEVVRVYIGSFWSHPLLIPDNRKLFEAEEQDLFKDIQSLPRNAALRKLNDLIKRARLAKVHAYIISSLKKEMPNVFGKESKKKELVNNLGEIYQKIEREHQISPGDFPSLRKMQELLQTQDFSKFQALKPKLLDTVDDMLANDIARLMVMVRQEESLMPSQVVKGGAFDGTMNGPFGHGYGEGAGEGIDDVEWVVGKDKPTYDEIFYTLSPVNGKITGANAKKEMVKSKLPNTVLGKIWKLADVDKDGLLDDEEFALANHLIKVKLEGHELPADLPPHLVPPSKRRHE

SEQ ID NO: 28684 - protein, 354 aa, Homo sapiens
MGSGISSESKESAKRSKELEKKLQEDAERDARTVKLLLLGAGESGKSTIVKQMKIIHKNGYSEQECMEFKAVIYSNTLQSILAIVKAMTTLGIDYVNPRSAEDQRQLYAMANTLEDGGMTPQLAEVIKRLWRDPGIQACFERASEYQLNDSAAYYLNDLDRITASGYVPNEQDVLHSRVKTTGIIETQFSFKDLHFRMFDVGGQRSERKKWIHCFEGVTCIIFCAALSAYDMVLVEDEEVNRMHESLHLFNSICNHKYFSTTSIVLFLNKKDIFQEKVTKVHLSICFPEYTGPNTFEDAGNYIKNQFLDLNLKKEDKEIYSHMTCATDTQNVKFVFDAVTDIIIKENLKDCGLF

SEQ ID NO: 28685 - protein, 352 aa, Homo sapiens
MASRKEGTGSTATSSSSTAGAAGKGKGKGGSGDSAVKQVQIDGLVVLKIIKHYQEEGQGTEVVQGVLLGLVVEDRLEITNCFPFPQHTEDDADFDEVQYQMEMMRSLRHVNIDHLHVGWYQSTYYGSFVTRALLDSQFSYQHAIEESVVLIYDPIKTAQGSLSLKAYRLTPKLMEVCKEKDFSPEALKKANITFEYMFEEVPIVIKNSHLINVLMWELEKKSAVADKHELLSLASSNHLGKNLQLLMDRVDEMSQDIVKYNTYMRNTSKQQQQKHQYQQRRQQENMQRQSRGEPPLPEEDLSKLFKPPQPPARMDSLLIAGQINTYCQNIKEFTAQNLGKLFMAQALQEYNN

SEQ ID NO: 28686 - protein, 452 aa, Homo sapiens
MLCGRPRSSSDNRNFLRERAGLSSAAVQTRIGNSAASRRSPAARPPVPAPPALPRGRPGTEGSTSLSAPAVLVVAVAVVVVVVSAVAWAMANYIHVPPGSPEVPKLNVTVQDQEEHRCREGALSLLQHLRPHWDPQEVTLQLFTDGITNKLIGCYVGNTMEDVVLVRIYGNKTELLVDRDEEVKSFRVLQAHGCAPQLYCTFNNGLCYEFIQGEALDPKHVCNPAIFRLIARQLAKIHAIHAHNGWIPKSNLWLKMGKYFSLIPTGFADEDINKRFLSDIPSSQILQEEMTWMKEILSNLGSPVVLCHNDLLCKNIIYNEKQGDVQFIDYEYSGYNYLAYDIGNHFNEFAGVSDVDYSLYPDRELQSQWLRAYLEAYKEFKGFGTEVTEKEVEILFIQVNQFALASHFFWGLWALIQAKYSTIEFDFLGYAIVRFNQYFKMKPEVTALKVPE

SEQ ID NO: 28687 - protein, 258 aa, Homo sapiens
MLCGRPRSSSDNRNFLRERAGLSSAAVQTRIGNSAASRRSPAARPPVPAPPALPRGRPGTEGSTSLSAPAVLVVAVAVVVVVVSAVAWAMANYIHVPPGSPEVPKLNVTVQDQEEHRCREGALSLLQHLRPHWDPQEVTLQLFTDGITNKLIGCYVGNTMEDVVLVRIYGNKTELLVDRDEEVKSFRVLQAHGCAPQLYCTFNNGLCYEFIQGEALDPKHVCNPAIFSLSSLTLCKGKTTRCFGLTGCRGSRLLLSFF

SEQ ID NO: 28688 - protein, 1958 aa, Homo sapiens
MADRTAPRCQLRLEWVYGYRGHQCRNNLYYTAGKEVVYFVAGVGVVYNTREHSQKFFLGHNDDIISLALHPDKTLVATGQVGKEPYICIWDSYNVQTVSLLKDVHTHGVACLAFDSDGQRLASVGLDAKNTVCIWDWRKGKLLASATGHSDRIFDISWDPYQPNRVVSCGVKHIKFWTLCGNALTAKRGIFGKTGDLQTILCLACAKEDITYSGALNGDIYVWKGLNLVRTIQGAHSAGIFSMYACEEGFATGGRDGCIRLWDTDFKPITKIDLRETEQGYKGLSIRSVCWKADRLLAGTQDSEIFEVIVRERDKPMLILQGHCEGELWALALHPKKPLAVTGSDDRSVRLWSLADHALIARCNMEEAVRSVAFSPDGSQLALGMKDGSFIVLRVRDMTEVVHIKDRKEVIHEMKFSPDGSYLAVGSNDGPVDVYAVAQRYKKIGECSKSLSFITHIDWSLDSKYLQTNDGAGERLFYRMPSGKPLTSKEEIKGIPWASWTCVKGPEVSGIWPKYTEVTDINSVDANYNSSVLVSGDDFGLVKLFKFPCLKRGAKFRKYVGHSAHVTNVRWSHDFQWVLSTGGADHSVFQWRFIPEGVSNGMLETAPQEGGADSYSEESDSDLSDVPELDSDIEQEAQINYDRQVYKEDLPQLKQQSKEKNHAVPFLKREKAPEDSLKLQFIHGYRGYDCRNNLFYTQAGEVVYHIAAVAVVYNRQQHSQRLYLGHDDDILSLTIHPVKDYVATGQVGRDAAIHVWDTQTLKCLSLLKGQHQRGVCALDFSADGKCLVSVGLDDFHSIVFWDWKKGEKIATTRGHKDKIFVVKCNPHHVDKLVTVGIKHIKFWQQAGGGFTSKRGTFGSVGKLETMMCVSYGRMEDLVFSGAATGDIFIWKDILLLKTVKAHDGPVFAMYALDKGFVTGGKDGIVELWDDMFERCLKTYAIKRSALSTSSKGLLLEDNPSIRAITLGHGHILVGTKNGEILEIDKSGPMTLLVQGHMEGEVWGLAAHPLLPICATVSDDKTLRIWELSAQHRMLAVRKLKKGGRCCAFSPDGKALAVGLNDGSFLVVNADTVEDMVSFHHRKEMISDIKFSKDTGKYLAVASHDNFVDIYNVLTSKRVGICKGASSYITHIDWDSRGKLLQVNSGAREQLFFEAPRGKRHIIRPSEIEKIEWDTWTCVLGPTCEGIWPAHSDITDVNAASLTKDCSLLATGDDFGFVKLFSYPVKGQHARFKKYVGHSAHVTNVRWLHNDSVLLTVGGADTALMIWTREFVGTQESKLVDSEESDTDVEEDGGYDSDVAREKAIDYTTKIYAVSIREMEGTKPHQQLKEVSVEERPPVSRAAPQPEKLQKNNITKKKKLVEELALDHVFGYRGFDCRNNLHYLNDGADIIFHTAAAGIVQNLSTGSQSFYLEHTDDILCLTVNQHPKYRNVVATSQIGTTPSIHIWDAMTKHTLSMLRCFHSKGVNYINFSATGKLLVSVGVDPEHTITVWRWQEGAKVASRGGHLERIFVVEFRPDSDTQFVSVGVKHMKFWTLAGSALLYKKGVIGSLGAAKMQTMLSVAFGANNLTFTGAINGDVYVWKDHFLIRLVAKAHTGPVFTMYTTLRDGLIVTGGKERPTKEGGAVKLWDQEMKRCRAFQLETGQLVECVRSVCRGKGKILVGTKDGEIIEVGEKNAASNILIDGHMEGEIWGLATHPSKDLFISASNDGTARIWDLADKKLLNKVSLGHAARCAAYSPDGEMVAIGMKNGEFVILLVNSLKVWGKKRDRKSAIQDIRISPDNRFLAVGSSEHTVDFYDLTQGTNLNRIGYCKDIPSFVIQMDFSADGKYIQVSTGAYKRQVHEVPLGKQVTEAVVIEKITWASWTSVLGDEVIGIWPRNADKADVNCACVTHAGLNIVTGDDFGLVKLFDFPCTEKFAKHKRYFGHSAHVTNIRFSYDDKYVVSTGGDDCSVFVWRCL

SEQ ID NO: 28689 - protein, 1874 aa, Homo sapiens
MADRTAPRCQLRLEWVYGYRGHQCRNNLYYTAGKEVVYFVAGVGVVYNTREHSQKFFLGHNDDIISLALHPDKTLVATGQVGKEPYICIWDSYNVQTVSLLKDVHTHGVACLAFDSDGQRLASVGLDAKNTVCIWDWRKGKLLASATGHSDRIFDISWDPYQPNRVVSCGVKHIKFWTLCGNALTAKRGIFGKTGDLQTILCLACAKEDITYSGALNGDIYVWKGLNLVRTIQGAHSAGIFSMYACEEGFATGGRDGCIRLWDTDFKPITKIDLRETEQGYKGLSIRSVCWKADRLLAGTQDSEIFEVIVRERDKPMLILQGHCEGELWALALHPKKPLAVTGSDDRSVRLWSLADHALIARCNMEEAVRSVAFSPDGSQLALGMKDGSFIVLRVRDMTEVVHIKDRKEVIHEMKFSPDGSYLAVGSNDGPVDVYAVAQRYKKIGECSKSLSFITHIDWSLDSKYLQTNDGAGERLFYRMPSGKPLTSKEEIKGIPWASWTCVKGPEVSGIWPKYTEVTDINSVDANYNSSVLVSGDDFGLVKLFKFPCLKRGAKFRKYVGHSAHVTNVRWSHDFQWVLSTGGADHSVFQWRFIPEGVSNGMLETAPQEGGADSYSEESDSDLSDVPELDSDIEQEAQINYDRQVYKEDLPQLKQQSKEKNHAVPFLKREKAPEDSLKLQFIHGYRGYDCRNNLFYTQAGEVVYHIAAVAVVYNRQQHSQRLYLGHDDDILSLTIHPVKDYVATGQVGRDAAIHVWDTQTLKCLSLLKGQHQRGVCALDFSADGKCLVSVGLDDFHSIVFWDWKKGEKIATTRGHKDKIFVVKCNPHHVDKLVTVGIKHIKFWQQAGGGFTSKRGTFGSVGKLETMMCVSYGRMEDLVFSGAATGDIFIWKDILLLKTVKAHDGPVFAMYALDKGFVTGGKDGIVELWDDMFERCLKTYAIKRSALSTSSKGLLLEDNPSIRAITLGHGHILVGTKNGEILEIDKSGPMTLLVQGHMEGEVWGLAAHPLLPICATVSDDKTLRIWELSAQHRMLAVRKLKKGGRCCAFSPDGKALAVGLNDGSFLVVNADTVEDMVSFHHRKEMISDIKFSKDTGKYLAVASHDNFVDIYNVLTSKRVGICKGASSYITHIDWDSRGKLLQVNSGAREQLFFEAPRGKRHIIRPSEIEKIEWDTWTCVLGPTCEGIWPAHSDITDVNAASLTKDCSLLATGDDFGFVKLFSYPVKGQHARFKKYVGHSAHVTNVRWLHNDSVLLTVGGADTALMIWTREFVGTQESKLVDSEESDTDVEEDGGYDSDVAREKAIDYTTKIYAVSIREMEGTKPHQQLKEVSVEERPPVSRAAPQPEKLQKNNITKKKKLVEELALDHVFGYRGFDCRNNLHYLNDGADIIFHTAAAGIVQNLSTGSQSFYLEHTDDILCLTVNQHPKYRNVVATSQIGTTPSIHIWDAMTKHTLSMLRCFHSKGVNYINFSATGKLLVSVGVDPEHTITVWRWQEGAKVASRGGHLERIFVVEFRPDSDTQFVSVGVKHMKFWTLAGSALLYKKGVIGSLGAAKMQTMLSVAFGANNLTFTGAINGDVYVWKDHFLIRLVAKAHTGPVFTMYTTLRDGLIVTGGKERPTKEGGAVKLWDQEMKRCRAFQLETGQLVECVRSVCRGKGKILVGTKDGEIIEVGEKNAASNILIDGHMEGEIWGLATHPSKDLFISASNDGTARIWDLADKKLLNKVSLGHAARCAAYSPDGEMVAIGMKNGEFVILLVNSLKVWGKKRDRKSAIQDIRISPDNRFLAVGSSEHTVDFYDLTQGTNLNRIGYCKDIPSFVIQMDFSADGKYIQMQLTLLVGNHTQRTAILGLWKIARKWMRRKMGKWPAVVVMGWP

SEQ ID NO: 28690 - protein, 300 aa, Homo sapiens
MILEGGGVMNLNPGNNLLHQPPAWTDSYSTCNVSSGFFGGQWHEIHPQYWTKYQVWEWLQHLLDTNQLDANCIPFQEFDINGEHLCSMSLQEFTRAAGTAGQLLYSNLQHLKWNGQCSSDLFQSTHNVIVKTEQTEPSIMNTWKDENYLYDTNYGSTVDLLDSKTFCRAQISMTTTSHLPVAESPDMKKEQDPPAKCHTKKHNPRGTHLWEFIRDILLNPDKNPGLIKWEDRSEGVFRFLKSEAVAQLWGKKKNNSSMTYEKLSRAMRYYYKREILERVDGRRLVYKFGKNARGWRENEN

SEQ ID NO: 28691 - protein, 277 aa, Homo sapiens
MILEGGGVMNLNPGNNLLHQPPAWTDSYSTCNVSSGFFGGQWHEIHPQYWTKYQVWEWLQHLLDTNQLDANCIPFQEFDINGEHLCSMSLQEFTRAAGTAGQLLYSNLQHLKWNGQCSSDLFQSTHNVIVKTEQTEPSIMNTWKDENYLYDTNYGSTVAESPDMKKEQDPPAKCHTKKHNPRGTHLWEFIRDILLNPDKNPGLIKWEDRSEGVFRFLKSEAVAQLWGKKKNNSSMTYEKLSRAMRYYYKREILERVDGRRLVYKFGKNARGWRENEN

SEQ ID NO: 28692 - protein, 322 aa, Homo sapiens
MGLPERRGLVLLLSLAEILFKIMILEGGGVMNLNPGNNLLHQPPAWTDSYSTCNVSSGFFGGQWHEIHPQYWTKYQVWEWLQHLLDTNQLDANCIPFQEFDINGEHLCSMSLQEFTRAAGTAGQLLYSNLQHLKWNGQCSSDLFQSTHNVIVKTEQTEPSIMNTWKDENYLYDTNYGSTVDLLDSKTFCRAQISMTTTSHLPVAESPDMKKEQDPPAKCHTKKHNPRGTHLWEFIRDILLNPDKNPGLIKWEDRSEGVFRFLKSEAVAQLWGKKKNNSSMTYEKLSRAMRYYYKREILERVDGRRLVYKFGKNARGWRENEN

SEQ ID NO: 28693 - protein, 327 aa, Homo sapiens
MRALPGLLEARARTPRLLLLQCLLAAARPSSADGSAPDSPFTSPPLREEIMANNFSLESHNISLTEHSSMPVEKNITLERPSNVNLTCQFTTSGDLNAVNVTWKKDGEQLENNYLVSATGSTLYTQYRFTIINSKQMGSYSCFFREEKEQRGTFNFKVPELHGKNKPLISYVGDSTVLTCKCQNCFPLNWTWYSSNGSVKVPVGVQMNKYVINGTYANETKLKITQLLEEDGESYWCRALFQLGESEEHIELVVLSYLVPLKPFLVIVAEVILLVATILLCEKYTQKKKKHSDEGKEFEQIEQLKSDDSNGIENNVPRHRKNESLGQ

SEQ ID NO: 28694 - protein, 277 aa, Homo sapiens
MANNFSLESHNISLTEHSSMPVEKNITLERPSNVNLTCQFTTSGDLNAVNVTWKKDGEQLENNYLVSATGSTLYTQYRFTIINSKQMGSYSCFFREEKEQRGTFNFKVPELHGKNKPLISYVGDSTVLTCKCQNCFPLNWTWYSSNGSVKVPVGVQMNKYVINGTYANETKLKITQLLEEDGESYWCRALFQLGESEEHIELVVLSYLVPLKPFLVIVAEVILLVATILLCEKYTQKKKKHSDEGKEFEQIEQLKSDDSNGIENNVPRHRKNESLGQ

SEQ ID NO: 28695 - protein, 552 aa, Homo sapiens
MRRLTRRLVLPVFGVLWITVLLFFWVTKRKLEVPTGPEVQTPKPSDADWDDLWDQFDERRYLNAKKWRVGDDPYKLYAFNQRESERISSNRAIPDTRHLRCTLLVYCTDLPPTSIIITFHNEARSTLLRTIRSVLNRTPTHLIREIILVDDFSNDPDDCKQLIKLPKVKCLRNNERQGLVRSRIRGADIAQGTTLTFLDSHCEVNRDWLQPLLHRVKEDYTRVVCPVIDIINLDTFTYIESASELRGGFDWSLHFQWEQLSPEQKARRLDPTEPIRTPIIAGGLFVIDKAWFDYLGKYDMDMDIWGGENFEISFRVWMCGGSLEIVPCSRVGHVFRKKHPYVFPDGNANTYIKNTKRTAEVWMDEYKQYYYAARPFALERPFGNVESRLDLRKNLRCQSFKWYLENIYPELSIPKESSIQKGNIRQRQKCLESQRQNNQETPNLKLSPCAKVKGEDAKSQVWAFTYTQQILQEELCLSVITLFPGAPVVLVLCKNGDDRQQWTKTGSHIEHIASHLCLDTDMFGDGTENGKEIVVNPCESSLMSQHWDMVSS

SEQ ID NO: 28696 - protein, 519 aa, Homo sapiens
MRRLTRRLVLPVFGVLWITVLLFFWVTKRKLEVPTGPEVQTPKPSDADWDDLWDQFDERRYLNAKKWRVGDDPYKLYAFNQRESERISSNRAIPDTRHLSVLNRTPTHLIREIILVDDFSNDPDDCKQLIKLPKVKCLRNNERQGLVRSRIRGADIAQGTTLTFLDSHCEVNRDWLQPLLHRVKEDYTRVVCPVIDIINLDTFTYIESASELRGGFDWSLHFQWEQLSPEQKARRLDPTEPIRTPIIAGGLFVIDKAWFDYLGKYDMDMDIWGGENFEISFRVWMCGGSLEIVPCSRVGHVFRKKHPYVFPDGNANTYIKNTKRTAEVWMDEYKQYYYAARPFALERPFGNVESRLDLRKNLRCQSFKWYLENIYPELSIPKESSIQKGNIRQRQKCLESQRQNNQETPNLKLSPCAKVKGEDAKSQVWAFTYTQQILQEELCLSVITLFPGAPVVLVLCKNGDDRQQWTKTGSHIEHIASHLCLDTDMFGDGTENGKEIVVNPCESSLMSQHWDMVSS

SEQ ID NO: 28697 - protein, 557 aa, Homo sapiens
MRRLTRRLVLPVFGVLWITVLLFFWVTKRKLEVPTGPEVQTPKVWSLFFKVAGMSPWAPQVPVSPTPPYQRGHLPTGGHLAVCHFPCLLQEAQFHLQTQVFLQVRCTLLVYCTDLPPTSIIITFHNEARSTLLRTIRSVLNRTPTHLIREIILVDDFSNDPDDCKQLIKLPKVKCLRNNERQGLVRSRIRGADIAQGTTLTFLDSHCEVNRDWLQPLLHRVKEDYTRVVCPVIDIINLDTFTYIESASELRGGFDWSLHFQWEQLSPEQKARRLDPTEPIRTPIIAGGLFVIDKAWFDYLGKYDMDMDIWGGENFEISFRVWMCGGSLEIVPCSRVGHVFRKKHPYVFPDGNANTYIKNTKRTAEVWMDEYKQYYYAARPFALERPFGNVESRLDLRKNLRCQSFKWYLENIYPELSIPKESSIQKGNIRQRQKCLESQRQNNQETPNLKLSPCAKVKGEDAKSQVWAFTYTQQILQEELCLSVITLFPGAPVVLVLCKNGDDRQQWTKTGSHIEHIASHLCLDTDMFGDGTENGKEIVVNPCESSLMSQHWDMVSS

SEQ ID NO: 28698 - protein, 532 aa, Homo sapiens
MSFPMSLARSSVPFADSGLSSSQPSDADWDDLWDQFDERRYLNAKKWRVGDDPYKLYAFNQRESERISSNRAIPDTRHLRCTLLVYCTDLPPTSIIITFHNEARSTLLRTIRSVLNRTPTHLIREIILVDDFSNDPDDCKQLIKLPKVKCLRNNERQGLVRSRIRGADIAQGTTLTFLDSHCEVNRDWLQPLLHRVKEDYTRVVCPVIDIINLDTFTYIESASELRGGFDWSLHFQWEQLSPEQKARRLDPTEPIRTPIIAGGLFVIDKAWFDYLGKYDMDMDIWGGENFEISFRVWMCGGSLEIVPCSRVGHVFRKKHPYVFPDGNANTYIKNTKRTAEVWMDEYKQYYYAARPFALERPFGNVESRLDLRKNLRCQSFKWYLENIYPELSIPKESSIQKGNIRQRQKCLESQRQNNQETPNLKLSPCAKVKGEDAKSQVWAFTYTQQILQEELCLSVITLFPGAPVVLVLCKNGDDRQQWTKTGSHIEHIASHLCLDTDMFGDGTENGKEIVVNPCESSLMSQHWDMVSS

SEQ ID NO: 28699 - protein, 381 aa, Homo sapiens
MSGVVRTLSRCLLPAEAGGARERRAGSGARDAEREARRRSRDIDALLARERRAVRRLVKILLLGAGESGKSTFLKQMRIIHGREFDQKALLEFRDTIFDNILKGSRVLVDARDKLGIPWQYSENEKHGMFLMAFENKAGLPVEPATFQLYVPALSALWRDSGIREAFSRRSEFQLGESVKYFLDNLDRIGQLNYFPSKQDILLARKATKGIVEHDFVIKKIPFKMVDVGGQRSQRQKWFQCFDGITSILFMVSSSEYDQVLMEDRRTNRLVESMNIFETIVNNKLFFNVSIILFLNKMDLLVEKVKTVSIKKHFPDFRGDPHRLEDVQRYLVQCFDRKRRNRSKPLFHHFTTAIDTENVRFVFHAVKDTILQENLKDIMLQ

SEQ ID NO: 28700 - protein, 322 aa, Homo sapiens
MKRRMFPRPCLARMPGSRGSGSTPDGNRKCCRFEHLLIAHPGSRGSRVLVDARDKLGIPWQYSENEKHGMFLMAFENKAGLPVEPATFQLYVPALSALWRDSGIREAFSRRSEFQLGESVKYFLDNLDRIGQLNYFPSKQDILLARKATKGIVEHDFVIKKIPFKMVDVGGQRSQRQKWFQCFDGITSILFMVSSSEYDQVLMEDRRTNRLVESMNIFETIVNNKLFFNVSIILFLNKMDLLVEKVKTVSIKKHFPDFRGDPHRLEDVQRYLVQCFDRKRRNRSKPLFHHFTTAIDTENVRFVFHAVKDTILQENLKDIMLQ

SEQ ID NO: 28701 - protein, 288 aa, Homo sapiens
MRIIHGREFDQKALLEFRDTIFDNILKGSRVLVDARDKLGIPWQYSENEKHGMFLMAFENKAGLPVEPATFQLYVPALSALWRDSGIREAFSRRSEFQLNYFPSKQDILLARKATKGIVEHDFVIKKIPFKMVDVGGQRSQRQKWFQCFDGITSILFMVSSSEYDQVLMEDRRTNRLVESMNIFETIVNNKLFFNVSIILFLNKMDLLVEKVKTVSIKKHFPDFRGDPHRLEDVQRYLVQCFDRKRRNRSKPLFHHFTTAIDTENVRFVFHAVKDTILQENLKDIMLQ

SEQ ID NO: 28702 - protein, 639 aa, Homo sapiens
MLLRKRYRHRPCRLQFLLLLLMLGCVLMMVAMLHPPHHTLHQTVTAQASKHSPEARYRLDFGESQDWVLEAEDEGEEYSPLEGLPPFISLREDQLLVAVALPQARRNQSQGRRGGSYRLIKQPRRQDKEAPKRDWGADEDGEVSEEEELTPFSLDPRGLQEALSARIPLQRALPEVRHPLCLQQHPQDSLPTASVILCFHDEAWSTLLRTVHSILDTVPRAFLKEIILVDDLSQQGQLKSALSEYVARLEGVKLLRSNKRLGAIRARMLGATRATGDVLVFMDAHCECHPGWLEPLLSRIAGDRSRVVSPVIDVIDWKTFQYYPSKDLQRGVLDWKLDFHWEPLPEHVRKALQSPISPIRSPVVPGEVVAMDRHYFQNTGAYDSLMSLRGGENLELSFKAWLCGGSVEILPCSRVGHIYQNQDSHSPLDQEATLRNRVRIAETWLGSFKETFYKHSPEAFSLSKAEKPDCMERLQLQRRLGCRTFHWFLANVYPELYPSEPRPSFSGKLHNTGLGLCADCQAEGDILGCPMVLAPCSDSRQQQYLQHTSRKEIHFGSPQHLCFAVRQEQVILQNCTEEGLAIHQQHWDFQENGMIVHILSGKCMEAVVQENNKDLYLRPCDGKARQQWRFDQINAVDER

SEQ ID NO: 28703 - protein, 395 aa, Homo sapiens
MCDQTFLVNVFGSCDKCFKQRALRPVFKKSQQLSYCSTCAEIMATEGLHENETLASLKSEAESLKGKLEEERAKLHDVELHQVAERVEALGQFVMKTRRTLKGHGNKVLCMDWCKDKRRIVSSSQDGKVIVWDSFTTNKEHAVTMPCTWVMACAYAPSGCAIACGGLDNKCSVYPLTFDKNENMAAKKKSVAMHTNYLSACSFTNSDMQILTASGDGTCALWDVESGQLLQSFHGHGADVLCLDLAPSETGNTFVSGGCDKKAMVWDMRSGQCVQAFETHESDINSVRYYPSGDAFASGSDDATCRLYDLRADREVAIYSKESIIFGASSVDFSLSGRLLFAGYNDYTINVWDVLKGSRVSILFGHENRVSTLRVSPDGTAFCSGSWDHTLRVWA

SEQ ID NO: 28704 - protein, 353 aa, Homo sapiens
MATEGLHENETLASLKSEAESLKGKLEEERAKLHDVELHQVAERVEALGQFVMKTRRTLKGHGNKVLCMDWCKDKRRIVSSSQDGKVIVWDSFTTNKEHAVTMPCTWVMACAYAPSGCAIACGGLDNKCSVYPLTFDKNENMAAKKKSVAMHTNYLSACSFTNSDMQILTASGDGTCALWDVESGQLLQSFHGHGADVLCLDLAPSETGNTFVSGGCDKKAMVWDMRSGQCVQAFETHESDINSVRYYPSGDAFASGSDDATCRLYDLRADREVAIYSKESIIFGASSVDFSLSGRLLFAGYNDYTINVWDVLKGSRVSILFGHENRVSTLRVSPDGTAFCSGSWDHTLRVWA

SEQ ID NO: 28705 - protein, 283 aa, Homo sapiens
MATEGLHENETLASLKSEAESLKGKLEEERAKLHDVELHQVAERVEALGQFVMKTRRTLKGHGNKVLCMDWCKDKRRIVSSSQDGKVIVWDSFTTNKILTASGDGTCALWDVESGQLLQSFHGHGADVLCLDLAPSETGNTFVSGGCDKKAMVWDMRSGQCVQAFETHESDINSVRYYPSGDAFASGSDDATCRLYDLRADREVAIYSKESIIFGASSVDFSLSGRLLFAGYNDYTINVWDVLKGSRVSILFGHENRVSTLRVSPDGTAFCSGSWDHTLRVWA

SEQ ID NO: 28706 - protein, 373 aa, Homo sapiens
MTTSASSHLNKGIKQVYMSLPQGEKVQAMYIWIDGTGEGLRCKTRTLDSEPKCVEELPEWNFDGSSTLQSEGSNSDMYLVPAAMFRDPFRKDPNKLVLCEVFKYNRRPAETNLRHTCKRIMDMVSNQHPWFGMEQEYTLMGTDGHPFGWPSNGFPGPQGPYYCGVGADRAYGRDIVEAHYRACLYAGVKIAGTNAEVMPAQWEFQIGPCEGISMGDHLWVARFILHRVCEDFGVIATFDPKPIPGNWNGAGCHTNFSTKAMREENGLKYIEEAIEKLSKRHQYHIRAYDPKGGLDNARRLTGFHETSNINDFSAGVANRSASIRIPRTVGQEKKGYFEDRRPSANCDPFSVTEALIRTCLLNETGDEPFQYKN

SEQ ID NO: 28707 - protein, 377 aa, Homo sapiens
MADFLPSRSVLSVCFPGCLLTSGEAEQQRKSKEIDKCLSREKTYVKRLVKILLLGAGESGKSTFLKQMRIIHGQDFDQRAREEFRPTIYSNVIKGMRVLVDAREKLHIPWGDNSNQQHGDKMMSFDTRAPMAAQGMVETRVFLQYLPAIRALWADSGIQNAYDRRREFQLGESVKYFLDNLDKLGEPDYIPSQQDILLARRPTKGIHEYDFEIKNVPFKMVDVGGQRSERKRWFECFDSVTSILFLVSSSEFDQVLMEDRLTNRLTESLNIFETIVNNRVFSNVSIILFLNKTDLLEEKVQIVSIKDYFLEFEGDPHCLRDVQKFLVECFRNKRRDQQQKPLYHHFTTAINTENIRLVFRDVKDTILHDNLKQLMLQ

SEQ ID NO: 28708 - protein, 282 aa, Homo sapiens
MRVLVDAREKLHIPWGDNSNQQHGDKMMSFDTRAPMAAQGMVETRVFLQYLPAIRALWADSGIQNAYDRRREFQLGESVKYFLDNLDKLGEPDYIPSQQDILLARRPTKGIHEYDFEIKNVPFKMVDVGGQRSERKRWFECFDSVTSILFLVSSSEFDQVLMEDRLTNRLTESLNIFETIVNNRVFSNVSIILFLNKTDLLEEKVQIVSIKDYFLEFEGDPHCLRDVQKFLVECFRNKRRDQQQKPLYHHFTTAINTENIRLVFRDVKDTILHDNLKQLMLQ

SEQ ID NO: 28709 - protein, 558 aa, Homo sapiens
MRKIRANAIAILTVAWILGTFYYLWQDNRAHAASSGGRGAQRAGRRSEQLREDRTIPLIVTGTPSKGFDEKAYLSAKQLKAGEDPYRQHAFNQLESDKLSPDRPIRDTRHYSCPSVSYSSDLPATSVIITFHNEARSTLLRTVKSVLNRTPANLIQEIILVDDFSSDPEDCLLLTRIPKVKCLRNDRREGLIRSRVRGADVAAATVLTFLDSHCEVNTEWLPPMLQRVKEDHTRVVSPIIDVISLDNFAYLAASADLRGGFDWSLHFKWEQIPLEQKMTRTDPTRPIRTPVIAGGIFVIDKSWFNHLGKYDAQMDIWGGENFELSFRVWMCGGSLEIVPCSRVGHVFRKRHPYNFPEGNALTYIRNTKRTAEVWMDEYKQYYYEARPSAIGKAFGSVATRIEQRKKMNCKSFRWYLENVYPELTVPVKEALPGIIKQGVNCLESQGQNTAGDFLLGMGICRGSAKNPQPAQAWLFSDHLIQQQGKCLAATSTLMSSPGSPVILQMCNPREGKQKWRRKGSFIQHSVSGLCLETKPAQLVTSKCQADAQAQQWQLLPHT

SEQ ID NO: 28710 - protein, 542 aa, Homo sapiens
MRKIRANAIAILTVAWILGTFYYLWQDNRAHAASSGGRGAQRAGRRSEQLREDRTIPLIVTGTPSKGFDEKAYLSAKQLKAGEDPYRQHAFNQLESDKLSPDRPIRDTRHYSCPSVSYSSDLPATSVIITFHNEARSTLLRTVKSVLNRTPANLIQEIILVDDFSSDPEDCLLLTRIPKVKCLRNDRREGLIRSRVRGADVAAATVLTFLDSHCEVNTEWLPPMLQRVKEDHTRVVSPIIDVISLDNFAYLAASADLRGGFDWSLHFKWEQIPLEQKMTRTDPTRPIRTPVIAGGIFVIDKSWFNHLGKYDAQMDIWGGENFELSFRVWMCGGSLEIVPCSRVGHVFRKRHPYNFPEGNALTYIRNTKRTAEVWMDEYKQYYYEARPSAIGKAFGSVATRIEQRKKMNCKSFRWYLENVYPELTVPVKEALPGIIKQGVNCLESQGQNTAGDFLLGMGICRGSAKNPQPAQAWLFSDHLIQQQGKCLAATSTLMSSPGSPVILQMCNPREGKQVSLLASGPEAQQPEGPCLRVADLGRRAPD

SEQ ID NO: 28711 - protein, 598 aa, Homo sapiens
MASLRRVKVLLVLNLIAVAGFVLFLAKCRPIAVRSGDAFHEIRPRAEVANLSAHSASPIQDAVLKRLSLLEDIVYRQLNGLSKSLGLIEGYGGRGKGGLPATLSPAEEEKAKGPHEKYGYNSYLSEKISLDRSIPDYRPTKCKELKYSKDLPQISIIFIFVNEALSVILRSVHSAVNHTPTHLLKEIILVDDNSDEEELKVPLEEYVHKRYPGLVKVVRNQKREGLIRARIEGWKVATGQVTGFFDAHVEFTAGWAEPVLSRIQENRKRVILPSIDNIKQDNFEVQRYENSAHGYSWELWCMYISPPKDWWDAGDPSLPIRTPAMIGCSFVVNRKFFGEIGLLDPGMDVYGGENIELGIKVWLCGGSMEVLPCSRVAHIERKKKPYNSNIGFYTKRNALRVAEVWMDDYKSHVYIAWNLPLENPGIDIGDVSERRALRKSLKCKNFQWYLDHVYPEMRRYNNTVAYGELRNNKAKDVCLDQGPLENHTAILYPCHGWGPQLARYTKEGFLHLGALGTTTLLPDTRCLVDNSKSRLPQLLDCDKVKSSLYKRWNFIQNGAIMNKGTGRCLEVENRGLAGIDLILRSCTGQRWTIKNSIK

SEQ ID NO: 28712 - protein, 914 aa, Homo sapiens
MVQRMWAEAAGPAGGAEPLFPGSRRSRSVWDAVRLEVGVPDSCPVVLHSFTQLDPDLPRPESSTQEIGEELINGVIYSISLRKVQLHHGGNKGQRWLGYENESALNLYETCKVRTVKAGTLEKLVEHLVPAFQGSDLSYVTIFLCTYRAFTTTQQVLDLLFKRYGRCDALTASSRYGCILPYSDEDGGPQDQLKNAISSILGTWLDQYSEDFCQPPDFPCLKQLVAYVQLNMPGSDLERRAHLLLAQLEHSEPIEAEPEALSPVPALKPTPELELALTPARAPSPVPAPAPEPEPAPTPAPGSELEVAPAPAPELQQAPEPAVGLESAPAPALELEPAPEQDPAPSQTLELEPAPAPVPSLQPSWPSPVVAENGLSEEKPHLLVFPPDLVAEQFTLMDAELFKKVVPYHCLGSIWSQRDKKGKEHLAPTIRATVTQFNSVANCVITTCLGNRSTKAPDRARVVEHWIEVARECRILKNFSSLYAILSALQSNSIHRLKKTWEDVSRDSFRIFQKLSEIFSDENNYSLSRELLIKEGTSKFATLEMNPKRAQKRPKETGIIQGTVPYLGTFLTDLVMLDTAMKDYLYGRLINFEKRRKEFEVIAQIKLLQSACNNYSIAPDEQFGAWFRAVERLSETESYNLSCELEPPSESASNTLRTKKNTAIVKRWSDRQAPSTELSTSGSSHSKSCDQLRCGPYLSSGDIADALSVHSAGSSSSDVEEINISFVPESPDGQEKKFWESASQSSPETSGISSASSSTSSSSASTTPVAATRTHKRSVSGLCNSSSALPLYNQQVGDCCIIRVSLDVDNGNMYKSILVTSQDKAPAVIRKAMDKHNLEEEEPEDYELLQILSDDRKLKIPENANVFYAMNSTANYDFVLKKRTFTKGVKVKHGASSTLPRMKQKGLKIAKGIF

SEQ ID NO: 28713 - protein, 951 aa, Homo sapiens
MVQRMWAEAAGPAGGAEPLFPGSRRSRSVWDAVRLEVGVPDSCPVVLHSFTQLDPDLPRPESSTQEIGEELINGVIYSISLRKVQLHHGGNKGQRWLGYENESALNLYETCKVRTVKAGTLEKLVEHLVPAFQGSDLSYVTIFLCTYRAFTTTQQVLDLLFKRYGRCDALTASSRYGCILPYSDEDGGPQDQLKNAISSILGTWLDQYSEDFCQPPDFPCLKQLVAYVQLNMPGSDLERRAHLLLAQLEHSEPIEAEPEALSPVPALKPTPELELALTPARAPSPVPAPAPEPEPAPTPAPGSELEVAPAPAPELQQAPEPAVGLESAPAPALELEPAPEQDPAPSQTLELEPAPAPVPSLQPSWPSPVVAENGLSEEKPHLLVFPPDLVAEQFTLMDAELFKKVVPYHCLGSIWSQRDKKGKEHLAPTIRATVTQFNSVANCVITTCLGNRSTKAPDRARVVEHWIEVARECRILKNFSSLYAILSALQSNSIHRLKKTWEDVSRDSFRIFQKLSEIFSDENNYSLSRELLIKEGTSKFATLEMNPKRAQKRPKETGIIQGTVPYLGTFLTDLVMLDTAMKDYLYGRLINFEKRRKEFEVIAQIKLLQSACNNYSIAPDEQFGAWFRAVERLSETESYNLSCELEPPSESASNTLRTKKNTAIVKRWSDRQAPSTELSTSGSSHSKSCDQLRCGPYLSSGDIADALSVHSAGSSSSDVEEINISFVPESPDGQEKKVTACPSPQYPFPSPHSKSMHGARKPWILNTASRRFPIWQLAWGAPTGQWDLLILPSPSVLGISLTVIPGDLRHQLSLQQHLVLLSLHHARGCHTHPQALCLRALQLQLRAAALQPAGGRLLYHPRQPGRGQWQHVQEHPGKPAGVAWVPPSTGGKCTLNTVHHPCPPGVYLVVGGEGQMSARYRNEEGSDQGQGWPEGRGGGKEQPCKAPRSIF

SEQ ID NO: 28714 - protein, 859 aa, Homo sapiens
MMVDCQSSTQEIGEELINGVIYSISLRKVQLHHGGNKGQRWLGYENESALNLYETCKVRTVKAGTLEKLVEHLVPAFQGSDLSYVTIFLCTYRAFTTTQQVLDLLFKRYGRCDALTASSRYGCILPYSDEDGGPQDQLKNAISSILGTWLDQYSEDFCQPPDFPCLKQLVAYVQLNMPGSDLERRAHLLLAQLEHSEPIEAEPEALSPVPALKPTPELELALTPARAPSPVPAPAPEPEPAPTPAPGSELEVAPAPAPELQQAPEPAVGLESAPAPALELEPAPEQDPAPSQTLELEPAPAPVPSLQPSWPSPVVAENGLSEEKPHLLVFPPDLVAEQFTLMDAELFKKVVPYHCLGSIWSQRDKKGKEHLAPTIRATVTQFNSVANCVITTCLGNRSTKAPDRARVVEHWIEVARECRILKNFSSLYAILSALQSNSIHRLKKTWEDVSRDSFRIFQKLSEIFSDENNYSLSRELLIKEGTSKFATLEMNPKRAQKRPKETGIIQGTVPYLGTFLTDLVMLDTAMKDYLYGRLINFEKRRKEFEVIAQIKLLQSACNNYSIAPDEQFGAWFRAVERLSETESYNLSCELEPPSESASNTLRTKKNTAIVKRWSDRQAPSTELSTSGSSHSKSCDQLRCGPYLSSGDIADALSVHSAGSSSSDVEEINISFVPESPDGQEKKFWESASQSSPETSGISSASSSTSSSSASTTPVAATRTHKRSVSGLCNSSSALPLYNQQVGDCCIIRVSLDVDNGNMYKSILVTSQDKAPAVIRKAMDKHNLEEEEPEDYELLQILSDDRKLKIPENANVFYAMNSTANYDFVLKKRTFTKGVKVKHGASSTLPRMKQKGLKIAKGIF

SEQ ID NO: 28715 - protein, 885 aa, Homo sapiens
MCLWGHSTAPAHTLSSPPLLFCSLPCALHLQPGTGHPPGQVPRKSSTQEIGEELINGVIYSISLRKVQLHHGGNKGQRWLGYENESALNLYETCKVRTVKAGTLEKLVEHLVPAFQGSDLSYVTIFLCTYRAFTTTQQVLDLLFKRYGCILPYSDEDGGPQDQLKNAISSILGTWLDQYSEDFCQPPDFPCLKQLVAYVQLNMPGSDLERRAHLLLAQLEHSEPIEAEPEALSPVPALKPTPELELALTPARAPSPVPAPAPEPEPAPTPAPGSELEVAPAPAPELQQAPEPAVGLESAPAPALELEPAPEQDPAPSQTLELEPAPAPVPSLQPSWPSPVVAENGLSEEKPHLLVFPPDLVAEQFTLMDAELFKKVVPYHCLGSIWSQRDKKGKEHLAPTIRATVTQFNSVANCVITTCLGNRSTKAPDRARVVEHWIEVARECRILKNFSSLYAILSALQSNSIHRLKKTWEDVSRDSFRIFQKLSEIFSDENNYSLSRELLIKEGTSKFATLEMNPKRAQKRPKETGIIQGTVPYLGTFLTDLVMLDTAMKDYLYGRLINFEKRRKEFEVIAQIKLLQSACNNYSIAPDEQFGAWFRAVERLSETESYNLSCELEPPSESASNTLRTKKNTAIVKRWSDRQAPSTELSTSGSSHSKSCDQLRCGPYLSSGDIADALSVHSAGSSSSDVEEINISFVPESPDGQEKKFWESASQSSPETSGISSASSSTSSSSASTTPVAATRTHKRSVSGLCNSSSALPLYNQQVGDCCIIRVSLDVDNGNMYKSILVTSQDKAPAVIRKAMDKHNLEEEEPEDYELLQILSDDRKLKIPENANVFYAMNSTANYDFVLKKRTFTKGVKVKHGASSTLPRMKQKGLKIAKGIF

SEQ ID NO: 28716 - protein, 913 aa, Homo sapiens
MAREAGQVCARPAVPRGRKGSVFFACVSVVTARRRAVARRAALQSPTPWLAPLPAPATTESSTQEIGEELINGVIYSISLRKVQLHHGGNKGQRWLGYENESALNLYETCKVRTVKAGTLEKLVEHLVPAFQGSDLSYVTIFLCTYRAFTTTQQVLDLLFKRYGRCDALTASSRYGCILPYSDEDGGPQDQLKNAISSILGTWLDQYSEDFCQPPDFPCLKQLVAYVQLNMPGSDLERRAHLLLAQLEHSEPIEAEPEALSPVPALKPTPELELALTPARAPSPVPAPAPEPEPAPTPAPGSELEVAPAPAPELQQAPEPAVGLESAPAPALELEPAPEQDPAPSQTLELEPAPAPVPSLQPSWPSPVVAENGLSEEKPHLLVFPPDLVAEQFTLMDAELFKKVVPYHCLGSIWSQRDKKGKEHLAPTIRATVTQFNSVANCVITTCLGNRSTKAPDRARVVEHWIEVARECRILKNFSSLYAILSALQSNSIHRLKKTWEDVSRDSFRIFQKLSEIFSDENNYSLSRELLIKEGTSKFATLEMNPKRAQKRPKETGIIQGTVPYLGTFLTDLVMLDTAMKDYLYGRLINFEKRRKEFEVIAQIKLLQSACNNYSIAPDEQFGAWFRAVERLSETESYNLSCELEPPSESASNTLRTKKNTAIVKRWSDRQAPSTELSTSGSSHSKSCDQLRCGPYLSSGDIADALSVHSAGSSSSDVEEINISFVPESPDGQEKKFWESASQSSPETSGISSASSSTSSSSASTTPVAATRTHKRSVSGLCNSSSALPLYNQQVGDCCIIRVSLDVDNGNMYKSILVTSQDKAPAVIRKAMDKHNLEEEEPEDYELLQILSDDRKLKIPENANVFYAMNSTANYDFVLKKRTFTKGVKVKHGASSTLPRMKQKGLKIAKGIF

SEQ ID NO: 28717 - protein, 902 aa, Homo sapiens
MVQRMWAEAAGPAGGAEPLFPGSRRSRSVWDAVRLEVGVPDSCPVVLHSFTQLDPDLPRPESSTQEIGEELINGVIYSISLRKVQLHHGGNKGQRWLGYENESALNLYETCKVRTVKAGTLEKLVEHLVPAFQGSDLSYVTIFLCTYRAFTTTQQVLDLLFKRYGCILPYSDEDGGPQDQLKNAISSILGTWLDQYSEDFCQPPDFPCLKQLVAYVQLNMPGSDLERRAHLLLAQLEHSEPIEAEPEALSPVPALKPTPELELALTPARAPSPVPAPAPEPEPAPTPAPGSELEVAPAPAPELQQAPEPAVGLESAPAPALELEPAPEQDPAPSQTLELEPAPAPVPSLQPSWPSPVVAENGLSEEKPHLLVFPPDLVAEQFTLMDAELFKKVVPYHCLGSIWSQRDKKGKEHLAPTIRATVTQFNSVANCVITTCLGNRSTKAPDRARVVEHWIEVARECRILKNFSSLYAILSALQSNSIHRLKKTWEDVSRDSFRIFQKLSEIFSDENNYSLSRELLIKEGTSKFATLEMNPKRAQKRPKETGIIQGTVPYLGTFLTDLVMLDTAMKDYLYGRLINFEKRRKEFEVIAQIKLLQSACNNYSIAPDEQFGAWFRAVERLSETESYNLSCELEPPSESASNTLRTKKNTAIVKRWSDRQAPSTELSTSGSSHSKSCDQLRCGPYLSSGDIADALSVHSAGSSSSDVEEINISFVPESPDGQEKKFWESASQSSPETSGISSASSSTSSSSASTTPVAATRTHKRSVSGLCNSSSALPLYNQQVGDCCIIRVSLDVDNGNMYKSILVTSQDKAPAVIRKAMDKHNLEEEEPEDYELLQILSDDRKLKIPENANVFYAMNSTANYDFVLKKRTFTKGVKVKHGASSTLPRMKQKGLKIAKGIF

SEQ ID NO: 28718 - protein, 355 aa, Homo sapiens
MAGCCCLSAEEKESQRISAEIERQLRRDKKDARRELKLLLLGTGESGKSTFIKQMRIIHGSGYSDEDRKGFTKLVYQNIFTAMQAMIRAMDTLRIQYVCEQNKENAQIIREVEVDKVSMLSREQVEAIKQLWQDPGIQECYDRRREYQLSDSAKYYLTDIDRIATPSFVPTQQDVLRVRVPTTGIIEYPFDLENIIFRMVDVGGQRSERRKWIHCFESVTSIIFLVALSEYDQVLAECDNENRMEESKALFKTIITYPWFLNSSVILFLNKKDLLEEKIMYSHLISYFPEYTGPKQDVRAARDFILKLYQDQNPDKEKVIYSHFTCATDTDNIRFVFAAVKDTILQLNLREFNLV

SEQ ID NO: 28719 - protein, 607 aa, Homo sapiens
MVCTRKTKTLVSTCVILSGMTNIICLLYVGWVTNYIASVYVRGQEPAPDKKLEEDKGDTLKIIERLDHLENVIKQHIQEAPAKPEEAEAEPFTDSSLFAHWGQELSPEGRRVALKQFQYYGYNAYLSDRLPLDRPLPDLRPSGCRNLSFPDSLPEVSIVFIFVNEALSVLLRSIHSAMERTPPHLLKEIILVDDNSSNEELKEKLTEYVDKVNSQKPGFIKVVRHSKQEGLIRSRVSGWRAATAPVVALFDAHVEFNVGWAEPVLTRIKENRKRIISPSFDNIKYDNFEIEEYPLAAQGFDWELWCRYLNPPKAWWKLENSTAPIRSPALIGCFIVDRQYFQEIGLLDEGMEVYGGENVELGIRVWQCGGSVEVLPCSRIAHIERAHKPYTEDLTAHVRRNALRVAEVWMDEFKSHVYMAWNIPQEDSGIDIGDITARKALRKQLQCKTFRWYLVSVYPEMRMYSDIIAYGVLQNSLKTDLCLDQGPDTENVPIMYICHGMTPQNVYYTSSQQIHVGILSPTVDDDDNRCLVDVNSRPRLIECSYAKAKRMKLHWQFSQGGPIQNRKSKRCLELQENSDLEFGFQLVLQKCSGQHWSITNVLRSLAS

SEQ ID NO: 28720 - protein, 91 aa, Homo sapiens
MVCTRKTKTLVSTCVILSGMTNIICLLYVGWVTNYIASVYVRGQEPAPDKKLEEDKGDTLKIIERLDHLENVIKQHIQGYRRNFSLLNVSN

SEQ ID NO: 28721 - protein, 164 aa, Homo sapiens
MIWRRAALAGTRLVWSRSGSAGWLDRAAGAAGAAAAAASGMESNTSSSLENLATAPVNQIQETISDNCVVIFSKTSCSYCTMAKKLFHDMNVNYKVVELDLLEYGNQFQDALYKMTGERTVPRIFVNGTFIGGATDTHRLHKEGKLLPLVHQCYLKKSKRKEFQ

SEQ ID NO: 28722 - protein, 165 aa, Homo sapiens
MNPRDKQVSRFSPLKDVYTWVALAGIQRSGSPGRTRSAARRMESNTSSSLENLATAPVNQIQETISDNCVVIFSKTSCSYCTMAKKLFHDMNVNYKVVELDLLEYGNQFQDALYKMTGERTVPRIFVNGTFIGGATDTHRLHKEGKLLPLVHQCYLKKSKRKEFQ

SEQ ID NO: 28723 - protein, 374 aa, Homo sapiens
MARSLTWRCCPWCLTEDEKAAARVDQEINRILLEQKKQDRGELKLLLLGPGESGKSTFIKQMRIIHGAGYSEEERKGFRPLVYQNIFVSMRAMIEAMERLQIPFSRPESKHHASLVMSQDPYKVTTFEKRYAAAMQWLWRDAGIRAYYERRREFHLLDSAVYYLSHLERITEEGYVPTAQDVLRSRMPTTGINEYCFSVQKTNLRIVDVGGQKSERKKWIHCFENVIALIYLASLSEYDQCLEENNQENRMKESLALFGTILELPWFKSTSVILFLNKTDILEEKIPTSHLATYFPSFQGPKQDAEAAKRFILDMYTRMYTGCVDGPEGSKKGARSRRLFSHYTCATDTQNIRKVFKDVRDSVLARYLDEINLL

SEQ ID NO: 28724 - protein, 184 aa, Homo sapiens
MKPDETPMFDPSLLKEVDWSQNTATFSPAISPTHPGEGLVLRPLCTADLNRGFFKVLGQLTETGVVSPEQFMKSFEHMKKSGDYYVTVVEDVTLGQIVATATLIIEHKFIHSCAKRGRVEDVVVSDECRGKQLGKLLLSTLTLLSKKLNCYKITLECLPQNVGFYKKFGYTVSEENYMCRRFLK

SEQ ID NO: 28725 - protein, 335 aa, Homo sapiens
MAAGAAEAAVAAVEEVGSAGQFEELLRLKAKSLLVVHFWAPWAPQCAQMNEVMAELAKELPQVSFVKLEAEGVPEVSEKYEISSVPTFLFFKNSQKIDRLDGAHAPELTKKVQRHASSGSFLPSANEHLKEDLNLRLKKLTHAAPCMLFMKGTPQEPRCGFSKQMVEILHKHNIQFSSFDIFSDEEVRQGLKAYSSWPTYPQLYVSGELIGGLDIIKELEASEELDTICPKAPKLEERLKVLTNKASVMLFMKGNKQEAKCGFSKQILEILNSTGVEYETFDILEDEEVRQGLKAYSNWPTYPQLYVKGELVGGLDIVKELKENGELLPILRGEN

SEQ ID NO: 28726 - protein, 607 aa, Homo sapiens
MPRKKPFSVKQKKKQLQDKRERKRGLQDGLRSSSNSRSGSRERREEQTDTSDGESVTHHIRRLNQQPSQGLGPRGYDPNRYRLHFERDSREEVERRKRAAREQVLQPVSAELLELDIREVYQPGSVLDFPRRPPWSYEMSKEQLMSQEERSFQDYLGKIHGAYSSEKLSYFEHNLETWRQLWRVLEMSDIVLLITDIRHPVVNFPPALYEYVTGELGLALVLVLNKVDLAPPALVVAWKHYFHQHYPQLHVVLFTSFPRDPRTPQDPSSVLKKSRRRGRGWTRALGPEQLLRACEAITVGKVDLSSWREKIARDVAGATWGNGSGEEEEEEDGPAVLVEQQTDSAMEPTGPTQERYKDGVVTIGCVGFPNVGKSSLINGLVGRKVVSVSRTPGHTRYFQTYFLTPSVKLCDCPGLIFPSLLPRQLQVLAGIYPIAQIQEPYTAVGYLASRIPVQALLHLRHPEAEDPSAEHPWCAWDICEAWAEKRGYKTAKAARNDVYRAANSLLRLAVDGRLSLCFHPPGYSEQKGTWESHPETTELVVLQGRVGPAGDEEEEEEEELSSSCEEEGEEDRDADEEGEGDEETPTSAPGSSLAGRNPYALLGEDEC

SEQ ID NO: 28727 - protein, 430 aa, Homo sapiens
MEAAVAVLEMSDIVLLITDIRHPVVNFPPALYEYVTGELGLALVLVLNKVDLAPPALVVAWKHYFHQHYPQLHVVLFTSFPRDPRTPQDPSSVLKKSRRRGRGWTRALGPEQLLRACEAITVGKVDLSSWREKIARDVAGATWGNGSGEEEEEEDGPAVLVEQQTDSAMEPTGPTQERYKDGVVTIGCVGFPNVGKSSLINGLVGRKVVSVSRTPGHTRYFQTYFLTPSVKLCDCPGLIFPSLLPRQLQVLAGIYPIAQIQEPYTAVGYLASRIPVQALLHLRHPEAEDPSAEHPWCAWDICEAWAEKRGYKTAKAARNDVYRAANSLLRLAVDGRLSLCFHPPGYSEQKGTWESHPETTELVVLQGRVGPAGDEEEEEEEELSSSCEEEGEEDRDADEEGEGDEETPTSAPGSSLAGRNPYALLGEDEC

SEQ ID NO: 28728 - protein, 354 aa, Homo sapiens
MGCTLSAEDKAAVERSKMIDRNLREDGEKAAREVKLLLLGAGESGKSTIVKQMKIIHEAGYSEEECKQYKAVVYSNTIQSIIAIIRAMGRLKIDFGDSARADDARQLFVLAGAAEEGFMTAELAGVIKRLWKDSGVQACFNRSREYQLNDSAAYYLNDLDRIAQPNYIPTQQDVLRTRVKTTGIVETHFTFKDLHFKMFDVGGQRSERKKWIHCFEGVTAIIFCVALSDYDLVLAEDEEMNRMHESMKLFDSICNNKWFTDTSIILFLNKKDLFEEKIKKSPLTICYPEYAGSNTYEEAAAYIQCQFEDLNKRKDTKEIYTHFTCATDTKNVQFVFDAVTDVIIKNNLKDCGLF

SEQ ID NO: 28729 - protein, 302 aa, Homo sapiens
MKIIHEAGYSEEECKQYKAVVYSNTIQSIIAIIRAMGRLKIDFGDSARADDARQLFVLAGAAEEGFMTAELAGVIKRLWKDSGVQACFNRSREYQLNDSAAYYLNDLDRIAQPNYIPTQQDVLRTRVKTTGIVETHFTFKDLHFKMFDVGGQRSERKKWIHCFEGVTAIIFCVALSDYDLVLAEDEEMNRMHESMKLFDSICNNKWFTDTSIILFLNKKDLFEEKIKKSPLTICYPEYAGSNTYEEAAAYIQCQFEDLNKRKDTKEIYTHFTCATDTKNVQFVFDAVTDVIIKNNLKDCGLF

SEQ ID NO: 28730 - protein, 582 aa, Homo sapiens
MMKLRHKNKKPGEGSKGHKKISWPYPQPAKQNGKKATSKVPSAPHFVHPNDHANREAELKKKWVEEMREKQQAAREQERQKRRTIESYCQDVLRRQEEFEHKEEVLQELNMFPQLDDEATRKAYYKEFRKVVEYSDVILEVLDARDPLGCRCFQMEEAVLRAQGNKKLVLVLNKIDLVPKEVVEKWLDYLRNELPTVAFKASTQHQVKNLNRCSVPVDQASESLLKSKACFGAENLMRVLGNYCRLGEVRTHIRVGVVGLPNVGKSSLINSLKRSRACSVGAVPGITKFMQEVYLDKFIRLLDAPGIVPGPNSEVGTILRNCVHVQKLADPVTPVETILQRCNLEEISNYYGVSGFQTTEHFLTAVAHRLGKKKKGGLYSQEQAAKAVLADWVSGKISFYIPPPATHTLPTHLSAEIVKEMTEVFDIEDTEQANEDTMECLATGESDELLGDTDPLEMEIKLLHSPMTKIADAIENKTTVYKIGDLTGYCTNPNRHQMGWAKRNVDHRPKSNSMVDVCSVDRRSVLQRIMETDPLQQGQALASALKNKKKMQKRADKIASKLSDSMMSALDLSGNADDGVGD

SEQ ID NO: 28731 - protein, 291 aa, Homo sapiens
MGVAARPPALRHWFSHSIPLAIFALLLLYLSVRSLGARSGCGPRAQPCVPGETAPFQVRQESGTLEAPERKQPPCLGPRGMLGRMMRRFHASLKPEGDVGLSPYLAGWRALVEFLTPLGSVFAFATREAFTKVTDLEARVHGPDAEHYWSLVAMAAWERRAGLLEQPGAAPRDPTRSSGSRTLLLLHRALRWSQLCLHRVATGALGGPDAGVQCSDAYRAALGPHHPWLVRQTARLAFLAFPGRRRLLELACPGATEAEARAALVRAAGTLEDVYNRTQSLLAERGLLQLA

SEQ ID NO: 28732 - protein, 157 aa, Homo sapiens
MSGSLGRAAAALLRWGRGAGGGGLWGPGVRAAGSGAGGGGSAEQLDALVKKDKVVVFLKGTPEQPQCGFSNAVVQILRLHGVRDYAAYNVLDDPELRQGIKDYSNWPTIPQVYLNGEFVGGCDILLQMHQNGDLVEELKKLGIHSALLDEKKDQDSK

SEQ ID NO: 28733 - protein, 355 aa, Homo sapiens
MGCTVSAEDKAAAERSKMIDKNLREDGEKAAREVKLLLLGAGESGKSTIVKQMKIIHEDGYSEEECRQYRAVVYSNTIQSIMAIVKAMGNLQIDFADPSRADDARQLFALSCTAEEQGVLPDDLSGVIRRLWADHGVQACFGRSREYQLNDSAAYYLNDLERIAQSDYIPTQQDVLRTRVKTTGIVETHFTFKDLHFKMFDVGGQRSERKKWIHCFEGVTAIIFCVALSAYDLVLAEDEEMNRMHESMKLFDSICNNKWFTDTSIILFLNKKDLFEEKITHSPLTICFPEYTGANKYDEAASYIQSKFEDLNKRKDTKEIYTHFTCATDTKNVQFVFDAVTDVIIKNNLKDCGLF

SEQ ID NO: 28734 - protein, 339 aa, Homo sapiens
MEYAGHLPASSAQGTILACTSCTGAGESGKSTIVKQMKIIHEDGYSEEECRQYRAVVYSNTIQSIMAIVKAMGNLQIDFADPSRADDARQLFALSCTAEEQGVLPDDLSGVIRRLWADHGVQACFGRSREYQLNDSAAYYLNDLERIAQSDYIPTQQDVLRTRVKTTGIVETHFTFKDLHFKMFDVGGQRSERKKWIHCFEGVTAIIFCVALSAYDLVLAEDEEMNRMHESMKLFDSICNNKWFTDTSIILFLNKKDLFEEKITHSPLTICFPEYTGANKYDEAASYIQSKFEDLNKRKDTKEIYTHFTCATDTKNVQFVFDAVTDVIIKNNLKDCGLF

SEQ ID NO: 28735 - protein, 318 aa, Homo sapiens
MRGAGESGKSTIVKQMKIIHEDGYSEEECRQYRAVVYSNTIQSIMAIVKAMGNLQIDFADPSRADDARQLFALSCTAEEQGVLPDDLSGVIRRLWADHGVQACFGRSREYQLNDSAAYYLNDLERIAQSDYIPTQQDVLRTRVKTTGIVETHFTFKDLHFKMFDVGGQRSERKKWIHCFEGVTAIIFCVALSAYDLVLAEDEEMNRMHESMKLFDSICNNKWFTDTSIILFLNKKDLFEEKITHSPLTICFPEYTGANKYDEAASYIQSKFEDLNKRKDTKEIYTHFTCATDTKNVQFVFDAVTDVIIKNNLKDCGLF

SEQ ID NO: 28736 - protein, 366 aa, Homo sapiens
MGCTVSAEDKAAAERSKMIDKNLREDGEKAAREVKLLLLGAGESGKSTIVKQMKIIHEDGYSEEECRQYRAVVYSNTIQSIMAIVKAMGNLQIDFADPSRADDARQLFALSCTAEEQGVLPDDLSGVIRRLWADHGVQACFGRSREYQLNDSAAYYLNDLERIAQSDYIPTQQDVLRTRVKTTGIVETHFTFKDLHFKMFDVGGQRSERKKWIHCFEGVTAIIFCVALSAYDLVLAEDEEMNRMHESMKLFDSICNNKWFTDTSIILFLNKKDLFEEKITHSPLTICFPEYTGANKYDEAASYIQSKFEDLNKRKDTKEIYTHFTCATDTKSRKLFRETYLKLSGPDQHPHPSPAPAPPLSSDSVP

SEQ ID NO: 28737 - protein, 339 aa, Homo sapiens
MTEGVKTLGWTKQKGGCHWGRSEGAGESGKSTIVKQMKIIHEDGYSEEECRQYRAVVYSNTIQSIMAIVKAMGNLQIDFADPSRADDARQLFALSCTAEEQGVLPDDLSGVIRRLWADHGVQACFGRSREYQLNDSAAYYLNDLERIAQSDYIPTQQDVLRTRVKTTGIVETHFTFKDLHFKMFDVGGQRSERKKWIHCFEGVTAIIFCVALSAYDLVLAEDEEMNRMHESMKLFDSICNNKWFTDTSIILFLNKKDLFEEKITHSPLTICFPEYTGANKYDEAASYIQSKFEDLNKRKDTKEIYTHFTCATDTKNVQFVFDAVTDVIIKNNLKDCGLF

SEQ ID NO: 28738 - protein, 303 aa, Homo sapiens
MKIIHEDGYSEEECRQYRAVVYSNTIQSIMAIVKAMGNLQIDFADPSRADDARQLFALSCTAEEQGVLPDDLSGVIRRLWADHGVQACFGRSREYQLNDSAAYYLNDLERIAQSDYIPTQQDVLRTRVKTTGIVETHFTFKDLHFKMFDVGGQRSERKKWIHCFEGVTAIIFCVALSAYDLVLAEDEEMNRMHESMKLFDSICNNKWFTDTSIILFLNKKDLFEEKITHSPLTICFPEYTGANKYDEAASYIQSKFEDLNKRKDTKEIYTHFTCATDTKNVQFVFDAVTDVIIKNNLKDCGLF

SEQ ID NO: 28739 - protein, 549 aa, Homo sapiens
MKRPKLKKASKRMTCHKRYKIQKKVREHHRKLRKEAKKRGHKKPRKDPGVPNSAPFKEALLREAELRKQRLEELKQQQKLDRQKELEKKRKLETNPDIKPSNVEPMEKEFGLCKTENKAKSGKQNSKKLYCQELKKVIEASDVVLEVLDARDPLGCRCPQVEEAIVQSGQKKLVLILNKSDLVPKENLESWLNYLKKELPTVVFRASTKPKDKGKITKRVKAKKNAAPFRSEVCFGKEGLWKLLGGFQETCSKAIRVGVIGFPNVGKSSIINSLKQEQMCNVGVSMGLTRSMQVVPLDKQITIIDSPSFIVSPLNSSSALALRSPASIEVVKPMEAASAILSQADARQVVLKYTVPGYRNSLEFFTVLAQRRGMHQKGGIPNVEGAAKLLWSEWTGASLAYYCHPPTSWTPPPYFNESIVVDMKSGFNLEELEKNNAQSIRAIKGPHLANSILFQSSGLTNGIIEEKDIHEELPKRKERKQEEREDDKDSDQETVDEEVDENSSGMFAAEETGEALSEETTAGEQSTRSFILDKIIEEDDAYDFSTDYV

SEQ ID NO: 28740 - protein, 537 aa, Homo sapiens
MTCHKRYKIQKKVREHHRKLRKEAKKRGHKKPRKDPGVPNSAPFKEALLREAELRKQRLEELKQQQKLDRQKELEKKRKLETNPDIKPSNVEPMEKEFGLCKTENKAKSGKQNSKKLYCQELKKVIEASDVVLEVLDARDPLGCRCPQVEEAIVQSGQKKLVLILNKSDLVPKENLESWLNYLKKELPTVVFRASTKPKDKGKITKRVKAKKNAAPFRSEVCFGKEGLWKLLGGFQETCSKAIRVGVIGFPNVGKSSIINSLKQEQMCNVGVSMGLTRSMQVVPLDKQITIIDSPSFIVSPLNSSSALALRSPASIEVVKPMEAASAILSQADARQVVLKYTVPGYRNSLEFFTVLAQRRGMHQKGGIPNVEGAAKLLWSEWTGASLAYYCHPPTSWTPPPYFNESIVVDMKSGFNLEELEKNNAQSIRAIKGPHLANSILFQSSGLTNGIIEEKDIHEELPKRKERKQEEREDDKDSDQETVDEEVDENSSGMFAAEETGEALSEETTAGEQSTRSFILDKIIEEDDAYDFSTDYV

SEQ ID NO: 28741 - protein, 423 aa, Homo sapiens
MVPHLLLLCLLPLVRATEPHEGRADEQSAEAALAVPNASHFFSWNNYTFSDWQNFVGRRRYGAESQNPTVKALLIVAYSFIIVFSLFGNVLVCHVIFKNQRMHSATSLFIVNLAVADIMITLLNTPFTLVRFVNSTWIFGKGMCHVSRFAQYCSLHVSALTLTAIAVDRHQVIMHPLKPRISITKGVIYIAVIWTMATFFSLPHAICQKLFTFKYSEDIVRSLCLPDFPEPADLFWKYLDLATFILLYILPLLIISVAYARVAKKLWLCNMIGDVTTEQYFALRRKKKKTIKMLMLVVVLFALCWFPLNCYVLLLSSKVIRTNNALYFAFHWFAMSSTCYNPFIYCWLNENFRIELKALLSMCQRPPKPQEDRPPSPVPSFRVAWTEKNDGQRAPLANNLLPTSQLQSGKTDLSSVEPIVTMS

SEQ ID NO: 28742 - protein, 145 aa, Homo sapiens
MATWALLLLAAMLLGNPGLVFSRLSPEYYDLARAHLRDEEKSCPCLAQEGPQGDLLTKTQELGRDYRTCLTIVQKLKKMVDKPTQRSVSNAATRVCRTGRSRWRDVCRNFMRRYQSRVTQGLVAGETAQQICEDLRLCIPSTGPL

SEQ ID NO: 28743 - protein, 130 aa, Homo sapiens
MEGLVFSRLSPEYYDLARAHLRDEEKSCPCLAQEGPQGDLLTKTQELGRDYRTCLTIVQKLKKMVDKPTQRSVSNAATRVCRTGRSRWRDVCRNFMRRYQSRVTQGLVAGETAQQICEDLRLCIPSTGPL

SEQ ID NO: 28744 - protein, 396 aa, Homo sapiens
MWNSSDANFSCYHESVLGYRYVAVSWGVVVAVTGTVGNVLTLLALAIQPKLRTRFNLLIANLTLADLLYCTLLQPFSVDTYLHLHWRTGATFCRVFGLLLFASNSVSILTLCLIALGRYLLIAHPKLFPQVFSAKGIVLALVSTWVVGVASFAPLWPIYILVPVVCTCSFDRIRGRPYTTILMGIYFVLGLSSVGIFYCLIHRQVKRAAQALDQYKLRQASIHSNHVARTDEAMPGRFQELDSRLASGGPSEGISSEPVSAATTQTLEGDSSEVGDQINSKRAKQMAEKSPPEASAKAQPIKGARRAPDSSSEFGKVTRMCFAVFLCFALSYIPFLLLNILDARVQAPRVVHMLAANLTWLNGCINPVLYAAMNRQFRQAYGSILKRGPRSFHRLH

SEQ ID NO: 28745 - protein, 354 aa, Homo sapiens
MGCTLSAEDKAAVERSKMIDRNLREDGEKAAKEVKLLLLGAGESGKSTIVKQMKIIHEDGYSEDECKQYKVVVYSNTIQSIIAIIRAMGRLKIDFGEAARADDARQLFVLAGSAEEGVMTPELAGVIKRLWRDGGVQACFSRSREYQLNDSASYYLNDLDRISQSNYIPTQQDVLRTRVKTTGIVETHFTFKDLYFKMFDVGGQRSERKKWIHCFEGVTAIIFCVALSDYDLVLAEDEEMNRMHESMKLFDSICNNKWFTETSIILFLNKKDLFEEKIKRSPLTICYPEYTGSNTYEEAAAYIQCQFEDLNRRKDTKEIYTHFTCATDTKNVQFVFDAVTDVIIKNNLKECGLY

SEQ ID NO: 28746 - protein, 295 aa, Homo sapiens
MVDSVYRTRSLGVAAEGLPDQYADGEAARVWQLYIGDTRSRTAEYKAWLLGLLRQHGCQRVLDVACGTGVDSIMLVEEGFSVTSVDASDKMLKYALKERWNRRHEPAFDKWVIEEANWMTLDKDVPQSAEGGFDAVICLGNSFAHLPDCKGDQSEHRLALKNIASMVRAGGLLVIDHRNYDHILSTGCAPPGKNIYYKSDLTKDVTTSVLIVNNKAHMVTLDYTVQVPGAGQDGSPGLSKFRLSYYPHCLASFTELLQAAFGGKCQHSVLGDFKPYKPGQTYIPCYFIHVLKRTD

SEQ ID NO: 28747 - protein, 370 aa, Homo sapiens
MANYSHAADNILQNLSPLTAFLKLTSLGFIIGVSVVGNLLISILLVKDKTLHRAPYYFLLDLCCSDILRSAICFPFVFNSVKNGSTWTYGTLTCKVIAFLGVLSCFHTAFMLFCISVTRYLAIAHHRFYTKRLTFWTCLAVICMVWTLSVAMAFPPVLDVGTYSFIREEDQCTFQHRSFRANDSLGFMLLLALILLATQLVYLKLIFFVHDRRKMKPVQFVAAVSQNWTFHGPGASGQAAANWLAGFGRGPTPPTLLGIRQNANTTGRRRLLVLDEFKMEKRISRMFYIMTFLFLTLWGPYLVACYWRVFARGPVVPGGFLTAAVWMSFAQAGINPFVCIFSNRELRRCFSTTLLYCRKSRLPREPYCVI

SEQ ID NO: 28748 - protein, 443 aa, Homo sapiens
MRNAIIQGLFYGSLTFGIWTALLFIYLHHNHVSSWQKKSQEPLSAWSPGKKVHQQIIYGSEQIPKPHVIVKRTDEDKAKSMLGTDFNHTNPELHKELLKYGFNVIISRSLGIEREVPDTRSKMCLQKHYPARLPTASIVICFYNEECNALFQTMSSVTNLTPHYFLEEIILVDDMSKVDDLKEKLDYHLETFRGKVKIIRNKKREGLIRARLIGASHASGDVLVFLDSHCEVNRVWLEPLLHAIAKDPKMVVCPLIDVIDDRTLEYKPSPLVRGTFDWNLQFKWDNVFSYEMDGPEGSTKPIRSPAMSGGIFAIRRHYFNEIGQYDKDMDFWGRENLELSLRIWMCGGQLFIIPCSRVGHISKKQTGKPSTIISAMTHNYLRLVHVWLDEYKEQFFLRKPGLKYVTYGNIRERVELRKRLGCKSFQWYLDNVFPELEASVNSL

SEQ ID NO: 28749 - protein, 133 aa, Homo sapiens
MRNAIIQGLFYGSLTFGIWTALLFIYLHHNHVSSWQKKSQEPLSAWSPGKKVHQQIIYGSEQIPKPHVIVKRTDEDKAKSMLGTDFNHTNPELHKELLKYGFNVIISRSLGIEREVPDTRSKMGCSGVPGQPL

SEQ ID NO: 28750 - protein, 358 aa, Homo sapiens
MGFNLTLAKLPNNELHGQESHNSGNRSDGPGKNTTLHNEFDTIVLPVLYLIIFVASILLNGLAVWIFFHIRNKTSFIFYLKNIVVADLIMTLTFPFRIVHDAGFGPWYFKFILCRYTSVLFYANMYTSIVFLGLISIDRYLKVVKPFGDSRMYSITFTKVLSVCVWVIMAVLSLPNIILTNGQPTEDNIHDCSKLKSPLGVKWHTAVTYVNSCLFVAVLVILIGCYIAISRYIHKSSRQFISQSSRKRKHNQSIRVVVAVFFTCFLPYHLCRIPFTFSHLDRLLDESAQKILYYCKEITLFLSACNVCLDPIIYFFMCRSFSRRLFKKSNIRTRSESIRSLQSVRRSEVRIYYDYTDV

SEQ ID NO: 28751 - protein, 601 aa, Homo sapiens
MKRKQKRFLQMTLLFTVALIFLPNVGLWSLYKDKHLVKSAEPGEQQTFPLGLGDGQFYSWTDGLRRKDWHDYESIQKEAMRSGKGEHGKPYPLTEEDHDDSAYRENGFNIFVSNNIALERSLPDIRHANCKHKMYLERLPNTSIIIPFHNEGWTSLLRTIHSIINRTPGSLIAEIILVDDFSEREHLKDKLEEYMARFSKVRIVRTKKREGLIRTRLLGASMARGEVLTFLDSHCEVNVNWLPPLLNQIALNHKTIVCPMIDVIDHNHFGYEAQAGDAMRGAFDWEMYYKRIPIPPELQRADPSDPFESPVMAGGLFAVDRKWFWELGGYDPGLEIWGGEQYEISFKVWMCGGEMFDVPCSRVGHIYRKYVPYKVPSGTSLARNLKRVAETWMDEFAEYIYQRRPEYRHLSTGDISAQKELRKQLKCKDFKWFMAAVAWDVPKYYPPVEPPPAAWGEIRNVAANLCVDSKHGATGTELRLDICVKDGSERTWSHEQLFTFGWREDIRPGEPLHTRKFCFDAISHNSPVTLYDCHGMKGNQLWGYRKDRTLFHPVSNSCMDCNPAEKKIFMARCDPLSETQQWIFEHINMTVLEKFNHHANS

SEQ ID NO: 28752 - protein, 584 aa, Homo sapiens
MRAKFRAGAGHQRNPSISADHGVHELVYQTFPLGLGDGQFYSWTDGLRRKDWHDYESIQKEAMRSGKGEHGKPYPLTEEDHDDSAYRENGFNIFVSNNIALERSLPDIRHANCKHKMYLERLPNTSIIIPFHNEGWTSLLRTIHSIINRTPGSLIAEIILVDDFSEREHLKDKLEEYMARFSKVRIVRTKKREGLIRTRLLGASMARGEVLTFLDSHCEVNVNWLPPLLNQIALNHKTIVCPMIDVIDHNHFGYEAQAGDAMRGAFDWEMYYKRIPIPPELQRADPSDPFESPVMAGGLFAVDRKWFWELGGYDPGLEIWGGEQYEISFKVWMCGGEMFDVPCSRVGHIYRKYVPYKVPSGTSLARNLKRVAETWMDEFAEYIYQRRPEYRHLSTGDISAQKELRKQLKCKDFKWFMAAVAWDVPKYYPPVEPPPAAWGEIRNVAANLCVDSKHGATGTELRLDICVKDGSERTWSHEQLFTFGWREDIRPGEPLHTRKFCFDAISHNSPVTLYDCHGMKGNQLWGYRKDRTLFHPVSNSCMDCNPAEKKIFMARCDPLSETQQWIFEHINMTVLEKFNHHANS

SEQ ID NO: 28753 - protein, 477 aa, Homo sapiens
MPPCQPQRPLLLLLLLLACQPQVPSAQVMDFLFEKWKLYGDQCHHNLSLLPPPTELVCNRTFDKYSCWPDTPANTTANISCPWYLPWHHKVQHRFVFKRCGPDGQWVRGPRGQPWRDASQCQMDGEEIEVQKEVAKMYSSFQVMYTVGYSLSLGALLLALAILGGLSKLHCTRNAIHANLFASFVLKASSVLVIDGLLRTRYSQKIGDDLSVSTWLSDGAVAGCRVAAVFMQYGIVANYCWLLVEGLYLHNLLGLATLPERSFFSLYLGIGWGAPMLFVVPWAVVKCLFENVQCWTSNDNMGFWWILRFPVFLAILINFFIFVRIVQLLVAKLRARQMHHTDYKFRLAKSTLTLIPLLGVHEVVFAFVTDEHAQGTLRSAKLFFDLFLSSFQGLLVAVLYCFLNKEVQSELRRRWHRWRLGKVLWEERNTSNHRASSSPGHGPPSKELQFGRGGGSQDSSAETPLAGGLPRLAESPF

SEQ ID NO: 28754 - protein, 384 aa, Homo sapiens
MTNSSSTSTSSTTGGSLLLLCEEEESWAGRRIPVSLLYSGLAIGGTLANGMVIYLVSSFRKLQTTSNAFIVNGCAADLSVCALWMPQEAVLGLLPTGSAEPPADWDGAGGSYRLLRGGLLGLGLTVSLLSHCLVALNRYLLITRAPATYQALYQRRHTAGMLALSWALALGLVLLLPPWAPRPGAAPPRVHYPALLAAAALLAQTALLLHCYLGIVRRVRVSVKRVSVLNFHLLHQLPGCAAAAAAFPGAQHAPGPGGAAHPAQAQPLPPALHPRRAQRRLSGLSVLLLCCVFLLATQPLVWVSLASGFSLPVPWGVQAASWLLCCALSALNPLLYTWRNEEFRRSVRSVLPGVGDAAAAAVAATAVPAVSQAQLGTRAAGQHW

SEQ ID NO: 28755 - protein, 319 aa, Homo sapiens
MVGKMWPVLWTLCAVRVTVDAISVETPQDVLRASQGKSVTLPCTYHTSTSSREGLIQWDKLLLTHTERVVIWPFSNKNYIHGELYKNRVSISNNAEQSDASITIDQLTMADNGTYECSVSLMSDLEGNTKSRVRLLVLVPPSKPECGIEGETIIGNNIQLTCQSKEGSPTPQYSWKRYNILNQEQPLAQPASGQPVSLKNISTDTSGYYICTSSNEEGTQFCNITVAVRSPSMNVALYVGIAVGVVAALIIIGIIIYCCCCRGKDDNTEDKEDARPNREAYEEPPEQLRELSREREEEDDYRQEEQRSTGRESPDHLDQ

SEQ ID NO: 28756 - protein, 333 aa, Homo sapiens
MWSCSWFNGTGLVEELPACQDLQLGLSLLSLLGLVVGVPVGLCYNALLVLANLHSKASMTMPDVYFVNMAVAGLVLSALAPVHLLGPPSSRWALWSVGGEVHVALQIPFNVSSLVAMYSTALLSLDHYIERALPRTYMASVYNTRHVCGFVWGGALLTSFSSLLFYICSHVSTRALECAKMQNAEAADATLVFIGYVVPALATLYALVLLSRVRREDTPLDRDTGRLEPSAHRLLVATVCTQFGLWTPHYLILLGHTVIISRGKPVDAHYLGLLHFVKDFSKLLAFSSSFVTPLLYRYMNQSFPSKLQRLMKKLPCGDRHCSPDHMGVQQVLA

SEQ ID NO: 28757 - protein, 680 aa, Homo sapiens
MESSSSSNSYFSVGPTSPSAVVLLYSKELKKWDEFEDILEERRHVSDLKFAMKCYTPLVYKGITPCKPIDIKCSVLNSEEIHYVIKQLSKESLQSVDVLREEVSEILDEMSHKLRLGAIRFCAFTLSKVFKQIFSKVCVNEEGIQKLQRAIQEHPVVLLPSHRSYIDFLMLSFLLYNYDLPVPVIAAGMDFLGMKMVGELLRMSGAFFMRRTFGGNKLYWAVFSEYVKTMLRNGYAPVEFFLEGTRSRSAKTLTPKFGLLNIVMEPFFKREVFDTYLVPISISYDKILEETLYVYELLGVPKPKESTTGLLKARKILSENFGSIHVYFGDPVSLRSLAAGRMSRSSYNLVPRYIPQKQSEDMHAFVTEVAYKMELLQIENMVLSPWTLIVAVLLQNRPSMDFDALVEKTLWLKGLTQAFGGFLIWPDNKPAEEVVPASILLHSNIASLVKDQVILKVDSGDSEVVDGLMLQHITLLMCSAYRNQLLNIFVRPSLVAVALQMTPGFRKEDVYSCFRFLRDVFADEFIFLPGNTLKDFEEGCYLLCKSEAIQVTTKDILVTEKGNTVLEFLVGLFKPFVESYQIICKYLLSEEEDHFSEEQYLAAVRKFTSQLLDQGTSQCYDVLSSDVQKNALAACVRLGVVEKKKINNNCIFNVNEPATTKLEEMLGCKTPIGKPATAKL

SEQ ID NO: 28758 - protein, 619 aa, Homo sapiens
MESSSSSNSYFSVGPTSPSAVVLLYSLSKESLQSVDVLREEVSEILDEMSHKLRLGAIRFCAFTLSKVFKQIFSKVCVNEEGIQKLQRAIQEHPVVLLPSHRSYIDFLMLSFLLYNYDLPVPVIAAGMDFLGMKMVGELLRMSGAFFMRRTFGGNKLYWAVFSEYVKTMLRNGYAPVEFFLEGTRSRSAKTLTPKFGLLNIVMEPFFKREVFDTYLVPISISYDKILEETLYVYELLGVPKPKESTTGLLKARKILSENFGSIHVYFGDPVSLRSLAAGRMSRSSYNLVPRYIPQKQSEDMHAFVTEVAYKMELLQIENMVLSPWTLIVAVLLQNRPSMDFDALVEKTLWLKGLTQAFGGFLIWPDNKPAEEVVPASILLHSNIASLVKDQVILKVDSGDSEVVDGLMLQHITLLMCSAYRNQLLNIFVRPSLVAVALQMTPGFRKEDVYSCFRFLRDVFADEFIFLPGNTLKDFEEGCYLLCKSEAIQVTTKDILVTEKGNTVLEFLVGLFKPFVESYQIICKYLLSEEEDHFSEEQYLAAVRKFTSQLLDQGTSQCYDVLSSDVQKNALAACVRLGVVEKKKINNNCIFNVNEPATTKLEEMLGCKTPIGKPATAKL

SEQ ID NO: 28759 - protein, 381 aa, Homo sapiens
MGCLGGNSKTTEDQGVDEKERREANKKIEKQLQKERLAYKATHRLLLLGAGESGKSTIVKQMRILHVNGFNPEEKKQKILDIRKNVKDAIVTIVSAMSTIIPPVPLANPENQFRSDYIKSIAPITDFEYSQEFFDHVKKLWDDEGVKACFERSNEYQLIDCAQYFLERIDSVSLVDYTPTDQDLLRCRVLTSGIFETRFQVDKVNFHMFDVGGQRDERRKWIQCFNDVTAIIYVAACSSYNMVIREDNNTNRLRESLDLFESIWNNRWLRTISIILFLNKQDMLAEKVLAGKSKIEDYFPEYANYTVPEDATPDAGEDPKVTRAKFFIRDLFLRISTATGDGKHYCYPHFTCAVDTENIRRVFNDCRDIIQRMHLKQYELL

SEQ ID NO: 28760 - protein, 458 aa, Homo sapiens
MGLCYSLRPLLFGGPGDDPCAASEPPVEDAQPAPAPALAPVRAAARDTARTLLPRGGEGSPACARPKADKPKEKRQRTEQLSAEEREAAKEREAVKEARKVSRGIDRMLRDQKRDLQQTHRLLLLGAGESGKSTIVKQMRILHVNGFNPEEKKQKILDIRKNVKDAIVTIVSAMSTIIPPVPLANPENQFRSDYIKSIAPITDFEYSQEFFDHVKKLWDDEGVKACFERSNEYQLIDCAQYFLERIDSVSLVDYTPTDQDLLRCRVLTSGIFETRFQVDKVNFHMFDVGGQRDERRKWIQCFNDVTAIIYVAACSSYNMVIREDNNTNRLRESLDLFESIWNNRWLRTISIILFLNKQDMLAEKVLAGKSKIEDYFPEYANYTVPEDATPDAGEDPKVTRAKFFIRDLFLRISTATGDGKHYCYPHFTCAVDTENIRRVFNDCRDIIQRMHLKQYELL

SEQ ID NO: 28761 - protein, 174 aa, Homo sapiens
MFDVGGQRDERRKWIQCFNDVTAIIYVAACSSYNMVIREDNNTNRLRESLDLFESIWNNRWLRTISIILFLNKQDMLAEKVLAGKSKIEDYFPEYANYTVPEDATPDAGEDPKVTRAKFFIRDLFLRISTATGDGKHYCYPHFTCAVDTENIRRVFNDCRDIIQRMHLKQYELL

SEQ ID NO: 28762 - protein, 347 aa, Homo sapiens
MGDELAPCPVGTTAWPALIQLISKTPCMPQAASNTSLGLGDLRVPSSMLYWLFLPSSLLAAATLAVSPLLLVTILRNQRLRQEPHYLLPANILLSDLAYILLHMLISSSSLGGWELGRMACGILTDAVFAACTSTILSFTAIVLHTYLAVIHPLRYLSFMSHGAAWKAVALIWLVACCFPTFLIWLSKWQDAQLEEQGASYILPPSMGTQPGCGLLVIVTYTSILCVLFLCTALIANCFWRIYAEAKTSGIWGQGYSRARGTLLIHSVLITLYVSTGVVFSLDMVLTRYHHIDSGTHTWLLAANSEVLMMLPRAMLTYLYLLRYRQLLGMVRGHLPSRRHQAIFTIS

SEQ ID NO: 28763 - protein, 731 aa, Homo sapiens
MSLFLSNLSTNDSSLWKENHNSTDLLNPPGTLNIYLFCLTCLMTFAALVGSIYSLISLLKMQNRTVVSMLVASWSVDDLMSVLSVTIFMFLQWPNEVPGYFQFLCTTSALMYLCQGLSSNLKATLLVSYNFYTMHRGVGSQTASRRSGQVLGVVLTVWAASLLLSALPLCGWGAFVRTPWGCLVDCSSSYVLFLSIVYALAFGLLVGLSVPLTHRLLCSEEPPRLHSNYQEISRGASIPGTPPTAGRVVSLSPEDAPGPSLRRSGGCSPSSDTVFGPGAPAAAGAEACRRENRGTLYGTRSFTVSVAQKRFALILALTKVVLWLPMMMHMVVQNVVGFQSLPLETFSFLLTLLATTVTPVFVLSKRWTHLPCGCIINCRQNAYAVASDGKKIKRKGFEFNLSFQKSYGIYKIAHEDYYDDDENSIFYHNLMNSECETTKDPQRDNRNIFNAIKVEISTTPSLDSSTQRGINKCTNTDITEAKQDSNNKKDAFSDKTGGDINYEETTFSEGPERRLSHEESQKPDLSDWEWCRSKSERTPRQRSGYALAIPLCAFQGTVSLHAPTGKTLSLSTYEVSAEGQKITPASKKIEVYRSKSVGHEPNSEDSSSTFVDTSVKIHLEVLEICDNEEALDTVSIISNISQSSTQVRSPSLRYSRKENRFVSCDLGETASYSLFLPTSNPDGDINISIPDTVEAHRQNSKRQHQERDGYQEEIQLLNKAYRKREEESKGS

SEQ ID NO: 28764 - protein, 289 aa, Homo sapiens
MKLIILEHYSQASEWAAKYIRNRIIQFNPGPEKYFTLGLPTGSTPLGCYKKLIEYYKNGDLSFKYVKTFNMDEYVGLPRDHPESYHSFMWNNFFKHIDIHPENTHILDGNAVDLQAECDAFEEKIKAAGGIELFVGGIGPDGHIAFNEPGSSLVSRTRVKTLAMDTILANARFFDGELTKVPTMALTVGVGTVMDAREVMILITGAHKAFALYKAIEEGVNHMWTVSAFQQHPRTVFVCDEDATLELKVKTVKYFKGLMLVHNKLVDPLYSIKEKETEKSQSSKKPYSD

SEQ ID NO: 28765 - protein, 212 aa, Homo sapiens
MKLIILEHYSQASEWAAKYIRNRIIQFNPGPEKYFTLGLPTGSTPLGCYKKLIEYYKNGDLSFKYVKTFNEPGSSLVSRTRVKTLAMDTILANARFFDGELTKVPTMALTVGVGTVMDAREVMILITGAHKAFALYKAIEEGVNHMWTVSAFQQHPRTVFVCDEDATLELKVKTVKYFKGLMLVHNKLVDPLYSIKEKETEKSQSSKKPYSD

SEQ ID NO: 28766 - protein, 242 aa, Homo sapiens
MALKNKFSCLWILGLCLVATTSSKIPSITDPHFIDNCIEAHNEWRGKVNPPAADMKYMIWDKGLAKMAKAWANQCKFEHNDCLDKSYKCYAAFEYVGENIWLGGIKSFTPRHAITAWYNETQFYDFDSLSCSRVCGHYTQLVWANSFYVGCAVAMCPNLGGASTAIFVCNYGPAGNFANMPPYVRGESCSLCSKEEKCVKNLCRTPQLIIPNQNPFLKPTGRAPQQTAFNPFSLGFLLLRIF

SEQ ID NO: 28767 - protein, 233 aa, Homo sapiens
MALKNKFSCLWILGLCLVATTSSKIPSITDPHFIDNCIEAHNEWRGKVNPPAADMKYMIWDKGLAKMAKAWANQCKFEHNDCLDKSYKCYAAFEYVGENIWLGGIKSFTPRHAITAWYNETQFYDFDSLSCSRVCGHYTQLVWANSFYVGCAVAMCPNLGGASTAIFVCNYGPAGNFANMPPYVRGESCSLCSKEEKCVKNLCKNPFLKPTGRAPQQTAFNPFSLGFLLLRIF

SEQ ID NO: 28768 - protein, 209 aa, Homo sapiens
MALLAEHLLKPLPADKQIETGPFLEAVSHLPPFFDCLGSPVFTPIKADISGNITKIKAVYDTNPAKFRTLQNILEVEKEMYGAEWPKVGATLALMWLKRGLRFIQVFLQSICDGERDENHPNLIRVNATKAYEMALKKYHGWIVQKIFQAALYAAPYKSDFLKALSKGQNVTEEECLEKIRLFLVNYTATIDVIYEMYTQMNAELNYKV

SEQ ID NO: 28769 - protein, 434 aa, Homo sapiens
MEDLFSPSILPPAPNISVPILLGWGLNLTLGQGAPASGPPSRRVRLVFLGVILVVAVAGNTTVLCRLCGGGGPWAGPKRRKMDFLLVQLALADLYACGGTALSQLAWELLGEPRAATGDLACRFLQLLQASGRGASAHLVVLIALERRRAVRLPHGRPLPARALAALGWLLALLLALPPAFVVRGDSPSPLPPPPPPTSLQPGAPPAARAWPGERRCHGIFAPLPRWHLQVYAFYEAVAGFVAPVTVLGVACGHLLSVWWRHRPQAPAAAAPWSASPGRAPAPSALPRAKVQSLKMSLLLALLFVGCELPYFAARLAAAWSSGPAGDWEGEGLSAALRVVAMANSALNPFVYLFFQAGDCRLRRQLRKRLGSLCCAPQGGAEDEEGPRGHQALYRQRWPHPHYHHARREPLDEGGLRPPPPRPRPLPCSCESAF

SEQ ID NO: 28770 - protein, 276 aa, Homo sapiens
MRLVILDNYDLASEWAAKYICNRIIQFKPGQDRYFTLGLPTGSTPLGCYKKLIEYHKNGHLSFKYVKTFNMDEYVGLPRNHPESYHSYMWNNFFKHIDIDPNNAHILDGNAADLQAECDAFENKIKEAGGIDLFVGGIGPDGHIAFNEPGSSLVSRTRLKTLAMDTILANAKYFDGDLSKVPTMALTVGVGTVMDAREVMILITGAHKAFALYKAIEEGVNHMWTVSAFQQHPRTIFVCDEDATLELRVKTVKYFKGLMHVHNKLVDPLFSMKDGN

SEQ ID NO: 28771 - protein, 275 aa, Homo sapiens
MRLVILDNYDLASEWAAKYICNRIIQFKPGQDRYFTLGLPTGSTPLGCYKKLIEYHKNGHLSFKYVKTFNMDEYVGLPRNHPESYHSYMWNNFFKHIDIDPNNAHILDGNAADLQAECDAFENKIKEAGGIDLFVGGIGPDGHIAFNEPGSSLVSRTRLKTLAMDTILANAKYFDGDLSKVPTMALTVGVGTVMDAREVMILITGAHKAFALYKAIEGVNHMWTVSAFQQHPRTIFVCDEDATLELRVKTVKYFKGLMHVHNKLVDPLFSMKDGN

SEQ ID NO: 28772 - protein, 259 aa, Homo sapiens
MRLVILDNYDLASEWAAKYICNRIIQFKPGQDRYFTLGLPTGSTPLGCYKKLIEYHKNGHLSFKYVKTFNMDEYVGLPRNHPESYHSYMWNNFFKHIDIDPNNAHILDGNAADLQAECDAFENKIKEAGGIDLFVGGIGPDGHIAFNEPGSSLVSRTRLKTLAMDTILANAKYFDGDLSKVPTMALTVGVGTVMDAREVMILITGAHKAFALYKAIEEGVNHMWTVSAFQQHPRTIFVCDEDATLELRVKTVKYFKGEH

SEQ ID NO: 28773 - protein, 206 aa, Homo sapiens
MDEYVGLPRNHPESYHSYMWNNFFKHIDIDPNNAHILDGNAADLQAECDAFENKIKEAGGIDLFVGGIGPDGHIAFNEPGSSLVSRTRLKTLAMDTILANAKYFDGDLSKVPTMALTVGVGTVMDAREVMILITGAHKAFALYKAIEEGVNHMWTVSAFQQHPRTIFVCDEDATLELRVKTVKYFKGLMHVHNKLVDPLFSMKDGN

SEQ ID NO: 28774 - protein, 242 aa, Homo sapiens
MRLVILDNYDLASEWAAKYICNRIIQFKPGQDRYFTLGLPTGLPRNHPESYHSYMWNNFFKHIDIDPNNAHILDGNAADLQAECDAFENKIKEAGGIDLFVGGIGPDGHIAFNEPGSSLVSRTRLKTLAMDTILANAKYFDGDLSKVPTMALTVGVGTVMDAREVMILITGAHKAFALYKAIEEGVNHMWTVSAFQQHPRTIFVCDEDATLELRVKTVKYFKGLMHVHNKLVDPLFSMKDGN

SEQ ID NO: 28775 - protein, 419 aa, Homo sapiens
MLAAAFADSNSSSMNVSFAHLHFAGGYLPSDSQDWRTIIPALLVAVCLVGFVGNLCVIGILLHNAWKGKPSMIHSLILNLSLADLSLLLFSAPIRATAYSKSVWDLGWFVCKSSDWFIHTCMAAKSLTIVVVAKVCFMYASDPAKQVSIHNYTIWSVLVAIWTVASLLPLPEWFFSTIRHHEGVEMCLVDVPAVAEEFMSMFGKLYPLLAFGLPLFFASFYFWRAYDQCKKRGTKTQNLRNQIRSKQVTVMLLSIAIISALLWLPEWVAWLWVWHLKAAGPAPPQGFIALSQVLMFSISSANPLIFLVMSEEFREGLKGVWKWMITKKPPTVSESQETPAGNSEGLPDKVPSPESPASIPEKEKPSSPSSGKGKTEKAEIPILPDVEQFWHERDTVPSVQDNDPIPWEHEDQETGEGVK

SEQ ID NO: 28776 - protein, 354 aa, Homo sapiens
MGCTLSAEERAALERSKAIEKNLKEDGISAAKDVKLLLLGAGESGKSTIVKQMKIIHEDGFSGEDVKQYKPVVYSNTIQSLAAIVRAMDTLGIEYGDKERKADAKMVCDVVSRMEDTEPFSAELLSAMMRLWGDSGIQECFNRSREYQLNDSAKYYLDSLDRIGAADYQPTEQDILRTRVKTTGIVETHFTFKNLHFRLFDVGGQRSERKKWIHCFEDVTAIIFCVALSGYDQVLHEDETTNRMHESLMLFDSICNNKFFIDTSIILFLNKKDLFGEKIKKSPLTICFPEYTGPNTYEDAAAYIQAQFESKNRSPNKEIYCHMTCATDTNNIQVVFDAVTDIIIANNLRGCGLY

SEQ ID NO: 28777 - protein, 354 aa, Homo sapiens
MGCTLSAEERAALERSKAIEKNLKEDGISAAKDVKLLLLGAGESGKSTIVKQMKIIHEDGFSGEDVKQYKPVVYSNTIQSLAAIVRAMDTLGIEYGDKERKADAKMVCDVVSRMEDTEPFSAELLSAMMRLWGDSGIQECFNRSREYQLNDSAKYYLDSLDRIGAADYQPTEQDILRTRVKTTGIVETHFTFKNLHFRLFDVGGQRSERKKWIHCFEDVTAIIFCVALSGYDQVLHEDETTNRMHESLKLFDSICNNKWFTDTSIILFLNKKDIFEEKIKKSPLTICFPEYTGPSAFTEAVAYIQAQYESKNKSAHKEIYTHVTCATDTNNIQFVFDAVTDVIIAKNLRGCGLY

SEQ ID NO: 28778 - protein, 470 aa, Homo sapiens
MDTTMEADLGATGHRPRTELDDEDSYPQGGWDTVFLVALLLLGLPANGLMAWLAGSQARHGAGTRLALLLLSLALSDFLFLAAAAFQILEIRHGGHWPLGTAACRFYYFLWGVSYSSGLFLLAALSLDRCLLALCPHWYPGHRPVRLPLWVCAGVWVLATLFSVPWLVFPEAAVWWYDLVICLDFWDSEELSLRMLEVLGGFLPFLLLLVCHVLTQATACRTCHRQQQPAACRGFARVARTILSAYVVLRLPYQLAQLLYLAFLWDVYSGYLLWEALVYSDYLILLNSCLSPFLCLMASADLRTLLRSVLSSFAAALCEERPGSFTPTEPQTQLDSEGPTLPEPMAEAQSQMDPVAQPQVNPTLQPRSDPTAQPQLNPTAQPQSDPTAQPQLNLMAQPQSDSVAQPQADTNVQTPAPAASSVPSPCDEASPTPSSHPTPGALEDPATPPASEGESPSSTPPEAAPGAGPT

SEQ ID NO: 28779 - protein, 609 aa, Homo sapiens
MSDERRLPGSAVGWLVCGGLSLLANAWGILSVGAKQKKWKPLEFLLCTLAATHMLNVAVPIATYSVVQLRRQRPDFEWNEGLCKVFVSTFYTLTLATCFSVTSLSYHRMWMVCWPVNYRLSNAKKQAVHTVMGIWMVSFILSALPAVGWHDTSERFYTHGCRFIVAEIGLGFGVCFLLLVGGSVAMGVICTAIALFQTLAVQVGRQADRRAFTVPTIVVEDAQGKRRSSIDGSEPAKTSLQTTGLVTTIVFIYDCLMGFPVLVVSFSSLRADASAPWMALCVLWCSVAQALLLPVFLWACDRYRADLKAVREKCMALMANDEESDDETSLEGGISPDLVLERSLDYGYGGDFVALDRMAKYEISALEGGLPQLYPLRPLQEDKMQYLQVPPTRRFSHDDADVWAAVPLPAFLPRWGSGEDLAALAHLVLPAGPERRRASLLAFAEDAPPSRARRRSAESLLSLRPSALDSGPRGARDSPPGSPRRRPGPGPRSASASLLPDAFALTAFECEPQALRRPPGPFPAAPAAPDGADPGEAPTPPSSAQRSPGPRPSAHSHAGSLRPGLSASWGEPGGLRAAGGGGSTSSFLSSPSESSGYATLHSDSLGSAS

SEQ ID NO: 28780 - protein, 870 aa, Homo sapiens
MNSNLPAENLTIAVNMTKTLPTAVTHGFNSTNDPPSMSITRLFPALLECFGIVLCGYIAGRANVITSTQAKGLGNFVSRFALPALLFKNMVVLNFSNVDWSFLYSILIAKASVFFIVCVLTLLVASPDSRFSKAGLFPIFATQSNDFALGYPIVEALYQTTYPEYLQYIYLVAPISLMMLNPIGFIFCEIQKWKDTQNASQNKIKIVGLGLLRVLQNPIVFMVFIGIAFNFILDRKVPVYVENFLDGLGNSFSGSALFYLGLTMVGKIKRLKKSAFVVLILLITAKLLVLPLLCREMVELLDKGDSVVNHTSLSNYAFLYGVFPVAPGVAIFATQFNMEVEIITSGMVISTFVSAPIMYVSAWLLTFPTMDPKPLAYAIQNVSFDISIVSLISLIWSLAILLLSKKYKQLPHMLTTNLLIAQSIVCAGMMIWNFVKEKNFVGQILVFVLLYSSLYSTYLWTGLLAISLFLLKKRERVQIPVGIIIISGWGIPALLVGVLLITGKHNGDSIDSAFFYGKEQMITTAVTLFCSILIAGISLMCMNQTAQAGSYEGFDQSQSHKVVEPGNTAFEESPAPVNEPELFTSSIPETSCCSCSMGNGELHCPSIEPIANTSTSEPVIPSFEKNNHCVSRCNSQSCILAQEEEQYLQSGDQQLTRHVLLCLLLIIGLFANLSSCLWWLFNQEPGRLYVELQFFCAVFNFGQGFISFGIFGLDKHLIILPFKRRLEFLWNNKDTAENRDSPVSEEIKMTCQQFIHYHRDLCIRNIVKERRCGAKTSAGTFCGCDLVSWLIEVGLASDRGEAVIYGDRLVQGGVIQHITNEYEFRDEYLFYRFLQKSPEQSPPAINANTLQQERYKEIEHSSPPSHSPKT

SEQ ID NO: 28781 - protein, 814 aa, Homo sapiens
MEPEINCSELCDSFPGQELDRRPLHDLCKTTITSSHHSSKTISSLSPVLLGIVWTFLSCGLLLILFFLAFTIHCRKNRIVKMSSPNLNIVTLLGSCLTYSSAYLFGIQDVLVGSSMETLIQTRLSMLCIGTSLVFGPILGKSWRLYKVFTQRVPDKRVIIKDLQLLGLVAALLMADVILLMTWVLTDPIQCLQILSVSMTVTGKDVSCTSTSTHFCASRYSDVWIALIWGCKGLLLLYGAYLAGLTGHVSSPPVNQSLTIMVGVNLLVLAAGLLFVVTRYLHSWPNLVFGLTSGGIFVCTTTINCFIFIPQLKQWKAFEEENQTIRRMAKYFSTPNKSFHTQYGEEENCHPRGEKSSMERLLTEKNAVIESLQEQVNNAKEKIVRLMSAECTYDLPEGAAPPASSPNKDVQAVASVHTLAAAQGPSGHLSDFQNDPGMAARDSQCTSGPSSYAQSLEGPGKDSSFSPGKEEKISDSKDFSDHLDSGCSQKPWTEQSLGPERGDQVPMNPSQSLLPERGGSDPQRQRHLENSEEPPERRSRVSSVIREKLQEVLQDLGLGPEASLSTAPSCHQQTWKNSAAFSPQKMPLSKELGFSPYMVRRRRAAQRARSHFPGSAPSSVGHRANRTVPGAHSRLHVQNGDSPSLAPQTTDSRVRRPSSRKPSLPSDPQDRPGTLEGSKQSQTEPEGARGSKAAFLRQPSGSGRAPSPAAPCLSKASPDLPEQWQLWPPVPSGCASLSSQHSYFDTESSSSDEFFCRCHRPYCEICFQSSSDSSDSGTSDTDPEPTGGLASWEKLWARSKPIVNFKDDLKPTLV

SEQ ID NO: 28782 - protein, 810 aa, Homo sapiens
MEPEINCSELCDSFPGQELDRRPLHDLCKTTITSSHHSSKTISSLSPVLLGIVWTFLSCGLLLILFFLAFTIHCRKNRIVKMSSPNLNIVTLLGSCLTYSSAYLFGIQDVLVGSSMETLIQTRLSMLCIGTSLVFGPILGKSWRLYKVFTQRVPDKRVIIKDLQLLGLVAALLMADVILLMTWVLTDPIQCLQILSVTGKDVSCTSTSTHFCASRYSDVWIALIWGCKGLLLLYGAYLAGLTGHVSSPPVNQSLTIMVGVNLLVLAAGLLFVVTRYLHSWPNLVFGLTSGGIFVCTTTINCFIFIPQLKQWKAFEEENQTIRRMAKYFSTPNKSFHTQYGEEENCHPRGEKSSMERLLTEKNAVIESLQEQVNNAKEKIVRLMSAECTYDLPEGAAPPASSPNKDVQAVASVHTLAAAQGPSGHLSDFQNDPGMAARDSQCTSGPSSYAQSLEGPGKDSSFSPGKEEKISDSKDFSDHLDSGCSQKPWTEQSLGPERGDQVPMNPSQSLLPERGGSDPQRQRHLENSEEPPERRSRVSSVIREKLQEVLQDLGLGPEASLSTAPSCHQQTWKNSAAFSPQKMPLSKELGFSPYMVRRRRAAQRARSHFPGSAPSSVGHRANRTVPGAHSRLHVQNGDSPSLAPQTTDSRVRRPSSRKPSLPSDPQDRPGTLEGSKQSQTEPEGARGSKAAFLRQPSGSGRAPSPAAPCLSKASPDLPEQWQLWPPVPSGCASLSSQHSYFDTESSSSDEFFCRCHRPYCEICFQSSSDSSDSGTSDTDPEPTGGLASWEKLWARSKPIVNFKDDLKPTLV

SEQ ID NO: 28783 - protein, 621 aa, Homo sapiens
MGLLSDPVRRRALARLVLRLNAPLCVLSYVAGIAWFLALVFPPLTQRTYMSENAMGSTMVEEQFAGGDRARAFARDFAAHRKKSGALPVAWLERTMRSVGLEVYTQSFSRKLPFPDETHERYMVSGTNVYGILRAPRAASTESLVLTVPCGSDSTNSQAVGLLLALAAHFRGQIYWAKDIVFLVTEHDLLGTEAWLEAYHDVNVTGMQSSPLQGRAGAIQAAVALELSSDVVTSLDVAVEGLNGQLPNLDLLNLFQTFCQKGGLLCTLQGKLQPEDWTSLDGPLQGLQTLLLMVLRQASGRPHGSHGLFLRYRVEALTLRGINSFRQYKYDLVAVGKALEGMFRKLNHLLERLHQSFFLYLLPGLSRFVSIGLYMPAVGFLLLVLGLKALELWMQLHEAGMGLEEPGGAPGPSVPLPPSQGVGLASLVAPLLISQAMGLALYVLPVLGQHVATQHFPVAEAEAVVLTLLAIYAAGLALPHNTHRVVSTQAPDRGWMALKLVALIYLALQLGCIALTNFSLGFLLATTMVPTAALAKPHGPRTLYAALLVLTSPAATLLGSLFLWRELQEAPLSLAEGWQLFLAALAQGVLEHHTYGALLFPLLSLGLYPCWLLFWNVLFWK

SEQ ID NO: 28784 - protein, 561 aa, Homo sapiens
MGLLSDPVRRRALARLVLRLNAPLWALPVAWLERTMRSVGLEVYTQSFSRKLPFPDETHERYMVSGTNVYGILRAPRAASTESLVLTVPCGSDSTNSQAVGLLLALAAHFRGQIYWAKDIVFLVTEHDLLGTEAWLEAYHDVNVTGMQSSPLQGRAGAIQAAVALELSSDVVTSLDVAVEGLNGQLPNLDLLNLFQTFCQKGGLLCTLQGKLQPEDWTSLDGPLQGLQTLLLMVLRQASGRPHGSHGLFLRYRVEALTLRGINSFRQYKYDLVAVGKALEGMFRKLNHLLERLHQSFFLYLLPGLSRFVSIGLYMPAVGFLLLVLGLKALELWMQLHEAGMGLEEPGGAPGPSVPLPPSQGVGLASLVAPLLISQAMGLALYVLPVLGQHVATQHFPVAEAEAVVLTLLAIYAAGLALPHNTHRVVSTQAPDRGWMALKLVALIYLALQLGCIALTNFSLGFLLATTMVPTAALAKPHGPRTLYAALLVLTSPAATLLGSLFLWRELQEAPLSLAEGWQLFLAALAQGVLEHHTYGALLFPLLSLGLYPCWLLFWNVLFWK

SEQ ID NO: 28785 - protein, 1256 aa, Homo sapiens
MLFKLLQRQTYTCLSHRYGLYVCFLGVVVTIVSAFQFGEVVLEWSRDQYHVLFDSYRDNIAGKSFQNRLCLPMPIDVVYTWVNGTDLELLKELQQVREQMEEEQKAMREILGKNTTEPTKKSEKQLECLLTHCIKVPMLVLDPALPANITLKDLPSLYPSFHSASDIFNVAKPKNPSTNVSVVVFDSTKDVEDAHSGLLKGNSRQTVWRGYLTTDKEVPGLVLMQDLAFLSGFPPTFKETNQLKTKLPENLSSKVKLLQLYSEASVALLKLNNPKDFQELNKQTKKNMTIDGKELTISPAYLLWDLSAISQSKQDEDISASRFEDNEELRYSLRSIERHAPWVRNIFIVTNGQIPSWLNLDNPRVTIVTHQDVFRNLSHLPTFSSPAIESHIHRIEGLSQKFIYLNDDVMFGKDVWPDDFYSHSKGQKVYLTWPVPNCAEGCPGSWIKDGYCDKACNNSACDWDGGDCSGNSGGSRYIAGGGGTGSIGVGQPWQFGGGINSVSYCNQGCANSWLADKFCDQACNVLSCGFDAGDCGQDHFHELYKVILLPNQTHYIIPKGECLPYFSFAEVAKRGVEGAYSDNPIIRHASIANKWKTIHLIMHSGMNATTIHFNLTFQNTNDEEFKMQITVEVDTREGPKLNSTAQKGYENLVSPITLLPEAEILFEDIPKEKRFPKFKRHDVNSTRRAQEEVKIPLVNISLLPKDAQLSLNTLDLQLEHGDITLKGYNLSKSALLRSFLMNSQHAKIKNQAIITDETNDSLVAPQEKQVHKSILPNSLGVSERLQRLTFPAVSVKVNGHDQGQNPPLDLETTARFRVETHTQKTIGGNVTKEKPPSLIVPLESQMTKEKKITGKEKENSRMEENAENHIGVTEVLLGRKLQHYTDSYLGFLPWEKKKYFQDLLDEEESLKTQLAYFTDSKNTGRQLKDTFADSLRYVNKILNSKFGFTSRKVPAHMPHMIDRIVMQELQDMFPEEFDKTSFHKVRHSEDMQFAFSYFYYLMSAVQPLNISQVFDEVDTDQSGVLSDREIRTLATRIHELPLSLQDLTGLEHMLINCSKMLPADITQLNNIPPTQESYYDPNLPPVTKSLVTNCKPVTDKIHKAYKDKNKYRFEIMGEEEIAFKMIRTNVSHVVGQLDDIRKNPRKFVCLNDNIDHNHKDAQTVKAVLRDFYESMFPIPSQFELPREYRNRFLHMHELQEWRAYRDKLKFWTHCVLATLIMFTIFSFFAEQLIALKRKIFPRRRIHKEASPNRIRV

SEQ ID NO: 28786 - protein, 490 aa, Homo sapiens
MLFKLLQRQTYTCLSHRYGLYVCFLGVVVTIVSAFQFGEVVLEWSRDQYHVLFDSYRDNIAGKSFQNRLCLPMPIDVVYTWVNGTDLELLKELQQVREQMEEEQKAMREILGKNTTEPTKKSEKQLECLLTHCIKVPMLVLDPALPANITLKDLPSLYPSFHSASDIFNVAKPKNPSTNVSVVVFDSTKDVEDAHSGLLKGNSRQTVWRGYLTTDKEVPGLVLMQDLAFLSGFPPTFKETNQLKTKLPENLSSKVKLLQLYSEASVALLKLNNPKDFQELNKQTKKNMTIDGKELTISPAYLLWDLSAISQSKQDEDISASRFEDNEELRYSLRSIERHAPWVRNIFIVTNGQIPSWLNLDNPRVTIVTHQDVFRNLSHLPTFSSPAIESHIHRIEGLSQKFIYLNDDVMFGKDVWPDDFYSHSKGQKVYLTWPVPNCAEGCPGSWIKDGYCDKACNNSACDWDGGDCSGKDVLNCNSFIFMEYFLLNHY

SEQ ID NO: 28787 - protein, 359 aa, Homo sapiens
MTLESIMACCLSEEAKEARRINDEIERQLRRDKRDARRELKLLLLGTGESGKSTFIKQMRIIHGSGYSDEDKRGFTKLVYQNIFTAMQAMIRAMDTLKIPYKYEHNKAHAQLVREVDVEKVSAFENPYVDAIKSLWNDPGIQECYDRRREYQLSDSTKYYLNDLDRVADPAYLPTQQDVLRVRVPTTGIIEYPFDLQSVIFRMVDVGGQRSERRKWIHCFENVTSIMFLVALSEYDQVLVESDNENRMEESKALFRTIITYPWFQNSSVILFLNKKDLLEEKIMYSHLVDYFPEYDGPQRDAQAAREFILKMFVDLNPDSDKIIYSHFTCATDTENIRFVFAAVKDTILQLNLKEYNLV

SEQ ID NO: 28788 - protein, 335 aa, Homo sapiens
MQPSPPPTELVPSERAVVLLSCALSALGSGLLVATHALWPDLRSRARRLLLFLSLADLLSAASYFYGVLQNFAGPSWDCVLQGALSTFANTSSFFWTVAIALYLYLSIVRAARGPRTDRLLWAFHVVSWGVPLVITVAAVALKKIGYDASDVSVGWCWIDLEAKDHVLWMLLTGKLWEMLAYVLLPLLYLLVRKHINRAHTALSEYRPILSQEHRLLRHSSMADKKLVLIPLIFIGLRVWSTVRFVLTLCGSPAVQTPVLVVLHGIGNTFQGGANCIMFVLCTRAVRTRLFSLCCCCCSSQPPTKSPAGTPKAPAPSKPGESQESQGTPGELPST

SEQ ID NO: 28789 - protein, 340 aa, Homo sapiens
MARDLIGPALPPGFKARGTAEDEERDPSPVAGPALPPNYKSSSSDSSDSDEDSSSLYEEGNQESEEDDSGPTARKQRKNQDDDDDDDDGFFGPALPPGFKKQDDSPPRPIIGPALPPGFIKSTQKSDKGRDDPGQQETDSSEDEDIIGPMPAKGPVNYNVTTEFEKRAQRMKEKLTKGDDDSSKPIVRESWMTELPPEMKDFGLGPRTFKRRADDTSGDRSIWTDTPADRERKAKETQEARKSSSKKDEEHILSGRDKRLAEQVSSYNESKRSESLMDIHHKKLKSKAAEDKNKPQERIPFDRDKDLKVNRFDEAQKKALIKKSRELNTRFSHGKGNMFL

SEQ ID NO: 28790 - protein, 191 aa, Homo sapiens
MPAKGPVNYNVTTEFEKRAQRMKEKLTKGDDDSSKPIVRESWMTELPPEMKDFGLGPRTFKRRADDTSGDRSIWTDTPADRERKAKETQEARKSSSKKDEEHILSGRDKRLAEQVSSYNESKRSESLMDIHHKKLKSKAAEDKNKPQERIPFDRDKDLKVNRFDEAQKKALIKKSRELNTRFSHGKGNMFL

SEQ ID NO: 28791 - protein, 170 aa, Homo sapiens
MKEKLTKGDDDSSKPIVRESWMTELPPEMKDFGLGPRTFKRRADDTSGDRSIWTDTPADRERKAKETQEARKSSSKKDEEHILSGRDKRLAEQVSSYNESKRSESLMDIHHKKLKSKAAEDKNKPQERIPFDRDKDLKVNRFDEAQKKALIKKSRELNTRFSHGKGNMFL

SEQ ID NO: 28792 - protein, 175 aa, Homo sapiens
MARDLIGPALPPGFKARGTAEDEERDPSPVAGPALPPNYKSSSSDSSDSDEDSSSLYEEGNQESEEDDSGPTARKQRKNQDDDDDDDDGFFGPALPPGFKKQDDSPPRPIIGPALPPGFIKSTQKSDKGRDDPGQQVSSSHFNSKVWKVFIERIRCIVTNSKLYACSYYNHWTQL

SEQ ID NO: 28793 - protein, 305 aa, Homo sapiens
MAAGLARLLLLLGLSAGGPAPAGAAKMKVVEEPNAFGVNNPFLPQASRLQAKRDPSPVSGPVHLFRLSGKCFSLVESTYKYEFCPFHNVTQHEQTFRWNAYSGILGIWHEWEIANNTFTGMWMRDGDACRSRSRQSKVELACGKSNRLAHVSEPSTCVYALTFETPLVCHPHALLVYPTLPEALQRQWDQVEQDLADELITPQGHEKLLRTLFEDAGYLKTPEENEPTQLEGGPDSLGFETLENCRKAHKELSKEIKRLKGLLTQHGIPYTRPTETSNLEHLGHETPRAKSPEQLRGDPGLRGSL

SEQ ID NO: 28794 - protein, 1215 aa, Homo sapiens
MGAMAYPLLLCLLLAQLGLGAVGASRDPQGRPDSPRERTPKGKPHAQQPGRASASDSSAPWSRSTDGTILAQKLAEEVPMDVASYLYTGDSHQLKRANCSGRYELAGLPGKWPALASAHPSLHRALDTLTHATNFLNVMLQSNKSREQNLQDDLDWYQALVWSLLEGEPSISRAAITFSTDSLSAPAPQVFLQATREESRILLQDLSSSAPHLANATLETEWFHGLRRKWRPHLHRRGPNQGPRGLGHSWRRKDGLGGDKSHFKWSPPYLECENGSYKPGWLVTLSSAIYGLQPNLVPEFRGVMKVDINLQKVDIDQCSSDGWFSGTHKCHLNNSECMPIKGLGFVLGAYECICKAGFYHPGVLPVNNFRRRGPDQHISGSTKDVSEEAYVCLPCREGCPFCADDSPCFVQEDKYLRLAIISFQALCMLLDFVSMLVVYHFRKAKSIRASGLILLETILFGSLLLYFPVVILYFEPSTFRCILLRWARLLGFATVYGTVTLKLHRVLKVFLSRTAQRIPYMTGGRVMRMLAVILLVVFWFLIGWTSSVCQNLEKQISLIGQGKTSDHLIFNMCLIDRWDYMTAVAEFLFLLWGVYLCYAVRTVPSAFHEPRYMAVAVHNELIISAIFHTIRFVLASRLQSDWMLMLYFAHTHLTVTVTIGLLLIPKFSHSSNNPRDDIATEAYEDELDMGRSGSYLNSSINSAWSEHSLDPEDIRDELKKLYAQLEIYKRKKMITNNPHLQKKRCSKKGLGRSIMRRITEIPETVSRQCSKEDKEGADHGTAKGTALIRKNPPESSGNTGKSKEETLKNRVFSLKKSHSTYDHVRDQTEESSSLPTESQEEETTENSTLESLSGKKLTQKLKEDSEAESTESVPLVCKSASAHNLSSEKKTGHPRTSMLQKSLSVIASAKEKTLGLAGKTQTAGVEERTKSQKPLPKDKETNRNHSNSDNTETKDPAPQNSNPAEEPRKPQKSGIMKQQRVNPTTANSDLNPGTTQMKDNFDIGEVCPWEVYDLTPGPVPSESKVQKHVSIVASEMEKNPTFSLKEKSHHKPKAAEVCQQSNQKRIDKAEVCLWESQGQSILEDEKLLISKTPVLPERAKEENGGQPRAANVCAGQSEELPPKAVASKTENENLNQIGHQEKKTSSSEENVRGSYNSSNNFQQPLTSRAEVCPWEFETPAQPNAGRSVALPASSALSANKIAGPRKEEIWDSFKV

SEQ ID NO: 28795 - protein, 327 aa, Homo sapiens
MPALLERPKLSNAMARALHRHIMMERERKRQEEEEVDKMMEQKMKEEQERRKKKEMEERMSLEETKEQILKLEEKLLALQEEKHQLFLQLKKVLHEEEKRRRKEQSDLTTLTSAAYQQSLTVHTGTHLLSMQGSPGGHNRPGTLMAADRAKQMFGPQVLTTRHYVGSAAAFAGTPEHGQFQGSPGGAYGTAQPPPHYGPTQPAYSPSQQLRAPSAFPAVQYLSQPQPQPYAVHGHFQPTQTGFLQPGGALSLQKQMEHANQQTGFSDSSSLRPMHPQALHPAPGLLASPQLPVQMQPAGKSGFAATSQPGPRLPFIQHSQNPRFYHK

SEQ ID NO: 28796 - protein, 303 aa, Homo sapiens
MPALLERPKLSNAMARALHRHIMMERERKRQEEEEVDKMMEQKMKEEQERRKKKEMEERMSLEETKEQILKLEEKLLALQEEKHQLFLQLKKVLHEEEKRRRKEQSDLTTLTSAAYQQSLTVHTGTHLLSMQGSPGGHNRPGTLMAADRAKQMFGPQVLTTRHYVGSAAAFAGTPEHGQFQGSPGGAYGTAQPPPHYGPTQPAYSPSQQLRAPSAFPAVQYLSQPQPQPYAVHGHFQPTQTGFLQPGGALSLQKQMEHANQQTGFSDSSSLRPMHPQALHPAPGLLASPQLPVQMQPAGKTAP

SEQ ID NO: 28797 - protein, 356 aa, Homo sapiens
MSRPLLITFTPATDPSDLWKDGQQQPQPEKPESTLDGAAARAFYEALIGDESSAPDSQRSQTEPARERKRKKRRIMKAPAAEAVAEGASGRHGQGRSLEAEDKMTHRILRAAQEGDLPELRRLLEPHEAGGAGGNINARDAFWWTPLMCAARAGQGAAVSYLLGRGAAWVGVCELSGRDAAQLAEEAGFPEVARMVRESHGETRSPENRSPTPSLQYCENCDTHFQDSNHRTSTAHLLSLSQGPQPPNLPLGVPISSPGFKLLLRGGWEPGMGLGPRGEGRANPIPTVLKRDQEGLGYRSAPQPRVTHFPAWDTRAVAGRERPPRVATLSWREERRREEKDRAWERDLRTYMNLEF

SEQ ID NO: 28798 - protein, 81 aa, Homo sapiens
MRLLVLSSLLCILLLCFSIFSTEGKRRPAKAWSGRRTRLCCHRVPSPNSTNLKGHHVRLCKPCKLEPEPRLWVVPGALPQV

SEQ ID NO: 28799 - protein, 1037 aa, Homo sapiens
MGVRNCLYGNNMSGQRDIPPEIGEQPEQPPLEAPGAAAPGAGPSPAEEMETEPPHNEPIPVENDGEACGPPEVSRPNFQVLNPAFREAGAHGSYSPPPEEAMPFEAEQPSLGGFWPTLEQPGFPSGVHAGLEAFGPALMEPGAFSGARPGLGGYSPPPEEAMPFEFDQPAQRGCSQLLLQVPDLAPGGPGAAGVPGAPPEEPQALRPAKAGSRGGYSPPPEETMPFELDGEGFGDDSPPPGLSRVIAQVDGSSQFAAVAASSAVRLTPAANAPPLWVPGAIGSPSQEAVRPPSNFTGSSPWMEISGPPFEIGSAPAGVDDTPVNMDSPPIALDGPPIKVSGAPDKRERAERPPVEEEAAEMEGAADAAEGGKVPSPGYGSPAAGAASADTAARAAPAAPADPDSGATPEDPDSGTAPADPDSGAFAADPDSGAAPAAPADPDSGAAPDAPADPDSGAAPDAPADPDAGAAPEAPAAPAAAETRAAHVAPAAPDAGAPTAPAASATRAAQVRRAASAAPASGARRKIHLRPPSPEIQAADPPTPRPTRASAWRGKSESSRGRRVYYDEGVASSDDDSSGDESDDGTSGCLRWFQHRRNRRRRKPQRNLLRNFLVQAFGGCFGRSESPQPKASRSLKVKKVPLAEKRRQMRKEALEKRAQKRAEKKRSKLIDKQLQDEKMGYMCTHRLLLLGAGESGKSTIVKQMRILHVNGFNGEGGEEDPQAARSNSDGEKATKVQDIKNNLKEAIETIVAAMSNLVPPVELANPENQFRVDYILSVMNVPDFDFPPEFYEHAKALWEDEGVRACYERSNEYQLIDCAQYFLDKIDVIKQADYVPSDQDLLRCRVLTSGIFETKFQVDKVNFHMFDVGGQRDERRKWIQCFNDVTAIIFVVASSSYNMVIREDNQTNRLQEALNLFKSIWNNRWLRTISVILFLNKQDLLAEKVLAGKSKIEDYFPEFARYTTPEDATPEPGEDPRVTRAKYFIRDEFLRISTASGDGRHYCYPHFTCAVDTENIRRVFNDCRDIIQRMHLRQYELL

SEQ ID NO: 28800 - protein, 1023 aa, Homo sapiens
MGVRNCLYGNNMSGQRDIPPEIGEQPEQPPLEAPGAAAPGAGPSPAEEMETEPPHNEPIPVENDGEACGPPEVSRPNFQVLNPAFREAGAHGSYSPPPEEAMPFEAEQPSLGGFWPTLEQPGFPSGVHAGLEAFGPALMEPGAFSGARPGLGGYSPPPEEAMPFEFDQPAQRGCSQLLLQVPDLAPGGPGAAGVPGAPPEEPQALRPAKAGSRGGYSPPPEETMPFELDGEGFGDDSPPPGLSRVIAQVDGSSQFAAVAASSAVRLTPAANAPPLWVPGAIGSPSQEAVRPPSNFTGSSPWMEISGPPFEIGSAPAGVDDTPVNMDSPPIALDGPPIKVSGAPDKRERAERPPVEEEAAEMEGAADAAEGGKVPSPGYGSPAAGAASADTAARAAPAAPADPDSGATPEDPDSGTAPADPDSGAFAADPDSGAAPAAPADPDSGAAPDAPADPDSGAAPDAPADPDAGAAPEAPAAPAAAETRAAHVAPAAPDAGAPTAPAASATRAAQVRRAASAAPASGARRKIHLRPPSPEIQAADPPTPRPTRASAWRGKSESSRGRRVYYDEGVASSDDDSSGDESDDGTSGCLRWFQHRRNRRRRKPQRNLLRNFLVQAFGGCFGRSESPQPKASRSLKVKKVPLAEKRRQMRKEALEKRAQKRAEKKRSKLIDKQLQDEKMGYMCTHRLLLLGAGESGKSTIVKQMRILHVNGFNGDSEKATKVQDIKNNLKEAIETIVAAMSNLVPPVELANPENQFRVDYILSVMNVPDFDFPPEFYEHAKALWEDEGVRACYERSNEYQLIDCAQYFLDKIDVIKQADYVPSDQDLLRCRVLTSGIFETKFQVDKVNFHMFDVGGQRDERRKWIQCFNDVTAIIFVVASSSYNMVIREDNQTNRLQEALNLFKSIWNNRWLRTISVILFLNKQDLLAEKVLAGKSKIEDYFPEFARYTTPEDATPEPGEDPRVTRAKYFIRDEFLRISTASGDGRHYCYPHFTCAVDTENIRRVFNDCRDIIQRMHLRQYELL

SEQ ID NO: 28801 - protein, 752 aa, Homo sapiens
MGVRNCLYGNNMSGQRDIPPEIGEQPEQPPLEAPGAAAPGAGPSPAEEMETEPPHNEPIPVENDGEACGPPEVSRPNFQVLNPAFREAGAHGSYSPPPEEAMPFEAEQPSLGGFWPTLEQPGFPSGVHAGLEAFGPALMEPGAFSGARPGLGGYSPPPEEAMPFEFDQPAQRGCSQLLLQVPDLAPGGPGAAGVPGAPPEEPQALRPAKAGSRGGYSPPPEETMPFELDGEGFGDDSPPPGLSRVIAQVDGSSQFAAVAASSAVRLTPAANAPPLWVPGAIGSPSQEAVRPPSNFTGSSPWMEISGPPFEIGSAPAGVDDTPVNMDSPPIALDGPPIKVSGAPDKRERAERPPVEEEAAEMEGAADAAEGGKVPSPGYGSPAAGAASADTAARAAPAAPADPDSGATPEDPDSGTAPADPDSGAFAADPDSGAAPAAPADPDSGAAPDAPADPDSGAAPDAPADPDAGAAPEAPAAPAAAETRAAHVAPAAPDAGAPTAPAASATRAAQVRRAASAAPASGARRKIHLRPPSPEIQAADPPTPRPTRASAWRGKSESSRGRRVYYDEGVASSDDDSSGDESDDGTSGCLRWFQHRRNRRRRKPQRNLLRNFLVQAFGGCFGRSESPQPKASRSLKVKKVPLAEKRRQMRKEALEKRAQKRAEKKRSKLIDKQLQDEKMGYMCTHRLLLLGRKVVPSDTEGRFRLDRPAPATVSWTGRGFSVSSLLIRSPNPPAFTVEKPDTQVLENLVKAPL

SEQ ID NO: 28802 - protein, 528 aa, Homo sapiens
MLLPLLLLLPMCWAVEVKRPRGVSLTNHHFYDESKPFTCLDGSATIPFDQVNDDYCDCKDGSDEPGTAACPNGSFHCTNTGYKPLYIPSNRVNDGVCDCCDGTDEYNSGVICENTCKEKGRKERESLQQMAEVTREGFRLKKILIEDWKKAREEKQKKLIELQAGKKSLEDQVEMLRTVKEEAEKPEREAKEQHQKLWEEQLAAAKAQQEQELAADAFKELDDDMDGTVSVTELQTHPELDTDGDGALSEAEAQALLSGDTQTDATSFYDRVWAAIRDKYRSEALPTDLPAPSAPDLTEPKEEQPPVPSSPTEEEEEEEEEEEEEAEEEEEEEDSEEAPPPLSPPQPASPAEEDKMPPYDEQTQAFIDAAQEARNKFEEAERSLKDMEESIRNLEQEISFDFGPNGEFAYLYSQCYELTTNEYVYRLCPFKLVSQKPKLGGSPTSLGTWGSWIGPDHDKFSAMKYEQGTGCWQGPNRSTTVRLLCGKETMVTSTTEPSRCEYLMELMTPAACPEPPPEAPTEDDHDEL

SEQ ID NO: 28803 - protein, 525 aa, Homo sapiens
MLLPLLLLLPMCWAVEVKRPRGVSLTNHHFYDESKPFTCLDGSATIPFDQVNDDYCDCKDGSDEPGTAACPNGSFHCTNTGYKPLYIPSNRVNDGVCDCCDGTDEYNSGVICENTCKEKGRKERESLQQMAEVTREGFRLKKILIEDWKKAREEKQKKLIELQAGKKSLEDQVEMLRTVKEEAEKPEREAKEQHQKLWEEQLAAAKAQQEQELAADAFKELDDDMDGTVSVTELQTHPELDTDGDGALSEAEAQALLSGDTQTDATSFYDRVWAAIRDKYRSEALPTDLPAPSAPDLTEPKEEQPPVPSSPTEEEEEEEEEEEEEAEEEEEEEDSEVQGEQPKPASPAEEDKMPPYDEQTQAFIDAAQEARNKFEEAERSLKDMEESIRNLEQEISFDFGPNGEFAYLYSQCYELTTNEYVYRLCPFKLVSQKPKLGGSPTSLGTWGSWIGPDHDKFSAMKYEQGTGCWQGPNRSTTVRLLCGKETMVTSTTEPSRCEYLMELMTPAACPEPPPEAPTEDDHDEL

SEQ ID NO: 28804 - protein, 328 aa, Homo sapiens
MANSASPEQNQNHCSAINNSIPLMQGNLPTLTLSGKIRVTVTFFLFLLSATFNASFLLKLQKWTQKKEKGKKLSRMKLLLKHLTLANLLETLIVMPLDGMWNITVQWYAGELLCKVLSYLKLFSMYAPAFMMVVISLDRSLAITRPLALKSNSKVGQSMVGLAWILSSVFAGPQLYIFRMIHLADSSGQTKVFSQCVTHCSFSQWWHQAFYNFFTFSCLFIIPLFIMLICNAKIIFTLTRVLHQDPHELQLNQSKNNIPRARLKTLKMTVAFATSFTVCWTPYYVLGIWYWFDPEMLNRLSDPVNHFFFLFAFLNPCFDPLIYGYFSL

SEQ ID NO: 28805 - protein, 249 aa, Homo sapiens
MANSASPEQNQNHCSAINNSIPLMQGNLPTLTLSGKIRVTVTFFLFLLSATFNASFLLKLQKWTQKKEKGKKLSRMKLLLKHLTLANLLETLIVMPLDGMWNITVQWYAGELLCKVLSYLKLFSMYAPAFMMVVISLDRSLAITRPLALKSNSKVGQSMVGLAWILSSVFAGPQLPLHHPSFHHADLQCKNHLHPDTGPSSGPPRTTTESVQEQYTKSTAEDSKNDGCICHFIYCLLDSLLCPRNLVLV

SEQ ID NO: 28806 - protein, 338 aa, Homo sapiens
MTALSSENCSFQYQLRQTNQPLDVNYLLFLIILGKILLNILTLGMRRKNTCQNFMEYFCISLAFVDLLLLVNISIILYFRDFVLLSIRFTKYHICLFTQIISFTYGFLHYPVFLTACIDYCLNFSKTTKLSFKCQKLFYFFTVILIWISVLAYVLGDPAIYQSLKAQNAYSRHCPFYVSIQSYWLSFFMVMILFVAFITCWEEVTTLVQAIRITSYMNETILYFPFSSHSSYTVRSKKIFLSKLIVCFLSTWLPFVLLQVIIVLLKVQIPAYIEMNIPWLYFVNSFLIATVYWFNCHKLNLKDIGLPLDPFVNWKCCFIPLTIPNLEQIEKPISIMIC

SEQ ID NO: 28807 - protein, 828 aa, Homo sapiens
MDESALTLGTIDVSYLPHSSEYSVGRCKHTSEEWGECGFRPTIFRSATLKWKESLMSRKRPFVGRCCYSCTPQSWDKFFNPSIPSLGLRNVIYINETHTRHRGWLARRLSYVLFIQERDVHKGMFATNVTENVLNSSRVQEAIAEVAAELNPDGSAQQQSKAVNKVKKKAKRILQEMVATVSPAMIRLTGWVLLKLFNSFFWNIQIHKGQLEMVKAATETNLPLLFLPVHRSHIDYLLLTFILFCHNIKAPYIASGNNLNIPIFSTLIHKLGGFFIRRRLDETPDGRKDVLYRALLHGHIVELLRQQQFLEIFLEGTRSRSGKTSCARAGLLSVVVDTLSTNVIPDILIIPVGISYDRIIEGHYNGEQLGKPKKNESLWSVARGVIRMLRKNYGCVRVDFAQPFSLKEYLESQSQKPVSALLSLEQALLPAILPSRPSDAADEGRDTSINESRNATDESLRRRLIANLAEHILFTASKSCAIMSTHIVACLLLYRHRQGIDLSTLVEDFFVMKEEVLARDFDLGFSGNSEDVVMHAIQLLGNCVTITHTSRNDEFFITPSTTVPSVFELNFYSNGVLHVFIMEAIIACSLYAVLNKRGLGGPTSTPPNLISQEQLVRKAASLCYLLSNEGTISLPCQTFYQVCHETVGKFIQYGILTVAEHDDQEDISPSLAEQQWDKKLPEPLSWRSDEEDEDSDFGEEQRDCYLKVSQSKEHQQFITFLQRLLGPLLEAYSSAAIFVHNFSGPVPEPEYLQKLHKYLITRTERNVAVYAESATYCLVKNAVKMFKDIGVFKETKQKRVSVLELSSTFLPQCNRQKLLEYILSFVVL

SEQ ID NO: 28808 - protein, 552 aa, Homo sapiens
MRLLPLAPGRLRRGSPRHLPSCSPALLLLVLGGCLGVFGVAAGTRRPNVVLLLTDDQDEVLGGMTPLKKTKALIGEMGMTFSSAYVPSALCCPSRASILTGKYPHNHHVVNNTLEGNCSSKSWQKIQEPNTFPAILRSMCGYQTFFAGKYLNEYGAPDAGGLEHVPLGWSYWYALEKNSKYYNYTLSINGKARKHGENYSVDYLTDVLANVSLDFLDYKSNFEPFFMMIATPAPHSPWTAAPQYQKAFQNVFAPRNKNFNIHGTNKHWLIRQAKTPMTNSSIQFLDNAFRKRWQTLLSVDDLVEKLVKRLEFTGELNNTYIFYTSDNGYHTGQFSLPIDKRQLYEFDIKVPLLVRGPGIKPNQTSKMLVANIDLGPTILDIAGYDLNKTQMDGMSLLPILRGASNLTWRSDVLVEYQGEGRNVTDPTCPSLSPGVSQCFPDCVCEDAYNNTYACVRTMSALWNLQYCEFDDQEVFVEVYNLTADPDQITNIAKTIDPELLGKMNYRLMMLQSCSGPTCRTPGVFDPGYRFDPRLMFSNRGSVRTRRFSKHLL

SEQ ID NO: 28809 - protein, 532 aa, Homo sapiens
MRLLPLAPGRLRRGSPRHLPSCSPALLLLVLGGCLGVFGVAAGTRRPNVVLLLTDDQDEVLGGMYVPSALCCPSRASILTGKYPHNHHVVNNTLEGNCSSKSWQKIQEPNTFPAILRSMCGYQTFFAGKYLNEYGAPDAGGLEHVPLGWSYWYALEKNSKYYNYTLSINGKARKHGENYSVDYLTDVLANVSLDFLDYKSNFEPFFMMIATPAPHSPWTAAPQYQKAFQNVFAPRNKNFNIHGTNKHWLIRQAKTPMTNSSIQFLDNAFRKRWQTLLSVDDLVEKLVKRLEFTGELNNTYIFYTSDNGYHTGQFSLPIDKRQLYEFDIKVPLLVRGPGIKPNQTSKMLVANIDLGPTILDIAGYDLNKTQMDGMSLLPILRGASNLTWRSDVLVEYQGEGRNVTDPTCPSLSPGVSQCFPDCVCEDAYNNTYACVRTMSALWNLQYCEFDDQEVFVEVYNLTADPDQITNIAKTIDPELLGKMNYRLMMLQSCSGPTCRTPGVFDPGYRFDPRLMFSNRGSVRTRRFSKHLL

SEQ ID NO: 28810 - protein, 245 aa, Homo sapiens
MDRRSRAQQWRRARHNYNDLCPPIGRRAATALLWLSCSIALLRALATSNARAQQRAAAQQRRSFLNAHHRSGAQVFPESPESESDHEHEEADLELSLPECLEYEEEFDYETESETESEIESETDFETEPETAPTTEPETEPEDDRGPVVPKHSTFGQSLTQRLHALKLRSPDASPSRAPPSTQEPQSPREGEELKPEDKDPRDPEESKEPKEEKQRRRCKPKKPTRRDASPESPSKKGPIPIRRH

SEQ ID NO: 28811 - protein, 434 aa, Homo sapiens
MEGAELAGKILSTWLTLVLGFILLPSVFGVSLGISEIYMKILVKTLEWATIRIEKGTPKESILKNSASVGIIQRDESPMEKGLSGLRGRDFELSDVFYFSKKGLEAIVEDEVTQRFSSEELVSWNLLTRTNVNFQYISLRLTMVWVLGVIVRYCVLLPLRVTLAFIGISLLVIGTTLVGQLPDSSLKNWLSELVHLTCCRICVRALSGTIHYHNKQYRPQKGGICVANHTSPIDVLILTTDGCYAMVGQVHGGLMGIIQRAMVKACPHVWFERSEMKDRHLVTKRLKEHIADKKKLPILIFPEGTCINNTSVMMFKKGSFEIGGTIHPVAIKYNPQFGDAFWNSSKYNMVSYLLRMMTSWAIVCDVWYMPPMTREEGEDAVQFANRVKSAIAIQGGLTELPWDGGLKRAKVKDIFKEEQQKNYSKMIVGNGSLS

SEQ ID NO: 28812 - protein, 2367 aa, Homo sapiens
MGTRGAVMPPPMWGLLGCCFVCAWALGGPRPIRSLPPLSSQVKPGSVPMQVPLEGAEAALAYLYSGDAQQLSQVNCSERYEARGAGAMPGLPPSLQGAAGTLAQAANFLNMLLQANDIRESSVEEDVEWYQALVRSVAEGDPRVYRALLTFNPPPGASHLQLALQATRTGEETILQDLSGNWVQEENPPGDLDTPALKKRVLTNDLGSLGSPKWPQADGYVGDTQQVRLSPPFLECQEGRLRPGWLITLSATFYGLKPDLSPEVRGQVQMDVDLQSVDINQCASGPGWYSNTHLCDLNSTQCVPLESQGFVLGRYLCRCRPGFYGASPSGGLEESDFQTTGQFGFPEGRSGRLLQCLPCPEGCTSCMDATPCLVEEAAVLRAAVLACQACCMLAIFLSMLVSYRCRRNKRIWASGVVLLETVLFGFLLLYFPVFILYFKPSVFRCIALRWVRLLGFAIVYGTIILKLYRVLQLFLSRTAQRSALLSSGRLLRRLGLLLLPVLGFLAVWTVGALERGIQHAPLVIRGHTPSGRHFYLCHHDRWDYIMVVAELLLLCWGSFLCYATRAVLSAFHEPRYMGIALHNELLLSAAFHTARFVLVPSLHPDWTLLLFFFHTHSTVTTTLALIFIPKFWKLGAPPREEMVDEVCEDELDLQHSGSYLGSSIASAWSEHSLDPGDIRDELKKLYAQLEVHKTKEMAANNPHLPKKRGSSCQGLGRSFMRYLAEFPEALARQHSRDSGSPGHGSLPGSSRRRLLSSSLQEPEGTPALHKSRSTYDQRREQDPPLLDSLLRRKLAKKASRTESRESVEGPPALGFRSASAHNLTVGERLPRARPASLQKSLSVASSREKALLMASQAYLEETYRQAKEREERKKAKAAMASLVRRPSARRLERPRGAPLSAPPSPAKSSSVDSSHTSGRLHEEARRRLPHPPIRHQVSTPILALSGGLGEPRMLSPTSTLAPALLPALAPTPAPALAPVPVSPQSPNLLTYICPWENAELPAKQENVPQEGPSGPERGHHSPAPARARLWRALSVAVEKSRAGENEMDAEDAHHQREANDVDEDRPKIFPKSHSLKAPVQQGSMRSLGLAIKALTRSRSTYREKESVEESPEGQNSGTAGESMGAPSRSPRLGRPKAVSKQAALIPSDDKESLQNQQNAHTSRMLQVCQREGSREQEDRGRRMTQGLGERKAERAGKTGLAMLRQVSRDKNIKQSKETPVGWQELPKAGLQSLGSADHRVAEVCPWEVTESETRQPDSGNKAEICPWETSEGAPESRALRQDPGDSQKKRGEARGKSEPIDVVPMMRKKPERLVREQEAVCPWESADRGGLSPGSAPQDPGRIRDKSEAGDSVEARKVEKPGWEAAGPEAHTPDITKAEPCPWEASEGGEDGKPAQEAVKDLPQEKQKTRKATFWKEQKPGGDLESLCPWESTDFRGPSAVSIQAPGSSECSGSLGSGIAEVCLWEAGDAPAIQKAEICPWELDDNVMGQEMLSLGTGRESLQEKEKASRKGSFGEMGEQTVKAVQKLSQQQESVCPRESTVPGHSSPCLDNSSSKAGSQFLCNGGSRATQVCPQEDLRPEAQEATPAKTEICPWEVNERTREEWTSAQVPRGGESQKDKEKMPGKSEIEDVTAWEKPEGQIQKQEAVGPWESVDPGSFSPQPRPQDTERPQTLLQMSGSVGSKAADICPLDVEENLTAGKAEICPWEVGAGAGEERALGAEAIRKSPNDTGKVSADLGPRERAVTAPEKPQKPTPEWEVACPWGSVGPGACSQHPGTLDADGPKAGFQELDHMGCRPGEVCPWEAQEAATSEKAKICPWEVSEGTTGKGLDQKAGSESAEQREKALEKGRLTSLGEDVSKGMAKLCQQQETICIWENKDLRESPAQAPKISDLPSSMSSEVAEGHSLEATEKGDLRQDPKTGSFPEHITQEKAPAADTEEFTTEDGEKTSHELQSVCPWETTAPADSVSHLDRQRPDQPKASSQRLVSTGGRAADVCPWDVPDAGVYKSDSSAKAETCPWEVTERIPVKGVSRQDGKGDSQEEKGRAPEKSEPKGVPVQKKPEMADFRQQEAVCPWESQDGKGLSPQPAPDASDRSRGSSEAAGSVETRVAEVCLWEVVEAPSAKKAEICPWEAGGGAAEEGEQERESQGQGEMFLQKAGPGGTEEHFSKAAAKPREQEAVCPGEGTGSGGLLPQSGALDPELKVSPKEAGSMGSRMAELCQWEITDPEGNKIKGTMADICPGEETGVPSEESGLLALTATRREFFPTAPEKPLCLLVHGPLDHFFPESKIPCPKVSRPASTFTLEGVRELQGPSGLEPRTSLAPEPSLQEAESQSSSLTEDSGQVAFEAQYEEFTPPTVYPWDWE

SEQ ID NO: 28813 - protein, 350 aa, Homo sapiens
MGAGASAEEKHSRELEKKLKEDAEKDARTVKLLLLGAGESGKSTIVKQMKIIHQDGYSLEECLEFIAIIYGNTLQSILAIVRAMTTLNIQYGDSARQDDARKLMHMADTIEEGTMPKEMSDIIQRLWKDSGIQACFERASEYQLNDSAGYYLSDLERLVTPGYVPTEQDVLRSRVKTTGIIETQFSFKDLNFRMFDVGGQRSERKKWIHCFEGVTCIIFIAALSAYDMVLVEDDEVNRMHESLHLFNSICNHRYFATTSIVLFLNKKDVFFEKIKKAHLSICFPDYDGPNTYEDAGNYIKVQFLELNMRRDVKEIYSHMTCATDTQNVKFVFDAVTDIIIKENLKDCGLF

SEQ ID NO: 28814 - protein, 187 aa, Homo sapiens
MAAPGALLVMGVSGSGKSTVGALLASELGWKFYDADDYHPEENRRKMGKGIPLNDQDRIPWLCNLHDILLRDVASGQRVVLACSALKKTYRDILTQGKDGVALKCEESGKEAKQAEMQLLVVHLSGSFEVISGRLLKREGHFMPPELLQSQFETLEPPAAPENFIQISVDKNVSEIIATIMETLKMK

SEQ ID NO: 28815 - protein, 230 aa, Homo sapiens
MKKPRPAAAAPSPRPPACSRGAHPGTASELRVPALRRGGCGDRRLREEAAPEQAAAGPRRSTVGALLASELGWKFYDADDYHPEENRRKMGKGIPLNDQDRIPWLCNLHDILLRDVASGQRVVLACSALKKTYRDILTQGKDGVALKCEESGKEAKQAEMQLLVVHLSGSFEVISGRLLKREGHFMPPELLQSQFETLEPPAAPENFIQISVDKNVSEIIATIMETLKMK

SEQ ID NO: 28816 - protein, 141 aa, Homo sapiens
MGKGIPLNDQDRIPWLCNLHDILLRDVASGQRVVLACSALKKTYRDILTQGKDGVALKCEESGKEAKQAEMQLLVVHLSGSFEVISGRLLKREGHFMPPELLQSQFETLEPPAAPENFIQISVDKNVSEIIATIMETLKMK

SEQ ID NO: 28817 - protein, 396 aa, Homo sapiens
MLGFLSARQTGLEDPLRLRRAESTRRVLGLELNKDRDVERIHGGGINTLDIEPVEGRYMLSGGSDGVIVLYDLENSSRQSYYTCKAVCSIGRDHPDVHRYSVETVQWYPHDTGMFTSSSFDKTLKVWDTNTLQTADVFNFEETVYSHHMSPVSTKHCLVAVGTRGPKVQLCDLKSGSCSHILQGHRQEILAVSWSPRYDYILATASADSRVKLWDVRRASGCLITLDQHNGKKSQAVESANTAHNGKVNGLCFTSDGLHLLTVGTDNRMRLWNSSNGENTLVNYGKVCNNSKKGLKFTVSCGCSSEFVFVPYGSTIAVYTVYSGEQITMLKGHYKTVDCCVFQSNFQELYSGSRDCNILAWVPSLYEPVPDDDETTTKSQLNPAFEDAWSSSDEEG

SEQ ID NO: 28818 - protein, 205 aa, Homo sapiens
MLGFLSARQTGLEDPLRLRRAESTRRVLGLELNKDRDVERIHGGGINTLDIEPVEGRYMLSGGSDGVIVLYDLENSSRQSYYTCKAVCSIGRDHPDVHRYSVETVQWYPHDTGMFTSSSFDKTLKVWDTNTLQTADVFNFEETVYSHHMSPVSTKHCLVAVGTRGPKVQLCDLKSGSCSHILQGIFILFQTATTLSKRFNKKKRY

SEQ ID NO: 28819 - protein, 3165 aa, Homo sapiens
MTDKSIVILSLMVFHSSFINGKTCRRQLVEEWHPQPSSYVVNWTLTENICLDFYRDCWFLGVNTKIDTSGNQAVPQICPLQIQLGDILVISSEPSLQFPEINLMNVSETSFVGCVQNTTTEDQLLFGCRLKGMHTVNSKWLSVGTHYFITVMASGPSPCPLGLRLNVTVKQQFCQESLSSEFCSGHGKCLSEAWSKTYSCHCQPPFSGKYCQELDACSFKPCKNNGSCINKRENWDEQAYECVCHPPFTGKNCSEIIGQCQPHVCFHGNCSNITSNSFICECDEQFSGPFCEVSAKPCVSLLFWKRGICPNSSSAYTYECPKGSSSQNGETDVSEFSLVPCQNGTDCIKISNDVMCICSPIFTDLLCKSIQTSCESFPLRNNATCKKCEKDYPCSCISGFTEKNCEKAIDHCKLLSINCLNEEWCFNIIGRFKYVCIPGCTKNPCWFLKNVYLIHQHLCYCGVTFHGICQDKGPAQFEYVWQLGFAGSEGEKCQGVIDAYFFLAANCTEDATYVNDPEDNNSSCWFPHEGTKEICANGCSCLSEEDSQEYRYLCFLRWAGNMYLENTTDDQENECQHEAVCKDEINRPRCSCSLSYIGRLCVVNVDYCLGNHSISVHGLCLALSHNCNCSGLQRYERNICEIDTEDCKSASCKNGTTSTHLRGYFFRKCVPGFKGTQCEIDIDECASHPCKNGATCIDQPGNYFCQCVPPFKVVDGFSCLCNPGYVGIRCEQDIDDCILNACEHNSTCKDLHLSYQCVCLSDWEGNFCEQESNECKMNPCKNNSTCTDLYKSYRCECTSGWTGQNCSEEINECDSDPCMNGGLCHESTIPGQFVCLCPPLYTGQFCHQRYNLCDLLHNPCRNNSTCLALVDANQHCICREEFEGKNCEIDVKDCLFLSCQDYGDCEDMVNNFRCICRPGFSGSLCEIEINECSSEPCKNNGTCVDLTNRFFCNCEPEYHGPFCELDVNKCKISPCLDEENCVYRTDGYNCLCAPGYTGINCEINLDECLSEPCLHDGVCIDGINHYTCDCKSGFFGTHCETNANDCLSNPCLHGRCTELINEYPCSCDADGTSTQCKIKINDCTSIPCMNEGFCQKSAHGFTCICPRGYTGAYCEKSIDNCAEPELNSVICLNGGICVDGPGHTFDCRCLPGFSGQFCEININECSSSPCLHGADCEDHINGYVCKCQPGWSGHHCENELECIPNSCVHELCMENEPGSTCLCTPGFMTCSIGLLCGDEIRRITCLTPIFQRTDPISTQTYTIPPSETLVSSFPSIKATRIPAIMDTYPVDQGPKQTGIVKHDILPTTGLATLRISTPLESYLLQELIVTRELSAKHSLLSSADVSSSRFLNFGIRDPAQIVQDKTSVSHMPIRTSAATLGFFFPDRRARTPFIMSSLMSDFIFPTQSLLFENCQTVALSATPTTSVIRSIPGADIELNRQSLLSRGFLLIAASISATPVVSRGAQEDIEEYSADSLISRREHWRLLSPSMSPIFPAKVIISKQVTILNSSALHRFSTKAFNPSEYQAITEASSNQRLTNIKSQAADSLRELSQTCATCSMTEIKSSREFSDQVLHSKQSHFYETFWMNSAILASWYALMGAQTITSGHSFSSATEITPSVAFTEVPSLFPSKKSAKRTILSSSLEESITLSSNLDVNLCLDKTCLSIVPSQTISSDLMNSDLTSKMTTDELSVSENILKLLKIRQYGITMGPTEVLNQESLLDMEKSKGSHTLFKLHPSDSSLDFELNLQIYPDVTLKTYSEITHANDFKNNLPPLTGSVPDFSEVTTNVAFYTVSATPALSIQTSSSMSVIRPDWPYFTDYMTSLKKEVKTSSEWSKWELQPSVQYQEFPTASRHLPFTRSLTLSSLESILAPQRLMISDFSCVRYYGDSYLEFQNVALNPQNNISLEFQTFSSYGLLLYVKQDSNLVDGFFIQLFIENGTLKYHFYCPGEAKFKSINTTVRVDNGQKYTLLIRQELDPCNAELTILGRNTQICESINHVLGKPLPKSGSVFIGGFPDLHGKIQMPVPVKNFTGCIEVIEINNWRSFIPSKAVKNYHINNCRSQGFMLSPTASFVDASDVTQGVDTMWTSVSPSVAAPSVCQQDVCHNGGTCHAIFLSSGIVSFQCDCPLHFTGRFCEKDAGLFFPSFNGNSYLELPFLKFVLEKEHNRTVTIYLTIKTNSLNGTILYSNGNNCGKQFLHLFLVEGRPSVKYGCGNSQNILTVSANYSINTNAFTPITIRYTTPVGSPGVVCMIEMTADGKPPVQKKDTEISHASQAYFESMFLGHIPANVQIHKKAGPVYGFRGCILDLQVNNKEFFIIDEARHGKNIENCHVPWCAHHLCRNNGTCISDNENLFCECPRLYSGKLCQFASCENNPCGNGATCVPKSGTDIVCLCPYGRSGPLCTDAINITQPRFSGTDAFGYTSFLAYSRISDISFHYEFHLKFQLANNHSALQNNLIFFTGQKGHGLNGDDFLAVGLLNGSVVYSYNLGSGIASIRSEPLNLSLGVHTVHLGKFFQEGWLKVDDHKNKSIIAPGRLVGLNVFSQFYVGGYSEYTPDLLPNGADFKNGFQGCIFTLQVRTEKDGHFRGLGNPEGHPNAGRSVGQCHASPCSLMKCGNGGTCIESGTSVYCNCTTGWKGSFCTETVSTCDPEHDPPHHCSRGATCISLPHGYTCFCPLGTTGIYCEQALILIVILEKPKPAERKVKKEALSISDPSFRSNELSWMSFASFHVRKKTHIQLQFQPLAADGILFYAAQHLKAQSGDFLCISLVNSSVQLRYNLGDRTIILETLQKVTINGSTWHIIKAGRVGAEGYLDLDGINVTEKASTKMSSLDTNTDFYIGGVSSLNLVNPMAIENEPVGFQGCIRQVIINNQELQLTEFGAKGGSNVGDCDGTACGYNTCRNGGECTVNGTTFSCRCLPDWAGNTCNQSVSCLNNLCLHQSLCIPDQSFSYSCLCTLGWVGRYCENKTSFSTAKFMGNSYIKYIDPNYRMRNLQFTTISLNFSTTKTEGLIVWMGIAQNEENDFLAIGLHNQTLKIAVNLGERISVPMSYNNGTFCCNKWHHVVVIQNQTLIKAYINNSLILSEDIDPHKNFVALNYDGICYLGGFEYGRKVNIVTQEIFKTNFVGKIKDVVFFQEPKNIELIKLEGYNVYDGDEQNEVT

SEQ ID NO: 28820 - protein, 3144 aa, Homo sapiens
MTDKSIVILSLMVFHSSFINGKTCRRQLVEEWHPQPSSYVVNWTLTENICLDFYRDCWFLGVNTKIDTSGNQAVPQICPLQIQLGDILVISSEPSLQFPEINLMNVSETSFVGCVQNTTTEDQLLFGCRLKGMHTVNSKWLSVGTHYFITVMASGPSPCPLGLRLNVTVKQQFCQESLSSEFCSGHGKCLSEAWSKTYSCHCQPPFSGKYCQELDACSFKPCKNNGSCINKRENWDEQAYECVCHPPFTGKNCSEIIGQCQPHVCFHGNCSNITSNSFICECDEQFSGPFCEVSAKPCVSLLFWKRGICPNSSSAYTYECPKGSSSQNGETDVSEFSLVPCQNGTDCIKISNDVMCICSPIFTDLLCKSIQTSCESFPLRNNATCKKCEKDYPCSCISGFTEKNCEKAIDHCKLLSINCLNEEWCFNIIGRFKYVCIPGCTKNPCWFLKNVYLIHQHLCYCGVTFHGICQDKGPAQFEYVWQLGFAGSEGEKCQGVIDAYFFLAANCTEDATYVNDPEDNNSSCWFPHEGTKEICANGCSCLSEEDSQEYRYLCFLRWAGNMYLENTTDDQENECQHEAVCKDEINRPRCSCSLSYIGRLCVVNVDYCLGNHSISVHGLCLALSHNCNCSGLQRYERNICEIDTEDCKSASCKNGTTSTHLRGYFFRKCVPGFKGTQCEIDIDECASHPCKNGATCIDQPGNYFCQCVPPFKVVDGFSCLCNPGYVGIRCEQDIDDCILNACEHNSTCKDLHLSYQCVCLSDWEGNFCEQESNECKMNPCKNNSTCTDLYKSYRCECTSGWTGQNCSEEINECDSDPCMNGGLCHESTIPGQFVCLCPPLYTGQFCHQRYNLCDLLHNPCRNNSTCLALVDANQHCICREEFEGKNCEIDVKDCLFLSCQDYGDCEDMVNNFRCICRPGFSGSLCEIEINECSSEPCKNNGTCVDLTNRFFCNCEPEYHGPFCELDVNKCKISPCLDEENCVYRTDGYNCLCAPGYTGINCEINLDECLSEPCLHDGVCIDGINHYTCDCKSGFFGTHCETNANDCLSNPCLHGRCTELINEYPCSCDADGTSTQCKIKINDCTSIPCMNEGFCQKSAHGFTCICPRGYTGAYCEKSIDNCAEPELNSVICLNGGICVDGPGHTFDCRCLPGFSGQFCEININECSSSPCLHGADCEDHINGYVCKCQPGWSGHHCENELECIPNSCVHELCMENEPGSTCLCTPGFMTCSIGLLCGDEIRRITCLTPIFQRTDPISTQTYTIPPSETLVSSFPSIKATRIPAIMDTYPVDQGPKQTGIVKHDILPTTGLATLRISTPLESYLLQELIVTRELSAKHSLLSSADVSSSRFLNFGIRDPAQIVQDKTSVSHMPIRTSAATLGFFFPDRRARTPFIMSSLMSDFIFPTQSLLFENCQTVALSATPTTSVIRSIPGADIELNRQSLLSRGFLLIAASISATPVVSRGAQEDIEEYSADSLISRREHWRLLSPSMSPIFPAKVIISKQVTILNSSALHRFSTKAFNPSEYQAITEASSNQRLTNIKSQAADSLRELSQTCATCSMTEIKSSREFSDQVLHSKQSHFYETFWMNSAILASWYALMGAQTITSGHSFSSATEITPSVAFTEVPSLFPSKKSAKRTILSSSLEESITLSSNLDVNLCLDKTCLSIVPSQTISSDLMNSDLTSKMTTDELSVSENILKLLKIRQYGITMGPTEVLNQESLLDMEKSKGSHTLFKLHPSDSSLDFELNLQIYPDVTLKTYSEITHANDFKNNLPPLTGSVPDFSEVTTNVAFYTVSATPALSIQTSSSMSVIRPDWPYFTDYMTSLKKEVKTSSEWSKWELQPSVQYQEFPTASRHLPFTRSLTLSSLESILAPQRLMISDFSCVRYYGDSYLEFQNVALNPQNNISLEFQTFSSYGLLLYVKQDSNLVDGFFIQLFIENGTLKYHFYCPGEAKFKSINTTVRVDNGQKYTLLIRQELDPCNAELTILGRNTQICESINHVLGKPLPKSGSVFIGGFPDLHGKIQMPVPVKNFTGCIEVIEINNWRSFIPSKAVKNYHINNCRSQGFMLSPTASFVDASDVTQGVDTMWTSVSPSVAAPSVCQQDVCHNGGTCHAIFLSSGIVSFQCDCPLHFTGRFCEKDAGLFFPSFNGNSYLELPFLKFVLEKEHNRTVTIYLTIKTNSLNGTILYSNGNNCGKQFLHLFLVEGRPSVKYGCGNSQNILTVSANYSINTNAFTPITIRYTTPVGSPGVVCMIEMTADGKPPVQKKDTEISHASQAYFESMFLGHIPANVQIHKKAGPVYGFRGCILDLQVNNKEFFIIDEARHGKNIENCHVPWCAHHLCRNNGTCISDNENLFCECPRLYSGKLCQFASCENNPCGNGATCVPKSGTDIVCLCPYGRSGPLCTDAINITQPRFSGTDAFGYTSFLAYSRISDISFHYEFHLKFQLANNHSALQNNLIFFTGQKGHGLNGDDFLAVGLLNGSVVYSYNLGSGIASIRSEPLNLSLGVHTVHLGKFFQEGWLKVDDHKNKSIIAPGRLVGLNVFSQFYVGGYSEYTPDLLPNGADFKNGFQGCIFTLQVRTEKDGHFRGLGNPEGHPNAGRSVGQCHASPCSLMKCGNGGTCIESGTSVYCNCTTGWKGSFCTETVSTCDPEHDPPHHCSRGATCISLPHGYTCFCPLGTTGIYCEQALSISDPSFRSNELSWMSFASFHVRKKTHIQLQFQPLAADGILFYAAQHLKAQSGDFLCISLVNSSVQLRYNLGDRTIILETLQKVTINGSTWHIIKAGRVGAEGYLDLDGINVTEKASTKMSSLDTNTDFYIGGVSSLNLVNPMAIENEPVGFQGCIRQVIINNQELQLTEFGAKGGSNVGDCDGTACGYNTCRNGGECTVNGTTFSCRCLPDWAGNTCNQSVSCLNNLCLHQSLCIPDQSFSYSCLCTLGWVGRYCENKTSFSTAKFMGNSYIKYIDPNYRMRNLQFTTISLNFSTTKTEGLIVWMGIAQNEENDFLAIGLHNQTLKIAVNLGERISVPMSYNNGTFCCNKWHHVVVIQNQTLIKAYINNSLILSEDIDPHKNFVALNYDGICYLGGFEYGRKVNIVTQEIFKTNFVGKIKDVVFFQEPKNIELIKLEGYNVYDGDEQNEVT

SEQ ID NO: 28821 - protein, 594 aa, Homo sapiens
MTDKSIVILSLMVFHSSFINGKTCRRQLVEEWHPQPSSYVVNWTLTENICLDFYRDCWFLGVNTKIDTSGNQAVPQICPLQIQLGDILVISSEPSLQFPEINLMNVSETSFVGCVQNTTTEDQLLFGCRLKGMHTVNSKWLSVGTHYFITVMASGPSPCPLGLRLNVTVKQQFCQESLSSEFCSGHGKCLSEAWSKTYSCHCQPPFSGKYCQELDACSFKPCKNNGSCINKRENWDEQAYECVCHPPFTGKNCSEIIGQCQPHVCFHGNCSNITSNSFICECDEQFSGPFCEVSAKPCVSLLFWKRGICPNSSSAYTYECPKGSSSQNGETDVSEFSLVPCQNGTDCIKISNDVMCICSPIFTDLLCKSIQTSCESFPLRNNATCKKCEKDYPCSCISGFTEKNCEKAIDHCKLLSINCLNEEWCFNIIGRFKYVCIPGCTKNPCWFLKNVYLIHQHLCYCGVTFHGICQDKGPAQFEYVWQLGFAGSEGEKCQGVIDAYFFLAANCTEDATYVNDPEDNNSSCWFPHEGTKEICANGCSCLSEEDSQEYRYLCFLRWAGNMYLENTTDDQENECQHEAVCKDEINRPRYLCII

SEQ ID NO: 28822 - protein, 619 aa, Homo sapiens
MTDKSIVILSLMVFHSSFINGKTCRRQLVEEWHPQPSSYVVNWTLTENICLDFYRDCWFLGVNTKIDTSGNQAVPQICPLQIQLGDILVISSEPSLQFPEINLMNVSETSFVGCVQNTTTEDQLLFGCRLKGMHTVNSKWLSVGTHYFITVMASGPSPCPLGLRLNVTVKQQFCQESLSSEFCSGHGKCLSEAWSKTYSCHCQPPFSGKYCQELDACSFKPCKNNGSCINKRENWDEQAYECVCHPPFTGKNCSEIIGQCQPHVCFHGNCSNITSNSFICECDEQFSGPFCEVSAKPCVSLLFWKRGICPNSSSAYTYECPKGSSSQNGETDVSEFSLVPCQNGTDCIKISNDVMCICSPIFTDLLCKSIQTSCESFPLRNNATCKKCEKDYPCSCISGFTEKNCEKAIDHCKLLSINCLNEEWCFNIIGRFKYVCIPGCTKNPCWFLKNVYLIHQHLCYCGVTFHGICQDKGPAQFEYVWQLGFAGSEGEKCQGVIDAYFFLAANCTEDATYVNDPEDNNSSCWFPHEGTKEICANGCSCLSEEDSQEYRYLCFLRWAGNMYLENTTDDQENECQHEAVCKDEINRPRRILNTVIPHQIQQHIERFIQHDQVGFIVRI

SEQ ID NO: 28823 - protein, 212 aa, Homo sapiens
MNLFRFLGDLSHLLAIILLLLKIWKSRSCAGISGKSQVLFAVVFTARYLDLFTNYISLYNTCMKVVYIACSFTTVWLIYSKFKATYDGNHDTFRVEFLVVPTAILAFLVNHDFTPLEILWTFSIYLESVAILPQLFMVSKTGEAETITSHYLFALGVYRTLYLFNWIWRYHFEGFFDLIAIVAGLVQTVLYCDFFYLYITKVLKGKKLSLPA

SEQ ID NO: 28824 - protein, 150 aa, Homo sapiens
MKVVYIACSFTTVWLIYSKFKATYDGNHDTFRVEFLVVPTAILAFLVNHDFTPLEILWTFSIYLESVAILPQLFMVSKTGEAETITSHYLFALGVYRTLYLFNWIWRYHFEGFFDLIAIVAGLVQTVLYCDFFYLYITKVLKGKKLSLPA

SEQ ID NO: 28825 - protein, 1035 aa, Homo sapiens
MGDQRPQDRPSSPGMDSTPWYCDKPPSKYFAKRKHRRLRFPPVDTQNWVFVTEGMDDFRYGCQSPEDTLVCRRDEFLLPKISLRGPQADPKSRKKKLLKKAALFSKLSPAQPARKAFVEEVEAQLMTKHPLAMYPNLGEDMPPDLLLQVLKPLDPERKLEDAGSCEGQEKTTDEPTEPGKYPCGEFSPRPPETRVSCLPPEPPKTPVSSLRPEPPETGVSHLRPQPPKTQVSSLHLEPPETGVSHLRPEPPKTQVSSLHLEPPETGVSHLYLEPPGTGVSHLCPEPPKTRVSHLHREPPETGVPDLCLEPPKSRVSHLRPEPSETGVSHLHPEPPKTLVSSLHPEPPETGVSHLCPEPPETRVSPLRQLPPEAGVSHLCPEPPKTRVPPLRPETPKNGVSPLFPEPPKTRISNLRSEPPKIGVSHLCLEPPKTRGSHLRPEPPETGVSHLRPEPPKTRVSSLHLEPPETGVSHLCPEPPEKDVSHLRPEPPDTGVSHLCPEPPKTRVSHLRPEPSETGVSHLRPEPPKILVSSLHQAPPESSVSHLRPEPPETGVSHLRPEPPKTRMYSLRPEPPDTGVSHLCPEPPKTRVSSLPPEPPETGVSHLCPEPPETRVSHLRPEPPETGVSHLRPEPPKTRMYSLRPEPPNTGVSHLCPEPPKTRVSSLPPEPPETGVSHLCPEPPETRVSHLRPEPPETGVSRLHPEPPKTRVSSLHAEPPESRVSHLCPEPPETGVSHLRPEPPKPRVSSLRPEPLETRVSHLRPEPPETGVSHLHPELPKPRVSSLHLEPPKTRRVSSLRLEPPKTGRVSSLCPEPTKTGASHLKELFQEGTSSTMECVSDSLQRRHTSRKLRDFKWAGDLGVNEESISSLFDFTPECRATYQDQKNKKANECSSGLKYSMELDEMDEVKFFSQEKDLDGKIQNAPNSHSAQHVKMGYGAWYLKPKLGKKLRSDEPLIDPKLVLEKPDEPDILDGLYGPIAFKDFILSKGYEMPGIIQRLFARRGWTYDSVKTPIQRAMQVYKYKEDVTDASEED

SEQ ID NO: 28826 - protein, 158 aa, Homo sapiens
MEIDGFQQLDLEKSVPSKKTTPKRIIHFVDGDIMEEYSTEEEEEEEKEEQSTNSTLDPSKLSWGPYLRFWAGRIASTSFSTCEFLGGRFAVFFGLTQPKYQYVLNEFYRIQNKKSDNKSERRGSKAQAAEVPNEKCHLEAGVQEYGTIQQDVTEAIPQ

SEQ ID NO: 28827 - protein, 120 aa, Homo sapiens
MEIDGFQQLDLEKSVPSKKTTPKRIIHFVDGDIMEEYSTEEEEEEEKEEQSTNSTLDPSKLSWGPYLRFWAGRIASTSFSMLSLQATLLLKAEKEGLKQLLRSLSGCMEEFLMWVLVTLD

SEQ ID NO: 28828 - protein, 2224 aa, Homo sapiens
MFPGCPRLWVLVVLGTSWVGWGSQGTEAAQLRQFYVAAQGISWSYRPEPTNSSLNLSVTSFKKIVYREYEPYFKKEKPQSTISGLLGPTLYAEVGDIIKVHFKNKADKPLSIHPQGIRYSKLSEGASYLDHTFPAEKMDDAVAPGREYTYEWSISEDSGPTHDDPPCLTHIYYSHENLIEDFNSGLIGPLLICKKGTLTEGGTQKTFDKQIVLLFAVFDESKSWSQSSSLMYTVNGYVNGTMPDITVCAHDHISWHLLGMSSGPELFSIHFNGQVLEQNHHKVSAITLVSATSTTANMTVGPEGKWIISSLTPKHLQAGMQAYIDIKNCPKKTRNLKKITREQRRHMKRWEYFIAAEEVIWDYAPVIPANMDKKYRSQHLDNFSNQIGKHYKKVMYTQYEDESFTKHTVNPNMKEDGILGPIIRAQVRDTLKIVFKNMASRPYSIYPHGVTFSPYEDEVNSSFTSGRNNTMIRAVQPGETYTYKWNILEFDEPTENDAQCLTRPYYSDVDIMRDIASGLIGLLLICKSRSLDRRGIQRAADIEQQAVFAVFDENKSWYLEDNINKFCENPDEVKRDDPKFYESNIMSTINGYVPESITTLGFCFDDTVQWHFCSVGTQNEILTIHFTGHSFIYGKRHEDTLTLFPMRGESVTVTMDNVGTWMLTSMNSSPRSKKLRLKFRDVKCIPDDDEDSYEIFEPPESTVMATRKMHDRLEPEDEESDADYDYQNRLAAALGIRSFRNSSLNQEEEEFNLTALALENGTEFVSSNTDIIVGSNYSSPSNISKFTVNNLAEPQKAPSHQQATTAGSPLRHLIGKNSVLNSSTAEHSSPYSEDPIEDPLQPDVTGIRLLSLGAGEFKSQEHAKHKGPKVERDQAAKHRFSWMKLLAHKVGRHLSQDTGSPSGMRPWEDLPSQDTGSPSRMRPWKDPPSDLLLLKQSNSSKILVGRWHLASEKGSYEIIQDTDEDTAVNNWLISPQNASRAWGESTPLANKPGKQSGHPKFPRVRHKSLQVRQDGGKSRLKKSQFLIKTRKKKKEKHTHHAPLSPRTFHPLRSEAYNTFSERRLKHSLVLHKSNETSLPTDLNQTLPSMDFGWIASLPDHNQNSSNDTGQASCPPGLYQTVPPEEHYQTFPIQDPDQMHSTSDPSHRSSSPELSEMLEYDRSHKSFPTDISQMSPSSEHEVWQTVISPDLSQVTLSPELSQTNLSPDLSHTTLSPELIQRNLSPALGQMPISPDLSHTTLSPDLSHTTLSLDLSQTNLSPELSQTNLSPALGQMPLSPDLSHTTLSLDFSQTNLSPELSHMTLSPELSQTNLSPALGQMPISPDLSHTTLSLDFSQTNLSPELSQTNLSPALGQMPLSPDPSHTTLSLDLSQTNLSPELSQTNLSPDLSEMPLFADLSQIPLTPDLDQMTLSPDLGETDLSPNFGQMSLSPDLSQVTLSPDISDTTLLPDLSQISPPPDLDQIFYPSESSQSLLLQEFNESFPYPDLGQMPSPSSPTLNDTFLSKEFNPLVIVGLSKDGTDYIEIIPKEEVQSSEDDYAEIDYVPYDDPYKTDVRTNINSSRDPDNIAAWYLRSNNGNRRNYYIAAEEISWDYSEFVQRETDIEDSDDIPEDTTYKKVVFRKYLDSTFTKRDPRGEYEEHLGILGPIIRAEVDDVIQVRFKNLASRPYSLHAHGLSYEKSSEGKTYEDDSPEWFKEDNAVQPNSSYTYVWHATERSGPESPGSACRAWAYYSAVNPEKDIHSGLIGPLLICQKGILHKDSNMPMDMREFVLLFMTFDEKKSWYYEKKSRSSWRLTSSEMKKSHEFHAINGMIYSLPGLKMYEQEWVRLHLLNIGGSQDIHVVHFHGQTLLENGNKQHQLGVWPLLPGSFKTLEMKASKPGWWLLNTEVGENQRAGMQTPFLIMDRDCRMPMGLSTGIISDSQIKASEFLGYWEPRLARLNNGGSYNAWSVEKLAAEFASKPWIQVDMQKEVIITGIQTQGAKHYLKSCYTTEFYVAYSSNQINWQIFKGNSTRNVMYFNGNSDASTIKENQFDPPIVARYIRISPTRAYNRPTLRLELQGCEVNGCSTPLGMENGKIENKQITASSFKKSWWGDYWEPFRARLNAQGRVNAWQAKANNNKQWLEIDLLKIKKITAIITQGCKSLSSEMYVKSYTIHYSEQGVEWKPYRLKSSMVDKIFEGNTNTKGHVKNFFNPPIISRFIRVIPKTWNQSIALRLELFGCDIY

SEQ ID NO: 28829 - protein, 329 aa, Homo sapiens
MLPWRRNKFVLVEDEAKCKAKSLSPGLAYTSLLSSFLRSCPDLLPDWPLERLGRVFRSRRQKVELNKEDPTYTVWYLGNAVTLHAKGDGCTDDAVGKIWARCGPGGGTKMKLTLGPHGIRMQPCERSAAGGSGGRRPAHAYLLPRITYCTADGRHPRVFAWVYRHQARHKAVVLRCHAVLLARAHKARALARLLRQTALAAFSDFKRLQRQSDARHVRQQHLRAGGAAASVPRAPLRRLLNAKCAYRPPPSERSRGAPRLSSIQEEDEEEEEDDAEEQEGGVPQRERPEVLSLARELRTCSLRGAPAPPPPAQPRRWKAGPRERAGQAR

SEQ ID NO: 28830 - protein, 330 aa, Homo sapiens
MKRRQKRKHLENEESQETAEKGGGMSKSQEDALQPGSTRVAKGWSQGVGEVTSTSEYCSCVSSSRKLIHSGIQRIHRDSPQPQSPLAQVQERGETPPRSQHVSLSSYSSYKTCVSSLCVNKEERGMKIYYMQVQMNKGVAVSWETEETLESLEKQPRMEEVTLSEVVRVGTPPSDVSTRNLLSDSEPSGEEKEHEERTESDSLPGSPTVEDTPRAKTPDWLVTMENGFRCMACCRVFTTMEALQEHVQFGIREGFSCHVFHLTMAQLTGNMESESTQDEQEEENGNEKEEEEKPEAKEEEGQPTEEDLGLRRSWSQCPGCVFHSPKDRNS

SEQ ID NO: 28831 - protein, 329 aa, Homo sapiens
MKRRQKRKHLENEESQETAEKGGGMSKSQEDALQPGSTRVAKGWSQGVGEVTSTSEYCSCVSSSRKLIHSGIQRIHRDSPQPQSPLAQVQERGETPPRSQHVSLSSYSSYKTCVSSLCVNKEERGMKIYYMQVQMNKGVAVSWETEETLESLEKQPRMEEVTLSEVVRVGTPPSDVSTRNLLSDSEPSGEEKEHEERTESDSLPGSPTVEDTPRAKTPDWLVTMENGFRCMACCRVFTTMEALQEHVQFGIREGFSCHVFHLTMAQLTGNMESESTQDEQEEENGNEKEEEEKPEAKEEEGQPTEEDLGLRRSWSQCPGCVFHSPKDRN

SEQ ID NO: 28832 - protein, 282 aa, Homo sapiens
MKRRQKRKHLENEESQETAEKGGGIQRIHRDSPQPQSPLAQVQERGETPPRSQHVSLSSYSSYKTCVSSLCVNKEERGMKIYYMQVQMNKGVAVSWETEETLESLEKQPRMEEVTLSEVVRVGTPPSDVSTRNLLSDSEPSGEEKEHEERTESDSLPGSPTVEDTPRAKTPDWLVTMENGFRCMACCRVFTTMEALQEHVQFGIREGFSCHVFHLTMAQLTGNMESESTQDEQEEENGNEKEEEEKPEAKEEEGQPTEEDLGLRRSWSQCPGCVFHSPKDRN

SEQ ID NO: 28833 - protein, 244 aa, Homo sapiens
MKRRQKRKHLENEESQETAEKGGGIQRIHRDSPQPQSPLAQVQERGETPPRSQHVSLSSYSSYKTCVSSLCVNKEERGMKIYYMQVQMNKGVAVSWETEETLESLEKQPRMEEVTLSEVVRVGTPPSDVSTRNLLSDSEPSGEEKEHEERTESDSLPGSPTVEDTPRAKTPDWLVTMENGFRCMACCRVFTTMEALQEHVQFGIREGFSCPKMSRRRKMEMRRRRKRNQKQRRRRGSPQKKTLA

SEQ ID NO: 28834 - protein, 261 aa, Homo sapiens
MGCIQSITCKARIRRENIVVYDVCATIDQCPTRIEETSPIVLRYKTPYFKASARVVMPPIPRHETWVVGWIQACNQMEFFNTYSDLGMSSWELPDLREGRVKAISDSDGVSYPWYGNTTETVTLVGPTNKISRFSVSMNDNFYPSVTWAVPVSDSNVPLLTRIKRDQSFTTWLVAMNTTTKEKIILQTIKWRMRVDIEVDPLQLLGQRARLVGRTQQEQPRILSRMEPIPPNALVKPNANDAQVLMWRPKRGPPLVVIPPK

SEQ ID NO: 28835 - protein, 256 aa, Homo sapiens
MGKTKDIGDDDTVASEFWSGALSQPSSVPTRPRTPNRDSWRRAWAARGLHPRPSILQPGPARLSRARAGGTRCPQRRHGRATFCALGRGIGVRRGPGPRPARIPGLTLTWKRMSARRMQWAMQTGGRNQTFGGGVPLFWTWLTICCAVWRSLPCRLTHSCSRAFSSAPLKKTKSSMLPPKQALASAARNLCRGAGCNRQAVAGQLLPSTWSLHAHGLAKEAPILPVKKISRSCSVNNKVSKKTTKPPTLRSFLSPI

SEQ ID NO: 28836 - protein, 514 aa, Homo sapiens
MDPLHTIEKVPARRNIHDRGHQGHRMGDGTPGRPKISVQQMTRFSLIIFFLSAPFVVNASTSNVFLQWAHSYADGLQQGDPCWVCGSLPVTNTMELPWWVSPLQGKDWVFFQSFIGDLKQWTGAQMTGVTRKNISEWPINKTLNEPGHDKPFSVNETRDKVIAFAIPLLDTKVFVQTSRPQNTQYRNGFLQIWDGFIWLTATKGHLSQIAPLCWEQRNHSLDNWPNTTRVMGWIPPGQCRHTILLQQRDLFATDWSQQPGLNWYAPNGTQWLCSPNLWPWLPSGWLGCCTLGIPWAQGRWVKTMEVYPYLPHVVNQGTRAIVHRNDHLPTIFMPSVGLGTVIQHIEALANFTQRALNDSLQSISLMNAEVYYMHEDILQNRMALDILTAAEGGTCALIKTECCVYIPNNSRNISLALEDTCRQIQVISSSALSLHDWIASQFSGRPSWWQKILIVLATLWSVGIALCCGLYFCRMFSQHIPQTHSIIFQQELPLSPPSQEHYQSQRDIFHSNAP

SEQ ID NO: 28837 - protein, 661 aa, Homo sapiens
MRLKNLTFIIILIISGELYAEEKPCGFPHVENGRIAQYYYTFKSFYFPMSIDKKLSFFCLAGYTTESGRQEEQTTCTTEGWSPEPRCFKKCTKPDLSNGYISDVKLLYKIQENMRYGCASGYKTTGGKDEEVVQCLSDGWSSQPTCRKEHETCLAPELYNGNYSTTQKTFKVKDKVQYECATGYYTAGGKKTEEVECLTYGWSLTPKCTKLKCSSLRLIENGYFHPVKQTYEEGDVVQFFCHENYYLSGSDLIQCYNFGWYPESPVCEGRRNRCPPPPLPINSKIQTHSTTYRHGEIVHIECELNFEIHGSAEIRCEDGKWTEPPKCIEGQEKVACEEPPFIENGAANLHSKIYYNGDKVTYACKSGYLLHGSNEITCNRGKWTLPPECVENNENCKHPPVVMNGAVADGILASYATGSSVEYRCNEYYLLRGSKISRCEQGKWSSPPVCLEPCTVNVDYMNRNNIEMKWKYEGKVLHGDLIDFVCKQGYDLSPLTPLSELSVQCNRGEVKYPLCTRKESKGMCTSPPLIKHGVIISSTVDTYENGSSVEYRCFDHHFLEGSREAYCLDGMWTTPPLCLEPCTLSFTEMEKNNLLLKWDFDNRPHILHGEYIEFICRGDTYPAELYITGSILRMQCDRGQLKYPRCIPRQSTLSYQEPLRT

SEQ ID NO: 28838 - protein, 416 aa, Homo sapiens
MSEQSICQARASVMVYDDTSKKWVPIKPGQQGFSRINIYHNTASNTFRVVGVKLQDQQVVINYSIVKGLKYNQATPTFHQWRDARQVYGLNFASKEEATTFSNAMLFALNIMNSQEGGPSSQRQVQNGPSPDEMDIQRRQVMEQHQQQRQESLERRTSATGPILPPGHPSSAASAPVSCSGPPPPPPPPVPPPPTGATPPPPPPLPAGGAQGSSHDESSMSGLAAAIAGAKLRRVQRPEDASGGSSPSGTSKSDANRASSGGGGGGLMEEMNKLLAKRRKAASQSDKPAEKKEDESQMEDPSTSPSPGTRAASQPPNSSEAGRKPWERSNSVEKPVSSILSRTPSVAKSPEAKSPLQSQPHSRMKPAGSVNDMALDAFDLDRMKQEILEEVVRELHKVKEEIIDAIRQELSGISTT

SEQ ID NO: 28839 - protein, 418 aa, Homo sapiens
MATSEQSICQARASVMVYDDTSKKWVPIKPGQQGFSRINIYHNTASNTFRVVGVKLQDQQVVINYSIVKGLKYNQATPTFHQWRDARQVYGLNFASKEEATTFSNAMLFALNIMNSQEGGPSSQRQVQNGPSPDEMDIQRRQVMEQHQQQRQESLERRTSATGPILPPGHPSSAASAPVSCSGPPPPPPPPVPPPPTGATPPPPPPLPAGGAQGSSHDESSMSGLAAAIAGAKLRRVQRPEDASGGSSPSGTSKSDANRASSGGGGGGLMEEMNKLLAKRRKAASQSDKPAEKKEDESQMEDPSTSPSPGTRAASQPPNSSEAGRKPWERSNSVEKPVSSILSRTPSVAKSPEAKSPLQSQPHSRMKPAGSVNDMALDAFDLDRMKQEILEEVVRELHKVKEEIIDAIRQELSGISTT

SEQ ID NO: 28840 - protein, 390 aa, Homo sapiens
MFAFEEFSEQSICQARASVMVYDDTSKKWVPIKPGQQGFSRINIYHNTASNTFRVVGVKLQDQQVVINYSIVKGLKYNQATPTFHQWRDARQVYGLNFASKEEATTFSNAMLFALNIMNSQEGGPSSQRQVQNGPSPDEMDIQRRQVMEQHQQQRQESLERRTSATGPILPPGHPSSAASAPVSCSGPPPPPPPPVPPPPTGATPPPPPPLPAGGAQGSSHDESSMSGLAAAIAGAKLRRVQRPEDASGGSSPSGTSKSDANRASSGGGGGGLMEEMNKLLAKRRKAASQSDKPAEKKEDESQMEDPSTSPSPGTRAASQPPNSSEAGRKPWERSNSVEKPVSSILSRTPSVAKSPEAKSPLQSQPHSRYRTTLLLTCPPGFGAPLSPVP

SEQ ID NO: 28841 - protein, 386 aa, Homo sapiens
MSEQSICQARASVMVYDDTSKKWVPIKPGQQGFSRINIYHNTASNTFRVVGVKLQDQQVVINYSIVKGLKYNQATPTFHQWRDARQVYGLNFASKEEATTFSNAMLFALNIMNSQEGGPSSQRQVQNGPSPDEMDIQRRQVMEQHQQQRQESLERRTSATGPILPPGHPSSAASAPVSCSGPPPPPPPPVPPPPTGATPPPPPPLPAGGAQGSSHDESSMSGLAAAIAGAKLRRVQRPEDASGGSSPSGTSKSDANRASSGGGGGGLMEEMNKLLAKRRKAASQSDKPAEKKEDESQMEDPSTSPSPGTRAASQPPNSSEAGRKPWERSNSVEKPVSSILSRTPSVAKSPEAKSPLQSQPHSRMKPAVKEEIIDAIRQELSGISTT

SEQ ID NO: 28842 - protein, 397 aa, Homo sapiens
MATSEQSICQARASVMVYDDTSKKWVPIKPGQQGFSRINIYHNTASNTFRVVGVKLQDQQVVINYSIVKGLKYNQATPTFHQWRDARQVYGLNFASKEEATTFSNAMLFALNIMNSQEGGPSSQRQVQNGPSPDEMDIQRRQVMEQHQQQRQESLERRTSATGPILPPGHPSSAASAPVSCSGPPPPPPPPVPPPPTGATPPPPPPLPAGGAQGSSHDESSMSGLAAAIAGAKLRRVQRPEDASGGSSPSGTSKSDANRASSGGGGGGLMEEMNKLLAKRRKAASQSDKPAEKKEDESQMEDPSTSPSPGTRAASQPPNSSEAGRKPWERSNSVEKPVSSILSRMKPAGSVNDMALDAFDLDRMKQEILEEVVRELHKVKEEIIDAIRQELSGISTT

SEQ ID NO: 28843 - protein, 217 aa, Homo sapiens
MASQKQMEVVTKGTGFRRRPKTITYTPGTCELLRVMMKESKLTNIQQRHIMDIMKRGDALPLQCSPTSSQRVLPSKQIASPIYLPPILAARPHLRPANMCQANGAYSREQFKPQATRDLEKEKQRLQNIFATGKDMEERKRKAPPARQKAPAPELDRFEELVKEIQERKEFLADMEALGQGKQYRGIILAEISQKLREMEDIDHRRSEELRKGLATT

SEQ ID NO: 28844 - protein, 198 aa, Homo sapiens
MATAEPSGRALRLSTPGPRPSGARDRAPGAAGPPSGQIGNRALRLGERTPAAVEKRGPYMVTRAPSIQAKLQKHRDLAKAVLRRKGMLGASPNRPDSSGKRSVKFNKGYTALSQSPDENLVSLDSDSDGELGSRYSSGYSSAEQVNQDVSRQLLQDGYHLDEIPDDEDLDLIPPKPMASSTCSCCWCCLGDSSSCTLQ

SEQ ID NO: 28845 - protein, 113 aa, Homo sapiens
MATAEPSGRALRLSTPGPRPSGARDRAPGAAGPPSGQIGNRALRLGERTPAAVEKRGPYMVTRAPSIQAKLQKHRDLAKAVLRRKGMLGASPNRPDSSGKRSQQAPPPLCQQL

SEQ ID NO: 28846 - protein, 148 aa, Homo sapiens
MATAEPSGRALRLSTPGPRPSGARDRAPGAAGPPSGQIGNRALRLGERTPAAVEKRGPYMVTRAPSIQAKLQKHRDLAKAVLRRKGMLGASPNRPDSSGKRSVKFNKGYTALSQSPDENLVSLDSDRPFMYIPGPFSSEQYPFPGWLG

SEQ ID NO: 28847 - protein, 259 aa, Homo sapiens
MRDRRGPLGTCLAQVQQAGGGDSDKLSCSLKKRMPEGPWPADAPSWMNKPVVDGNSQSEALSLEMRKDPSGAGLWLHSGGPVLPYVRESVRRNPASAATPSTAVGLFPAPTECFARVSCSGVEALGRRDWLGGGPRATDGHRGQCPKGEPRVSRLPRHQKVPEMGSFQDDPPSAFPKGLGSELEPACLHSILSATLHVYPEVLLSEETKRIFLDRLKPMFSKQTIEFKKMLKSTSDGLQITLGLLALQPFELANTLCHS

SEQ ID NO: 28848 - protein, 132 aa, Homo sapiens
MCDAFVGTWKLVSSENFDDYMKEVGVGFATRKVAGMAKPNMIISVNGDVITIKSESTFKNTEISFILGQEFDEVTADDRKVKSTITLDGGVLVHVQKWDGKSTTIKRKREDDKLVVECVMKGVTSTRVYERA

SEQ ID NO: 28849 - protein, 139 aa, Homo sapiens
MCFATRRWFYLHLGCMMLINLVNADFEFQKGVLASISPGITKDIDLQCWKACSLTLIDLKELKIEHNVDAFWNFMLFLQKSQRPGHYNVFLNIAQDFWDMYVDCLLSRSHGMGRRQVMPPKYNFPQKITGGNLNVYLRE

SEQ ID NO: 28850 - protein, 192 aa, Homo sapiens
MKVQSFGERVVLFILNAIIFGRLERNLDDDDMFFLPHSVKEQAKILWRRGAAVGFYTTKMKGRLCGDGTGACYLLPVFDTVFIRRKHWHRGLGTAMLRDFCETFPEDEALGVSCSMSPAMYQAHPGNSEDVSRHARTSQNDRPRQPAPGDGSKERMCGEELEDTKDDPECGVEEEDAGLAGQPPGKLTRSSP

SEQ ID NO: 28851 - protein, 79 aa, Homo sapiens; identical to SEQ ID NO: 22902

SEQ ID NO: 28852 - protein, 184 aa, Homo sapiens
MKSVLLLTTLLVPAHLVAAWSNNYAVDCPQHCDSSECKSSPRCKRTVLDDCGCCRVCAAGRGETCYRTVSGMDGMKCGPGLRCQPSNGEDPFGEEFGICKDCPYGTFGMDCRETCNCQSGICDRGTGKCLKFPFFQYSVTKSSNRFVSLTEHDMASGDGNIVREEVVKENAAGSPVMRKWLNPR

SEQ ID NO: 28853 - protein, 134 aa, Homo sapiens
MKSVLLLTTLLVPAHLVAAWSNNYAVDCPQHCDSSECKSSPRCKRTVLDDCGCCRVCAAGRGETCYRTVSGMDGMKCGPGLRCQPSNGEDPFGEEFGICKEHDMASGDGNIVREEVVKENAAGSPVMRKWLNPR

SEQ ID NO: 28854 - protein, 290 aa, Homo sapiens
MPFDFRRFDIYRKVPKDLTQPTYTGAIISICCCLFILFLFLSELTGFITTEVVNELYVDDPDKDSGGKIDVSLNISLPNLHCELVGLDIQDEMGRHEVGHIDNSMKIPLNNGAGCRFEGQFSINKVPGNFHVSTHSATAQPQNPDMTHVIHKLSFGDTLQVQNIHGAFNALGGADRLTSNPLASHDYILKIVPTVYEDKSGKQRYSYQYTVANKEYVAYSHTGRIIPAIWFRYDLSPITVKYTERRQPLYRFITTICAIIGGTFTVAGILDSCIFTASEAWKKIQLGKMH

SEQ ID NO: 28855 - protein, 198 aa, Homo sapiens
MGRHEVGHIDNSMKIPLNNGAGCRFEGQFSINKVPGNFHVSTHSATAQPQNPDMTHVIHKLSFGDTLQVQNIHGAFNALGGADRLTSNPLASHDYILKIVPTVYEDKSGKQRYSYQYTVANKEYVAYSHTGRIIPAIWFRYDLSPITVKYTERRQPLYRFITTICAIIGGTFTVAGILDSCIFTASEAWKKIQLGKMH

SEQ ID NO: 28856 - protein, 159 aa, Homo sapiens
MERWAMRVNELYVDDPDKDSGGKIDVSLNISLPNLHCELVGLDIQDEMGRHEVGHIDNSMKIPLNNGAGCRFEGQFSINKVWKPCLSPFYLLPFPAVSPLPGNWLWRHSLDLTLTQPPASEGSCPAAWPFLLRIWMGVQAPWGFKPLMAGSGRSYSSLQ

SEQ ID NO: 28857 - protein, 477 aa, Homo sapiens
MTSKFLLVSFILAALSLSTTFSLQPDQQKVLLVSFDGFRWDYLYKVPTPHFHYIMKYGVHVKQVTNVFITKTYPNHYTLVTGLFAENHGIVANDMFDPIRNKSFSLDHMNIYDSKFWEEATPIWITNQRAGHTSGAAMWPGTDVKIHKRFPTHYMPYNESVSFEDRVAKIIEWFTSKEPINLGLLYWEDPDDMGHHLGPDSPLMGPVISDIDKKLGYLIQMLKKAKLWNTLNLIITSDHGMTQCSEERLIELDQYLDKDHYTLIDQSPVAAILPKEGKFDEVYEALTHAHPNLTVYKKEDVPERWHYKYNSRIQPIIAVADEGWHILQNKSDDFLLGNHGYDNALADMHPIFLAHGPAFRKNFSKEAMNSTDLYPLLCHLLNITAMPHNGSFWNVQDLLNSAMPRVVPYTQSTILLPGSVKPAEYDQEGSYPYFIGVSLGSIIVIVFFVIFIKHLIHSQIPALQDMHAEIAQPLLQA

SEQ ID NO: 28858 - protein, 105 aa, Homo sapiens; identical to SEQ ID NO: 1686

SEQ ID NO: 28859 - protein, 974 aa, Homo sapiens [sequence omitted]

SEQ ID NO: 28860 - protein, 473 aa, Homo sapiens
MAAEAAGGKYRSTVSKSKDPSGLLISVIRTLSTSDDVEDRENEKGRLEEAYEKCDRDLDELIVQHYTELTTAIRTYQSITERITNSRNKIKQVKENLLSCKMLLHCKRDELRKLWIEGIEHKHVLNLLDEIENIKQVPQKLEQCMASKHYLSATDMLVSAVESLEGPLLQVEGLSDLRLELHSKKMNLHLVLIDELHRHLYIKSTSRVVQRNKEKGKISSLVKDASVPLIDVTNLPTPRKFLDTSHYSTAGSSSVREINLQDIKEDLELDPEENSTLFMGILIKGLAKLKKIPETVKAIIERLEQELKQIVKRSTTQVADSGYQRGENVTVENQPRLLLELLELLFDKFNAVAAAHSVVLGYLQDTVVTPLTQQEDIKLYDMADVWVKIQDVLQMLLTEYLDMKNTRTASEPSAQLSYASTGREFAAFFAKKKPQRPKNSLFKFESSSHAISMSAYLREQRRELYSRSGELQG

SEQ ID NO: 28861 - protein, 875 aa, Homo sapiens [sequence omitted]

SEQ ID NO: 28862 - protein, 291 aa, Homo sapiens [sequence omitted]

SEQ ID NO: 28863 - protein, 278 aa, Homo sapiens
MEPQEERETQVAAWLKKIFGDHPIPQYEVNPRTTEILHHLSERNRVRDRDVYLVIEDLKQKASEYESEAKYLQDLLMESVNFSPANLSSTGSRYLNALVDSAVALETKDTSLASFIPAVNDLTSDLFRTKSKSEEIKIELEKLEKNLTATLVLEKCLQEDVKKAELHLSTERAKVDNRRQNMDFLKAKSEEFRFGIKAAEEQLSARGMDASLSHQSLVALSEKLARLKQQTIPLKKKLESYLDLMPNPSLAQVKIEEAKRELDSIEAELTRRVDMMEL

SEQ ID NO: 28864 - protein, 202 aa, Homo sapiens
MESVNFSPANLSSTGSRYLNALVDSAVALETKDTSLASFIPAVNDLTSDLFRTKSKSEEIKIELEKLEKNLTATLVLEKCLQEDVKKAELHLSTERAKVDNRRQNMDFLKAKSEEFRFGIKAAEEQLSARGMDASLSHQSLVALSEKLARLKQQTIPLKKKLESYLDLMPNPSLAQVKIEEAKRELDSIEAELTRRVDMMEL

SEQ ID NO: 28865 - protein, 428 aa, Homo sapiens
MATSWGTVFFMLVVSCVCSAVSHRNQQTWFEGIFLSSMCPINVSASTLYGIMFDAGSTGTRIHVYTFVQKMPGQLPILEGEVFDSVKPGLSAFVDQPKQGAETVQGLLEVAKDSIPRSHWKKTPVVLKATAGLRLLPEHKAKALLFEVKEIFRKSPFLVPKGSVSIMDGSDEGILAWVTVNFLTGQLHGHRQETVGTLDLGGASTQITFLPQFEKTLEQTPRGYLTSFEMFNSTYKLYTHSYLGFGLKAARLATLGALETEGTDGHTFRSACLPRWLEAEWIFGGVKYQYGGNQEGEVGFEPCYAEVLRVVRGKLHQPEEVQRGSFYAFSYYYDRAVDTDMIDYEKGGILKVEDFERKAREVCDNLENFTSGSPFLCMDLSYITALLKDGFGFADSTVLQLTKKVNNIETGWALGATFHLLQSLGISH

SEQ ID NO: 28866 - protein, 278 aa, Homo sapiens
MGARLSRRRLPADPSLALDALPPELLVQVLSHVPPRSLVTRCRPVCRAWRDIVDGPTVWLLQLARDRSAEGRALYAVAQRCLPSNEDKEEFPLCALARYCLRAPFGRNLIFNSCGEQGFRGWEVEHGGNGWAIEKNLTPVPGAPSQTCFVTSFEWCSKRQLVDLVMEGVWQELLDSAQIEICVADWWGARENCGCVYQLRVRLLDVYEKEVVKFSASPDPVLQWTERGCRQVSHVFTNFGKGIRYVSFEQYGRDVSSWVGHYGALVTHSSVRVRIRLS

SEQ ID NO: 28867 - protein, 510 aa, Homo sapiens
MATGRGRILQQHWLGLQTLRGPSRGGGAARGRARAFGCRKGPGVKLSAGSAALRCHAGGGQHWESSFSCCSGFLDGMPSEILLKIFSYLDAVSLLCTGCVSRRFYHLANDNFIWIGIYSTAFSPARSNWKFNSVEKIAMSMSFLSVQDKEAGYWKKEYITKQIASVKAALADILKPVNPYTGLPVKTKEALRIFGLGWAIILKEKGGKEYIMEHVDLSINDTSVTVIWYGKKWPCLASLSTLDLCGMTPVFTDWYKTPTKHRLRWHSLIAKYNLSHLTISTMIGCDRLIRIFCLHPGLLVGVWKKEEELAFVMANLHFHHLVERSTLGSATIPYELPPHSPFLDDSPEYGLHGYQLHVDLHSGGVFYLCGTFRNLFTKRGNIENGHVKLIVIHLKNNREHLPLIGKVGLSWKTDIFDGCIKSCSMMDVTLLDEHGKPFWCFSSPVCLRSPATPSDSSSFLGQTYNVDYVDAEGRVHVELVWIRETEEYLIVNLVLYLSIAKINHWFGTEY

SEQ ID NO: 28868 - protein, 434 aa, Homo sapiens
MPSEILLKIFSYLDAVSLLCTGCVSRRFYHLANDNFIWIGIYSTAFSPARSNWKFNSVEKIAMSMSFLSVQDKEAGYWKKEYITKQIASVKAALADILKPVNPYTGLPVKTKEALRIFGLGWAIILKEKGGKEYIMEHVDLSINDTSVTVIWYGKKWPCLASLSTLDLCGMTPVFTDWYKTPTKHRLRWHSLIAKYNLSHLTISTMIGCDRLIRIFCLHPGLLVGVWKKEEELAFVMANLHFHHLVERSTLGSATIPYELPPHSPFLDDSPEYGLHGYQLHVDLHSGGVFYLCGTFRNLFTKRGNIENGHVKLIVIHLKNNREHLPLIGKVGLSWKTDIFDGCIKSCSMMDVTLLDEHGKPFWCFSSPVCLRSPATPSDSSSFLGQTYNVDYVDAEGRVHVELVWIRETEEYLIVNLVLYLSIAKINHWFGTEY

SEQ ID NO: 28869 - protein, 806 aa, Homo sapiens
MGAPACALALCVAVAIVAGASSESLGTEQRVVGRAAEVPGPEPGQQEQLVFGSGDAVELSCPPPGGGPMGPTVWVKDGTGLVPSERVLVGPQRLQVLNASHEDSGAYSCRQRLTQRVLCHFSVRVTDAPSSGDDEDGEDEAEDTGVDTGAPYWTRPERMDKKLLAVPAANTVRFRCPAAGNPTPSISWLKNGREFRGEHRIGGIKLRHQQWSLVMESVVPSDRGNYTCVVENKFGSIRQTYTLDVLERSPHRPILQAGLPANQTAVLGSDVEFHCKVYSDAQPHIQWLKHVEVNGSKVGPDGTPYVTVLKTAGANTTDKELEVLSLHNVTFEDAGEYTCLAGNSIGFSHHSAWLVVLPAEEELVEADEAGSVYAGILSYGVGFFLFILVVAAVTLCRLRSPPKKGLGSPTVHKISRFPLKRQVSLESNASMSSNTPLVRIARLSSGEGPTLANVSELELPADPKWELSRARLTLGKPLGEGCFGQVVMAEAIGIDKDRAAKPVTVAVKMLKDDATDKDLSDLVSEMEMMKMIGKHKNIINLLGACTQGGPLYVLVEYAAKGNLREFLRARRPPGLDYSFDTCKPPEEQLTFKDLVSCAYQVARGMEYLASQKCIHRDLAARNVLVTEDNVMKIADFGLARDVHNLDYYKKTTNGRLPVKWMAPEALFDRVYTHQSDVWSFGVLLWEIFTLGGSPYPGIPVEELFKLLKEGHRMDKPANCTHDLYMIMRECWHAAPSQRPTFKQLVEDLDRVLTVTSTDEYLDLSAPFEQYSPGGQDTPSSSSSGDDSVFAHDLLPPAPPSSGGSRT

SEQ ID NO: 28870 - protein, 808 aa, Homo sapiens
MGAPACALALCVAVAIVAGASSESLGTEQRVVGRAAEVPGPEPGQQEQLVFGSGDAVELSCPPPGGGPMGPTVWVKDGTGLVPSERVLVGPQRLQVLNASHEDSGAYSCRQRLTQRVLCHFSVRVTDAPSSGDDEDGEDEAEDTGVDTGAPYWTRPERMDKKLLAVPAANTVRFRCPAAGNPTPSISWLKNGREFRGEHRIGGIKLRHQQWSLVMESVVPSDRGNYTCVVENKFGSIRQTYTLDVLERSPHRPILQAGLPANQTAVLGSDVEFHCKVYSDAQPHIQWLKHVEVNGSKVGPDGTPYVTVLKSWISESVEADVRLRLANVSERDGGEYLCRATNFIGVAEKAFWLSVHGPRAAEEELVEADEAGSVYAGILSYGVGFFLFILVVAAVTLCRLRSPPKKGLGSPTVHKISRFPLKRQVSLESNASMSSNTPLVRIARLSSGEGPTLANVSELELPADPKWELSRARLTLGKPLGEGCFGQVVMAEAIGIDKDRAAKPVTVAVKMLKDDATDKDLSDLVSEMEMMKMIGKHKNIINLLGACTQGGPLYVLVEYAAKGNLREFLRARRPPGLDYSFDTCKPPEEQLTFKDLVSCAYQVARGMEYLASQKCIHRDLAARNVLVTEDNVMKIADFGLARDVHNLDYYKKTTNGRLPVKWMAPEALFDRVYTHQSDVWSFGVLLWEIFTLGGSPYPGIPVEELFKLLKEGHRMDKPANCTHDLYMIMRECWHAAPSQRPTFKQLVEDLDRVLTVTSTDEYLDLSAPFEQYSPGGQDTPSSSSSGDDSVFAHDLLPPAPPSSGGSRT

SEQ ID NO: 28871 - protein, 694 aa, Homo sapiens
MGAPACALALCVAVAIVAGASSESLGTEQRVVGRAAEVPGPEPGQQEQLVFGSGDAVELSCPPPGGGPMGPTVWVKDGTGLVPSERVLVGPQRLQVLNASHEDSGAYSCRQRLTQRVLCHFSVRVTDAPSSGDDEDGEDEAEDTGVDTGAPYWTRPERMDKKLLAVPAANTVRFRCPAAGNPTPSISWLKNGREFRGEHRIGGIKLRHQQWSLVMESVVPSDRGNYTCVVENKFGSIRQTYTLDVLERSPHRPILQAGLPANQTAVLGSDVEFHCKVYSDAQPHIQWLKHVEVNGSKVGPDGTPYVTVLKVSLESNASMSSNTPLVRIARLSSGEGPTLANVSELELPADPKWELSRARLTLGKPLGEGCFGQVVMAEAIGIDKDRAAKPVTVAVKMLKDDATDKDLSDLVSEMEMMKMIGKHKNIINLLGACTQGGPLYVLVEYAAKGNLREFLRARRPPGLDYSFDTCKPPEEQLTFKDLVSCAYQVARGMEYLASQKCIHRDLAARNVLVTEDNVMKIADFGLARDVHNLDYYKKTTNGRLPVKWMAPEALFDRVYTHQSDVWSFGVLLWEIFTLGGSPYPGIPVEELFKLLKEGHRMDKPANCTHDLYMIMRECWHAAPSQRPTFKQLVEDLDRVLTVTSTDEYLDLSAPFEQYSPGGQDTPSSSSSGDDSVFAHDLLPPAPPSSGGSRT

SEQ ID NO: 28872 - protein, 791 aa, Homo sapiens
MGAPACALALCVAVAIVAGASSESLGTEQRVVGRAAEVPGPEPGQQEQLVFGSGDAVELSCPPPGGGPMGPTVWVKDGTGLVPSERVLVGPQRLQVLNASHEDSGAYSCRQRLTQRVLCHFSVRVTDAPSSGDDEDGEDEAEDTGVDTGAPYWTRPERMDKKLLAVPAANTVRFRCPAAGNPTPSISWLKNGREFRGEHRIGGIKLRHQQWSLVMESVVPSDRGNYTCVVENKFGSIRQTYTLDVLERSPHRPILQAGLPANQTAVLGSDVEFHCKVYSDAQPHIQWLKHVEVNGSKVGPDGTPYVTVLKTAGANTTDKELEVLSLHNVTFEDAGEYTCLAGNSIGFSHHSAWLVVLPAEEELVEADEAGSVYAGILSYGVGFFLFILVVAAVTLCRLRSPPKKGLGSPTVHKISRFPLKRQVSLESNASMSSNTPLVRIARLSSGEGPTLANVSELELPADPKWELSRARLTLGKPLGEGCFGQVVMAEAIGIDKDRAAKPVTVAVKMLKDDATDKDLSDLVSEMEMMKMIGKHKNIINLLGACTQGGPLYVLVEYAAKGNLREFLRARRPPGLDYSFDTCKPPEEQLTFKDLVSCAYQVARGMEYLASQKCIHRDLAARNVLVTEDNVMKIADFGLARDVHNLDYYKKTTNLVLWGPALGDLHAGGLPVPRHPCGGALQAAEGGPPHGQARQLHTRPVHDHAGVLACRALPEAHLQAAGGGPGPCPYRDVHRRVPGPVGAFRAVLPGWPGHPQLQLLRGRLRVCPRPAAPGPTQQWGLADVKGHWSPTM

SEQ ID NO: 28873 - protein, 532 aa, Homo sapiens
MPLFLILCLLQGSSFALPQKRPHPRWLWEGSLPSRTHLRAMGTLRPSSPLCWREESSFAAPNSLKGSRLVSGEPGGAVTIQCHYAPSSVNRHQRKYWCRLGPPRWICQTIVSTNQYTHHRYRDRVALTDFPQRGLFVVRLSQLSPDDIGCYLCGIGSENNMLFLSMNLTISAGPASTLPTATPAAGELTMRSYGTASPVANRWTPGTTQTLGQGTAWDTVASTPGTSKTTASAEGRRTPGATRPAAPGTGSWAEGSVKAPAPIPESPPSKSRSMSNTTEGVWEGTRSSVTNRARASKDRREMTTTKADRPREDIEGVRIALDAAKKVLGTIGPPALVSETLAWEILPQATPVSKQQSQGSIGETTPAAGMWTLGTPAADVWILGTPAADVWTSMEAASGEGSAAGDLDAATGDRGPQATLSQTPAVGPWGPPGKESSVKRTFPEDESSSRTLAPVSTMLALFMLMALVLLQRKLWRRRTSQEAERVTLIQMTHFLEVNPQADQLPHVERKMLQDDSLPAGASLTAPERNPGP

SEQ ID NO: 28874 - protein, 220 aa, Homo sapiens
MPLFLILCLLQGSSFALPQKRPHPRWLWEGSLPSRTHLRAMGTLRPSSPLCWREESSFAAPNSLKGSRLVSGEPGGAVTIQCHYAPSSVNRHQRKYWCRLGPPRWICQTIVSTNQYTHHRYRDRVALTDFPQRGLFVVRLSQLSPDDIGCYLCGIGSENNMLFLSMNLTISAVLFQKMKAALGPWLLSLPCWPCLCLWLWFYCKGSSGEGGPLRRQKGSP

SEQ ID NO: 28875 - protein, 534 aa, Homo sapiens
MDGEATVKPGEQVPLWTHGWPPDDPSPSFAAGSSFALPQKRPHPRWLWEGSLPSRTHLRAMGTLRPSSPLCWREESSFAAPNSLKGSRLVSGEPGGAVTIQCHYAPSSVNRHQRKYWCRLGPPRWICQTIVSTNQYTHHRYRDRVALTDFPQRGLFVVRLSQLSPDDIGCYLCGIGSENNMLFLSMNLTISAGPASTLPTATPAAGELTMRSYGTASPVANRWTPGTTQTLGQGTAWDTVASTPGTSKTTASAEGRRTPGATRPAAPGTGSWAEGSVKAPAPIPESPPSKSRSMSNTTEGVWEGTRSSVTNRARASKDRREMTTTKADRPREDIEGVRIALDAAKKVLGTIGPPALVSETLAWEILPQATPVSKQQSQGSIGETTPAAGMWTLGTPAADVWITSMEAASGEGSAAGDLDAATGDRGPQATLSQTPAVGPWGPPGKESSVKRATCPGLSTLKEIKVSAVLTQNPHSLLCVSAAQEAERVTLIQMTHFLEVNPQADQLPHVERKMLQDDSLPAGASLTAPERNPGP

SEQ ID NO: 28876 - protein, 440 aa, Homo sapiens
MPLFLILCLLQGSSFALPQKRPHPRWLWEGSLPSRTHLRAMGTLRPSSPLCWREESSFAAPNSLKGSRLVSGEPGGAVTIQCHYAPSSVNRHQRKYWCRLGPPRWICQTIVSTNQYTHHRYRDRVALTDFPQRGLFVVRLSQLSPDDIGCYLCGIGSENNMLFLSMNLTISAGPASTLPTATPAAGELTMRSYGTASPVANRWTPGTTQTLGQGTAWDTVASTPGTSKTTASAEGRRTPGATRPAAPGTGSWAEGSVKAPAPIPESPPSKSRSMSNTTEGVWEGTRSSVTNRARASKDRREMTTTKADRPREDIEGVRIALDAAKKVLGTIGPPALVSETLAWEILPQATPVSKQQSQGSIGETTPAAGMWTLGTPAADVWILGTPAADVWTSMEAASGEGSAAGDLDAATGDRGPQATLSQTPAVGPWGPPGKESSVKR

SEQ ID NO: 28877 - protein, 330 aa, Homo sapiens
MWLLVSVILISRISSVGGEATFCDFPKINHGILYDEEKYKPFSQVPTGEVFYYSCEYNFVSPSKSFWTRITCTEEGWSPTPKCLRLCFFPFVENGHSESSGQTHLEGDTVQIICNTGYRLQNNENNISCVERGWSTPPKCRSTDTSCVNPPTVQNAHILSRQMSKYPSGERVRYECRSPYEMFGDEEVMCLNGNWTEPPQCKDSTGKCGPPPPIDNGDITSFPLSVYAPASSVEYQCQNLYQLEGNKRITCRNGQWSEPPKCLHPCVISREIMENYNIALRWTAKQKLYLRTGESAEFVCKRGYRLSSRSHTLRTTCWDGKLEYPTCAKR

SEQ ID NO: 28878 - protein, 3259 aa, Homo sapiens
MLSRLSGLANVVLHELSGDDDTDQNMRAPLDPELHQESDMEFNNTTQEDVQERLAYAEQLVVELKDIIRQKDVQLQQKDEALQEERKAADNKIKKLKLHAKAKLTSLNKYIEEMKAQGGTVLPTEPQSEEQLSKHDKSSTEEEMEIEKIKHKLQEKEELISTLQAQLTQAQAEQPAQSSTEMEEFVMMKQQLQEKEEFISTLQAQLSQTQAEQAAQQVVREKDARFETQVRLHEDELLQLVTQADVETEMQQKLRVLQRKLEEHEESLVGRAQVVDLLQQELTAAEQRNQILSQQLQQMEAEHNTLRNTVETEREESKILLEKMELEVAERKLSFHNLQEEMHHLLEQFEQAGQAQAELESRYSALEQKHKAEMEEKTSHILSLQKTGQELQSACDALKDQNSKLLQDKNEQAVQSAQTIQQLEDQLQQKSKEISQFLNRLPLQQHETASQTSFPDVYNEGTQAVTEENIASLQKRVVELENEKGALLLSSIELEELKAENEKLSSQITLLEAQNRTGEADREVSEISIVDIANKRSSSAEESGQDVLENTFSQKHKELSVLLLEMKEAQEEIAFLKLQLQGKRAEEADHEVLDQKEMKQMEGEGIAPIKMKVFLEDTGQDFPLMPNEESSLPAVEKEQASTEHQSRTSEEISLNDAGVELKSTKQDGDKSLSAVPDIGQCHQDELERLKSQILELELNFHKAQEIYEKNLDEKAKEISNLNQLIEEFKKNADNNSSAFTALSEERDQLLSQVKELSMVTELRAQVKQLEMNLAEAERQRRLDYESQTAHDNLLTEQIHSLSIEAKSKDVKIEVLQNELDDVQLQFSEQSTLIRSLQSQLQNKESEVLEGAERVRHISSKVEELSQALSQKELEITKMDQLLLEKKRDVETLQQTIEEKDQQVTEISFSMTEKMVQLNEEKFSLGVEIKTLKEQLNLLSRAEEAKKEQVEEDNEVSSGLKQNYDEMSPAGQISKEELQHEFDLLKKENEQRKRKLQAALINRKELLQRVSRLEEELANLKDESKKEIPLSETERGEVEEDKENKEYSEKCVTSKCQEIEIYLKQTISEKEVELQHIRKDLEEKLAAEEQFQALVKQMNQTLQDKTNQIDLLQAEISENQAIIQKLITSNTDASDGDSVALVKETVVISPPCTGSSEHWKPELEEKILALEKEKEQLQKKLQEALTSRKAILKKAQEKERHLREELKQQKDDYNRLQEQFDEQSKENENIGDQLRQLQIQVRESIDGKLPSTDQQESCSSTPGLEEPLFKATEQHHTQPVLESNLCPDWPSHSEDASALQGGTSVAQIKAQLKEIEAEKVELELKVSSTTSELTKKSEEVFQLQEQINKQGLEIESLKTVSHEAEVHAESLQQKLESSQLQIAGLEHLRELQPKLDELQKLISKKEEDVSYLSGQLSEKEAALTKIQTEIIEQEDLIKALHTQLEMQAKEHDERIKQLQVELCEMKQKPEEIGEESRAKQQIQRKLQAALISRKEALKENKSLQEELSLARGTIERLTKSLADVESQVSAQNKEKDTVLGRLALLQEERDKLITEMDRSLLENQSLSSSCESLKLALEGLTEDKEKLVKEIESLKSSKIAESTEWQEKHKELQKEYEILLQSYENVSNEAERIQHVVEAVRQEKQELYGKLRSTEANKKETEKQLQEAEQEMEEMKEKMRKFAKSKQQKILELEEENDRLRAEVHPAGDTAKECMETLLSSNASMKEELERVKMEYETLSKKFQSLMSEKDSLSEEVQDLKHQIEGNVSKQANLEATEKHDNQTNVTEEGTQSIPGETEEQDSLSMSTRPTCSESVPSAKSANPAVSKDFSSHDEINNYLQQIDQLKERIAGLEEEKQKNKEFSQTLENEKNTLLSQISTKDGELKMLQEEVTKMNLLNQQIQEELSRVTKLKETAEEEKDDLEERLMNQLAELNGSIGNYCQDVTDAQIKNELLESEMKNLKKCVSELEEEKQQLVKEKTKVESEIRKEYLEKIQGAQKEPGNKSHAKELQELLKEKQQEVKQLQKDCIRYQEKISALERTVKALEFVQTESQKDLEITKENLAQAVEHRKKAQAELASFKVLLDDTQSEAARVLADNLKLKKELQSNKESVKSQMKQKDEDLERRLEQAEEKHLKEKKNMQEKLDALRREKVHLEETIGEIQVTLNKKDKEVQQLQENLDSTVTQLAAFTKSMSSLQDDRDRVIDEAKKWERKFSDAIQSKEEEIRLKEDNCSVLKDQLRQMSIHMEELKINISRLEHDKQIWESKAQTEVQLQQKVCDTLQGENKELLSQLEETRHLYHSSQNELAKLESELKSLKDQLTDLSNSLEKCKEQKGNLEGIIRQQEADIQNSKFSYEQLETDLQASRELTSRLHEEINMKEQKIISLLSGKEEAIQVAIAELRQQHDKEIKELENLLSQEEEENIVLEEENKKAVDKTNQLMETLKTIKKENIQQKAQLDSFVKSMSSLQNDRDRIVGDYQQLEERHLSIILEKDQLIQEAAAENNKLKEEIRGLRSHMDDLNSENAKLDAELIQYREDLNQVITIKDSQQKQLLEVQLQQNKELENKYAKLEEKLKESEEANEDLRRSFNALQEEKQDLSKEIESLKVSISQLTRQVTALQEEGTLGLYHAQLKVKEEEVHRLSALFSSSQKRIAELEEELVCVQKEAAKKVGEIEDKLKKELKHLHHDAGIMRNETETAEERVAELARDLVEMEQKLLMVTKENKGLTAQIQSFGRSMSSLQNSRDHANEELDELKRKYDASLKELAQLKEQGLLNRERDALLSETAFSMNSTEENSLSHLEKLNQQLLSKDEQLLHLSSQLEDSYNQVQSFSKAMASLQNERDHLWNELEKFRKSEEGKQRSAAQPSTSPAEVQSLKKAMSSLQNDRDRLLKELKNLQQQYLQINQEITELHPLKAQLQEYQDKTKAFQIMQEELRQENLSWQHELHQLRMEKSSWEIHERRMKEQYLMAISDKDQQLSHLQNLIRELRSSSSQTQPLKVQYQRQASPETSASPDGSQNLVYETELLRTQLNDSLKEIHQKELRIQQLNSNFSQLLEEKNTLSIQLCDTSQSLRENQQHYGDLLNHCAVLEKQVQELQAGPLNIDVAPGAPQEKNGVHRKSDPEELREPQQSFSEAQQQLCNTRQEVNELRKLLEEERDQRVAAENALSVAEEQIRRLEHSEWDSSRTPIIGSCGTQEQALLIDLTSNSCRRTRSGVGWKRVLRSLCHSRTRVPLLAAIYFLMIHVLLILCFTGHL

SEQ ID NO: 28879 - protein, 3269 aa, Homo sapiens
MLSRLSGLANVVLHELSGDDDTDQNMRAPLDPELHQESDMEFNNTTQEDVQERLAYAEQLVVELKDIIRQKDVQLQQKDEALQEERKAADNKIKKLKLHAKAKLTSLNKYIEEMKAQGGTVLPTEPQSEEQLSKHDKSSTEEEMEIEKIKHKLQEKEELISTLQAQLTQAQAEQPAQSSTEMEEFVMMKQQLQEKEEFISTLQAQLSQTQAEQAAQLSSMQQVVREKDARFETQVRLHEDELLQLVTQADVETEMQQKLRVLQRKLEEHEESLVGRAQVVDLLQQELTAAEQRNQILSQQLQQMEAEHNTLRNTVETEREESKILLEKMELEVAERKLSFHNLQEEMHHLLEQFEQAGQAQAELESRYSALEQKHKAEMEEKTSHILSLQKTGQELQSACDALKDQNSKLLQDKNEQAVQSAQTIQQLEDQLQQKSKEISQFLNRLPLQQHETASQTSFPDVYNEGTQAVTEENIASLQKRVVELENEKGALLLSSIELEELKAENEKLSSQITLLEAQNRTGEADREVSEISIVDIANKRSSSAEESGQDVLENTFSQKHKELSVLLLEMKEAQEEIAFLKLQLQGKRAEEADHEVLDQKEMKQMEGEGIAPIKMKVFLEDTGQDFPLMPNEESSLPAVEKEQASTEHQSRTSEEISLNDAGVELKSTKQDGDKSLSAVPDIGQCHQDELERLKSQILELELNFHKAQEIYEKNLDEKAKEISNLNQLIEEFKKNADNNSSAFTALSEERDQLLSQVKELSMVTELRAQVKQLEMNLAEAERQRRLDYESQTAHDNLLTEQIHSLSIEAKSKDVKIEVLQNELDDVQLQFSEQSTLIRSLQSQLQNKESEVLEGAERVRHISSKVEELSQALSQKELEITKMDQLLLEKKRDVETLQQTIEEKDQQVTEISFSMTEKMVQLNEEKFSLGVEIKTLKEQLNLLSRAEEAKKEQVEEDNEVSSGLKQNYDEMSPAGQISKEELQHEFDLLKKENEQRKRKLQAALINRKELLQRVSRLEEELANLKDESKKEIPLSETERGEVEEDKENKEYSEKCVTSKCQEIEIYLKQTISEKEVELQHIRKDLEEKLAAEEQFQALVKQMNQTLQDKTNQIDLLQAEISENQAIIQKLITSNTDASDGDSVALVKETVVISPPCTGSSEHWKPELEEKILALEKEKEQLQKKLQEALTSRKAILKKAQEKERHLREELKQQKDDYNRLQEQFDEQSKENENIGDQLRQLQIQVRESIDGKLPSTDQQESCSSTPGLEEPLFKATEQHHTQPVLESNLCPDWPSHSEDASALQGGTSVAQIKAQLKEIEAEKVELELKVSSTTSELTKKSEEVFQLQEQINKQGLEIESLKTVSHEAEVHAESLQQKLESSQLQIAGLEHLRELQPKLDELQKLISKKEEDVSYLSGQLSEKEAALTKIQTEIIEQEDLIKALHTQLEMQAKEHDERIKQLQVELCEMKQKPEEIGEESRAKQQIQRKLQAALISRKEALKENKSLQEELSLARGTIERLTKSLADVESQVSAQNKEKDTVLGRLALLQEERDKLITEMDRSLLENQSLSSSCESLKLALEGLTEDKEKLVKEIESLKSSKIAESTEWQEKHKELQKEYEILLQSYENVSNEAERIQHVVEAVRQEKQELYGKLRSTEANKKETEKQLQEAEQEMEEMKEKMRKFAKSKQQKILELEEENDRLRAEVHPAGDTAKECMETLLSSNASMKEELERVKMEYETLSKKFQSLMSEKDSLSEEVQDLKHQIEGNVSKQANLEATEKHDNQTNVTEEGTQSIPGETEEQDSLSMSTRPTCSESVPSAKSANPAVSKDFSSHDEINNYLQQIDQLKERIAGLEEEKQKNKEFSQTLENEKNTLLSQISTKDGELKMLQEEVTKMNLLNQQIQEELSRVTKLKETAEEEKDDLEERLMNQLAELNGSIGNYCQDVTDAQIKNELLESEMKNLKKCVSELEEEKQQLVKEKTKVESEIRKEYLEKIQGAQKEPGNKSHAKELQELLKEKQQEVKQLQKDCIRYQEKISALERTVKALEFVQTESQKDLEITKENLAQAVEHRKKAQAELASFKVLLDDTQSEAARVLADNLKLKKELQSNKESVKSQMKQKDEDLERRLEQAEEKHLKEKKNMQEKLDALRREKVHLEETIGEIQVTLNKKDKEVQQLQENLDSTVTQLAAFTKSMSSLQDDRDRVIDEAKKWERKFSDAIQSKEEEIRLKEDNCSVLKDQLRQMSIHMEELKINISRLEHDKQIWESKAQTEVQLQQKVCDTLQGENKELLSQLEETRHLYHSSQNELAKLESELKSLKDQLTDLSNSLEKCKEQKGNLEGIIRQQEADIQNSKFSYEQLETDLQASRELTSRLHEEINMKEQKIISLLSGKEEAIQVAIAELRQQHDKEIKELENLLSQEEEENIVLEEENKKAVDKTNQLMETLKTIKKENIQQKAQLDSFVKSMSSLQNDRDRIVGDYQQLEERHLSIILEKDQLIQEAAAENNKLKEEIRGLRSHMDDLNSENAKLDAELIQYREDLNQVITIKDSQQKQLLEVQLQQNKELENKYAKLEEKLKESEEANEDLRRSFNALQEEKQDLSKEIESLKVSISQLTRQVTALQEEGTLGLYHAQLKVKEEEVHRLSALFSSSQKRIAELEEELVCVQKEAAKKVGEIEDKLKKELKHLHHDAGIMRNETETAEERVAELARDLVEMEQKLLMVTKENKGLTAQIQSFGRSMSSLQNSRDHANEELDELKRKYDASLKELAQLKEQGLLNRERDALLSETAFSMNSTEENSLSHLEKLNQQLLSKDEQLLHLSSQLEDSYNQVQSFSKAMASLQNERDHLWNELEKFRKSEEGKQRSAAQPSTSPAEVQSLKKAMSSLQNDRDRLLKELKNLQQQYLQINQEITELHPLKAQLQEYQDKTKAFQIMQEELRQENLSWQHELHQLRMEKSSWEIHERRMKEQYLMAISDKDQQLSHLQNLIRELRSSSSQTQPLKVQYQRQASPETSASPDGSQNLVYETELLRTQLNDSLKEIHQKELRIQQLNSNFSQLLEEKNTLSIQLCDTSQSLRENQQHYGDLLNHCAVLEKQVQELQAVSKEKGPLNIDVAPGAPQEKNGVHRKSDPEELREPQQSFSEAQQQLCNTRQEVNELRKLLEEERDQRVAAENALSVAEEQIRRLEHSEWDSSRTPIIGSCGTQEQALLIDLTSNSCRRTRSGVGWKRVLRSLCHSRTRVPLLAAIYFLMIHVLLILCFTGHL

SEQ ID NO: 28880 - protein, 3225 aa, Homo sapiens
MEFNNTTQEDVQERLAYAEQLVVELKDIIRQKDVQLQQKDEALQEERKAADNKIKKLKLHAKAKLTSLNKYIEEMKAQGGTVLPTEPQSEEQLSKHDKSSTEEEMEIEKIKHKLQEKEELISTLQAQLTQAQAEQPAQSSTEMEEFVMMKQQLQEKEEFISTLQAQLSQTQAEQAAQLSSMQQVVREKDARFETQVRLHEDELLQLVTQADVETEMQQKLRVLQRKLEEHEESLVGRAQVVDLLQQELTAAEQRNQILSQQLQQMEAEHNTLRNTVETEREESKILLEKMELEVAERKLSFHNLQEEMHHLLEQFEQAGQAQAELESRYSALEQKHKAEMEEKTSHILSLQKTGQELQSACDALKDQNSKLLQDKNEQAVQSAQTIQQLEDQLQQKSKEISQFLNRLPLQQHETASQTSFPDVYNEGTQAVTEENIASLQKRVVELENEKGALLLSSIELEELKAENEKLSSQITLLEAQNRTGEADREVSEISIVDIANKRSSSAEESGQDVLENTFSQKHKELSVLLLEMKEAQEEIAFLKLQLQGKRAEEADHEVLDQKEMKQMEGEGIAPIKMKVFLEDTGQDFPLMPNEESSLPAVEKEQASTEHQSRTSEEISLNDAGVELKSTKQDGDKSLSAVPDIGQCHQDELERLKSQILELELNFHKAQEIYEKNLDEKAKEISNLNQLIEEFKKNADNNSSAFTALSEERDQLLSQVKELSMVTELRAQVKQLEMNLAEAERQRRLDYESQTAHDNLLTEQIHSLSIEAKSKDVKIEVLQNELDDVQLQFSEQSTLIRSLQSQLQNKESEVLEGAERVRHISSKVEELSQALSQKELEITKMDQLLLEKKRDVETLQQTIEEKDQQVTEISFSMTEKMVQLNEEKFSLGVEIKTLKEQLNLLSRAEEAKKEQVEEDNEVSSGLKQNYDEMSPAGQISKEELQHEFDLLKKENEQRKRKLQAALINRKELLQRVSRLEEELANLKDESKKEIPLSETERGEVEEDKENKEYSEKCVTSKCQEIEIYLKQTISEKEVELQHIRKDLEEKLAAEEQFQALVKQMNQTLQDKTNQIDLLQAEISENQAIIQKLITSNTDASDGDSVALVKETVVISPPCTGSSEHWKPELEEKILALEKEKEQLQKKLQEALTSRKAILKKAQEKERHLREELKQQKDDYNRLQEQFDEQSKENENIGDQLRQLQIQVRESIDGKLPSTDQQESCSSTPGLEEPLFKATEQHHTQPVLESNLCPDWPSHSEDASALQGGTSVAQIKAQLKEIEAEKVELELKVSSTTSELTKKSEEVFQLQEQINKQGLEIESLKTVSHEAEVHAESLQQKLESSQLQIAGLEHLRELQPKLDELQKLISKKEEDVSYLSGQLSEKEAALTKIQTEIIEQEDLIKALHTQLEMQAKEHDERIKQLQVELCEMKQKPEEIGEESRAKQQIQRKLQAALISRKEALKENKSLQEELSLARGTIERLTKSLADVESQVSAQNKEKDTVLGRLALLQEERDKLITEMDRSLLENQSLSSSCESLKLALEGLTEDKEKLVKEIESLKSSKIAESTEWQEKHKELQKEYEILLQSYENVSNEAERIQHVVEAVRQEKQELYGKLRSTEANKKETEKQLQEAEQEMEEMKEKMRKFAKSKQQKILELEEENDRLRAEVHPAGDTAKECMETLLSSNASMKEELERVKMEYETLSKKFQSLMSEKDSLSEEVQDLKHQIEGNVSKQANLEATEKHDNQTNVTEEGTQSIPGETEEQDSLSMSTRPTCSESVPSAKSANPAVSKDFSSHDEINNYLQQIDQLKERIAGLEEEKQKNKEFSQTLENEKNTLLSQISTKDGELKMLQEEVTKMNLLNQQIQEELSRVTKLKETAEEEKDDLEERLMNQLAELNGSIGNYCQDVTDAQIKNELLESEMKNLKKCVSELEEEKQQLVKEKTKVESEIRKEYLEKIQGAQKEPGNKSHAKELQELLKEKQQEVKQLQKDCIRYQEKISALERTVKALEFVQTESQKDLEITKENLAQAVEHRKKAQAELASFKVLLDDTQSEAARVLADNLKLKKELQSNKESVKSQMKQKDEDLERRLEQAEEKHLKEKKNMQEKLDALRREKVHLEETIGEIQVTLNKKDKEVQQLQENLDSTVTQLAAFTKSMSSLQDDRDRVIDEAKKWERKFSDAIQSKEEEIRLKEDNCSVLKDQLRQMSIHMEELKINISRLEHDKQIWESKAQTEVQLQQKVCDTLQGENKELLSQLEETRHLYHSSQNELAKLESELKSLKDQLTDLSNSLEKCKEQKGNLEGIIRQQEADIQNSKFSYEQLETDLQASRELTSRLHEEINMKEQKIISLLSGKEEAIQVAIAELRQQHDKEIKELENLLSQEEEENIVLEEENKKAVDKTNQLMETLKTIKKENIQQKAQLDSFVKSMSSLQNDRDRIVGDYQQLEERHLSIILEKDQLIQEAAAENNKLKEEIRGLRSHMDDLNSENAKLDAELIQYREDLNQVITIKDSQQKQLLEVQLQQNKELENKYAKLEEKLKESEEANEDLRRSFNALQEEKQDLSKEIESLKVSISQLTRQVTALQEEGTLGLYHAQLKVKEEEVHRLSALFSSSQKRIAELEEELVCVQKEAAKKVGEIEDKLKKELKHLHHDAGIMRNETETAEERVAELARDLVEMEQKLLMVTKENKGLTAQIQSFGRSMSSLQNSRDHANEELDELKRKYDASLKELAQLKEQGLLNRERDALLSETAFSMNSTEENSLSHLEKLNQQLLSKDEQLLHLSSQLEDSYNQVQSFSKAMASLQNERDHLWNELEKFRKSEEGKQRSAAQPSTSPAEVQSLKKAMSSLQNDRDRLLKELKNLQQQYLQINQEITELHPLKAQLQEYQDKTKAFQIMQEELRQENLSWQHELHQLRMEKSSWEIHERRMKEQYLMAISDKDQQLSHLQNLIRELRSSSSQTQPLKVQYQRQASPETSASPDGSQNLVYETELLRTQLNDSLKEIHQKELRIQQLNSNFSQLLEEKNTLSIQLCDTSQSLRENQQHYGDLLNHCAVLEKQVQELQAGPLNIDVAPGAPQEKNGVHRKSDPEELREPQQSFSEAQQQLCNTRQEVNELRKLLEEERDQRVAAENALSVAEEQIRRLEHSEWDSSRTPIIGSCGTQEQALLIDLTSNSCRRTRSGVGWKRVLRSLCHSRTRVPLLAAIYFLMIHVLLILCFTGHL

SEQ ID NO: 28881 - protein, 3184 aa, Homo sapiens
MEFNNTTQEDVQERLAYAEQLVVELKDIIRQKDVQLQQKDEALQEERKAADNKIKKLKLHAKAKLTSLNKYIEEMKAQGGTVLPTEPQSEEQLSKHDKSSTEEEMEIEKIKHKLQEKEELISTLQAQLTQAQAEQPAQSSTEMEEFVMMKQQLQEKEEFISTLQAQLSQTQAEQAAQKLRVLQRKLEEHEESLVGRAQVVDLLQQELTAAEQRNQILSQQLQQMEAEHNTLRNTVETEREESKILLEKMELEVAERKLSFHNLQEEMHHLLEQFEQAGQAQAELESRYSALEQKHKAEMEEKTSHILSLQKTGQELQSACDALKDQNSKLLQDKNEQAVQSAQTIQQLEDQLQQKSKEISQFLNRLPLQQHETASQTSFPDVYNEGTQAVTEENIASLQKRVVELENEKGALLLSSIELEELKAENEKLSSQITLLEAQNRTGEADREVSEISIVDIANKRSSSAEESGQDVLENTFSQKHKELSVLLLEMKEAQEEIAFLKLQLQGKRAEEADHEVLDQKEMKQMEGEGIAPIKMKVFLEDTGQDFPLMPNEESSLPAVEKEQASTEHQSRTSEEISLNDAGVELKSTKQDGDKSLSAVPDIGQCHQDELERLKSQILELELNFHKAQEIYEKNLDEKAKEISNLNQLIEEFKKNADNNSSAFTALSEERDQLLSQVKELSMVTELRAQVKQLEMNLAEAERQRRLDYESQTAHDNLLTEQIHSLSIEAKSKDVKIEVLQNELDDVQLQFSEQSTLIRSLQSQLQNKESEVLEGAERVRHISSKVEELSQALSQKELEITKMDQLLLEKKRDVETLQQTIEEKDQQVTEISFSMTEKMVQLNEEKFSLGVEIKTLKEQLNLLSRAEEAKKEQVEEDNEVSSGLKQNYDEMSPAGQISKEELQHEFDLLKKENEQRKRKLQAALINRKELLQRVSRLEEELANLKDESKKEIPLSETERGEVEEDKENKEYSEKCVTSKCQEIEIYLKQTISEKEVELQHIRKDLEEKLAAEEQFQALVKQMNQTLQDKTNQIDLLQAEISENQAIIQKLITSNTDASDGDSVALVKETVVISPPCTGSSEHWKPELEEKILALEKEKEQLQKKLQEALTSRKAILKKAQEKERHLREELKQQKDDYNRLQEQFDEQSKENENIGDQLRQLQIQVRESIDGKLPSTDQQESCSSTPGLEEPLFKATEQHHTQPVLESNLCPDWPSHSEDASALQGGTSVAQIKAQLKEIEAEKVELELKVSSTTSELTKKSEEVFQLQEQINKQGLEIESLKTVSHEAEVHAESLQQKLESSQLQIAGLEHLRELQPKLDELQKLISKKEEDVSYLSGQLSEKEAALTKIQTEIIEQEDLIKALHTQLEMQAKEHDERIKQLQVELCEMKQKPEEIGEESRAKQQIQRKLQAALISRKEALKENKSLQEELSLARGTIERLTKSLADVESQVSAQNKEKDTVLGRLALLQEERDKLITEMDRSLLENQSLSSSCESLKLALEGLTEDKEKLVKEIESLKSSKIAESTEWQEKHKELQKEYEILLQSYENVSNEAERIQHVVEAVRQEKQELYGKLRSTEANKKETEKQLQEAEQEMEEMKEKMRKFAKSKQQKILELEEENDRLRAEVHPAGDTAKECMETLLSSNASMKEELERVKMEYETLSKKFQSLMSEKDSLSEEVQDLKHQIEGNVSKQANLEATEKHDNQTNVTEEGTQSIPGETEEQDSLSMSTRPTCSESVPSAKSANPAVSKDFSSHDEINNYLQQIDQLKERIAGLEEEKQKNKEFSQTLENEKNTLLSQISTKDGELKMLQEEVTKMNLLNQQIQEELSRVTKLKETAEEEKDDLEERLMNQLAELNGSIGNYCQDVTDAQIKNELLESEMKNLKKCVSELEEEKQQLVKEKTKVESEIRKEYLEKIQGAQKEPGNKSHAKELQELLKEKQQEVKQLQKDCIRYQEKISALERTVKALEFVQTESQKDLEITKENLAQAVEHRKKAQAELASFKVLLDDTQSEAARVLADNLKLKKELQSNKESVKSQMKQKDEDLERRLEQAEEKHLKEKKNMQEKLDALRREKVHLEETIGEIQVTLNKKDKEVQQLQENLDSTVTQLAAFTKSMSSLQDDRDRVIDEAKKWERKFSDAIQSKEEEIRLKEDNCSVLKDQLRQMSIHMEELKINISRLEHDKQIWESKAQTEVQLQQKVCDTLQGENKELLSQLEETRHLYHSSQNELAKLESELKSLKDQLTDLSNSLEKCKEQKGNLEGIIRQQEADIQNSKFSYEQLETDLQASRELTSRLHEEINMKEQKIISLLSGKEEAIQVAIAELRQQHDKEIKELENLLSQEEEENIVLEEENKKAVDKTNQLMETLKTIKKENIQQKAQLDSFVKSMSSLQNDRDRIVGDYQQLEERHLSIILEKDQLIQEAAAENNKLKEEIRGLRSHMDDLNSENAKLDAELIQYREDLNQVITIKDSQQKQLLEVQLQQNKELENKYAKLEEKLKESEEANEDLRRSFNALQEEKQDLSKEIESLKVSISQLTRQVTALQEEGTLGLYHAQLKVKEEEVHRLSALFSSSQKRIAELEEELVCVQKEAAKKVGEIEDKLKKELKHLHHDAGIMRNETETAEERVAELARDLVEMEQKLLMVTKENKGLTAQIQSFGRSMSSLQNSRDHANEELDELKRKYDASLKELAQLKEQGLLNRERDALLSETAFSMNSTEENSLSHLEKLNQQLLSKDEQLLHLSSQLEDSYNQVQSFSKAMASLQNERDHLWNELEKFRKSEEGKQRSAAQPSTSPAEVQSLKKAMSSLQNDRDRLLKELKNLQQQYLQINQEITELHPLKAQLQEYQDKTKAFQIMQEELRQENLSWQHELHQLRMEKSSWEIHERRMKEQYLMAISDKDQQLSHLQNLIRELRSSSSQTQPLKVQYQRQASPETSASPDGSQNLVYETELLRTQLNDSLKEIHQKELRIQQLNSNFSQLLEEKNTLSIQLCDTSQSLRENQQHYGDLLNHCAVLEKQVQELQAGPLNIDVAPGAPQEKNGVHRKSDPEELREPQQSFSEAQQQLCNTRQEVNELRKLLEEERDQRVAAENALSVAEEQIRRLEHSEWDSSRTPIIGSCGTQEQALLIDLTSNSCRRTRSGVGWKRVLRSLCHSRTRVPLLAAIYFLMIHVLLILCFTGHL

SEQ ID NO: 28882 - protein, 526 aa, Homo sapiens
MGSSSSRVLGQPRRALAQQEQGARARGSARRPDTGDDAASYGFCYCPGSHKRKRSSGACRYCDPDSHREEHEEEGDKQQPLLNTPARKKLRSTSKYIYQTLFLNGENSDIKICALGEEWRLHKIYLCQSGYFSSMFSGSWKESSMNIIELEIPDQNIDVDALQVAFGSLYRDDVLIKPSRVVAILAAACMLQLDGLIQQCGETMKETINVKTVCGYYTSVEIYGLDSVKKKCLEWLLNNLMTHQNVKLFKELGINVMKQLIGSSNLFVMQVEMDVYTTLKKWMFLQLVPSWNGSLKQLLTETDVWFSKQRKDFEGMAFLETEPGKPFVSVFRHLRLQYIISDLASARIIEQDGIVPSEWLSSVYKQQWFAMLRAEQDREVGPQEINKEDLEGNSMRCGRKLAKDGEYYWCWTGFNFGFDLLVIYTNGYIIFKRNTLNQPRSGSVSLRPRRSIAFRLRLASFDSSGKLVCSRTTGYQILILKKDQEQVVMNLDSRFLTFPLYICCNFLYISPEKGIENNRHPENPEN

SEQ ID NO: 28883 - protein, 623 aa, Homo sapiens
MSCRQFSSSYLSRSGGGGGGGLGSGGSIRSSYSRFSSSGGGGGGGRFSSSSGYGGGSSRVCGRGGGGSFGYSYGGGSGGGFSASSLGGGFGGGSRGFGGASGGGYSSSGGFGGGFGGGSGGGFGGGYGSGFGGFGGFGGGAGGGDGGILTANEKSTMQELNSRLASYLDKVQALEEANNDLENKIQDWYDKKGPAAIQKNYSPYYNTIDDLKDQIVDLTVGNNKTLLDIDNTRMTLDDFRIKFEMEQNLRQGVDADINGLRQVLDNLTMEKSDLEMQYETLQEELMALKKNHKEEMSQLTGQNSGDVNVEINVAPGKDLTKTLNDMRQEYEQLIAKNRKDIENQYETQITQIEHEVSSSGQEVQSSAKEVTQLRHGVQELEIELQSQLSKKAALEKSLEDTKNRYCGQLQMIQEQISNLEAQITDVRQEIECQNQEYSLLLSIKMRLEKEIETYHNLLEGGQEDFESSGAGKIGLGGRGGSGGSYGRGSRGGSGGSYGGGGSGGGYGGGSGSRGGSGGSYGGGSGSGGGSGGGYGGGSGGGHSGGSGGGHSGGSGGNYGGGSGSGGGSGGGYGGGSGSRGGSGGSHGGGSGFGGESGGSYGGGEEASGSGGGYGGGSGKSSHS

SEQ ID NO: 28884 - protein, 361 aa, Homo sapiens
MAPTEPWSPSPGSAPWDYSGLDGLEELELCPAGDLPYGYVYIPALYLAAFAVGLLGNAFVVWLLAGRRGPRRLVDTFVLHLAAADLGFVLTLPLWAAAAALGGRWPFGDGLCKLSSFALAGTRCAGALLLAGMSVDRYLAVVKLLEARPLRTPRCALASCCGVWAVALLAGLPSLVYRGLQPLPGGQDSQCGEEPSHAFQGLSLLLLLLTFVLPLVVTLFCYCRISRRLRRPPHVGRARRNSLRIIFAIESTFVGSWLPFSALRAVFHLARLGALPLPCPLLLALRWGLTIATCLAFVNSCANPLIYLLLDRSFRARALDGACGRTGRLARRISSASSLSRDDSSVFRCRAQAANTASASW

SEQ ID NO: 28885 - protein, 1161 aa, Homo sapiens
MTFGTVLLLSVLASYHGFNLDVEEPTIFQEDAGGFGQSVVQFGGSRLVVGAPLEVVAANQTGRLYDCAAATGMCQPIPLHIRPEAVNMSLGLTLAASTNGSRLLACGPTLHRVCGENSYSKGSCLLLGSRWEIIQTVPDATPECPHQEMDIVFLIDGSGSIDQNDFNQMKGFVQAVMGQFEGTDTLFALMQYSNLLKIHFTFTQFRTSPSQQSLVDPIVQLKGLTFTATGILTVVTQLFHHKNGARKSAKKILIVITDGQKYKDPLEYSDVIPQAEKAGIIRYAIGVGHAFQGPTARQELNTISSAPPQDHVFKVDNFAALGSIQKQLQEKIYAVEGTQSRASSSFQHEMSQEGFSTALTMDGLFLGAVGSFSWSGGAFLYPPNMSPTFINMSQENVDMRDSYLGYSTELALWKGVQNLVLGAPRYQHTGKAVIFTQVSRQWRKKAEVTGTQIGSYFGASLCSVDVDSDGSTDLILIGAPHYYEQTRGGQVSVCPLPRGRVQWQCDAVLRGEQGHPWGRFGAALTVLGDVNEDKLIDVAIGAPGEQENRGAVYLFHGASESGISPSHSQRIASSQLSPRLQYFGQALSGGQDLTQDGLMDLAVGARGQVLLLRSLPVLKVGVAMRFSPVEVAKAVYRCWEEKPSALEAGDATVCLTIQKSSLDQLGDIQSSVRFDLALDPGRLTSRAIFNETKNPTLTRRKTLGLGIHCETLKLLLPDCVEDVVSPIILHLNFSLVREPIPSPQNLRPVLAVGSQDLFTASLPFEKNCGQDGLCEGDLGVTLSFSGLQTLTVGSSLELNVIVTVWNAGEDSYGTVVSLYYPAGLSHRRVSGAQKQPHQSALRLACETVPTEDEGLRSSRCSVNHPIFHEGSNGTFIVTFDVSYKATLGDRMLMRASASSENNKASSSKATFQLELPVKYAVYTMISRQEESTKYFNFATSDEKKMKEAEHRYRVNNLSQRDLAISINFWVPVLLNGVAVWDVVMEAPSQSLPCVSERKPPQHSDFLTQISRSPMLDCSIADCLQFRCDVPSFSVQEELDFTLKGNLSFGWVRETLQKKVLVVSVAEITFDTSVYSQLPGQEAFMRAQMEMVLEEDEVYNAIPIIMGSSVGALLLLALITATLYKLGFFKRHYKEMLEDKPEDTATFSGDDFSCVAPNVPLS

SEQ ID NO: 28886 - protein, 319 aa, Homo sapiens
MSQQNTSGDCLFDGVNELMKTLQFAVHIPTFVLGLLLNLLAIHGFSTFLKNRWPDYAATSIYMINLAVFDLLLVLSLPFKMVLSQVQSPFPSLCTLVECLYFVSMYGSVFTICFISMDRFLAIRYPLLVSHLRSPRKIFGICCTIWVLVWTGSIPIYSFHGKVEKYMCFHNMSDDTWSAKVFFPLEVFGFLLPMGIMGFCCSRSIHILLGRRDHTQDWVQQKACIYSIAASLAVFVVSFLPVHLGFFLQFLVRNSFIVECRAKQSISFFLQLSMCFSNVNCCLDVFCYYFVIKEFRMNIRAHRPSRVQLVLQDTTISRG

SEQ ID NO: 28887 - protein, 879 aa, Homo sapiens
MDPTAGSKKEPGGGAATEEGVNRIAVPKPPSIEEFSIVKPISRGAFGKVYLGQKGGKLYAVKVVKKADMINKNMTHQVQAERDALALSKSPFIVHLYYSLQSANNVYLVMEYLIGGDVKSLLHIYGYFDEEMAVKYISEVALALDYLHRHGIIHRDLKPDNMLISNEGHIKLTDFGLSKVTLNRDINMMDILTTPSMAKPRQDYSRTPGQVLSLISSLGFNTPIAEKNQDPANILSACLSETSQLSQGLVCPMSVDQKDTTPYSSKLLKSCLETVASNPGMPVKCLTSNLLQSRKRLATSSASSQSHTFISSVESECHSSPKWEKDCQESDEALGPTMMSWNAVEKLCAKSANAIETKGFNKKDLELALSPIHNSSALPTTGRSCVNLAKKCFSGEVSWEAVELDVNNINMDTDTSQLGFHQSNQWAVDSGGISEEHLGKRSLKRNFELVDSSPCKKIIQNKKTCVEYKHNEMTNCYTNQNTGLTVEVQDLKLSVHKSQQNDCANKENIVNSFTDKQQTPEKLPIPMIAKNLMCELDEDCEKNSKRDYLSSSFLCSDDDRASKNISMNSDSSFPGISIMESPLESQPLDSDRSIKESSFEESNIEDPLIVTPDCQEKTSPKGVENPAVQESNQKMLGPPLEVLKTLASKRNAVAFRSFNSHINASNNSEPSRMNMTSLDAMDISCAYSGSYPMAITPTQKRRSCMPHQQTPNQIKSGTPYRTPKSVRRGVAPVDDGRILGTPDYLAPELLLGRAHGPAVDWWALGVCLFEFLTGIPPFNDETPQQVFQNILKRDIPWPEGEEKLSDNAQSAVEILLTIDDTKRAGMKELKRHPLFSDVDWENLQHQTMPFIPQPDDETDTSYFEARNTAQHLTVSGFSL

SEQ ID NO: 28888 - protein, 840 aa, Homo sapiens
MDPTAGSKKEPGGGAATEEGVNRIAVPKPPSIEEFSIVKPISRGAFGKVYLGQKGGKLYAVKVVKKADMINKNMTHQVQAERDALALSKSPFIVHLYYSLQSANNVYLVMEYLIGGDVKSLLHIYGYFDEEMAVKYISEVALALDYLHRHGIIHRDLKPDNMLISNEGHIKLTDFGLSKVTLNRDINMMDILTTPSMAKPRQDYSRTPGQVLSLISSLGFNTPIAEKNQDPANILSACLSETSQLSQGLVCPMSVDQKDTTPYSSKLLKSCLETVASNPGMPVKCLTSNLLQSRKRLATSSASSQSHTFISSVESECHSSPKWEKDCQESDEALGPTMMSWNAVEKLCAKSANAIETKGFNKKDLELALSPIHNSSALPTTGRSCVNLAKKCFSGEVSWEAVELDVNNINMDTDTSQLGFHQSNQWAVDSGGISEEHLGKRSLKRNFELVDSSPCKKIIQNKKTCVEYKHNEMTNCYTNQNTGLTVEVQDLKLSVHKSQQNDCANKENIVNSFTDKQQTPEKLPIPMIAKNLMCELDEDCEKNSKRDYLSSSFLCSDDDRASKNISMNSDSSFPGISIMESPLESQPLDSDRSIKESSFEESNIEDPLIVTPDCQEKTSPKGVENPAVQESNQKMLGPPLEVLKTLASKRNAVAFRSFNSHINASNNSEPSRMNMTSLDAMDISCAYSGSYPMAITPTQKRRSCMPHQTPNQIKSGTPYRTPKSVRRGVAPVDDGRILGTPDYLAPELLLGRAHDIPWPEGEEKLSDNAQSAVEILLTIDDTKRAGMKELKRHPLFSDVDWENLQHQTMPFIPQPDDETDTSYFEARNTAQHLTVSGFSL

SEQ ID NO: 28889 - protein, 878 aa, Homo sapiens
MDPTAGSKKEPGGGAATEEGVNRIAVPKPPSIEEFSIVKPISRGAFGKVYLGQKGGKLYAVKVVKKADMINKNMTHQVQAERDALALSKSPFIVHLYYSLQSANNVYLVMEYLIGGDVKSLLHIYGYFDEEMAVKYISEVALALDYLHRHGIIHRDLKPDNMLISNEGHIKLTDFGLSKVTLNRDINMMDILTTPSMAKPRQDYSRTPGQVLSLISSLGFNTPIAEKNQDPANILSACLSETSQLSQGLVCPMSVDQKDTTPYSSKLLKSCLETVASNPGMPVKCLTSNLLQSRKRLATSSASSQSHTFISSVESECHSSPKWEKDCQESDEALGPTMMSWNAVEKLCAKSANAIETKGFNKKDLELALSPIHNSSALPTTGRSCVNLAKKCFSGEVSWEAVELDVNNINMDTDTSQLGFHQSNQWAVDSGGISEEHLGKRSLKRNFELVDSSPCKKIIQNKKTCVEYKHNEMTNCYTNQNTGLTVEVQDLKLSVHKSQQNDCANKENIVNSFTDKQQTPEKLPIPMIAKNLMCELDEDCEKNSKRDYLSSSFLCSDDDRASKNISMNSDSSFPGISIMESPLESQPLDSDRSIKESSFEESNIEDPLIVTPDCQEKTSPKGVENPAVQESNQKMLGPPLEVLKTLASKRNAVAFRSFNSHINASNNSEPSRMNMTSLDAMDISCAYSGSYPMAITPTQKRRSCMPHQTPNQIKSGTPYRTPKSVRRGVAPVDDGRILGTPDYLAPELLLGRAHGPAVDWWALGVCLFEFLTGIPPFNDETPQQVFQNILKRDIPWPEGEEKLSDNAQSAVEILLTIDDTKRAGMKELKRHPLFSDVDWENLQHQTMPFIPQPDDETDTSYFEARNTAQHLTVSGFSL

SEQ ID NO: 28890 - protein, 194 aa, Homo sapiens
MTENSTSAPAAKPKRAKASKKSTDHPKYSDMIVAAIQAEKNRAGSSRQSIQKYIKSHYKVGENADSQIKLSIKRLVTTGVLKQTKGVGASGSFRLAKSDEPKKSVAFKKTKKEIKKVATPKKASKPKKAASKAPTKKPKATPVKKAKKKLAATPKKAKKPKTVKAKPVKASKPKKAKPVKPKAKSSAKRAGKKK

SEQ ID NO: 28891 - protein, 177 aa, Homo sapiens
MTKKSTDHPKYSDMIVAAIQAEKNRAGSSRQSIQKYIKSHYKVGENADSQIKLSIKRLVTTGVLKQTKGVGASGSFRLAKSDEPKKSVAFKKTKKEIKKVATPKKASKPKKAASKAPTKKPKATPVKKAKKKLAATPKKAKKPKTVKAKPVKASKPKKAKPVKPKAKSSAKRAGKKK

SEQ ID NO: 28892 - protein, 126 aa, Homo sapiens
MPEPAKSAPAPKKGSKKAVTKAQKKDGKKRKRSRKESYSVYVYKVLKQVHPDTGISSKAMGIMNSFVNDIFERIAGEASRLAHYNKRSTITSREIQTAVRLLLPGELAKHAVSEGTKAVTKYTSSK

SEQ ID NO: 28893 - protein, 362 aa, Homo sapiens
MENQVLTPHVYWAQRHRELYLRVELSDVQNPAISITENVLHFKAQGHGAKGDNVYEFHLEFLDLVKPEPVYKLTQRQVNITVQKKVSQWWERLTKQEKRPLFLAPDFDRWLDESDAEMELRAKEEERLNKLRLESEGSPETLTNLRKGYLFMYNLVQFLGFSWIFVNLTVRFCILGKESFYDTFHTVADMMYFCQMLAVVETINAAIGVTTSPVLPSLIQLLGRNFILFIIFGTMEEMQNKAVVFFVFYLWSAIEIFRYSFYMLTCIDMDWKVLTWLRYTLWIPLYPLGCLAEAVSVIQSIPIFNETGRFSFTLPYPVKIKVRFSFFLQIYLIMIFLGLYINFRHLYKQRRRRYGQKKKKIH

SEQ ID NO: 28894 - protein, 307 aa, Homo sapiens
MENQVLTPHVYWAQRHRELYLRVELSDVQNPAISITENVLHFKAQGHGAKGDNVYEFHLEFLDLVKPEEEERLNKLRLESEGSPETLTNLRKGYLFMYNLVQFLGFSWIFVNLTVRFCILGKESFYDTFHTVADMMYFCQMLAVVETINAAIGVTTSPVLPSLIQLLGRNFILFIIFGTMEEMQNKAVVFFVFYLWSAIEIFRYSFYMLTCIDMDWKVLTWLRYTLWIPLYPLGCLAEAVSVIQSIPIFNETGRFSFTLPYPVKIKVRFSFFLQIYLIMIFLGLYINFRHLYKQRRRRYGQKKKKIH

SEQ ID NO: 28895 - protein, 126 aa, Homo sapiens
MPEPSKSAPAPKKGSKKAVTKAQKKDGKKRKRSRKESYSVYVYKVLKQVHPDTGISSKAMGIMNSFVNDIFERIAGEASRLAHYNKRSTITSREIQTAVRLLLPGELAKHAVSEGTKAVTKYTSSK

SEQ ID NO: 28896 - protein, 193 aa, Homo sapiens
MPEPAKFAPAPKKGSKKAVTKAQKKDGKKRKRSRKESYSIYVYKVLKRVHPDTGIWCKAMGIMNSFLNDIFERIAGEASRLAHYNKRSTITSRRSRRPCACCCPASWPSTPCPRAPRRSPSTPAPSESLPGPGARSLPPSLPPRVAGCFVSKGSFQGHLTTSVKESFLCCQSQLMFLASRLVNFRRAHNTKHR

SEQ ID NO: 28897 - protein, 1204 aa, Homo sapiens
MKDQQTVIMTECTSLQFVSPFAFEAMQKVDVVCLASLSDPELRLLLPCLVRMALCAPADQSQSWAQDKKLILRLLSGVEAVNSIVALLSVDFHALEQDASKEQQLRHKLGGGSGESILVSQLQHGLTLEFEHSDSPRRLRLVLSELLAIMNKVSESNGEFFFKSSELFESPVYLEEAADVLCILQAELPSLLPIVDVAEALLHVRNGAWFLCLLVANVPDSFNEVCRGLIKNGERQDEESLGGRRRTDALRFLCKMNPSQALKVRGMVVEECHLPGLGVALTLDHTKNEACEDGVSDLVCFVSGLLLGTNAKVRTWFGTFIRNGQQRKRETSSSVLWQMRRQLLLELMGILPTVRSTRIVEEADVDMEPNVSVYSGLKEEHVVKASALLRLYCALMGIAGLKPTEEEAEQLLQLMTSRPPATPAGVRFVSLSFCMLLAFSTLVSTPEQEQLMVVWLSWMIKEEAYFESTSGVSASFGEMLLLVAMYFHSNQLSAIIDLVCSTLGMKIVIKPSSLSRMKTIFTQEIFTEQVVTAHAVRVPVTSNLSANITGFLPIHCIYQLLRSRSFTKHKVSIKDWIYRQLCETSTPLHPQLLPLIDVYINSILTPASKSNPEATNQPVTEQEILNIFQGVIGGDNIRLNQRFSITAQLLVLYYILSYEEALLANTKTLAAMQRKPKSYSSSLMDQIPIKFLIRQAQGLQQELGGLHSALLRLLATNYPHLCIVDDWICEEEITGTDALLRRMLLTNNAKNHSPKQLQEAFSAVPVNNTQVMQIIEHLTLLSASELIPYAEVLTSNMSQLLNSGVPRRILQTVNKLWMVLNTVMPRRLWVMTVNALQPSIKFVRQQKYTQNDLMIDPLIVLRCDQRVHRCPPLMDITLHMLNGYLLASKAYLSAHLKETEQDRPSQNNTIGLVGQTDAPEVTREELKNALLAAQDSAAVQILLEICLPTEEEKANGVNPDSLLRNVQSVITTSAPNKGMEEGEDNLLCNLREVQCLICCLLHQMYIADPNIAKLVHFQGYPCELLPLTVAGIPSMHICLDFIPELIAQPELEKQIFAIQLLSHLCIQYALPKSLSVARLAVNVMGTLLTVLTQAKRYAFFMPTLPSLVSFCRAFPPLYEDIMSLLIQIGQVCASDVATQTRDIDPIITRLQQIKEKPSGWSQICKDSSYKNGSRDTGSMDPDVQLCHCIERTVIEIINMSVSGI

SEQ ID NO: 28898 - protein, 175 aa, Homo sapiens
MLRTEVPRLPRSTTAIVWSCHLMATASAMAGPSSETTSEEQLITQEPKEANSTTSQKQSKQRKRGRHGPRRCHSNCRGDSFATYFRRVLKQVHQGLSLSREAVSVMDSLVHDILDRIATEAGRLARSTKRQTITAWETRMAVRLLLPGQMGKLAESEGTKAVLRTSLYAIQQQRK

SEQ ID NO: 28899 - protein, 217 aa, Homo sapiens
MSLVGGFPHHPVVHHEGYPFAAAAAAAAAAAASRCSHEENPYFHGWLIGHPEMSPPDYSMALSYSPEYASGAAGLDHSHYGGVPPGAGPPGLGGPRPVKRRGTANRKERRRTQSINSAFAELRECIPNVPADTKLSKIKTLRLATSYIAYLMDLLAKDDQNGEAEAFKAEIKKTDVKEEKRKKELNEILKSTVSSNDKKTKGRTGWPQHVWALELKQ

SEQ ID NO: 28900 - protein, 180 aa, Homo sapiens
MSLVGGFPHHPVVHHEGYPFAAAAAASRCSHEENPYFHGWLIGHPEMSPPDYSMALSYSPEYASGTANRKERRRTQSINSAFAELRECIPNVPADTKLSKIKTLRLATSYIAYLMDLLAKDDQNGEAEAFKAEIKKTDVKEEKRKKELNEILKSTVSSNDKKTKGRTGWPQHVWALELKQ

SEQ ID NO: 28901 - protein, 304 aa, Homo sapiens
MSLMVVSMACVGFFLLQGAWPHEGVHRKPSLLAHPGPLVKSEETVILQCWSDVRFEHFLLHREGKYKDTLHLIGEHHDGVSKANFSIGPMMQDLAGTYRCYGSVTHSPYQLSAPSDPLDIVITGLYEKPSLSAQPGPTVLAGESVTLSCSSRSSYDMYHLSREGEAHERRFSAGPKVNGTFQADFPLGPATHGGTYRCFGSFRDSPYEWSNSSDPLLVSVTGNPSNSWPSPTEPSSKTGNPRHLHVLIGTSVVKIPFTILLFFLLHRWCSNKKNAAVMDQEPAGNRTVNSEDSDEQDHQEVSYA

SEQ ID NO: 28902 - protein, 130 aa, Homo sapiens
MSGRGKQGGKARAKAKSRSSRAGLQFPVGRVHRLLRKGNYAERVGAGAPVYMAAVLEYLTAEILELAGNAARDNKKTRIIPRHLQLAIRNDEELNKLLGKVTIAQGGVLPNIQAVLLPKKTESHHKAKGK

SEQ ID NO: 28903 - protein, 126 aa, Homo sapiens
MPEPAKSAPAPKKGSKKAVTKAQKKDGRKRKRSRKESYSVYVYKVLKQVHPDTGISSKAMGIMNSFVNDIFERIAGEASRLPHYNKRSTITSREIQTAVRLLLPGELAKHAVSEGTKAVTKYTSAK

SEQ ID NO: 28904 - protein, 148 aa, Homo sapiens
MEPEAFEICPYDPHHRIPLSRFQYHLASCRRKNPKKAKKMATCKYNACHVVPIKNLEEHEAVCVNRSAVEEEDTENPLKVSPPSSEQNDDTQQVSPCLPSPDIWNVDGANCQHVFVLKTFFPQKVVCENDTKESARETSPQKILRPGQ

SEQ ID NO: 28905 - protein, 123 aa, Homo sapiens
MEPEAFEICPYDPHHRIPLSRFQYHLASCRRKNPKKAKKMATCKYNACHVVPIKNLEEHEAVCVNRSAVEEEDTENPLKVSPPSSEQNDDTQQTFFPQKVVCENDTKESARETSPQKILRPGQ

SEQ ID NO: 28906 - protein, 492 aa, Homo sapiens
MEPSSKKLTGRLMLAVGGAVLGSLQFGYNTGVINAPQKVIEEFYNQTWVHRYGESILPTTLTTLWSLSVAIFSVGGMIGSFSVGLFVNRFGRRNSMLMMNLLAFVSAVLMGFSKLGKSFEMLILGRFIIGVYCGLTTGFVPMYVGEVSPTALRGALGTLHQLGIVVGILIAQVFGLDSIMGNKDLWPLLLSIIFIPALLQCIVLPFCPESPRFLLINRNEENRAKSVLKKLRGTADVTHDLQEMKEESRQMMREKKVTILELFRSPAYRQPILIAVVLQLSQQLSGINAVFYYSTSIFEKAGVQQPVYATIGSGIVNTAFTVVSLFVVERAGRRTLHLIGLAGMAGCAILMTIALALLEQLPWMSYLSIVAIFGFVAFFEVGPGPIPWFIVAELFSQGPRPAAIAVAGFSNWTSNFIVGMCFQYVEQLCGPYVFIIFTVLLVLFFIFTYFKVPETKGRTFDEIASGFRQGGASQSDKTPEELFHPLGADSQV

SEQ ID NO: 28907 - protein, 368 aa, Homo sapiens
MGGARLGARNMAGQDAGCGRGGDDYSEDEGDSSVSRAAVEVFGKLKDLNCPFLEGLYITEPKTIQELLCSPSEYRLEILEWMCTRVWPSLQDRFSSLKGVPTEVKIQEMTKLGHELMLCAPDDQELLKGCACAQKQLHFMDQLLDTIRSLTIGCSSCSSLMEHFEDTREKNEALLGELFSSPHLQMLLNPECDPWPLDMQPLLNKQSDDWQWASASAKSEEEEKLAELARQLQESAAKLHALRTEYFAQHEQGAAAGAADISTLDQKLRLVTSDFHQLILAFLQVYDDELGECCQRPGPDLHPCGPIIQATHQNLTSYSQLLQVVMAVADTSAKAVETVKKQQGEQICWGGSSSVMSLATKMNELMEK

SEQ ID NO: 28908 - protein, 427 aa, Homo sapiens
MGGARLGARNMAGQDAGCGRGGDDYSEDEGDSSVSRAAVEVFGKLKDLNCPFLEGLYITEPKTIQELLCSPSEYRLEILEWMCTRVWPSLQDRFSSLKGVPTEVKIQEMTKLGHELMLCAPDDQELLKGCACAQKQLHFMDQLLDTIRSLTIGCSSCSSLMEHFEDTREKNEALLGELFSSPHLQMLLNPECDPWPLDMQPLLNKQSDDWQWASASAKSEEEEKLAELARQLQESAAKLHALRTEYFAQHEQGAAAGAADISTLDQKLRLVTSDFHQLILAFLQVYDDELGECCQRPGPDLHPCGPIIQATHQNLTSYSQIPRGQPKKPALVTMTTVPTCATLPLAQGFRDVHFGFLSERLRAFQPLTGWSCETPRSGMLLQVVMAVADTSAKAVETVKKQQGEQICWGGSSSVMSLATKMNELMEK

SEQ ID NO: 28909 - protein, 338 aa, Homo sapiens
MGGARLGARNMAGQDAGCGRGGDDYSEDEGDSSVSRAAVEVFGKLKDLNCPFLEGLYITEPKTIQELLCSPSEYRLEILEWMCTRVWPSLQDRFSSLKGVPTEVKIQEMTKLGHELMLCAPDDQELLKGCACAQKQLHFMDQLLDTIRSLTIGCSSCSSLMEHFEDTREKNEALLGELFSSPHLQMLLNPECDPWPLDMQPLLNKQSDDWQWASASAKSEEEEKLAELARQLQESAAKLHALRTEYFAQHEQGAAAGAADISTLDQKLRLVTSDFHQLILAFLQVYDDELGECCQRPGPDLHPCGPIIQATHQNLTSYSQVRVPFPSPLTAPSPVHSD

SEQ ID NO: 28910 - protein, 918 aa, Homo sapiens
MEHGTLLAQPGLWTRDTSWALLYFLCYILPQTAPQVLRIGGIFETVENEPVNVEELAFKFAVTSINRNRTLMPNTTLTYDIQRINLFDSFEASRRACDQLALGVAALFGPSHSSSVSAVQSICNALEVPHIQTRWKHPSVDNKDLFYINLYPDYAAISRAILDLVLYYNWKTVTVVYEDSTGLIRLQELIKAPSRYNIKIKIRQLPSGNKDAKPLLKEMKKGKEFYVIFDCSHETAAEILKQILFMGMMTEYYHYFFTTLDLFALDLELYRYSGVNMTGFRLLNIDNPHVSSIIEKWSMERLQAPPRPETGLLDGMMTTEAALMYDAVYMVAIASHRASQLTVSSLQCHRHKPWRLGPRFMNLIKEARWDGLTGHITFNKTNGLRKDFDLDIISLKEEGTEKAAGEVSKHLYKVWKKIGIWNSNSGLNMTDSNKDKSSNITDSLANRTLIVTTILEEPYVMYRKSDKPLYGNDRFEGYCLDLLKELSNILGFIYDVKLVPDGKYGAQNDKGEWNGMVKELIDHRADLAVAPLTITYVREKVIDFSKPFMTLGISILYRKPNGTNPGVFSFLNPLSPDIWMYVLLACLGVSCVLFVIARFTPYEWYNPHPCNPDSDVVENNFTLLNSFWFGVGALMQQGSELMPKALSTRIVGGIWWFFTLIIISSYTANLAAFLTVERMESPIDSADDLAKQTKIEYGAVRDGSTMTFFKKSKISTYEKMWAFMSSRQQTALVRNSDEGIQRVLTTDYALLMESTSIEYVTQRNCNLTQIGGLIDSKGYGVGTPIGSPYRDKITIAILQLQEEGKLHMMKEKWWRGNGCPEEDNKEASALGVENIGGIFIVLAAGLVLSVFVAIGEFIYKSRKNNDIEQAFCFFYGLQCKQTHPTNSTSGTTLSTDLECGKLIREERGIRKQSSVHTV

SEQ ID NO: 28911 - protein, 905 aa, Homo sapiens
MEHGTLLAQPGLWTRDTSWALLYFLCYILPQTAPQVLRIGGIFETVENEPVNVEELAFKFAVTSINRNRTLMPNTTLTYDIQRINLFDSFEASRRACDQLALGVAALFGPSHSSSVSAVQSICNALEVPHIQTRWKHPSVDNKDLFYINLYPDYAAISRAILDLVLYYNWKTVTVVYEDSTGLIRLQELIKAPSRYNIKIKIRQLPSGNKDAKPLLKEMKKGKEFYVIFDCSHETAAEILKQILFMGMMTEYYHYFFTTLDLFALDLELYRYSGVNMTGFRLLNIDNPHVSSIIEKWSMERLQAPPRPETGLLDGMMTTEAALMYDAVYMVAIASHRASQLTVSSLQCHRHKPWRLGPRFMNLIKEARWDGLTGHITFNKTNGLRKDFDLDIISLKEEGTEKIGIWNSNSGLNMTDSNKDKSSNITDSLANRTLIVTTILEEPYVMYRKSDKPLYGNDRFEGYCLDLLKELSNILGFIYDVKLVPDGKYGAQNDKGEWNGMVKELIDHRADLAVAPLTITYVREKVIDFSKPFMTLGISILYRKPNGTNPGVFSFLNPLSPDIWMYVLLACLGVSCVLFVIARFTPYEWYNPHPCNPDSDVVENNFTLLNSFWFGVGALMQQGSELMPKALSTRIVGGIWWFFTLIIISSYTANLAAFLTVERMESPIDSADDLAKQTKIEYGAVRDGSTMTFFKKSKISTYEKMWAFMSSRQQTALVRNSDEGIQRVLTTDYALLMESTSIEYVTQRNCNLTQIGGLIDSKGYGVGTPIGSPYRDKITIAILQLQEEGKLHMMKEKWWRGNGCPEEDNKEASALGVENIGGIFIVLAAGLVLSVFVAIGEFIYKSRKNNDIEQCLSFNAIMEELGISLKNQKKIKKKSRTKGKSSFTSILTCHQRRTQRKETVA

SEQ ID NO: 28912 - protein, 363 aa, Homo sapiens
MASGDFCSPGEGMEILQQVCSKQLPPCNLSKEDLLQNPYFSKLLLNLSQHVDESGLSLTLAKEQAQAWKEVRLHKTTWLRSEILHRVIQELLVDYYVKIQDTNVTSEDKKFHETLEQRLLVTELMRLLGPSQEREIPPLLGLEKADLLELMPLSEDFVWMRARLQQEVEEQLKKKCFTLLCYYDPNSDADSETVKAAKVWKLAEVLVGEQQQCQDAKSQQKEQMLLLEKKSAAYSQVLLRCLTLLQRLLQEHRLKTQSELDRINAQYLEVKCGAMILKLRMEELKILSDTYTVEKVEVHRLIRDRLEGAIHLQEQDMENSRQVLNSYEVLGEEFDRLVKEYTVLKQATENKRWALQEFSKVYR

SEQ ID NO: 28913 - protein, 237 aa, Homo sapiens
MASGDFCSPGEGMEILQQVCSKQLPPCNLSKEDLLQNPYFSKLLLNLSQHVDESGLSLTLAKEQAQAWKEVRLHKTTWLRSEILHRVIQELLVDYYVKIQDTNVTSEDKKVLLRCLTLLQRLLQEHRLKTQSELDRINAQYLEVKCGAMILKLRMEELKILSDTYTVEKVEVHRLIRDRLEGAIHLQEQDMENSRQVLNSYEVLGEEFDRLVKEYTVLKQATENKRWALQEFSKVYR

SEQ ID NO: 28914 - protein, 239 aa, Homo sapiens
MRLLGPSQEREIPPLLGLEKADLLELMPLSEDFVWMRARLQQEVEEQLKKKCFTLLCYYDPNSDADSETVKAAKVWKLAEVLVGEQQQCQDAKSQQKEQMLLLEKKSAAYSQVLLRCLTLLQRLLQEHRLKTQSELDRINAQYLEVKCGAMILKLRMEELKILSDTYTVEKVEVHRLIRDRLEGAIHLQEQDMENSRQVLNSYEVLGEEFDRLVKEYTVLKQATENKRWALQEFSKVYR

SEQ ID NO: 28915 - protein, 318 aa, Homo sapiens
MASGDFCSPGEGMEILQQVCSKQLPPCNLSKEDLLQNPYFSKLLLNLSQHVDESGLSLTLAKEQAQAWKEVRLHKTTWLRSEILHRVIQELLVDYYVKIQDTNVTSEDKKDFVWMRARLQQEVEEQLKKKCFTLLCYYDPNSDADSETVKAAKVWKLAEVLVGEQQQCQDAKSQQKEQMLLLEKKSAAYSQVLLRCLTLLQRLLQEHRLKTQSELDRINAQYLEVKCGAMILKLRMEELKILSDTYTVEKVEVHRLIRDRLEGAIHLQEQDMENSRQVLNSYEVLGEEFDRLVKEYTVLKQATENKRWALQEFSKVYR

SEQ ID NO: 28916 - protein, 445 aa, Homo sapiens
MAELKYISGFGNECSSEDPRCPGSLPEGQNNPQVCPYNLYAEQLSGSAFTCPRSTNKRSWLYRILPSVSHKPFESIDEGQVTHNWDEVDPDPNQLRWKPFEIPKASQKKVDFVSGLHTLCGAGDIKSNNGLAIHIFLCNTSMENRCFYNSDGDFLIVPQKGNLLIYTEFGKMLVQPNEICVIQRGMRFSIDVFEETRGYILEVYGVHFELPDLGPIGANGLANPRDFLIPIAWYEDRQVPGGYTVINKYQGKLFAAKQDVSPFNVVAWHGNYTPYKYNLKNFMVINSVAFDHADPSIFTVLTAKSVRPGVAIADFVIFPPRWGVADKTFRPPYYHRNCMSEFMGLIRGHYEAKQGGFLPGGGSLHSTMTPHGPDADCFEKASKVKLAPERIADGTMAFMFESSLSLAVTKWGLKASRCLDENYHKCWEPLKSHFTPNSRNPAEPN

SEQ ID NO: 28917 - protein, 205 aa, Homo sapiens
MAEPLQPDPGAAEDAAAQAVETPGWKAPEDAGPQPGSYEIRHYGPAKWVSTSVESMDWDSAIQTGFTKLNSYIQGKNEKEMKIKMTAPVTSYVEPGSGPFSESTITISLYIPSEQQFDPPRPLESDVFIEDRAEMTVFVRSFDGFSSAQKNQEQLLTLASILREDGKVFDEKVYYTAGYNSPVKLLNRNNEVWLIQKNEPTKENE

SEQ ID NO: 28918 - protein, 184 aa, Homo sapiens
MAEPLQPDPGAFQPGSYEIRHYGPAKWVSTSVESMDWDSAIQTGFTKLNSYIQGKNEKEMKIKMTAPVTSYVEPGSGPFSESTITISLYIPSEQQFDPPRPLESDVFIEDRAEMTVFVRSFDGFSSAQKNQEQLLTLASILREDGKVFDEKVYYTAGYNSPVKLLNRNNEVWLIQKNEPTKENE

SEQ ID NO: 28919 - protein, 488 aa, Homo sapiens
MFAAGLAPFYASNFSLWSAAYCSSAGPGGCSFPLDPAAVKKPSFCIADILHAGVGDLGAAPEGLAGASAAALTAHLGSVHPHASFQAAARSPLRPTPVVAPSEVPAGFPQRLSPLSAAYHHHHPQQQQQQQQPQQQQPPPPPRAGALQPPASGTRVVPNPHHSGSAPAPSSKDLKFGIDRILSAEFDPKVKEGNTLRDLTSLLTGGRPAGVHLSGLQPSAGQFFASLDPINEASAILSPLNSNPRNSVQHQFQDTFPGPYAVLTKDTMPQTYKRKRSWSRAVFSNLQRKGLEKRFEIQKYVTKPDRKQLAAMLGLTDAQVKVWFQNRRMKWRHSKEAQAQKDKDKEAGEKPSGGAPAADGEQDERSPSRSEGEAESESSDSESLDMAPSDTERTEGSERSLHQTTVIKAPVTGALITASSAGSGGSSGGGGNSFSFSSASSLSSSSTSAGCASSLGGGGASELLPATQPTASSAPKSPEPAQGALGCL

SEQ ID NO: 28920 - protein, 474 aa, Homo sapiens
MRLSKTLVDMDMADYSAALDPAYTTLEFENVQVLTMGNDTSPSEGTNLNAPNSLGVSALCAICGDRATGKHYGASSCDGCKGFFRRSVRKNHMYSCRFSRQCVVDKDKRNQCRYCRLKKCFRAGMKKEAVQNERDRISTRRSSYEDSSLPSINALLQAEVLSRQITSPVSGINGDIRAKKIASIADVCESMKEQLLVLVEWAKYIPAFCELPLDDQVALLRAHAGEHLLLGATKRSMVFKDVLLLGNDYIVPRHCPELAEMSRVSIRILDELVLPFQELQIDDNEYAYLKAIIFFDPDAKGLSDPGKIKRLRSQVQVSLEDYINDRQYDSRGRFGELLLLLPTLQSITWQMIEQIQFIKLFGMAKIDNLLQEMLLGGSPSDAPHAHHPLHPHLMQEHMGTNVIVANTMPTHLSNGQMCEWPRPRGQAATPETPQPSPPGGSGSEPYKLLPGAVATIVKPLSAIPQPTITKQEVI

SEQ ID NO: 28921 - protein, 464 aa, Homo sapiens
MRLSKTLVDMDMADYSAALDPAYTTLEFENVQVLTMGNDTSPSEGTNLNAPNSLGVSALCAICGDRATGKHYGASSCDGCKGFFRRSVRKNHMYSCRFSRQCVVDKDKRNQCRYCRLKKCFRAGMKKEAVQNERDRISTRRSSYEDSSLPSINALLQAEVLSRQITSPVSGINGDIRAKKIASIADVCESMKEQLLVLVEWAKYIPAFCELPLDDQVALLRAHAGEHLLLGATKRSMVFKDVLLLGNDYIVPRHCPELAEMSRVSIRILDELVLPFQELQIDDNEYAYLKAIIFFDPDAKGLSDPGKIKRLRSQVQVSLEDYINDRQYDSRGRFGELLLLLPTLQSITWQMIEQIQFIKLFGMAKIDNLLQEMLLGGSPSDAPHAHHPLHPHLMQEHMGTNVIVANTMPTHLSNGQMSTPETPQPSPPGGSGSEPYKLLPGAVATIVKPLSAIPQPTITKQEVI

SEQ ID NO: 28922 - protein, 417 aa, Homo sapiens
MRLSKTLVDMDMADYSAALDPAYTTLEFENVQVLTMGNDTSPSEGTNLNAPNSLGVSALCAICGDRATGKHYGASSCDGCKGFFRRSVRKNHMYSCRFSRQCVVDKDKRNQCRYCRLKKCFRAGMKKEAVQNERDRISTRRSSYEDSSLPSINALLQAEVLSRQITSPVSGINGDIRAKKIASIADVCESMKEQLLVLVEWAKYIPAFCELPLDDQVALLRAHAGEHLLLGATKRSMVFKDVLLLGNDYIVPRHCPELAEMSRVSIRILDELVLPFQELQIDDNEYAYLKAIIFFDPDAKGLSDPGKIKRLRSQVQVSLEDYINDRQYDSRGRFGELLLLLPTLQSITWQMIEQIQFIKLFGMAKIDNLLQEMLLGGPCQAQEGRGWSGDSPGDRPHTVSSPLSSLASPLCRFGQVA

SEQ ID NO: 28923 - protein, 504 aa, Homo sapiens
MRLSKTLVDMDMADYSAALDPAYTTLEFENVQVLTMGNDLLPLRLARLRHPLRHHWSISGGVDSSPQGDTSPSEGTNLNAPNSLGVSALCAICGDRATGKHYGASSCDGCKGFFRRSVRKNHMYSCRFSRQCVVDKDKRNQCRYCRLKKCFRAGMKKEAVQNERDRISTRRSSYEDSSLPSINALLQAEVLSRQITSPVSGINGDIRAKKIASIADVCESMKEQLLVLVEWAKYIPAFCELPLDDQVALLRAHAGEHLLLGATKRSMVFKDVLLLGNDYIVPRHCPELAEMSRVSIRILDELVLPFQELQIDDNEYAYLKAIIFFDPDAKGLSDPGKIKRLRSQVQVSLEDYINDRQYDSRGRFGELLLLLPTLQSITWQMIEQIQFIKLFGMAKIDNLLQEMLLGGSPSDAPHAHHPLHPHLMQEHMGTNVIVANTMPTHLSNGQMCEWPRPRGQAATPETPQPSPPGGSGSEPYKLLPGAVATIVKPLSAIPQPTITKQEVI

SEQ ID NO: 28924 - protein, 452 aa, Homo sapiens
MVSVNAPLGAPVESSYDTSPSEGTNLNAPNSLGVSALCAICGDRATGKHYGASSCDGCKGFFRRSVRKNHMYSCRFSRQCVVDKDKRNQCRYCRLKKCFRAGMKKEAVQNERDRISTRRSSYEDSSLPSINALLQAEVLSRQITSPVSGINGDIRAKKIASIADVCESMKEQLLVLVEWAKYIPAFCELPLDDQVALLRAHAGEHLLLGATKRSMVFKDVLLLGNDYIVPRHCPELAEMSRVSIRILDELVLPFQELQIDDNEYAYLKAIIFFDPDAKGLSDPGKIKRLRSQVQVSLEDYINDRQYDSRGRFGELLLLLPTLQSITWQMIEQIQFIKLFGMAKIDNLLQEMLLGGSPSDAPHAHHPLHPHLMQEHMGTNVIVANTMPTHLSNGQMCEWPRPRGQAATPETPQPSPPGGSGSEPYKLLPGAVATIVKPLSAIPQPTITKQEVI

SEQ ID NO: 28925 - protein, 442 aa, Homo sapiens
MVSVNAPLGAPVESSYDTSPSEGTNLNAPNSLGVSALCAICGDRATGKHYGASSCDGCKGFFRRSVRKNHMYSCRFSRQCVVDKDKRNQCRYCRLKKCFRAGMKKEAVQNERDRISTRRSSYEDSSLPSINALLQAEVLSRQITSPVSGINGDIRAKKIASIADVCESMKEQLLVLVEWAKYIPAFCELPLDDQVALLRAHAGEHLLLGATKRSMVFKDVLLLGNDYIVPRHCPELAEMSRVSIRILDELVLPFQELQIDDNEYAYLKAIIFFDPDAKGLSDPGKIKRLRSQVQVSLEDYINDRQYDSRGRFGELLLLLPTLQSITWQMIEQIQFIKLFGMAKIDNLLQEMLLGGSPSDAPHAHHPLHPHLMQEHMGTNVIVANTMPTHLSNGQMSTPETPQPSPPGGSGSEPYKLLPGAVATIVKPLSAIPQPTITKQEVI

SEQ ID NO: 28926 - protein, 395 aa, Homo sapiens
MVSVNAPLGAPVESSYDTSPSEGTNLNAPNSLGVSALCAICGDRATGKHYGASSCDGCKGFFRRSVRKNHMYSCRFSRQCVVDKDKRNQCRYCRLKKCFRAGMKKEAVQNERDRISTRRSSYEDSSLPSINALLQAEVLSRQITSPVSGINGDIRAKKIASIADVCESMKEQLLVLVEWAKYIPAFCELPLDDQVALLRAHAGEHLLLGATKRSMVFKDVLLLGNDYIVPRHCPELAEMSRVSIRILDELVLPFQELQIDDNEYAYLKAIIFFDPDAKGLSDPGKIKRLRSQVQVSLEDYINDRQYDSRGRFGELLLLLPTLQSITWQMIEQIQFIKLFGMAKIDNLLQEMLLGGPCQAQEGRGWSGDSPGDRPHTVSSPLSSLASPLCRFGQVA

SEQ ID NO: 28927 - protein, 402 aa, Homo sapiens
MVCARAALGPGALWAAAWGVLLLTAPAGAQRGRKKVVHVLEGESGSVVVQTAPGQVVSHRGGTIVLPCRYHYEAAAHGHDGVRLKWTKVVDPLAFTDVFVALGPQHRAFGSYRGRAELQGDGPGDASLVLRNVTLQDYGRYECEVTNELEDDAGMVKLDLEGVVFPYHPRGGRYKLTFAEAQRACAEQDGILASAEQLHAAWRDGLDWCNAGWLRDGSVQYPVNRPREPCGGLGGTGSAGGGGDANGGLRNYGYRHNAEERYDAFCFTSNLPGRVFFLKPLRPVPFSGAARACAARGAAVAKVGQLFAAWKLQLLDRCTAGWLADGSARYPIVNPRARCGGRRPGVRSLGFPDATRRLFGVYCYRAPGAPDPAPGGWGWGWAGGGGWAGGARDPAAWTPLHV

SEQ ID NO: 28928 - protein, 708 aa, Homo sapiens
MATSTSTEAKSASWWNYFFLYDGSKVKEEGDPTRAGICYFYPSQTLLDQQELLCGQIAGVVRCVSDISDSPPTLVRLRKLKFAIKVDGDYLWVLGCAVELPDVSCKRFLDQLVGFFNFYNGPVSLAYENCSQEELSTEWDTFIEQILKNTSDLHKIFNSLWNLDQTKVEPLLLLKAARILQTCQRSPHILAGCILYKGLIVSTQLPPSLTAKVLLHRTAPQEQRLPTGEDAPQEHGAALPPNVQIIPVFVTKEEAISLHEFPVEQMTRSLASPAGLQDGSAQHHPKGGSTSALKENATGHVESMAWTTPDPTSPDEACPDGRKENGCLSGHDLESIRPAGLHNSARGEVLGLSSSLGKELVFLQEELDLSEIHIPEAQEVEMASGHFAFLHVPVPDGRAPYCKASLSASSSLEPTPPEDTAISSLRPPSAPEMLTQHGAQEQLEDHPGHSSQAPIPRADPLPRRTRRPLLLPRLDPGQRGNKLPTGEQGLDEDVDGVCESHAAPGLECSSGSANCQGAGPSADGISSRLTPAESCMGLVRMNLYTHCVKGLVLSLLAEEPLLGDSAAIEEVYHSSLASLNGLEVHLKETLPRDEAASTSSTYNFTHYDRIQSLLMANLPQVATPQDRRFLQAVSLMHSEFAQLPALYEMTVRNASTAVYACCNPIQETYFQQLAPAARSSGFPNPQDGAFSLSGKAKQKLLKHGVNLL

SEQ ID NO: 28929 - protein, 528 aa, Homo sapiens
MATSTSTEAKSASWWNYFFLYDGSKVKEEGDPTRAGICYFYPSQTLLDQQELLCGQIAGVVRCVSDISDSPPTLVRLRKLKFAIKVDGDYLWVLGCAVELPDVSCKRFLDQLVGFFNFYNGPVSLAYENCSQEELSTEWDTFIEQILKNTSDLHKIFNSLWNLDQTKVEPLLLLKAARILQTCQRSPHILAGCILYKGLIVSTQLPPSLTAKVLLHRTAPQEQRLPTGEDAPQEHGKWMLWSFKNRVTHQNPNGAALPPNVQIIPVFVTKEEAISLHEFPVEQMTRSLASPAGLQDGSAQHHPKGGSTSALKENATGHVESMAWTTPDPTSPDEACPDGRKENGCLSGHDLESIRPAGLHNSARGEVLGLSSSLGKELVFLQEELDLSEIHIPEAQEVEMASGHFAFLHVPVPDGRAPYCKASLSASSSLEPTPPEDTAISSLRPPSAPEMLTQHGAQEQLEDHPGHSSQAPIPRADPLPKSTVLFSGGCVKGSDTQLCVPGLVWYLEPQFYYVIVRHFFDSMRQTAG

SEQ ID NO: 28930 - protein, 703 aa, Homo sapiens
MAPLCSLARWNYFFLYDGSKVKEEGDPTRAGICYFYPSQTLLDQQELLCGQIAGVVRCVSDISDSPPTLVRLRKLKFAIKVDGDYLWVLGCAVELPDVSCKRFLDQLVGFFNFYNGPVSLAYENCSQEELSTEWDTFIEQILKNTSDLHKIFNSLWNLDQTKVEPLLLLKAARILQTCQRSPHILAGCILYKGLIVSTQLPPSLTAKVLLHRTAPQEQRLPTGEDAPQEHGAALPPNVQIIPVFVTKEEAISLHEFPVEQMTRSLASPAGLQDGSAQHHPKGGSTSALKENATGHVESMAWTTPDPTSPDEACPDGRKENGCLSGHDLESIRPAGLHNSARGEVLGLSSSLGKELVFLQEELDLSEIHIPEAQEVEMASGHFAFLHVPVPDGRAPYCKASLSASSSLEPTPPEDTAISSLRPPSAPEMLTQHGAQEQLEDHPGHSSQAPIPRADPLPRRTRRPLLLPRLDPGQRGNKLPTGEQGLDEDVDGVCESHAAPGLECSSGSANCQGAGPSADGISSRLTPAESCMGLVRMNLYTHCVKGLVLSLLAEEPLLGDSAAIEEVYHSSLASLNGLEVHLKETLPRDEAASTSSTYNFTHYDRIQSLLMANLPQVATPQDRRFLQAVSLMHSEFAQLPALYEMTVRNASTAVYACCNPIQETYFQQLAPAARSSGFPNPQDGAFSLSGKAKQKLLKHGVNLL

SEQ ID NO: 28931 - protein, 721 aa, Homo sapiens
MAPLCSLARWNYFFLYDGSKVKEEGDPTRAGICYFYPSQTLLDQQELLCGQIAGVVRCVSDISDSPPTLVRLRKLKFAIKVDGDYLWVLGCAVELPDVSCKRFLDQLVGFFNFYNGPVSLAYENCSQEELSTEWDTFIEQILKNTSDLHKIFNSLWNLDQTKVEPLLLLKAARILQTCQRSPHILAGCILYKGLIVSTQLPPSLTAKVLLHRTAPQEQRLPTGEDAPQEHGKWMLWSFKNRVTHQNPNGAALPPNVQIIPVFVTKEEAISLHEFPVEQMTRSLASPAGLQDGSAQHHPKGGSTSALKENATGHVESMAWTTPDPTSPDEACPDGRKENGCLSGHDLESIRPAGLHNSARGEVLGLSSSLGKELVFLQEELDLSEIHIPEAQEVEMASGHFAFLHVPVPDGRAPYCKASLSASSSLEPTPPEDTAISSLRPPSAPEMLTQHGAQEQLEDHPGHSSQAPIPRADPLPRRTRRPLLLPRLDPGQRGNKLPTGEQGLDEDVDGVCESHAAPGLECSSGSANCQGAGPSADGISSRLTPAESCMGLVRMNLYTHCVKGLVLSLLAEEPLLGDSAAIEEVYHSSLASLNGLEVHLKETLPRDEAASTSSTYNFTHYDRIQSLLMANLPQVATPQDRRFLQAVSLMHSEFAQLPALYEMTVRNASTAVYACCNPIQETYFQQLAPAARSSGFPNPQDGAFSLSGKAKQKLLKHGVNLL

SEQ ID NO: 28932 - protein, 355 aa, Homo sapiens
MSEEQFGGDGAAAAATAAVGGSAGEQEGAMVAATQGAAAAAGSGAGTGGGTASGGTEGGSAESEGAKIDASKNEEDEGHSNSSPRHSEAATAQREEWKMFIGGLSWDTTKKDLKDYFSKFGEVVDCTLKLDPITGRSRGFGFVLFKESESVDKVMDQKEHKLNGKVIDPKRAKAMKTKEPVKKIFVGGLSPDTPEEKIREYFGGFGEVESIELPMDNKTNKRRGFCFITFKEEEPVKKIMEKKYHNVGLSKCEIKVAMSKEQYQQQQQWGSRGGFAGRARGRGGGPSQNWNQGYSNYWNQGYGNYGYNSQGYGGYGGYDYTGYNNYYGYGDYSNQQSGYGKVSRRGGHQNSYKPY

SEQ ID NO: 28933 - protein, 336 aa, Homo sapiens
MSEEQFGGDGAAAAATAAVGGSAGEQEGAMVAATQGAAAAAGSGAGTGGGTASGGTEGGSAESEGAKIDASKNEEDEGKMFIGGLSWDTTKKDLKDYFSKFGEVVDCTLKLDPITGRSRGFGFVLFKESESVDKVMDQKEHKLNGKVIDPKRAKAMKTKEPVKKIFVGGLSPDTPEEKIREYFGGFGEVESIELPMDNKTNKRRGFCFITFKEEEPVKKIMEKKYHNVGLSKCEIKVAMSKEQYQQQQQWGSRGGFAGRARGRGGGPSQNWNQGYSNYWNQGYGNYGYNSQGYGGYGGYDYTGYNNYYGYGDYSNQQSGYGKVSRRGGHQNSYKPY

SEQ ID NO: 28934 - protein, 306 aa, Homo sapiens
MSEEQFGGDGAAAAATAAVGGSAGEQEGAMVAATQGAAAAAGSGAGTGGGTASGGTEGGSAESEGAKIDASKNEEDEGHSNSSPRHSEAATAQREEWKMFIGGLSWDTTKKDLKDYFSKFGEVVDCTLKLDPITGRSRGFGFVLFKESESVDKVMDQKEHKLNGKVIDPKRAKAMKTKEPVKKIFVGGLSPDTPEEKIREYFGGFGEVESIELPMDNKTNKRRGFCFITFKEEEPVKKIMEKKYHNVGLSKCEIKVAMSKEQYQQQQQWGSRGGFAGRARGRGGDQQSGYGKVSRRGGHQNSYKPY

SEQ ID NO: 28935 - protein, 287 aa, Homo sapiens
MSEEQFGGDGAAAAATAAVGGSAGEQEGAMVAATQGAAAAAGSGAGTGGGTASGGTEGGSAESEGAKIDASKNEEDEGKMFIGGLSWDTTKKDLKDYFSKFGEVVDCTLKLDPITGRSRGFGFVLFKESESVDKVMDQKEHKLNGKVIDPKRAKAMKTKEPVKKIFVGGLSPDTPEEKIREYFGGFGEVESIELPMDNKTNKRRGFCFITFKEEEPVKKIMEKKYHNVGLSKCEIKVAMSKEQYQQQQQWGSRGGFAGRARGRGGDQQSGYGKVSRRGGHQNSYKPY

SEQ ID NO: 28936 - protein, 116 aa, Homo sapiens
MCDQTKHSKCCPAKGNQCCPPQQNQCCQSKGNQCCPPKQNQCCQPKGSQCCPPKHNHCCQPKPPCCIQARCCGLETKPEVSPLNMESEPNSPQTQDKGCQTQQQPHSPQNESRPSK

SEQ ID NO: 28937 - protein, 538 aa, Homo sapiens
MPRGWAAPLLLLLLQGGWGCPDLVCYTDYLQTVICILEMWNLHPSTLTLTWQDQYEELKDEATSCSLHRSAHNATHATYTCHMDVFHFMADDIFSVNITDQSGNYSQECGSFLLAESIKPAPPFNVTVTFSGQYNISWRSDYEDPAFYMLKGKLQYELQYRNRGDPWAVSPRRKLISVDSRSVSLLPLEFRKDSSYELQVRAGPMPGSSYQGTWSEWSDPVIFQTQSEELKEGWNPHLLLLLLLVIVFIPAFWSLKTHPLWRLWKKIWAVPSPERFFMPLYKGCSGDFKKWVGAPFTGSSLELGPWSPEVPSTLEVYSCHPPRSPAKRLQLTELQEPAELVESDGVPKPSFWPTAQNSGGSAYSEERDRPYGLVSIDTVTVLDAEGPCTWPCSCEDDGYPALDLDAGLEPSPGLEDPLLDAGTTVLSCGCVSAGSPGLGGPLGSLLDRLKPPLADGEDWAGGLPWGGRSPGGVSESEAGSPLAGLDMDTFDSGFVGSDCSSPVECDFTSPGDEGPPRSYLRQWVVIPPPLSSPGPQAS

SEQ ID NO: 28938 - protein, 230 aa, Homo sapiens
MSSSYYVNALFSKYTAGASLFQNAEPTSCSFAPNSQRSGYGAGAGAFASTVPGLYNVNSPLYQSPFASGYGLGADAYGNLPCASYDQNIPGLCSDLAKGACDKTDEGALHGAAEANFRIYPWMRSSGPDRKRGRQTYTRYQTLELEKEFHFNRYLTRRRRIEIAHALCLTERQIKIWFQNRRMKWKKEHKDEGPTAAAAPEGAVPSAAATAAADKADEEDDDEEEEDEEE

SEQ ID NO: 28939 - protein, 224 aa, Homo sapiens
MSSYFVNSTFPVTLASGQESFLGQLPLYSSGYADPLRHYPAPYGPGPGQDKGFATSSYYPPAGGGYGRAAPCDYGPAPAFYREKESACALSGADEQPPFHPEPRKSDCAQDKSVFGETEEQKCSTPVYPWMQRMNSCNSSSFGPSGRRGRQTYTRYQTLELEKEFHYNRYLTRRRRIEIAHALCLTERQIKIWFQNRRMKWKKESKLLSASQLSAEEEEEKQAE

SEQ ID NO: 28940 - protein, 140 aa, Homo sapiens
MSSYFVNSTFPVTLASGQESFLGQLPLYSSGYADPLRHYPAPYGPGPGQDKGFATSSYYPPAGGGYGRAAPCDYGPAPAFYREKESACALSGADEQPPFHPEPRKSDCAQDKSVFGETEEQKCSTPVYPWMQRMNSCNSE

SEQ ID NO: 28941 - protein, 431 aa, Homo sapiens
MQKATYYDNAAAALFGGYSSYPGSNGFGFDVPPQPPFQAATHLEGDYQRSACSLQSLGNAAPHAKSKELNGSCMRPGLAPEPLSAPPGSPPPSAAPTSATSNSSNGGGPSKSGPPKCGPGTNSTLTKQIFPWMKESRQTSKLKNNSPGTAEGCGGGGGGGGGGGSGGSGGGGGGGGGGDKSPPGSAASKRARTAYTSAQLVELEKEFHFNRYLCRPRRVEMANLLNLSERQIKIWFQNRRMKYKKDQKAKGLASSSGGPSPAGSPPQPMQSTAGFMNALHSMTPSYESPSPPAFGKAHQNAYALPSNYQPPLKGCGAPQKYPPTPAPEYEPHVLQANGGAYGTPTMQGSPVYVGGGGYADPLPPPAGPSLYGLNHLSHHPSGNLDYNGAPPMAPSQHHGPCEPHPTYTDLSSHHAPPPQGRIQEAPKLTHL

SEQ ID NO: 28942 - protein, 358 aa, Homo sapiens
MRPGLAPEPLSAPPGSPPPSAAPTSATSNSSNGGGPSKSGPPKCGPGTNSTLTKQIFPWMKESRQTSKLKNNSPGTAEGCGGGGGGGGGGGSGGSGGGGGGGGGGDKSPPGSAASKRARTAYTSAQLVELEKEFHFNRYLCRPRRVEMANLLNLSERQIKIWFQNRRMKYKKDQKAKGLASSSGGPSPAGSPPQPMQSTAGFMNALHSMTPSYESPSPPAFGKAHQNAYALPSNYQPPLKGCGAPQKYPPTPAPEYEPHVLQANGGAYGTPTMQGSPVYVGGGGYADPLPPPAGPSLYGLNHLSHHPSGNLDYNGAPPMAPSQHHGPCEPHPTYTDLSSHHAPPPQGRIQEAPKLTHL

SEQ ID NO: 28943 - protein, 299 aa, Homo sapiens
MKESRQTSKLKNNSPGTAEGCGGGGGGGGGGGSGGSGGGGGGGGGGDKSPPGSAASKRARTAYTSAQLVELEKEFHFNRYLCRPRRVEMANLLNLSERQIKIWFQNRRMKYKKDQKAKGLASSSGGPSPAGSPPQPMQSTAGFMNALHSMTPSYESPSPPAFGKAHQNAYALPSNYQPPLKGCGAPQKYPPTPAPEYEPHVLQANGGAYGTPTMQGSPVYVGGGGYADPLPPPAGPSLYGLNHLSHHPSGNLDYNGAPPMAPSQHHGPCEPHPTYTDLSSHHAPPPQGRIQEAPKLTHL

SEQ ID NO: 28944 - protein, 4374 aa, Homo sapiens
MKVDRTKLKKTPTEAPADCRALIDKLKVCNDEQLLLELQQIKTWNIGKCELYHWVDLLDRFDGILADAGQTVENMSWMLVCDRPEREQLKMLLLAVLNFTALLIEYSFSRHLYSSIEHLTTLLASSDMQVVLAVLNLLYVFSKRSNYITRLGSDKRTPLLTRLQHLAESWGGKENGFGLAECCRDLHMMKYPPSATTLHFEFYADPGAEVKIEKRTTSNTLHYIHIEQLDKISESPSEIMESLTKMYSIPKDKQMLLFTHIRLAHGFSNHRKRLQAVQARLHAISILVYSNALQESANSILYNGLIEELVDVLQITDKQLMEIKAASLRTLTSIVHLERTPKLSSIIDCTGTASYHGFLPVLVRNCIQAMIDPSMDPYPHQFATALFSFLYHLASYDAGGEALVSCGMMEALLKVIKFLGDEQDQITFVTRAVRVVDLITNLDMAAFQSHSGLSIFIYRLEHEVDLCRKECPFVIKPKIQRPNTTQEGEEMETDMDGVQCIPQRAALLKSMLNFLKKAIQDPAFSDGIRHVMDGSLPTSLKHIISNAEYYGPSLFLLATEVVTVFVFQEPSLLSSLQDNGLTDVMLHALLIKDVPATREVLGSLPNVFSALCLNARGLQSFVQCQPFERLFKVLLSPDYLPAMRRRRSSDPLGDTASNLGSAVDELMRHQPTLKTDATTAIIKLLEEICNLGRDPKYICQKPSIQKADGTATAPPPRSNHAAEEASSEDEEEEEVQAMQSFNSTQQNETEPNQQVVGTEERIPIPLMDYILNVMKFVESILSNNTTDDHCQEFVNQKGLLPLVTILGLPNLPIDFPTSAACQAVAGVCKSILTLSHEPKVLQEGLLQLDSILSSLEPLHRPIESPGGSVLLRELACAGNVADATLSAQATPLLHALTAAHAYIMMFVHTCRVGQSEIRSISVNQWGSQLGLSVLSKLSQLYCSLVWESTVLLSLCTPNSLPSGCEFGQADMQKLVPKDEKAGTTQGGKRSDGEQDGAAGSMDASTQGLLEGIGLDGDTLAPMETDEPTASDSKGKSKITPAMAARIKQIKPLLSASSRLGRALAELFGLLVKLCVGSPVRQRRSHHAASTTTAPTPAARSTASALTKLLTKGLSWQPPPYTPTPRFRLTFFICSVGFTSPMLFDERKYPYHLMLQKFLCSGGHNALFETFNWALSMGGKVPVSEGLEHSDLPDGTGEFLDAWLMLVEKMVNPTTVLESPHSLPAKLPGGVQNFPQFSALRFLVVTQKAAFTCIKNLWNRKPLKVYGGRMAESMLAILCHILRGEPVIRERLSKEKEGSRGEEDTGQEEGGSRREPQVNQQQLQQLMDMGFTREHAMEALLNTSTMEQATEYLLTHPPPIMGGVVRDLSMSEEDQMMRAIAMSLGQDIPMDQRAESPEEVACRKEEEERKAREKQEEEEAKCLEKFQDADPLEQDELHTFTDTMLPGCFHLLDELPDTVYRVCDLIMTAIKRNGADYRDMILKQVVNQVWEAADVLIKAALPLTTSDTKTVSEWISQMATLPQASNLATRILLLTLLFEELKLPCAWVVESSGILNVLIKLLEVVQPCLQAAKEQKEVQTPKWITPVLLLIDFYEKTAISSKRRAQMTKYLQSNSNNWRWFDDRSGRWCSYSASNNSTIDSAWKSGETSVRFTAGRRRYTVQFTTMVQVNEETGNRRPVMLTLLRVPRLNKNSKNSNGQELEKTLEESKEMDIKRKENKGNDTPLALESTNTEKETSLEETKIGEILIQGLTEDMVTVLIRACVSMLGVPVDPDTLHATLRLCLRLTRDHKYAMMFAELKSTRMILNLTQSSGFNGFTPLVTLLLRHIIEDPCTLRHTMEKVVRSAATSGAGSTTSGVVSGSLGSREINYILRVLGPAACRNPDIFTEVANCCIRIALPAPRGSGTASDDEFENLRIKGPNAVQLVKTTPLKPSPLPVIPDTIKEVIYDMLNALAAYHAPEEADKSDPKPGVMTQEVGQLLQDMGDDVYQQYRSLTRQSSDFDTQSGFSINSQVFAADGASTETSASGTSQGEASTPEESRDGKKDKEGDRASEEGKQKGKGSKPLMPTSTILRLLAELVRSYVGIATLIANYSYTVGQSELIKEDCSVLAFVLDHLLPHTQNAEDKDTPALARLFLASLAAAGSGTDAQVALVNEVKAALGRALAMAESTEKHARLQAVMCIISTIMESCPSTSSFYSSATAKTQHNGMNNIIRLFLKKGLVNDLARVPHSLDLSSPNMANTVNAALKPLETLSRIVNQPSSLFGSKSASSKNKSEQDAQGASQDSSSNQQDPGEPGEAEVQEEDHDVTQTEVADGDIMDGEAETDSVVIAGQPEVLSSQEMQVENELEDLIDELLERDGGSGNSTIIVSRSGEDESQEDVLMDEAPSNLSQASTLQANREDSMNILDPEDEEEHTQEEDSSGSNEDEDDSQDEEEEEEEDEEDDQEDDEGEEGDEDDDDDGSEMELDEDYPDMNASPLVRFERFDREDDLIIEFDNMFSSATDIPPSPGNIPTTHPLMVRHADHSSLTLGSGSSTTRLTQGIGRSQRTLRQLTANTGHTIHVHYPGNRQPNPPLILQRLLGPSAAADILQLSSSLPLQSRGRARLLVGNDDVHIIARSDDELLDDFFHDQSTATSQAGTLSSIPTALTRWTEECKVLDAESMHDCVSVVKVSIVNHLEFLRDEELEERREKRRKQLAEEETKITDKGKEDKENRDQSAQCTASKSNDSTEQNLSDGTPMPDSYPTTPSSTDAATSESKETLGTLQSSQQQPTLPTPPALGEVPQELQSPAGEGGSSTQLLMPVEPEELGPTRPSGEAETTQMELSPAPTITSLSPERAEDSDALTAVSSQLEGSPMDTSSLASCTLEEAVGDTSAAGSSEQPRAGSSTPGDAPPAVAEVQGRSDGSGESAQPPEDSSPPASSESSSTRDSAVAISGADSRGILEEPLPSTSSEEEDPLAGISLPEGVDPSFLAALPDDIRREVLQNQLGIRPPTRTAPSTNSSAPAVVGNPGVTEVSPEFLAALPPAIQEEVLAQQRAEQQRRELAQNASSDTPMDPVTFIQTLPSDLRRSVLEDMEDSVLAVMPPDIAAEAQALRREQEARQRQLMHERLFGHSSTSALSAILRSPAFTSRLSGNRGVQYTRLAVQRGGTFQMGGSSSHNRPSGSNVDTLLRLRGRLLLDHEALSCLLVLLFVDEPKLNTSRLHRVLRNLCYHAQTRHWVIRSLLSILQRSSESELCIETPKLTTSEEKGKKSSKSCGSSSHENRPLDLLHKMESKSSNQLSWLSVSMDAALGCRTNIFQIQRSGGRKHTEKHASGGSTVHIHPQAAPVVCRHVLDTLIQLAKVFPSHFTQQRTKETNCESDRERGNKACSPCSSQSSSSGICTDFWDLLVKLDNMNVSRKGKNSVKSVPVSAGGEGETSPYSLEASPLGQLMNMLSHPVIRRSSLLTEKLLRLLSLISIALPENKVSEAQANSGSGASSTTTATSTTSTTTTTAASTTPTPPTAPTPVTSAPALVAATAISTIVVAASTTVTTPTTATTTVSISPTTKGSKSPAKVSDGGSSSTDFKMVSSGLTENQLQLSVEVLTSHSCSEEGLEDAANVLLQLSRGDSGTRDTVLKLLLNGARHLGYTLCKQIGTLLAELREYNLEQQRRAQCETLSPDGLPEEQPQTTKLKGKMQSRFDMAENVVIVASQKRPLGGRELQLPSMSMLTSKTSTQKFFLRVLQVIIQLRDDTRRANKKAKQTGRLGSSGLGSASSIQAAVRQLEAEADAIIQMVREGQRARRQQQAATSESSQSEASVRREESPMDVDQPSPSAQDTQSIASDGTPQGEKEKEERPPELPLLSEQLSLDELWDMLGECLKELEESHDQHAVLVLQPAVEAFFLVHATERESKPPVRDTRESQLAHIKDEPPPLSPAPLTPATPSSLDPFFSREPSSMHISSSLPPDTQKFLRFAETHRTVLNQILRQSTTHLADGPFAVLVDYIRVLDFDVKRKYFRQELERLDEGLRKEDMAVHVRRDHVFEDSYRELHRKSPEEMKNRLYIVFEGEEGQDAGGLLREWYMIISREMFNPMYALFRTSPGDRVTYTINPSSHCNPNHLSYFKFVGRIVAKAVYDNRLLECYFTRSFYKHILGKSVRYTDMESEDYHFYQGLVYLLENDVSTLGYDLTFSTEVQEFGVCEVRDLKPNGANILVTEENKKEYVHLVCQMRMTGAIRKQLAAFLEGFYEIIPKRLISIFTEQELELLISGLPTIDIDDLKSNTEYHKYQSNSIQIQWFWRALRSFDQADRAKFLQFVTGTSKVPLQGFAALEGMNGIQKFQIHRDDRSTDRLPSAHTCFNQLDLPAYESFEKLRHMLLLAIQECSEGFGLA

SEQ ID NO: 28945 - protein, 4358 aa, Homo sapiens
MKVDRTKLKKTPTEAPADCRALIDKLKVCNDEQLLLELQQIKTWNIGKCELYHWVDLLDRFDGILADAGQTVENMSWMLVCDRPEREQLKMLLLAVLNFTALLIEYSFSRHLYSSIEHLTTLLASSDMQVVLAVLNLLYVFSKRSNYITRLGSDKRTPLLTRLQHLAESWGGKENGFGLAECCRDLHMMKYPPSATTLHFEFYADPGAEVKIEKRTTSNTLHYIHIEQLDKISESPSEIMESLTKMYSIPKDKQMLLFTHIRLAHGFSNHRKRLQAVQARLHAISILVYSNALQESANSILYNGLIEELVDVLQITDKQLMEIKAASLRTLTSIVHLERTPKLSSIIDCTGTASYHGFLPVLVRNCIQAMIDPSMDPYPHQFATALFSFLYHLASYDAGGEALVSCGMMEALLKVIKFLGDEQDQITFVTRAVRVVDLITNLDMAAFQSHSGLSIFIYRLEHEVDLCRKECPFVIKPKIQRPNTTQEGEEMETDMDGVQCIPQRAALLKSMLNFLKKAIQDPAFSDGIRHVMDGSLPTSLKHIISNAEYYGPSLFLLATEVVTVFVFQEPSLLSSLQDNGLTDVMLHALLIKDVPATREVLGSLPNVFSALCLNARGLQSFVQCQPFERLFKVLLSPDYLPAMRRRRSSDPLGDTASNLGSAVDELMRHQPTLKTDATTAIIKLLEEICNLGRDPKYICQKPSIQKADGTATAPPPRSNHAAEEASSEDEEEEEVQAMQSFNSTQQNETEPNQQVVGTEERIPIPLMDYILNVMKFVESILSNNTTDDHCQEFVNQKGLLPLVTILGLPNLPIDFPTSAACQAVAGVCKSILTLSHEPKVLQEGLLQLDSILSSLEPLHRPIESPGGSVLLRELACAGNVADATLSAQATPLLHALTAAHAYIMMFVHTCRVGQSEIRSISVNQWGSQLGLSVLSKLSQLYCSLVWESTVLLSLCTPNSLPSGCEFGQADMQKLVPKDEKAGTTQGGKRSDGEQDGAAGSMDASTQGLLEGIGLDGDTLAPMETDEPTASDSKGKSKITPAMAARIKQIKPLLSASSRLGRALAELFGLLVKLCVGSPVRQRRSHHAASTTTAPTPAARSTASALTKLLTKGLSWQPPPYTPTPRFRLTFFICSVGFTSPMLFDERKYPYHLMLQKFLCSGGHNALFETFNWALSMGGKVPVSEGLEHSDLPDGTGEFLDAWLMLVEKMVNPTTVLESPHSLPAKLPGGVQNFPQFSALRFLVVTQKAAFTCIKNLWNRKPLKVYGGRMAESMLAILCHILRGEPVIRERLSKEKEGSRGEEDTGQEEGGSRREPQVNQQQLQQLMDMGFTREHAMEALLNTSTMEQATEYLLTHPPPIMGGVVRDLSMSEEDQMMRAIAMSLGQDIPMDQRAESPEEVACRKEEEERKAREKQEEEEAKCLEKFQDADPLEQDELHTFTDTMLPGCFHLLDELPDTVYRVCDLIMTAIKRNGADYRDMILKQVVNQVWEAADVLIKAALPLTTSDTKTVSEWISQMATLPQASNLATRILLLTLLFEELKLPCAWVVESSGILNVLIKLLEVVQPCLQAAKEQKEVQTPKWITPVLLLIDFYEKTAISSKRRAQMTKYLQSNSNNWRWFDDRSGRWCSYSASNNSTIDSAWKSGETSVRFTAGRRRYTVQFTTMVQVNEETGNRRPVMLTLLRVPRLNKNSKNSNGQELEKTLEESKEMDIKRKENKGNDTPLALESTNTEKETSLEETKIGEILIQGLTEDMVTVLIRACVSMLGVPVDPDTLHATLRLCLRLTRDHKYAMMFAELKSTRMILNLTQSSGFNGFTPLVTLLLRHIIEDPCTLRHTMEKVVRSAATSGAGSTTSGVVSGSLGSREINYILRVLGPAACRNPDIFTEVANCCIRIALPAPRGSGTASDDEFENLRIKGPNAVQLVKTTPLKPSPLPVIPDTIKEVIYDMLNALAAYHAPEEADKSDPKPGVMTQEVGQLLQDMGDDVYQQYRSLTRQSSDFDTQSGFSINSQVFAADGASTETSASGTSQGEASTPEESRDGKKDKEGDRASEEGKQKGKGSKPLMPTSTILRLLAELVRSYVGIATLIANYSYTVGQSELIKEDCSVLAFVLDHLLPHTQNAEDKDTPALARLFLASLAAAGSGTDAQVALVNEVKAALGRALAMAESTEKHARLQAVMCIISTIMESCPSTSSFYSSATAKTQHNGMNNIIRLFLKKGLVNDLARVPHSLDLSSPNMANTVNAALKPLETLSRIVNQPSSLFGSKSASSKNKSEQDAQGASQDSSSNQQDPGEPGEAEVQEEDHDVTQTEVADGDIMDGEAETDSVVIAGQPEVLSSQEMQVENELEDLIDELLERDGGSGNSTIIVSRSGEDESQEDVLMDEAPSNLSQASTLQANREDSMNILDPEDEEEHTQEEDSSGSNEDEDDSQDEEEEEEEDEEDDQEDDEGEEGDEDDDDDGSEMELDEDYPDMNASPLVRFERFDREDDLIIEFDNMFSSATDIPPSPGNIPTTHPLMVRHADHSSLTLGSGSSTTRLTQGIGRSQRTLRQLTANTGHTIHVHYPGNRQPNPPLILQRLLGPSAAADILQLSSSLPLQSRGRARLLVGNDDVHIIARSDDELLDDFFHDQSTATSQAGTLSSIPTALTRWTEECKVLDAESMHDCVSVVKVSIVNHLEFLRDEELEERREKRRKQLAEEETKITDKGKEDKENRDQSAQCTASKSNDSTEQNLSDGTPMPDSYPTTPSSTDAATSESKETLGTLQSSQQQPTLPTPPALGEVPQELQSPAGEGGSSTQLLMPVEPEELGPTRPSGEAETTQMELSPAPTITSLSPERAEDSDALTAVSSQLEGSPMDTSSLASCTLEEAVGDTSAAGSSEQPRAGSSTPGDAPPAVAEVQGRSDGSGESAQPPEDSSPPASSESSSTRDSAVAISGADSRGILEEPLPSTSSEEEDPLAGISLPEGVDPSFLAALPDDIRREVLQNQLGIRPPTRTAPSTNSSAPAVVGNPGVTEVLAQQRAEQQRRELAQNASSDTPMDPVTFIQTLPSDLRRSVLEDMEDSVLAVMPPDIAAEAQALRREQEARQRQLMHERLFGHSSTSALSAILRSPAFTSRLSGNRGVQYTRLAVQRGGTFQMGGSSSHNRPSGSNVDTLLRLRGRLLLDHEALSCLLVLLFVDEPKLNTSRLHRVLRNLCYHAQTRHWVIRSLLSILQRSSESELCIETPKLTTSEEKGKKSSKSCGSSSHENRPLDLLHKMESKSSNQLSWLSVSMDAALGCRTNIFQIQRSGGRKHTEKHASGGSTVHIHPQAAPVVCRHVLDTLIQLAKVFPSHFTQQRTKETNCESDRERGNKACSPCSSQSSSSGICTDFWDLLVKLDNMNVSRKGKNSVKSVPVSAGGEGETSPYSLEASPLGQLMNMLSHPVIRRSSLLTEKLLRLLSLISIALPENKVSEAQANSGSGASSTTTATSTTSTTTTTAASTTPTPPTAPTPVTSAPALVAATAISTIVVAASTTVTTPTTATTTVSISPTTKGSKSPAKVSDGGSSSTDFKMVSSGLTENQLQLSVEVLTSHSCSEEGLEDAANVLLQLSRGDSGTRDTVLKLLLNGARHLGYTLCKQIGTLLAELREYNLEQQRRAQCETLSPDGLPEEQPQTTKLKGKMQSRFDMAENVVIVASQKRPLGGRELQLPSMSMLTSKTSTQKFFLRVLQVIIQLRDDTRRANKKAKQTGRLGSSGLGSASSIQAAVRQLEAEADAIIQMVREGQRARRQQQAATSESSQSEASVRREESPMDVDQPSPSAQDTQSIASDGTPQGEKEKEERPPELPLLSEQLSLDELWDMLGECLKELEESHDQHAVLVLQPAVEAFFLVHATERESKPPVRDTRESQLAHIKDEPPPLSPAPLTPATPSSLDPFFSREPSSMHISSSLPPDTQKFLRFAETHRTVLNQILRQSTTHLADGPFAVLVDYIRVLDFDVKRKYFRQELERLDEGLRKEDMAVHVRRDHVFEDSYRELHRKSPEEMKNRLYIVFEGEEGQDAGGLLREWYMIISREMFNPMYALFRTSPGDRVTYTINPSSHCNPNHLSYFKFVGRIVAKAVYDNRLLECYFTRSFYKHILGKSVRYTDMESEDYHFYQGLVYLLENDVSTLGYDLTFSTEVQEFGVCEVRDLKPNGANILVTEENKKEYVHLVCQMRMTGAIRKQLAAFLEGFYEIIPKRLISIFTEQELELLISGLPTIDIDDLKSNTEYHKYQSNSIQIQWFWRALRSFDQADRAKFLQFVTGTSKVPLQGFAALEGMNGIQKFQIHRDDRSTDRLPSAHTCFNQLDLPAYESFEKLRHMLLLAIQECSEGFGLA

SEQ ID NO: 28946 - protein, 4365 aa, Homo sapiens
MKVDRTKLKKTPTEAPADCRALIDKLKVCNDEQLLLELQQIKTWNIGKCELYHWVDLLDRFDGILADAGQTVENMSWMLVCDRPEREQLKMLLLAVLNFTALLIEYSFSRHLYSSIEHLTTLLASSDMQVVLAVLNLLYVFSKRSNYITRLGSDKRTPLLTRLQHLAESWGGKENGFGLAECCRDLHMMKYPPSATTLHFEFYADPGAEVKIEKRTTSNTLHYIHIEQLDKISESPSEIMESLTKMYSIPKDKQMLLFTHIRLAHGFSNHRKRLQAVQARLHAISILVYSNALQESANSILYNGLIEELVDVLQITDKQLMEIKAASLRTLTSIVHLERTPKLSSIIDCTGTASYHGFLPVLVRNCIQAMIDPSMDPYPHQFATALFSFLYHLASYDAGGEALVSCGMMEALLKVIKFLGDEQDQITFVTRAVRVVDLITNLDMAAFQSHSGLSIFIYRLEHEVDLCRKECPFVIKPKIQRPNTTQEGEEMETDMDGVQCIPQRAALLKSMLNFLKKAIQDPAFSDGIRHVMDGSLPTSLKHIISNAEYYGPSLFLLATEVVTVFVFQEPSLLSSLQDNGLTDVMLHALLIKDVPATREVLGSLPNVFSALCLNARGLQSFVQCQPFERLFKVLLSPDYLPAMRRRRSSDPLGDTASNLGSAVDELMRHQPTLKTDATTAIIKLLEEICNLGRDPKYICQKPSIQKADGTATAPPPRSNHAAEEASSEDEEEEEVQAMQSFNSTQQNETEPNQQVVGTEERIPIPLMDYILNVMKFVESILSNNTTDDHCQEFVNQKGLLPLVTILGLPNLPIDFPTSAACQAVAGVCKSILTLSHEPKVLQEGLLQLDSILSSLEPLHRPIESPGGSVLLRELACAGNVADATLSAQATPLLHALTAAHAYIMMFVHTCRVGQSEIRSISVNQWGSQLGLSVLSKLSQLYCSLVWESTVLLSLCTPNSLPSGCEFGQADMQKLVPKDEKADGEQDGAAGSMDASTQGLLEGIGLDGDTLAPMETDEPTASDSKGKSKITPAMAARIKQIKPLLSASSRLGRALAELFGLLVKLCVGSPVRQRRSHHAASTTTAPTPAARSTASALTKLLTKGLSWQPPPYTPTPRFRLTFFICSVGFTSPMLFDERKYPYHLMLQKFLCSGGHNALFETFNWALSMGGKVPVSEGLEHSDLPDGTGEFLDAWLMLVEKMVNPTTVLESPHSLPAKLPGGVQNFPQFSALRFLVVTQKAAFTCIKNLWNRKPLKVYGGRMAESMLAILCHILRGEPVIRERLSKEKEGSRGEEDTGQEEGGSRREPQVNQQQLQQLMDMGFTREHAMEALLNTSTMEQATEYLLTHPPPIMGGVVRDLSMSEEDQMMRAIAMSLGQDIPMDQRAESPEEVACRKEEEERKAREKQEEEEAKCLEKFQDADPLEQDELHTFTDTMLPGCFHLLDELPDTVYRVCDLIMTAIKRNGADYRDMILKQVVNQVWEAADVLIKAALPLTTSDTKTVSEWISQMATLPQASNLATRILLLTLLFEELKLPCAWVVESSGILNVLIKLLEVVQPCLQAAKEQKEVQTPKWITPVLLLIDFYEKTAISSKRRAQMTKYLQSNSNNWRWFDDRSGRWCSYSASNNSTIDSAWKSGETSVRFTAGRRRYTVQFTTMVQVNEETGNRRPVMLTLLRVPRLNKNSKNSNGQELEKTLEESKEMDIKRKENKGNDTPLALESTNTEKETSLEETKIGEILIQGLTEDMVTVLIRACVSMLGVPVDPDTLHATLRLCLRLTRDHKYAMMFAELKSTRMILNLTQSSGFNGFTPLVTLLLRHIIEDPCTLRHTMEKVVRSAATSGAGSTTSGVVSGSLGSREINYILRVLGPAACRNPDIFTEVANCCIRIALPAPRGSGTASDDEFENLRIKGPNAVQLVKTTPLKPSPLPVIPDTIKEVIYDMLNALAAYHAPEEADKSDPKPGVMTQEVGQLLQDMGDDVYQQYRSLTRQSSDFDTQSGFSINSQVFAADGASTETSASGTSQGEASTPEESRDGKKDKEGDRASEEGKQKGKGSKPLMPTSTILRLLAELVRSYVGIATLIANYSYTVGQSELIKEDCSVLAFVLDHLLPHTQNAEDKDTPALARLFLASLAAAGSGTDAQVALVNEVKAALGRALAMAESTEKHARLQAVMCIISTIMESCPSTSSFYSSATAKTQHNGMNNIIRLFLKKGLVNDLARVPHSLDLSSPNMANTVNAALKPLETLSRIVNQPSSLFGSKSASSKNKSEQDAQGASQDSSSNQQDPGEPGEAEVQEEDHDVTQTEVADGDIMDGEAETDSVVIAGQPEVLSSQEMQVENELEDLIDELLERDGGSGNSTIIVSRSGEDESQEDVLMDEAPSNLSQASTLQANREDSMNILDPEDEEEHTQEEDSSGSNEDEDDSQDEEEEEEEDEEDDQEDDEGEEGDEDDDDDGSEMELDEDYPDMNASPLVRFERFDREDDLIIEFDNMFSSATDIPPSPGNIPTTHPLMVRHADHSSLTLGSGSSTTRLTQGIGRSQRTLRQLTANTGHTIHVHYPGNRQPNPPLILQRLLGPSAAADILQLSSSLPLQSRGRARLLVGNDDVHIIARSDDELLDDFFHDQSTATSQAGTLSSIPTALTRWTEECKVLDAESMHDCVSVVKVSIVNHLEFLRDEELEERREKRRKQLAEEETKITDKGKEDKENRDQSAQCTASKSNDSTEQNLSDGTPMPDSYPTTPSSTDAATSESKETLGTLQSSQQQPTLPTPPALGEVPQELQSPAGEGGSSTQLLMPVEPEELGPTRPSGEAETTQMELSPAPTITSLSPERAEDSDALTAVSSQLEGSPMDTSSLASCTLEEAVGDTSAAGSSEQPRAGSSTPGDAPPAVAEVQGRSDGSGESAQPPEDSSPPASSESSSTRDSAVAISGADSRGILEEPLPSTSSEEEDPLAGISLPEGVDPSFLAALPDDIRREVLQNQLGIRPPTRTAPSTNSSAPAVVGNPGVTEVSPEFLAALPPAIQEEVLAQQRAEQQRRELAQNASSDTPMDPVTFIQTLPSDLRRSVLEDMEDSVLAVMPPDIAAEAQALRREQEARQRQLMHERLFGHSSTSALSAILRSPAFTSRLSGNRGVQYTRLAVQRGGTFQMGGSSSHNRPSGSNVDTLLRLRGRLLLDHEALSCLLVLLFVDEPKLNTSRLHRVLRNLCYHAQTRHWVIRSLLSILQRSSESELCIETPKLTTSEEKGKKSSKSCGSSSHENRPLDLLHKMESKSSNQLSWLSVSMDAALGCRTNIFQIQRSGGRKHTEKHASGGSTVHIHPQAAPVVCRHVLDTLIQLAKVFPSHFTQQRTKETNCESDRERGNKACSPCSSQSSSSGICTDFWDLLVKLDNMNVSRKGKNSVKSVPVSAGGEGETSPYSLEASPLGQLMNMLSHPVIRRSSLLTEKLLRLLSLISIALPENKVSEAQANSGSGASSTTTATSTTSTTTTTAASTTPTPPTAPTPVTSAPALVAATAISTIVVAASTTVTTPTTATTTVSISPTTKGSKSPAKVSDGGSSSTDFKMVSSGLTENQLQLSVEVLTSHSCSEEGLEDAANVLLQLSRGDSGTRDTVLKLLLNGARHLGYTLCKQIGTLLAELREYNLEQQRRAQCETLSPDGLPEEQPQTTKLKGKMQSRFDMAENVVIVASQKRPLGGRELQLPSMSMLTSKTSTQKFFLRVLQVIIQLRDDTRRANKKAKQTGRLGSSGLGSASSIQAAVRQLEAEADAIIQMVREGQRARRQQQAATSESSQSEASVRREESPMDVDQPSPSAQDTQSIASDGTPQGEKEKEERPPELPLLSEQLSLDELWDMLGECLKELEESHDQHAVLVLQPAVEAFFLVHATERESKPPVRDTRESQLAHIKDEPPPLSPAPLTPATPSSLDPFFSREPSSMHISSSLPPDTQKFLRFAETHRTVLNQILRQSTTHLADGPFAVLVDYIRVLDFDVKRKYFRQELERLDEGLRKEDMAVHVRRDHVFEDSYRELHRKSPEEMKNRLYIVFEGEEGQDAGGLLREWYMIISREMFNPMYALFRTSPGDRVTYTINPSSHCNPNHLSYFKFVGRIVAKAVYDNRLLECYFTRSFYKHILGKSVRYTDMESEDYHFYQGLVYLLENDVSTLGYDLTFSTEVQEFGVCEVRDLKPNGANILVTEENKKEYVHLVCQMRMTGAIRKQLAAFLEGFYEIIPKRLISIFTEQELELLISGLPTIDIDDLKSNTEYHKYQSNSIQIQWFWRALRSFDQADRAKFLQFVTGTSKVPLQGFAALEGMNGIQKFQIHRDDRSTDRLPSAHTCFNQLDLPAYESFEKLRHMLLLAIQECSEGFGLA

SEQ ID NO: 28947 - protein, 250 aa, Homo sapiens
MSISGTLSSYYVDSIISHESEDAPPAKFPSGQYASSRQPGHAEHLEFPSCSFQPKAPVFGASWAPLSPHASGSLPSVYHPYIQPQGVPPAESRYLRTWLEPAPRGEAAPGQGQAAVKAEPLLGAPGELLKQGTPEYSLETSAGREAVLSNQRPGYGDNKICEGSEDKERPDQTNPSANWLHARSSRKKRCPYTKYQTLELEKEFLFNMYLTRDRRHEVARLLNLSERQVKIWFQNRRMKMKKMNKEQGKE

SEQ ID NO: 28948 - protein, 162 aa, Homo sapiens
MRSSPGNMERIVICLMVIFLGTLVHKSSSQGQDRHMIRMRQLIDIVDQLKNYVNDLVPEFLPAPEDVETNCEWSAFSCFQKAQLKSANTGNNERIINVSIKKLKRKPPSTNAGRRQKHRLTCPSCDSYEKKPPKEFLERFKSLLQKMIHQHLSSRTHGSEDS

SEQ ID NO: 28949 - protein, 153 aa, Homo sapiens
MRSSPGNMERIVICLMVIFLGTLVHKSSSQGQDRHMIRMRQLIDIVDQLKNYVNDLVPEFLPAPEDVETNCEWSAFSCFQKAQLKSANTGNNERIINVSIKKLKRKPPSTNAGRRQKHRLTCPSCDSYEKKPPKEFLERFKSLLQKVSTLSFI

SEQ ID NO: 28950 - protein, 463 aa, Homo sapiens
MATSKLPVVPGEEENTILMAKERLEALRTAFESGDLPQAASHLQELLASTESIRLEVGVTGESGAGKSSLINALRGLEAEDPGAALTGVMETTMQPSPYPHPQFPDVTLWDLPGAGSPGCPADKYLKQVDFSRYDFFLLVSPRRCGAVETRLAAEILCQGKKFYFVRTKVDEDLAATRTQRPSGFREAAVLQEIRDHCAERLREAGVADPRIFLVSNLSPARYDFPTLVSTWEHDLPSHRRHAGLLSLPDISLEALQKKKAMLQEQVLKTALVLGVIQALPVPGLAAAYDDALLIHSLRGYHRSFGLDDDSLAKLAEQVGKQAGDLRSVIRSPLANEVSPETVLRLYSQSSDGAMRVARAFERGIPVFGTLVAGGISFGAVYTMLQGCLNEMAEDAQRVRIKALEDDEPQPEVSLEVASDNGVEKGGSGEGGGEEAPLSTCRKLGLLLKYILDSWKKHDSEEK

SEQ ID NO: 28951 - protein, 152 aa, Homo sapiens
MSRLPVLLLLQLLVRPGLQAPMTQTTPLKTSWVNCSNMIDEIITHLKQPPLPLLDFNNLNGEDQDILMENNLRRPNLEAFNRAVKSLQNASAIESILKNLLPCLPLATAAPTRHPIHIKDGDWNEFRRKLTFYLKTLENAQAQQTTLSLAIF

SEQ ID NO: 28952 - protein, 260 aa, Homo sapiens
MSATGPISNYYVDSLISHDNEDLLASRFPATGAHPAAARPSGLVPDCSDFPSCSFAPKPAVFSTSWAPVPSQSSVVYHPYGPQPHLGADTRYMRTWLEPLSGAVSFPSFPAGGRHYALKPDAYPGRRADCGPGEGRSYPDYMYGSPGELRDRAPQTLPSPEADALAGSKHKEEKADLDPSNPVANWIHARSTRKKRCPYTKYQTLELEKEFLFNMYLTRDRRYEVARVLNLTERQVKIWFQNRRMKMKKMNKEKTDKEQS

SEQ ID NO: 28953 - protein, 352 aa, Homo sapiens
MLGGSAGRLKMSSSGTLSNYYVDSLIGHEGDEVFAARFGPPGPGAQGRPAGVADGPAATAAEFASCSFAPRSAVFSASWSAVPSQPPAAAAMSGLYHPYVPPPPLAASASEPGRYVRSWMEPLPGFPGGAGGGGGGGGGGPGRGPSPGPSGPANGRHYGIKPETRAAPAPATAASTTSSSSTSLSSSSKRTECSVARESQGSSGPEFSCNSFLQEKAAAATGGTGPGAGIGAATGTGGSSEPSACSDHPIPGCSLKEEEKQHSQPQQQQLDPNNPAANWIHARSTRKKRCPYTKYQTLELEKEFLFNMYLTRDRRYEVARILNLTERQVKIWFQNRRMKMKKMSKEKCPKGD

SEQ ID NO: 28954 - protein, 897 aa, Homo sapiens
MVLAQGLLSMALLALCWERSLAGAEETIPLQTLRCYNDYTSHITCRWADTQDAQRLVNVTLIRRVNEDLLEPVSCDLSDDMPWSACPHPRCVPRRCVIPCQSFVVTDVDYFSFQPDRPLGTRLTVTLTQHVQPPEPRDLQISTDQDHFLLTWSVALGSPQSHWLSPGDLEFEVVYKRLQDSWEDAAILLSNTSQATLGPEHLMPSSTYVARVRTRLAPGSRLSGRPSKWSPEVCWDSQPGDEAQPQNLECFFDGAAVLSCSWEVRKEVASSVSFGLFYKPSPDAGEEECSPVLREGLGSLHTRHHCQIPVPDPATHGQYIVSVQPRRAEKHIKSSVNIQMAPPSLNVTKDGDSYSLRWETMKMRYEHIDHTFEIQYRKDTATWKDSKTETLQNAHSMALPALEPSTRYWARVRVRTSRTGYNGIWSEWSEARSWDTESVLPMWVLALIVIFLTIAVLLALRFCGIYGYRLRRKWEEKIPNPSKSHLFQNGSAELWPPGSMSAFTSGSPPHQGPWGSRFPELEGVFPVGFGDSEVSPLTIEDPKHVCDPPSGPDTTPAASDLPTEQPPSPQPGPPAASHTPEKQASSFDFNGPYLGPPHSRSLPDILGQPEPPQEGGSQKSPPPGSLEYLCLPAGGQVQLVPLAQAMGPGQAVEVERRPSQGAAGSPSLESGGGPAPPALGPRVGGQDQKDSPVAIPMSSGDTEDPGVASGYVSSADLVFTPNSGASSVSLVPSLGLPSDQTPSLCPGLASGPPGAPGPVKSGFEGYVELPPIEGRSPRSPRNNPVPPEAKSPVLNPGERPADVSPTSPQPEGLLVLQQVGDYCFLPGLGPGPLSLRSKPSSPGPGPEIKNLDQAFQVKKPPGQAVPQVPVIQLFKALKQQDYLSLPPWEVNKPGEVC

SEQ ID NO: 28955 - protein, 903 aa, Homo sapiens
MVLAQGLLSMALLALCWERSLAGAEETIPLQTLRCYNDYTSHITCRWADTQDAQRLVNVTLIRRVNEDLLEPVSCDLSDDMPWSACPHPRCVPRRCVIPCQSFVVTDVDYFSFQPDRPLGTRLTVTLTQHVQPPEPRDLQISTDQDHFLLTWSVALGSPQSHWLSPGDLEFEVVYKRLQDSWEDAAILLSNTSQATLGPEHLMPSSTYVARVRTRLAPGSRLSGRPSKWSPEVCWDSQPGDEAQPQNLECFFDGAAVLSCSWEVRKEVASSVSFGLFYKPSPDAGSAVLLREEECSPVLREGLGSLHTRHHCQIPVPDPATHGQYIVSVQPRRAEKHIKSSVNIQMAPPSLNVTKDGDSYSLRWETMKMRYEHIDHTFEIQYRKDTATWKDSKTETLQNAHSMALPALEPSTRYWARVRVRTSRTGYNGIWSEWSEARSWDTESVLPMWVLALIVIFLTIAVLLALRFCGIYGYRLRRKWEEKIPNPSKSHLFQNGSAELWPPGSMSAFTSGSPPHQGPWGSRFPELEGVFPVGFGDSEVSPLTIEDPKHVCDPPSGPDTTPAASDLPTEQPPSPQPGPPAASHTPEKQASSFDFNGPYLGPPHSRSLPDILGQPEPPQEGGSQKSPPPGSLEYLCLPAGGQVQLVPLAQAMGPGQAVEVERRPSQGAAGSPSLESGGGPAPPALGPRVGGQDQKDSPVAIPMSSGDTEDPGVASGYVSSADLVFTPNSGASSVSLVPSLGLPSDQTPSLCPGLASGPPGAPGPVKSGFEGYVELPPIEGRSPRSPRNNPVPPEAKSPVLNPGERPADVSPTSPQPEGLLVLQQVGDYCFLPGLGPGPLSLRSKPSSPGPGPEIKNLDQAFQVKKPPGQAVPQVPVIQLFKALKQQDYLSLPPWEVNKPGEVC

SEQ ID NO: 28956 - protein, 642 aa, Homo sapiens
MPCGEDWLSHPLGIVQGFFAQNGVNPDWEKKVIEYFKEKLKENNAPKWVPSLNEVPLHYLKPNSFVKFRCMIQDMFDPEFYMGVYETVNQNTKAHVLHFGKYRDVAECGPQQELDLNSPRNTTLERQTFYCVPVPGESTWVKEAYVNANQARVSPSTSYTPSRHKRSYEDDDDMDLQPNKQKDQHAGARQAGSVGGLQWCGEPKRLETEASTGQQLNSLNLSSPFDLNFPLPGEKGPACLVKVYEDWDCFKVNDILELYGILSVDPVLSILNNDERDASALLDPMECTDTAEEQRVHSPPASLVPRIHVILAQKLQHINPLLPACLNKEESKTCKFVSSFMSELSPVRAELLGFLTHALLGDSLAAEYLILHLISTVYTRRDVLPLGKFTVNLSGCPRNSTFTEHLYRIIQHLVPASFRLQMTIENMNHLKFIPHKDYTANRLVSGLLQLPSNTSLVIDETLLEQGQLDTPGVHNVTALSNLITWQKVDYDFSYHQMEFPCNINVFITSEGRSLLPADCQIHLQPQLIPPNMEEYMNSLLSAVLPSVLNKFRIYLTLLRFLEYSISDEITKAVEDDFVEMRKNDPQSITADDLHQLLVVARCLSLSAGQTTLSRERWLRAKQLESLRRTRLQQQKCVNGNEL

SEQ ID NO: 28957 - protein, 640 aa, Homo sapiens
MPCGEDWLSHPLGIVQGFFAQNGVNPDWEKKVIEYFKEKLKENNAPKWVPSLNEVPLHYLKPNSFVKFRCMIQDMFDPEFYMGVYETVNQNTKAHVLHFGKYRDVAECGPQQELDLNSPRNTTLERQTFYCVPVPGESTWVKEAYVNANQARVSPSTSYTPSRHKRSYEDDDDMDLQPNKQKDQHAGARQAGSVGGLQWCGEPKRLETEASTGQQLNSLNLSSPFDLNFPLPGEKGPACLVKVYEDWDCFKVNDILELYGILSVDPVLSILNNDERDASALLDPMECTDTAEEQRVHSPPASLVPRIHVILAQKLQHINPLLPACLNKEESKTFVSSFMSELSPVRAELLGFLTHALLGDSLAAEYLILHLISTVYTRRDVLPLGKFTVNLSGCPRNSTFTEHLYRIIQHLVPASFRLQMTIENMNHLKFIPHKDYTANRLVSGLLQLPSNTSLVIDETLLEQGQLDTPGVHNVTALSNLITWQKVDYDFSYHQMEFPCNINVFITSEGRSLLPADCQIHLQPQLIPPNMEEYMNSLLSAVLPSVLNKFRIYLTLLRFLEYSISDEITKAVEDDFVEMRKNDPQSITADDLHQLLVVARCLSLSAGQTTLSRERWLRAKQLESLRRTRLQQQKCVNGNEL

SEQ ID NO: 28958 - protein, 467 aa, Homo sapiens
MDLQPNKQKDQHAGARQAGSVGGLQWCGEPKRLETEASTGQQLNSLNLSSPFDLNFPLPGEKGPACLVKVYEDWDCFKVNDILELYGILSVDPVLSILNNDERDASALLDPMECTDTAEEQRVHSPPASLVPRIHVILAQKLQHINPLLPACLNKEESKTFVSSFMSELSPVRAELLGFLTHALLGDSLAAEYLILHLISTVYTRRDVLPLGKFTVNLSGCPRNSTFTEHLYRIIQHLVPASFRLQMTIENMNHLKFIPHKDYTANRLVSGLLQLPSNTSLVIDETLLEQGQLDTPGVHNVTALSNLITWQKVDYDFSYHQMEFPCNINVFITSEGRSLLPADCQIHLQPQLIPPNMEEYMNSLLSAVLPSVLNKFRIYLTLLRFLEYSISDEITKAVEDDFVEMRKNDPQSITADDLHQLLVVARCLSLSAGQTTLSRERWLRAKQLESLRRTRLQQQKCVNGNEL

SEQ ID NO: 28959 - protein, 381 aa, Homo sapiens
MSNPSPQVPEEEASTSVCRPKSSMASTSRRQRRERRFRRYLSAGRLVRAQALLQRHPGLDVDAGQPPPLHRACARHDAPALCLLLRLGADPAHQDRHGDTALHAAARQGPDAYTDFFLPLLSRCPSAMGIKNKDGETPGQILGWGPPWDSAEEEEEDDASKEREWRQKLQGELEDEWQEVMGRFEGDASHETQEPESFSAWSDRLAREHAQKCQQQQREAEGSCRPPRAEGSSQSWRQQEEEQRLFRERARAKEEELRESRARRAQEALGDREPKPTRAGPREEHPRGAGRGSLWRFGDVPWPCPGGGDPEAMAAALVARGPPLEEQGALRRYLRVQQVRWHPDRFLQRFRSQIETWELGRVMGAVTALSQALNRHAEALK

SEQ ID NO: 28960 - protein, 358 aa, Homo sapiens
MASTSRRQRRERRFRRYLSAGRLVRAQALLQRHPGLDVDAGQPPPLHRACARHDAPALCLLLRLGADPAHQDRHGDTALHAAARQGPDAYTDFFLPLLSRCPSAMGIKNKDGETPGQILGWGPPWDSAEEEEEDDASKEREWRQKLQGELEDEWQEVMGRFEGDASHETQEPESFSAWSDRLAREHAQKCQQQQREAEGSCRPPRAEGSSQSWRQQEEEQRLFRERARAKEEELRESRARRAQEALGDREPKPTRAGPREEHPRGAGRGSLWRFGDVPWPCPGGGDPEAMAAALVARGPPLEEQGALRRYLRVQQVRWHPDRFLQRFRSQIETWELGRVMGAVTALSQALNRHAEALK

SEQ ID NO: 28961 - protein, 366 aa, Homo sapiens [sequence omitted]

SEQ ID NO: 28962 - protein, 135 aa, Homo sapiens
MKGSIFTLFLFSVLFAISEVRSKESVRLCGLEYIRTVIYICASSRWRRHQEGIPQAQQAETGNSFQLPHKREFSEENPAQNLPKVDASGEDRLWGGQMPTEELWKSKKHSVMSRQDLQTLCCTDGCSMTDLSALC

SEQ ID NO: 28963 - protein, 253 aa, Homo sapiens
MTTSRCSHLPEVLPDCTSSAAPVVKTVEDCGSLVNGQPQYVMQVSAKDGQLLSTVVRTLATQSPFNDRPMCRICHEGSSQEDLLSPCECTGTLGTIHRSCLEHWLSSSNTSYCELCHFRFAVERKPRPLVEWLRNPGPQHEKRTLFGDMVCFLFITPLATISGWLCLRGAVDHLHFSSRLEAVGLIALTVALFTIYLFWTLVSFRYHCRLYNEWRRTNQRVILLIPKSVNVPSNQPSLLGLHSVKRNSKETVV

SEQ ID NO: 28964 - protein, 138 aa, Homo sapiens
MTTSRCSHLPEVLPDCTSSAAPVVKTVEDCGSLVNGQPQYVMQVSAKDGQLLSTVVRTLATQSPFNDRPMCRICHEGSSQEDLLSPCECTGTLGTIHRSCLEHWLSSSNTSYCELCHFRFAVERKPRPLVEVSKWGTS

SEQ ID NO: 28965 - protein, 122 aa, Homo sapiens
MAWVSFYLLPFIFSTGLCALPVLTQPPSASALLGASIKLTCTLSSEHSTYTIEWYQQRPGRSPQYIMKVKSDGSHSKGDGIPDRFMGSSSGADRYLTFSNLQSDDEAEYHCGESHTIDGQVG

SEQ ID NO: 28966 - protein, 879 aa, Homo sapiens
MRLHLLLLLALCGAGTTAAELSYSLRGNWSICNGNGSLELPGAVPGCVHSALFQQGLIQDSYYRFNDLNYRWVSLDNWTYSKEFKIPFEISKWQKVNLILEGVDTVSKILFNEVTIGETDNMFNRYSFDITNVVRDVNSIELRFQSAVLYAAQQSKAHTRYQVPPDCPPLVQKGECHVNFVRKEQCSFSWDWGPSFPTQGIWKDVRIEAYNICHLNYFTFSPIYDKSAQEWNLEIESTFDVVSSKPVGGQVIVAIPKLQTQQTYSIELQPGKRIVELFVNISKNITVETWWPHGHGNQTGYNMTVLFELDGGLNIEKSAKVYFRTVELIEEPIKGSPGLSFYFKINGFPIFLKGSNWIPADSFQDRVTSELLRLLLQSVVDANMNTLRVWGGGIYEQDEFYELCDELGIMVWQDFMFACALYPTDQGFLDSVTAEVAYQIKRLKSHPSIIIWSGNNENEEALMMNWYHISFTDRPIYIKDYVTLYVKNIRELVLAGDKSRPFITSSPTNGAETVAEAWVSQNPNSNYFGDVHFYDYISDCWNWKVFPKARFASEYGYQSWPSFSTLEKVSSTEDWSFNSKFSLHRQHHEGGNKQMLYQAGLHFKLPQSTDPLRTFKDTIYLTQVMQAQCVKTETEFYRRSRSEIVDQQGHTMGALYWQLNDIWQAPSWASLEYGGKWKMLHYFAQNFFAPLLPVGFENENTFYIYGVSDLHSDYSMTLSVRVHTWSSLEPVCSRVTERFVMKGGEAVCLYEEPVSELLRRCGNCTRESCVVSFYLSADHELLSPTNYHFLSSPKEAVGLCKAQITAIISQQGDIFVFDLETSAVAPFVWLDVGSIPGRFSDNGFLMTEKTRTILFYPWEPTSKNELEQSFHVTSLTDIY

SEQ ID NO: 28967 - protein, 120 aa, Homo sapiens
MAWTPLLLLFPLLLHCTGSLSQPVLTQSSSASASLGSSVKLTCTLSSGHSSYIIAWHQQQPGKAPRYLMKLEGSGSYNKGSGVPDRFSGSSSGADRYLTISNLQFEDEADYYCETWDSNT

SEQ ID NO: 28968 - protein, 119 aa, Homo sapiens
MAWTPLLFLTLLLHCTGSLSQLVLTQSPSASASLGASVKLTCTLSSGHSSYAIAWHQQQPEKGPRYLMKLNSDGSHSKGDGIPDRFSGSSSGAERYLTISSLQSEDEADYYCQTWGTGI

SEQ ID NO: 28969 - protein, 835 aa, Homo sapiens
MAAPILKDVVAYVEVWSSNGTENYSKTFTTQLVDMGAKVSKTFNKQVTHVIFKDGYQSTWDKAQKRGVKLVSVLWVEKCRTAGAHIDESLFPAANMNEHLSSLIKKKRKCMQPKDFNFKTPENDKRFQKKFEKMAKELQRQKTNLDDDVPILLFESNGSLIYTPTIEINSRHHSAMEKRLQEMKEKRENLSPTSSQMIQQSHDNPSNSLCEAPLNISRDTLCSDEYFAGGLHSSFDDLCGNSGCGNQERKLEGSINDIKSDVCISSLVLKANNIHSSPSFTHLDKSSPQKFLSNLSKEEINLQRNIAGKVVTPDQKQAAGMSQETFEEKYRLSPTLSSTKGHLLIHSRPRSSSVKRKRVSHGSHSPPKEKCKRKRSTRRSIMPRLQLCRSEDRLQHVAGPALEALSCGESSYDDYFSPDNLKERYSENLPPESQLPSSPAQLSCRSLSKKERTSIFEMSDFSCVGKKTRTVDITNFTAKTISSPRKTGNGEGRATSSCVTSAPEEALRCCRQAGKEDACPEGNGFSYTIEDPALPKGHDDDLTPLEGSLEEMKEAVGLKSTQNKGTTSKISNSSEGEAQSEHEPCFIVDCNMETSTEEKENLPGGYSGSVKNRPTRHDVLDDSCDGFKDLIKPHEELKKSGRGKKPTRTLVMTSMPSEKQNVVIQVVDKLKGFSIAPDVCETTTHVLSGKPLRTLNVLLGIARGCWVLSYDWVLWSLELGHWISEEPFELSHHFPAAPLCRSECHLSAGPYRGTLFADQPAMFVSPASSPPVAKLCELVHLCGGRVSQVPRQASIVIGPYSGKKKATVKYLSEKWVLDSITQHKVCAPENYLLSQ

SEQ ID NO: 28970 - protein, 562 aa, Homo sapiens
MAAPILKDVVAYVEVWSSNGTENYSKTFTTQLVDMGAKVSKTFNKQVTHVIFKDGYQSTWDKAQKRGVKLVSVLWVEKCRTAGAHIDESLFPAANMNEHLSSLIKKKRKCMQPKDFNFKTPENDKRFQKKFEKMAKELQRQKTNLASQMIQQSHDNPSNSLCEAPLNISRDTLCSDEYFAGGLHSSFDDLCGNSGCGNQERKLEGSINDIKSDVCISSLVLKANNIHSSPSFTHLDKSSPQKFLSNLSKEEINLQRNIAGKVVTPDQKQAAGMSQETFEEKYRLSPTLSSTKGHLLIHSRPRSSSVKRKRVSHGSHSPPKEKCKRKRSTRRSIMPRLQLCRSEDRLQHVAGPALEALSCGESSYDDYFSPDNLKERYSENLPPESQLPSSPAQLSCRSLSKKERTSIFEMSDFSCVGKKTRTVDITNFTAKTISSPRKTGNGEGRATSSCVTSAPEEALRCCRQAGKEDACPEGNGFSYTIEDPALPKGHDDDLTPLEGSLEEMKEAVGLKSTQNKGTTSKISNSSEGEAQSEHEPCFIVDCNMETSTEEKENLPGGYSGSM

SEQ ID NO: 28971 - protein, 610 aa, Homo sapiens
MAAPILKDVVAYVEVWSSNGTENYSKTFTTQLVDMGAKVSKTFNKQVTHVIFKDGYQSTWDKAQKRGVKLVSVLWVEKCRTAGAHIDESLFPAANMNEHLSSLIKKKRKCMQPKDFNFKTPENDKRFQKKFEKMAKELQRQKTNLDDDVPILLFESNGSLIYTPTIEINSRHHSAMEKRLQEMKEKRENLSPTSSQMIQQSHDNPSNSLCEAPLNISRDTLCSDEYFAGGLHSSFDDLCGNSGCGNQERKLEGSINDIKSDVCISSLVLKANNIHSSPSFTHLDKSSPQKFLSNLSKEEINLQRNIAGKVVTPDQKQAAGMSQETFEEKYRLSPTLSSTKGHLLIHSRPRSSSVKRKRVSHGSHSPPKEKCKRKRSTRRSIMPRLQLCRSEDRLQHVAGPALEALSCGESSYDDYFSPDNLKERYSENLPPESQLPSSPAQLSCRSLSKKERTSIFEMSDFSCVGKKTRTVDITNFTAKTISSPRKTGNGEGRATSSCVTSAPEEALRCCRQAGKEDACPEGNGFSYTIEDPALPKGHDDDLTPLEGSLEEMKEAVGLKSTQNKGTTSKISNSSEGEAQSEHEPCFIVDCNMETSTEEKENLPGGYSGSM

SEQ ID NO: 28972 - protein, 403 aa, Homo sapiens
MNHKSKKRIREAKRSARPELKDSLDWTRHNYYESFSLSPAAVADNVERADALQLSVEEFVERYERPYKPVVLLNAQEGWSAQEKWTLERLKRKYRNQKFKCGEDNDGYSVKMKMKYYIEYMESTRDDSPLYIFDSSYGEHPKRRKLLEDYKVPKFFTDDLFQYAGEKRRPPYRWFVMGPPRSGTGIHIDPLGTSAWNALVQGHKRWCLFPTSTPRELIKVTRDEGGNQQDEAITWFNVIYPRTQLPTWPPEFKPLEILQKPGETVFVPGGWWHVVLNLDTTIAITQNFASSTNFPVVWHKTVRGRPKLSRKWYRILKQEHPELAVLADSVDLQESTGIASDSSSDSSSSSSSSSSDSDSECESGSEGDGTVHRRKKRRTCSMVGNGDTTSQDDCVSKERSSSR

SEQ ID NO: 28973 - protein, 372 aa, Homo sapiens
MNHKSKKRIREAKRSARPELKDSLDWTRHNYYESFSLSPAAVADNVERADALQLSVEEFVERYERPYKPVVLLNAQEGWSAQEKWTLERLKRKYRNQKFKCGEDNDGYSVKMKMKYYIEYMESTRDDSPLYIFDSSYGEHPKRRKLLEDYKVPKFFTDDLFQYAGEKRRPPYRWFVMGPPRSGTGIHIDPLGTSAWNALVQGHKRWCLFPTSTPRELIKVTRDEGGNQQDEAITWFNVIYPRTQLPTWPPEFKPLEILQKPGETVFVPGGWWHVVLNLDTTIAITQNFASSTNFPVVWHKTVRGRPKLSRKWYRILKQEHPELAVLADSVDLQESTGIASDSSSDSSSSSSSSSSDSDSERIRDTCGGRAHP

SEQ ID NO: 28974 - protein, 414 aa, Homo sapiens
MNHKSKKRIREAKRSARPELKDSLDWTRHNYYESFSLSPAAVADNVERADALQLSVEEFVERYERPYKPVVLLNAQEGWSAQEKWTLERLKRKYRNQKFKCGEDNDGYSVKMKMKYYIEYMESTRDDSPLYIFDSSYGEHPKRRKLLEDYKVPKFFTDDLFQYAGEKRRPPYRWFVMGPPRSGTGIHIDPLGTSAWNALVQGHKRWCLFPTSTPRELIKVTRDEGGNQQDEAITWFNVIYPRTQLPTWPPEFKPLEILQKPGETVFVPGGWWHVVLNLDTTIAITQNFASSTNFPVVWHKTVRGRPKLSRKWYRILKQEHPELAVLADSVDLQESTGIASDSSSDSSSSSSSSSSDSDSECESGSEGDGTVHRRKKRRTCSMVGNGDTTSQDDCVSKERSSSRIRDTCGGRAHP

SEQ ID NO: 28975 - protein, 117 aa, Homo sapiens
MAWTPLFLFLLTCCPGSNSQAVVTQEPSLTVSPGGTVTLTCGSSTGAVTSGHYPYWFQQKPGQAPRTLIYDTSNKHSWTPARFSGSLLGGKAALTLLGAQPEDEAEYYCLLSYSGAR

SEQ ID NO: 28976 - protein, 164 aa, Homo sapiens
MRVRFCTKGNLILVIIEDVEESIEWKTLQKKKQQKIKEKLRIRTKAAVKIQAWWRGTLVRRTLLHAALRAWIIQCWWRMTLSRVLEKKRQAALIAYATRERAVIKLQSLVRMWRVRWRYCQVLNAIYIIQGHWQCHNCQTCALLQGHCVVTATHLQFHIEIINS

SEQ ID NO: 28977 - protein, 696 aa, Homo sapiens
MSGGRFDFDDGGAYCGGWEGGKAHGHGLCTGPKGQGEYSGSWNFGFEVAGVYTWPSGNTFEGYWSQGKRHGLGIETKGRWLYKGEWTHGFKGRYGIRQSSSSGAKYEGTWNNGLQDGYGTETYADGGTYQGQFTNGMRHGYGVRQSVPYGMAVVVRSPLRTSLSSLRSEHSNGTVAPDSPASPASDGPALPSPAIPRGGFALSLLANAEAAARAPKGGGLFQRGALLGKLRRAESRTSVGSQRSRVSFLKSDLSSGASDAASTASLGEAAEGADEAAPFEADIDATTTETYMGEWKNDKRSGFGVSERSSGLRYEGEWLDNLRHGYGCTTLPDGHREEGKYRHNVLVKDTKRRMLQLKSNKVRQKVEHSVEGAQRAAAIARQKAEIAASRTSHAKAKAEAAEQAALAANQESNIARTLARELAPDFYQPGPEYQKRRLLQEILENSESLLEPPDRGAGAAGLPQPPRESPQLHERETPRPEGGSPSPAGTPPQPKRPRPGVSKDGLLSPGAWNGEPSGEGSRSVTPSEGAGRRSPARPATERMAIEALQAPPAPSREPEVALYQGYHSYAVRTTPPEPPPFEDQPEPEVSGSESAPSSPATAPLQAPTLRGPEPARETPAKLEPKPIIPKAEPRAKARKTEARGLTKAGAKKKARKEAALAAEAEVEVEEVPNTILICMVILLNIGLAILFVHLLT

SEQ ID NO: 28978 - protein, 129 aa, Homo sapiens
MSGGRFDFDDGGAYCGGWEGGKAHGHGLCTGPKGQGEYSGSWNFGFEVAGVYTWPSGNTFEGYWSQGKRHGLGIETKGRWLYKGEWTHGFKGRYGIRQSSSSGAKYEGTWNNGLQDGYGTETYADGGMC

SEQ ID NO: 28979 - protein, 310 aa, Homo sapiens
MALRRPPRLRLCARLPDFFLLLLFRGCLIGAVNLKSSNRTPVVQEFESVELSCIITDSQTSDPRIEWKKIQDEQTTYVFFDNKIQGDLAGRAEILGKTSLKIWNVTRRDSALYRCEVVARNDRKEIDEIVIELTVQVKPVTPVCRVPKAVPVGKMATLHCQESEGHPRPHYSWYRNDVPLPTDSRANPRFRNSSFHLNSETGTLVFTAVHKDDSGQYYCIASNDAGSARCEEQEMEVYDLNIGGIIGGVLVVLAVLALITLGICCAYRRGYFINNKQDGESYKNPGKPDGVNYIRTDEEGDFRHKSSFVI

SEQ ID NO: 28980 - protein, 259 aa, Homo sapiens
MALRRPPRLRLCARLPDFFLLLLFRGCLIGAVNLKSSNRTPVVQEFESVELSCIITDSQTSDPRIEWKKIQDEQTTYVFFDNKIQVKPVTPVCRVPKAVPVGKMATLHCQESEGHPRPHYSWYRNDVPLPTDSRANPRFRNSSFHLNSETGTLVFTAVHKDDSGQYYCIASNDAGSARCEEQEMEVYDLNIGGIIGGVLVVLAVLALITLGICCAYRRGYFINNKQDGESYKNPGKPDGVNYIRTDEEGDFRHKSSFVI

SEQ ID NO: 28981 - protein, 298 aa, Homo sapiens
MARRSRHRLLLLLLRYLVVALGYHKAYGFSAPKDQQVVTAVEYQEAILACKTPKKTVSSRLEWKKLGRSVSFVYYQQTLQGDFKNRAEMIDFNIRIKNVTRSDAGKYRCEVSAPSEQGQNLEEDTVTLEVLVAPAVPSCEVPSSALSGTVVELRCQDKEGNPAPEYTWFKDGIRLLENPRLGSQSTNSSYTMNTKTGTLQFNTVSKLDTGEYSCEARNSVGYRRCPGKRMQVDDLNISGIIAAVVVVALVISVCGLGVCYAQRKGYFSKETSFQKSNSSSKATTMSENDFKHTKSFII

SEQ ID NO: 28982 - protein, 262 aa, Homo sapiens
MARRSRHRLLLLLLRYLVVALGYHKAYGFSAPKDQQVVTAVEYQGDFKNRAEMIDFNIRIKNVTRSDAGKYRCEVSAPSEQGQNLEEDTVTLEVLVAPAVPSCEVPSSALSGTVVELRCQDKEGNPAPEYTWFKDGIRLLENPRLGSQSTNSSYTMNTKTGTLQFNTVSKLDTGEYSCEARNSVGYRRCPGKRMQVDDLNISGIIAAVVVVALVISVCGLGVCYAQRKGYFSKETSFQKSNSSSKATTMSENDFKHTKSFII

SEQ ID NO: 28983 - protein, 312 aa, Homo sapiens
MARRSRHRLLLLLLRYLVVALGYHKAYGFSAPKDQQVVTAVEYQEAILACKTPKKTVSSRLEWKKLGRSVSFVYYQQTLQGDFKNRAEMIDFNIRIKNVTRSDAGKYRCEVSAPSEQGQNLEEDTVTLEVLVAPAVPSCEVPSSALSGTVVELRCQDKEGNPAPEYTWFKDGIRLLENPRLGSQSTNSSYTMNTKTGTLQFNTVSKLDTGEYSCEARNSVGYRRCPGKRMQVDDLNISGIIAAVVVVALVISVCGLGVCYAQRKGYFSKETSFQKSNSSSKATTMSENVQWLTPVIPALWKAAAGGSRGQEF

SEQ ID NO: 28984 - protein, 359 aa, Homo sapiens
MAPMGIRLSPLGVAVFCLLGLGVLYHLYSGFLAGRFSLFGLGGEPGGGAAGPAAAADGGTVDLREMLAVSVLAAVRGGDEVRRVRESNVLHEKSKGKTREGAEDKMTSGDVLSNRKMFYLLKTAFPSVQINTEEHVDAADQEVILWDHKIPEDILKEVTTPKEVPAESVTVWIDPLDATQEYTEDLRKYVTTMVCVAVNGKPMLGVIHKPFSEYTAWAMVDGGSNVKARSSYNEKTPRIVVSRSHSGMVKQVALQTFGNQTTIIPAGGAGYKVLALLDVPDKSQEKADLYIHVTYIKKWDICAGNAILKALGGHMTTLSGEEISYTGSDGIEGGLLASIRMNHQALVRKLPDLEKTGHK

SEQ ID NO: 28985 - protein, 1179 aa, Homo sapiens
MAPRPRARPGVAVACCWLLTVVLRCCVSFNVDVKNSMTFSGPVEDMFGYTVQQYENEEGKWVLIGSPLVGQPKNRTGDVYKCPVGRGESLPCVKLDLPVNTSIPNVTEVKENMTFGSTLVTNPNGGFLACGPLYAYRCGHLHYTTGICSDVSPTFQVVNSIAPVQECSTQLDIVIVLDGSNSIYPWDSVTAFLNDLLERMDIGPKQTQVGIVQYGENVTHEFNLNKYSSTEEVLVAAKKIVQRGGRQTMTALGIDTARKEAFTEARGARRGVKKVMVIVTDGESHDNHRLKKVIQDCEDENIQRFSIAILGSYNRGNLSTEKFVEEIKSIASEPTEKHFFNVSDELALVTIVKTLGERIFALEATADQSAASFEMEMSQTGFSAHYSQDWVMLGAVGAYDWNGTVVMQKASQIIIPRNTTFNVESTKKNEPLASYLGYTVNSATASSGDVLYIAGQPRYNHTGQVIIYRMEDGNIKILQTLSGEQIGSYFGSILTTTDIDKDSNTDILLVGAPMYMGTEKEEQGKVYVYALNQTRFEYQMSLEPIKQTCCSSRQHNSCTTENKNEPCGARFGTAIAAVKDLNLDGFNDIVIGAPLEDDHGGAVYIYHGSGKTIRKEYAQRIPSGGDGKTLKFFGQSIHGEMDLNGDGLTDVTIGGLGGAALFWSRDVAVVKVTMNFEPNKVNIQKKNCHMEGKETVCINATVCFDVKLKSKEDTIYEADLQYRVTLDSLRQISRSFFSGTQERKVQRNITVRKSECTKHSFYMLDKHDFQDSVRITLDFNLTDPENGPVLDDSLPNSVHEYIPFAKDCGNKEKCISDLSLHVATTEKDLLIVRSQNDKFNVSLTVKNTKDSAYNTRTIVHYSPNLVFSGIEAIQKDSCESNHNITCKVGYPFLRRGEMVTFKILFQFNTSYLMENVTIYLSATSDSEEPPETLSDNVVNISIPVKYEVGLQFYSSASEYHISIAANETVPEVINSTEDIGNEINIFYLIRKSGSFPMPELKLSISFPNMTSNGYPVLYPTGLSSSENANCRPHIFEDPFSINSGKKMTTSTDHLKRGTILDCNTCKFATITCNLTSSDISQVNVSLILWKPTFIKSYFSSLNLTIRGELRSENASLVLSSSNQKRELAIQISKDGLPGRVPLWVILLSAFAGLLLLMLLILALWKIGFFKRPLKKKMEK

SEQ ID NO: 28986 - protein, 584 aa, Homo sapiens
MANEDCPKAADSPFSSDKHAQLILAQINKMRNGQHFCDVQLQVGQESFKAHRLVLAASSPYFAALFTGGMKESSKDVVPILGIEAGIFQILLDFIYTGIVNIGVNNVQELIIAADMLQLTEVVHLCCEFLKGQIDPLNCIGIFQFSEQIACHDLLEFSENYIHVHFLEVHSGEEFLALTKDQLIKILRSEELSIEDEYQVFLAAMQWILKDLGKRRKHVVEVLDPIRFPLLPPQRLLKYIEGVSDFNLRVALQTLLKEYCEVCKSPKENKFCSFLQTSKVRPRKKARKYLYAVGGYTRLQGGRWSDSRALSCVERFDTFSQYWTTVSSLHQARSGLGVTVLGGMVYAIGGEKDSMIFDCTECYDPVTKQWTTVASMNHPRCGLGVCVCYGAIYALGGWVGAEIGNTIERFDPDENKWEVVGNMAVSRYYFGCCEMQGLIYVIGGISNEGIELRSFEVYDPLSKRWSPLPPMGTRRAYLGVAALNDCIYSVGGWNETQDALHTVEKYSFEEEKWVEVASMKVPRAGMCVVAVNGLLYVSGGRSSSHDFLAPGTLDSVEVYNPHSDTWTEIGNMITSRCEGGVAVL

SEQ ID NO: 28987 - protein, 582 aa, Homo sapiens
MANEDCPKAADSPFSSDKHAQLILAQINKMRNGQHFCDVQLQVGQESFKAHRLVLAASSPYFAALFTGGMKESSKDVVPILGIEAGIFQILLDFIYTGIVNIGVNNVQELIIAADMLQLTEVVHLCCEFLKGQIDPLNCIGIFQFSEQIACHDLLEFSENYIHVHFLEVHSGEEFLALTKDQLIKILRSEELSIEDEYQVFLAAMQWILKDLGKRRKHVVEVLDPIRFPLLPPQRLLKYIEGVSDFNLRVALQTLLKEYCEVCKSPKENKFCSFLQTSKVRPRKKARKYLYAVGGYTRLQGGRWSDSRALSCVERFDTFSQYWTTVSSLHQARSGLGVTVLGGMVYAIGGEKDSMIFDCTECYDPVTKQWTTVASMNHPRCGLGVCVCYGAIYALGGWVGAEIGNTIERFDPDENKWEVVGNMAVSRYYFGCCEMQGLIYVIGGISNEGIELRSFEVYDPLSKRWSPLPPMGTRRAYLGVAALNDCIYSVGGWNETQDALHTVEKYSFEEEKWVEVASMKVPRAGMCVVAVNGLLYVSGGRSSSHDFLAPDTHRYEVFRLKWENMCILFNDHKTLTKGIFNL

SEQ ID NO: 28988 - protein, 249 aa, Homo sapiens
  MOD_RES (126)..(126): Selenocysteine
MGLPQPGLWLKRLWVLLEVAVHVVVGKVLLILFPDRVKRNILAMGEKTGMTRNPHFSHDNWIPTFFSTQYFWFVLKVRWQRLEDTTELGGLAPNCPVVRLSGQRCNIWEFMQGNRPLVLNFGSCTXPSFMFKFDQFKRLIEDFSSIADFLVIYIEEAHASDGWAFKNNMDIRNHQNLQDRLQAAHLLLARSPQCPVVVDTMQNQSSQLYAALPERLYIIQEGRILYKGKSGPWNYNPEEVRAVLEKLHS

SEQ ID NO: 28989 - protein, 185 aa, Homo sapiens
  MOD_RES (62)..(62): Selenocysteine
MGLPQPGLWLKRLWVLLEVAVHVVVGKVLLILFPDRVKRNILAMGEKTGNRPLVLNFGSCTXPSFMFKFDQFKRLIEDFSSIADFLVIYIEEAHASDGWAFKNNMDIRNHQNLQDRLQAAHLLLARSPQCPVVVDTMQNQSSQLYAALPERLYIIQEGRILYKGKSGPWNYNPEEVRAVLEKLHS

SEQ ID NO: 28990 - protein, 109 aa, Homo sapiens
  MOD_RES (83)..(83): Selenocysteine
MGLPQPGLWLKRLWVLLEVAVHVVVGKVLLILFPDRVKRNILAMGEKTGMTRNPHFSHDNWIPTFFSTQYFWFVLKVIGHWCXILEVVPDLHLCSNLTSSRGLLKTLVP

SEQ ID NO: 28991 - protein, 201 aa, Homo sapiens
MGLPQPGLWLKRLWVLLEVAVHVVVGKVLLILFPDRVKRNILAMGEKTGMTRNPHFSHDNWIPTFFSTQYFWFVLKVRWQRLEDTTELGGLAPNCPVVRLSGQRCNIWEFMQDGWAFKNNMDIRNHQNLQDRLQAAHLLLARSPQCPVVVDTMQNQSSQLYAALPERLYIIQEGRILYKGKSGPWNYNPEEVRAVLEKLHS

SEQ ID NO: 28992 - protein, 161 aa, Homo sapiens
  MOD_RES (126)..(126): Selenocysteine
MGLPQPGLWLKRLWVLLEVAVHVVVGKVLLILFPDRVKRNILAMGEKTGMTRNPHFSHDNWIPTFFSTQYFWFVLKVRWQRLEDTTELGGLAPNCPVVRLSGQRCNIWEFMQGNRPLVLNFGSCTXPSFMFKFDQFKRLIEDFSSIADFLVIYIEEAHASG

SEQ ID NO: 28993 - protein, 40 aa, Homo sapiens
  MOD_RES (34)..(34): Selenocysteine
MGLPQPGLWLKRLWVLLEVAVHVVVAPSISGSSXRSVGSD

SEQ ID NO: 28994 - protein, 113 aa, Homo sapiens
MGLPQPGLWLKRLWVLLEVAVHVVVGKVLLILFPDRVKRNILAMGEKTGMTRNPHFSHDNWIPTFFSTQYFWFVLKVRWQRLEDTTELGGLAPNCPVVRLSGQRCNIWEFMQG

SEQ ID NO: 28995 - protein, 85 aa, Homo sapiens
  MOD_RES (59)..(59): Selenocysteine
MGLPQPGLWLKRLWVLLEVAVHVVVGKVLLILFPDRVKRNILAMGEKTGPLAATRGHDXARGSGPKLPGGPPLRTEVQHLGVYAR

SEQ ID NO: 28996 - protein, 89 aa, Homo sapiens
  MOD_RES (59)..(59): Selenocysteine
MGLPQPGLWLKRLWVLLEVAVHVVVGKVLLILFPDRVKRNILAMGEKTGPLAATRGHDXARGSGPKLPGGPPLRTEVQHLGVYARWLGF

SEQ ID NO: 28997 - protein, 192 aa, Homo sapiens
MAAQIPIVATTSTPGIVRNSKKRPASPSHNGSSGGGYGASKKKKASASSFAQGISMEAMSENKMVPSEFSTGPVEKAAKPLPFKDPNFVHSGHGGAVAGKKNRTWKNLKQILASERALPWQLNDPNYFSIDAPPSFKPAKKYSDVSGLLANYTDPQSKLRFSTIEEFSYIRRLPSDVVTGYLALRKATSIVP

SEQ ID NO: 28998 - protein, 197 aa, Homo sapiens
MAAQIPIVATTSTPGIVRNSKKRPASPSHNGSSGGGYGASKKKKASASSFAQGISMEAMSENKMVPSEFSTGPVEKAAKPLPFKDPNFVHSGHGGAVAGKKNRTWKNLKQILASERALPWQLNDPNYFSIDAPPSFKPAKKYSDVSGLLEPPNCFPQRLHQLTFPLAMDEGSNFSRCSPTLVNFGFVFIMAILVGVK

SEQ ID NO: 28999 - protein, 228 aa, Homo sapiens
MAAQIPIVATTSTPGIVRNSKKRPASPSHNGSSGGGYGASKKKKASASSFAQTCLSPSTMIVRPPQPRGTTCLLPSAMIVRPPQPRGNGISMEAMSENKMVPSEFSTGPVEKAAKPLPFKDPNFVHSGHGGAVAGKKNRTWKNLKQILASERALPWQLNDPNYFSIDAPPSFKPAKKYSDVSGLLANYTDPQSKLRFSTIEEFSYIRRLPSDVVTGYLALRKATSIVP

SEQ ID NO: 29000 - protein, 236 aa, Homo sapiens
MQVQDDGVNLIPFAKCSRVVSRSPPPRLPSQSLRPMPQRYGDVFWKNLNQRPTPTWLEEQHIPPMLRATGCSQLGLYPPEQLPPPEMLWRRKKRRPCLEGMQQQGLGGVPARVRAVTYHLEDLRRRQSIINELKKAQWGSSGAASEPVVLGEEGCGFPSTNEYPDLEEERATYPQEEDRFLTPGRAQLLWSPWSPLDQEEACASRQLHSLASFSTVTARRNPLHNPWGMELAASEE

SEQ ID NO: 29001 - protein, 221 aa, Homo sapiens
MQVQDDGVNLIPFAKCSRVVSRSPPPRLPSQSLRPMPQRYGDVFWKNLNQRPTPTWLEEQHIPPMLLPPPEMLWRRKKRRPCLEGMQQQGLGGVPARVRAVTYHLEDLRRRQSIINELKKAQWGSSGAASEPVVLGEEGCGFPSTNEYPDLEEERATYPQEEDRFLTPGRAQLLWSPWSPLDQEEACASRQLHSLASFSTVTARRNPLHNPWGMELAASEE

SEQ ID NO: 29002 - protein, 694 aa, Homo sapiens
MDLHKQWENTETNWHKEKMELLDQFDNERKEWESQWKIMQKKIEELCREVKLWRKININESAKIIDLYHEKTIPEKVIESSPNYPDLGQSEFIRTNHKDGLRKENKREQSLVSGGNQMCKEQKATKKSKVGFLDPLATDNQKECEAWPDLRTSEEDSKSCSGALSTALEELAKVSEELCSFQEEIRKRSNHRRMKSDSFLQEMPNVTNIPHGDPMINNDQCILPISLEKEKQKNRKNLSCTNVLQSNSTKKCGIDTIDLKRNETPPVPPPRSTSRNFPSSDSEQAYERWKERLDHNSWVPHEGRSKRNYNPHFPLRQQEMSMLYPNEGKTSKDGIIFSSLVPEVKIDSKPPSNEDVGLSMWSCDIGIGAKRSPSTSWFQKTCSTPSNPKYEMVIPDHPAKSHPDLHVSNDCSSSVAESSSPLRNFSCGFERTTRNEKLAAKTDEFNRTVFRTDRNCQAIQQNHSCSKSSEDLKPCDTSSTHTGSISQSNDVSGIWKTNAHMPVPMENVPDNPTKKSTTGLVRQMQGHLSPRSYRNMLHEHDWRPSNLSGRPRSADPRSNYGVVEKLLKTYETATESALQNSKCFQDNWTKCNSDVSGGATLSQHLEMLQMEQQFQQKTAVWGGQEVKQGIDPKKITEESMSVNASHGKGFSRPARPANRRLPSRWASRSPSAPPALRRTTHNYTISLRSEALMV

SEQ ID NO: 29003 - protein, 577 aa, Homo sapiens
MCKEQKATKKSKVGFLDPLATDNQKECEAWPDLRTSEEDSKSCSGALSTALEELAKVSEELCSFQEEIRKRSNHRRMKSDSFLQEMPNVTNIPHGDPMINNDQCILPISLEKEKQKNRKNLSCTNVLQSNSTKKCGIDTIDLKRNETPPVPPPRSTSRNFPSSDSEQAYERWKERLDHNSWVPHEGRSKRNYNPHFPLRQQEMSMLYPNEGKTSKDGIIFSSLVPEVKIDSKPPSNEDVGLSMWSCDIGIGAKRSPSTSWFQKTCSTPSNPKYEMVIPDHPAKSHPDLHVSNDCSSSVAESSSPLRNFSCGFERTTRNEKLAAKTDEFNRTVFRTDRNCQAIQQNHSCSKSSEDLKPCDTSSTHTGSISQSNDVSGIWKTNAHMPVPMENVPDNPTKKSTTGLVRQMQGHLSPRSYRNMLHEHDWRPSNLSGRPRSADPRSNYGVVEKLLKTYETATESALQNSKCFQDNWTKCNSDVSGGATLSQHLEMLQMEQQFQQKTAVWGGQEVKQGIDPKKITEESMSVNASHGKGFSRPARPANRRLPSRWASRSPSAPPALRRTTHNYTISLRSEALMV

SEQ ID NO: 29004 - protein, 520 aa, Homo sapiens
MSLSPCRAQRGFSARSACSARSRGRSRGGFSSRGGFSSRSLNSFGGCLEGSRGSTWGSGGRLGVRFGEWSGGPGLSLCPPGGIQEVTINQNLLTPLKIEIDPQFQVVRTQETQEIRTLNNQFASFIDKVRFLEQQNKVLETKWHLLQQQGLSGSQQGLEPVFEACLDQLRKQLEQLQGERGALDAELKACRDQEEEYKSKYEEEAHRRATLENDFVVLKKDVDGVFLSKMELEGKLEALREYLYFLKHLNEEELGQLQTQASDTSVVLSMDNNRYLDFSSIITEVRARYEEIARSSKAEAEALYQTKYQELQVSAQLHGDRMQETKVQISQLHQEIQRLQSQTENLKKQNASLQAAITDAEQRGELALKDAQAKVDELEAALRMAKQNLARLLCEYQELTSTKLSLDVEIATYRRLLEGEECRMSGECTSQVTISSVGGSAVMSGGVGGGLGSTCGLGSGKGSPGSCCTSIVTGGSNIILGSGKDPVLDSCSVSGSSAGSSCHTILKKTVESSLKTSITY

SEQ ID NO: 29005 - protein, 410 aa, Homo sapiens
MEGHEASPAQVGQGDRGKVRFLEQQNKVLETKWHLLQQQGLSGSQQGLEPVFEACLDQLRKQLEQLQGERGALDAELKACRDQEEEYKSKYEEEAHRRATLENDFVVLKKDVDGVFLSKMELEGKLEALREYLYFLKHLNEEELGQLQTQASDTSVVLSMDNNRYLDFSSIITEVRARYEEIARSSKAEAEALYQTKYQELQVSAQLHGDRMQETKVQISQLHQEIQRLQSQTENLKKQNASLQAAITDAEQRGELALKDAQAKVDELEAALRMAKQNLARLLCEYQELTSTKLSLDVEIATYRRLLEGEECRMSGECTSQVTISSVGGSAVMSGGVGGGLGSTCGLGSGKGSPGSCCTSIVTGGSNIILGSGKDPVLDSCSVSGSSAGSSCHTILKKTVESSLKTSITY

SEQ ID NO: 29006 - protein, 519 aa, Homo sapiens
MSYPQFGYPYSSAPQFLMATNSLSTCCESGGRTLADSGPAASAQAPVYCPVYESRLLATARHELNSAAALGVYGGPYGGSQGYGNYVTYGSEASAFYSLNSFDSKDGSGSAHGGLAPAAAAYYPYEPALGQYPYDRYGTMDSGTRRKNATRETTSTLKAWLQEHRKNPYPTKGEKIMLAIITKMTLTQVSTWFANARRRLKKENKMTWPPRNKCADEKRPYAEGEEEEGGEEEAREEPLKSSKNAEPVGKEEKELELSDLDDFDPLEAEPPACELKPPFHSLDGGLERVPAAPDGPVKEASGALRMSLAAGGGAALDEDLERARSCLRSAAAGPEPLPGAEGGPQVCEAKLGFVPAGASAGLEAKPRIWSLAHTATAAAAAATSLSQTEFPSCMLKRQGPAAPAAVSSAPATSPSVALPHSGALDRHQDSPVTSLRNWVDGVFHDPILRHSTLNQAWATAKGALLDPGPLGRSLGAGANVLTAPLARAFPPAVPQDAPAAGAARELLALPKAGGKPFCA

SEQ ID NO: 29007 - protein, 545 aa, Homo sapiens
MSYPQFGYPYSSAPQFLMATNSLSTCCESGGRTLADSGPAASAQAPVYCPVYESRLLATARHELNSAAALGVYGGPYGGSQGYGNYVTYGSEASAFYSLNSFDSKDGSGSAHGGLAPAAAAYYPYEPALGQYPYDRIKRLGGHPHKGIGLDLSGLGRSPGSLYGTMDSGTRRKNATRETTSTLKAWLQEHRKNPYPTKGEKIMLAIITKMTLTQVSTWFANARRRLKKENKMTWPPRNKCADEKRPYAEGEEEEGGEEEAREEPLKSSKNAEPVGKEEKELELSDLDDFDPLEAEPPACELKPPFHSLDGGLERVPAAPDGPVKEASGALRMSLAAGGGAALDEDLERARSCLRSAAAGPEPLPGAEGGPQVCEAKLGFVPAGASAGLEAKPRIWSLAHTATAAAAAATSLSQTEFPSCMLKRQGPAAPAAVSSAPATSPSVALPHSGALDRHQDSPVTSLRNWVDGVFHDPILRHSTLNQAWATAKGALLDPGPLGRSLGAGANVLTAPLARAFPPAVPQDAPAAGAARELLALPKAGGKPFCA

SEQ ID NO: 29008 - protein, 718 aa, Homo sapiens
MSRGYSENNNFLNNNNQMVLDMILYPLIGIPQTINWETIARLVPGLTPKECAKRFDELKSSGSSPVDNQYNSLMAAGESPVETLATYIKSSLLDIHGEFQETPVGHDAVSKTGRHSIASTRNCSSESENCTTHNGGEMTEESEGPNMVIHVCDEAKNLKEDFTCPRDLLISEMKYFAEYLSMDAQRWEEVDISVHCDVHIFNWLIKYIKRNTKENKDCEMPTLEPGNVISILISSEFLKMDSLVEQCIQYCHKNMNAIVATPCNMNCINANLLTRIADLFSHNEVDDLKDKKDKFKSKLFCKKIERLFDPEYLNPDSRSNAATLYRCCLCKKLLTKETERRIPCIPGKINVDRRGNIVYIHIRDKTWDVHEYLNSLFEELKSWRDVYWRLWGTINWLTCSRCYQAFLCIEFSHCQYHSETVVYPTAASSLNTVGTGIYPCCNQKVLRFDPTQLTKGCKVRDHMVTLRDQGEGGDLPSCPTARMLDDLHKYRDVIVVPFSKDTVSDVGVGLCDEKGIECDVLLEPNTPWGPKTGELNAFLSLKNWTLQLKQQSLFSEEEEYTTGSEVTEDEVGDEEEVSKKQRKKEKPKKFTRQPKKQVSSPCAQRKEKALEKSASRDVSPFVMSMQKNKWDATRSLRFNQDAQREDDQRRMTEITGHLIKMRLGDLDRVKSKEAKEFAGGIYSRLEAQIKASVPVSARQSSSEKNTRSKSRFGQGRPA

SEQ ID NO: 29009 - protein, 707 aa, Homo sapiens
MSRGYSENNNFLNNNNQMVLDMILYPLIGIPQTINWETIARLVPGLTPKECAKRFDELKSSGSSPVDNQYNSLMAAGESPVETLATYIKSSLLDIHGEFQETPVGHDAVSKTGRHSIASTRNCSSESENCTTHNGGEMTEESEGPNMVIHVCDEAKNLKEDFTCPRDLLISEMKYFAEYLSMDAQRWEEVDISVHCDVHIFNWLIKYIKRNTKENKDCEMPTLEPGNVISILISSEFLKMDSLVEQCIQYCHKNMNAIVATPCNMNCINANLLTRIADLFSHNEVDDLKDKKDKFKSKLFCKKIERLFDPEYLNPDSRSNAATLYRCCLCKKLLTKETERRIPCIPGKINVDRRGNIVYIHIRDKTWDVHEYLNSLFEELKSWRDVYWRLWGTINWLTCSRCYQAFLCIEFSHCQYHSETVVYPTAASSLNTVGTGIYPCCNQKVLRFDPTQLTKGCKVRDHMVTLRDQGEGGDLPSCPTARMLDDLHKYRDVIVVPFSKDTVSDVGVGLCDEKGIECDVLLEPNTPWGPKTGELNAFLSLKNWTLQLKQQSLFSEEEEYTTGSEVTEDEVGDEEEVSKKQRKKEKPKKFTRQPKKQVSSPCAQRKEKALEKSASRDVSPFVMSMQKNKWDATRSLRFNQDAQREDDQRRMTEITGHLIKMRLGDLDRVKSKEAKETDKLRPRDGTVSKSNRKSGLSSVLLMTVLLC

SEQ ID NO: 29010 - protein, 572 aa, Homo sapiens
MVIHVCDEAKNLKEDFTCPRDLLISEMKYFAEYLSMDAQRWEEVDISVHCDVHIFNWLIKYIKRNTKENKDCEMPTLEPGNVISILISSEFLKMDSLVEQCIQYCHKNMNAIVATPCNMNCINANLLTRIADLFSHNEVDDLKDKKDKFKSKLFCKKIERLFDPEYLNPDSRSNAATLYRCCLCKKLLTKETERRIPCIPGKINVDRRGNIVYIHIRDKTWDVHEYLNSLFEELKSWRDVYWRLWGTINWLTCSRCYQAFLCIEFSHCQYHSETVVYPTAASSLNTVGTGIYPCCNQKVLRFDPTQLTKGCKVRDHMVTLRDQGEGGDLPSCPTARMLDDLHKYRDVIVVPFSKDTVSDVGVGLCDEKGIECDVLLEPNTPWGPKTGELNAFLSLKNWTLQLKQQSLFSEEEEYTTGSEVTEDEVGDEEEVSKKQRKKEKPKKFTRQPKKQVSSPCAQRKEKALEKSASRDVSPFVMSMQKNKWDATRSLRFNQDAQREDDQRRMTEITGHLIKMRLGDLDRVKSKEAKEFAGGIYSRLEAQIKASVPVSARQSSSEKNTRSKSRFGQGRPA

SEQ ID NO: 29011 - protein, 379 aa, Homo sapiens
MSRGYSENNNFLNNNNQMVLDMILYPLIGIPQTINWETIARLVPGLTPKECAKRFDELKSSGSSPVDNQYNSLMAAGESPVETLATYIKSSLLDIHGEFQETPVGHDAVSKTGRHSIASTRNCSSESENCTTHNGGEMTEESEGPNMVIHVCDEAKNLKEDFTCPRDLLISEMKYFAEYLSMDAQRWEEVDISVHCDVHIFNWLIKYIKRNTKENKDCEMPTLEPGNVISILISSEFLKMDSLVEQCIQYCHKNMNAIVATPCNMNCINANLLTRIADLFSHNEVDDLKDKKDKFKSKLFCKKIERLFDPEYLNPDSRSNAATLYRCCLCKKLLTKETERRIPCIPGKINVDRRGNIVYIHIRCREDKIHTCIFVYIYI

SEQ ID NO: 29012 - protein, 471 aa, Homo sapiens
MSYPQGYLYQAPGSLALYSCPAYGASALAAPRSEELARSASGSAFSPYPGSAAFTAQAATGFGSPLQYSADAAAAAAGFPSYMGAPYDAHTTGMTGAISYHPYGSAAYPYQLNDPAYRKNATRDATATLKAWLNEHRKNPYPTKGEKIMLAIITKMTLTQVSTWFANARRRLKKENKMTWAPRNKSEDEDEDEGDATRSKDESPDKAQEGTETSAEDEGISLHVDSLTDHSCSAESDGEKLPCRAGDPLCESGSECKDKYDDLEDDEDDDEEGERGLAPPKPVTSSPLTGLEAPLLSPPPEAAPRGGRKTPQGSRTSPGAPPPASKPKLWSLAEIATSDLKQPSLGPGCGPPGLPAAAAPASTGAPPGGSPYPASPLLGRPLYYTSPFYGNYTNYGNLNAALQGQGLLRYNSAAAAPGEALHTAPKAASDAGKAGAHPLESHYRSPGGGYEPKKDASEGCTVVGGGVQPYL

SEQ ID NO: 29013 - protein, 628 aa, Homo sapiens
MSRQASKTSGGGSQGFSGRSAVVSGSSRMSCVAHSGGAGGGAYGFRSGAGGFGSRSLYNLGGNKSISISVAAGGSRAGGFGGGRSSCAFAGGYGGGFGSGYGGGFGGGFGGGRGMGGGFGGAGGFGGAGGFGGAGGFGGPGGFGGSGGFGGPGSLGSPGGFGPGGFPGGIQEVTINQSLLQPLNVEIDPQIGQVKAQEREQIKTLNNKFASFIDKVRFLEQQNKVLETKWNLLQQQGTSSISGTNNLEPLFENHINYLRSYLDNILGERGRLDSELKNMEDLVEDFKKKYEDEINKRTAAENEFVTLKKDVDSAYMNKVELQAKVDALIDEIDFLRTLYDAELSQMQSHISDTSVVLSMDNNRSLDLDSIIAEVRAQYEDIAQRSKAEAEALYQTKLGELQTTAGRHGDDLRNTKSEIIELNRMIQRLRAEIEGVKKQNANLQTAIAEAEQHGEMALKDANAKLQELQAALQQAKDDLARLLRDYQELMNVKLALDVEIATYRKLLEGEEYRMSGECPSAVSISVVSSSTTSASAGGYGGGYGGGMGGGLGGGFSAGGGSGSGFGRGGGGGIGGGFGGGSSGFSGGSGFGSISGARYGVSGGGFSSASNRGGSIKFSQSSQSSQRYSR

SEQ ID NO: 29014 - protein, 473 aa, Homo sapiens
MTTCSRQFTSSSSMKGSCGIGGGIGGGSSRISSVLAGGSCRAPSTYGGGLSVSSRFSSGGACGLGGGYGGGFSSSSSFGSGFGGGYGGGLGAGFGGGLGAGFGGGFAGGDGLLVGSEKVTMQNLNDRLASYLDKVRALEEANADLEVKIRDWYQRQRPSEIKDYSPYFKTIEDLRNKIIAATIENAQPILQIDNARLAADDFRTKYEHELALRQTVEADVNGLRRVLDELTLARTDLEMQIEGLKEELAYLRKNHEEEMLALRGQTGGDVNVEMDAAPGVDLSRILNEMRDQYEQMAEKNRRDAETWFLSKTEELNKEVASNSELVQSSRSEVTELRRVLQGLEIELQSQLSMKASLENSLEETKGRYCMQLSQIQGLIGSVEEQLAQLRCEMEQQSQEYQILLDVKTRLEQEIATYRRLLEGEDAHLSSQQASGQSYSSREVFTSSSSSSSRQTRPILKEQSSSSFSQGQSS

SEQ ID NO: 29015 - protein, 494 aa, Homo sapiens
MRPPGFRNFLLLASSLLFAGLSAVPQSFSPSLRSWPGAACRLSRAESERRCRAPGQPPGAALCHGRGRCDCGVCICHVTEPGMFFGPLCECHEWVCETYDGSTCAGHGKCDCGKCKCDQGWYGDACQYPTNCDLTKKKSNQMCKNSQDIICSNAGTCHCGRCKCDNSDGSGLVYGKFCECDDRECIDDETEEICGGHGKCYCGNCYCKAGWHGDKCEFQCDITPWESKRRCTSPDGKICSNRGTCVCGECTCHDVDPTGDWGDIHGDTCECDERDCRAVYDRYSDDFCSGHGQCNCGRCDCKAGWYGKKCEHPQSCTLSAEESIRKCQGSSDLPCSGRGKCECGKCTCYPPGDRRVYGKTCECDDRRCEDLDGVVCGGHGTCSCGRCVCERGWFGKLCQHPRKCNMTEEQSKNLCESADGILCSGKGSCHCGKCICSAEEWYISGEFCDCDDRDCDKHDGLICTGNGICSCGNCECWDGWNGNACEIWLGSEYP

SEQ ID NO: 29016 - protein, 353 aa, Homo sapiens
MCKNSQDIICSNAGTCHCGRCKCDNSDGSGLVYGKFCECDDRECIDDETEEICGGHGKCYCGNCYCKAGWHGDKCEFQCDITPWESKRRCTSPDGKICSNRGTCVCGECTCHDVDPTGDWGDIHGDTCECDERDCRAVYDRYSDDFCSGHGQCNCGRCDCKAGWYGKKCEHPQSCTLSAEESIRKCQGSSDLPCSGRGKCECGKCTCYPPGDRRVYGKTCECDDRRCEDLDGVVCGGHGTCSCGRCVCERGWFGKLCQHPRKCNMTEEQSKNLCESADGILCSGKGSCHCGKCICSAEEWYISGEFCDCDDRDCDKHDGLICTGNGICSCGNCECWDGWNGNACEIWLGSEYP

SEQ ID NO: 29017 - protein, 401 aa, Homo sapiens
MNLVAVMGAFNKGHGKCDCGKCKCDQGWYGDACQYPTNCDLTKKKSNQMCKNSQDIICSNAGTCHCGRCKCDNSDGSGLVYGKFCECDDRECIDDETEEICGGHGKCYCGNCYCKAGWHGDKCEFQCDITPWESKRRCTSPDGKICSNRGTCVCGECTCHDVDPTGDWGDIHGDTCECDERDCRAVYDRYSDDFCSGHGQCNCGRCDCKAGWYGKKCEHPQSCTLSAEESIRKCQGSSDLPCSGRGKCECGKCTCYPPGDRRVYGKTCECDDRRCEDLDGVVCGGHGTCSCGRCVCERGWFGKLCQHPRKCNMTEEQSKNLCESADGILCSGKGSCHCGKCICSAEEWYISGEFCDCDDRDCDKHDGLICTGNGICSCGNCECWDGWNGNACEIWLGSEYP

SEQ ID NO: 29018 - protein, 365 aa, Homo sapiens
MGRKKIQISRILDQRNRQVTFTKRKFGLMKKAYELSVLCDCEIALIIFNSANRLFQYASTDMDRVLLKYTEYSEPHESRTNTDILETLKRRGIGLDGPELEPDEGPEEPGEKFRRLAGEGGDPALPRPRLYPAAPAMPSPDVVYGALPPPGCDPSGLGEALPAQSRPSPFRPAAPKAGPPGLVHPLFSPSHLTSKTPPPLYLPTEGRRSDLPGGLAGPRGGLNTSRSLYSGLQNPCSTATPGPPLGSFPFLPGGPPVGAEAWARRVPQPAAPPRRPPQSASSLSASLRPPGAPATFLRPSPIPCSSPGPWQSLCGLGPPCAGCPWPTAGPGRRSPGGTSPERSPGTARARGDPTSLQASSEKTQQ

SEQ ID NO: 29019 - protein, 368 aa, Homo sapiens
MGRKKIQISRILDQRNRQVTFTKRKFGLMKKAYELSVLCDCEIALIIFNSANRLFQYASTDMDRVLLKYTEYSEPHESRTNTDILETLKRRGIGLDGPELEPDEGPEEPGEKFRRLAGEGGDPALPRPRLYPAAPAMPSPDVVYGALPPPGCDPSGLGEALPAQSRPSPFRPAAPKAGPPGLVHPLFSPSHLTSKTPPPLYLPTEGRRSDLPGGLAGPRGGLNTSRSLYSGLQNPCSTATPGPPLGSFPFLPGGPPEYGLGDPPPPPGLLQPPTLAPWQPSRGDGPPAVSSQPSGGRSLGEEGPPTRGASPPTPPVSIKSERLSPAPGGPGDFPKTFPYPLLLARSLAEPLRPGPALRRLPLADGWPR

SEQ ID NO: 29020 - protein, 379 aa, Homo sapiens
MAAAAAQGGGGGEPRRTEGVGPGVPGEVEMVKGQPFDVGPRYTQLQYIGEGAYGMVSSAYDHVRKTRVAIKKISPFEHQTYCQRTLREIQILLRFRHENVIGIRDILRASTLEAMRDVYIVQDLMETDLYKLLKSQQLSNDHICYFLYQILRGLKYIHSANVLHRDLKPSNLLINTTCDLKICDFGLARIADPEHDHTGFLTEYVATRWYRAPEIMLNSKGYTKSIDIWSVGCILAEMLSNRPIFPGKHYLDQLNHILGILGSPSQEDLNCIINMKARNYLQSLPSKTKVAWAKLFPKSDSKALDLLDRMLTFNPNKRITVEEALAHPYLEQYYDPTDEPVAEEPFTFAMELDDLPKERLKELIFQETARFQPGVLEAP

SEQ ID NO: 29021 - protein, 335 aa, Homo sapiens
MAAAAAQGGGGGEPRRTEGVGPGVPGEVEMVKGQPFDVGPRYTQLQYIGEGAYGMVSSAYDHVRKTRVAIKKISPFEHQTYCQRTLREIQILLRFRHENVIGIRDILRASTLEAMRDVYIVQDLMETDLYKLLKSQQLSNDHICYFLYQILRGLKYIHSANVLHRDLKPSNLLINTTCDLKICDFGLARIADPEHDHTGFLTEYVATRWYRAPEIMLNSKGYTKSIDIWSVGCILAEMLSNRPIFPGKHYLDQLNHILALDLLDRMLTFNPNKRITVEEALAHPYLEQYYDPTDEPVAEEPFTFAMELDDLPKERLKELIFQETARFQPGVLEAP

SEQ ID NO: 29022 - protein, 357 aa, Homo sapiens
MAAAAAQGGGGGEPRRTEGVGPGVPGEVEMVKGQPFDVGPRYTQLQYIGEGAYGMVSSAYDHVRKTRVAIKKISPFEHQTYCQRTLREIQILLRFRHENVIGIRDILRASTLEAMRDVYIVQDLMETDLYKLLKSQQLSNDHICYFLYQILRGLKYIHSANVLHRDLKPSNLLINTTCDLKICDFGLARIADPEHDHTGFLTEYVATRWYRAPEIMLNSKGYTKSIDIWSVGCILAEMLSNRPIFPGKHYLDQLNHILGILGSPSQEDLNCIINMKARNYLQSLPSKTKVAWAKLFPKSDSKALDLLDRMLTFNPNKRITVEEALAHPYLEQYYDPTDEVGQSPAAVGLGAGEQGGT

SEQ ID NO: 29023 - protein, 473 aa, Homo sapiens
MGRKKIQITRIMDERNRQVTFTKRKFGLMKKAYELSVLCDCEIALIIFNSTNKLFQYASTDMDKVLLKYTEYNEPHESRTNSDIVETLRKKGLNGCDSPDPDADDSVGHSPESEDKYRKINEDIDLMISRQRLCAVPPPNFEMPVSIPVSSHNSLVYSNPVSSLGNPNLLPLAHPSLQRNSMSPGVTHRPPSAGNTGGLMGGDLTSGAGTSAGNGYGNPRNSPGLLVSPGNLNKNMQAKSPPPMNLGMNNRKPDLRVLIPPGSKNTMPSVSEDVDLLLNQRINNSQSAQSLATPVVSVATPTLPGQGMGGYPSAISTTYGTEYSLSSADLSSLSGFNTASALHLGSVTGWQQQHLHNMPPSALSQLGACTSTHLSQSSNLSLPSTQSLNIKSEPVSPPRDRTTTPSRYPQHTRHEAGRSPVDSLSSCSSSYDGSDREDHRNEFHSPIGLTRPSPDERESPSVKRMRLSEGWAT

SEQ ID NO: 29024 - protein, 465 aa, Homo sapiens
MGRKKIQITRIMDERNRQVTFTKRKFGLMKKAYELSVLCDCEIALIIFNSTNKLFQYASTDMDKVLLKYTEYNEPHESRTNSDIVETLRKKGLNGCDSPDPDADDSVGHSPESEDKYRKINEDIDLMISRQRLCAVPPPNFEMPVSIPVSSHNSLVYSNPVSSLGNPNLLPLAHPSLQRNSMSPGVTHRPPSAGNTGGLMGGDLTSGAGTSAGNGYGNPRNSPGLLVSPGNLNKNMQAKSPPPMNLGMNNRKPDLRVLIPPGSKNTMPSVNQRINNSQSAQSLATPVVSVATPTLPGQGMGGYPSAISTTYGTEYSLSSADLSSLSGFNTASALHLGSVTGWQQQHLHNMPPSALSQLGACTSTHLSQSSNLSLPSTQSLNIKSEPVSPPRDRTTTPSRYPQHTRHEAGRSPVDSLSSCSSSYDGSDREDHRNEFHSPIGLTRPSPDERESPSVKRMRLSEGWAT

SEQ ID NO: 29025 - protein, 441 aa, Homo sapiens
MGRKKIQITRIMDERNRQVTFTKRKFGLMKKAYELSVLCDCEIALIIFNSTNKLFQYASTDMDKVLLKYTEYNEPHESRTNSDIVETLRKKGLNGCDSPDPDADDSVGHSPESEDKYRKINEDIDLMISRQRLCAVPPPNFEMPVSIPVSSHNSLVYSNPVSSLGNPNLLPLAHPSLQRNSMSPGVTHRPPSAGNTGGLMGGDLTSGAGTSAGNGYGNPRNSPGLLVSPGNLNKNMQAKSPPPMNLGMNNRKPDLRVLIPPGSKNTMPSVSEDVDLLLNQRINNSQSAQSLATPVVSVATPTLPGQGMGGYPSAISTTYGTEYSLSSADLSSLSGFNTASALHLGSVTGWQQQHLHNMPPSALSQLGDRTTTPSRYPQHTRHEAGRSPVDSLSSCSSSYDGSDREDHRNEFHSPIGLTRPSPDERESPSVKRMRLSEGWAT

SEQ ID NO: 29026 - protein, 417 aa, Homo sapiens
MGRKKIQITRIMDERNRQVTFTKRKFGLMKKAYELSVLCDCEIALIIFNSTNKLFQYASTDMDKVLLKYTEYNEPHESRTNSDIVEAVPPPNFEMPVSIPVSSHNSLVYSNPVSSLGNPNLLPLAHPSLQRNSMSPGVTHRPPSAGNTGGLMGGDLTSGAGTSAGNGYGNPRNSPGLLVSPGNLNKNMQAKSPPPMNLGMNNRKPDLRVLIPPGSKNTMPSVNQRINNSQSAQSLATPVVSVATPTLPGQGMGGYPSAISTTYGTEYSLSSADLSSLSGFNTASALHLGSVTGWQQQHLHNMPPSALSQLGACTSTHLSQSSNLSLPSTQSLNIKSEPVSPPRDRTTTPSRYPQHTRHEAGRSPVDSLSSCSSSYDGSDREDHRNEFHSPIGLTRPSPDERESPSVKRMRLSEGWAT

SEQ ID NO: 29027 - protein, 483 aa, Homo sapiens
MGRKKIQITRIMDERNRQVTFTKRKFGLMKKAYELSVLCDCEIALIIFNSTNKLFQYASTDMDKVLLKYTEYNEPHESRTNSDIVETLRKKGLNGCDSPDPDADDSALNKKENKGCESPDPDSSYALTPRTEEKYKKINEEFDNMIKSHKIPAVPPPNFEMPVSIPVSSHNSLVYSNPVSSLGNPNLLPLAHPSLQRNSMSPGVTHRPPSAGNTGGLMGGDLTSGAGTSAGNGYGNPRNSPGLLVSPGNLNKNMQAKSPPPMNLGMNNRKPDLRVLIPPGSKNTMPSVNQRINNSQSAQSLATPVVSVATPTLPGQGMGGYPSAISTTYGTEYSLSSADLSSLSGFNTASALHLGSVTGWQQQHLHNMPPSALSQLGACTSTHLSQSSNLSLPSTQSLNIKSEPVSPPRDRTTTPSRYPQHTRHEAGRSPVDSLSSCSSSYDGSDREDHRNEFHSPIGLTRPSPDERESPSVKRMRLSEGWAT

SEQ ID NO: 29028 - protein, 463 aa, Homo sapiens
MGRKKIQITRIMDERNRQVTFTKRKFGLMKKAYELSVLCDCEIALIIFNSTNKLFQYASTDMDKVLLKYTEYNEPHESRTNSDIVEALNKKENKGCESPDPDSSYALTPRTEEKYKKINEEFDNMIKSHKIPAVPPPNFEMPVSIPVSSHNSLVYSNPVSSLGNPNLLPLAHPSLQRNSMSPGVTHRPPSAGNTGGLMGGDLTSGAGTSAGNGYGNPRNSPGLLVSPGNLNKNMQAKSPPPMNLGMNNRKPDLRVLIPPGSKNTMPSVNQRINNSQSAQSLATPVVSVATPTLPGQGMGGYPSAISTTYGTEYSLSSADLSSLSGFNTASALHLGSVTGWQQQHLHNMPPSALSQLGACTSTHLSQSSNLSLPSTQSLNIKSEPVSPPRDRTTTPSRYPQHTRHEAGRSPVDSLSSCSSSYDGSDREDHRNEFHSPIGLTRPSPDERESPSVKRMRLSEGWAT

SEQ ID NO: 29029 - protein, 538 aa, Homo sapiens
MTTPGKENFRLKSYKNKSLNPDEMRRRREEEGLQLRKQKREEQLFKRRNVATAEEETEEEVMSDGGFHEAQISNMEMAPGGVITSDMIEMIFSKSPEQQLSATQKFRKLLSKEPNPPIDEVISTPGVVARFVEFLKRKENCTLQFESAWVLTNIASGNSLQTRIVIQAGAVPIFIELLSSEFEDVQEQAVWALGNIAGDSTMCRDYVLDCNILPPLLQLFSKQNRLTMTRNAVWALSNLCRGKSPPPEFAKVSPCLNVLSWLLFVSDTDVLADACWALSYLSDGPNDKIQAVIDAGVCRRLVELLMHNDYKVVSPALRAVGNIVTGDDIQTQVILNCSALQSLLHLLSSPKESIKKEACWTISNITAGNRAQIQTVIDANIFPALISILQTAEFRTRKEAAWAITNATSGGSAEQIKYLVELGCIKPLCDLLTVMDSKIVQVALNGLENILRLGEQEAKRNGTGINPYCALIEEAYGLDKIEFLQSHENQEIYQKAFDLIEHYFGTEDEDSSIAPQVDLNQQQYIFQQCEAPMEGFQL

SEQ ID NO: 29030 - protein, 146 aa, Homo sapiens
MCHTSCSSGCQPACCAPSPCQPACCVPSSCQASCCVPVGCQSSVCVPVSFKPAVCLPVSCQSSVCVPMSFKSAVCVPVSCQSSVCVPVSCRPIVCAAPSCQSSLCVPVSCRPVVYAAPSCQSSGCCQPSCTSVLCRPISYSISSCC

SEQ ID NO: 29031 - protein, 332 aa, Homo sapiens
MLLLAAAFLVAFVLLLYMVSPLISPKPLALPGAHVVVTGGSSGIGKCIAIECYKQGAFITLVARNEDKLLQAKKEIEMHSINDKQVVLCISVDVSQDYNQVENVIKQAQEKLGPVDMLVNCAGMAVSGKFEDLEVSTFERLMSINYLGSVYPSRAVITTMKERRVGRIVFVSSQAGQLGLFGFTAYSASKFAIRGLAEALQMEVKPYNVYITVAYPPDTDTPGFAEENRTKPLETRLISETTSVCKPEQVAKQIVKDAIQGNFNSSLGSDGYMLSALTCGMAPVTSITEGLQQVVTMGLFRTIALFYLGSFDSIVRRCMMQREKSENADKTA

SEQ ID NO: 29032 - protein, 268 aa, Homo sapiens
MLLLAAAFLVAFVLLLYMVSPLISPKPLALPGAHVVVTGGSSGIGKCIAIECYKQGAFITLVARNEDKLLQAKKEIEMHSINDKQVVLCISVDVSQDYNQVENVIKQAQEKLGPVDMLVNCAGMAVSGKFEDLEVSTFEVKPYNVYITVAYPPDTDTPGFAEENRTKPLETRLISETTSVCKPEQVAKQIVKDAIQGNFNSSLGSDGYMLSALTCGMAPVTSITEGLQQVVTMGLFRTIALFYLGSFDSIVRRCMMQREKSENADKTA

SEQ ID NO: 29033 - protein, 102 aa, Homo sapiens
MHNRSQGFFFSSCHPQNHVSYGCQSPSFIFCRCQSLNFVSRTCYPLSYFSYGNQTIGSISNSFRSLNYVSHSFQPISFMHSSFQPACSDFVGWQSPFLRRTC

SEQ ID NO: 29034 - protein, 79 aa, Homo sapiens
MCCNYYGNSCGYGSGCGCGYGSGSGCGCGYGTGYGCGYGCGFGSHYGCGYGTGYGCGYGSGSGYCGYRPFCFRRCYSSC

SEQ ID NO: 29035 - protein, 96 aa, Homo sapiens
MCHTSCSPACQPTCCIHSPCQASCYVPVSCQSSVCMPVSCTRIVCVAPSCQPSVCVPVSCRPIIYVTPSCQSSGCCQPPCTTALCRPISCSTPSCC

SEQ ID NO: 29036 - protein, 58 aa, Homo sapiens
MRYYGSYYRGLGYGCGGFGGLGYGCGCGGYRYGSGYGGYRYGCCRPSCREGYGFSGFY

SEQ ID NO: 29037 - protein, 263 aa, Homo sapiens
MAELQLDPAMAGLGGGGGSGVGDGGGPVRGPPSPRPAGPTPRGHGRPAAAVAQPLEPGPGPPERAGGGGAARWVRLNVGGTYFVTTRQTLGREPKSFLCRLCCQEDPELDSDKDETGAYLIDRDPTYFGPILNYLRHGKLIITKELAEEGVLEEAEFYNIASLVRLVKERIRDNENRTSQGPVKHVYRVLQCQEEELTQMVSTMSDGWKFEQLISIGSSYNYGNEDQAEFLCVVSRELNNSTNGIVIEPSEKAKILQERGSRM

SEQ ID NO: 29038 - protein, 596 aa, Homo sapiens
MPTQRDSSTMSHTVAGGGSGDHSHQVRVKAYYRGDIMITHFEPSISFEGLCNEVRDMCSFDNEQLFTMKWIDEEGDPCTVSSQLELEEAFRLYELNKDSELLIHVFPCVPERPGMPCPGEDKSIYRRGARRWRKLYCANGHTFQAKRFNRRAHCAICTDRIWGLGRQGYKCINCKLLVHKKCHKLVTIECGRHSLPQEPVMPMDQSSMHSDHAQTVIPYNPSSHESLDQVGEEKEAMNTRESGKASSSLGLQDFDLLRVIGRGSYAKVLLVRLKKTDRIYAMKVVKKELVNDDEDIDWVQTEKHVFEQASNHPFLVGLHSCFQTESRLFFVIEYVNGGDLMFHMQRQRKLPEEHARFYSAEISLALNYLHERGIIYRDLKLDNVLLDSEGHIKLTDYGMCKEGLRPGDTTSTFCGTPNYIAPEILRGEDYGFSVDWWALGVLMFEMMAGRSPFDIVGSSDNPDQNTEDYLFQVILEKQIRIPRSLSVKAASVLKSFLNKDPKERLGCHPQTGFADIQGHPFFRNVDWDMMEQKQVVPPFKPNISGEFGLDNFDSQFTNEPVQLTPDDDDIVRKIDQSEFEGFEYINPLLMSAEECV

SEQ ID NO: 29039 - protein, 349 aa, Homo sapiens
MAVAVPPGRAAGSGWAWRPVARDALLARAFHSCTELRGRFYLVGGLLAGGAREPSSDTVVFDPARGQAVRLGARGSPPRSHHDAAPVDGRWLCVVGGWDGSRRLATVTALDTERGVWEAWTGTPGDCPPAGLSSHTCTRISDRELQVAGREGGIHTQRRYGSIYTLRLDPSARTYCYKQEGCHTASRSGHCAALLQTPGPHPGHQLLLFGGCNLAEPEVAGHWSHGKIKEEPPVAPHLMEQLARLVSSGQGSQKGPHGLRHHSCSVVGPFAVLFGGETLTRARDTICNDLYIYDTRTSPPLWFHFPCADRGMKRMGHRTCLWNDQLYLVGGFGEDGRTASPQVCILDFI

SEQ ID NO: 29040 - protein, 288 aa, Homo sapiens
MAVAVPPGRAAGSGWAWRPVARDALLARAFHSCTELRGRFYLVGGLLAGGAREPSSDTVVFDPARGQAVRLGARGSPPRSHHDAAPVDGRWLCVVGGWDGSRRLATVTALDTERGVWEAWTGTPGDCPPAGLSSHTCTRISDRELQVAGREGGIHTQRRYGSIYTLRLDPSARTYCYKQEGCHTASRSGHCAALLQTPGPHPGHQLLLFGGCNLAEPEVAGHWSHGKIKSFLSPQGGTTCCSSFDGTACKACEQWAGVPEGAPWTTASLMFCGRALCCAVWWRNSDQS

SEQ ID NO: 29041 - protein, 263 aa, Homo sapiens
MAVAVPPGRAAGSGWAWRPVARDALLARAFHSCTELRGRFYLVGGLLAGGAREPSSDTVVFDPARGQAVRLGARGSPPRSHHDAAPVDGRWLCVVGGWDGSRRLATVTALDTERGVWEAWTGTPGDCPPAGLSSHTCTRISDRELQVAGREGGIHTQRRYGSIYTLRLDPSARTYWYGTLRPKPFTLIHTLEKQKPKQISQAIYPPPHSSTLLPGEPTMFKLAELSTVLPSLLSHLPHCPMPLLHPSLARAVALTFSRKPTQP

SEQ ID NO: 29042 - protein, 174 aa, Homo sapiens
MTHCCSPCCQPTCCRTTCCRTTCWKPTTVTTCSSTPCCQPACCVSSCCQPCCRPTCCQNTCCRTTCCQPTCVTSCCQPSCCSTPCCQPTCCGSSCCGQTSCGSSCGQSSSCAPVYCRRTCYYPTTVCLPGCLNQSCGSNCCQPCCRPACCETTCCRTTCFQPTCVSSCCQPSCC

SEQ ID NO: 29043 - protein, 128 aa, Homo sapiens
MMTAVSLTTRPQESVAFEDVAVYFTTKEWAIMVPAERALYRDVMLENYEAVAFVVPPTSKPALVSHLEQGKESCFTQPQGVLSRNDWRAGWIGYLELRRYTYLAKAVLRRIVSKIFRNRQCWEDRRKA

SEQ ID NO: 29044 - protein, 106 aa, Homo sapiens
MMTAVSLTTRPQESVAFEDVAVYFTTKEWAIMVPAERALYRDVMLENYEAVAFVVPPTSKPALVSHLEQGKESCFTQPQGVLSRNDWRAGWIGPRPLGSLLLWLRA

SEQ ID NO: 29045 - protein, 303 aa, Homo sapiens
MMDVSGVGFPSKVPWKKMSAEELENQYCPSRWVVRLGAEEALRTYSQIGIEATTRARATRKSLLHVPYGDGEGEKVDIYFPDESSEALPFFLFFHGGYWQSGSKDESAFMVHPLTAQGVAVVIVAYGIAPKGTLDHMVDQVTRSVAFVQKRYPSNKGIYLCGHSAGAHLAAMMLLADWTKHGVTPNLRGFFLVSGVFDLEPIVYTSQNVALQLTLEDAQRNSPQLKVAQAQPVDPTCRVLVVVGQFDSPEFHRQSWEFYQTLCQGEWKASFEELHDVDHFEIVENLTQKDNVLTQIILKTIFQ

SEQ ID NO: 29046 - protein, 308 aa, Homo sapiens
MMDVSGVGFPSKVPWKKMSAEELENQYCPSRWVVRLGAEEALRTYSQIGIEATTRARATRKSLLHVPYGDGEGEKVDIYFPDESSEALPFFLFFHGGYWQSGSKDESAFMVHPLTAQGVAVVIVAYGIAPKGTLDHMVDQVTRSVAFVQKRYPSNKGIYLCGHSAGAHLAAMMLLADWTKHGVTPNLRGFFLVSGVFDLEPIVYTSQNVALQLTLEDAQRNSPQLKVAQAQPVDPTCRVLVVVGQFDSPEFHRQSWEFYQVLPVQTLCQGEWKASFEELHDVDHFEIVENLTQKDNVLTQIILKTIFQ

SEQ ID NO: 29047 - protein, 671 aa, Homo sapiens
MSELEEDFAKILMLKEERIKELEKRLSEKEEEIQELKRKLHKCQSVLPVPSTHIGPRTTRAQGISAEPQTYRSFHDLRQAFRKFTKSERSKDLIKEAILDNDFMKNLELSQIQEIVDCMYPVEYGKDSCIIKEGDVGSLVYVMEDGKVEVTKEGVKLCTMGPGKVFGELAILYNCTRTATVKTLVNVKLWAIDRQCFQTIMMRTGLIKHTEYMEFLKSVPTFQSLPEEILSKLADVLEETHYENGEYIIRQGARGDTFFIISKGTVNVTREDSPSEDPVFLRTLGKGDWFGEKALQGEDVRTANVIAAEAVTCLVIDRDSFKHLIGGLDDVSNKAYEDAEAKAKYEAEAAFFANLKLSDFNIIDTLGVGGFGRVELVQLKSEESKTFAMKILKKRHIVDTRQQEHIRSEKQIMQGAHSDFIVRLYRTFKDSKYLYMLMEACLGGELWTILRDRGSFEDSTTRFYTACVVEAFAYLHSKGIIYRDLKPENLILDHRGYAKLVDFGFAKKIGFGKKTWTFCGTPEYVAPEIILNKGHDISADYWSLGILMYELLTGSPPFSGPDPMKTYNIILRGIDMIEFPKKIAKNAANLIKKLCRDNPSERLGNLKNGVKDIQKHKWFEGFNWEGLRKGTLTPPIIPSVASPTDTSNFDSFPEDNDEPPPDDNSGWDIDF

SEQ ID NO: 29048 - protein, 686 aa, Homo sapiens
MGTLRDLQYALQEKIEELRQRDALIDELELELDQKDELIQKLQNELDKYRSVIRPATQQAQKQSASTLQGEPRTKRQAISAEPTAFDIQDLSHVTLPFYPKSPQSKDLIKEAILDNDFMKNLELSQIQEIVDCMYPVEYGKDSCIIKEGDVGSLVYVMEDGKVEVTKEGVKLCTMGPGKVFGELAILYNCTRTATVKTLVNVKLWAIDRQCFQTIMMRTGLIKHTEYMEFLKSVPTFQSLPEEILSKLADVLEETHYENGEYIIRQGARGDTFFIISKGTVNVTREDSPSEDPVFLRTLGKGDWFGEKALQGEDVRTANVIAAEAVTCLVIDRDSFKHLIGGLDDVSNKAYEDAEAKAKYEAEAAFFANLKLSDFNIIDTLGVGGFGRVELVQLKSEESKTFAMKILKKRHIVDTRQQEHIRSEKQIMQGAHSDFIVRLYRTFKDSKYLYMLMEACLGGELWTILRDRGSFEDSTTRFYTACVVEAFAYLHSKGIIYRDLKPENLILDHRGYAKLVDFGFAKKIGFGKKTWTFCGTPEYVAPEIILNKGHDISADYWSLGILMYELLTGSPPFSGPDPMKTYNIILRGIDMIEFPKKIAKNAANLIKKLCRDNPSERLGNLKNGVKDIQKHKWFEGFNWEGLRKGTLTPPIIPSVASPTDTSNFDSFPEDNDEPPPDDNSGWDIDF

SEQ ID NO: 29049 - protein, 389 aa, Homo sapiens
MEKQNMFLHGSYILREDVRTANVIAAEAVTCLVIDRDSFKHLIGGLDDVSNKAYEDAEAKAKYEAEAAFFANLKLSDFNIIDTLGVGGFGRVELVQLKSEESKTFAMKILKKRHIVDTRQQEHIRSEKQIMQGAHSDFIVRLYRTFKDSKYLYMLMEACLGGELWTILRDRGSFEDSTTRFYTACVVEAFAYLHSKGIIYRDLKPENLILDHRGYAKLVDFGFAKKIGFGKKTWTFCGTPEYVAPEIILNKGHDISADYWSLGILMYELLTGSPPFSGPDPMKTYNIILRGIDMIEFPKKIAKNAANLIKKLCRDNPSERLGNLKNGVKDIQKHKWFEGFNWEGLRKGTLTPPIIPSVASPTDTSNFDSFPEDNDEPPPDDNSGWDIDF

SEQ ID NO: 29050 - protein, 1749 aa, Homo sapiens
MQAMDPAAADLYEEDGKDLDFYDFEPLPTLPEDEENVSLADILSLRDRGLSEQEAWAVCLECSLSMRSVAHAAIFQSLCITPDTLAFNTSGNVCFMEQLSDDPEGAFVPPEFDVTGNTFEAHIYSLGATLKAALEYVAEPTLEPRLSQDLEALLSRMQAEDPGDRPDLESIIALCEEKLQLTSSCRVCRSLSAVGRRVLSIESFGALQDVSESSWRERPAPGNAGPRRPPGDPSTDPEVLPTPEGPESETSRGPRASPTKALLSTPVRNGESHSREGLAGLVLDAERTLGELDRDALRRSRLRKVQTFPRLLSDSPEATLCLPLTRGKSQLPISELFSPDPRKAFLDRKNGLSSFQAQPKCRLWPEQEPEHQLGRVPCAGRSTDRGPGVPGSPGQPETSHPSQGPAEAPADPRDASGEAQTPRDDERIPEGARQLESAAAEQWVSLQDLLSQLGRPFREYELWALCLACLRALQTRPEHPAYLCLDSVLVAEDGAVLFQPPPANGSYDSFFLAPELAEERLVTEKASVYCVAAVLWTAAKFSVPRNHKLALPRRLKTLLLDMARRSAPERPSAAEAIKVCGSYLLQRGMDSRKILAHLRASICQVYQEEETISLQNAFSVVELKPSVAPAPEPSPGFLPVNSDTGLVAVPGPVPGQHPCGEEATQLPAAFTSEATHFKPIVLAQNASVARDQPALAQEESEERGGQREGEGEEKLSLEAHAGSPSLKTPDGPVPGPGPQGAAPEPLGASVQRDSAQGRPCPPPQAPANQPEGASSAAPGSPVPAPPTKASALPVEQGPAEPIPPGVASGGLRPDALGPTTAHHGPRHPPKPPRSKATERPGQEPEGPGATPAGERDDQSPDSVPERPRPADRRLCLPCVDASPLPGRTACPSLQEATRLIQEEFAFDGYLDNGLEALIMGEYIFALKDLTFATFCGAISEKFCDLYWDEKLLQNLFKVVNGQASPSPSTAEEAGSQLEGSQSPRSPSSKRPSLHRLGKEKPAMARTSSRAPCSPTSVSDVDSDALSRGNFEVGFRPQRSVKAERAQQPEAGEDRRPAGGASDVEAVTRLARSKGVGPALSPGPAGFQSCSPGWCSAFYEADCFGADVHNYVKDLGRQQADGALPDAQSPELEQQLMMEKRNYRKTLKFYQKLLQKEKRNKGSDVKTMLSKLKGQLEEMKSRVQFLSLVKKYLQVMYAERWGLEPCTLPVIVNIAAAPCDTLDFSPLDESSSLIFYNVNKHPGGRQKARILQAGTPLGLMAYLYSSDAFLEGYVQQFLYTFRYFCTPHDFLHFLLDRINSTLTRAHQDPTSTFTKIYRRSLCVLQAWVEDCYAVDFPRNSGLLGKLEDFISSKILPLDGSAKHLLGLLEVGMDRRAEGNPRGTDLENPREAEEDARPFNALCKRLSEDGISRKSFPWRLPRGNGLVLPPHKERPYTIAAALPKPCFLEDFYGPCAKTSEKGPYFLTEYSTHQLFSQLTLLQQELFQKCHPVHFLNSRALGVMDKSTAIPKASSSESLSAKTCSLFLPNYVQDKYLLQLLRNADDVSTWVAAEIVTSHTSKLQVNLLSKFLLIAKSCYEQRNFATAMQILSGLEHLAVRQSPAWRILPAKIAEVMEELKAVEVFLKSDSLCLMEGRRFRAQPTLPSAHLLAMHIQQLETGGFTMTNGAHRWSKLRNIAKVVSQVHAFQENPYTFSPDPKLQSYLKQRIARFSGADISTLAADSRANFHQVSSEKHSRKIQDKLRRMKATFQ

SEQ ID NO: 29051 - protein, 1397 aa, Homo sapiens
MQAMDPAAADLYEEDGKDLDFYDFEPLPTLPEDEENVSLADILSLRDRGLSEQEAWAVCLECSLSMRSVAHAAIFQSLCITPDTLAFNTSGNVCFMEQLSDDPEGAFVPPEFDVTGNTFEAHIYSLGATLKAALEYVAEPTLEPRLSQDLEALLSRMQAEDPGDRPDLESIIALCEEKLQLTSSCRVCRSLSAVGRRVLSIESFGALQDVSESSWRERPAPGNAGPRRPPGDPSTDPEVLPTPEGPESETSRGPRASPTKALLSTPVRNGESHSREGLAGLVLDAERTLGELDRDALRRSRLRKVQTFPRLLSDSPEATLCLPLTRGKSQLPISELFSPDPRKAFLDRKNGLSSFQAQPKCRLWPEQEPEHQLGRVPCAGRSTDRGPGVPGSPGQPETSHPSQGPAEAPADPRDASGEAQTPRDDERIPEGARQLESAAAEQWVSLQDLLSQLGRPFREYELWALCLACLRALQTRPEHPAYLCLDSVLVAEDGAVLFQPPPANGSYDSFFLAPELAEERLVTEKASVYCVAAVLWTAAKFSVPRNHKLALPRRLKTLLLDMARRSAPERPSAAEAIKVCGSYLLQRGMDSRKILAHLRASICQVYQEEETISLQNAFSVVELKPSVAPAPEPSPGFLPVNSDTGLVAVPGPVPGQHPCGEEATQLPAAFTSEATHFKPIVLAQNASVARDQPALAQEESEERGGQREGEGEEKLSLEAHAGSPSLKTPDGPVPGPGPQGAAPEPLGASVQRDSAQGRPCPPPQAPANQPEGASSAAPGSPVPAPPTKASALPVEQGPAEPIPPGVASGGLRPDALGPTTAHHGPRHPPKPPRSKATERPGQEPEGPGATPAGERDDQSPDSVPERPRPADRRLCLPCVDASPLPGRTACPSLQEATRLIQEEFAFDGYLDNGLEALIMGEYIFALKDLTFATFCGAISEKFCDLYWDEKLLQNLFKVVNGQASPSPSTAEEAGSQLEGSQSPRSPSSKRPSLHRLGKEKPAMARTSSRAPCSPTSVSDVDSDALSRGNFEVGFRPQRSVKAERAQQPEAGEDRRPAGGASDVEAVTRLARSKGVGPALSPGPAGFQSCSPGWCSAFYEADCFGADVHNYVKDLGRQQADGALPDAQSPVSPRPWHCRVGQGVSFQQSFLVTAGDRWHRVPRAPNRVTLVLVPPPRGCQDGQGPLPGLSSTSRDRLVCTGAPGGSTSEDREGLFSHGRPGDGFTGGPSMLVTRLRSVVFSVGQAQPPGPWAASLCSERKHQKRLPSKSRLGLVAAAWSGLSGQQCHPGSGAAATPPWPAGRGGLRPGSPGCRRGLQSSGRKVGPVTHSPDLGCILESPGTPGWMTGGAQWPSAPGTSPTTVCLELSHRGKPPPASGHRSPSWGSSLLLSCRLLACTL

SEQ ID NO: 29052 - protein, 642 aa, Homo sapiens
MQPRSERPAGRTQSPEHGSPGPGPEAPPPPPPQPPAPEAERTRPRQARPAAPMEGAVQLLSREGHSVAHNSKRHYHDAFVAMSRMRQRGLLCDIVLHVAAKEIRAHKVVLASCSPYFHAMFTNEMSESRQTHVTLHDIDPQALDQLVQFAYTAEIVVGEGNVQTLLPAASLLQLNGVRDACCKFLLSQLDPSNCLGIRGFADAHSCSDLLKAAHRYVLQHFVDVAKTEEFMLLPLKQVLELVSSDSLNVPSEEEVYRAVLSWVKHDVDARRQHVPRLMKCVRLPLLSRDFLLGHVDAESLVRHHPDCKDLLIEALKFHLLPEQRGVLGTSRTRPRRCEGAGPVLFAVGGGSLFAIHGDCEAYDTRTDRWHVVASMSTRRARVGVAAVGNRLYAVGGYDGTSDLATVESYDPVTNTWQPEVSMGTRRSCLGVAALHGLLYSAGGYDGASCLNSAERYDPLTGTWTSVAAMSTRRRYVRVATLDGNLYAVGGYDSSSHLATVEKYEPQVNVWSPVASMLSRRSSAGVAVLEGALYVAGGNDGTSCLNSVERYSPKAGAWESVAPMNIRRSTHDLVAMDGWLYAVGGNDGSSSLNSIEKYNPRTNKWVAASCMFTRRSSVGVAVLELLNFPPPSSPTLSVSSTSL

SEQ ID NO: 29053 - protein, 837 aa, Homo sapiens
MAEPSQAPTPAPAAQPRPLQSPAPAPTPTPAPSPASAPIPTPTPAPAPAPAAAPAGSTGTGGPGVGSGGAGSGGDPARPGLSQQQRASQRKAQVRGLPRAKKLEKLGVFSACKANETCKCNGWKNPKPPTAPRMDLQQPAANLSELCRSCEHPLADHVSHLENVSEDEINRLLGMVVDVENLFMSVHKEEDTDTKQVYFYLFKLLRKCILQMTRPVVEGSLGSPPFEKPNIEQGVLNFVQYKFSHLAPRERQTMFELSKMFLLCLNYWKLETPAQFRQRSQAEDVATYKVNYTRWLCYCHVPQSCDSLPRYETTHVFGRSLLRSIFTVTRRQLLEKFRVEKDKLVPEKRTLILTHFPKFLSMLEEEIYGANSPIWESGFTMPPSEGTQLVPRPASVSAAVVPSTPIFSPSMGGGSNSSLSLDSAGAEPMPGEKRTLPENLTLEDAKRLRVMGDIPMELVNEVMLTITDPAAMLGPETSLLSANAARDETARLEERRGIIEFHVIGNSLTPKANRRVLLWLVGLQNVFSHQLPRMPKEYIARLVFDPKHKTLALIKDGRVIGGICFRMFPTQGFTEIVFCAVTSNEQVKGYGTHLMNHLKEYHIKHNILYFLTYADEYAIGYFKKQGFSKDIKVPKSRYLGYIKDYEGATLMECELNPRIPYTELSHIIKKQKEIIKKLIERKQAQIRKVYPGLSCFKEGVRQIPVESVPGIRETGWKPLGKEKGKELKDPDQLYTTLKNLLAQIKSHPSAWPFMEPVKKSEAPDYYEVIRFPIDLKTMTERLRSRYYVTRKLFVADLQRVIANCREYNPPDSEYCRCASALEKFFYFKLKEGGLIDK

SEQ ID NO: 29054 - protein, 427 aa, Homo sapiens
MGGGSNSSLSLDSAGAEPMPGEKRTLPENLTLEDAKRLRVMGDIPMELVNEVMLTITDPAAMLGPETSLLSANAARDETARLEERRGIIEFHVIGNSLTPKANRRVLLWLVGLQNVFSHQLPRMPKEYIARLVFDPKHKTLALIKDGRVIGGICFRMFPTQGFTEIVFCAVTSNEQVKGYGTHLMNHLKEYHIKHNILYFLTYADEYAIGYFKKQGFSKDIKVPKSRYLGYIKDYEGATLMECELNPRIPYTELSHIIKKQKEIIKKLIERKQAQIRKVYPGLSCFKEGVRQIPVESVPGIRETGWKPLGKEKGKELKDPDQLYTTLKNLLAQIKSHPSAWPFMEPVKKSEAPDYYEVIRFPIDLKTMTERLRSRYYVTRKLFVADLQRVIANCREYNPPDSEYCRCASALEKFFYFKLKEGGLIDK

SEQ ID NO: 29055 - protein, 123 aa, Homo sapiens
MSTLSNFTQTLEDVFRRIFITYMDNWRQNTTAEQEALQAKVDAENFYYVILYLMVMIGMFSFIIVAILVSTVKSKRREHSNDPYHQYIVEDWQEKYKSQILNLEESKATIHENIGAAGFKMSP

SEQ ID NO: 29056 - protein, 492 aa, Homo sapiens
MNRIRIHVLPTNRGRITPVPRSQEPLSCAFTHRPCSHPRLEGQEFCIKHILEDKNAPFKQCSYISTKNGKRCPNAAPKPEKKDGVSFCAEHVRRNALALHAQMKKTNPGPVGETLLCQLSSYAKTELGSQTPESSRSEASRILDEDSWSDGEQEPITVDQTWRGDPDSEADSIDSDQEDPLKHAGVYTAEEVALIMREKLIRLQSLYIDQFKRLQHLLKEKKRRYLHNRKVEHEALGSSLLTGPEGLLAKERENLKRLKCLRRYRQRYGVEALLHRQLKERRMLATDGAAQQAHTTRSSQRCLAFVDDVRCSNQSLPMTRHCLTHICQDTNQVLFKCCQGSEEVPCNKPVPVSLSEDPCCPLHFQLPPQMYKPEQVLSVPDDLEAGPMDLYLSAAELQPTESLPLEFSDDLDVVGDGMQCPPSPLLFDPSLTLEDHLVKEIAEDPVDILGQMQMAGDGCRSQGSRNSEKASAPLSQSGLATANGKPEPTSIS

SEQ ID NO: 29057 - protein, 155 aa, Homo sapiens
MNRIRIHVLPTNRGRITPVPRSQEPLSCAFTHRPCSHPRLEGQEFCIKHILEDKNAPFKQCSYISTKNGKRCPNAAPKPEKKDGVSFCAEHVRRNALALHAQMKKTNPGPVGETLLCQLSSYAKTELGSQTPESSRSEASRILDMLVSTQQKKWP

SEQ ID NO: 29058 - protein, 443 aa, Homo sapiens
MQRRDDPAARMSRSSGRSGSMDPSGAHPSVRQTPSRQPPLPHRSRGGGGGSRGGARASPATQPPPLLPPSATGPDATVGGPAPTPLLPPSATASVKMEPENKYLPELMAEKDSLDPSFTHAMQLLTAEIEKIQKGDSKKDDEENYLDLFSHKNMKLKERVLIPVKQYPKFNFVGKILGPQGNTIKRLQEETGAKISVLGKGSMRDKAKEEELRKGGDPKYAHLNMDLHVFIEVFGPPCEAYALMAHAMEEVKKFLVPDMMDDICQEQFLELSYLNGVPEPSRGRGVPVRGRGAAPPPPPVPRGRGVGPPRGALVRGTPVRGAITRGATVTRGVPPPPTVRGAPAPRARTAGIQRIPLPPPPAPETYEEYGYDDTYAEQSYEGYEGYYSQSQGDSEYYDYGHGEVQDSYEAYGQDDWNGTRPSLKAPPARPVKGAYREHPYGRY

SEQ ID NO: 29059 - protein, 418 aa, Homo sapiens
MQRRDDPAARMSRSSGRSGSMDPSGAHPSVRQTPSRQPPPLLPPSATGPDATVGGPAPTPLLPPSATASVKMEPENKYLPELMAEKDSLDPSFTHAMQLLTAEIEKIQKGDSKKDDEENYLDLFSHKNMKLKERVLIPVKQYPKFNFVGKILGPQGNTIKRLQEETGAKISVLGKGSMRDKAKEEELRKGGDPKYAHLNMDLHVFIEVFGPPCEAYALMAHAMEEVKKFLVPDMMDDICQEQFLELSYLNGVPEPSRGRGVPVRGRGAAPPPPPVPRGRGVGPPRGALVRGTPVRGAITRGATVTRGVPPPPTVRGAPAPRARTAGIQRIPLPPPPAPETYEEYGYDDTYAEQSYEGYEGYYSQSQGDSEYYDYGHGEVQDSYEAYGQDDWNGTRPSLKAPPARPVKGAYREHPYGRY

SEQ ID NO: 29060 - protein, 404 aa, Homo sapiens
MQRRDDPAARMSRSSGRSGSMDPSGAHPSVRQTPSRQPPLPHRSRGGGGGSRGGARASPATQPPPLLPPSATGPDATVGGPAPTPLLPPSATASVKMEPENKYLPELMAEKDSLDPSFTHAMQLLTAEIEKIQKGDSKKDDEENYLDLFSHKNMKLKERVLIPVKQYPKEEELRKGGDPKYAHLNMDLHVFIEVFGPPCEAYALMAHAMEEVKKFLVPDMMDDICQEQFLELSYLNGVPEPSRGRGVPVRGRGAAPPPPPVPRGRGVGPPRGALVRGTPVRGAITRGATVTRGVPPPPTVRGAPAPRARTAGIQRIPLPPPPAPETYEEYGYDDTYAEQSYEGYEGYYSQSQGDSEYYDYGHGEVQDSYEAYGQDDWNGTRPSLKAPPARPVKGAYREHPYGRY

SEQ ID NO: 29061 - protein, 587 aa, Homo sapiens
MEGESVKLSSQTLIQAGDDEKNQRTITVNPAHMGKAFKVMNELRSKQLLCDVMIVAEDVEIEAHRVVLAACSPYFCAMFTGDMSESKAKKIEIKDVDGQTLSKLIDYIYTAEIEVTEENVQVLLPAASLLQLMDVRQNCCDFLQSQLHPTNCLGIRAFADVHTCTDLLQQANAYAEQHFPEVMLGEEFLSLSLDQVCSLISSDKLTVSSEEKVFEAVISWINYEKETRLEHMAKLMEHVRLPLLPRDYLVQTVEEEALIKNNNTCKDFLIEAMKYHLLPLDQRLLIKNPRTKPRTPVSLPKVMIVVGGQAPKAIRSVECYDFEEDRWDQIAELPSRRCRAGVVFMAGHVYAVGGFNGSLRVRTVDVYDGVKDQWTSIASMQERRSTLGAAVLNDLLYAVGGFDGSTGLASVEAYSYKTNEWFFVAPMNTRRSSVGVGVVEGKLYAVGGYDGASRQCLSTVEQYNPATNEWIYVADMSTRRSGAGVGVLSGQLYATGGHDGPLVRKSVEVYDPGTNTWKQVADMNMCRRNAGVCAVNGLLYVVGGDDGSCNLASVEYYNPVTDKWTLLPTNMSTGRSYAGVAVIHKSL

SEQ ID NO: 29062 - protein, 555 aa, Homo sapiens
MGKAFKVMNELRSKQLLCDVMIVAEDVEIEAHRVVLAACSPYFCAMFTGDMSESKAKKIEIKDVDGQTLSKLIDYIYTAEIEVTEENVQVLLPAASLLQLMDVRQNCCDFLQSQLHPTNCLGIRAFADVHTCTDLLQQANAYAEQHFPEVMLGEEFLSLSLDQVCSLISSDKLTVSSEEKVFEAVISWINYEKETRLEHMAKLMEHVRLPLLPRDYLVQTVEEEALIKNNNTCKDFLIEAMKYHLLPLDQRLLIKNPRTKPRTPVSLPKVMIVVGGQAPKAIRSVECYDFEEDRWDQIAELPSRRCRAGVVFMAGHVYAVGGFNGSLRVRTVDVYDGVKDQWTSIASMQERRSTLGAAVLNDLLYAVGGFDGSTGLASVEAYSYKTNEWFFVAPMNTRRSSVGVGVVEGKLYAVGGYDGASRQCLSTVEQYNPATNEWIYVADMSTRRSGAGVGVLSGQLYATGGHDGPLVRKSVEVYDPGTNTWKQVADMNMCRRNAGVCAVNGLLYVVGGDDGSCNLASVEYYNPVTDKWTLLPTNMSTGRSYAGVAVIHKSL

SEQ ID NO: 29063 - protein, 505 aa, Homo sapiens
MSESKAKKIEIKDVDGQTLSKLIDYIYTAEIEVTEENVQVLLPAASLLQLMDVRQNCCDFLQSQLHPTNCLGIRAFADVHTCTDLLQQANAYAEQHFPEVMLGEEFLSLSLDQVCSLISSDKLTVSSEEKVFEAVISWINYEKETRLEHMAKLMEHVRLPLLPRDYLVQTVEEEALIKNNNTCKDFLIEAMKYHLLPLDQRLLIKNPRTKPRTPVSLPKVMIVVGGQAPKAIRSVECYDFEEDRWDQIAELPSRRCRAGVVFMAGHVYAVGGFNGSLRVRTVDVYDGVKDQWTSIASMQERRSTLGAAVLNDLLYAVGGFDGSTGLASVEAYSYKTNEWFFVAPMNTRRSSVGVGVVEGKLYAVGGYDGASRQCLSTVEQYNPATNEWIYVADMSTRRSGAGVGVLSGQLYATGGHDGPLVRKSVEVYDPGTNTWKQVADMNMCRRNAGVCAVNGLLYVVGGDDGSCNLASVEYYNPVTDKWTLLPTNMSTGRSYAGVAVIHKSL

SEQ ID NO: 29064 - protein, 367 aa, Homo sapiens
MYPESTTGSPARLSLRQTGSPGMIYSTRYGSPKRQLQFYRNLGKSGLRVSCLGLGTWVTFGGQITDEMAEQLMTLAYDNGINLFDTAEVYAAGKAEVVLGNIIKKKGWRRSSLVITTKIFWGGKAETERGLSRKHIIEGLKASLERLQLEYVDVVFANRPDPNTPMEETVRAMTHVINQGMAMYWGTSRWSSMEIMEAYSVARQFNLTPPICEQAEYHMFQREKVEVQLPELFHKIGVGAMTWSPLACGIVSGKYDSGIPPYSRASLKGYQWLKDKILSEEGRRQQAKLKELQAIAERLGCTLPQLAIAWCLRNEGVSSVLLGASNADQLMENIGAIQVLPKLSSSIIHEIDSILGNKPYSKKDYRS

SEQ ID NO: 29065 - protein, 353 aa, Homo sapiens
MYPESTTGSPARLSLRQTGSPGMIYRNLGKSGLRVSCLGLGTWVTFGGQITDEMAEQLMTLAYDNGINLFDTAEVYAAGKAEVVLGNIIKKKGWRRSSLVITTKIFWGGKAETERGLSRKHIIEGLKASLERLQLEYVDVVFANRPDPNTPMEETVRAMTHVINQGMAMYWGTSRWSSMEIMEAYSVARQFNLTPPICEQAEYHMFQREKVEVQLPELFHKIGVGAMTWSPLACGIVSGKYDSGIPPYSRASLKGYQWLKDKILSEEGRRQQAKLKELQAIAERLGCTLPQLAIAWCLRNEGVSSVLLGASNADQLMENIGAIQVLPKLSSSIIHEIDSILGNKPYSKKDYRS

SEQ ID NO: 29066 - protein, 415 aa, Homo sapiens
MLSMTYSESLRSVSSRCHSEWALHPVRQTDTLELQRLREVRAAAQARNMESFLRMHGLSLDGCTAQRTGMKYRNLGKSGLRVSCLGLGTWVTFGGQITDEMAEQLMTLAYDNGINLFDTAEVYAAGKAEVVLGNIIKKKGWRRSSLVITTKIFWGGKAETERGLSRKHIIEGLKASLERLQLEYVDVVFANRPDPNTPMEGDPFSSSKSRTFIIEETVRAMTHVINQGMAMYWGTSRWSSMEIMEAYSVARQFNLTPPICEQAEYHMFQREKVEVQLPELFHKIGVGAMTWSPLACGIVSGKYDSGIPPYSRASLKGYQWLKDKILSEEGRRQQAKLKELQAIAERLGCTLPQLAIAWCLRNEGVSSVLLGASNADQLMENIGAIQVLPKLSSSIIHEIDSILGNKPYSKKDYRS

SEQ ID NO: 29067 - protein, 300 aa, Homo sapiens
MAEQLMTLAYDNGINLFDTAEVYAAGKAEVVLGNIIKKKGWRRSSLVITTKIFWGGKAETERGLSRKHIIEGLKASLERLQLEYVDVVFANRPDPNTPMEETVRAMTHVINQGMAMYWGTSRWSSMEIMEAYSVARQFNLTPPICEQAEYHMFQREKVEVQLPELFHKIGVGAMTWSPLACGIVSGKYDSGIPPYSRASLKGYQWLKDKILSEEGRRQQAKLKELQAIAERLGCTLPQLAIAWCLRNEGVSSVLLGASNADQLMENIGAIQVLPKLSSSIIHEIDSILGNKPYSKKDYRS

SEQ ID NO: 29068 - protein, 395 aa, Homo sapiens
MYPESTTGSPARLSLRQTGSPGMIYSTRYGSPKRQLQFYRNLGKSGLRVSCLGLGTWVTFGGQITDEMAEQLMTLAYDNGINLFDTAEVYAAGKAEVVLGNIIKKKGWRRSSLVITTKIFWGGKAETERGLSRKHIIEGLKASLERLQLEYVDVVFANRPDPNTPMEETVRAMTHVINQGMAMYWGTSRWSSMEIMEAYSVARQFNLTPPICEQAEYHMFQREKVEVQLPELFHKIGVGAMTWSPLACGIVSGKYDSGIPPYSRASLKGYQWLKDKILSEEGRRQQAKLKELQAIAERLGCTLPQLAIAWCLRNEGVSSVLLGASNADQLMENIGAIQVRVRGPAGQRAHPSPSPVQCILPGSSCVPGSVLGTQDAPVNHQSCAPGELAFQQEQT

SEQ ID NO: 29069 - protein, 404 aa, Homo sapiens
MQVSIACTEQNLRSRSSEDRLCGPRPGPGGGNGGPAGGGHGNPPGGGGSGPKARAALVPRPPAPAGALRESTGRGTGMKYRNLGKSGLRVSCLGLGTWVTFGSQISDETAEDVLTVAYEHGVNLFDTAEVYAAGKAERTLGNILKSKGWRRSSYVITTKIFWGGQAETERGLSRKHIIEGLRGSLERLQLGYVDIVFANRSDPNCPMEEIVRAMTYVINQGLALYWGTSRWGAAEIMEAYSMARQFNLIPPVCEQAEHHLFQREKVEMQLPELYHKIGVGSVTWYPLACGLITSKYDGRVPDTCRASIKGYQWLKDKVQSEDGKKQQAKVMDLLPVAHQLGCTVAQLAIAWCLRSEGVSSVLLGVSSAEQLIEHLGALQVLSQLTPQTVMEIDGLLGNKPHSKK

SEQ ID NO: 29070 - protein, 121 aa, Homo sapiens
MVLQTQVFISLLLWISGAYGDIVMTQSPDSLAVSLGERATINCKSSQSVLYSSNNKNYLAWYQQKPGQPPKLLIYWASTRESGVPDRFSGSGSGTDFTLTISSLQAEDVAVYYCQQYYSTP

SEQ ID NO: 29071 - protein, 1468 aa, Homo sapiens
MTRMSCPWGSYQWEPGACPAAPRGIGGGDMAGGIPDVRGLQEAALGAGRSQEEARLVEEAQTPVMLPQDSGQRVEEVPGDLMAKRMSLILHVQKLPWDHVPCLRRTRQNLYQDVGGHAHGSGLGGAKRGAARSALRRPLPPATCRPAGIVSGPSPRLDSNPTGAHLIKQTRPLTVEWTKDTPVPEPMELRSDASHKENVSPKPAALPKPGKRLKQRRFRRSLGIGLSGRHDQWVPGCQVERGGPAATPSPGAVLDQEPCRVQTNLASPGPRLGLALKDTTGQLVNSSFWQQSNLQSLARRRQGKAREFAIQQSNLSINETSSPHLCPEPGGSSGPHKLPWGPLLSQEPLARPSSCLRQSGLPAPGTPSGDFRPTEAFAPLDGHTQPGLRSWGGLGSWRSRLVGEPLTLEDLAVPSQNQTQAPSRAAVHQLLASVHCLAQEAARLRCQAPQEPPAWGVSPKQKGEEGAPRERVHREEERTAFHLSDTVPASSASKNKAQNITAPESEAICWQLLSRCFRSWRHLVKRQREPAAAAVALGRWQLLRKCLQALWLREAQLEAAWGQYTKVLLVRSFREVSGLQVGPGGRVKQCPGSLREEEIAQRLLSHPRQRTDSRHERVQILQALQLAVFFLWCQQKKRARQERETLRKATRATQRTGSFPQAWHSTAAGVAWVAPLSPQHQRAWLCRCFGAWQQFVQRGSRYRDHLADRRTGTLRKCLEQWVRMKQLRESDGAKVTQLSLCRQKAGREAVYTAGPGACGLGAVGQAQGQQEQGRGSLQDACWTLALCWALLLWKMRLFQRQWANSFFQGLQQRMLQRSLRWWHLRALGPDATSSCTKTPSALEPLSSSTLQDSLEKVPRAPTLPDTLQGSLLWAAGQRQQGQCLLLWQARAQQFQGTARWYQHTRQRRIFLSWSRWATAQWAWRELASHRAWDRTCRAVLGLWRQRLLQSRLVEWWAQERGWRLARDALCHWHSCWQGQQFLHEKCQTWVQVHLQGLQKVVFRSWQQAAAHQRCTVTRPEQLLLQSYFQAWCEVVRDTGVLRAQHQAFQDGLRRRALGAVFATWREAQEVAAGAQEQRVAQASLARWRSCGQQGQEDGQQKKARAPQAFPAWPVAPGMHHEAQQQAGESAGAQAAQCWTWCWALWVHESCRGQVSRAHASWKPRAWVLEASVQSAVRGGVQRAILTQLRPAELRRFLRTVQLRVRLGLPGAGKTRSCWTQATELVPPAPSLQCSLGGRRKPRGTAWAQRCREHSLCPAFQLWPQWPGQSSWVPGLPLWTRDQGPRAHSSPEPRACKAQSKAHKRRLRILEKQAQAHGSALLLALKGHDALGHQEEVPAAPVPRGTASRAAGFPAGQVPGSGMAALGGCPRGRAAGADPAQGVAPEMGLADVVAADPATASGSAVTAAGRWAFKKWHQRLAARSPRRGAASSPRPWSKPGPKGPESGQEAARAPRGWGLGAEHGAQLQL

SEQ ID NO: 29072 - protein, 1473 aa, Homo sapiens
MTRMSCPWGSYQWEPGACPAAPRGIGGGDMAGGIPDVRGLQEAALGAGRSQEEARLVEEAQTPVMLPQDSGQRVEEVPGDLMAKRMSLILHVQKLPWDHVPCLRRTRQNLYQDVGGHAHGSGLGGAKRGAARSALRRPLPPATCRPAGIVSGPSPRLDSNPTGAHLIKQTRPLTVEWTKDTPVPEPMELRSDASHKENVSPKPAALPKPGKRLKQRRFRRSLGIGLSGRHDQWVPGCQVERGGPAATPSPGAVLDQEPCRVQTNLASPGPRLGLALKDTTGQLVNSSFWQQSNLQSLARRRQGKAREFAIQQSNLSINETSSPHLCPEPGGSSGPHKLPWGPLLSQEPLARPSSCLRQSGLPAPGTPSGDFRPTEAFAPLDGHTQPGLRSWGGLGSWRSRLVGEPLTLEDLAVPSQNQTQAPSRAAVHQLLASVHCLAQEAARLRCQAPQEPPAWGVSPKQKGEEGAPRERVHREEERTAFHLSDTVPASSASKNKAQNITAPESEAICWQLLSRCFRSWRHLVKRQREPAAAAVALGRWQLLRKCLQALWLREAQLEAAWGQYTKVLLVRSFREVSGLQVGPGGRVKQCPGSLREEEIAQRLLSHPRQRTDSRHERVQILQALQLAVFFLWCQQKKRARQERETLRKATRATQRTGSFPQAWHSTAAGVAWVAPLSPQHQRAWLCRCFGAWQQFVQRGSRYRDHLADRRTGTLRKCLEQWVRMKQLRESDGAKVTQLSLCRQKAGREAVYTAGPGACGLGAVGQAQGQQEQGRGSLQDACWTLALCWALLLWKMRLFQRQWANSFFQGLQQRMLQRSLRWWHLRALGPDATSSCTKTPSALEPLSSSTLQDSLEKVPRAPTLPDTLQGSLLWAAGQRQQGQCLLLWQARAQQFQGTARWYQHTRQRRIFLSWSRWATAQWAWRELASHRAWDRTCRAVLGLWRQRLLQSRLVEWWAQERGWRLARDALCHWHSCWQGQQFLHEKCQTWVQVHLQGLQKVVFRSWQQAAAHQRCTVTRPEQLLLQSYFQAWCEVVRDTGVLRAQHQAFQDGLRRRALGAVFATWREAQEVAAGAQEQRVAQASLARWRSCGQQGQEDGQQKKARAPQAFPAWPVAPGMHHEAQQQAGESAGAQAAQCWTWCWALWVHESCRGQVSRAHASWKPRAWVLEASVQSAVRGGVQRAILTQLRPAELRRFLRTVQLRVRLGLPGAGKTRSCWTQATELVPPAPSLQCSLGGRRKPRGTAWAQRCREHSLCPAFQLWPQWPGQSSWVPGLPLWTRDQGPRAHSSPEPRACKAQSKAHKRRLRARSCRILEKQAQAHGSALLLALKGHDALGHQEEVPAAPVPRGTASRAAGFPAGQVPGSGMAALGGCPRGRAAGADPAQGVAPEMGLADVVAADPATASGSAVTAAGRWAFKKWHQRLAARSPRRGAASSPRPWSKPGPKGPESGQEAARAPRGWGLGAEHGAQLQL

SEQ ID NO: 29073 - protein, 538 aa, Homo sapiens
MVELVISPSLTVNSDCLDKLKFNRADAAVWTLSDRQGITKSAPLRVSQLFSRSCPRVLPRQPSTAMAAYGQTQYSAGIQQATPYTAYPPPAQAYGIPSYSIKTEDSLNHSPGQSGFLSYGSSFSTSPTGQSPYTYQMHGTTGFYQGGNGLGNAAGFGSVHQDYPSYPGFPQSQYPQYYGSSYNPPYVPASSICPSPLSTSTYVLQEASHNVPNQSSESLAGEYNTHNGPSTPAKEGDTDRPHRASDGKLRGRSKRSSDPSPAGDNEIERVFVWDLDETIIIFHSLLTGTFASRYGKDTTTSVRIGLMMEEMIFNLADTHLFFNDLEDCDQIHVDDVSSDDNGQDLSTYNFSADGFHSSAPGANLCLGSGVHGGVDWMRKLAFRYRRVKEMYNTYKNNVGGLIGTPKRETWLQLRAELEALTDLWLTHSLKALNLINSRPNCVNVLVTTTQLIPALAKVLLYGLGSVFPIENIYSATKTGKESCFERIMQRFGRKAVYVVIGDGVEEEQGAKKHNMPFWRISCHADLEALRHALELEYL

SEQ ID NO: 29074 - protein, 514 aa, Homo sapiens
MVELVISPSLTVNSDCLDKLKFNRADAAVWTLSDRQGITKSAPLRVSQLFSRSCPRVLPRQPSTAMAAYGQTQYSAGIQQATPYTAYPPPAQAYGIPSFSTSPTGQSPYTYQMHGTTGFYQGGNGLGNAAGFGSVHQDYPSYPGFPQSQYPQYYGSSYNPPYVPASSICPSPLSTSTYVLQEASHNVPNQSSESLAGEYNTHNGPSTPAKEGDTDRPHRASDGKLRGRSKRSSDPSPAGDNEIERVFVWDLDETIIIFHSLLTGTFASRYGKDTTTSVRIGLMMEEMIFNLADTHLFFNDLEDCDQIHVDDVSSDDNGQDLSTYNFSADGFHSSAPGANLCLGSGVHGGVDWMRKLAFRYRRVKEMYNTYKNNVGGLIGTPKRETWLQLRAELEALTDLWLTHSLKALNLINSRPNCVNVLVTTTQLIPALAKVLLYGLGSVFPIENIYSATKTGKESCFERIMQRFGRKAVYVVIGDGVEEEQGAKKHNMPFWRISCHADLEALRHALELEYL

SEQ ID NO: 29075 - protein, 459 aa, Homo sapiens
MVELVISPSLTVNSDCLDKLKFNRADAAVWTLSDRQGITKSAPLRVSQLFSRSCPRVLPRQPSTAMAAYGQTQYSAGIQQATPYTAYPPPAQAYGIPSYSIKTEDSLNHSPGQSGFLSYGSSFSTSPTGQSPYTYQMHGTTGFYQGGNGLGNAAGFGSVHQDYPSYPGFPQSQYPQYYGSSYNPPYVPASSICPSPLSTSTYVLQEASHNVPNQSSESLAGEYNTHNGPSTPAKEGDTDRPHRASDGKLRGRSKRSSDPSPAGDNEIERVFVWDLDETIIIFHSLLTGTFASRYGKDTTTSVRIGLMMEEMIFNLADTHLFFNDLEDCDQIHVDDVSSDDNGQDLSTYNFSADGFHSSAPGANLCLGSGVHGGVDWMRKLAFRYRRVKEMYNTYKNNVGGKESCFERIMQRFGRKAVYVVIGDGVEEEQGAKKHNMPFWRISCHADLEALRHALELEYL

SEQ ID NO: 29076 - protein, 2579 aa, Homo sapiens
MAEAVKPQRRAKAKASRTKTKEKKKYETPQREESSEVSLPKTSREQEIPSLACEFKGDHLKVVTDSQLQDDASGQNESEMFDVPLTSLTISNEESLTCNTEPPKEGGEARPCVGDSAVTPKVHPGDNVGTKVETPKNFTEVEENMSVQGGLSESAPQSNFSYTQPAMENIQVRETQNSKEDKQGLVCSSEVPQNVGLQSSCPAKHGFQTPRVKKLYPQLPAEIAGEAPALVAVKPLLRSERLYPELPSQLELVPFTKEQLKILEPGSWLENVESYLEEFDSMAHQDRHEFYELLLNYSRCRKQLLLAEAELLTLTSDCQNAKSRLWQFKEEQMSVQGICADQVKVFSYHRYQRVEMNENALVELKKLFDAKSEHLHQTLALHSYTSVLSRLQVESYIYALLSSSAVLRSSAIHQQGRASKQTESIPSDLCQLKECISVLFMFTRRVNEDTQFHDDILLWLQKLVSVLQRVGCPGDHLFLLNHILRCPAGVSKWAVPFIQIKVLHNPSGVFHFMQSLALLMSPVKNRAEFMCHMKPSERKPSSSGPGSGTWTLVDEGGEEDEDPETSWILLNEDDLVTILAQFPFHELFQHLLGFKAKGDYLPETTRPQEMMKIFAFANSLVELLAVGLETFNRARYRQFVKRIGYMIRMTLGYVSDHWAQYVSHNQGSGLAQQPYSMEKLQVEFDELFLRAVLHVLKAKRLGIWLFMSEMPFGTLSVQMLWKLFYLMHQVESENLQQLSSSLQPAQCKQQLQDPEHFTNFEKCLSSMNSSEEICLLTTFAQMAQARRTNVDEDFIKIIVLEIYEVSYVTLSTRETFSKVGRELLGTITAVHPEIISVLLDRVQETIDQVGMVSLYLFKELPLYLWQPSASEIAVIRDWLLNYNLTVVKNKLACVILEGLNWGFAKQATLHLDQAVHAEVALMVLEAYQKYLAQKPYAGILSESMKQVSYLASIVRYGETPETSFNQWAWNLILRLKLHKNDYGIQPNCPAVPFSVTVPDMTESPTFHPLLKAVKAGMPIGCYLALSMTAVGHSIEKFCAEGIPLLGILVQSRHLRTVVHVLDKILPLFYPCQYYLLKNEQFLSHLLLFLHLDSGVPQGVTQQVTHKVAQHLTGASHGDNVKLLNSMIQAHISVSTQPNEVGPVAVLEFWVQALISQHLWYREQPILFLMDHLCKAAFQLMQEDCIQKLLYQQHKNALGYHCDRSLLSSLVSWIVAGNITPSFVEGLATPTQVWFAWTVLNMESIFEEDSQLRRVIEGELVINSAFTPDQALKKAQTQLKLPIVPSLQRLLIYRWAHQALVTPSDHPLLPLIWQKFFLLYLHRPGPQYGLPIDGCIGRRFFQSPAHINLLKEMKRRLTEVADFHHAASKALRVPAEGSEGLPESHSGTPGYLTSPELHKELVRLFNVYILWLEDENFQKGDTYIPSLPKHYDIHRLAKVMQNQQDLWMEYLNMERIYHEFQETVGLWTQAKLESHSTPCSLSVQLDFTDPLLAKERVLSNLRKHEAPQPPLALHPTKPPVPVISSAVLLSQKDATQLVCTDLNLLQQQARTAALRESQQVALDGELLDTMPKQYVNREEQTTLHLECRGSSGKKCQGAAVVTVQFEGMHKNEAISQQLHVLRKEVKQLQAEAAKPPSLNIVEAAVHAENLITALVNAYKLQPTPGIQKVGISLFFTIVDYVSDETQRHPPTRQFFTSCIEILGQVFISGIKSECRKVLETILKNSRLCSLLSPFFTPNAAPAEFIQLYEQVVKFLSEDNSDMIFMLLTKFDLKQWLSATKPPLSDRTRLLESIHLALTAWGLEPDEDILMPFNLFCKHWTYLLLYQFPDQYSDILRLLMQSSAEQLLSPECWKATLRALGCCAPSCQQGAASTEGAVLPSSSDALLSDKQVMETIQWLSDFFYKLRLSKMDFKSFGLFSKWSPYMADVKTFLGYLVKRLIDLEMTCLAQDPTASRKTVLKSLHSVIIQLFKPWILVLEDNESSQQRHYPWLESDTVVASSIVQLFTDCIDSLHESFKDKLLPGDAGALWLHLMHYCEACTAPKMPEFILYAFHSTYRKLPWKDLHPDQMLMEAFFKVERGSPKSCFLFLGSVLCEVNWVSVLSDAWNSSPHPETRSMIVCLLFMMILLAKEVQLVDQTDSPLLSLLGQTSSLSWHLVDIVSYQSVLSYFSSHYPPSIILAKESYAELIMKLLKVSAGLSIPTDSQKHLDAVPKCQAFTHQMVQFLSTLEQNGKITLAVLEQEMSKLLDDIIVFNPPDMDSQTRHMALSSLFMEVLMMMNNATIPTAEFLRGSIRTWIGQKMHGLVVLPLLTAACQSLASVRHMAETTEACITAYFKESPLNQNSGWGPILVSLQVPELTMEEFLQECLTLGSYLTLYVYLLQCLNSEQTLRNEMKVLLILSKWLEQVYPSSVEEEAKLFLWWHQVLQLSLIQTEQNDSVLTESVIRILLLVQSRQNLVAEERLSSGILGAIGFGRKSPLSNRFRVVARSMAAFLSVQVPMEDQIRLRPGSELHLTPKAQQALNALESMASSKQYVEYQDQILQATQFIRHPGHCLQDGKSFLALLVNCLYPEVHYLDHIR

SEQ ID NO: 29077 - protein, 2481 aa, Homo sapiens
MAEAVKPQRRAKAKASRTKTKEKKKYETPQREESSEVSLPKTSREQEIPSLACEFKGDHLKVVTDSQLQDDASGQNESEMFDVPLTSLTISNEESLTCNTEPPKEGGEARPCVGDSAVTPKVHPGDNVGTKVETPKNFTEVEENMSVQGGLSESAPQSNFSYTQPAMENIQVRETQNSKEDKQGLVCSSEVPQNVGLQSSCPAKHGFQTPRVKKLYPQLPAEIAGEAPALVAVKPLLRSERLYPELPSQLELVPFTKEQLKILEPGSWLENVESYLEEFDSMAHQDRHEFYELLLNYSRCRKQLLLAEAELLTLTSDCQNAKSRLWQFKEEQMSVQGICADQVKVFSYHRYQRVEMNENALVELKKLFDAKSEHLHQTLALHSYTSVLSRLQVESYIYALLSSSAVLRSSAIHQQGRASKQTESIPSDLCQLKECISVLFMFTRRVNEDTQFHDDILLWLQKLVSVLQRVGCPGDHLFLLNHILRCPAGVSKWAVPFIQIKVLHNPSGVFHFMQSLALLMSPVKNRAEFMCHMKPSERKPSSSGPGSGTWTLVDEGGEEDEDPETSWILLNEDDLVTILAQFPFHELFQHLLGFKAKGDYLPETTRPQEMMKIFAFANSLVELLAVGLETFNRARYRQFVKRIGYMIRMTLGYVSDHWAQYVSHNQGSGLAQQPYSMEKLQVEFDELFLRAVLHVLKAKRLGIWLFMSEMPFGTLSVQMLWKLFYLMHQVESENLQQLSSSLQPAQCKQQLQDPEHFTNFEKCLSSMNSSEEICLLTTFAQMAQARRTNVDEDFIKIIVLEIYEVSYVTLSTRETFSKVGRELLGTITAVHPEIISVLLDRVQETIDQVGMVSLYLFKELPLYLWQPSASEIAVIRDWLLNYNLTVVKNKLACVILEGLNWGFAKQATLHLDQAVHAEVALMVLEAYQKYLAQKPYAGILSESMKQVSYLASIVRYGETPETSFNQWAWNLILRLKLHKNDYGIQPNCPAVPFSVTVPDMTESPTFHPLLKAVKAGMPIGCYLALSMTAVGHSIEKFCAEGIPLLGILVQSRHLRTVVHVLDKILPLFYPCQYYLLKNEQFLSHLLLFLHLDSGVPQGVTQQVTHKVAQHLTGASHGDNVKLLNSMIQAHISVSTQPNEVGPVAVLEFWVQALISQHLWYREQPILFLMDHLCKAAFQLMQEDCIQKLLYQQHKNALGYHCDRSLLSSLVSWIVAGNITPSFVEGLATPTQVWFAWTVLNMESIFEEDSQLRRVIEGELVINSAFTPDQALKKAQTQLKLPIVPSLQRLLIYRWAHQALVTPSDHPLLPLIWQKFFLLYLHRPGPQYGLPIDGCIGRRFFQSPAHINLLKEMKRRLTEVADFHHAASKALRVPAEGSEGLPESHSGTPGYLTSPELHKELVRLFNVYILWLEDENFQKGDTYIPSLPKHYDIHRLAKVMQNQQDLWMEYLNMERIYHEFQETVGLWTQAKLESHSTPCSLSVQLDFTDPLLAKERVLSNLRKHEAPQPPLALHPTKPPVPVISSAVLLSQKDATQLVCTDLNLLQQQARTAALRESQQVALDGELLDTMPKQYVNREEQTTLHLECRGSSGKKCQGAAVVTVQFEGMHKNEAISQQLHVLRKEVKQLQAEAAKPPSLNIVEAAVHAENLITALVNAYKLQPTPGIQKVGISLFFTIVDYVSDETQRHPPTRQFFTSCIEILGQVFISGIKSECRKVLETILKNSRLCSLLSPFFTPNAAPAEFIQLYEQVVKFLSEDNSDMIFMLLTKFDLKQWLSATKPPLSDRTRLLESIHLALTAWGLEPDEDILMPFNLFCKHWTYLLLYQFPDQYSDILRLLMQSSAEQLLSPECWKATLRALGCCAPSCQQGAASTEGAVLPSSSDALLSDKQVMETIQWLSDFFYKLRLSKMDFKSFGLFSKWSPYMADVKTFLGYLVKRLIDLEMTCLAQDPTASRKTVLKSLHSVIIQLFKPWILVLEDNESSQQRHYPWLESDTVVASSIVQLFTDCIDSLHESFKDKLLPGDAGALWLHLMHYCEACTAPKMPEFILYAFHSTYRKLPWKDLHPDQMLMEAFFKVERGSPKSCFLFLGSVLCEVNWVSVLSDAWNSSPHPETRSMIVCLLFMMILLAKEVQLVDQTDSPLLSLLGQTSSLSWHLVDIVSYQSVLSYFSSHYPPSIILAKESYAELIMKLLKVSAGLSIPTDSQKHLDAVPKCQAFTHQMVQFLSTLEQNGKITLAVLEQEMSKLLDDIIVFNPPDMDSQTRHMALSSLFMEVLMMMNNATIPTAEFLRGSIRTWIGQKMHGLVVLPLLTAACQSLASVRHMAETTEACITAYFKESPLNQNSGWGPILVSLQVPELTMEEFLQECLTLGSYLTLYVYLLQCLNSEQTLRNEMKVLLILSKWLEQVYPSSVEEEAKLFLWWHQVLQLSLIQTEQNDSVLTESVIRILLLVQSRQNLVAEERLSSGILGAIGFGRKSPLSNR

SEQ ID NO: 29078 - protein, 233 aa, Homo sapiens
MWSGLLPPGLNESDAESNSEDEATLENSGLNLQEDKEDESIRKTEIIDFSTDEPKTETESNVNAYEECPSGIPIDMWNKFQELHKKHSEQKSTTSRFRGKRRKRSRKDKLKNEKELHSEPSSNETQWKELTQYFGVNDRFDPPVKRKKVEKSGLEKRIDQAVEEWNIEKAEELSNQLATRELGVKIAKAVACHNFVKAKKEVENSQAARKKKKLAWGFEAKKRWETKSNMGYM

SEQ ID NO: 29079 - protein, 383 aa, Homo sapiens
MNAGPSWNKVQHSKNSSGKRQSKSQVPHASSQPRSSLTAVTQPTEEKLKESISPEARRKRNPLGSRCQGASGNKLFLDFQSMKIIKENADEDSASDLSDSERIPIPPSPLTPPDLNLRAEEIDPVYFDLHPGQGHTKPEYYYPNFLPSPFSSWDLRDMALLLNAENKTEAVPRVGGLLGKYIDRLIQLEWLQVQTVQCEKAKGGKARPPTAPGTSGALKSPGRSKLIASALSKPLPHQEGASKSGPSRKKAFHHEEIHPSHYAFETSPRPIDVLGGTRFCSQRQTLEMRTEEKKKKSSKSTKLQRWDLSGSGSSSKVETSGHIRVPKQAAVILDSADSCKASKTQAHAHPRKKGKAESCGHATVSSEKKLKTNGVKQNTYKLK

SEQ ID NO: 29080 - protein, 508 aa, Homo sapiens
MGRRNENCANSLRVSNISQENLSHWNLDSEVPVSENKNLPAGRDGAAGGKINKNYLEIPVEQLMLEPNLSVHSQKSTQNSKQGIFQLWNCPLNEGSTIEKREFKKSSVETGFNVINHPIRVFTLNHPLTIASVDKQVGPYPGLPMPLGLCWPYADGDFFKNRNEIHVSSCSTIENNDGETLPAPNWNLKHGNSSVEENFTDESDLSENEKTNDTLLSYFKKVDLNLKPETIKNVEEPFTEEPNEVFPYPDFLPPPFSALDLHNLALSKSDNWKVTVDPAETSVEHLITRLLELERLQHMTIQKERPRLQTTFCTPAVTERPSSSKATPKVRQPKLCDSLSLQIPCVDKSQEKSKNNSGSCKLEQNALKRNWSNAGKYRWNSRPLSLKSSSTPKQLIETYDKNPKSSILSPCQELSFKPTIGHTNQSMVKMVSTRCLPWRSPMPVSPIPLTFPENQKEEIKAPKRNFGTKKKLYRQNIVLNRPFSIQKLNCLSPSLIAKDKCCSPIEQK

SEQ ID NO: 29081 - protein, 467 aa, Homo sapiens
MSQGVRRAGAGQGVAAAVQLLVTLSFLRSVVEAQVTGVLDDCLCDIDSIDNFNTYKIFPKIKKLQERDYFRYYKVNLKRPCPFWAEDGHCSIKDCHVEPCPESKIPVGIKAGHSNKYLKMANNTKELEDCEQANKLGAINSTLSNQSKEAFIDWARYDDSRDHFCELDDERSPAAQYVDLLLNPERYTGYKGTSAWRVWNSIYEENCFKPRSVYRPLNPLAPSRGEDDGESFYTWLEGLCLEKRVFYKLISGLHASINLHLCANYLLEETWGKPSWGPNIKEFKHRFDPVETKGEGPRRLKNLYFLYLIELRALSKVAPYFERSIVDLYTGNAEEDADTKTLLLNIFQDTKSFPMHFDEKSMFAGDKKGAKSLKEEFRLHFKNISRIMDCVGCDKCRLWGKLQTQGLGTALKILFSEKEIQKLPENSPSKGFQLTRQEIVALLNAFGRLSTSIRDLQNFKVLLQHSR

SEQ ID NO: 29082 - protein, 144 aa, Homo sapiens
MSQGVRRAGAGQGVAAAVQLLVTLSFLRSVVEAQVTGVLDDCLCDIDSIDNFNTYKIFPKIKKLQERDYFRYYKVNLKRPCPFWAEDGHCSIKDCHVEPCPESKIPVGIKAGHSNKYLKMANNTKELEDCEQANKLGAINSTLR

SEQ ID NO: 29083 - protein, 656 aa, Homo sapiens
MASTDYSTYSQAAAQQGYSAYTAQPTQGYAQTTQAYGQQSYGTYGQPTDVSYTQAQTTATYGQTAYATSYGQPPTGYTTPTAPQAYSQPVQGYGTGAYDTTTATVTTTQASYAAQSAYGTQPAYPAYGQQPAATAPTRPQDGNKPTETSQPQSSTGGYNQPSLGYGQSNYSYPQVPGSYPMQPVTAPPSYPPTSYSSTQPTSYDQSSYSQQNTYGQPSSYGQQSSYGQQSSYGQQPPTSYPPQTGSYSQAPSQYSQQSSSYGQQSSFRQDHPSSMGVYGQESGGFSGPGENRSMSGPDNRGRGRGGFDRGGMSRGGRGGGRGGMGSAGERGGFNKPGGPMDEGPDLDLGPPVDPDEDSDNSAIYVQGLNDSVTLDDLADFFKQCGVVKMNKRTGQPMIHIYLDKETGKPKGDATVSYEDPPTAKAAVEWFDGKDFQGSKLKVSLARKKPPMNSMRGGLPPREGRGMPPPLRGGPGGPGGPGGPMGRMGGRGGDRGGFPPRGPRGSRGNPSGGGNVQHRAGDWQCPNPGCGNQNFAWRTECNQCKAPKPEGFLPPPFPPPGGDRGRGGPGGMRGGRGGLMDRGGPGGMFRGGRGGDRGGFRGGRGMDRGGFGGGRRGGPGGPPGPLMEQMGGRRGGRGGPGKMDKGEHRQERRDRPY

SEQ ID NO: 29084 - protein, 583 aa, Homo sapiens
MASTDYSTYSQAAAQQGYSAYTAQPTQGYAQTTQAYGQQSYGTYGQPTDVSYTQAQTTATYGQTAYATSYGQPPTGYTTPTAPQAYSQPVQGYGTGAYDTTTATVTTTQASYAAQSAYGTQPAYPAYGQQPAATAPTRPQDGNKPTETSQPQSSTGGYNQPSLGYGQSNYSYPQVPGSYPMQPVTAPPSYPPTSYSSTQPTSYDQSSYSQQNTYGQPSSYGQQSSYGQQSSYGQQPPTSYPPQTGSYSQAPSQYSQQSSSYGQQSPMDEGPDLDLGPPVDPDEDSDNSAIYVQGLNDSVTLDDLADFFKQCGVVKMNKRTGQPMIHIYLDKETGKPKGDATVSYEDPPTAKAAVEWFDGKDFQGSKLKVSLARKKPPMNSMRGGLPPREGRGMPPPLRGGPGGPGGPGGPMGRMGGRGGDRGGFPPRGPRGSRGNPSGGGNVQHRAGDWQCPNPGCGNQNFAWRTECNQCKAPKPEGFLPPPFPPPGGDRGRGGPGGMRGGRGGLMDRGGPGGMFRGGRGGDRGGFRGGRGMDRGGFGGGRRGGPGGPPGPLMEQMGGRRGGRGGPGKMDKGEHRQERRDRPY

SEQ ID NO: 29085 - protein, 655 aa, Homo sapiens
MASTDYSTYSQAAAQQGYSAYTAQPTQGYAQTTQAYGQQSYGTYGQPTDVSYTQAQTTATYGQTAYATSYGQPPTGYTTPTAPQAYSQPVQGYGTGAYDTTTATVTTTQASYAAQSAYGTQPAYPAYGQQPAATAPTRPQDGNKPTETSQPQSSTGGYNQPSLGYGQSNYSYPQVPGSYPMQPVTAPPSYPPTSYSSTQPTSYDQSSYSQQNTYGQPSSYGQQSSYGQQSSYGQQPPTSYPPQTGSYSQAPSQYSQQSSSYGQQSSFRQDHPSSMGVYGQESGGFSGPGENRSMSGPDNRGRGRGGFDRGGMSRGGRGGGRGGMGAGERGGFNKPGGPMDEGPDLDLGPPVDPDEDSDNSAIYVQGLNDSVTLDDLADFFKQCGVVKMNKRTGQPMIHIYLDKETGKPKGDATVSYEDPPTAKAAVEWFDGKDFQGSKLKVSLARKKPPMNSMRGGLPPREGRGMPPPLRGGPGGPGGPGGPMGRMGGRGGDRGGFPPRGPRGSRGNPSGGGNVQHRAGDWQCPNPGCGNQNFAWRTECNQCKAPKPEGFLPPPFPPPGGDRGRGGPGGMRGGRGGLMDRGGPGGMFRGGRGGDRGGFRGGRGMDRGGFGGGRRGGPGGPPGPLMEQMGGRRGGRGGPGKMDKGEHRQERRDRPY

SEQ ID NO: 29086 - protein, 354 aa, Homo sapiens
MASTDYSTYSQAAAQQGYSAYTAQPTQGYAQTTQAYGQQSYGTYGQPTDVSYTQAQTTATYGQTAYATSYGQPPTGYTTPTAPQAYSQPVQGYGTGAYDTTTATVTTTQASYAAQSAYGTQPAYPAYGQQPAATAPTRPQDGNKPTETSQPQSSTGGYNQPSLGYGQSNYSYPQVPGSYPMQPVTAPPSYPPTSYSSTQPTSYDQSSYSQQNTYGQPSSYGQQSSYGQQSSYGQQPPTSYPPQTGSYSQAPSQYSQQSSSYGQQSSFRQDHPSSMGVYGQESGGFSGPGENRSMSGPDNRGRGRGGFDRGGMSRGGRGGGRGGMGLQSESLVYTSILKKYPYSVLSRQHNEKWD

SEQ ID NO: 29087 - protein, 661 aa, Homo sapiens
MASTDYSTYSQAAAQQGYSAYTAQPTQGYAQTTQAYGQQSYGTYGQPTDVSYTQAQTTATYGQTAYATSYGQPPTVEGTSTGYTTPTAPQAYSQPVQGYGTGAYDTTTATVTTTQASYAAQSAYGTQPAYPAYGQQPAATAPTRPQDGNKPTETSQPQSSTGGYNQPSLGYGQSNYSYPQVPGSYPMQPVTAPPSYPPTSYSSTQPTSYDQSSYSQQNTYGQPSSYGQQSSYGQQSSYGQQPPTSYPPQTGSYSQAPSQYSQQSSSYGQQSSFRQDHPSSMGVYGQESGGFSGPGENRSMSGPDNRGRGRGGFDRGGMSRGGRGGGRGGMGAGERGGFNKPGGPMDEGPDLDLGPPVDPDEDSDNSAIYVQGLNDSVTLDDLADFFKQCGVVKMNKRTGQPMIHIYLDKETGKPKGDATVSYEDPPTAKAAVEWFDGKDFQGSKLKVSLARKKPPMNSMRGGLPPREGRGMPPPLRGGPGGPGGPGGPMGRMGGRGGDRGGFPPRGPRGSRGNPSGGGNVQHRAGDWQCPNPGCGNQNFAWRTECNQCKAPKPEGFLPPPFPPPGGDRGRGGPGGMRGGRGGLMDRGGPGGMFRGGRGGDRGGFRGGRGMDRGGFGGGRRGGPGGPPGPLMEQMGGRRGGRGGPGKMDKGEHRQERRDRPY

SEQ ID NO: 29088 - protein, 600 aa, Homo sapiens
MASTDYSTYSQAAAQQGYSAYTAQPTQGYAQTTQAYGQQSYGTYGQPTDVSYTQAQTTATYGQTAYATSYGQPPTGYTTPTAPQAYSQPVQGYGTGAYDTTTATVTTTQASYAAQSAYGTQPAYPAYGQQPAATAPTSYSSTQPTSYDQSSYSQQNTYGQPSSYGQQSSYGQQSSYGQQPPTSYPPQTGSYSQAPSQYSQQSSSYGQQSSFRQDHPSSMGVYGQESGGFSGPGENRSMSGPDNRGRGRGGFDRGGMSRGGRGGGRGGMGSAGERGGFNKPGGPMDEGPDLDLGPPVDPDEDSDNSAIYVQGLNDSVTLDDLADFFKQCGVVKMNKRTGQPMIHIYLDKETGKPKGDATVSYEDPPTAKAAVEWFDGKDFQGSKLKVSLARKKPPMNSMRGGLPPREGRGMPPPLRGGPGGPGGPGGPMGRMGGRGGDRGGFPPRGPRGSRGNPSGGGNVQHRAGDWQCPNPGCGNQNFAWRTECNQCKAPKPEGFLPPPFPPPGGDRGRGGPGGMRGGRGGLMDRGGPGGMFRGGRGGDRGGFRGGRGMDRGGFGGGRRGGPGGPPGPLMEQMGGRRGGRGGPGKMDKGEHRQERRDRPY

SEQ ID NO: 29089 - protein, 273 aa, Homo sapiens
MEAAPSRFMFLLFLLTCELAAEVAAEVEKSSDGPGAAQEPTWLTDVPAAMEFIAATEVAVIGFFQDLEIPAVPILHSMVQKFPGVSFGISTDSEVLTHYNITGNTICLFRLVDNEQLNLEDEDIESIDATKLSRFIEINSLHMVTEYNPVTVIGLFNSVIQIHLLLIMNKASPEYEENMHRYQKAAKLFQGKILFILVDSGMKENGKVISFFKLKESQLPALAIYQTLDDEWDTLPTAEVSVEHVQNFCDGFLSGKLLKENRESEGKTPKVEL

SEQ ID NO: 29090 - protein, 660 aa, Homo sapiens
MATSHRVAKLVASSLQTPVNPITGARVAQYEREDPLKALAAAEAILEDEEEEKVAQPAGASADLNTSFSGVDEHAPISYEDFVNFPDIHHSNEEYFKKVEELKAAHIETMAKLEKMYQDKLHLKEVQPVVIREDSLSDSSRSVSEKNSYHPVSLMTSFSEPDLGQSSSLYVSSSEEELPNLEKEYPRKNRMMTYAKELINNMWTDFCVEDYIRCKDTGFHAAEKRRKKRKEWVPTITVPEPFQMMIREQKKKEESMKSKSDIEMVHKALKKQEEDPEYKKKFRANPVPASVFLPLYHDLVKQKEERRRSLKEKSKEALLASQKPFKFIAREEQKRAAREKQLRDFLKYKKKTNRFKARPIPRSTYGSTTNDKLKEEELYRNLRTQLRAQEHLQNSSPLPCRSACGCRNPRCPEQAVKLKCKHKVRCPTPDFEDLPERYQKHLSEHKSPKLLTVCKPFDLHASPHASIKREKILADIEADEENLKETRWPYLSPRRKSPVRCAGVNPVPCNCNPPVPTVSSRGREQAVRKSEKERMREYQRELEEREEKLKKRPLLFERVAQKNARMAAEKHYSNTLKALGISDEFVSKKGQSGKVLEYFNNQETKSVTEDKESFNEEEKIEERENGEENYFIDTNSQDSYKEKDEANEESEEEKSVEESH

SEQ ID NO: 29091 - protein, 551 aa, Homo sapiens
MAKLEKMYQDKLHLKEVQPVVIREDSLSDSSRSVSEKNSYHPVSLMTSFSEPDLGQSSSLYVSSSEEELPNLEKEYPRKNRMMTYAKELINNMWTDFCVEDYIRCKDTGFHAAEKRRKKRKEWVPTITVPEPFQMMIREQKKKEESMKSKSDIEMVHKALKKQEEDPEYKKKFRANPVPASVFLPLYHDLVKQKEERRRSLKEKSKEALLASQKPFKFIAREEQKRAAREKQLRDFLKYKKKTNRFKARPIPRSTYGSTTNDKLKEEELYRNLRTQLRAQEHLQNSSPLPCRSACGCRNPRCPEQAVKLKCKHKVRCPTPDFEDLPERYQKHLSEHKSPKLLTVCKPFDLHASPHASIKREKILADIEADEENLKETRWPYLSPRRKSPVRCAGVNPVPCNCNPPVPTVSSRGREQAVRKSEKERMREYQRELEEREEKLKKRPLLFERVAQKNARMAAEKHYSNTLKALGISDEFVSKKGQSGKVLEYFNNQETKSVTEDKESFNEEEKIEERENGEENYFIDTNSQDSYKEKDEANEESEEEKSVEESH

SEQ ID NO: 29092 - protein, 716 aa, Homo sapiens
MATSHRVAKLVASSLQTPVNPITGARVAQYEREDPLKALAAAEAILEDEEEEKVAQPAGASADLNTSFSGVDEHAPISYEDFVNFPDIHHSNEEYFKKVEELKAAHIETMAKLEKMYQDKLHLKEVQPVVIREDSLSDSSRSVSEKNSYHPVSLMTSFSEPDLGQSSSLYVSSSEEELPNLEKEYPRKNRMMTYAKELINNMWTDFCVEDYIRCKDTGFHAAEKRRKKRKEWVPTITVPEPFQMMIREQKKKEESMKSKSDIEMVHKALKKQEEDPEYKKKFRANPVPASVFLPLYHDLVKQKEERRRSLKEKSKEALLASQKPFKFIAREEQKRAAREKQLRDFLKYKKKTNRFKARPIPRSTYGSTTNDKLKEEELYRNLRTQLRAQEHLQNSSPLPCRSACGCRNPRCPEQAVKLKCKHKVRCPTPDFEDLPERYQKHLSEHKSPKLLTVCKPFDLHASPHASIKREKILADIEADEENLKETRWPYLSPRRKSPVRCAGVNPVPCNCNPPVPTVSSRGREQAVRRSLEEKKMLEEERNRILTKQKQRMKELQKLLTTRAKAYDSHQSLAQISKSRVKCLRKSEKERMREYQRELEEREEKLKKRPLLFERVAQKNARMAAEKHYSNTLKALGISDEFVSKKGQSGKVLEYFNNQETKSVTEDKESFNEEEKIEERENGEENYFIDTNSQDSYKEKDEANEESEEEKSVEESH

SEQ ID NO: 29093 - protein, 384 aa, Homo sapiens
MGPLFTTIPGAHSGPMRPLPKKHVEPMAVRQLLLGNSTMIRHTCPMSVPLSRQVKEVAAQKPSEDIYKNRQRRQQQQQQQQQQQQLDLLFHQRIQISLWPRKQKRRKTEQHSHPFVKKAFRFSAGPGCRRPSSNKMLRSMGGGQRPMGLGSEFFRLLHDLHLLAFATKRIWIHRRGEATARPRAPEHPAPPATAVRGRDAASQNLKRRPGSGTDGLRLQGAEPSRLLRTYAGGAVIPTGTPERAQPPPPQDPLGRRRWLSRNTWGPWPGTTQPPSPQLLRNDWGSCGFMVPEAARGKVFQDSQEGAHIRRETVSKSVCAEPWRHQRARDPAPTNFPLKCQKQRGASTSSGQHGGRVNLVFFIDSPTVIAVPDLQCPTKYSGILY

SEQ ID NO: 29094 - protein, 452 aa, Homo sapiens
MSETPAQCSIKQERISYTPPESPVPSYASSTPLHVPVPRALRMEEDSIRLPAHLRLQPIYWSRDDVAQWLKWAENEFSLRPIDSNTFEMNGKALLLLTKEDFRYRSPHSGDVLYELLQHILKQRKPRILFSPFFHPGNSIHTQPEVILHQNHEEDNCVQRTPRPSVDNVHHNPPTIELLHRSRSPITTNHRPSPDPEQRPLRSPLDNMIRRLSPAERAQGPRPHQENNHQESYPLSVSPMENNHCPASSESHPKPSSPRQESTRVIQLMPSPIMHPLILNPRHSVDFKQSRLSEDGLHREGKPINLSHREDLAYMNHIMVSVSPPEEHAMPIGRIADCRLLWDYVYQLLSDSRYENFIRWEDKESKIFRIVDPNGLARLWGNHKNRTNMTYEKMSRALRHYYKLNIIRKEPGQRLLFRFMKTPDEIMSGRTDRLEHLESQELDEQIYQEDEC

SEQ ID NO: 29095 - protein, 570 aa, Homo sapiens
MNHFRKMEVINLTTLPMIPVDEHLAVSLVARNTMVKTVRKELENNPPSCLIGSMHQVNQKIADINLRTEPSANSLAIERFELEKKALREKTRSSPEDKVKRQRKSQYSCKGSELRHARSSVIKRKTADKNLLAELYQYSNFNSSKPNKLPNGVDFCDMVGNVVRAERDCLSGKHFCSGRELEKFLSSSSPRAIWLDSFWWIFHERYQPNKELQNNLFDRIAQHYALLLFRVPKSHSEEALLKRLPSLLSKAVYTSFCCCFPQSWFDTHEFKSDICNTMSLWISGTYPSPQSYDSWDYSELDPERFRREELMLYRRRLTKGREFSLFAGKRAFSQKPAQSRKFYHPQSSSANSPSEKTSSAKQNSEKSLRMQNTAKEHHCQTLVLKKPTQEVKRISEARECENMFPKKSCAACKSPELTSNLFNIYGKSPLIVYFLQNYASLQQHGKNVLIVRREKTTSTPDCTPTYTDVISETLCSMKKRKDNLNQLYQHHWTEWNYFDKHLKELQDNFSREMKNIDPKAADTKKANHMFIPPSAVNEESPDKKTKEGKGGEGKRRETEVEHFFPLTSKP

SEQ ID NO: 29096 - protein, 477 aa, Homo sapiens
MLFSWVKRQRKSQYSCKGSELRHARSSVIKRKTADKNLLAELYQYSNFNSSKPNKLPNGVDFCDMVGNVVRAERDCLSGKHFCSGRELEKFLSSSSPRAIWLDSFWWIFHERYQPNKELQNNLFDRIAQHYALLLFRVPKSHSEEALLKRLPSLLSKAVYTSFCCCFPQSWFDTHEFKSDICNTMSLWISGTYPSPQSYDSWDYSELDPERFRREELMLYRRRLTKGREFSLFAGKRAFSQKPAQSRKFYHPQSSSANSPSEKTSSAKQNSEKSLRMQNTAKEHHCQTLVLKKPTQEVKRISEARECENMFPKKSCAACKSPELTSNLFNIYGKSPLIVYFLQNYASLQQHGKNVLIVRREKTTSTPDCTPTYTDVISETLCSMKKRKDNLNQLYQHHWTEWNYFDKHLKELQDNFSREMKNIDPKAADTKKANHMFIPPSAVNEESPDKKTKEGKGGEGKRRETEVEHFFPLTSKP

SEQ ID NO: 29097 - protein, 162 aa, Homo sapiens
MLRAVGSLLRLGRGLTVRCGPGAPLEATRRPAPALPPRGLPCYSSGGAPSNSGPQGHGEIHRVPTQRRPSQFDKKILLWTGRFKSMEEIPPRIPPEMIDTARNKARVKACYIMIGLTIIACFAVIVSAKRAVERHESLTSWNLAKKAKWREEAALAAQAKAK

SEQ ID NO: 29098 - protein, 169 aa, Homo sapiens
MVSSKGLWKERPSAHTSECFSTTACPVAFILLVWNSQTPAGLQSLCTGRHPSLSARAQRAGPRASREEGTFWTERVGQERWLIRSGSSQNESQEDQGAGLISQAGLKADNRRESSTWANEVEDRRPQCTPALNLTPSHPHPPHSLTTFLRSVIGIQIPPGLVAAGGTVA

SEQ ID NO: 29099 - protein, 201 aa, Homo sapiens
MASRSAGTLLTEFNAAYVPPGLMPGYQGHVPTVAFSFGAPYGTTTLKYFQDHRNRAMEKSHTPFSQGGHFPTIFSTNPNLLLMERASTRDRWLHKPSYTRFNLDSHRSTELTNFYQMVQQHRKYYQDKTGTVPRVPYFAMPVREPERYPLPTVLPPLCPKKKWHLLRLAPENLKTYQTFPSGKRVSPQERKKRDCYFEFRA

SEQ ID NO: 29100 - protein, 121 aa, Homo sapiens
MVRILANGEIVQDDDPRVRTTTQPPRGSIPRQSFFNRGHGAPPGGPGPRQQQAGARLGAAQSPFNDLNRQLVNMGFPQWHLGNHAVEPVTSILLLFLLMMLGVRGLLLVGLVYLVSHLSQR

SEQ ID NO: 29101 - protein, 163 aa, Homo sapiens
MSPVLSGIHSIYSAWVTSVNITDCKPPSISGAAHQGPTAPGRMVRILANGEIVQDDDPRVRTTTQPPRGSIPRQSFFNRGHGAPPGGPGPRQQQAGARLGAAQSPFNDLNRQLVNMGFPQWHLGNHAVEPVTSILLLFLLMMLGVRGLLLVGLVYLVSHLSQR

SEQ ID NO: 29102 - protein, 240 aa, Homo sapiens
MAEPGRPWAQARSAYRASEVLRRGTGRRRDPGPQSNGPGQEDARAPGRMARLRGQLRAEAASRSEVPRLLKLVERAGAGAAGRGREDRRAQPRAPCARYAGSPAAGPPTRRGSWRSASGGCRRAWRQCARSWAPGLRRCARSFERSWMPCARCCRRRRPRLPAASPAPSPAPRPAARPCRGRSAPLAPWSPPPGPQTTPRTAQQNAERTEPRPGRTTRRCQCRLGPRKVAGTEGGRTRAA

SEQ ID NO: 29103 - protein, 132 aa, Homo sapiens
MVEAFCATWKLTNSQNFDEYMKALGVGFATRQVGNVTKPTVIISQEGDKVVIRTLSTFKNTEISFQLGEEFDETTADDRNCKSVVSLDGDKLVHIQKWDGKETNFVREIKDGKMVMTLTFGDVVAVRHYEKA

SEQ ID NO: 29104 - protein, 166 aa, Homo sapiens
MVEAFCATWKLTNSQNFDEYMKALGVGFATRQVGNVTKPTVIISQEGDKVVIRTLSTFKNTEISFQLGEEFDETTADDRNCKSVVSLDGDKLVHIQKWDGKETNFVREIKDGKMVMVSNDNSPFFLVFFSSPHTSHLLPSSSLLLPFFLLPSFFNNTSLARFFNYM

SEQ ID NO: 29105 - protein, 79 aa, Homo sapiens; identical to SEQ ID NO: 25598

SEQ ID NO: 29106 - protein, 338 aa, Homo sapiens [sequence omitted]

SEQ ID NO: 29107 - protein, 548 aa, Homo sapiens
MKTPADTGFAFPDWAYKPESSPGSRQIQLWHFILELLRKEEYQGVIAWQGDYGEFVIKDPDEVARLWGVRKCKPQMNYDKLSRALRYYYNKRILHKTKGKRFTYKFNFNKLVLVNYPFIDVGLAGGAVPQSAPPVPSGGSHFRFPPSTPSEVLSPTEDPRSPPACSSSSSSLFSAVVARRLGRGSVSDCSDGTSELEEPLGEDPRARPPGPPDLGAFRGPPLARLPHDPGVFRVYPRPRGGPEPLSPFPVSPLAGPGSLLPPQLSPALPMTPTHLAYTPSPTLSPMYPSGGGGPSGSGGGSHFSFSPEDMKRYLQAHTQSVYNYHLSPRAFLHYPGLVVPQPQRPDKCPLPPMAPETPPVPSSASSSSSSSSSPFKFKLQPPPLGRRQRAAGEKAVAGADKSGGSAGGLAEGAGALAPPPPPPQIKVEPISEGESEEVEVTDISDEDEEDGEVFKTPRAPPAPPKPEPGEAPGASQCMPLKLRFKRRWSEDCRLEGGGGPAGGFEDEGEDKKVRGEGPGEAGGPLTPRRVSSDLQHATAQLSLEHRDS

SEQ ID NO: 29108 - protein, 473 aa, Homo sapiens
MNYDKLSRALRYYYNKRILHKTKGKRFTYKFNFNKLVLVNYPFIDVGLAGGAVPQSAPPVPSGGSHFRFPPSTPSEVLSPTEDPRSPPACSSSSSSLFSAVVARRLGRGSVSDCSDGTSELEEPLGEDPRARPPGPPDLGAFRGPPLARLPHDPGVFRVYPRPRGGPEPLSPFPVSPLAGPGSLLPPQLSPALPMTPTHLAYTPSPTLSPMYPSGGGGPSGSGGGSHFSFSPEDMKRYLQAHTQSVYNYHLSPRAFLHYPGLVVPQPQRPDKCPLPPMAPETPPVPSSASSSSSSSSSPFKFKLQPPPLGRRQRAAGEKAVAGADKSGGSAGGLAEGAGALAPPPPPPQIKVEPISEGESEEVEVTDISDEDEEDGEVFKTPRAPPAPPKPEPGEAPGASQCMPLKLRFKRRWSEDCRLEGGGGPAGGFEDEGEDKKVRGEGPGEAGGPLTPRRVSSDLQHATAQLSLEHRDS

SEQ ID NO: 29109 - protein, 329 aa, Homo sapiens
MAALGGDGLRLLSVSRPERPPESAALGGLGPGLCCWVSVFSCLSLACSYVGSLYVWKSELPRDHPAVIKRRFTSVLVVSSLSPLCVLLWRELTGIQPGTSLLTLMGFRLEGIFPAALLPLLLTMILFLGPLMQLSMDCPCDLADGLKVVLAPRSWARCLTDMRWLRNQVIAPLTEELVFRACMLPMLAPCMGLGPAVFTCPLFFGVAHFHHIIEQLRFRQSSVGNIFLSAAFQFSYTAVFGAYTAFLFIRTGHLIGPVLCHSFCNYMGFPAVCAALEHPQRRPLLAGYALGVGLFLLLLQPLTDPKLYGSLPLCVLLERAGDSEAPLCS

SEQ ID NO: 29110 - protein, 101 aa, Homo sapiens
MVVSKMNKDAQMRAAINQKLIETGERERLKELLRAKLIECGWKDQLKAHCKEVIKEKGLEHVTVDDLVAEITPKGRALVPDSVKKELLQRIRTFLAQHASL

SEQ ID NO: 29111 - protein, 96 aa, Homo sapiens
MNKDAQMRAAINQKLIETGERERLKELLRAKLIECGWKDQLKAHCKEVIKEKGLEHVTVDDLVAEITPKGRALVPDSVKKELLQRIRTFLAQHASL

SEQ ID NO: 29112 - protein, 854 aa, Homo sapiens
MALEQALQAARQGELDVLRSLHAAGLLGPSLRDPLDALPVHHAARAGKLHCLRFLVEEAALPAAARARNGATPAHDASATGHLACLQWLLSQGGCRVQDKDNSGATVLHLAARFGHPEVVNWLLHHGGGDPTAATDMGALPIHYAAAKGDFPSLRLLVEHYPEGVNAQTKNGATPLYLACQEGHLEVTQYLVQECGADPHARAHDGMTPLHAAAQMGHSPVIVWLVSCTDVSLSEQDKDGATAMHFAASRGHTKVLSWLLLHGGEISADLWGGTPLHDAAENGELECCQILVVNGAELDVRDRDGYTAADLSDFNGHSHCTRYLRTVENLSVEHRVLSRDPSAELEAKQPDSGMSSPNTTVSVQPLNFDLSSPTSTLSNYDSCSSSHSSIKGQHPPCGLSSARAADIQSYMDMLNPELGLPRGTIGKPTPPPPPPSFPPPPPPPGTQLPPPPPGYPAPKPPVGPQAADIYMQTKNKLRHVETEALKKELSSCDGHDGLRRQDSSRKPRAFSKQPSTGDYYRQLGRCPGETLAARPGMAHSEEVRARQPARAGCPRLGPAARGSLEGPSAPPQAALLPGNHVPNGCAADPKASRELPPPPPPPPPPLPEAASSPPPAPPLPLESAGPGCGQRRSSSSTGSTKSFNMMSPTGDNSELLAEIKAGKSLKPTPQSKGLTTVFSGIGQPAFQPDSPLPSVSPALSPVRSPTPPAAGFQPLLNGSLVPVPPTTPAPGVQLDVEALIPTHDEQGRPIPEWKRQVMVRKMQLKMQEEEEQRRKEEEEEARLASMPAWRRDLLRKKLEEEREQKRKEEERQKQEELRREKEQSEKLRTLGYDESKLAPWQRQVILKKGDIAKY

SEQ ID NO: 29113 - protein, 288 aa, Homo sapiens
MAHSEEAALLPGNHVPNGCAADPKASRELPPPPPPPPPPLPEAASSPPPAPPLPLESAGPGCGQRRSSSSTGSTKSFNMMSPTGDNSELLAEIKAGKSLKPTPQSKGLTTVFSGIGQPAFQPDSPLPSVSPALSPVRSPTPPAAGFQPLLNGSLVPVPPTTPAPGVQLDVEALIPTHDEQGRPIPEWKRQVMVRKMQLKMQEEEEQRRKEEEEEARLASMPAWRRDLLRKKLEEEREQKRKEEERQKQEELRREKEQSEKLRTLGYDESKLAPWQRQVILKKGDIAKY

SEQ ID NO: 29114 - protein, 309 aa, Homo sapiens
MSKIRGLPPEVREPGPGVELGVENGLLCQLIHSPEFNLFSNSVVFESNFIQTHVPEADFQVTKPGNWRDVCEGSATVILGVTSSVPSLPLPNVLLMANVTWPQGPFTTWSTPGDAPVINLSRLLPLKYVELRIYDRLQRILRVRTVTEKIYYLKLHEKHPEIVFQFWVRLVKILQKGLSITTKDPRIKFTHCLVPKMPTNSTETTPENSLLSSPQPSEPLVLLAAEQTSGSFSQLSGKPQLTADRNNDTAIEIDNCSSYKIPSPVASPINLNIPMRAALSHSLWEQEDWNEHLLQVHIASYLGEHFLGA

SEQ ID NO: 29115 - protein, 300 aa, Homo sapiens
MSKIRGLPPEVREPGPGVELGVENGLLCQLIHSPEFNLFSNSVVFESNFIQVTKPGNWRDVCEGSATVILGVTSSVPSLPLPNVLLMANVTWPQGPFTTWSTPGDAPVINLSRLLPLKYVELRIYDRLQRILRVRTVTEKIYYLKLHEKHPEIVFQFWVRLVKILQKGLSITTKDPRIKFTHCLVPKMPTNSTETTPENSLLSSPQPSEPLVLLAAEQTSGSFSQLSGKPQLTADRNNDTAIEIDNCSSYKIPSPVASPINLNIPMRAALSHSLWEQEDWNEHLLQVHIASYLGEHFLGA

SEQ ID NO: 29116 - protein, 464 aa, Homo sapiens
MMARRDPTSWAKRLVRAQTLQKQRRAPVGPRAPPPDEEDPRLKCKNCGAFGHTARSTRCPMKCWKAALVPATLGKKEGKENLKPWKPRVEANPGPLNKDKGEKEERPRQQDPQRKALLHMFSGKPPEKPLPNGKGSTEPSDYLRVASGPMPVHTTSKRPRLDPVLADRSATEMSGRGSVLASLSPLRKASLSSSSSLGPKERQTGAAADMPQPAVRHQGREPLLVVKPTHSRPEGDCREVPQAASKTHGLLQAARPQAQDKRPAVTSQPCPPAATHSLGLGSNLSFGPGAKRPAQAPIQACLNFPKKPRLGPFQIPESAIQGGELGAPENLQPPPAATELGPSTSPQMGRRTPAQVPSVDRQPPHSRPCLPTAQACTMSHHPAASHDGAQPLRVLFRRLENGRWSSSLLAAPSFHSPEKPGAFLAQSPHVSEKSEAPCVRVPPSVLYEDLQVSSSSEDSDSDLE

SEQ ID NO: 29117 - protein, 330 aa, Homo sapiens
MAPEENAGTELLLQGFERRFLAVRTLRSFPWQSLEAKLRDSSDSELLRDILQKTVRHPVCVKHPPSVKYAWCFLSELIKKHEAVHTEPLDKLYEVLAETLMAKESTQGHRSYLLSSGGSVTLSKSTAIISHGTTGLVTWDAALYLAEWAIENPAAFINRTVLELGSGAGLTGLAICKMCRPRAYIFSDPHSRILEQLRGNVLLNGLSLEADITGNLDSPRVTVAQLDWDVAMVHQLSAFQPDVVIAADVLYCPEAIVSLVGVLQRLAACREHKRAPEVYVAFTVRNPETCQLFTTELGRDGIRWEAEAHHDQKLFPYGEHLEMAMLNLTL

SEQ ID NO: 29118 - protein, 595 aa, Homo sapiens [sequence omitted]

SEQ ID NO: 29119 - protein, 483 aa, Homo sapiens
MTMTLHTKASGMALLHQIQGNELEPLNRPQLKIPLERPLGEVYLDSSKPAVYNYPEGAAYEFNAAAAANAQVYGQTGLPYGPGSEAAAFGSNGLGGFPPLNSVSPSPLMLLHPPPQLSPFLQPHGQQVPYYLENEPSGYTVREAGPPAFYRPNSDNRRQGGRERLASTNDKGSMAMESAKETRYCAVCNDYASGYHYGVWSCEGCKAFFKRSIQGHNDYMCPATNQCTIDKNRRKSCQACRLRKCYEVGMMKGGFVDLTLHDQVHLLECAWLEILMIGLVWRSMEHPGKLLFAPNLLLDRNQGKCVEGMVEIFDMLLATSSRFRMMNLQGEEFVCLKSIILLNSGVYTFLSSTLKSLEEKDHIHRVLDKITDTLIHLMAKAGLTLQQQHQRLAQLLLILSHIRHMSNKGMEHLYSMKCKNVVPLYDLLLEMLDAHRLHAPTSRGGASVEETDQSHLATAGSTSSHSLQKYYITGEAEGFPATV

SEQ ID NO: 29120 - protein, 422 aa, Homo sapiens
MAMESAKETRYCAVCNDYASGYHYGVWSCEGCKAFFKRSIQGHNDYMCPATNQCTIDKNRRKSCQACRLRKCYEVGMMKGGIRKDRRGGRMLKHKRQRDDGEGRGEVGSAGDMRAANLWPSPLMIKRSKKNSLALSLTADQMVSALLDAEPPILYSEYDPTRPFSEASMMGLLTNLADRELVHMINWAKRVPGFVDLTLHDQVHLLECAWLEILMIGLVWRSMEHPGKLLFAPNLLLDRNQGKCVEGMVEIFDMLLATSSRFRMMNLQGEEFVCLKSIILLNSGVYTFLSSTLKSLEEKDHIHRVLDKITDTLIHLMAKAGLTLQQQHQRLAQLLLILSHIRHMSNKGMEHLYSMKCKNVVPLYDLLLEMLDAHRLHAPTSRGGASVEETDQSHLATAGSTSSHSLQKYYITGEAEGFPATV

SEQ ID NO: 29121 - protein, 312 aa, Homo sapiens
MAMESAKETRYCAVCNDYASGYHYGVWSCEGCKAFFKRSIQGHNDYMCPATNQCTIDKNRRKSCQACRLRKCYEVGMMKGGIRKDRRGGRMLKHKRQRDDGEGRGEVGSAGDMRAANLWPSPLMIKRSKKNSLALSLTADQMVSALLDAEPPILYSEYDPTRPFSEASMMGLLTNLADRELVHMINWAKRVPGFVDLTLHDQVHLLECAWLEILMIGLVWRSMEHPGKLLFAPNLLLDRNQGKCVEGMVEIFDMLLATSSRFRMMNLQGEEFVCLKSIILLNSGFTISHVEAKKRILNLHPKIFGNKWFPRV

SEQ ID NO: 29122 - protein, 464 aa, Homo sapiens
MMARRDPKSWAKRLVRAQTLQKQRRAPVGPRAPPPDEEDPRLKCKNCGAFGHTARSTRCPMKCWKAALVPATLGKKEGKENLKPWKPRVEANPGPLNKDKGEKEERPRQQDPQRKALLHMFSGKPPEKPLPNGKGSTESSDHLRVASGPMPVHTTSKRPRVDPVLADRSAAEMSGRGSVLASLSPLRKASLSSSSSLGPKERQTGAAADMPQPAVRHQGREPLLVVKPTHSSPEGGCREVPQAASKTHGLLQAARPQAQDKRPAVTSQPCPPAATHSLGLGSNLSFGPGAKRPAQAPIQACLNFPKKPRLGPFQIPESAIQGGELGAPENLQPPPAATELGPSTSPQMGRRTPAQVPSVDRQPPHSTPCLPTAQACTMSHHSAASHDGAQPLRVLFRRLENGRWSSSLLAAPSFHSPEKPGTFLAQSPHVSEKSEAPCVRVPPSVLYEDLQVSSSSEDSDSDLE

SEQ ID NO: 29123 - protein, 686 aa, Homo sapiens
MQLGEQLLVSSVNLPGAHFYPLESARGGSGGSAGHLPSAAPSPQKLDLDKASKKFSGSLSCEAVSGEPAAASAGAPAAMLSDTDAGDAFASAAAVAKPGPPDGRKGSPCGEEELPSAAAAAAAAAAAAAATARYSMDSLSSERYYLQSPGPQGSELAAPCSLFPYQAAAGAPHGPVYPAPNGARYPYGSMLPPGGFPAAVCPPGRAQFGPGAGAGSGAGGSSGGGGGPGTYQYSQGAPLYGPYPGAAAAGSCGGLGGLGVPGSGFRAHVYLCNRPLWLKFHRHQTEMIITKQGRRMFPFLSFNINGLNPTAHYNVFVEVVLADPNHWRFQGGKWVTCGKADNNMQGNKMYVHPESPNTGSHWMRQEISFGKLKLTNNKGANNNNTQMIVLQSLHKYQPRLHIVEVTEDGVEDLNEPSKTQTFTFSETQFIAVTAYQNTDITQLKIDHNPFAKGFRDNYDSSHQIVPGGRYGVQSFFPEPFVNTLPQARYYNGERTVPQTNGLLSPQQSEEVANPPQRWLVTPVQQPGTNKLDISSYESEYTSSTLLPYGIKSLPLQTSHALGYYPDPTFPAMAGWGGRGSYQRKMAAGLPWTSRTSPTVFSEDQLSKEKVKEEIGSSWIETPPSIKSLDSNDSGVYTSACKRRRLSPSNSSNENSPSIKCEDINAEEYSKDTSKGMGGYYAFYTTP

SEQ ID NO: 29124 - protein, 419 aa, Homo sapiens
MIITKQGRRMFPFLSFNINGLNPTAHYNVFVEVVLADPNHWRFQGGKWVTCGKADNNMQGNKMYVHPESPNTGSHWMRQEISFGKLKLTNNKGANNNNTQMIVLQSLHKYQPRLHIVEVTEDGVEDLNEPSKTQTFTFSETQFIAVTAYQNTDITQLKIDHNPFAKGFRDNYDSMYTASENDRLTPSPTDSPRSHQIVPGGRYGVQSFFPEPFVNTLPQARYYNGERTVPQTNGLLSPQQSEEVANPPQRWLVTPVQQPGTNKLDISSYESEYTSSTLLPYGIKSLPLQTSHALGYYPDPTFPAMAGWGGRGSYQRKMAAGLPWTSRTSPTVFSEDQLSKEKVKEEIGSSWIETPPSIKSLDSNDSGVYTSACKRRRLSPSNSSNENSPSIKCEDINAEEYSKDTSKGMGGYYAFYTTP

SEQ ID NO: 29125 - protein, 410 aa, Homo sapiens
MFPFLSFNINGLNPTAHYNVFVEVVLADPNHWRFQGGKWVTCGKADNNMQGNKMYVHPESPNTGSHWMRQEISFGKLKLTNNKGANNNNTQMIVLQSLHKYQPRLHIVEVTEDGVEDLNEPSKTQTFTFSETQFIAVTAYQNTDITQLKIDHNPFAKGFRDNYDSMYTASENDRLTPSPTDSPRSHQIVPGGRYGVQSFFPEPFVNTLPQARYYNGERTVPQTNGLLSPQQSEEVANPPQRWLVTPVQQPGTNKLDISSYESEYTSSTLLPYGIKSLPLQTSHALGYYPDPTFPAMAGWGGRGSYQRKMAAGLPWTSRTSPTVFSEDQLSKEKVKEEIGSSWIETPPSIKSLDSNDSGVYTSACKRRRLSPSNSSNENSPSIKCEDINAEEYSKDTSKGMGGYYAFYTTP

SEQ ID NO: 29126 - protein, 705 aa, Homo sapiens
MQLGEQLLVSSVNLPGAHFYPLESARGGSGGSAGHLPSAAPSPQKLDLDKASKKFSGSLSCEAVSGEPAAASAGAPAAMLSDTDAGDAFASAAAVAKPGPPDGRKGSPCGEEELPSAAAAAAAAAAAAAATARYSMDSLSSERYYLQSPGPQGSELAAPCSLFPYQAAAGAPHGPVYPAPNGARYPYGSMLPPGGFPAAVCPPGRAQFGPGAGAGSGAGGSSGGGGGPGTYQYSQGAPLYGPYPGAAAAGSCGGLGGLGVPGSGFRAHVYLCNRPLWLKFHRHQTEMIITKQGRRMFPFLSFNINGLNPTAHYNVFVEVVLADPNHWRFQGGKWVTCGKADNNMQGNKMYVHPESPNTGSHWMRQEISFGKLKLTNNKGANNNNTQMIVLQSLHKYQPRLHIVEVTEDGVEDLNEPSKTQTFTFSETQFIAVTAYQNTDITQLKIDHNPFAKGFRDNYDSMYTASENDRLTPSPTDSPRSHQIVPGGRYGVQSFFPEPFVNTLPQARYYNGERTVPQTNGLLSPQQSEEVANPPQRWLVTPVQQPGTNKLDISSYESEYTSSTLLPYGIKSLPLQTSHALGYYPDPTFPAMAGWGGRGSYQRKMAAGLPWTSRTSPTVFSEDQLSKEKVKEEIGSSWIETPPSIKSLDSNDSGVYTSACKRRRLSPSNSSNENSPSIKCEDINAEEYSKDTSKGMGGYYAFYTTP

SEQ ID NO: 29127 - protein, 708 aa, Homo sapiens
MATTAELFEEPFVADEYIERLVWRTPGGGSRGGPEAFDPKRLLEEFVNHIQELQIMDERIQRKVEKLEQQCQKEAKEFAKKVQELQKSNQVAFQHFQELDEHISYVATKVCHLGDQLEGVNTPRQRAVEAQKLMKYFNEFLDGELKSDVFTNSEKIKEAADIIQKLHLIAQELPFDRFSEVKSKIASKYHDLECQLIQEFTSAQRRGEISRMREVAAVLLHFKGYSHCVDVYIKQCQEGAYLRNDIFEDAGILCQRVNKQVGDIFSNPETVLAKLIQNVFEIKLQSFVKEQLEECRKSDAEQYLKNLYDLYTRTTNLSSKLMEFNLGTDKQTFLSKLIKSIFISYLENYIEVETGYLKSRSAMILQRYYDSKNHQKRSIGTGGIQDLKERIRQRTNLPLGPSIDTHGETFLSQEVVVNLLQETKQAFERCHRLSDPSDLPRNAFRIFTILVEFLCIEHIDYALETGLAGIPSSDSRNANLYFLDVVQQANTIFHLFDKQFNDHLMPLISSSPKLSECLQKKKEIIEQMEMKLDTGIDRTLNCMIGQMKHILAAEQKKTDFKPEDENNVLIQYTNACVKVCAYVRKQVEKIKNSMDGKNVDTVLMELGVRFHRLIYEHLQQYSYSCMGGMLAICDVAEYRKCAKDFKIPMVLHLFDTLHALCNLLVVAPDNLKQVCSGEQLANLDKNILHSFVQLRADYRSARLARHFS

SEQ ID NO: 29128 - protein, 691 aa, Homo sapiens
MGQALGIKSCDFQAARNNEEHHTKALSSRRLFVRRGQPFTIILYFRAPVRAFLPALKKVALTAQTGEQPSKINRTQATFPISSLGDRKWWSAVVEERDAQSWTISVTTPADAVIGHYSLLLQVSGRKQLLLGQFTLLFNPWNREDAVFLKNEAQRMEYLLNQNGLIYLGTADCIQAESWDFGQFEGDVIDLSLRLLSKDKQVEKWSQPVHVARVLGALLHFLKEQRVLPTPQTQATQEGALLNKRRGSVPILRQWLTGRGRPVYDGQAWVLAAVACTVLRCLGIPARVVTTFASAQGTGGRLLIDEYYNEEGLQNGEGQRGRIWIFQTSTECWMTRPALPQGYDGWQILHPSAPNGGGVLGSCDLVPVRAVKEGTLGLTPAVSDLFAAINASCVVWKCCEDGTLELTDSNTKYVGNNISTKGVGSDRCEDITQNYKYPEGSLQEKEVLERVEKEKMEREKDNGIRPPSLETASPLYLLLKAPSSLPLRGDAQISVTLVNHSEQEKAVQLAIGVQAVHYNGVLAAKLWRKKLHLTLSANLEKIITIGLFFSNFERNPPENTFLRLTAMATHSESNLSCFAQEDIAICRPHLAIKMPEKAEQYQPLTASVSLQNSLDAPMEDCVISILGRGLIHRERSYRFRSVWPENTMCAKFQFTPTHVGLQRLTVEVDCNMFQNLTNYKSVTVVAPELSA

SEQ ID NO: 29129 - protein, 721 aa, Homo sapiens
MGQGEPSQRSTGLAGLYAAPAASPVFIKGSGMDALGIKSCDFQAARNNEEHHTKALSSRRLFVRRGQPFTIILYFRAPVRAFLPALKKVALTAQTGEQPSKINRTQATFPISSLGDRKWWSAVVEERDAQSWTISVTTPADAVIGHYSLLLQVSGRKQLLLGQFTLLFNPWNREDAVFLKNEAQRMEYLLNQNGLIYLGTADCIQAESWDFGQFEGDVIDLSLRLLSKDKQVEKWSQPVHVARVLGALLHFLKEQRVLPTPQTQATQEGALLNKRRGSVPILRQWLTGRGRPVYDGQAWVLAAVACTVLRCLGIPARVVTTFASAQGTGGRLLIDEYYNEEGLQNGEGQRGRIWIFQTSTECWMTRPALPQGYDGWQILHPSAPNGGGVLGSCDLVPVRAVKEGTLGLTPAVSDLFAAINASCVVWKCCEDGTLELTDSNTKYVGNNISTKGVGSDRCEDITQNYKYPEGSLQEKEVLERVEKEKMEREKDNGIRPPSLETASPLYLLLKAPSSLPLRGDAQISVTLVNHSEQEKAVQLAIGVQAVHYNGVLAAKLWRKKLHLTLSANLEKIITIGLFFSNFERNPPENTFLRLTAMATHSESNLSCFAQEDIAICRPHLAIKMPEKAEQYQPLTASVSLQNSLDAPMEDCVISILGRGLIHRERSYRFRSVWPENTMCAKFQFTPTHVGLQRLTVEVDCNMFQNLTNYKSVTVVAPELSA

SEQ ID NO: 29130 - protein, 619 aa, Homo sapiens
MGQALGIKSCDFQAARNNEEHHTKALSSRRLFVRRGQPFTIILYFRAPVRAFLPALKKVALTAQTGEQPSKINRTQATFPISSLGDRKWWSAVVEERDAQSWTISVTTPADAVIGHYSLLLQVSGRKQLLLGQFTLLFNPWNREDAVFLKNEAQRMEYLLNQNGLIYLGTADCIQAESWDFGQFEGDVIDLSLRLLSKDKQVEKWSQPVHVARVLGALLHFLKEQRVLPTPQTQATQEGALLNKRRGSVPILRQWLTGRGRPVYDGQAWVLAAVACTVLRCLGIPARVVTTFASAQGTGGRLLIDEYYNEEGLQNGEGQRGRIWKCCEDGTLELTDSNTKYVGNNISTKGVGSDRCEDITQNYKYPEGSLQEKEVLERVEKEKMEREKDNGIRPPSLETASPLYLLLKAPSSLPLRGDAQISVTLVNHSEQEKAVQLAIGVQAVHYNGVLAAKLWRKKLHLTLSANLEKIITIGLFFSNFERNPPENTFLRLTAMATHSESNLSCFAQEDIAICRPHLAIKMPEKAEQYQPLTASVSLQNSLDAPMEDCVISILGRGLIHRERSYRFRSVWPENTMCAKFQFTPTHVGLQRLTVEVDCNMFQNLTNYKSVTVVAPELSA

SEQ ID NO: 29131 - protein, 453 aa, Homo sapiens
MKLLVILLFSGLITGFRSDSSSSLPPKLLLVSFDGFRADYLKNYEFPHLQNFIKEGVLVEHVKNVFITKTFPNHYSIVTGLYEESHGIVANSMYDAVTKKHFSDSNDKDPFWWNEAVPIWVTNQLQENRSSAAAMWPGTDVPIHDTISSYFMNYNSSVSFEERLNNITMWLNNSNPPVTFATLYWEEPDASGHKYGPEDKENMSRVLKKIDDLIGDLVQRLKMLGLWENLNVIITSDHGMTQCSQDRLINLDSCIDHSYYTLIDLSPVAAILPKINRTEVYNKLKNCSPHMNVYLKEDIPNRFYYQHNDRIQPIILVADEGWTIVLNESSQKLGDHGYDNSLPSMHPFLAAHGPAFHKGYKHSTINIVDIYPMMCHILGLKPHPNNGTFGHTKCLLVDQWCINLPEAIAIVIGSLLVLTMLTCLIIIMQNRLSVPRPFSRLQLQEDDDDPLIG

SEQ ID NO: 29132 - protein, 337 aa, Homo sapiens
MATASPAADGGRGRPWEGGLVSWPPAPPLTLPWTWMGPSWGQHPGHWGFPALTEPSASPAAGLGIFEVRRVLDASGCSMLAPLQTGAARFSSYLLSRARKVLGSHLFSPCGVPEFCSISTRKLAAHGFGASMAAMVSFPPQRYHYFLVLDFEATCDKPQIHPQEIIEFPILKLNGRTMEIESTFHMYVQPVVHPQLTPFCTELTGIIQAMVDGQPSLQQVLERVDEWMAKEGLLDPNVKSIFVTCGDWDLKVMLPGQCQYLGLPVADYFKQWINLKKAYSFAMGCWPKNGLLDMNKGLSLQHIGRPHSGIDDCKNIANIMKTLAYRGFIFKQTSKPF

SEQ ID NO: 29133 - protein, 222 aa, Homo sapiens
MFVMLQVPWLQSCANLVQIGAPLPLLGCLGQYFEVLGSMEVLAGQYGMEIIEFPILKLNGRTMEIESTFHMYVQPVVHPQLTPFCTELTGIIQAMVDGQPSLQQVLERVDEWMAKEGLLDPNVKSIFVTCGDWDLKVMLPGQCQYLGLPVADYFKQWINLKKAYSFAMGCWPKNGLLDMNKGLSLQHIGRPHSGIDDCKNIANIMKTLAYRGFIFKQTSKPF

SEQ ID NO: 29134 - protein, 128 aa, Homo sapiens
MVDGQPSLQQVLERVDEWMAKEGLLDPNVKSIFVTCGDWDLKVMLPGQCQYLGLPVADYFKQWINLKKAYSFAMGCWPKNGLLDMNKGLSLQHIGRPHSGIDDCKNIANIMKTLAYRGFIFKQTSKPF

SEQ ID NO: 29135 - protein, 1019 aa, Homo sapiens
MGSKRGISSRHHSLSSYEIMFAALFAILVVLCAGLIAVSCLTIKESQRGAALGQSHEARATFKITSGVTYNPNLQDKLSVDFKVLAFDLQQMIDEIFLSSNLKNEYKNSRVLQFENGSIIVVFDLFFAQWVSDENVKEELIQGLEANKSSQLVTFHIDLNSVDILDKLTTTSHLATPGNVSIECLPGSSPCTDALTCIKADLFCDGEVNCPDGSDEDNKMCATVCDGRFLLTGSSGSFQATHYPKPSETSVVCQWIIRVNQGLSIKLSFDDFNTYYTDILDIYEGVGSSKILRASIWETNPGTIRIFSNQVTATFLIESDESDYVGFNATYTAFNSSELNNYEKINCNFEDGFCFWVQDLNDDNEWERIQGSTFSPFTGPNFDHTFGNASGFYISTPTGPGGRQERVGLLSLPLDPTLEPACLSFWYHMYGENVHKLSINISNDQNMEKTVFQKEGNYGDNWNYGQVTLNETVKFKVAFNAFKNKILSDIALDDISLTYGICNGSLYPEPTLVPTPPPELPTDCGGPFELWEPNTTFSSTNFPNSYPNLAFCVWILNAQKGKNIQLHFQEFDLENINDVVEIRDGEEADSLLLAVYTGPGPVKDVFSTTNRMTVLLITNDVLARGGFKANFTTGYHLGIPEPCKADHFQCKNGECVPLVNLCDGHLHCEDGSDEADCVRFFNGTTNNNGLVRFRIQSIWHTACAENWTTQISNDVCQLLGLGSGNSSKPIFPTDGGPFVKLNTAPDGHLILTPSQQCLQDSLIRLQCNHKSCGKKLAAQDITPKIVGGSNAKEGAWPWVVGLYYGGRLLCGASLVSSDWLVSAAHCVYGRNLEPSKWTAILGLHMKSNLTSPQTVPRLIDEIVINPHYNRRRKDNDIAMMHLEFKVNYTDYIQPICLPEENQVFPPGRNCSIAGWGTVVYQGTTANILQEADVPLLSNERCQQQMPEYNITENMICAGYEEGGIDSCQGDSGGPLMCQENNRWFLAGVTSFGYKCALPNRPGVYARVSRFTEWIQSFLH

SEQ ID NO: 29136 - protein, 483 aa, Homo sapiens
MEEGGGGVRSLVPGGPVLLVLCGLLEASGGGRALPQLSDDIPFRVNWPGTEFSLPTTGVLYKEDNYVIMTTAHKEKYKCILPLVTSGDEEEEKDYKGPNPRELLEPLFKQSSCSYRIESYWTYEVCHGKHIRQYHEEKETGQKINIHEYYLGNMLAKNLLFEKEREAEEKEKSNEIPTKNIEGQMTPYYPVGMGNGTPCSLKQNRPRSSTVMYICHPESKHEILSVAEVTTCEYEVVILTPLLCSHPKYRFRASPVNDIFCQSLPGSPFKPLTLRQLEQQEEILRVPFRRNKEEDLQSTKEERFPAIHKSIAIGSQPVLTVGTTHISKLTDDQLIKEFLSGSYCFRGGVGWWKYEFCYGKHVHQYHEDKDSGKTSVVVGTWNQEEHIEWAKKNTARAYHLQDDGTQTVRMVSHFYGNGDICDITDKPRQVTVKLKCKESDSPHAVTVYMLEPHSCQYILGVESPVICKILDTADENGLLSLPN

SEQ ID NO: 29137 - protein, 429 aa, Homo sapiens
MEEGGGGVRSLVPGGPVLLVLCGLLEASGGGRALPQLSDDIPFRVNWPGTEFSLPTTGVLYKEDNYVIMTTAHKEKYKCILPLVTSGDEEEEKDYKGPNPRELLEPLFKQSSCSYRIESYWTYEVCHGKHIRQYHEEKETGQKINIHEYYLGNMLAKNLLFEKEREAEEKEKSNEIPTKNIEGQMTPYYPVGMGNGTPCSLKQNRPRSSTVMYICHPESKHEILSVAEVTTCEYEVVILTPLLCSHPKYRFRASPVNDIFCQSLPGSPFKPLTLRQLEQQEEILRVPFRRNKEGVGWWKYEFCYGKHVHQYHEDKDSGKTSVVVGTWNQEEHIEWAKKNTARAYHLQDDGTQTVRMVSHFYGNGDICDITDKPRQVTVKLKCKESDSPHAVTVYMLEPHSCQYILGVESPVICKILDTADENGLLSLPN

SEQ ID NO: 29138 - protein, 457 aa, Homo sapiens
MEEGGGGVRSLVPGGPVLLVLCGLLEASGGGRALPQLSDDIPFRVNWPGTEFSLPTTGVLYKEDNYVIMTTAHKEKYKCILPLVTSGDEEEEKDYKGPNPRELLEPLFKQSSCSYRIESYWTYEVCHGKHIRQYHEEKETGQKINIHEYYLGNMLAKNLLFEKEREAEEKEKSNEIPTKNIEGQMTPYYPVGMGNGTPCSLKQNRPRSSTVMYICHPESKHEILSVAEVTTCEYEVVILTPLLCSHPKYRFRASPVNDIFCQSLPGSPFKPLTLRQLEQQEEILRVPFRRNKEEDLQSTKEERFPAIHKSIAIGSQPVLTVGTTHISKLTDDQLIKEFLSGSYCFRGGVGWWKYEFCYGKHVHQYHEDKDSGKTSVVVGTWNQEEHIEWAKKNTARAYHLQDDGTQTVRCKESDSPHAVTVYMLEPHSCQYILGVESPVICKILDTADENGLLSLPN

SEQ ID NO: 29139 - protein, 885 aa, Homo sapiens
MAPPSTREPRVLSATSATKSDGEMVLPGFPDADSFVKFALGSVVAVTKASGGLPQFGDEYDFYRSFPGFQAFCETQGDRLLQCMSRVMQYHGCRSNIKDRSKVTELEDKFDLLVDANDVILERVGILLDEASGVNKNQQPVLPAGLQVPKTVVSSWNRKAAEYGKKAKSETFRLLHAKNIIRPQLKFREKIDNSNTPFLPKIFIKPNAQKPLPQALSKERRERPQDRPEDLDVPPALADFIHQQRTQQVEQDMFAHPYQYELNHFTPADAVLQKPQPQLYRPIEETPCHFISSLDELVELNEKLLNCQEFAVDLEHHSYRSFLGLTCLMQISTRTEDFIIDTLELRSDMYILNESLTDPAIVKVFHGADSDIEWLQKDFGLYVVNMFDTHQAARLLNLGRHSLDHLLKLYCNVDSNKQYQLADWRIRPLPEEMLSYARDDTHYLLYIYDKMRLEMWERGNGQPVQLQVVWQRSRDICLKKFIKPIFTDESYLELYRKQKKHLNTQQLTAFQLLFAWRDKTARREDESYGYVLPNHMMLKIAEELPKEPQGIIACCNPVPPLVRQQINEMHLLIQQAREMPLLKSEVAAGVKKSGPLPSAERLENVLFGPHDCSHAPPDGYPIIPTSGSVPVQKQASLFPDEKEDNLLGTTCLIATAVITLFNEPSAEDSKKGPLTVAQKKAQNIMESFENPFRMFLPSLGHRAPVSQAAKFDPSTKIYEISNRWKLAQVQVQKDSKEAVKKKAAEQTAAREQAKEACKAAAEQAISVRQQVVLENAAKKRERATSDPRTTEQKQEKKRLKISKKPKDPEPPEKEFTPYDYSQSDFKAFAGNSKSKVSSQFDPNKQTPSGKKCIAAKKIKQSVGNKSMSFPTGKSDRGFRYNWPQR

SEQ ID NO: 29140 - protein, 860 aa, Homo sapiens
MAPPSTREPRVLSATSATKSDGEMVLPGFPDADSFVKFALGSVVAVTKASGGLPQFGDEYDFYRSFPGFQAFCETQGDRLLQCMSRVMQYHGCRSNIKDRSKVTELEDKFDLLVDANDVILERVGILLDEASGVNKNQQPVLPAGLQVPKTVVSSWNRKAAEYGKKAKSETFRLLHAKNIIRPQLKFREKIDNSNTPFLPKIFIKPNAQKPLPQALSKERRERPQDRPEDLDVPPALADFIHQQRTQQVEQDMFAHPYQYELNHFTPADAVLQKPQPQLYRPIEETPCHFISSLDELVELNEKLLNCQEFAVDLEHHSYRSFLGLTCLMQISTRTEDFIIDTLELRSDMYILNESLTDPAIVKVFHGADSDIEWLQKDFGLYVVNMFDTHQAARLLNLGRHSLDHLLKLYCNVDSNKQYQLADWRIRPLPEEMLSYARDDTHYLLYIYDKMRLEMWERGNGQPVQLQVVWQRSRDICLKKFIKPIFTDESYLELYRKQKKHLNTQQLTAFQLLFAWRDKTARREDESYGYVLPNHMMLKIAEELPKEPQGIIACCNPVPPLVRQQINEMHLLIQQAREMPLLKSEVAAGVKKSGPLPSAERLENVLFGPHDCSHAPPDGYPIIPTSGSVPVQKQASLFPDEKEDNLLGTTCLIATAVITLFNEPSAEDSKKGPLTVAQKKAQNIMESFENPFRMISNRWKLAQVQVQKDSKEAVKKKAAEQTAAREQAKEACKAAAEQAISVRQQVVLENAAKKRERATSDPRTTEQKQEKKRLKISKKPKDPEPPEKEFTPYDYSQSDFKAFAGNSKSKVSSQFDPNKQTPSGKKCIAAKKIKQSVGNKSMSFPTGKSDRGFRYNWPQR

SEQ ID NO: 29141 - protein, 558 aa, Homo sapiens
MAQDSVDLSCDYQFWMQKLSVWDQASTLETQQDTCLHVAQFQEFLRKMYEALKEMDSNTVIERFPTIGQLLAKACWNPFILAYDESQKILIWCLCCLINKEPQNSGQSKLNSWIQGVLSHILSALRFDKEVALFTQGLGYAPIDYYPGLLKNMVLSLASELRENHLNGFNTQRRMAPERVASLSRVCVPLITLTDVDPLVEALLICHGREPQEILQPEFFEAVNEAILLKKISLPMSAVVCLWLRHLPSLEKAMLHLFEKLISSERNCLRRIECFIKDSSLPQAACHPAIFRVVDEMFRCALLETDGALEIIATIQVFTQCFVEALEKASKQLRFALKTYFPYTSPSLAMVLLQDPQDIPRGHWLQTLKHISELLREAVEDQTHGSCGGPFESWFLFIHFGGWAEMVAEQLLMSAAEPPTALLWLLAFYYGPRDGRQQRAQTMVQVKAVLGHLLAMSRSSSLSAQDLQTVAGQGTDTDLRAPAQQLIRHLLLNFLLWAPGGHTIAWDVITLMAHTAEITHEIIGFLDQTLYRWNRLGIESPRSEKLARELLKELRTQV

SEQ ID NO: 29142 - protein, 227 aa, Homo sapiens
MRVAGAAKLVVAVAVFLLTFYVISQVFEIKMDASLGNLFARSALDTAARSTKPPRYKCGISKACPEKHFAFKMASGAANVVGPKICLEDNVLMSGVKNNVGRGINVALANGKTGEVLDTKYFDMWGGDVAPFIEFLKAIQDGTIVLMGTYDDGATKLNDEARRLIADLGSTSITNLGFRDNWVFCGGKGIKTKSPFEQHIKNNKDTNKYEGWPEVVEMEGCIPQKQD

SEQ ID NO: 29143 - protein, 493 aa, Homo sapiens
MLKALFLTMLTLALVKSQDTEETITYTQCTDGYEWDPVRQQCKDIDECDIVPDACKGGMKCVNHYGGYLCLPKTAQIIVNNEQPQQETQPAEGTSGATTGVVAASSMATSGVLPGGGFVASAAAVAGPEMQTGRNNFVIRRNPADPQRIPSNPSHRIQCAAGYEQSEHNVCQDIDECTAGTHNCRADQVCINLRGSFACQCPPGYQKRGEQCVDIDECTIPPYCHQRCVNTPGSFYCQCSPGFQLAANNYTCVDINECDASNQCAQQCYNILGSFICQCNQGYELSSDRLNCEDIDECRTSSYLCQYQCVNEPGKFSCMCPQGYQVVRSRTCQDINECETTNECREDEMCWNYHGGFRCYPRNPCQDPYILTPENRCVCPVSNAMCRELPQSIVYKYMSIRSDRSVPSDIFQIQATTIYANTINTFRIKSGNENGEFYLRQTSPVSAMLVLVKSLSGPREHIVDLEMLTVSSIGTFRTSSVLRLTIIVGPFSF

SEQ ID NO: 29144 - protein, 485 aa, Homo sapiens
MLTLALVKSQDTEETITYTQCTDGYEWDPVRQQCKDIDECDIVPDACKGGMKCVNHYGGYLCLPKTAQIIVNNEQPQQETQPAEGTSGATTGVVAASSMATSGVLPGGGFVASAAAVAGPEMQTGRNNFVIRRNPADPQRIPSNPSHRIQCAAGYEQSEHNVCQDIDECTAGTHNCRADQVCINLRGSFACQCPPGYQKRGEQCVDIDECTIPPYCHQRCVNTPGSFYCQCSPGFQLAANNYTCVDINECDASNQCAQQCYNILGSFICQCNQGYELSSDRLNCEDIDECRTSSYLCQYQCVNEPGKFSCMCPQGYQVVRSRTCQDINECETTNECREDEMCWNYHGGFRCYPRNPCQDPYILTPENRCVCPVSNAMCRELPQSIVYKYMSIRSDRSVPSDIFQIQATTIYANTINTFRIKSGNENGEFYLRQTSPVSAMLVLVKSLSGPREHIVDLEMLTVSSIGTFRTSSVLRLTIIVGPFSF

SEQ ID NO: 29145 - protein, 492 aa, Homo sapiens
MLKALFLTMLTLALVKSQDTEETITYTQCTDGYEWDPVRQQCKDIDECDIVPDACKGMKCVNHYGGYLCLPKTAQIIVNNEQPQQETQPAEGTSGATTGVVAASSMATSGVLPGGGFVASAAAVAGPEMQTGRNNFVIRRNPADPQRIPSNPSHRIQCAAGYEQSEHNVCQDIDECTAGTHNCRADQVCINLRGSFACQCPPGYQKRGEQCVDIDECTIPPYCHQRCVNTPGSFYCQCSPGFQLAANNYTCVDINECDASNQCAQQCYNILGSFICQCNQGYELSSDRLNCEDIDECRTSSYLCQYQCVNEPGKFSCMCPQGYQVVRSRTCQDINECETTNECREDEMCWNYHGGFRCYPRNPCQDPYILTPENRCVCPVSNAMCRELPQSIVYKYMSIRSDRSVPSDIFQIQATTIYANTINTFRIKSGNENGEFYLRQTSPVSAMLVLVKSLSGPREHIVDLEMLTVSSIGTFRTSSVLRLTIIVGPFSF

SEQ ID NO: 29146 - protein, 492 aa, Homo sapiens
MLKALFLTMLTLALVKSQDTEETITYTQCTDGYEWDPVRQQCKDIDECDIVPDACKGGMKCVNHYGGYLCLPKTAQIIVNNEQPQQETQPAEGTSGATTGVVAASMATSGVLPGGGFVASAAAVAGPEMQTGRNNFVIRRNPADPQRIPSNPSHRIQCAAGYEQSEHNVCQDIDECTAGTHNCRADQVCINLRGSFACQCPPGYQKRGEQCVDIDECTIPPYCHQRCVNTPGSFYCQCSPGFQLAANNYTCVDINECDASNQCAQQCYNILGSFICQCNQGYELSSDRLNCEDIDECRTSSYLCQYQCVNEPGKFSCMCPQGYQVVRSRTCQDINECETTNECREDEMCWNYHGGFRCYPRNPCQDPYILTPENRCVCPVSNAMCRELPQSIVYKYMSIRSDRSVPSDIFQIQATTIYANTINTFRIKSGNENGEFYLRQTSPVSAMLVLVKSLSGPREHIVDLEMLTVSSIGTFRTSSVLRLTIIVGPFSF

SEQ ID NO: 29147 - protein, 355 aa, Homo sapiens
MKCVNHYGGYLCLPKTAQIIVNNEQPQQETQPAEGTSGATTGVVAASSMATSGVLPGGGFVASAAAVAGPEMQTGRNNFVIRRNPADPQRIPSNPSHRIQCAAGYEQSEHNVCQDIDECTAGTHNCRADQVCINLRGSFACQCPPGYQKRGEQCVDIDECRTSSYLCQYQCVNEPGKFSCMCPQGYQVVRSRTCQDINECETTNECREDEMCWNYHGGFRCYPRNPCQDPYILTPENRCVCPVSNAMCRELPQSIVYKYMSIRSDRSVPSDIFQIQATTIYANTINTFRIKSGNENGEFYLRQTSPVSAMLVLVKSLSGPREHIVDLEMLTVSSIGTFRTSSVLRLTIIVGPFSF

SEQ ID NO: 29148 - protein, 4588 aa, Homo sapiens
MGRHLALLLLLLLLFQHFGDSDGSQRLEQTPLQFTHLEYNVTVQENSAAKTYVGHPVKMGVYITHPAWEVRYKIVSGDSENLFKAEEYILGDFCFLRIRTKGGNTAILNREVKDHYTLIVKALEKNTNVEARTKVRVQVLDTNDLRPLFSPTSYSVSLPENTAIRTSIARVSATDADIGTNGEFYYSFKDRTDMFAIHPTSGVIVLTGRLDYLETKLYEMEILAADRGMKLYGSSGISSMAKLTVHIEQANECAPVITAVTLSPSELDRDPAYAIVTVDDCDQGANGDIASLSIVAGDLLQQFRTVRSFPGSKEYKVKAIGGIDWDSHPFGYNLTLQAKDKGTPPQFSSVKVIHVTSPQFKAGPVKFEKDVYRAEISEFAPPNTPVVMVKAIPAYSHLRYVFKSTPGKAKFSLNYNTGLISILEPVKRQQAAHFELEVTTSDRKASTKVLVKVLGANSNPPEFTQTAYKAAFDENVPIGTTVMSLSAVDPDEGENGYVTYSIANLNHVPFAIDHFTGAVSTSENLDYELMPRVYTLRIRASDWGLPYRREVEVLATITLNNLNDNTPLFEKINCEGTIPRDLGVGEQITTVSAIDADELQLVQYQIEAGNELDFFSLNPNSGVLSLKRSLMDGLGAKVSFHSLRITATDGENFATPLYINITVAASHKLVNLQCEETGVAKMLAEKLLQANKLHNQGEVEDIFFDSHSVNAHIPQFRSTLPTGIQVKENQPVGSSVIFMNSTDLDTGFNGKLVYAVSGGNEDSCFMIDMETGMLKILSPLDRETTDKYTLNITVYDLGIPQKAAWRLLHVVVVDANDNPPEFLQESYFVEVSEDKEVHSEIIQVEATDKDLGPNGHVTYSIVTDTDTFSIDSVTGVVNIARPLDRELQHEHSLKIEARDQAREEPQLFSTVVVKVSLEDVNDNPPTFIPPNYRVKVREDLPEGTVIMWLEAHDPDLGQSGQVRYSLLDHGEGNFDVDKLSGAVRIVQQLDFEKKQVYNLTVRAKDKGKPVSLSSTCYVEVEVVDVNENLHPPVFSSFVEKGTVKEDAPVGSLVMTVSAHDEDARRDGEIRYSIRDGSGVGVFKIGEETGVIETSDRLDRESTSHYWLTVFATDQGVVPLSSFIEIYIEVEDVNDNAPQTSEPVYYPEIMENSPKDVSVVQIEAFDPDSSSNDKLMYKITSGNPQGFFSIHPKTGLITTTSRKLDREQQDEHILEVTVTDNGSPPKSTIARVIVKILDENDNKPQFLQKFYKIRLPEREKPDRERNARREPLYHVIATDKDEGPNAEISYSIEDGNEHGKFFIEPKTGVVSSKRFSAAGEYDILSIKAVDNGRPQKSSTTRLHIEWISKPKPSLEPISFEESFFTFTVMESDPVAHMIGVISVEPPGIPLWFDITGGNYDSHFDVDKGTGTIIVAKPLDAEQKSNYNLTVEATDGTTTILTQVFIKVIDTNDHRPQFSTSKYEVVIPEDTAPETEILQISAVDQDEKNKLIYTLQSSRDPLSLKKFRLDPATGSLYTSEKLDHEAVHQHTLTVMVRDQDVPVKRNFARIVVNVSDTNDHAPWFTASSYKGRVYESAAVGSVVLQVTALDKDKGKNAEVLYSIESGNIGNSFMIDPVLGSIKTAKELDRSNQAEYDLMVKATDKGSPPMSEITSVRIFVTIADNASPKFTSKEYSVELSETVSIGSFVGMVTAHSQSSVVYEIKDGNTGDAFDINPHSGTIITQKALDFETLPIYTLIIQGTNMAGLSTNTTVLVHLQDENDNAPVFMQAEYTGLISESASINSVVLTDRNVPLVIRAADADKDSNALLVYHIVEPSVHTYFAIDSSTGAIHTVLSLDYEETSIFHFTVQVHDMGTPRLFAEYAANVTVHVIDINDCPPVFAKPLYEASLLLPTYKGVKVITVNATDADSSAFSQLIYSITEGNIGEKFSMDYKTGALTVQNTTQLRSRYELTVRASDGRFAGLTSVKINVKESKESHLKFTQDVYSAVVKENSTEAETLAVITAIGNPINEPLFYHILNPDRRFKISRTSGVLSTTGTPFDREQQEAFDVVVEVTEEHKPSAVAHVVVKVIVEDQNDNAPVFVNLPYYAVVKVDTEVGHVIRYVTAVDRDSGRNGEVHYYLKEHHEHFQIGPLGEISLKKQFELDTLNKEYLVTVVAKDGGNPAFSAEVIVPITVMNKAMPVFEKPFYSAEIAESIQVHSPVVHVQANSPEGLKVFYSITDGDPFSQFTINFNTGVINVIAPLDFEAHPAYKLSIRATDSLTGAHAEVFVDIIVDDINDNPPVFAQQSYAVTLSEASVIGTSVVQVRATDSDSEPNRGISYQMFGNHSKSHDHFHVDSSTGLISLLRTLDYEQSRQHTIFVRAVDGGMPTLSSDVIVTVDVTDLNDNPPLFEQQIYEARISEHAPHGHFVTCVKAYDADSSDIDKLQYSILSGNDHKHFVIDSATGIITLSNLHRHALKPFYSLNLSVSDGVFRSSTQVHVTVIGGNLHSPAFLQNEYEVELAENAPLHTLVMEVKTTDGDSGIYGHVTYHIVNDFAKDRFYINERGQIFTLEKLDRETPAEKVISVRLMAKDAGGKVAFCTVNVILTDDNDNAPQFRATKYEVNIGSSAAKGTSVVKVLASDADEGSNADITYAIEADSESVKENLEINKLSGVITTKESLIGLENEFFTFFVRAVDNGSPSKESVVLVYVKILPPEMQLPKFSEPFYTFTVSEDVPIGTEIDLIRAEHSGTVLYSLVKGNTPESNRDESFVIDRQSGRLKLEKSLDHETTKWYQFSILARCTQDDHEMVASVDVSIQVKDANDNSPVFESSPYEAFIVENLPGGSRVIQIRASDADSGTNGQVMYSLDQSQSVEVIESFAINMETGWITTLKELDHEKRDNYQIKVVASDHGEKIQLSSTAIVDVTVTDVNDSPPRFTAEIYKGTVSEDDPQGGVIAILSTTDADSEEINRQVTYFITGGDPLGQFAVETIQNEWKVYVKKPLDREKRDNYLLTITATDGTFSSKAIVEVKVLDANDNSPVCEKTLYSDTIPEDVLPGKLIMQISATDADIRSNAEITYTLLGSGAEKFKLNPDTGELKTSTPLDREEQAVYHLLVRATDGGGRFCQASIVLTLEDVNDNAPEFSADPYAITVFENTEPGTLLTRVQATDADAGLNRKILYSLIDSADGQFSINELSGIIQLEKPLDRELQAVYTLSLKAVDQGLPRRLTATGTVIVSVLDINDNPPVFEYREYGATVSEDILVGTEVLQVYAASRDIEANAEITYSIISGNEHGKFSIDSKTGAVFIIENLDYESSHEYYLTVEATDGGTPSLSDVATVNVNVTDINDNTPVFSQDTYTTVISEDAVLEQSVITVMADDADGPSNSHIHYSIIDGNQGSSFTIDPVRGEVKVTKLLDRETISGYTLTVQASDNGSPPRVNTTTVNIDVSDVNDNAPVFSRGNYSVIIQENKPVGFSVLQLVVTDEDSSHNGPPFFFTIVTGNDEKAFEVNPQGVLLTSSAIKRKEKDHYLLQVKVADNGKPQLSSLTYIDIRVIEESIYPPAILPLEIFITSSGEEYSGGVIGKIHATDQDVYDTLTYSLDPQMDNLFSVSSTGGKLIAHKKLDIGQYLLNVSVTDGKFTTVADITVHIRQVTQEMLNHTIAIRFANLTPEEFVGDYWRNFQRALRNILGVRRNDIQIVSLQSSEPHPHLDVLLFVEKPGSAQISTKQLLHKINSSVTDIEEIIGVRILNVFQKLCAGLDCPWKFCDEKVSVDESVMSTHSTARLSFVTPRHHRAAVCLCKEGRCPPVHHGCEDDPCPEGSECVSDPWEEKHTCVCPSGRFGQCPGSSSMTLTGNSYVKYRLTENENKLEMKLTMRLRTYSTHAVVMYARGTDYSILEIHHGRLQYKFDCGSGPGIVSVQSIQVNDGQWHAVALEVNGNYARLVLDQVHTASGTAPGTLKTLNLDNYVFFGGHIRQQGTRHGRSPQVGNGFRGCMDSIYLNGQELPLNSKPRSYAHIEESVDVSPGCFLTATEDCASNPCQNGGVCNPSPAGGYYCKCSALYIGTHCEISVNPCSSKPCLYGGTCVVDNGGFVCQCRGLYTGQRCQLSPYCKDEPCKNGGTCFDSLDGAVCQCDSGFRGERCQSDIDECSGNPCLHGALCENTHGSYHCNCSHEYRGRHCEDAAPNQYVSTPWNIGLAEGIGIVVFVAGIFLLVVVFVLCRKMISRKKKHQAEPKDKHLGPATAFLQRPYFDSKLNKNIYSDIPPQVPVRPISYTPSIPSDSRNNLDRNSFEGSAIPEHPEFSTFNPESVHGHRKAVAVCSVAPNLPPPPPSNSPSDSDSIQKPSWDFDYDTKVVDLDPCLSKKPLEEKPSQPYSARESLSEVQSLSSFQSESCDDNGYHWDTSDWMPSVPLPDIQEFPNYEVIDEQTPLYSADPNAIDTDYYPGGYDIESDFPPPPEDFPAADELPPLPPEFSNQFESIHPPRDMPAAGSLGSSSRNRQRFNLNQYLPNFYPLDMSEPQTKGTGENSTCREPHAPYPPGYQRHFEAPAVESMPMSVYASTASCSDVSACCEVESEVMMSDYESGDDGHFEEVTIPPLDSQQHTEV

SEQ ID NO: 29149 - protein, 501 aa, Homo sapiens
MSETEFHHGAQAGLELLRSSNSPTSASQSAGMTVTDQAFVTLATNDIYCQGALVLGQSLRRHRLTRKLVVLITPQVSSLLRVILSKVFDEVIEVNLIDSADYIHLAFLKRPELGLTLTKLHCWTLTHYSKCVFLDADTLVLSNVDELFDRGEFSAAPDPGWPDCFNSGVFVFQPSLHTHKLLLQHAMEHGSFDGADQGLLNSFFRNWSTTDIHKHLPFIYNLSSNTMYTYSPAFKQFGSSAKVVHFLGSMKPWNYKYNPQSGSVLEQGSASSSQHQAAFLHLWWTVYQNNVLPLYKSVQAGEARASPGHTLCHSDVGGPCADSASGVGEPCENSTPSAGVPCANSPLGSNQPAQGLPEPTQIVDETLSLPEGRRSEDMIACPETETPAVITCDPLSQPSPQPADFTETETILQPANKVESVSSEETFEPSQELPAEALRDPSLQDALEVDLAVSVSQISIEEKVKELSPEEERRKWEEGRIDYMGKDAFARIQEKLDRFLQ

SEQ ID NO: 29150 - protein, 470 aa, Homo sapiens
MSVTDQAFVTLATNDIYCQGALVLGQSLRRHRLTRKLVVLITPQVSSLLRVILSKVFDEVIEVNLIDSADYIHLAFLKRPELGLTLTKLHCWTLTHYSKCVFLDADTLVLSNVDELFDRGEFSAAPDPGWPDCFNSGVFVFQPSLHTHKLLLQHAMEHGSFDGADQGLLNSFFRNWSTTDIHKHLPFIYNLSSNTMYTYSPAFKQFGSSAKVVHFLGSMKPWNYKYNPQSGSVLEQGSASSSQHQAAFLHLWWTVYQNNVLPLYKSVQAGEARASPGHTLCHSDVGGPCADSASGVGEPCENSTPSAGVPCANSPLGSNQPAQGLPEPTQIVDETLSLPEGRRSEDMIACPETETPAVITCDPLSQPSPQPADFTETETILQPANKVESVSSEETFEPSQELPAEALRDPSLQDALEVDLAVSVSQISIEEKVKELSPEEERRKWEEGRIDYMGKDAFARIQEKLDRFLQ

SEQ ID NO: 29151 - protein, 461 aa, Homo sapiens
MSATNDIYCQGALVLGQSLRRHRLTRKLVVLITPQVSSLLRVILSKVFDEVIEVNLIDSADYIHLAFLKRPELGLTLTKLHCWTLTHYSKCVFLDADTLVLSNVDELFDRGEFSAAPDPGWPDCFNSGVFVFQPSLHTHKLLLQHAMEHGSFDGADQGLLNSFFRNWSTTDIHKHLPFIYNLSSNTMYTYSPAFKQFGSSAKVVHFLGSMKPWNYKYNPQSGSVLEQGSASSSQHQAAFLHLWWTVYQNNVLPLYKSVQAGEARASPGHTLCHSDVGGPCADSASGVGEPCENSTPSAGVPCANSPLGSNQPAQGLPEPTQIVDETLSLPEGRRSEDMIACPETETPAVITCDPLSQPSPQPADFTETETILQPANKVESVSSEETFEPSQELPAEALRDPSLQDALEVDLAVSVSQISIEEKVKELSPEEERRKWEEGRIDYMGKDAFARIQEKLDRFLQ

SEQ ID NO: 29152 - protein, 430 aa, Homo sapiens
MSETEFHHGAQAGLELLRSSNSPTSASQSAGMTVTDQAFVTLATNDIYCQGALVLGQSLRRHRLTRKLVVLITPQVSSLLRVILSKVFDEVIEVNLIDSADYIHLAFLKRPELGLTLTKLHCWTLTHYSKCVFLDADTLVLSNVDELFDRGEFSAAPDPGWPDCFNSGVFVFQPSLHTHKLLLQHAMEHGSFDGADQGLLNSFFRNWSTTDIHKHLPFIYNLSSNTMYTYSPAFKQFGSSAKVVHFLGSMKPWNYKYNPQSGSVLEQGSASSSQHQAAFLHLWWTVYQNNVLPLYKSVQAGEARASPGHTLCHSDVGGPCADSASGVGEPCENSTPSAGVPCANSPLGSNQPAQGLPEPTQIVDETLSLPEGRRSEDVDLAVSVSQISIEEKVKELSPEEERRKWEEGRIDYMGKDAFARIQEKLDRFLQ

SEQ ID NO: 29153 - protein, 406 aa, Homo sapiens
MSETEFHHGAQAGLELLRSSNSPTSASQSAGMTVTDQAFVTLATNDIYCQGALVLGQSLRRHRLTRKLVVLITPQVSSLLRVILSKVFDEVIEVNLIDSADYIHLAFLKRPELGLTLTKLHCWTLTHYSKCVFLDADTLVLSNVDELFDRGEFSAAPDPGWPDCFNSGVFVFQPSLHTHKLLLQHAMEHGSFDGADQGLLNSFFRNWSTTDIHKHLPFIYNLSSNTMYTYSPAFKQFGSSAKVVHFLGSMKPWNYKYNPQSGSVLEQGSASSSQHQAAFLHLWWTVYQNNVLPLYKSVQAGEARASPGHTLCHSDVGGPCADSASGVGEPCENSTPSAGVPCANSPLGSNQPAQGLPEPTQIVDETLSLPEGRRSEDMIACPETETPAVITCDPLSQPSPQPADFT

SEQ ID NO: 29154 - protein, 465 aa, Homo sapiens
MSETEFHHGAQAGLELLRSSNSPTSASQSAGMTVTDQAFVTLATNDIYCQGALVLGQSLRRHRLTRKLVVLITPQVSSLLRVILSKVFDEVIEVNLIDSADYIHLAFLKRPELGLTLTKLHCWTLTHYSKCVFLDADTLVLSNVDELFDRGEFSAAPDPGWPDCFNSGVFVFQPSLHTHKLLLQHAMEHGSFDGADQGLLNSFFRNWSTTDIHKHLPFIYNLSSNTMYTYSPAFKQFGSSAKVVHFLGSMKPWNYKYNPQSGSVLEQGSASSSQHQAAFLHLWWTVYQNNVLPLYKSVQAGEARASPGHTLCHSDVGGPCADSASGVGEPCENSTPSAGVPCANSPLGSNQPAQGLPEPTQIVDETLSLPEGRRSEDMIACPETETPAVITCDPLSQPSPQPADFTETETILVDLAVSVSQISIEEKVKELSPEEERRKWEEGRIDYMGKDAFARIQEKLDRFLQ

SEQ ID NO: 29155 - protein, 556 aa, Homo sapiens
MARFGLPALLCTLAVLSAALLAAELKSKSCSEVRRLYVSKGFNKNDAPLHEINGDHLKICPQGSTCCSQEMEEKYSLQSKDDFKSVVSEQCNHLQAVFASRYKKFDEFFKELLENAEKSLNDMFVKTYGHLYMQNSELFKDLFVELKRYYVVGNVNLEEMLNDFWARLLERMFRLVNSQYHFTDEYLECVSKYTEQLKPFGDVPRKLKLQVTRAFVAARTFAQGLAVAGDVVSKVSVVNPTAQCTHALLKMIYCSHCRGLVTVKPCYNYCSNIMRGCLANQGDLDFEWNNFIDAMLMVAERLEGPFNIESVMDPIDVKISDAIMNMQDNSVQVSQKVFQGCGPPKPLPAGRISRSISESAFSARFRPHHPEERPTTAAGTSLDRLVTDVKEKLKQAKKFWSSLPSNVCNDERMAAGNGNEDDCWNGKGKSRYLFAVTGNGLANQGNNPEVQVDTSKPDILILRQIMALRVMTSKMKNAYNGNDVDFFDISDESSGEGSGSGCEYQQCPSEFDYNATDHAGKSANEKADSAGVRPGAQAYLLTVFCILFLVMQREWR

SEQ ID NO: 29156 - protein, 486 aa, Homo sapiens
MEEKYSLQSKDDFKSVVSEQCNHLQAVFASRYKKFDEFFKELLENAEKSLNDMFVKTYGHLYMQNSELFKDLFVELKRYYVVGNVNLEEMLNDFWARLLERMFRLVNSQYHFTDEYLECVSKYTEQLKPFGDVPRKLKLQVTRAFVAARTFAQGLAVAGDVVSKVSVVNPTAQCTHALLKMIYCSHCRGLVTVKPCYNYCSNIMRGCLANQGDLDFEWNNFIDAMLMVAERLEGPFNIESVMDPIDVKISDAIMNMQDNSVQVSQKVFQGCGPPKPLPAGRISRSISESAFSARFRPHHPEERPTTAAGTSLDRLVTDVKEKLKQAKKFWSSLPSNVCNDERMAAGNGNEDDCWNGKGKSRYLFAVTGNGLANQGNNPEVQVDTSKPDILILRQIMALRVMTSKMKNAYNGNDVDFFDISDESSGEGSGSGCEYQQCPSEFDYNATDHAGKSANEKADSAGVRPGAQAYLLTVFCILFLVMQREWR

SEQ ID NO: 29157 - protein, 631 aa, Homo sapiens
MAEETQHNKLAAAKKKLKEYWQKNSPRVPAGANRNRKTNGSIPEKATSGGCQPPRDSATGFHREGPTSSATLKDLESPCQERAVVLDSRSVEISQLKNTIKSLKQQKKQVEHQLEEEKKANNKKQKAKRVLEVQIQTLNIQKEELNTDLYHMKRSLRYFEEKSKDLAVRLQHSLQRKGELESVLSNVMATQKKKANQLSSRSKARTEWKLEQSMREETLLKVQLTQLKESFQQVQLERDEYSEHLKGERARWQQRMRKMSQEICTLKKEKQQDMRRVEELERSLSKLKNQMAEPLPPEPPAVPSEVELQHLRKELERVAGELQAQVKKNQRISLLNQRQEERIQEQEERLRKQEERIQEQHKSLQQLAKPQSVFEEPNNENKNALQLEQQVKELQEKLGEEHLEAASQQNQQLTAQLSLMALPGEGHGGEHLDSEGEEAPQPMPSVPEDLESREAMSSFMDHLKEKADLSELVKKELCFIHHWRDRRHQKTHHLLSEPGGCAKDAALGGGHHQAGAQGGDEGEAAGAAADGIAAYSNYNNGHRKFLAAAHNPADEPGPGAPAPQELGAADKHGDLREVSLTSSAQGEAREDPLLDKPTAQPIVQDHQEHPGLGSNCCVPFLCWAWLPRRRR

SEQ ID NO: 29158 - protein, 572 aa, Homo sapiens
MDAQTWPVGFRCLLLLALVGSARSEGVQTCEEVRKLFQWRLLGAVRGLPDSPRAGPDLQVCISKKPTCCTRKMEERYQIAARQDMQQFLQTSSSTLKFLISRNAAAFQETLETLIKQAENYTSILFCSTYRNMALEAAASVQEFFTDVGLYLFGADVNPEEFVNRFFDSLFPLVYNHLINPGVTDSSLEYSECIRMARRDVSPFGNIPQRVMGQMGRSLLPSRTFLQALNLGIEVINTTDYLHFSKECSRALLKMQYCPHCQGLALTKPCMGYCLNVMRGCLAHMAELNPHWHAYIRSLEELSDAMHGTYDIGHVLLNFHLLVNDAVLQAHLNGQKLLEQVNRICGRPVRTPTQSPRCSFDQSKEKHGMKTTTRNSEETLANRRKEFINSLRLYRSFYGGLADQLCANELAAADGLPCWNGEDIVKSYTQRVVGNGIKAQSGNPEVKVKGIDPVINQIIDKLKHVVQLLQGRSPKPDKWELLQLGSGGGMVEQVSGDCDDEDGCGGSGSGEVKRTLKITDWMPDDMNFSDVKQIHQTDTGSTLDTTGAGCAVATESMTFTLISVVMLLPGIW

SEQ ID NO: 29159 - protein, 555 aa, Homo sapiens
MPSWIGAVILPLLGLLLSLPAGADVKARSCGEVRQAYGAKGFSLADIPYQEIAGEHLRICPQEYTCCTTEMEDKLSQQSKLEFENLVEETSHFVRTTFVSRHKKFDEFFRELLENAEKSLNDMFVRTYGMLYMQNSEVFQDLFTELKRYYTGGNVNLEEMLNDFWARLLERMFQLINPQYHFSEDYLECVSKYTDQLKPFGDVPRKLKIQVTRAFIAARTFVQGLTVGREVANRVSKVSPTPGCIRALMKMLYCPYCRGLPTVRPCNNYCLNVMKGCLANQADLDTEWNLFIDAMLLVAERLEGPFNIESVMDPIDVKISEAIMNMQENSMQVSAKVFQGCGQPKPAPALRSARSAPENFNTRFRPYNPEERPTTAAGTSLDRLVTDIKEKLKLSKKVWSALPYTICKDESVTAGTSNEEECWNGHSKARYLPEIMNDGLTNQINNPEVDVDITRPDTFIRQQIMALRVMTNKLKNAYNGNDVNFQDTSDESSGSGSGSGCMDDVCPTEFEFVTTEAPAVDPDRREVDSSAAQRGHSLLSWSLTCIVLALQRLCR

SEQ ID NO: 29160 - protein, 1502 aa, Homo sapiens
MADRFSRFNEDRDFQGNHFDQYEEGHLEIEQASLDKPIESDNIGHRLLQKHGWKLGQGLGKSLQGRTDPIPIVVKYDVMGMGRMEMELDYAEDATERRRVLEVEKEDTEELRQKYKDYVDKEKAIAKALEDLRANFYCELCDKQYQKHQEFDNHINSYDHAHKQRLKDLKQREFARNVSSRSRKDEKKQEKALRRLHELAEQRKQAECAPGSGPMFKPTTVAVDEEGGEDDKDESATNSGTGATASCGLGSEFSTDKGGPFTAVQITNTTGLAQAPGLASQGISFGIKNNLGTPLQKLGVSFSFAKKAPVKLESIASVFKDHAEEGTSEDGTKPDEKSSDQGLQKVGDSDGSSNLDGKKEDEDPQDGGSLASTLSKLKRMKREEGAGATEPEYYHYIPPAHCKVKPNFPFLLFMRASEQMDGDNTTHPKNAPESKKGSSPKPKSCIKAAASQGAEKTVSEVSEQPKETSMTEPSEPGSKAEAKKALGGDVSDQSLESHSQKVSETQMCESNSSKETSLATPAGKESQEGPKHPTGPFFPVLSKDESTALQWPSELLIFTKAEPSISYSCNPLYFDFKLSRNKDARTKGTEKPKDIGSSSKDHLQGLDPGEPNKSKEVGGEKIVRSSGGRMDAPASGSACSGLNKQEPGGSHGSETEDTGRSLPSKKERSGKSHRHKKKKKHKKSSKHKRKHKADTEEKSSKAESGEKSKKRKKRKRKKNKSSAPADSERGPKPEPPGSGSPAPPRRRRRAQDDSQRRSLPAEEGSSGKKDEGGGGSSSQDHGGRKHKGELPPSSCQRRAGTKRSSRSSHRSQPSSGDEDSDDASSHRLHQKSPSQYSEEEEEEDSGSEHSRSRSRSGRRHSSHRSSRRSYSSSSDASSDQSCYSRQRSYSDDSYSDYSDRSRRHSKRSHDSDDSDYASSKHRSKRHKYSSSDDDYSLSCSQSRSRSRSHTRERSRSRGRSRSSSCSRSRSKRRSRSTTAHSWQRSRSYSRDRSRSTRSPSQRSGSRKRSWGHESPEERHSGRRDFIRSKIYRSQSPHYFRSGRGEGPGKKDDGRGDDSKATGPPSQNSNIGTGRGSEGDCSPEDKNSVTAKLLLEKIQSRKVERKPSVSEEVQATPNKAGPKLKDPPQGYFGPKLPPSLGNKPVLPLIGKLPATRKPNKKCEESGLERGEEQEQSETEEGPPGSSDALFGHQFPSEETTGPLLDPPPEESKSGEATADHPVAPLGTPAHSDCYPGDPTISHNYLPDPSDGDTLESLDSSSQPGPVESSLLPIAPDLEHFPSYAPPSGDPSIESTDGAEDASLAPLESQPITFTPEEMEKYSKLQQAAQQHIQQQLLAKQVKAFPASAALAPATPALQPIHIQQPATASATSITTVQHAILQHHAAAAAAAIGIHPHPHPQPLAQVHHIPQPHLTPISLSHLTHSIIPGHPATFLASHPIHIIPASAIHPGPFTFHPVPHAALYPTLLAPRPAAAAATALHLHPLLHPIFSGQDLQHPPSHGT

SEQ ID NO: 29161 - protein, 1424 aa, Homo sapiens
MGMGRMEMELDYAEDATERRRVLEVEKEDTEELRQKYKDYVDKEKAIAKALEDLRANFYCELCDKQYQKHQEFDNHINSYDHAHKQRLKDLKQREFARNVSSRSRKDEKKQEKALRRLHELAEQRKQAECAPGSGPMFKPTTVAVDEEGGEDDKDESATNSGTGATASCGLGSEFSTDKGGPFTAVQITNTTGLAQAPGLASQGISFGIKNNLGTPLQKLGVSFSFAKKAPVKLESIASVFKDHAEEGTSEDGTKPDEKSSDQGLQKVGDSDGSSNLDGKKEDEDPQDGGSLASTLSKLKRMKREEGAGATEPEYYHYIPPAHCKVKPNFPFLLFMRASEQMDGDNTTHPKNAPESKKGSSPKPKSCIKAAASQGAEKTVSEVSEQPKETSMTEPSEPGSKAEAKKALGGDVSDQSLESHSQKVSETQMCESNSSKETSLATPAGKESQEGPKHPTGPFFPVLSKDESTALQWPSELLIFTKAEPSISYSCNPLYFDFKLSRNKDARTKGTEKPKDIGSSSKDHLQGLDPGEPNKSKEVGGEKIVRSSGGRMDAPASGSACSGLNKQEPGGSHGSETEDTGRSLPSKKERSGKSHRHKKKKKHKKSSKHKRKHKADTEEKSSKAESGEKSKKRKKRKRKKNKSSAPADSERGPKPEPPGSGSPAPPRRRRRAQDDSQRRSLPAEEGSSGKKDEGGGGSSSQDHGGRKHKGELPPSSCQRRAGTKRSSRSSHRSQPSSGDEDSDDASSHRLHQKSPSQYSEEEEEEDSGSEHSRSRSRSGRRHSSHRSSRRSYSSSSDASSDQSCYSRQRSYSDDSYSDYSDRSRRHSKRSHDSDDSDYASSKHRSKRHKYSSSDDDYSLSCSQSRSRSRSHTRERSRSRGRSRSSSCSRSRSKRRSRSTTAHSWQRSRSYSRDRSRSTRSPSQRSGSRKRSWGHESPEERHSGRRDFIRSKIYRSQSPHYFRSGRGEGPGKKDDGRGDDSKATGPPSQNSNIGTGRGSEGDCSPEDKNSVTAKLLLEKIQSRKVERKPSVSEEVQATPNKAGPKLKDPPQGYFGPKLPPSLGNKPVLPLIGKLPATRKPNKKCEESGLERGEEQEQSETEEGPPGSSDALFGHQFPSEETTGPLLDPPPEESKSGEATADHPVAPLGTPAHSDCYPGDPTISHNYLPDPSDGDTLESLDSSSQPGPVESSLLPIAPDLEHFPSYAPPSGDPSIESTDGAEDASLAPLESQPITFTPEEMEKYSKLQQAAQQHIQQQLLAKQVKAFPASAALAPATPALQPIHIQQPATASATSITTVQHAILQHHAAAAAAAIGIHPHPHPQPLAQVHHIPQPHLTPISLSHLTHSIIPGHPATFLASHPIHIIPASAIHPGPFTFHPVPHAALYPTLLAPRPAAAAATALHLHPLLHPIFSGQDLQHPPSHGT

SEQ ID NO: 29162 - protein, 43 aa, Homo sapiens
MADRFSRFNEDRDFQGNHFDQYEEGHLEIEQASLDKPIESPSF

SEQ ID NO: 29163 - protein, 1064 aa, Homo sapiens
MKIATVSVLLPLALCLIQDAASKNEDQEMCHEFQAFMKNGKLFCPQDKKFFQSLDGIMFINKCATCKMILEKEAKSQKRARHLARAPKATAPTELNCDDFKKGERDGDFICPDYYEAVCGTDGKTYDNRCALCAENAKTGSQIGVKSEGECKSSNPEQDVCSAFRPFVRDGRLGCTRENDPVLGPDGKTHGNKCAMCAELFLKEAENAKREGETRIRRNAEKDFCKEYEKQVRNGRLFCTRESDPVRGPDGRMHGNKCALCAEIFKQRFSEENSKTDQNLGKAEEKTKVKREIVKLCSQYQNQAKNGILFCTRENDPIRGPDGKMHGNLCSMCQAYFQAENEEKKKAEARARNKRESGKATSYAELCSEYRKLVRNGKLACTRENDPIQGPDGKVHGNTCSMCEVFFQAEEEEKKKKEGKSRNKRQSKSTASFEELCSEYRKSRKNGRLFCTRENDPIQGPDGKMHGNTCSMCEAFFQQEERARAKAKREAAKEICSEFRDQVRNGTLICTREHNPVRGPDGKMHGNKCAMCASVFKLEEEEKKNDKEEKGKVEAEKVKREAVQELCSEYRHYVRNGRLPCTRENDPIEGLDGKIHGNTCSMCEAFFQQEAKEKERAEPRAKVKREAEKETCDEFRRLLQNGKLFCTRENDPVRGPDGKTHGNKCAMCKAVFQKENEERKRKEEEDQRNAAGHGSSGGGGGNTQDECAEYREQMKNGRLSCTRESDPVRDADGKSYNNQCTMCKAKLEREAERKNEYSRSRSNGTGSESGKDTCDEFRSQMKNGKLICTRESDPVRGPDGKTHGNKCTMCKEKLEREAAEKKKKEDEDRSNTGERSNTGERSNDKEDLCREFRSMQRNGKLICTRENNPVRGPYGKMHINKCAMCQSIFDREANERKKKDEEKSSSKPSNNAKDECSEFRNYIRNNELICPRENDPVHGADGKFYTNKCYMCRAVFLTEALERAKLQEKPSHVRASQEEDSPDSFSSLDSEMCKDYRVLPRIGYLCPKDLKPVCGDDGQTYNNPCMLCHENLIRQTNTHIRSTGKCEESSTPGTTAASMPPSDE

SEQ ID NO: 29164 - protein, 916 aa, Homo sapiens
MKIATVSVLLPLALCLIQDAASKNEDQEMCHEFQAFMKNGKLFCPQDKKFFQSLDGIMFINKCATCKMILEKEAKSQKRARHLARAPKATAPTELNCDDFKKGERDGDFICPDYYEAVCGTDGKTYDNRCALCAENAKTGSQIGVKSEGECKSSNPEQDVCSAFRPFVRDGRLGCTRENDPVLGPDGKTHGNKCAMCAELFLKEAENAKREGETRIRRNAEKDFCKEYEKQVRNGRLFCTRESDPVRGPDGRMHGNKCALCAEIFKQRFSEENSKTDQNLGKAEEKTKVKREIVKLCSQYQNQAKNGILFCTRENDPIRGPDGKMHGNLCSMCQAYFQAENEEKKKAEARARNKRESGKATSYAELCSEYRKLVRNGKLACTRENDPIQGPDGKVHGNTCSMCEVFFQAEEEEKKKKEGKSRNKRQSKSTASFEELCSEYRKSRKNGRLFCTRENDPIQGPDGKMHGNTCSMCEAFFQQEERARAKAKREAAKEICSEFRDQVRNGTLICTREHNPVRGPDGKMHGNKCAMCASVFKLEEEEKKNDKEEKGKVEAEKVKREAVQELCSEYRHYVRNGRLPCTRENDPIEGLDGKIHGNTCSMCEAFFQQEAKEKERAEPRAKVKREAEKETCDEFRRLLQNGKLFCTRENDPVRGPDGKTHGNKCAMCKAVFQKENEERKRKEEEDQRNAAGHGSSGGGGGNTQDECAEYREQMKNGRLSCTRESDPVRDADGKSYNNQCTMCKAKLEREAERKNEYSRSRSNGTGSESGKDTCDEFRSQMKNGKLICTRESDPVRGPDGKTHGNKCTMCKEKLEREAAEKKKKEDEDRSNTGERSNTGERSNDKEDLCREFRSMQRNGKLICTRENNPVRGPYGKMHINKCAMCQSIFDREANERKKKDEEKSSSKPSNNAKVIY

SEQ ID NO: 29165 - protein, 1094 aa, Homo sapiens
MKIATVSVLLPLALCLIQDAASKNEDQEMCHEFQAFMKNGKLFCPQDKKFFQSLDGIMFINKCATCKMILEKEAKSQKRARHLARAPKATAPTELNCDDFKKGERDGDFICPDYYEAVCGTDGKTYDNRCALCAENAKTGSQIGVKSEGECKSSNPEQDVCSAFRPFVRDGRLGCTRENDPVLGPDGKTHGNKCAMCAELFLKEAENAKREGETRIRRNAEKDFCKEYEKQVRNGRLFCTRESDPVRGPDGRMHGNKCALCAEIFKQRFSEENSKTDQNLGKAEEKTKVKREIVKLCSQYQNQAKNGILFCTRENDPIRGPDGKMHGNLCSMCQAYFQAENEEKKKAEARARNKRESGKATSYAELCSEYRKLVRNGKLACTRENDPIQGPDGKVHGNTCSMCEVFFQAEEEEKKKKEGKSRNKRQSKSTASFEELCSEYRKSRKNGRLFCTRENDPIQGPDGKMHGNTCSMCEAFFQQEERARAKAKREAAKEICSEFRDQVRNGTLICTREHNPVRGPDGKMHGNKCAMCASVFKLEEEEKKNDKEEKGKVEAEKVKREAVQELCSEYRHYVRNGRLPCTRENDPIEGLDGKIHGNTCSMCEAFFQQEAKEKERAEPRAKVKREAEKETCDEFRRLLQNGKLFCTRENDPVRGPDGKTHGNKCAMCKAVFQKENEERKRKEEEDQRNAAGHGSSGGGGGNTQDECAEYREQMKNGRLSCTRESDPVRDADGKSYNNQCTMCKAKLEREAERKNEYSRSRSNGTGSESGKDTCDEFRSQMKNGKLICTRESDPVRGPDGKTHGNKCTMCKEKLEREAAEKKKKEDEDRSNTGERSNTGERSNDKEDLCREFRSMQRNGKLICTRENNPVRGPYGKMHINKCAMCQSIFDREANERKKKDEEKSSSKPSNNAKDQCRQVQNEAEDAKFRQPGRSLASVARMSTDECSEFRNYIRNNELICPRENDPVHGADGKFYTNKCYMCRAVFLTEALERAKLQEKPSHVRASQEEDSPDSFSSLDSEMCKDYRVLPRIGYLCPKDLKPVCGDDGQTYNNPCMLCHENLIRQTNTHIRSTGKCEESSTPGTTAASMPPSDE

SEQ ID NO: 29166 - protein, 1218 aa, Homo sapiens
MRSPRTRGRSGRPLSLLLALLCALRAKVCGASGQFELEILSMQNVNGELQNGNCCGGARNPGDRKCTRDECDTYFKVCLKEYQSRVTAGGPCSFGSGSTPVIGGNTFNLKASRGNDRNRIVLPFSFAWPRSYTLLVEAWDSSNDTVQPDSIIEKASHSGMINPSRQWQTLKQNTGVAHFEYQIRVTCDDYYYGFGCNKFCRPRDDFFGHYACDQNGNKTCMEGWMGPECNRAICRQGCSPKHGSCKLPGDCRCQYGWQGLYCDKCIPHPGCVHGICNEPWQCLCETNWGGQLCDKDLNYCGTHQPCLNGGTCSNTGPDKYQCSCPEGYSGPNCEIAEHACLSDPCHNRGSCKETSLGFECECSPGWTGPTCSTNIDDCSPNNCSHGGTCQDLVNGFKCVCPPQWTGKTCQLDANECEAKPCVNAKSCKNLIASYYCDCLPGWMGQNCDININDCLGQCQNDASCRDLVNGYRCICPPGYAGDHCERDIDECASNPCLNGGHCQNEINRFQCLCPTGFSGNLCQLDIDYCEPNPCQNGAQCYNRASDYFCKCPEDYEGKNCSHLKDHCRTTPCEVIDSCTVAMASNDTPEGVRYISSNVCGPHGKCKSQSGGKFTCDCNKGFTGTYCHENINDCESNPCRNGGTCIDGVNSYKCICSDGWEGAYCETNINDCSQNPCHNGGTCRDLVNDFYCDCKNGWKGKTCHSRDSQCDEATCNNGGTCYDEGDAFKCMCPGGWEGTTCNIARNSSCLPNPCHNGGTCVVNGESFTCVCKEGWEGPICAQNTNDCSPHPCYNSGTCVDGDNWYRCECAPGFAGPDCRININECQSSPCAFGATCVDEINGYRCVCPPGHSGAKCQEVSGRPCITMGSVIPDGAKWDDDCNTCQCLNGRIACSKVWCGPRPCLLHKGHSECPSGQSCIPILDDQCFVHPCTGVGECRSSSLQPVKTKCTSDSYYQDNCANITFTFNKEMMSPGLTTEHICSELRNLNILKNVSAEYSIYIACEPSPSANNEIHVAISAEDIRDDGNPIKEITDKIIDLVSKRDGNSSLIAAVAEVRVQRRPLKNRTDFLVPLLSSVLTVAWICCLVTAFYWCLRKRRKPGSHTHSASEDNTTNNVREQLNQIKNPIEKHGANTVPIKDYENKNSKMSKIRTHNSEVEEDDMDKHQQKARFAKQPAYTLVDREEKPPNGTPTKHPNWTNKQDNRDLESAQSLNRMEYIV

SEQ ID NO: 29167 - protein, 1059 aa, Homo sapiens
MINPSRQWQTLKQNTGVAHFEYQIRVTCDDYYYGFGCNKFCRPRDDFFGHYACDQNGNKTCMEGWMGPECNRAICRQGCSPKHGSCKLPGDCRCQYGWQGLYCDKCIPHPGCVHGICNEPWQCLCETNWGGQLCDKDLNYCGTHQPCLNGGTCSNTGPDKYQCSCPEGYSGPNCEIAEHACLSDPCHNRGSCKETSLGFECECSPGWTGPTCSTNIDDCSPNNCSHGGTCQDLVNGFKCVCPPQWTGKTCQLDANECEAKPCVNAKSCKNLIASYYCDCLPGWMGQNCDININDCLGQCQNDASCRDLVNGYRCICPPGYAGDHCERDIDECASNPCLNGGHCQNEINRFQCLCPTGFSGNLCQLDIDYCEPNPCQNGAQCYNRASDYFCKCPEDYEGKNCSHLKDHCRTTPCEVIDSCTVAMASNDTPEGVRYISSNVCGPHGKCKSQSGGKFTCDCNKGFTGTYCHENINDCESNPCRNGGTCIDGVNSYKCICSDGWEGAYCETNINDCSQNPCHNGGTCRDLVNDFYCDCKNGWKGKTCHSRDSQCDEATCNNGGTCYDEGDAFKCMCPGGWEGTTCNIARNSSCLPNPCHNGGTCVVNGESFTCVCKEGWEGPICAQNTNDCSPHPCYNSGTCVDGDNWYRCECAPGFAGPDCRININECQSSPCAFGATCVDEINGYRCVCPPGHSGAKCQEVSGRPCITMGSVIPDGAKWDDDCNTCQCLNGRIACSKVWCGPRPCLLHKGHSECPSGQSCIPILDDQCFVHPCTGVGECRSSSLQPVKTKCTSDSYYQDNCANITFTFNKEMMSPGLTTEHICSELRNLNILKNVSAEYSIYIACEPSPSANNEIHVAISAEDIRDDGNPIKEITDKIIDLVSKRDGNSSLIAAVAEVRVQRRPLKNRTDFLVPLLSSVLTVAWICCLVTAFYWCLRKRRKPGSHTHSASEDNTTNNVREQLNQIKNPIEKHGANTVPIKDYENKNSKMSKIRTHNSEVEEDDMDKHQQKARFAKQPAYTLVDREEKPPNGTPTKHPNWTNKQDNRDLESAQSLNRMEYIV

SEQ ID NO: 29168 - protein, 350 aa, Homo sapiens
MTDQAFVTLTTNDAYAKGALVLGSSLKQHRTTRRLVVLATPQVSDSMRKVLETVFDEVIMVDVLDSGDSAHLTLMKRPELGVTLTKLHCWSLTQYSKCVFMDADTLVLANIDDLFDREELSAAPDPGWPDCFNSGVFVYQPSVETYNQLLHLASEQGSFDGGDQGILNTFFSSWATTDIRKHLPFIYNLSSISIYSYLPAFKVFGASAKVVHFLGRVKPWNYTYDPKTKSVKSEAHDPNMTHPEFLILWWNIFTTNVLPLLQQFGLVKDTCSYVNVLSDLVYTLAFSCGFCRKEDVSGAISHLSLGEIPAMAQPFVSSEERKERWEQGQADYMGADSFDNIKRKLDTYLQ

SEQ ID NO: 29169 - protein, 333 aa, Homo sapiens
MTDQAFVTLTTNDAYAKGALVLGSSLKQHRTTRRLVVLATPQVSDSMRKVLETVFDEVIMVDVLDSGDSAHLTLMKRPELGVTLTKLHCWSLTQYSKCVFMDADTLVLANIDDLFDREELSAAPDPGWPDCFNSGVFVYQPSVETYNQLLHLASEQGSFDGGDQGILNTFFSSWATTDIRKHLPFIYNLSSISIYSYLPAFKVFGASAKVVHFLGRVKPWNYTYDPKTKSVKSEAHDPNMTHPEFLILWWNIFTTNVLPLLQQFGLVKDTCSYVNVEDVSGAISHLSLGEIPAMAQPFVSSEERKERWEQGQADYMGADSFDNIKRKLDTYLQ

SEQ ID NO: 29170 - protein, 279 aa, Homo sapiens
MTDQAFVTLTTNDAYAKGALVLGSSLKQHRTTRRLVVLATPQVSDSMRKVLETVFDEVIMVDVLDSGDSAHLTLMKRPELGVTLTKLHCWSLTQYSKCVFMDADTLVLANIDDLFDREELSAAPDPGWPDCFNSGVFVYQPSVETYNQLLHLASEQGSFDGGDQGILNTFFSSWATTDIRKHLPFIYNLSSISIYSYLPAFKVKMSQEPYHICPLGRSQLWHSRLYPRKNGRNDGNRARLIIWEQIPLTTSRGNLTLTSSRNTAFFCEHIHFTSLVSDT

SEQ ID NO: 29171 - protein, 294 aa, Homo sapiens
MLVLHNSQKLQILYKSLEKSIPESIKVYGAIFNIKDKNPFNMEVLVDAWPDYQIVITRPQKQEMKDDQDHYTNTYHIFTKAPDKLEEVLSYSNVISWEQTLQIQGCQEGLDEAIRKVATSKSVQVDYMKTILFIPELPKKHKTSSNDKMELFEVDDDNKEGNFSNMFLDASHAGLVNEHWAFGKNERSLKYIERCLQDFLGFGVLGPEGQLVSWIVMEQSCELRMGYTVPKYRHQGNMLQIGYHLEKYLSQKEIPFYFHVADNNEKSLQALNNLGFKICPCGWHQWKCTPKKYC

SEQ ID NO: 29172 - protein, 91 aa, Homo sapiens
MYGKIIFVLLLSEIVSISALSTTEVAMHTSTSSSVTKSYISSQTNGETGQLVHRFTVPAPVVIILIILCVMAGIIGTILLISYSIRRLIKA

SEQ ID NO: 29173 - protein, 58 aa, Homo sapiens
MYGKIIFVLLLSGETGQLVHRFTVPAPVVIILIILCVMAGIIGTILLISYSIRRLIKA

SEQ ID NO: 29174 - protein, 288 aa, Homo sapiens
MLVLNCSTKLLILEKMLKSCFPESLKVYGAVMNINRGNPFQKEVVLDSWPDFKAVITRRQREAETDNLDHYTNAYAVFYKDVRAYRQLLEECDVFNWDQVFQIQGLQSELYDVSKAVANSKQLNIKLTSFKAVHFSPVSSLPDTSFLKGPSPRLTYLSVANADLLNRTWSRGGNEQCLRYIANLISCFPSVCVRDEKGNPVSWSITDQFATMCHGYTLPEHRRKGYSRLVALTLARKLQSRGFPSQGNVLDDNTASISLLKSLHAEFLPCRFHRLILTPATFSGLPHL

SEQ ID NO: 29175 - protein, 302 aa, Homo sapiens
MILLNNSERLLALFKSLARSIPESLKVYGSLFHINHGNPFNMEVLVDSWPEYQMVIIRPQKQEMTDDMDSYTNVYRVFSKDPQKSQEVLKNSEIINWKQKLQIQGFQESLGEGIRAAAFSNSVKVEHSRALLFVTEDILKLYATNKSKLGSWAETGHPDDELESETPNFKYAQLNVSYSGLVNDNWKLGMNKRSLRYIKRCLGALPAACMLGPEGVPVSWVTMDPSCEIGMGYSVEKYRRRGNGTRLIMRCMKYLCQKNIPFYGSVLEENQGVIRKTSALGFLEASCQWHQWNCYPQNLVPL

SEQ ID NO: 29176 - protein, 226 aa, Homo sapiens
  MOD_RES (73)..(73): Selenocysteine
MARLLQASCLLSLLLAGFVSQSRGQEKSKMDCHGGISGTIYEYGALTIDGEEYIPFKQYAGKYVLFVNVASYXGLTGQYIELNALQEELAPFGLVILGFPCNQFGKQEPGENSEILPTLKYVRPGGGFVPNFQLFEKGDVNGEKEQKFYTFLKNSCPPTSELLGTSDRLFWEPMKVHDIRWNFEKFLVGPDGIPIMRWHHRTTVSNVKMDILSYMRRQAALGVKRK

SEQ ID NO: 29177 - protein, 491 aa, Homo sapiens
MEEGKMDENEWGYHGEGNKSLVVAHAQRCVVLRFLKFPPNRKKTSEEIFQHLQNIVDFGKNVMKEFLGENYVHYGEVVQLPLEFVKQLCLKIQSERPESRCDKDLDTLSGYAMCLPNLTRLQTYRFAEHRPILCVEIKPKCGFIPFSSDVTHEMKHKVCRYCMHQHLKVATGKWKQISKYCPLDLYSGNKQRMHFALKSLLQEAQNNLKIFKNGELIYGCKDARSPVADWSELAHHLKPFFFPSNGLASGPHCTRAVIRELVHVITRVLLSGSDKGRAGTLSPGLGPQGPRVCEASPFSRSLRCQGKNTPERSGLPKGCLLYKTLQVQMLDLLDIEGLYPLYNRVERYLEEFPEERKTLQIDGPYDEAFYQKLLDLSTEDDGTVAFALTKVQQYRVAMTAKDCSIMIALSPCLQDASSDQRPVVPSSRSRFAFSVSVLDLDLKPYESIPHQYKLDGKIVNYYSKTVRAKDNAVMSTRFKESEDCTLVLHKV

SEQ ID NO: 29178 - protein, 265 aa, Homo sapiens
MKPAMETAAEENTEQSQERKGCFECCIKCLGGVPYASLVATILCFSGVALFCGCGHVALAGTVAILEQHFSTNASDHALLSEVIQLMQYVIYGIASFFFLYGIILLAEGFYTTSAVKELHGEFKTTACGRCISGMFVFLTYVLGVAWLGVFGFSAVPVFMFYNIWSTCEVIKSPQTNGTTGVEQICVDIRQYGIIPWNAFPGKICGSALENICNTNEFYMSYHLFIVACAGAGATVIALLIYMMATTYNYAVLKFKSREDCCTKF

SEQ ID NO: 29179 - protein, 246 aa, Homo sapiens
MGCFECCIKCLGGVPYASLVATILCFSGVALFCGCGHVALAGTVAILEQHFSTNASDHALLSEVIQLMQYVIYGIASFFFLYGIILLAEGFYTTSAVKELHGEFKTTACGRCISGMFVFLTYVLGVAWLGVFGFSAVPVFMFYNIWSTCEVIKSPQTNGTTGVEQICVDIRQYGIIPWNAFPGKICGSALENICNTNEFYMSYHLFIVACAGAGATVIALLIYMMATTYNYAVLKFKSREDCCTKF

SEQ ID NO: 29180 - protein, 305 aa, Homo sapiens
MKPAMETAAEENTEQSQERKVNSRAEMEIGRYHWMYPGSKNHQYHPVPTLGDRASPLSSPGCFECCIKCLGGVPYASLVATILCFSGVALFCGCGHVALAGTVAILEQHFSTNASDHALLSEVIQLMQYVIYGIASFFFLYGIILLAEGFYTTSAVKELHGEFKTTACGRCISGMFVFLTYVLGVAWLGVFGFSAVPVFMFYNIWSTCEVIKSPQTNGTTGVEQICVDIRQYGIIPWNAFPGKICGSALENICNTNEFYMSYHLFIVACAGAGATVIALLIYMMATTYNYAVLKFKSREDCCTKF

SEQ ID NO: 29181 - protein, 328 aa, Homo sapiens
MKPAMETAAEENTEQSQERKVNSRAEMEIGRYHWMYPGSKNHQYHPVPTLGDRASPLSSPGCFECCIKCLGGVPYASLVATILCFSGVALFCGCGHVALAGTVAILEQHFSTNASDHALLSEVIQLMQYVIYGIASFFFLYGIILLAEGFYTTSAVKELHGEFKTTACGRCISGMFVFLTYVLGVAWLGVFGFSAVPVFMFYNIWSTCEVIKSPQTNGTTGVEQICVDIRQYGIIPWNAFPGKICGSALENICNTNEFYMSYHLFIVACAGAGATVIALIHFLMILSSNWAYLKDASKMQAYQDIKAKEEQELQDIQSRSKEQLNSYT

SEQ ID NO: 29182 - protein, 1721 aa, Homo sapiens
MAQFPTPFGGSLDIWAITVEERAKHDQQFHSLKPISGFITGDQARNFFFQSGLPQPVLAQIWALADMNNDGRMDQVEFSIAMKLIKLKLQGYQLPSALPPVMKQQPVAISSAPAFGMGGIASMPPLTAVAPVPMGSIPVVGMSPTLVSSVPTAAVPPLANGAPPVIQPLPAFAHPAATLPKSSSFSRSGPGSQLNTKLQKAQSFDVASVPPVAEWAVPQSSRLKYRQLFNSHDKTMSGHLTGPQARTILMQSSLPQAQLASIWNLSDIDQDGKLTAEEFILAMHLIDVAMSGQPLPPVLPPEYIPPSFRRVRSGSGISVISSTSVDQRLPEEPVLEDEQQQLEKKLPVTFEDKKRENFERGNLELEKRRQALLEQQRKEQERLAQLERAEQERKERERQEQERKRQLELEKQLEKQRELERQREEERRKEIERREAAKRELERQRQLEWERNRRQELLNQRNKEQEDIVVLKAKKKTLEFELEALNDKKHQLEGKLQDIRCRLTTQRQEIESTNKSRELRIAEITHLQQQLQESQQMLGRLIPEKQILNDQLKQVQQNSLHRDSLVTLKRALEAKELARQHLRDQLDEVEKETRSKLQEIDIFNNQLKELREIHNKQQLQKQKSMEAERLKQKEQERKIIELEKQKEEAQRRAQERDKQWLEHVQQEDEHQRPRKLHEEEKLKREESVKKKDGEEKGKQEAQDKLGRLFHQHQEPAKPAVQAPWSTAEKGPLTISAQENVKVVYYRALYPFESRSHDEITIQPGDIVMVKGEWVDESQTGEPGWLGGELKGKTGWFPANYAEKIPENEVPAPVKPVTDSTSAPAPKLALRETPAPLAVTSSEPSTTPNNWADFSSTWPTSTNEKPETDNWDAWAAQPSLTVPSAGQLRQRSAFTPATATGSSPSPVLGQGEKVEGLQAQALYPWRAKKDNHLNFNKNDVITVLEQQDMWWFGEVQGQKGWFPKSYVKLISGPIRKSTSMDSGSSESPASLKRVASPAAKPVVSGEEFIAMYTYESSEQGDLTFQQGDVILVTKKDGDWWTGTVGDKAGVFPSNYVRLKDSEGSGTAGKTGSLGKKPEIAQVIASYTATGPEQLTLAPGQLILIRKKNPGGWWEGELQARGKKRQIGWFPANYVKLLSPGTSKITPTEPPKSTALAAVCQVIGMYDYTAQNDDELAFNKGQIINVLNKEDPDWWKGEVNGQVGLFPSNYVKLTTDMDPSQQWCSDLHLLDMLTPTERKRQGYIHELIVTEENYVNDLQLVTEIFQKPLMESELLTEKEVAMIFVNWKELIMCNIKLLKALRVRKKMSGEKMPVKMIGDILSAQLPHMQPYIRFCSRQLNGAALIQQKTDEAPDFKEFVKRLAMDPRCKGMPLSSFILKPMQRVTRYPLIIKNILENTPENHPDHSHLKHALEKAEELCSQVNEGVREKENSDRLEWIQAHVQCEGLSEQLVFNSVTNCLGPRKFLHSGKLYKAKSNKELYGFLFNDFLLLTQITKPLGSSGTDKVFSPKSNLQYKMYKTPIFLNEVLVKLPTDPSGDEPIFHISHIDRVYTLRAESINERTAWVQKIKAASELYIETEKKKREKAYLVRSQRATGIGRLMVNVVEGIELKPCRSHGKSNPYCEVTMGSQCHITKTIQDTLNPKWNSNCQFFIRDLEQEVLCITVFERDQFSPDDFLGRTEIRVADIKKDQGSKGPVTKCLLLHEVPTGEIVVRLDLQLFDEP

SEQ ID NO: 29183 - protein, 1220 aa, Homo sapiens
MAQFPTPFGGSLDIWAITVEERAKHDQQFHSLKPISGFITGDQARNFFFQSGLPQPVLAQIWALADMNNDGRMDQVEFSIAMKLIKLKLQGYQLPSALPPVMKQQPVAISSAPAFGMGGIASMPPLTAVAPVPMGSIPVVGMSPTLVSSVPTAAVPPLANGAPPVIQPLPAFAHPAATLPKSSSFSRSGPGSQLNTKLQKAQSFDVASVPPVAEWAVPQSSRLKYRQLFNSHDKTMSGHLTGPQARTILMQSSLPQAQLASIWNLSDIDQDGKLTAEEFILAMHLIDVAMSGQPLPPVLPPEYIPPSFRRVRSGSGISVISSTSVDQRLPEEPVLEDEQQQLEKKLPVTFEDKKRENFERGNLELEKRRQALLEQQRKEQERLAQLERAEQERKERERQEQERKRQLELEKQLEKQRELERQREEERRKEIERREAAKRELERQRQLEWERNRRQELLNQRNKEQEDIVVLKAKKKTLEFELEALNDKKHQLEGKLQDIRCRLTTQRQEIESTNKSRELRIAEITHLQQQLQESQQMLGRLIPEKQILNDQLKQVQQNSLHRDSLVTLKRALEAKELARQHLRDQLDEVEKETRSKLQEIDIFNNQLKELREIHNKQQLQKQKSMEAERLKQKEQERKIIELEKQKEEAQRRAQERDKQWLEHVQQEDEHQRPRKLHEEEKLKREESVKKKDGEEKGKQEAQDKLGRLFHQHQEPAKPAVQAPWSTAEKGPLTISAQENVKVVYYRALYPFESRSHDEITIQPGDIVMVKGEWVDESQTGEPGWLGGELKGKTGWFPANYAEKIPENEVPAPVKPVTDSTSAPAPKLALRETPAPLAVTSSEPSTTPNNWADFSSTWPTSTNEKPETDNWDAWAAQPSLTVPSAGQLRQRSAFTPATATGSSPSPVLGQGEKVEGLQAQALYPWRAKKDNHLNFNKNDVITVLEQQDMWWFGEVQGQKGWFPKSYVKLISGPIRKSTSMDSGSSESPASLKRVASPAAKPVVSGEEFIAMYTYESSEQGDLTFQQGDVILVTKKDGDWWTGTVGDKAGVFPSNYVRLKDSEGSGTAGKTGSLGKKPEIAQVIASYTATGPEQLTLAPGQLILIRKKNPGGWWEGELQARGKKRQIGWFPANYVKLLSPGTSKITPTEPPKSTALAAVCQVIGMYDYTAQNDDELAFNKGQIINVLNKEDPDWWKGEVNGQVGLFPSNYVKLTTDMDPSQQ

SEQ ID NO: 29184 - protein, 1144 aa, Homo sapiens
MAQFPTPFGGSLDIWAITVEERAKHDQQFHSLKPISGFITGDQARNFFFQSGLPQPVLAQIWALADMNNDGRMDQVEFSIAMKLIKLKLQGYQLPSALPPVMKQQPVAISSAPAFGMGGIASMPPLTAVAPVPMGSIPVVGMSPTLVSSVPTAAVPPLANGAPPVIQPLPAFAHPAATLPKSSSFSRSGPGSQLNTKLQKAQSFDVASVPPVAEWAVPQSSRLKYRQLFNSHDKTMSGHLTGPQARTILMQSSLPQAQLASIWNLSDIDQDGKLTAEEFILAMHLIDVAMSGQPLPPVLPPEYIPPSFRRVRSGSGISVISSTSVDQRLPEEPVLEDEQQQLEKKLPVTFEDKKRENFERGNLELEKRRQALLEQQRKEQERLAQLERAEQERKERERQEQERKRQLELEKQLEKQRELERQREEERRKEIERREAAKRELERQRQLEWERNRRQELLNQRNKEQEDIVVLKAKKKTLEFELEALNDKKHQLEGKLQDIRCRLTTQRQEIESTNKSRELRIAEITHLQQQLQESQQMLGRLIPEKQILNDQLKQVQQNSLHRDSLVTLKRALEAKELARQHLRDQLDEVEKETRSKLQEIDIFNNQLKELREIHNKQQLQKQKSMEAERLKQKEQERKIIELEKQKEEAQRRAQERDKQWLEHVQQEDEHQRPRKLHEEEKLKREESVKKKDGEEKGKQEAQDKLGRLFHQHQEPAKPAVQAPWSTAEKGPLTISAQENVKVVYYRALYPFESRSHDEITIQPGDIVMVDESQTGEPGWLGGELKGKTGWFPANYAEKIPENEVPAPVKPVTDSTSAPAPKLALRETPAPLAVTSSEPSTTPNNWADFSSTWPTSTNEKPETDNWDAWAAQPSLTVPSAGQLRQRSAFTPATATGSSPSPVLGQGEKVEGLQAQALYPWRAKKDNHLNFNKNDVITVLEQQDMWWFGEVQGQKGWFPKSYVKLISGPIRKSTSMDSGSSESPASLKRVASPAAKPVVSGEEIAQVIASYTATGPEQLTLAPGQLILIRKKNPGGWWEGELQARGKKRQIGWFPANYVKLLSPGTSKITPTEPPKSTALAAVCQVIGMYDYTAQNDDELAFNKGQIINVLNKEDPDWWKGEVNGQVGLFPSNYVKLTTDMDPSQQ

SEQ ID NO: 29185 - protein, 1650 aa, Homo sapiens
MAQFPTPFGGSLDIWAITVEERAKHDQQFHSLKPISGFITGDQARNFFFQSGLPQPVLAQIWALADMNNDGRMDQVEFSIAMKLIKLKLQGYQLPSALPPVMKQQPVAISSAPAFGMGGIASMPPLTAVAPVPMGSIPVVGMSPTLVSSVPTAAVPPLANGAPPVIQPLPAFAHPAATLPKSSSFSRSGPGSQLNTKLQKAQSFDVASVPPVAEWAVPQSSRLKYRQLFNSHDKTMSGHLTGPQARTILMQSSLPQAQLASIWNLSDIDQDGKLTAEEFILAMHLIDVAMSGQPLPPVLPPEYIPPSFRRVRSGSGISVISSTSVDQRLPEEPVLEDEQQQLEKKLPVTFEDKKRENFERGNLELEKRRQALLEQQRKEQERLAQLERAEQERKERERQEQERKRQLELEKQLEKQRELERQREEERRKEIERREAAKRELERQRQLEWERNRRQELLNQRNKEQEDIVVLKAKKKTLEFELEALNDKKHQLEGKLQDIRCRLTTQRQEIESTNKSRELRIAEITHLQQQLQESQQMLGRLIPEKQILNDQLKQVQQNSLHRDSLVTLKRALEAKELARQHLRDQLDEVEKETRSKLQEIDIFNNQLKELREIHNKQQLQKQKSMEAERLKQKEQERKIIELEKQKEEAQRRAQERDKQWLEHVQQEDEHQRPRKLHEEEKLKREESVKKKDGEEKGKQEAQDKLGRLFHQHQEPAKPAVQAPWSTAEKGPLTISAQENVKVVYYRALYPFESRSHDEITIQPGDIVMVKGEWVDESQTGEPGWLGGELKGKTGWFPANYAEKIPENEVPAPVKPVTDSTSAPAPKLALRETPAPLAVTSSEPSTTPNNWADFSSTWPTSTNEKPETDNWDAWAAQPSLTVPSAGQLRQRSAFTPATATGSSPSPVLGQGEKVEGLQAQALYPWRAKKDNHLNFNKNDVITVLEQQDMWWFGEVQGQKGWFPKSYVKLISGPIRKSTSMDSGSSESPASLKRVASPAAKPVVSGEEIAQVIASYTATGPEQLTLAPGQLILIRKKNPGGWWEGELQARGKKRQIGWFPANYVKLLSPGTSKITPTEPPKSTALAAVCQVIGMYDYTAQNDDELAFNKGQIINVLNKEDPDWWKGEVNGQVGLFPSNYVKLTTDMDPSQQWCSDLHLLDMLTPTERKRQGYIHELIVTEENYVNDLQLVTEIFQKPLMESELLTEKEVAMIFVNWKELIMCNIKLLKALRVRKKMSGEKMPVKMIGDILSAQLPHMQPYIRFCSRQLNGAALIQQKTDEAPDFKEFVKRLAMDPRCKGMPLSSFILKPMQRVTRYPLIIKNILENTPENHPDHSHLKHALEKAEELCSQVNEGVREKENSDRLEWIQAHVQCEGLSEQLVFNSVTNCLGPRKFLHSGKLYKAKSNKELYGFLFNDFLLLTQITKPLGSSGTDKVFSPKSNLQYKMYKTPIFLNEVLVKLPTDPSGDEPIFHISHIDRVYTLRAESINERTAWVQKIKAASELYIETEKKKREKAYLVRSQRATGIGRLMVNVVEGIELKPCRSHGKSNPYCEVTMGSQCHITKTIQDTLNPKWNSNCQFFIRDLEQEVLCITVFERDQFSPDDFLGRTEIRVADIKKDQGSKGPVTKCLLLHEVPTGEIVVRLDLQLFDEP

SEQ ID NO: 29186 - protein, 1020 aa, Homo sapiens
MAQFPTPFGGSLDIWAITVEERAKHDQQFHSLKPISGFITGDQARNFFFQSGLPQPVLAQIWALADMNNDGRMDQVEFSIAMKLIKLKLQGYQLPSALPPVMKQQPVAISSAPAFGMGGIASMPPLTAVAPVPMGSIPVVGMSPTLVSSVPTAAVPPLANGAPPVIQPLPAFAHPAATLPKSSSFSRSGPGSQLNTKLQKAQSFDVASVPPVAEWAVPQSSRLKYRQLFNSHDKTMSGHLTGPQARTILMQSSLPQAQLASIWNLSDIDQDGKLTAEEFILAMHLIDVAMSGQPLPPVLPPEYIPPSFRRVRSGSGISVISSTSVDQRLPEEPVLEDEQQQLEKKLPVTFEDKKRENFERGNLELEKRRQALLEQQRKEQERLAQLERAEQERKERERQEQERKRQLELEKQLEKQRELERQREEERRKEIERREAAKRELERQRQLEWERNRRQELLNQRNKEQEDIVVLKAKKKTLEFELEALNDKKHQLEGKLQDIRCRLTTQRQEIESTNKSRELRIAEITHLQQQLQESQQMLGRLIPEKQILNDQLKQVQQNSLHRDSLVTLKRALEAKELARQHLRDQLDEVEKETRSKLQEIDIFNNQLKELREIHNKQQLQKQKSMEAERLKQKEQERKIIELEKQKEEAQRRAQERDKQWLEHVQQEDEHQRPRKLHEEEKLKREESVKKKDGEEKGKQEAQDKLGRLFHQHQEPAKPAVQAPWSTAEKGPLTISAQENVKVVYYRALYPFESRSHDEITIQPGDIVMVDESQTGEPGWLGGELKGKTGWFPANYAEKIPENEVPAPVKPVTDSTSAPAPKLALRETPAPLAVTSSEPSTTPNNWADFSSTWPTSTNEKPETDNWDAWAAQPSLTVPSAGQLRQRSAFTPATATGSSPSPVLGQPDFLLHPSMRLGHMQPRIVLLFPDPLQCSTSRLLPMLRPRPGVPFLRSPSCQSPSHPSRPISDAAPSVKFTLMPPGRIHPCFLFIPAVNSRNSFLVYFILPGGTLGCFYLCLPHYL

SEQ ID NO: 29187 - protein, 1015 aa, Homo sapiens
MAQFPTPFGGSLDIWAITVEERAKHDQQFHSLKPISGFITGDQARNFFFQSGLPQPVLAQIWALADMNNDGRMDQVEFSIAMKLIKLKLQGYQLPSALPPVMKQQPVAISSAPAFGMGGIASMPPLTAVAPVPMGSIPVVGMSPTLVSSVPTAAVPPLANGAPPVIQPLPAFAHPAATLPKSSSFSRSGPGSQLNTKLQKAQSFDVASVPPVAEWAVPQSSRLKYRQLFNSHDKTMSGHLTGPQARTILMQSSLPQAQLASIWNLSDIDQDGKLTAEEFILAMHLIDVAMSGQPLPPVLPPEYIPPSFRRVRSGSGISVISSTSVDQRLPEEPVLEDEQQQLEKKLPVTFEDKKRENFERGNLELEKRRQALLEQQRKEQERLAQLERAEQERKERERQEQERKRQLELEKQLEKQRELERQREEERRKEIERREAAKRELERQRQLEWERNRRQELLNQRNKEQEDIVVLKAKKKTLEFELEALNDKKHQLEGKLQDIRCRLTTQRQEIESTNKSRELRIAEITHLQQQLQESQQMLGRLIPEKQILNDQLKQVQQNSLHRDSLVTLKRALEAKELARQHLRDQLDEVEKETRSKLQEIDIFNNQLKELREIHNKQQLQKQKSMEAERLKQKEQERKIIELEKQKEEAQRRAQERDKQWLEHVQQEDEHQRPRKLHEEEKLKREESVKKKDGEEKGKQEAQDKLGRLFHQHQEPAKPAVQAPWSTAEKGPLTISAQENVKVVYYRALYPFESRSHDEITIQPGDIVMVDESQTGEPGWLGGELKGKTGWFPANYAEKIPENEVPAPVKPVTDSTSAPAPKLALRETPAPLAVTSSEPSTTPNNWADFSSTWPTSTNEKPETDNWDAWAAQPSLTVPSAGQLRQRSAFTPATATGSSPSPVLGQGEKVEGLQAQALYPWRAKKDNHLNFNKNDVITVLEQQDMWWFGEVQGQKGWFPKSYVKLISGPIRKSTSMDSGSSESPASLKRVASPAAKPVVSGEGLWNCWENREFRKKT

SEQ ID NO: 29188 - protein, 1215 aa, Homo sapiens
MAQFPTPFGGSLDIWAITVEERAKHDQQFHSLKPISGFITGDQARNFFFQSGLPQPVLAQIWALADMNNDGRMDQVEFSIAMKLIKLKLQGYQLPSALPPVMKQQPVAISSAPAFGMGGIASMPPLTAVAPVPMGSIPVVGMSPTLVSSVPTAAVPPLANGAPPVIQPLPAFAHPAATLPKSSSFSRSGPGSQLNTKLQKAQSFDVASVPPVAEWAVPQSSRLKYRQLFNSHDKTMSGHLTGPQARTILMQSSLPQAQLASIWNLSDIDQDGKLTAEEFILAMHLIDVAMSGQPLPPVLPPEYIPPSFRRVRSGSGISVISSTSVDQRLPEEPVLEDEQQQLEKKLPVTFEDKKRENFERGNLELEKRRQALLEQQRKEQERLAQLERAEQERKERERQEQERKRQLELEKQLEKQRELERQREEERRKEIERREAAKRELERQRQLEWERNRRQELLNQRNKEQEDIVVLKAKKKTLEFELEALNDKKHQLEGKLQDIRCRLTTQRQEIESTNKSRELRIAEITHLQQQLQESQQMLGRLIPEKQILNDQLKQVQQNSLHRDSLVTLKRALEAKELARQHLRDQLDEVEKETRSKLQEIDIFNNQLKELREIHNKQQLQKQKSMEAERLKQKEQERKIIELEKQKEEAQRRAQERDKQWLEHVQQEDEHQRPRKLHEEEKLKREESVKKKDGEEKGKQEAQDKLGRLFHQHQEPAKPAVQAPWSTAEKGPLTISAQENVKVVYYRALYPFESRSHDEITIQPGDIVMVDESQTGEPGWLGGELKGKTGWFPANYAEKIPENEVPAPVKPVTDSTSAPAPKLALRETPAPLAVTSSEPSTTPNNWADFSSTWPTSTNEKPETDNWDAWAAQPSLTVPSAGQLRQRSAFTPATATGSSPSPVLGQGEKVEGLQAQALYPWRAKKDNHLNFNKNDVITVLEQQDMWWFGEVQGQKGWFPKSYVKLISGPIRKSTSMDSGSSESPASLKRVASPAAKPVVSGEEFIAMYTYESSEQGDLTFQQGDVILVTKKDGDWWTGTVGDKAGVFPSNYVRLKDSEGSGTAGKTGSLGKKPEIAQVIASYTATGPEQLTLAPGQLILIRKKNPGGWWEGELQARGKKRQIGWFPANYVKLLSPGTSKITPTEPPKSTALAAVCQVIGMYDYTAQNDDELAFNKGQIINVLNKEDPDWWKGEVNGQVGLFPSNYVKLTTDMDPSQQ

SEQ ID NO: 29189 - protein, 1716 aa, Homo sapiens
MAQFPTPFGGSLDIWAITVEERAKHDQQFHSLKPISGFITGDQARNFFFQSGLPQPVLAQIWALADMNNDGRMDQVEFSIAMKLIKLKLQGYQLPSALPPVMKQQPVAISSAPAFGMGGIASMPPLTAVAPVPMGSIPVVGMSPTLVSSVPTAAVPPLANGAPPVIQPLPAFAHPAATLPKSSSFSRSGPGSQLNTKLQKAQSFDVASVPPVAEWAVPQSSRLKYRQLFNSHDKTMSGHLTGPQARTILMQSSLPQAQLASIWNLSDIDQDGKLTAEEFILAMHLIDVAMSGQPLPPVLPPEYIPPSFRRVRSGSGISVISSTSVDQRLPEEPVLEDEQQQLEKKLPVTFEDKKRENFERGNLELEKRRQALLEQQRKEQERLAQLERAEQERKERERQEQERKRQLELEKQLEKQRELERQREEERRKEIERREAAKRELERQRQLEWERNRRQELLNQRNKEQEDIVVLKAKKKTLEFELEALNDKKHQLEGKLQDIRCRLTTQRQEIESTNKSRELRIAEITHLQQQLQESQQMLGRLIPEKQILNDQLKQVQQNSLHRDSLVTLKRALEAKELARQHLRDQLDEVEKETRSKLQEIDIFNNQLKELREIHNKQQLQKQKSMEAERLKQKEQERKIIELEKQKEEAQRRAQERDKQWLEHVQQEDEHQRPRKLHEEEKLKREESVKKKDGEEKGKQEAQDKLGRLFHQHQEPAKPAVQAPWSTAEKGPLTISAQENVKVVYYRALYPFESRSHDEITIQPGDIVMVDESQTGEPGWLGGELKGKTGWFPANYAEKIPENEVPAPVKPVTDSTSAPAPKLALRETPAPLAVTSSEPSTTPNNWADFSSTWPTSTNEKPETDNWDAWAAQPSLTVPSAGQLRQRSAFTPATATGSSPSPVLGQGEKVEGLQAQALYPWRAKKDNHLNFNKNDVITVLEQQDMWWFGEVQGQKGWFPKSYVKLISGPIRKSTSMDSGSSESPASLKRVASPAAKPVVSGEEFIAMYTYESSEQGDLTFQQGDVILVTKKDGDWWTGTVGDKAGVFPSNYVRLKDSEGSGTAGKTGSLGKKPEIAQVIASYTATGPEQLTLAPGQLILIRKKNPGGWWEGELQARGKKRQIGWFPANYVKLLSPGTSKITPTEPPKSTALAAVCQVIGMYDYTAQNDDELAFNKGQIINVLNKEDPDWWKGEVNGQVGLFPSNYVKLTTDMDPSQQWCSDLHLLDMLTPTERKRQGYIHELIVTEENYVNDLQLVTEIFQKPLMESELLTEKEVAMIFVNWKELIMCNIKLLKALRVRKKMSGEKMPVKMIGDILSAQLPHMQPYIRFCSRQLNGAALIQQKTDEAPDFKEFVKRLAMDPRCKGMPLSSFILKPMQRVTRYPLIIKNILENTPENHPDHSHLKHALEKAEELCSQVNEGVREKENSDRLEWIQAHVQCEGLSEQLVFNSVTNCLGPRKFLHSGKLYKAKSNKELYGFLFNDFLLLTQITKPLGSSGTDKVFSPKSNLQYKMYKTPIFLNEVLVKLPTDPSGDEPIFHISHIDRVYTLRAESINERTAWVQKIKAASELYIETEKKKREKAYLVRSQRATGIGRLMVNVVEGIELKPCRSHGKSNPYCEVTMGSQCHITKTIQDTLNPKWNSNCQFFIRDLEQEVLCITVFERDQFSPDDFLGRTEIRVADIKKDQGSKGPVTKCLLLHEVPTGEIVVRLDLQLFDEP

SEQ ID NO: 29190 - protein, 1660 aa, Homo sapiens
MAQFPTPFGGSLDIWAITVEERAKHDQQFHSLKPISGFITGDQARNFFFQSGLPQPVLAQIWALADMNNDGRMDQVEFSIAMKLIKLKLQGYQLPSALPPVMKQQPVAISSAPAFGMGGIASMPPLTAVAPVPMGSIPVVGMSPTLVSSVPTAAVPPLANGAPPVIQPLPAFAHPAATLPKSSSFSRSGPGSQLNTKLQKAQSFDVASVPPVAEWAVPQSSRLKYRQLFNSHDKTMSGHLTGPQARTILMQSSLPQAQLASIWNLSDIDQDGKLTAEEFILAMHLIDVAMSGQPLPPVLPPEYIPPSFRRVRSGSGISVISSTSVDQRLPEEPVLEDEQQQLEKKLPVTFEDKKRENFERGNLELEKRRQALLEQQRKEQERLAQLERAEQERKERERQEQERKRQLELEKQLEKQRELERQREEERRKEIERREAAKRELERQRQLEWERNRRQELLNQRNKEQEDIVVLKAKKKTLEFELEALNDKKHQLEGKLQDIRCRLTTQRQEIESTNKSRELRIAEITHLQQQLQESQQMLGRLIPEKQILNDQLKQVQQNSLHRDSLVTLKRALEAKELARQHLRDQLDEVEKETRSKLQEIDIFNNQLKELREIHNKQQLQKQKSMEAERLKQKEQERKIIELEKQKEEAQRRAQERDKQWLEHVQQEDEHQRPRKLHEEEKLKREESVKKKDGEEKGKQEAQDKLGRLFHQHQEPAKPAVQAPWSTAEKGPLTISAQENVKVVYYRALYPFESRSHDEITIQPGDIVMVDESQTGEPGWLGGELKGKTGWFPANYAEKIPENEVPAPVKPVTDSTSAPAPKLALRETPAPLAVTSSEPSTTPNNWADFSSTWPTSTNEKPETDNWDAWAAQPSLTVPSAGQLRQRSAFTPATATGSSPSPVLGQGEKVEGLQAQALYPWRAKKDNHLNFNKNDVITVLEQQDMWWFGEVQGQKGWFPKSYVKLISGPIRKSTSMDSGSSESPASLKRVASPAAKPVVSGEEFIAMYTYESSEQGDLTFQQGDVILVTKKDGDWWTGTVGDKAGVFPSNYVRLKDSEGSGTAGKTGSLGKKPEIAQVIASYTATGPEQLTLAPGQLILIRKKNPGGWWEGELQARGKKRQIGWFPANYVKLLSPGTSKITPTEPPKSTALAAVCQVIGMYDYTAQNDDELAFNKGQIINVLNKEDPDWWKGEVNGQVGLFPSNYVKLTTDMDPSQQWCSDLHLLDMLTPTERKRQGYIHELIVTEENYVNDLQLVTEIFQKPLMESELLTEKEVAMIFVNWKELIMCNIKLLKALRVRKKMSGEKMPVKMIGDILSAQLPHMQPYIRFCSRQLNGAALIQQKTDEAPDFKEFVKRLAMDPRCKGMPLSSFILKPMQRVTRYPLIIKNQLVFNSVTNCLGPRKFLHSGKLYKAKSNKELYGFLFNDFLLLTQITKPLGSSGTDKVFSPKSNLQYKMYKTPIFLNEVLVKLPTDPSGDEPIFHISHIDRVYTLRAESINERTAWVQKIKAASELYIETEKKKREKAYLVRSQRATGIGRLMVNVVEGIELKPCRSHGKSNPYCEVTMGSQCHITKTIQDTLNPKWNSNCQFFIRDLEQEVLCITVFERDQFSPDDFLGRTEIRVADIKKDQGSKGPVTKCLLLHEVPTGEIVVRLDLQLFDEP

SEQ ID NO: 29191 - protein, 1178 aa, Homo sapiens
MAQFPTPFGGSLDIWAITVEERAKHDQQFHSLKPISGFITGDQARNFFFQSGLPQPVLAQIWALADMNNDGRMDQVEFSIAMKLIKLKLQGYQLPSALPPVMKQQPVAISSAPAFAAVPPLANGAPPVIQPLPAFAHPAATLPKSSSFSRSGPGSQLNTKLQKAQSFDVASVPPVAEWAVPQSSRLKYRQLFNSHDKTMSGHLTGPQARTILMQSSLPQAQLASIWNLSDIDQDGKLTAEEFILAMHLIDVAMSGQPLPPVLPPEYIPPSFRRVRSGSGISVISSTSVDQRLPEEPVLEDEQQQLEKKLPVTFEDKKRENFERGNLELEKRRQALLEQQRKEQERLAQLERAEQERKERERQEQERKRQLELEKQLEKQRELERQREEERRKEIERREAAKRELERQRQLEWERNRRQELLNQRNKEQEDIVVLKAKKKTLEFELEALNDKKHQLEGKLQDIRCRLTTQRQEIESTNKSRELRIAEITHLQQQLQESQQMLGRLIPEKQILNDQLKQVQQNSLHRDSLVTLKRALEAKELARQHLRDQLDEVEKETRSKLQEIDIFNNQLKELREIHNKQQLQKQKSMEAERLKQKEQERKIIELEKQKEEAQRRAQERDKQWLEHVQQEDEHQRPRKLHEEEKLKREESVKKKDGEEKGKQEAQDKLGRLFHQHQEPAKPAVQAPWSTAEKGPLTISAQENVKVVYYRALYPFESRSHDEITIQPGDIVMVDESQTGEPGWLGGELKGKTGWFPANYAEKIPENEVPAPVKPVTDSTSAPAPKLALRETPAPLAVTSSEPSTTPNNWADFSSTWPTSTNEKPETDNWDAWAAQPSLTVPSAGQLRQRSAFTPATATGSSPSPVLGQGEKVEGLQAQALYPWRAKKDNHLNFNKNDVITVLEQQDMWWFGEVQGQKGWFPKSYVKLISGPIRKSTSMDSGSSESPASLKRVASPAAKPVVSGEEFIAMYTYESSEQGDLTFQQGDVILVTKKDGDWWTGTVGDKAGVFPSNYVRLKDSEGSGTAGKTGSLGKKPEIAQVIASYTATGPEQLTLAPGQLILIRKKNPGGWWEGELQARGKKRQIGWFPANYVKLLSPGTSKITPTEPPKSTALAAVCQVIGMYDYTAQNDDELAFNKGQIINVLNKEDPDWWKGEVNGQVGLFPSNYVKLTTDMDPSQQ

SEQ ID NO: 29192 - protein, 1112 aa, Homo sapiens
MAQFPTPFGGSLDIWAITVEERAKHDQQFHSLKPISGFITGDQARNFFFQSGLPQPVLAQIWALADMNNDGRMDQVEFSIAMKLIKLKLQGYQLPSALPPVMKQQPVAISSAPAFAAVPPLANGAPPVIQPLPAFAHPAATLPKSSSFSRSGPGSQLNTKLQKAQSFDVASVPPVAEWAVPQSSRLKYRQLFNSHDKTMSGHLTGPQARTILMQSSLPQAQLASIWNLSDIDQDGKLTAEEFILAMHLIDVAMSGQPLPPVLPPEYIPPSFRRVRSGSGISVISSTSVDQRLPEEPVLEDEQQQLEKKLPVTFEDKKRENFERGNLELEKRRQALLEQQRKEQERLAQLERAEQERKERERQEQERKRQLELEKQLEKQRELERQREEERRKEIERREAAKRELERQRQLEWERNRRQELLNQRNKEQEDIVVLKAKKKTLEFELEALNDKKHQLEGKLQDIRCRLTTQRQEIESTNKSRELRIAEITHLQQQLQESQQMLGRLIPEKQILNDQLKQVQQNSLHRDSLVTLKRALEAKELARQHLRDQLDEVEKETRSKLQEIDIFNNQLKELREIHNKQQLQKQKSMEAERLKQKEQERKIIELEKQKEEAQRRAQERDKQWLEHVQQEDEHQRPRKLHEEEKLKREESVKKKDGEEKGKQEAQDKLGRLFHQHQEPAKPAVQAPWSTAEKGPLTISAQENVKVVYYRALYPFESRSHDEITIQPGDIVMVKGEWVDESQTGEPGWLGGELKGKTGWFPANYAEKIPENEVPAPVKPVTDSTSAPAPKLALRETPAPLAVTSSEPSTTPNNWADFSSTWPTSTNEKPETDNWDAWAAQPSLTVPSAGQLRQRSAFTPATATGSSPSPVLGQGEKVEGLQAQALYPWRAKKDNHLNFNKNDVITVLEQQDMWWFGEVQGQKGWFPKSYVKLISGPIRKSTSMDSGSSESPASLKRVASPAAKPVVSGEEIAQVIASYTATGPEQLTLAPGQLILIRKKNPGGWWEGELQARGKKRQIGWFPANYVKLLSPGTSKITPTEPPKSTALAAVCQVIGMYDYTAQNDDELAFNKGQIINVLNKEDPDWWKGEVNGQVGLFPSNYVKLTTDMDPSQQ

SEQ ID NO: 29193 - protein, 1107 aa, Homo sapiens
MAQFPTPFGGSLDIWAITVEERAKHDQQFHSLKPISGFITGDQARNFFFQSGLPQPVLAQIWALADMNNDGRMDQVEFSIAMKLIKLKLQGYQLPSALPPVMKQQPVAISSAPAFAAVPPLANGAPPVIQPLPAFAHPAATLPKSSSFSRSGPGSQLNTKLQKAQSFDVASVPPVAEWAVPQSSRLKYRQLFNSHDKTMSGHLTGPQARTILMQSSLPQAQLASIWNLSDIDQDGKLTAEEFILAMHLIDVAMSGQPLPPVLPPEYIPPSFRRVRSGSGISVISSTSVDQRLPEEPVLEDEQQQLEKKLPVTFEDKKRENFERGNLELEKRRQALLEQQRKEQERLAQLERAEQERKERERQEQERKRQLELEKQLEKQRELERQREEERRKEIERREAAKRELERQRQLEWERNRRQELLNQRNKEQEDIVVLKAKKKTLEFELEALNDKKHQLEGKLQDIRCRLTTQRQEIESTNKSRELRIAEITHLQQQLQESQQMLGRLIPEKQILNDQLKQVQQNSLHRDSLVTLKRALEAKELARQHLRDQLDEVEKETRSKLQEIDIFNNQLKELREIHNKQQLQKQKSMEAERLKQKEQERKIIELEKQKEEAQRRAQERDKQWLEHVQQEDEHQRPRKLHEEEKLKREESVKKKDGEEKGKQEAQDKLGRLFHQHQEPAKPAVQAPWSTAEKGPLTISAQENVKVVYYRALYPFESRSHDEITIQPGDIVMVDESQTGEPGWLGGELKGKTGWFPANYAEKIPENEVPAPVKPVTDSTSAPAPKLALRETPAPLAVTSSEPSTTPNNWADFSSTWPTSTNEKPETDNWDAWAAQPSLTVPSAGQLRQRSAFTPATATGSSPSPVLGQGEKVEGLQAQALYPWRAKKDNHLNFNKNDVITVLEQQDMWWFGEVQGQKGWFPKSYVKLISGPIRKSTSMDSGSSESPASLKRVASPAAKPVVSGEEIAQVIASYTATGPEQLTLAPGQLILIRKKNPGGWWEGELQARGKKRQIGWFPANYVKLLSPGTSKITPTEPPKSTALAAVCQVIGMYDYTAQNDDELAFNKGQIINVLNKEDPDWWKGEVNGQVGLFPSNYVKLTTDMDPSQQ

SEQ ID NO: 29194 - protein, 914 aa, Homo sapiens
MAQFPTPFGGSLDIWAITVEERAKHDQQFHSLKPISGFITGDQARNFFFQSGLPQPVLAQIWALADMNNDGRMDQVEFSIAMKLIKLKLQGYQLPSALPPVMKQQPVAISSAPAFGMGGIASMPPLTAVAPVPMGSIPVVGMSPTLVSSVPTAAVPPLANGAPPVIQPLPAFAHPAATLPKSSSFSRSGPGSQLNTKLQKAQSFDVASVPPVAEWAVPQSSRLKYRQLFNSHDKTMSGHLTGPQARTILMQSSLPQAQLASIWNLSDIDQDGKLTAEEFILAMHLIDVAMSGQPLPPVLPPEYIPPSFRRVRSGSGISVISSTSVDQRLPEEPVLEDEQQQLEKKLPVTFEDKKRENFERGNLELEKRRQALLEQQRKEQERLAQLERAEQERKERERQEQERKRQLELEKQLEKQRELERQREEERRKEIERREAAKRELERQRQLEWERNRRQELLNQRNKEQEDIVVLKAKKKTLEFELEALNDKKHQLEGKLQDIRCRLTTQRQEIESTNKSRELRIAEITHLQQQLQESQQMLGRLIPEKQILNDQLKQVQQNSLHRDSLVTLKRALEAKELARQHLRDQLDEVEKETRSKLQEIDIFNNQLKELREIHNKQQLQKQKSMEAERLKQKEQERKIIELEKQKEEAQRRAQERDKQWLEHVQQEDEHQRPRKLHEEEKLKREESVKKKDGEEKGKQEAQDKLGRLFHQHQEPAKPAVQAPWSTAEKGPLTISAQENVKVVYYRALYPFESRSHDEITIQPGDIVMVDESQTGEPGWLGGELKGKTGWFPANYAEKIPENEVPAPVKPVTDSTSAPAPKLALRETPAPLAVTSSEPSTTPNNWADFSSTWPTSTNEKPETDNWDAWAAQPSLTVPSAGQLRQRSAFTPATATGSSPSPVLGQHGFWFFRESC

SEQ ID NO: 29195 - protein, 686 aa, Homo sapiens
MKPPFLLALVVCSVVSTNLKMVSKRNSVDGCIDWSVDLKTYMALAGEPVRVKCALFYSYIRTNYSTAQSTGLRLMWYKNKGDLEEPIIFSEVRMSKEEDSIWFHSAEAQDSGFYTCVLRNSTYCMKVSMSLTVAENESGLCYNSRIRYLEKSEVTKRKEISCPDMDDFKKSDQEPDVVWYKECKPKMWRSIIIQKGNALLIQEVQEEDGGNYTCELKYEGKLVRRTTELKVTALLTDKPPKPLFPMENQPSVIDVQLGKPLNIPCKAFFGFSGESGPMIYWMKGEKFIEELAGHIREGEIRLLKEHLGEKEVELALIFDSVVEADLANYTCHVENRNGRKHASVLLRKKDLIYKIELAGGLGAIFLLLVLLVVIYKCYNIELMLFYRQHFGADETNDDNKEYDAYLSYTKVDQDTLDCDNPEEEQFALEVLPDVLEKHYGYKLFIPERDLIPSGTYMEDLTRYVEQSRRLIIVLTPDYILRRGWSIFELESRLHNMLVSGEIKVILIECTELKGKVNCQEVESLKRSIKLLSLIKWKGSKSSKLNSKFWKHLVYEMPIKKKEMLPRCHVLDSAEQGLFGELQPIPSIAMTSTSATLVSSQADLPEFHPSDSMQIRHCCRGYKHEIPATTLPVPSLGNHHTYCNLPLTLLNGQLPLNNTLKDTQEFHRNSSLLPLSSKELSFTSDIW

SEQ ID NO: 29196 - protein, 464 aa, Homo sapiens
MSLQFSNGSRHVCLRSGAGSVRPLNGGAGFAGSSACGGSVAGSEFSCALGGGLGSVPGGSHAGGALGNAACIGFAGSEGGLLSGNEKVTMQNLNDRLASYLDNVRALEEANAELERKIKGWYEKYGPGSCRGLDHDYSRYHLTIEDLKNKIISSTTTNANVILQIDNARLAADDFRLKYENELTLHQNVEADINGLRRVLDELTLCRTDQELQYESLSEEMTYLKKNHEEEMKALQCAAGGNVNVEMNAAPGVDLAVLLNNMRAEYEALAEQNRKDAEAWFNEKSASLQQQISHDSGAATFARSQLTEMRRTLQTLEIQLQSLMATKHSLECSLTETESNYCTQLAQIQAQIGALEEQLHQVRTETEGQKLEYEHLLDVKVHLEKEIETYCRLIDGDGNSCSKSKGFGSGSPGNSSKDLSKTTLVKTVVEELDQRGKVLSSRIHSIEEKTSKMTNGKTEQRVPF

SEQ ID NO: 29197 - protein, 1697 aa, Homo sapiens
MMAQFPTAMNGGPNMWAITSEERTKHDRQFDNLKPSGGYITGDQARNFFLQSGLPAPVLAEIWALSDLNKDGKMDQQEFSIAMKLIKLKLQGQQLPVVLPPIMKQPPMFSPLISARFGMGSMPNLSIPQPLPPAAPITSLSSATSGTNLPPLMMPTPLVPSVSTSSLPNGTASLIQPLPIPYSSSTLPHGSSYSLMMGGFGGASIQKAQSLIDLGSSSSTSSTASLSGNSPKTGTSEWAVPQPTRLKYRQKFNTLDKSMSGYLSGFQARNALLQSNLSQTQLATIWTLADVDGDGQLKAEEFILAMHLTDMAKAGQPLPLTLPPELVPPSFRGGKQIDSINGTLPSYQKMQEEEPQKKLPVTFEDKRKANYERGNMELEKRRQALMEQQQREAERKAQKEKEEWERKQRELQEQEWKKQLELEKRLEKQRELERQREEERRKDIERREAAKQELERQRRLEWERIRRQELLNQKNREQEEIVRLNSKKKNLHLELEALNGKHQQISGRLQDVRLKKQTQKTELEVLDKQCDLEIMEIKQLQQELQEYQNKLIYLVPEKQLLNERIKNMQFSNTPDSGVSLLHKKSLEKEELCQRLKEQLDALEKETASKLSEMDSFNNQLKCGNMDDSVLQCLLSLLSCLNNLFLLLKELRETYNTQQLALEQLYKIKRDKLKEIERKRLELMQKKKLEDEAARKAKQGKENLWKENLRKEEEEKQKRLQEEKTQEKIQEEERKAEEKQRKDKDTLKAEEKKRETASVLVNYRALYPFEARNHDEMSFNSGDIIQVDEKTVGEPGWLYGSFQGNFGWFPCNYVEKMPSSENEKAVSPKKALLPPTVSLSATSTSSEPLSSNQPASVTDYQNVSFSNLTVNTSWQKKSAFTRTVSPGSVSPIHGQGQVVENLKAQALCSWTAKKDNHLNFSKHDIITVLEQQENWWFGEVHGGRGWFPKSYVKIIPGSEVKREEPEALYAAVNKKPTSAAYSVGEEYIALYPYSSVEPGDLTFTEGEEILVTQKDGEWWTGSIGDRSGIFPSNYVKPKDQESFGSASKSGASNKKPEIAQVTSAYVASGSEQLSLAPGQLILILKKNTSGWWQGELQARGKKRQKGWFPASHVKLLGPSSERATPAFHPVCQVIAMYDYAANNEDELSFSKGQLINVMNKDDPDWWQGEINGVTGLFPSNYVKMTTDSDPSQQWCADLQTLDTMQPIERKRQGYIHELIQTEERYMADLQLVVEVFQKRMAESGFLTEGEMALIFVNWKELIMSNTKLLKALRVRKKTGGEKMPVQMIGDILAAELSHMQAYIRFCSCQLNGAALLQQKTDEDTDFKEFLKKLASDPRCKGMPLSSFLLKPMQRITRYPLLIRSILENTPESHADHSSLKLALERAEELCSQVNEGVREKENSDRLEWIQAHVQCEGLAEQLIFNSLTNCLGPRKLLHSGKLYKTKSNKELHGFLFNDFLLLTYMVKQFAVSSGSEKLFSSKSNAQFKMYKTPIFLNEVLVKLPTDPSSDEPVFHISHIDRVYTLRTDNINERTAWVQKIKAASEQYIDTEKKKREKAYQARSQKTSGIGRLMVHVIEATELKACKPNGKSNPYCEISMGSQSYTTRTIQDTLNPKWNFNCQFFIKDLYQDVLCLTLFDRDQFSPDDFLGRTEIPVAKIRTEQESKGPMTRRLLLHEVPTGEVWVRFDLQLFEQKTLL

SEQ ID NO: 29198 - protein, 1670 aa, Homo sapiens
MMAQFPTAMNGGPNMWAITSEERTKHDRQFDNLKPSGGYITGDQARNFFLQSGLPAPVLAEIWALSDLNKDGKMDQQEFSIAMKLIKLKLQGQQLPVVLPPIMKQPPMFSPLISARFGMGSMPNLSIPQPLPPAAPITSLSSATSGTNLPPLMMPTPLVPSVSTSSLPNGTASLIQPLPIPYSSSTLPHGSSYSLMMGGFGGASIQKAQSLIDLGSSSSTSSTASLSGNSPKTGTSEWAVPQPTRLKYRQKFNTLDKSMSGYLSGFQARNALLQSNLSQTQLATIWTLADVDGDGQLKAEEFILAMHLTDMAKAGQPLPLTLPPELVPPSFRGGKQIDSINGTLPSYQKMQEEEPQKKLPVTFEDKRKANYERGNMELEKRRQALMEQQQREAERKAQKEKEEWERKQRELQEQEWKKQLELEKRLEKQRELERQREEERRKDIERREAAKQELERQRRLEWERIRRQELLNQKNREQEEIVRLNSKKKNLHLELEALNGKHQQISGRLQDVRLKKQTQKTELEVLDKQCDLEIMEIKQLQQELQEYQNKLIYLVPEKQLLNERIKNMQFSNTPDSGVSLLHKKSLEKEELCQRLKEQLDALEKETASKLSEMDSFNNQLKELRETYNTQQLALEQLYKIKRDKLKEIERKRLELMQKKKLEDEAARKAKQGKENLWKENLRKEEEEKQKRLQEEKTQEKIQEEERKAEEKQRKDKDTLKAEEKKRETASVLVNYRALYPFEARNHDEMSFNSGDIIQVDEKTVGEPGWLYGSFQGNFGWFPCNYVEKMPSSENEKAVSPKKALLPPTVSLSATSTSSEPLSSNQPASVTDYQNVSFSNLTVNTSWQKKSAFTRTVSPGSVSPIHGQGQVVENLKAQALCSWTAKKDNHLNFSKHDIITVLEQQENWWFGEVHGGRGWFPKSYVKIIPGSEVKREEPEALYAAVNKKPTSAAYSVGEEYIALYPYSSVEPGDLTFTEGEEILVTQKDGEWWTGSIGDRSGIFPSNYVKPKDQESFGSASKSGASNKKPEIAQVTSAYVASGSEQLSLAPGQLILILKKNTSGWWQGELQARGKKRQKGWFPASHVKLLGPSSERATPAFHPVCQVIAMYDYAANNEDELSFSKGQLINVMNKDDPDWWQGEINGVTGLFPSNYVKMTTDSDPSQQWCADLQTLDTMQPIERKRQGYIHELIQTEERYMADLQLVVEVFQKRMAESGFLTEGEMALIFVNWKELIMSNTKLLKALRVRKKTGGEKMPVQMIGDILAAELSHMQAYIRFCSCQLNGAALLQQKTDEDTDFKEFLKKLASDPRCKGMPLSSFLLKPMQRITRYPLLIRSILENTPESHADHSSLKLALERAEELCSQVNEGVREKENSDRLEWIQAHVQCEGLAEQLIFNSLTNCLGPRKLLHSGKLYKTKSNKELHGFLFNDFLLLTYMVKQFAVSSGSEKLFSSKSNAQFKMYKTPIFLNEVLVKLPTDPSSDEPVFHISHIDRVYTLRTDNINERTAWVQKIKAASEQYIDTEKKKREKAYQARSQKTSGIGRLMVHVIEATELKACKPNGKSNPYCEISMGSQSYTTRTIQDTLNPKWNFNCQFFIKDLYQDVLCLTLFDRDQFSPDDFLGRTEIPVAKIRTEQESKGPMTRRLLLHEVPTGEVWVRFDLQLFEQKTLL

SEQ ID NO: 29199 - protein, 1249 aa, Homo sapiens
MMAQFPTAMNGGPNMWAITSEERTKHDRQFDNLKPSGGYITGDQARNFFLQSGLPAPVLAEIWALSDLNKDGKMDQQEFSIAMKLIKLKLQGQQLPVVLPPIMKQPPMFSPLISARFGMGSMPNLSIPQPLPPAAPITSLSSATSGTNLPPLMMPTPLVPSVSTSSLPNGTASLIQPLPIPYSSSTLPHGSSYSLMMGGFGGASIQKAQSLIDLGSSSSTSSTASLSGNSPKTGTSEWAVPQPTRLKYRQKFNTLDKSMSGYLSGFQARNALLQSNLSQTQLATIWTLADVDGDGQLKAEEFILAMHLTDMAKAGQPLPLTLPPELVPPSFRGGKQIDSINGTLPSYQKMQEEEPQKKLPVTFEDKRKANYERGNMELEKRRQALMEQQQREAERKAQKEKEEWERKQRELQEQEWKKQLELEKRLEKQRELERQREEERRKDIERREAAKQELERQRRLEWERIRRQELLNQKNREQEEIVRLNSKKKNLHLELEALNGKHQQISGRLQDVRLKKQTQKTELEVLDKQCDLEIMEIKQLQQELQEYQNKLIYLVPEKQLLNERIKNMQFSNTPDSGVSLLHKKSLEKEELCQRLKEQLDALEKETASKLSEMDSFNNQLKCGNMDDSVLQCLLSLLSCLNNLFLLLKELRETYNTQQLALEQLYKIKRDKLKEIERKRLELMQKKKLEDEAARKAKQGKENLWKENLRKEEEEKQKRLQEEKTQEKIQEEERKAEEKQRKDKDTLKAEEKKRETASVLVNYRALYPFEARNHDEMSFNSGDIIQVDEKTVGEPGWLYGSFQGNFGWFPCNYVEKMPSSENEKAVSPKKALLPPTVSLSATSTSSEPLSSNQPASVTDYQNVSFSNLTVNTSWQKKSAFTRTVSPGSVSPIHGQGQVVENLKAQALCSWTAKKDNHLNFSKHDIITVLEQQENWWFGEVHGGRGWFPKSYVKIIPGSEVKREEPEALYAAVNKKPTSAAYSVGEEYIALYPYSSVEPGDLTFTEGEEILVTQKDGEWWTGSIGDRSGIFPSNYVKPKDQESFGSASKSGASNKKPEIAQVTSAYVASGSEQLSLAPGQLILILKKNTSGWWQGELQARGKKRQKGWFPASHVKLLGPSSERATPAFHPVCQVIAMYDYAANNEDELSFSKGQLINVMNKDDPDWWQGEINGVTGLFPSNYVKMTTDSDPSQQWCADLQTLDTMQPIERKRQGYIHELIQTEERYMADLQLVVEVRRLLLASSRGICCLS

SEQ ID NO: 29200 - protein, 1192 aa, Homo sapiens
MMAQFPTAMNGGPNMWAITSEERTKHDRQFDNLKPSGGYITGDQARNFFLQSGLPAPVLAEIWALSDLNKDGKMDQQEFSIAMKLIKLKLQGQQLPVVLPPIMKQPPMFSPLISARFGMGSMPNLSIPQPLPPAAPITSLSSATSGTNLPPLMMPTPLVPSVSTSSLPNGTASLIQPLPIPYSSSTLPHGSSYSLMMGGFGGASIQKAQSLIDLGSSSSTSSTASLSGNSPKTGTSEWAVPQPTRLKYRQKFNTLDKSMSGYLSGFQARNALLQSNLSQTQLATIWTLADVDGDGQLKAEEFILAMHLTDMAKAGQPLPLTLPPELVPPSFRGGKQIDSINGTLPSYQKMQEEEPQKKLPVTFEDKRKANYERGNMELEKRRQALMEQQQREAERKAQKEKEEWERKQRELQEQEWKKQLELEKRLEKQRELERQREEERRKDIERREAAKQELERQRRLEWERIRRQELLNQKNREQEEIVRLNSKKKNLHLELEALNGKHQQISGRLQDVRLKKQTQKTELEVLDKQCDLEIMEIKQLQQELQEYQNKLIYLVPEKQLLNERIKNMQFSNTPDSGVSLLHKKSLEKEELCQRLKEQLDALEKETASKLSEMDSFNNQLKCGNMDDSVLQCLLSLLSCLNNLFLLLKELRETYNTQQLALEQLYKIKRDKLKEIERKRLELMQKKKLEDEAARKAKQGKENLWKENLRKEEEEKQKRLQEEKTQEKIQEEERKAEEKQRKDKDTLKAEEKKRETASVLVNYRALYPFEARNHDEMSFNSGDIIQVDEKTVGEPGWLYGSFQGNFGWFPCNYVEKMPSSENEKAVSPKKALLPPTVSLSATSTSSEPLSSNQPASVTDYQNVSFSNLTVNTSWQKKSAFTRTVSPGSVSPIHGQGQVVENLKAQALCSWTAKKDNHLNFSKHDIITVLEQQENWWFGEVHGGRGWFPKSYVKIIPGSEVKREEPEALYAAVNKKPTSAAYSVGEEYIALYPYSSVEPGDLTFTEGEEILVTQKDGEWWTGSIGDRSGIFPSNYVKPKDQESFGSASKSGASNKKPEIAQVTSAYVASGSEQLSLAPGQLILILKKNTSGWWQGELQARGKKRQKGWFPASHVKLLGPSSERATPAFHPVCQVIAMYDYAANNEDELSFSKGQLINVMNKDDPDWWQGEINGVTGLFPSNYVKMTTDSDPSQQ

SEQ ID NO: 29201 - protein, 334 aa, Homo sapiens
MNEDLKVNLSGLPRDYLDAAAAENISAAVSSRVPAVEPEPELVVNPWDIVLCTSGTLISCENAIVVLIIFHNPSLRAPMFLLIGSLALADLLAGIGLITNFVFAYLLQSEATKLVTIGLIVASFSASVCSLLAITVDRYLSLYYALTYHSERTVTFTYVMLVMLWGTSICLGLLPVMGWNCLRDESTCSVVRPLTKNNAAILSVSFLFMFALMLQLYIQICKIVMRHAHQIALQHHFLATSHYVTTRKGVSTLAIILGTFAACWMPFTLYSLIADYTYPSIYTYATLLPATYNSIINPVIYAFRNQEIQKALCLICCGCIPSSLAQRARSPSDV

SEQ ID NO: 29202 - protein, 1063 aa, Homo sapiens
MSPGASRGPRGSQAPLIAPLCCAAAALGMLLWSPACQAFNLDVEKLTVYSGPKGSYFGYAVDFHIPDARTASVLVGAPKANTSQPDIVEGGAVYYCPWPAEGSAQCRQIPFDTTNNRKIRVNGTKEPIEFKSNQWFGATVKAHKGKVVACAPLYHWRTLKPTPEKDPVGTCYVAIQNFSAYAEFSPCRNSNADPEGQGYCQAGFSLDFYKNGDLIVGGPGSFYWQGQVITASVADIIANYSFKDILRKLAGEKQTEVAPASYDDSYLGYSVAAGEFTGDSQQELVAGIPRGAQNFGYVSIINSTDMTFIQNFTGEQMASYFGYTVVVSDVNSDGLDDVLVGAPLFMEREFESNPREVGQIYLYLQVSSLLFRDPQILTGTETFGRFGSAMAHLGDLNQDGYNDIAIGVPFAGKDQRGKVLIYNGNKDGLNTKPSQVLQGVWASHAVPSGFGFTLRGDSDIDKNDYPDLIVGAFGTGKVAVYRARPVVTVDAQLLLHPMIINLENKTCQVPDSMTSAACFSLRVCASVTGQSIANTIVLMAEVQLDSLKQKGAIKRTLFLDNHQAHRVFPLVIKRQKSHQCQDFIVYLRDETEFRDKLSPINISLNYSLDESTFKEGLEVKPILNYYRENIVSEQAHILVDCGEDNLCVPDLKLSARPDKHQVIIGDENHLMLIINARNEGEGAYEAELFVMIPEEADYVGIERNNKGFRPLSCEYKMENVTRMVVCDLGNPMVSGTNYSLGLRFAVPRLEKTNMSINFDLQIRSSNKDNPDSNFVSLQINITAVAQVEIRGVSHPPQIVLPIHNWEPEEEPHKEEEVGPLVEHIYELHNIGPSTISDTILEVGWPFSARDEFLLYIFHIQTLGPLQCQPNPNINPQDIKPAASPEDTPELSAFLRNSTIPHLVRKRDVHVVEFHRQSPAKILNCTNIECLQISCAVGRLEGGESAVLKVRSRLWAHTFLQRKNDPYALASLVSFEVKKMPYTDQPAKLPEGSIVIKTSVIWATPNVSFSIPLWVIILAILLGLLVLAILTLALWKCGFFDRARPPQEDMTDREQLTNDKTPEA

SEQ ID NO: 29203 - protein, 530 aa, Homo sapiens
MATPDVSVHMEEVVVVTTPDTAVDGSGVEGVKTVLVTTNLAPHGGDLTEDNMETENAAAAAAAAFTASSQLKEAVLVKMAEEGENLEAEIVYPITCGDSRANLIWRKFVCPGINVKCVQYDEHVISPKEFVHLAGKSTLKDWKRAIRMNGIMLRKIMDSGELDFYQHDKVCSNTCRSTKIDLSGARVSLSSPTSAEYIPLTPAAADVNGSPATITIETCEDPGDWTAAIGDDTFTFWRGLKDAGLLDEVIQEFHQELVETMRGLQQRVQDPPLQLRDAVLLNNIVQNFGMLDLVKKVLASHKCQMDRSREQYARDLAALEQQCDEHRRRAKELKHKSQHLSNVLMTLTPVSLPPPVKRPRLARATSGPAAMASQVLTQSAQLALGPGVPVPQLTSVPLGKVVSTLPSTVLGKGSLQAPPASSPASPLLGGYTVLASSGSTYPSTVEIHPDASSLTVLSTAAVQDGSTVFKVVSPLQLLTLPGLGPTLQNVAQASPGSSTIVTVPAGAAPGPEEHTATIEVAAMAEDHERK

SEQ ID NO: 29204 - protein, 1338 aa, Homo sapiens
MASPPRHGPPGPASGDGPNLNNNNNNNNHSVRKCGYLRKQKHGHKRFFVLRGPGAGGDEATAGGGSAPQPPRLEYYESEKKWRSKAGAPKRVIALDCCLNINKRADAKHKYLIALYTKDEYFAVAAENEQEQEGWYRALTDLVSEGRAAAGDAPPAAAPAASCSASLPGALGGSAGAAGAEDSYGLVAPATAAYREVWQVNLKPKGLGQSKNLTGVYRLCLSARTIGFVKLNCEQPSVTLQLMNIRRCGHSDSFFFIEVGRSAVTGPGELWMQADDSVVAQNIHETILEAMKALKELFEFRPRSKSQSSGSSATHPISVPGARRHHHLVNLPPSQTGLVRRSRTDSLAATPPAAKCSSCRVRTASEGDGGAAAGAAAAGARPVSVAGSPLSPGPVRAPLSRSHTLSGGCGGRGSKVALLPAGGALQHSRSMSMPVAHSPPAATSPGSLSSSSGHGSGSYPPPPGPHPPLPHPLHHGPGQRPSSGSASASGSPSDPGFMSLDEYGSSPGDLRAFCSHRSNTPESIAETPPARDGGGGGEFYGYMTMDRPLSHCGRSYRRVSGDAAQDLDRGLRKRTYSLTTPARQRPVPQPSSASLDEYTLMRATFSGSAGRLCPSCPASSPKVAYHPYPEDYGDIEIGSHRSSSSNLGADDGYMPMTPGAALAGSGSGSCRSDDYMPMSPASVSAPKQILQPRAAAAAAAAVPSAGPAGPAPTSAAGRTFPASGGGYKASSPAESSPEDSGYMRMWCGSKLSMEHADGKLLPNGDYLNVSPSDAVTTGTPPDFFSAALHPGGEPLRGVPGCCYSSLPRSYKAPYTCGGDSDQYVLMSSPVGRILEEERLEPQATPGPSQAASAFGAGPTQPPHPVVPSPVRPSGGRPEGFLGQRGRAVRPTRLSLEGLPSLPSMHEYPLPPEPKSPGEYINIDFGEPGARLSPPAPPLLASAASSSSLLSASSPASSLGSGTPGTSSDSRQRSPLSDYMNLDFSSPKSPKPGAPSGHPVGSLDGLLSPEASSPYPPLPPRPSASPSSSLQPPPPPPAPGELYRLPPASAVATAQGPGAASSLSSDTGDNGDYTEMAFGVAATPPQPIAAPPKPEAARVASPTSGVKRLSLMEQVSGVEAFLQASQPPDPHRGAKVIRADPQGGRRRHSSETFSSTTTVTPVSPSFAHNPKRHNSASVENVSLRKSSEGGVGVGPGGGDEPPTSPRQLQPAPPLAPQGRPWTPGQPGGLVGCPGSGGSPMRRETSAGFQNGLNYIAIDVREEPGLPPQPQPPPPPLPQPGDKSSWGRTRSLGGLISAVGVGSTGGGCGGPGPGALPPANTYASIDFLSHHLKEATIVKE

SEQ ID NO: 29205 - protein, 333 aa, Homo sapiens
MDLINSTDYLINASTLVRNSTQFLAPASKMIIALSLYISSIIGTITNGLYLWVLRFKMKQTVNTLLFFHLILSYFISTMILPFMATSQLQDNHWNFGTALCKVFNGTLSLGMFTSVFFLSAIGLDRYLLTLHPVWSQQHRTPRWASSIVLGVWISAAALSIPYLIFRETHHDRKGKVTCQNNYAVSTNWESKEMQASRQWIHVACFISRFLLGFLLPFFIIIFCYERVASKVKERSLFKSSKPFKVMMTAIISFFVCWMPYHIHQGLLLTTNQSLLLELTLILTVLTTSFNTIFSPTLYLFVGENFKKVFKKSILALFESTFSEDSSVERTQT

SEQ ID NO: 29206 - protein, 381 aa, Homo sapiens
MRSHTITMTTTSVSSWPYSSHRMRFITNHSDQPPQNFSATPNVTTCPMDEKLLSTVLTTSYSVIFIVGLVGNIIALYVFLGIHRKRNSIQIYLLNVAIADLLLIFCLPFRIMYHINQNKWTLGVILCKVVGTLFYMNMYISIILLGFISLDRYIKINRSIQQRKAITTKQSIYVCCIVWMLALGGFLTMIILTLKKGGHNSTMCFHYRDKHNAKGEAIFNFILVVMFWLIFLLIILSYIKIGKNLLRISKRRSKFPNSGKYATTARNSFIVLIIFTICFVPYHAFRFIYISSQLNVSSCYWKEIVHKTNEIMLVLSSFNSCLDPVMYFLMSSNIRKIMCQLLFRRFQGEPSRSESTSEFKPGYSLHDTSVAVKIQSSSKST

SEQ ID NO: 29207 - protein, 108 aa, Homo sapiens
MQYPFRKLLRPSTESCCVAQARVQWCHLGSLQPPLPGFKQFSCHSLPSSWDYRWNLTLSPRLECSGAISAHCNLCLPDLSDSPASTSRVAGTTGAHHHAQEPVVIRKM

SEQ ID NO: 29208 - protein, 597 aa, Homo sapiens
MPEEVHHGEEEVETFAFQAEIAQLISLIINTFYSNEEIFLQELISNASDALDKIRYESLTDPSKLDSGKELKIDIIPNPQERTLALVDTGIGMTKADLINNLRTIAKSGTKACMEALQAEKLVVITKHNDDEQYAWESSAGGSFTVHADHGEPIGRGTKVILHLKEDQTEYLEERRVKEVVKKHSQFIGYPITLYLEKEQDKEISDDEAEEEKGEKEEEDKDDEEKPKIKDVGSDEEDDSKEYGEFYKSLTSDWEDHLAVKHFSVEGQLEFRALLFSPRRAPFDLFENKKKKNNIKLYVRRVFIMDSCDELIPEYLNFIHGVVDSEDLPLNISREMLQQSKILKYVSHMKETQKSTYYITGESKEQVANSAFVERVRKQGFEVVYMTEPIDEYCVQQLKEFDGKSLVSVTKEGLELPEDEEEKKKMEESKEKFENLCKLMKEILDKKVEKVTISNRLVSSPCCIVTSTYGWTANMEQIMKAQALRDNSTMGYMMAKKHLEINPDHPIMETLRQKAEADKNDKAVKDLVVLLFETALLSSGFSLEDPQTHSNHIYHMIKLGLGTDEDEVAAEEPSDAVPDEIPPLEGDEDASRMEEVD

SEQ ID NO: 29209 - protein, 254 aa, Homo sapiens
MSDRYLEQRISIKFCVKLNKSASETHHLLKEAYGDEVMSRARVFDWHKRFKEGREDVRDDARSGRPVTHRTDDNIQKVKDLVCSNRQLTVRMMAEELNLDKETVRLILKENLNMRKISAKVISGVLKETEPHYVAQAGLELLVSRDPPTLASQSSGIISMSHHAKPKPGVQWCKFQSESTGRRARSADVQGQEKMDVTAQEARTNLPFYLFVLFRSSMNWMMSMHIREGCLFITRSTNSNANLFRKHPHRHTQK

SEQ ID NO: 29210 - protein, 210 aa, Homo sapiens
MSDRYLEQRISIKFCVKLNKSASETHHLLKEAYGDEVMSRARVFDWHKRFKEGREDVRDDARSGRPVTHRTDDNIQKVKDLVCSNRQLTVRMMAEELNLDKETVRLILKENLNMRKISAKVISGVLKGEPKPRKLDFRSDLSKETRKNSSCLRKKVTGSETWSYLQGEAGGEMPLPVSHPRVHYSASQLLQASSSTSLPPRVAENWFTPW

SEQ ID NO: 29211 - protein, 349 aa, Homo sapiens
MAKMELSKAFSGQRTLLSAILSMLSLSFSTTSLLSNYWFVGTQKVPKPLCEKGLAAKCFDMPVSLDGDTNTSTQEVVQYNWETGDDRFSFRSFRSGMWLSCEETVEEPALLHPQSWKQFRALRSSGTAAAKGERCRSFIELTPPAKREILWLSLGTQITYIGLQFISFLLLLTDLLLTGNPACGLKLSAFAAVSSVLSGLLGMVAHMMYSQVFQATVNLGPEDWRPHVWNYGWAFYMAWLSFTCCMASAVTTFNTYTRMVLEFKCKHSKSFKENPNCLPHHHQCFPRRLSSAAPTVGPLTSYHQYHNQPIHSVSEGVDFYSELRNKGFQRGASQELKEAVRSSVEEEQC

SEQ ID NO: 29212 - protein, 298 aa, Homo sapiens
MAKMELSKAFSGQRTLLSAILSMLSLSFSTTSLLSNYWFVGTQKVPKPLCEKGLAAKCFDMPVSLDGDTNTSTQEVVQYNWETGDDRFSFRSFRSGMWLSCEETVEEPALLHPQSWKQFRALRSSGTAAAKGERCRSFIELTPPAKRGLLGMVAHMMYSQVFQATVNLGPEDWRPHVWNYGWAFYMAWLSFTCCMASAVTTFNTYTRMVLEFKCKHSKSFKENPNCLPHHHQCFPRRLSSAAPTVGPLTSYHQYHNQPIHSVSEGVDFYSELRNKGFQRGASQELKEAVRSSVEEEQC

SEQ ID NO: 29213 - protein, 326 aa, Homo sapiens
MAKMELSKAFSGQRTLLSAILSMLSLSFSTTSLLSNYWFVGTQKVPKPLCEKGLAAKCFDMPVSLDGDTNTSTQEVVQYNWETGDDRFSFRSFRSGMWLSCEETVEEPGERCRSFIELTPPAKREILWLSLGTQITYIGLQFISFLLLLTDLLLTGNPACGLKLSAFAAVSSVLSGLLGMVAHMMYSQVFQATVNLGPEDWRPHVWNYGWAFYMAWLSFTCCMASAVTTFNTYTRMVLEFKCKHSKSFKENPNCLPHHHQCFPRRLSSAAPTVGPLTSYHQYHNQPIHSVSEGVDFYSELRNKGFQRGASQELKEAVRSSVEEEQC

SEQ ID NO: 29214 - protein, 285 aa, Homo sapiens
MAKMELSKAFSGQRTLLSAILSMLSLSFSTTSLLSNYWFVGTQKVPKPLCEKGLAAKCFDMPVSLDGDTNTSTQEVVQYNWETGDDRFSFRSFRSGMWLSCEETVEEPGERCRSFIELTPPAKRGEKGLLEFATLQGPCHPTLRFGGKRLMEKASLPSPPLGLCGKNPMVIPGNADHLHRTSIHQLPPATNRLATHWEPCLWAQTERLCCCFLCPVRSPGDGGPHDVFTSLPSDCQLGSRRLETTCLELWLGLLHGLALLHLLHGVGCHHLQHVHQDGAGVQVQA

SEQ ID NO: 29215 - protein, 275 aa, Homo sapiens
MAKMELSKAFSGQRTLLSAILSMLSLSFSTTSLLSNYWFVGTQKVPKPLCEKGLAAKCFDMPVSLDGDTNTSTQEVVQYNWETGDDRFSFRSFRSGMWLSCEETVEEPGERCRSFIELTPPAKRGLLGMVAHMMYSQVFQATVNLGPEDWRPHVWNYGWAFYMAWLSFTCCMASAVTTFNTYTRMVLEFKCKHSKSFKENPNCLPHHHQCFPRRLSSAAPTVGPLTSYHQYHNQPIHSVSEGVDFYSELRNKGFQRGASQELKEAVRSSVEEEQC

SEQ ID NO: 29216 - protein, 339 aa, Homo sapiens
MSDPSQLTQNVCLTQEMELSKAFSGQRTLLSAILSMLSLSFSTTSLLSNYWFVGTQKVPKPLCEKGLAAKCFDMPVSLDGDTNTSTQEVVQYNWETGDDRFSFRSFRSGMWLSCEETVEEPGERCRSFIELTPPAKREILWLSLGTQITYIGLQFISFLLLLTDLLLTGNPACGLKLSAFAAVSSVLSGLLGMVAHMMYSQVFQATVNLGPEDWRPHVWNYGWAFYMAWLSFTCCMASAVTTFNTYTRMVLEFKCKHSKSFKENPNCLPHHHQCFPRRLSSAAPTVGPLTSYHQYHNQPIHSVSEGVDFYSELRNKGFQRGASQELKEAVRSSVEEEQC

SEQ ID NO: 29217 - protein, 326 aa, Homo sapiens
MSDPSQLTQNVCLTQEMELSKAFSGQRTLLSAILSMLSLSFSTTSLLSNYWFVGTQKVPKPLCEKGLAAKCFDMPVSLDGDTNTSTQEVVQYNWETGDDRFSFRSFRSGMWLSCEETVEEPALLHPQSWKQFRALRSSGTAAAKGERCRSFIELTPPAKRGEKGLLEFATLQGPCHPTLRFGGKRLMEKASLPSPPLGLCGKNPMVIPGNADHLHRTSIHQLPPATNRLATHWEPCLWAQTERLCCCFLCPVRSPGDGGPHDVFTSLPSDCQLGSRRLETTCLELWLGLLHGLALLHLLHGVGCHHLQHVHQDGAGVQVQPPPWVL

SEQ ID NO: 29218 - protein, 343 aa, Homo sapiens
MAKMELSKAFSGQRTLLSAILSMLSLSFSTTSLLSNYWFVGTQKVPKPLCEKGLAAKCFDMPVSLDGDTNTSTQEVVQYNWETGDDRFSFRSFRSGMWLSCEETVEEPGERCRSFIELTPPAKRGEKGLLEFATLQGPCHPTLRFGGKRLMEKASLPSPPLGLCGKNPMVIPGNADHLHRTSTHQLPPATNRLATHWEPCLWAQTERLCCCFLCPVRSPGDGGPHDVFTSLPSDCQLGSRRLETTCLELWLGLLHGLALLHLLHGVGCHHLQHVHHQCFPRRLSSAAPTVGPLTSYHQYHNQPIHSVSEGVDFYSELRNKGFQRGASQELKEAVRSSVEEEQC

SEQ ID NO: 29219 - protein, 440 aa, Homo sapiens
MRRYLRVVVLCVACGFCSLLYAFSQLAVSLEEGTGGGGGKPQAAVASWLAGGGRGAVRGAGVAGPAAHPGVSDRCKDFSLCYWNPYWMLPSDVCGMNCFWEAAFRYSLKIQPVEKMHLAVVACGERLEETMTMLKSAIIFSIKPLQFHIFAEDQLHHSFKGRLDNWSFLQTFNYTLYPITFPSENAAEWKKLFKPCASQRLFLPLILKEVDSLLYVDTDILFLRPVDDIWSLLKKFNSTQIAAMAPEHEEPRIGWYNRFARHPYYGKTGVNSGVMLMNMTRMRRKYFKNDMTTVRLQWGDILMPLLKKYKLNITWGDQDLLNIVFFHNPESLFVFPCQWNYRPDHCIYGSNCQEAEEGGIFILHGNRGVYHDDKQPAFRAVYEALRNCSFEDDNIRSLLKPLELELQKTVHTYCGKIYKIFIKQLAKSVRDRYARSPKEK

SEQ ID NO: 29220 - protein, 409 aa, Homo sapiens
MRRYLRVVVLCVACGFCSLLYAFSQLAVSLEEGTGGGGGKPQAAVASWLAGGGRGAVRGAGVAGPAAHPGVSDRYSLKIQPVEKMHLAVVACGERLEETMTMLKSAIIFSIKPLQFHIFAEDQLHHSFKGRLDNWSFLQTFNYTLYPITFPSENAAEWKKLFKPCASQRLFLPLILKEVDSLLYVDTDILFLRPVDDIWSLLKKFNSTQIAAMAPEHEEPRIGWYNRFARHPYYGKTGVNSGVMLMNMTRMRRKYFKNDMTTVRLQWGDILMPLLKKYKLNITWGDQDLLNIVFFHNPESLFVFPCQWNYRPDHCIYGSNCQEAEEGGIFILHGNRGVYHDDKQPAFRAVYEALRNCSFEDDNIRSLLKPLELELQKTVHTYCGKIYKIFIKQLAKSVRDRYARSPKEK

SEQ ID NO: 29221 - protein, 1108 aa, Homo sapiens
MFLGLGRFSRLVLWFAAFRKLLGHHGLASAKFLWCLCLLSVMSLPQQVWTLPYKIGVVGPWACDSLFSKALPEVAARLAIERINRDPSFDLSYSFEYVILNEDCQTSRALSSFISHHQMASGFIGPTNPGYCEAASLLGNSWDKGIFSWACVNYELDNKISYPTFSRTLPSPIRVLVTVMKYFQWAHAGVISSDEDIWVHTANRVASALRSHGLPVGVVLTTGQDSQSMRKALQRIHQADRIRIIIMCMHSALIGGETQMHLLECAHDLKMTDGTYVFVPYDALLYSLPYKHTPYRVLRNNPKLREAYDAVLTITVESQEKTFYQAFTEAAARGEIPEKLEFDQVSPLFGTIYNSIYFIAQAMNNAMKENGQAGAASLVQHSRNMQFHGFNQLMRTDSNGNGISEYVILDTNLKEWELHSTYTVDMEMELLRFGGTPIHFPGGRPPRADAKCWFAEGKICHGGIDPAFAMMVCLTLLIALLSINGFAYFIRRRINKIQLIKGPNRILLTLEDVTFINPHFGSKRGSRASVSFQITSEVQSGRSPRLSFSSGSLTPATYENSNIAIYEGDWVWLKKFSLGDFGDLKSIKSRASDVFEMMKDLRHENINPLLGFFYDSGMFAIVTEFCSRGSLEDILTNQDVKLDWMFKSSLLLDLIKGMKYLHHREFVHGRLKSRNCVVDGRFVLKVTDYGFNDILEMLRLSEEESSMEELLWTAPELLRAPRGSRLGSFAGDVYSFAIIMQEVMVRGTPFCMMDLPAQEIINRLKKPPPVYRPVVPPEHAPPECLQLMKQCWAEAAEQRPTFDEIFNQFKTFNKGKKTNIIDSMLRMLEQYSSNLEDLIRERTEELEIEKQKTEKLLTQMLPPSVAESLKKGCTVEPEGFDLVTLYFSDIVGFTTISAMSEPIEVVDLLNDLYTLFDAIIGSHDVYKVETIGDAYMVASGLPKRNGSRHAAEIANMSLDILSSVGTFKMRHMPEVPVRIRIGLHSGPVVAGVVGLTMPRYCLFGDTVNTASRMESTGLPYRIHVSLSTVTILQNLSEGYEVELRGRTELKGKGTEETFWLIGKKGFMKPLPVPPPVDKDGQVGHGLQPVEIAAFQRRKAERQLVRNKP

SEQ ID NO: 29222 - protein, 288 aa, Homo sapiens
MGRLTEAAAAGSGSRAAGWAGSPPTLLPLSPTSPRCAATMASSDEDGTNGGASEAGEDREAPGERRRLGVLATAWLTFYDIAMTAGWLVLAIAMVRFYMEKGTHRGLYKSIQKTLKFFQTFALLEIVHCLIGIVPTSVIVTGVQVSSRIFMVWLITHSIKPIQNEESVVLFLVAWTVTEITRYSFYTFSLLDHLPYFIKWARYNFFIILYPVGVAGELLTIYAALPHVKKTGMFSIRLPNKYNVSFDYYYFLLITMASYIPLFPQLYFHMLRQRRKVLHGEVIVEKDD

SEQ ID NO: 29223 - protein, 140 aa, Homo sapiens
MGRLTEAAAAGSGSRAAGWAGSPPTLLPLSPTSPRCAATMASSDEDGTNGGASEAGEDREAPGERRRLGVLATAWLTFYDIAMTAGWLVLAIAMVRFYMEKGTHRGLYKSIQKTLKFFQTFALLEVSFPSCCFSIAVIFM

SEQ ID NO: 29224 - protein, 126 aa, Homo sapiens
MPDPAKSAPAPKKGSKKAVTKAQKKDGKKRKRSRKESYSIYVYKVLKQVHPDTGISSKAMGIMNSFVNDIFERIAGEASRLAHYNKRSTITSREIQTAVRLLLPGELAKHAVSEGTKAVTKYTSSK

SEQ ID NO: 29225 - protein, 126 aa, Homo sapiens
MPEPAKSAPAPKKGSKKAVTKAQKKDGKKRKRSRKESYSVYVYKVLKQVHPDTGISSKAMGIMNSFVNDIFERIAGEASRLAHYNKRSTITSREIQTAVRLLLPGELAKHAVSEGTKAVTKYTSAK

SEQ ID NO: 29226 - protein, 578 aa, Homo sapiens [sequence omitted]

SEQ ID NO: 29227 - protein, 551 aa, Homo sapiens
MPDSNFAERSEEQVSGAKVIAQALKTQDVEYIFGIVGIPVTEIAIAAQQLGIKYIGMRNEQAACYAASAIGYLTSRPLLVIGGSSERNQETMGAFQEFPQVEACRLYTKFSARPSSIEAIPFVIEKAVRSSIYGRPGACYVDIPADFVNLQVNVNSIKYMERCMSPPISMAETSAVCTAASVIRNAKQPLLIIGKGAAYAHAEESIKKLVEQYKLPFLPTPMGKGVVPDNHPYCVGAARSRALQFADVIVLFGARLNWILHFGLPPRYQPDVKFIQVDICAEELGNNVKPAVTLLGNIHAVTKQLLEELDKTPWQYPPESKWWKTLREKMKSNEAASKELASKKSLPMNYYTVFYHVQEQLPRDCFVVSEGANTMDIGRTVLQNYLPRHRLDAGTFGTMGVGLGFAIAAAVVAKDRSPGQWIICVEGDSAFGFSGMEVETICRYNLPIILLVVNNNGIYQGFDTDTWKEMLKFQDATAVVPPMCLLPNSHYEQVMTAFGGKGYFVQTPEELQKSLRQSLADTTKPSLINIMIEPQATRKAQDFHWLTRSNM

SEQ ID NO: 29228 - protein, 518 aa, Homo sapiens
MPDSNFAERSEEQVSGAKVIAQALKTQDVEYIFGIVGIPVTEIAIAAQQLGIKYIGMRNEQAACYAASAIGYLTSRPGVCLVVSGPGLIHALGGMANANMNCWPLLVIGGSSERNQETMGAFQEFPQAVRSSIYGRPGACYVDIPADFVNLQVNVNSIKYMERCMSPPISMAETSAVCTAASVIRNAKQPLLIIGKGAAYAHAEESIKKLVEQYKLPFLPTPMGKGVVPDNHPYCVGAARSRALQFADVIVLFGARLNWILHFGLPPRYQPDVKFIQVDICAEELGNNVKPAVTLLGNIHAVTKQELASKKSLPMNYYTVFYHVQEQLPRDCFVVSEGANTMDIGRTVLQNYLPRHRLDAGTFGTMGVGLGFAIAAAVVAKDRSPGQWIICVEGDSAFGFSGMEVETICRYNLPIILLVVNNNGIYQGFDTDTWKEMLKFQDATAVVPPMCLLPNSHYEQVMTAFGGKGYFVQTPEELQKSLRQSLADTTKPSLINIMIEPQATRKAQDFHWLTRSNM

SEQ ID NO: 29229 - protein, 496 aa, Homo sapiens
MPDSNFAERSEEQVSGAKVIAQALKTQDVEYIFGIVGIPVTEIAIAAQQLGIKYIGMRNEQAACYAASAIGYLTSRPGVCLVVSGPGLIHALGGMANANMNCWYMERCMSPPISMAETSAVCTAASVIRNAKQPLLIIGKGAAYAHAEESIKKLVEQYKLPFLPTPMGKGVVPDNHPYCVGAARSRALQFADVIVLFGARLNWILHFGLPPRYQPDVKFIQVDICAEELGNNVKPAVTLLGNIHAVTKQLLEELDKTPWQYPPESKWWKTLREKMKSNEAASKELASKKSLPMNYYTVFYHVQEQLPRDCFVVSEGANTMDIGRTVLQNYLPRHRLDAGTFGTMGVGLGFAIAAAVVAKDRSPGQWIICVEGDSAFGFSGMEVETICRYNLPIILLVVNNNGIYQGFDTDTWKEMLKFQDATAVVPPMCLLPNSHYEQVMTAFGGKGYFVQTPEELQKSLRQSLADTTKPSLINIMIEPQATRKAQDFHWLTRSNM

SEQ ID NO: 29230 - protein, 164 aa, Homo sapiens
MPEPAKFAPAPKKGSKKAVTKAQKKDGKKRKRSRKESYSIYVYKVLKRVHPDTGIWCKAMGIMNSFLNDIFERIAGEASRLAHYNKRSTITSRRSRRPCACCCPASWPSTPCPRAPRRSPSTPAPSESLPGPGARSLPPSLPPRVAGCFVSKGSFQGHLTPLVK

SEQ ID NO: 29231 - protein, 522 aa, Homo sapiens
MALLPRALSAGAGPSWRRAARAFRGFLLLLPEPAALTRALSRAMACRQEPQPQGPPPAAGAVASYDYLVIGGGSGGLASARRAAELGARAAVVESHKLGGTCVNVGCVPKKVMWNTAVHSEFMHDHADYGFPSCEGKFNWRVIKEKRDAYVSRLNAIYQNNLTKSHIEIIRGHAAFTSDPKPTIEVSGKKYTAPHILIATGGMPSTPHESQIPGASLGITSDGFFQLEELPGRSVIVGAGYIAVEMAGILSALGSKTSLMIRHDKVLRSFDSMISTNCTEELENAGVEVLKFSQVKEVKKTLSGLEVSMVTAVPGRLPVMTMIPDVDCLLWAIGRVPNTKDLSLNKLGIQTDDKGHIIVDEFQNTNVKGIYAVGDVCGKALLTPVAIAAGRKLAHRLFEYKEDSKLDYNNIPTVVFSHPPIGTVGLTEDEAIHKYGIENVKTYSTSFTPMYHAVTKRKTKCVMKMVCANKEEKVVGIHMQGLGCDEMLQGFAVAVKMGATKADFDNTVAIHPTSSEELVTLR

SEQ ID NO: 29232 - protein, 479 aa, Homo sapiens
MACRQEPQPQGPPPAAGAVASYDYLVIGGGSGGLASARRAAELGARAAVVESHKLGGTCVNVGCVPKKVMWNTAVHSEFMHDHADYGFPSCEGKFNWRVIKEKRDAYVSRLNAIYQNNLTKSHIEIIRGHAAFTSDPKPTIEVSGKKYTAPHILIATGGMPSTPHESQIPGASLGITSDGFFQLEELPGRSVIVGAGYIAVEMAGILSALGSKTSLMIRHDKVLRSFDSMISTNCTEELENAGVEVLKFSQVKEVKKTLSGLEVSMVTAVPGRLPVMTMIPDVDCLLWAIGRVPNTKDLSLNKLGIQTDDKGHIIVDEFQNTNVKGIYAVGDVCGKALLTPVAIAAGRKLAHRLFEYKEDSKLDYNNIPTVVFSHPPIGTVGLTEDEAIHKYGIENVKTYSTSFTPMYHAVTKRKTKCVMKMVCANKEEKVVGIHMQGLGCDEMLQGFAVAVKMGATKADFDNTVAIHPTSSEELVTLR

SEQ ID NO: 29233 - protein, 493 aa, Homo sapiens
MALLPRALSAGAGPSWRRAARAFRGFLLLLPEPAALTRALSRAMACRQEPQPQGPPPAAGAVASYDYLVIGGGSGGLASARRAAELGARAAVVESHKLGGTCVNVGCVPKKVMWNTAVHSEFMHDHADYGFPSCEGKFNWRVIKEKRDAYVSRLNAIYQNNLTKSHIEIIRGHAAFTSDPKPTIEVSGKKYTAPHILIATGGMPSTPHESQIPGASLGITSDGFFQLEELPGRSVIVGAGYIAVEMAGILSALGSKTSLMIRHDKVKEVKKTLSGLEVSMVTAVPGRLPVMTMIPDVDCLLWAIGRVPNTKDLSLNKLGIQTDDKGHIIVDEFQNTNVKGIYAVGDVCGKALLTPVAIAAGRKLAHRLFEYKEDSKLDYNNIPTVVFSHPPIGTVGLTEDEAIHKYGIENVKTYSTSFTPMYHAVTKRKTKCVMKMVCANKEEKVVGIHMQGLGCDEMLQGFAVAVKMGATKADFDNTVAIHPTSSEELVTLR

SEQ ID NO: 29234 - protein, 469 aa, Homo sapiens
MALLPRALSAGAGPSWRRAARAFRGFLLLLPEPAALTRALSRAMACRQEPQPQGPPPAAGAVASYDYLVIGGGSGGLASARRAAELGARAAVVESHKLGGTCVNVGCVPKKVMWNTAVHSEFMHDHADYGFPSCEGKFNWRVIKEKRDAYVSRLNAIYQNNLTKSHIEIIRGHAAFTSDPKPTIEVSGKKYTAPHILIATGGMPSTPHESQIPGASLGITSDGFFQLEELPGRSVIVGAGYIAVEMAGILSALGSKTSLMIRHDKVLRSFDSMISTNCTEELENAGVEVLKFSQGIQTDDKGHIIVDEFQNTNVKGIYAVGDVCGKALLTPVAIAAGRKLAHRLFEYKEDSKLDYNNIPTVVFSHPPIGTVGLTEDEAIHKYGIENVKTYSTSFTPMYHAVTKRKTKCVMKMVCANKEEKVVGIHMQGLGCDEMLQGFAVAVKMGATKADFDNTVAIHPTSSEELVTLR

SEQ ID NO: 29235 - protein, 440 aa, Homo sapiens
MALLPRALSAGAGPSWRRAARAFRGFLLLLPEPAALTRALSRAMACRQEPQPQGPPPAAGAVASYDYLVIGGGSGGLASARRAAELGARAAVVESHKLGGTCVNVGCVPKKVMWNTAVHSEFMHDHADYGFPSCEGKFNWRVIKEKRDAYVSRLNAIYQNNLTKSHIEIIRGHAAFTSDPKPTIEVSGKKYTAPHILIATGGMPSTPHESQIPGASLGITSDGFFQLEELPGRSVIVGAGYIAVEMAGILSALGSKTSLMIRHDKGIQTDDKGHIIVDEFQNTNVKGIYAVGDVCGKALLTPVAIAAGRKLAHRLFEYKEDSKLDYNNIPTVVFSHPPIGTVGLTEDEAIHKYGIENVKTYSTSFTPMYHAVTKRKTKCVMKMVCANKEEKVVGIHMQGLGCDEMLQGFAVAVKMGATKADFDNTVAIHPTSSEELVTLR

SEQ ID NO: 29236 - protein, 215 aa, Homo sapiens
MNLVGSYAHHHHHHHPHPAHPMLHEPFLFGPASRCHQERPYFQSWLLSPADAAPDFPAGGPPPAAAAAATAYGPDARPGQSPGRLEALGGRLGRRKGSGPKKERRRTESINSAFAELRECIPNVPADTKLSKIKTLRLATSYIAYLMDVLAKDAQSGDPEAFKAELKKADGGRESKRKRELQQHEGFPPALGPVEKRIKGRTGWPQQVWALELNQ

SEQ ID NO: 29237 - protein, 147 aa, Homo sapiens
MARTKQTARKATAWQAPRKPLATKAARKRASPTGGIKKPHRYKPGTLALREIRKYQKSTQLLLRKLPFQRLVREIAQAISPDLRFQSAAIGALQEASEAYLVQLFEDTNLCAIHARRVTIMPRDMQLARRLRGEGAGEPTLLGNLAL

SEQ ID NO: 29238 - protein, 634 aa, Homo sapiens
MAHYNFKKITVVPSAKDFIDLTLSKTQRKTPTVIHKHYQIHRIRHFYMRKVKFTQQNYHDRLSQILTDFPKLDDIHPFYADLMNILYDKDHYKLALGQINIAKNLVDNVAKDYVRLMKYGDSLYRCKQLKRAALGRMCTVIKRQKQSLEYLEQVRQHLSRLPTIDPNTRTLLLCGYPNVGKSSFINKVTRADVDVQPYAFTTKSLFVGHMDYKYLRWQVVDTPGILDHPLEDRNTIEMQAITALAHLRAAVLYVMDLSEQCGHGLREQLELFQNIRPLFINKPLIVVANKCDVKRIAELSEDDQKIFTDLQSEGFPVIETSTLTEEGVIKVKTEACDRLLAHRVETKMKGNKVNEVLNRLHLAIPTRRDDKERPPFIPEGVVARRKRMETEESRKKRERDLELEMGDDYILDLQKYWDLMNLSEKHDKIPEIWEGHNIADYIDPAIMKKLEELEKEEELRTAAGEYDSVSESEDEEMLEIRQLAKQIREKKKLKILESKEKNTQGPRMPRTAKKVQRTVLEKEMRSLGVDMDDKDDAHYAVQARRSRSITRKRKREDSAPPSSVARSGSCSRTPRDVSGLRDVKMVKKAKTMMKNAQKKMNRLGKKGEADRHVFDMKPKHLLSGKRKAGKKDRR

SEQ ID NO: 29239 - protein, 587 aa, Homo sapiens
MRKVKFTQQNYHDRLSQILTDFPKLDDIHPFYADLMNILYDKDHYKLALGQINIAKNLVDNVAKDYVRLMKYGDSLYRCKQLKRAALGRMCTVIKRQKQSLEYLEQVRQHLSRLPTIDPNTRTLLLCGYPNVGKSSFINKVTRADVDVQPYAFTTKSLFVGHMDYKYLRWQVVDTPGILDHPLEDRNTIEMQAITALAHLRAAVLYVMDLSEQCGHGLREQLELFQNIRPLFINKPLIVVANKCDVKRIAELSEDDQKIFTDLQSEGFPVIETSTLTEEGVIKVKTEACDRLLAHRVETKMKGNKVNEVLNRLHLAIPTRRDDKERPPFIPEGVVARRKRMETEESRKKRERDLELEMGDDYILDLQKYWDLMNLSEKHDKIPEIWEGHNIADYIDPAIMKKLEELEKEEELRTAAGEYDSVSESEDEEMLEIRQLAKQIREKKKLKILESKEKNTQGPRMPRTAKKVQRTVLEKEMRSLGVDMDDKDDAHYAVQARRSRSITRKRKREDSAPPSSVARSGSCSRTPRDVSGLRDVKMVKKAKTMMKNAQKKMNRLGKKGEADRHVFDMKPKHLLSGKRKAGKKDRR

SEQ ID NO: 29240 - protein, 518 aa, Homo sapiens
MKYGDSLYRCKQLKRAALGRMCTVIKRQKQSLEYLEQVRQHLSRLPTIDPNTRTLLLCGYPNVGKSSFINKVTRADVDVQPYAFTTKSLFVGHMDYKYLRWQVVDTPGILDHPLEDRNTIEMQAITALAHLRAAVLYVMDLSEQCGHGLREQLELFQNIRPLFINKPLIVVANKCDVKRIAELSEDDQKIFTDLQSEGFPVIETSTLTEEGVIKVKTEACDRLLAHRVETKMKGNKVNEVLNRLHLAIPTRRDDKERPPFIPEGVVARRKRMETEESRKKRERDLELEMGDDYILDLQKYWDLMNLSEKHDKIPEIWEGHNIADYIDPAIMKKLEELEKEEELRTAAGEYDSVSESEDEEMLEIRQLAKQIREKKKLKILESKEKNTQGPRMPRTAKKVQRTVLEKEMRSLGVDMDDKDDAHYAVQARRSRSITRKRKREDSAPPSSVARSGSCSRTPRDVSGLRDVKMVKKAKTMMKNAQKKMNRLGKKGEADRHVFDMKPKHLLSGKRKAGKKDRR

SEQ ID NO: 29241 - protein, 301 aa, Homo sapiens
MFSHLPFDCVLLLLLLLLTRSSEVEYRAEVGQNAYLPCFYTPAAPGNLVPVCWGKGACPVFECGNVVLRTDERDVNYWTSRYWLNGDFRKGDVSLTIENVTLADSGIYCCRIQIPGIMNDEKFNLKLVIKPAKVTPAPTRQRDFTAAFPRMLTTRGHGPAETQTLGSLPDINLTQISTLANELRDSRLANDLRDSGATIRIGIYIGAGICAGLALALIFGALIFKWYSHSKEKIQNLSLISLANLPPSGLANAVAEGIRSEENIYTIEENVYEVEEPNEYYCYVSSRQQPSQPLGCRFAMP

SEQ ID NO: 29242 - protein, 142 aa, Homo sapiens
MFSHLPFDCVLLLLLLLLTRSSEVEYRAEVGQNAYLPCFYTPAAPGNLVPVCWGKGACPVFECGNVVLRTDERDVNYWTSRYWLNGDFRKGDVSLTIENVTLADSGIYCCRIQIPGIMNDEKFNLKLVIKPGEWTFACHLYE

SEQ ID NO: 29243 - protein, 445 aa, Homo sapiens
MTMFENVTRALARQLNPRGDLTPLDSLIDFKRFHPFCLVLRKRKSTLFWGARYVRTDYTLLDVLEPGSSPSDPTDTGNFGFKNMLDTRVEGDVDVPKTVKVKGTAGLSQNSTLEVQTLSVAPKALETVQERKLAADHPFLKEMQDQGENLYVVMEVVETVQEVTLERAGKAEACFSLPFFAPLGLQGSINHKEAVTIPKGCVLAFRVRQLMVKGKDEWDIPHICNDNMQTFPPGEKSGEEKVILIQASDVGDVHEGFRTLKEEVQRETQQVEKLSRVGQSSLLSSLSKLLGKKKELQDLELALEGALDKGHEVTLEALPKDVLLSKEAVGAILYFVGALTELSEAQQKLLVKSMEKKILPVQLKLVESTMEQNFLLDKEGVFPLQPELLSSLGDEELTLTEALVGLSGLEVQRSGPQYMWDPDTLPRLCALYAGLSLLQQLTKAS

SEQ ID NO: 29244 - protein, 279 aa, Homo sapiens
MSLFDLFRGFFGFPGPRSHRDPFFGGMTRDEDDDEEEEEEGGSWGRGNPRFHSPQHPPEEFGFGFSFSPGGGIRFHDNFGFDDLVRDFNSIFSDMGAWTLPSHPPELPGPESETPGERLREGQTLRDSMLKYPDSHQPRIFGGVLESDARSESPQPAPDWGSQRPFHRFDDVWPMDPHPRTREDNDLDSQVSQEGLGPVLQPQPKSYFKSISVTKITKPDGIVEERRTVVDSEGRTETTVTRHEADSSPRGDPESPRPPALDDAFSILDLFLGRWFRSR

SEQ ID NO: 29245 - protein, 287 aa, Homo sapiens
MSLFDLFRGFFGFPGPRSHRDPFFGGMTRDEDDDEEEEEEGGSWGRGNPRFHSPQHPPEEFGFGFSFSPGGGIRFHDNFGFDDLVRDFNSIFSDMGAWTLPSHPPANTCHLSAELPGPESETPGERLREGQTLRDSMLKYPDSHQPRIFGGVLESDARSESPQPAPDWGSQRPFHRFDDVWPMDPHPRTREDNDLDSQVSQEGLGPVLQPQPKSYFKSISVTKITKPDGIVEERRTVVDSEGRTETTVTRHEADSSPRGDPESPRPPALDDAFSILDLFLGRWFRSR

SEQ ID NO: 29246 - protein, 253 aa, Homo sapiens
MTRDEDDDEEEEEEGGSWGRGNPRFHSPQHPPEEFGFGFSFSPGGGIRFHDNFGFDDLVRDFNSIFSDMGAWTLPSHPPELPGPESETPGERLREGQTLRDSMLKYPDSHQPRIFGGVLESDARSESPQPAPDWGSQRPFHRFDDVWPMDPHPRTREDNDLDSQVSQEGLGPVLQPQPKSYFKSISVTKITKPDGIVEERRTVVDSEGRTETTVTRHEADSSPRGDPESPRPPALDDAFSILDLFLGRWFRSR

SEQ ID NO: 29247 - protein, 124 aa, Homo sapiens
MSLFDLFRGFFGFPGPRSHRDPFFGGMTRDEDDDEEEEEEGGSWGRGNPRFHSPQHPPEEFGFGFSFSPGGGIRFHDNFGFDDLVRDFNSIFSDMGAWTLPSHPPGVWLSLRGNLWFLVGWWVK

SEQ ID NO: 29248 - protein, 231 aa, Homo sapiens
MSLFDLFRGFFGFPGPRSFSPGGGIRFHDNFGFDDLVRDFNSIFSDMGAWTLPSHPPELPGPESETPGERLREGQTLRDSMLKYPDSHQPRIFGGVLESDARSESPQPAPDWGSQRPFHRFDDVWPMDPHPRTREDNDLDSQVSQEGLGPVLQPQPKSYFKSISVTKITKPDGIVEERRTVVDSEGRTETTVTRHEADSSPRGDPESPRPPALDDAFSILDLFLGRWFRSR

SEQ ID NO: 29249 - protein, 191 aa, Homo sapiens
MSLFDLFRGFFGFPGPRSHRDPFFGGMTRDEDDDEEEEEEGGSWGRGNPRFHSPQHPPEEFGFGFSFSPGGGIRFHDNFGFDDLNFQVLSQRHLVRDYGRDRHFGTQCLSIQIVTSPGSLGGSWRVMQEVNPPNQHQTGAPRGHFIGLMMYGLWTPILEPERTMILIPRFPRRVLARFYSPSPNPISRASL

SEQ ID NO: 29250 - protein, 136 aa, Homo sapiens [sequence omitted]

SEQ ID NO: 29251 - protein, 352 aa, Homo sapiens
MAPKLITVLCLGFCLNQKICPHAGAQDKFSLSAWPSPVVPLGGRVTLSCHSHLRFVIWTIFQTTGTRSHELHTGLSNNITISPVTPEHAGTYRCVGIYKHASKWSAESNSLKIIVTGLFTKPSISAHPSSLVHAGARVSLRCHSELAFDEFILYKEGHIQHSQQLDQGMEAGIHYVEAVFSMGPVTPAHAGAYRCCGCFSHSRYEWSAPSDPLDIVITGKYKKPSLSTQVDPMMRLGEKLTLFCSSEISFDQYHLFRHGVAHGQWLSGGQRHREAFQANFSVGRATPVPGGTYRCYGSFNDSPYKPPVTRCNFTPQETLRVLLCHSQNPPLNLTHLALKDSPATCICSLDSQ

SEQ ID NO: 29252 - protein, 191 aa, Homo sapiens
MGKTNSKLAPEVLEDLVQNTEFSEQELKQWYKGFLKDCPSGILNLEEFQQLYIKFFPYGDASKFAQHAFRTFDKNGDGTIDFREFICALSVTSRGSFEQKLNWAFEMYDLDGDGRITRLEMLEIIEAIYKMVGTVIMMRMNQDGLTPQQRVDKIFKKMDQDKDDQITLEEFKEAAKSDPSIVLLLQCDMQK

SEQ ID NO: 29253 - protein, 641 aa, Homo sapiens
MATAKGIAIGIDLGTTYSCVGVFQHGKVEIIANDQGNRTTPSYVAFTDTERLIGDAAKNQVAMNPQNTVFDAKRLIGRKFNDPVVQADMKLWPFQVINEGGKPKVLVSYKGENKAFYPEEISSMVLTKLKETAEAFLGHPVTNAVITVPAYFNDSQRQATKDAGVIAGLNVLRIINEPTAAAIAYGLDKGGQGERHVLIFDLGGGTFDVSILTIDDGIFEVKATAGDTHLGGEDFDNRLVSHFVEEFKRKHKKDISQNKRAVRRLRTACERAKRTLSSSTQANLEIDSLYEGIDFYTSITRARFEELCADLFRGTLEPVEKALRDAKMDKAKIHDIVLVGGSTRIPKVQRLLQDYFNGRDLNKSINPDEAVAYGAAVQAAILMGDKSEKVQDLLLLDVAPLSLGLETAGGVMTALIKRNSTIPTKQTQIFTTYSDNQPGVLIQVYEGERAMTKDNNLLGRFDLTGIPPAPRGVPQIEVTFDIDANGILNVTATDKSTGKVNKITITNDKGRLSKEEIERMVLDAEKYKAEDEVQREKIAAKNALESYAFNMKSVVSDEGLKGKISESDKNKILDKCNELLSWLEVNQLAEKDEFDHKRKELEQMCNPIITKLYQGGCTGPACGTGYVPGRPATGPTIEEVD

SEQ ID NO: 29254 - protein, 646 aa, Homo sapiens
MSKGPAVGIDLGTTYSCVGVFQHGKVEIIANDQGNRTTPSYVAFTDTERLIGDAAKNQVAMNPTNTVFDAKRLIGRRFDDAVVQSDMKHWPFMVVNDAGRPKVQVEYKGETKSFYPEEVSSMVLTKMKEIAEAYLGKTVTNAVVTVPAYFNDSQRQATKDAGTIAGLNVLRIINEPTAAAIAYGLDKKVGAERNVLIFDLGGGTFDVSILTIEDGIFEVKSTAGDTHLGGEDFDNRMVNHFIAEFKRKHKKDISENKRAVRRLRTACERAKRTLSSSTQASIEIDSLYEGIDFYTSITRARFEELNADLFRGTLDPVEKALRDAKLDKSQIHDIVLVGGSTRIPKIQKLLQDFFNGKELNKSINPDEAVAYGAAVQAAILSGDKSENVQDLLLLDVTPLSLGIETAGGVMTVLIKRNTTIPTKQTQTFTTYSDNQPGVLIQVYEGERAMTKDNNLLGKFELTGIPPAPRGVPQIEVTFDIDANGILNVSAVDKSTGKENKITITNDKGRLSKEDIERMVQEAEKYKAEDEKQRDKVSSKNSLESYAFNMKATVEDEKLQGKINDEDKQKILDKCNEIINWLDKNQTAEKEEFEHQQKELEKVCNPIITKLYQSAGGMPGGMPGGFPGGGAPPSGGASSGPTIEEVD

SEQ ID NO: 29255 - protein, 493 aa, Homo sapiens
MSKGPAVGIDLGTTYSCVGVFQHGKVEIIANDQGNRTTPSYVAFTDTERLIGDAAKNQVAMNPTNTVFDAKRLIGRRFDDAVVQSDMKHWPFMVVNDAGRPKVQVEYKGETKSFYPEEVSSMVLTKMKEIAEAYLGKTVTNAVVTVPAYFNDSQRQATKDAGTIAGLNVLRIINEPTAAAIAYGLDKKVGAERNVLIFDLGGGTFDVSILTIEDGIFEVKSTAGDTHLGGEDFDNRMVNHFIAEFKRKHKKDISENKRAVRRLRTACERAKRTLSSSTQASIEIDSLYEGIDFYTSITRARFEELNADLFRGTLDPVEKALRDAKLDKSQIHDIVLVGGSTRIPKIQKLLQDFFNGKELNKSINPDEAVAYGAAVQAAILSGDKSENVQDLLLLDVTPLSLGIETAGGVMTVLIKRNTTIPTKQTQTFTTYSDNQPGVLIQVYEGERAMTKDNNLLGKFELTGMPGGMPGGFPGGGAPPSGGASSGPTIEEVD

SEQ ID NO: 29256 - protein, 340 aa, Homo sapiens
MPGWLTLPTLCRFLLWAFTIFHKAQGDPASHPGPHYLLPPIHEVIHSHRGATATLPCVLGTTPPSYKVRWSKVEPGELRETLILITNGLHARGYGPLGGRARMRRGHRLDASLVIAGVRLEDEGRYRCELINGIEDESVALTLSLEGVVFPYQPSRGRYQFNYYEAKQACEEQDGRLATYSQLYQAWTEGLDWCNAGWLLEGSVRYPVLTARAPCGGRGRPGIRSYGPRDRMRDRYDAFCFTSALAGQVFFVPGRLTLSEAHAACRRRGAVVAKVGHLYAAWKFSGLDQCDGGWLADGSVRFPITTPRPRCGGLPDPGVRSFGFPRPQQAAYGTYCYAEN

SEQ ID NO: 29257 - protein, 293 aa, Homo sapiens
MASNVTNKMDPHSMNSRVFIGNLNTLVVKKSDVEAIFSKYGKIAGCSVHKGFAFVQYDKEKNARAAVAGEDGRMIASQVVDINLAAEPKVNRGNAGVKRSAAEMYGSSFDLDYGFQRDYYDGMYSFPARVPPPPPIALAVVPSKRQRLSGNTSRRGKSGFNSKSGKRGSSKSGKLKGDDLQAIKQELTQIKQKVDSLLENLEKIEKEQSKQEVEVKNAKSEEEQSSSSMKKDETHVKMESEGGAEDSAEEGDPLDDDVNEDQGDDQLELIKDDEKEAEEGEDDRDSTNGQDDS

SEQ ID NO: 29258 - protein, 346 aa, Homo sapiens
MDWVMKHNGPNDASDGTVRLRGLPFGCSKEEIVQFFQGLEIVPNGITLTMDYQGRSTGEAFVQFASKEIAENALGKHKERIGHRYIEIFRSSRSEIKGFYDPPRRLLGQRPGPYDRPIGGRGGYYGAGRGSMYDRMRRGGDGYDGGYGGFDDYGGYNNYGYGNDGFDDRMRDGRGMGGHGYGGAGDASSGFHGGHFVHMRGLPFRATENDIANFFSPLNPIRVHIDIGADGRATGEADVEFVTHEDAVAAMSKDKNNMQHRYIELFLNSTPGGGSGMGGSGMGGYGRDGMDNQGGYGSVGRMGMGNNYSGGYGTPDGLGGYGRGGGGSGGYYGQGGMSGGGWRGMY

SEQ ID NO: 29259 - protein, 331 aa, Homo sapiens
MDWVMKHNGPNDASDGTVRLRGLPFGCSKEEIVQFFQGLEIVPNGITLTMDYQGRSTGEAFVQFASKEIAENALGKHKERIGHRYIEIFRSSRSEIKGFYDPPRRLLGQRPGPYDRPIGGRGGYYGAGRGSYGGFDDYGGYNNYGYGNDGFDDRMRDGRGMGGHGYGGAGDASSGFHGGHFVHMRGLPFRATENDIANFFSPLNPIRVHIDIGADGRATGEADVEFVTHEDAVAAMSKDKNNMQHRYIELFLNSTPGGGSGMGGSGMGGYGRDGMDNQGGYGSVGRMGMGNNYSGGYGTPDGLGGYGRGGGGSGGYYGQGGMSGGGWRGMY

SEQ ID NO: 29260 - protein, 297 aa, Homo sapiens
MDYQGRSTGEAFVQFASKEIAENALGKHKERIGHRYIEIFRSSRSEIKGFYDPPRRLLGQRPGPYDRPIGGRGGYYGAGRGSMYDRMRRGGDGYDGGYGGFDDYGGYNNYGYGNDGFDDRMRDGRGMGGHGYGGAGDASSGFHGGHFVHMRGLPFRATENDIANFFSPLNPIRVHIDIGADGRATGEADVEFVTHEDAVAAMSKDKNNMQHRYIELFLNSTPGGGSGMGGSGMGGYGRDGMDNQGGYGSVGRMGMGNNYSGGYGTPDGLGGYGRGGGGSGGYYGQGGMSGGGWRGMY

SEQ ID NO: 29261 - protein, 215 aa, Homo sapiens
MYDRMRRGGDGYDGGYGGFDDYGGYNNYGYGNDGFDDRMRDGRGMGGHGYGGAGDASSGFHGGHFVHMRGLPFRATENDIANFFSPLNPIRVHIDIGADGRATGEADVEFVTHEDAVAAMSKDKNNMQHRYIELFLNSTPGGGSGMGGSGMGGYGRDGMDNQGGYGSVGRMGMGNNYSGGYGTPDGLGGYGRGGGGSGGYYGQGGMSGGGWRGMY

SEQ ID NO: 29262 - protein, 145 aa, Homo sapiens
MYDRMRRGGDGYDGGYGGFDDYGGYNNYGYGNDGFDDRMRDGRGMGGHGYGGAGDASSGFHGGHFVHMRGLPFRATENDIANFFSPLNPIRVHIDIGADGRATGEADVEFVTHEDAVAAMSKDKNNMRKWCLWHTILFPKREFIK

SEQ ID NO: 29263 - protein, 139 aa, Homo sapiens
MCFSLNYTGYGGFDDYGGYNNYGYGNDGFDDRMRDGRGMGGHGYGGAGDASSGFHGGHFVHMRGLPFRATENDIANFFSPLNPIRVHIDIGADGRATGEADVEFVTHEDAVAAMSKDKNNMRKWCLWHTILFPKREFIK

SEQ ID NO: 29264 - protein, 95 aa, Homo sapiens
MLFYSFFKSLVGKDVVVELKNDLSICGTLHSVDQYLNIKLTDISVTDPEKYPHMLSVKNCFIRGSVVRYVQLPADEVDTQLLQDAARKEALQQKQ

SEQ ID NO: 29265 - protein, 856 aa, Homo sapiens
MDVRRLKVNELREELQRRGLDTRGLKAELAERLQAALEAEEPDDERELDADDEPGRPGHINEEVETEGGSELEGTAQPPPPGLQPHAEPGGYSGPDGHYAMDNITRQNQFYDTQVIKQENESGYERRPLEMEQQQAYRPEMKTEMKQGAPTSFLPPEASQLKPDRQQFQSRKRPYEENRGRGYFEHREDRRGRSPQPPAEEDEDDFDDTLVAIDTYNCDLHFKVARDRSSGYPLTIEGFAYLWSGARASYGVRRGRVCFEMKINEEISVKHLPSTEPDPHVVRIGWSLDSCSTQLGEEPFSYGYGGTGKKSTNSRFENYGDKFAENDVIGCFADFECGNDVELSFTKNGKWMGIAFRIQKEALGGQALYPHVLVKNCAVEFNFGQRAEPYCSVLPGFTFIQHLPLSERIRGTVGPKSKAECEILMMVGLPAAGKTTWAIKHAASNPSKKYNILGTNAIMDKMRVMGLRRQRNYAGRWDVLIQQATQCLNRLIQIAARKKRNYILDQTNVYGSAQRRKMRPFEGFQRKAIVICPTDEDLKDRTIKRTDEEGKDVPDHAVLEMKANFTLPDVGDFLDEVLFIELQREEADKLVRQYNEEGRKAGPPPEKRFDNRGGGGFRGRGGGGGFQRYENRGPPGGNRGGFQNRGGGSGGGGNYRGGFNRSGGGGYSQNRWGNNNRDNNNSNNRGSYNRAPQQQPPPQQPPPPQPPPQQPPPPPSYSPARNPPGASTYNKNSNIPGSSANTSTPTVSSYSPPQPSYSQPPYNQGGYSQGYTAPPPPPPPPPAYNYGSYGGYNPAPYTPPPPPTAQTYPQPSYNQYQQYAQQWNQYYQNQGQWPPYYGNYDYGSYSGNTQGGTSTQ

SEQ ID NO: 29266 - protein, 804 aa, Homo sapiens
MDVRRLKVNELREELQRRGLDTRGLKAELAERLQAALEAEEPDDERELDADDEPGRPGHINEEVETEGGSELEGTAQPPPPGLQPHAEPGGYSGPDGHYAMDNITRQNQFYDTQVIKQENESGYERRPLEMEQQQAYRPEMKTEMKQGAPTSFLPPEASQLKPDRQQFQSRKRPYEENRGRGYFEHREDRRGRSPQPPAEEDEDDFDDTLVAIDTYNCDLHFKVARDRSSGYPLTIEGFAYLWSGARASYGVRRGRVCFEMKINEEISVKHLPSTEPDPHVVRIGWSLDSCSTQLGEEPFSYGYGGTGKKSTNSRFENYGDKFAENDVIGCFADFECGNDVELSFTKNGKWMGIAFRIQKEALGGQALYPHVLVKNCAVEFNFGQRAEPYCSVLPGFTFIQHLPLSERIRGTVGPKSKAECEILMMVGLPAAGKTTWAIKHAASNPSKKYNILGTNAIMDKMRVMGLRRQRNYAGRWDVLIQQATQCLNRLIQIAARKKRNYILDQTNVYGSAQRRKMRPFEGFQRKAIVICPTDEDLKDRTIKRTDEEGKDVPDHAVLEMKANFTLPDVGDFLDEVLFIELQREEADKLVRQYNEEGRKAGPPPEKRFDNRGGGGFRGRGGGGGFQRYENRGPPGGNRGGFQNRGGGSGGGGNYRGGFNRSGGGGYSQNRWGNNNRDNNNSNNRGSYNRAPQQQPPPQQPPPPQPPPQQPPPPPSYSPARNPPGASTYNKNSNIPGSSANTSTPTVSSYSPPQTYPQPSYNQYQQYAQQWNQYYQNQGQWPPYYGNYDYGSYSGNTQGGTSTQ

SEQ ID NO: 29267 - protein, 752 aa, Homo sapiens
MDVRRLKVNELREELQRRGLDTRGLKAELAERLQPPPPGLQPHAEPGGYSGPDGHYAMDNITRQNQFYDTQVIKQENESGYERRPLEMEQQQAYRPEMKTEMKQGAPTSFLPPEASQLKPDRQQFQSRKRPYEENRGRGYFEHREDRRGRSPQPPAEEDEDDFDDTLVAIDTYNCDLHFKVARDRSSGYPLTIEGFAYLWSGARASYGVRRGRVCFEMKDFECGNDVELSFTKNGKWMGIAFRIQKEALGGQALYPHVLVKNCAVEFNFGQRAEPYCSVLPGFTFIQHLPLSERIRGTVGPKSKAECEILMMVGLPAAGKTTWAIKHAASNPSKKYNILGTNAIMDKMRVMGLRRQRNYAGRWDVLIQQATQCLNRLIQIAARKKRNYILDQTNVYGSAQRRKMRPFEGFQRKAIVICPTDEDLKDRTIKRTDEEGKDVPDHAVLEMKANFTLPDVGDFLDEVLFIELQREEADKLVRQYNEEGRKAGPPPEKRFDNRGGGGFRGRGGGGGFQRYENRGPPGGNRGGFQNRGGGSGGGGNYRGGFNRSGGGGYSQNRWGNNNRDNNNSNNRGSYNRAPQQQPPPQQPPPPQPPPQQPPPPPSYSPARNPPGASTYNKNSNIPGSSANTSTPTVSSYSPPQSFGFFPSTFQPSYSQPPYNQGGYSQGYTAPPPPPPPPPAYNYGSYGGYNPAPYTPPPPPTAQTYPQPSYNQYQQYAQQWNQYYQNQGQWPPYYGNYDYGSYSGNTQGGTSTQ

SEQ ID NO: 29268 - protein, 756 aa, Homo sapiens
MDNITRQNQFYDTQVIKQENESGYERRPLEMEQQQAYRPEMKTEMKQGAPTSFLPPEASQLKPDRQQFQSRKRPYEENRGRGYFEHREDRRGRSPQPPAEEDEDDFDDTLVAIDTYNCDLHFKVARDRSSGYPLTIEGFAYLWSGARASYGVRRGRVCFEMKINEEISVKHLPSTEPDPHVVRIGWSLDSCSTQLGEEPFSYGYGGTGKKSTNSRFENYGDKFAENDVIGCFADFECGNDVELSFTKNGKWMGIAFRIQKEALGGQALYPHVLVKNCAVEFNFGQRAEPYCSVLPGFTFIQHLPLSERIRGTVGPKSKAECEILMMVGLPAAGKTTWAIKHAASNPSKKYNILGTNAIMDKMRVMGLRRQRNYAGRWDVLIQQATQCLNRLIQIAARKKRNYILDQTNVYGSAQRRKMRPFEGFQRKAIVICPTDEDLKDRTIKRTDEEGKDVPDHAVLEMKANFTLPDVGDFLDEVLFIELQREEADKLVRQYNEEGRKAGPPPEKRFDNRGGGGFRGRGGGGGFQRYENRGPPGGNRGGFQNRGGGSGGGGNYRGGFNRSGGGGYSQNRWGNNNRDNNNSNNRGSYNRAPQQQPPPQQPPPPQPPPQQPPPPPSYSPARNPPGASTYNKNSNIPGSSANTSTPTVSSYSPPQPSYSQPPYNQGGYSQGYTAPPPPPPPPPAYNYGSYGGYNPAPYTPPPPPTAQTYPQPSYNQYQQYAQQWNQYYQNQGQWPPYYGNYDYGSYSGNTQGGTSTQ

SEQ ID NO: 29269 - protein, 390 aa, Homo sapiens
MGFCHVGQAGLELLTSGDPPASASQSAGITGVSHRARPSVFVFLIHYSSFLHLLPSGRPLFWVEGTRLQKVLTSSSCSLWGTSFLLANFTLPDVGDFLDEVLFIELQREEADKLVRQYNEEGRKAGPPPEKRFDNRGGGGFRGRGGGGGFQRYENRGPPGGNRGGFQNRGGGSGGGGNYRGGFNRSGGGGYSQNRWGNNNRDNNNSNNRGSYNRAPQQQPPPQQPPPPQPPPQQPPPPPSYSPARNPPGASTYNKNSNIPGSSANTSTPTVSSYSPPQSFGFFPSTFQPSYSQPPYNQGGYSQGYTAPPPPPPPPPAYNYGSYGGYNPAPYTPPPPPTAQTYPQPSYNQYQQYAQQWNQYYQNQGQWPPYYGNYDYGSYSGNTQGGTSTQ

SEQ ID NO: 29270 - protein, 51 aa, Homo sapiens
MARYRCCRSQSRSRYYRQRQRSRRRRRRSCQTRRRAMRCCRPRYRPRCRRH

SEQ ID NO: 29271 - protein, 437 aa, Homo sapiens
MTSYMAIDGSALVPLRQKPRRKTQGFLTMSRRRISCKDLGHADCQGWLYKKKEKGSFLSNKWKKFWVILKGSSLYWYSNQMAEKADGFVNLPDFTVERASECKKKHAFKISHPQIKTFYFAAENVQEMNVWLNKLGSAVIHQESTTKDEECYSESEQEDPEIAAETPPPPHASQTQSLTAQQASSSSPSLSGTSYSFSSLENTVKTPSSFPSSLSKERQSLPDTVNSLSAAEDEGQPITFAVQVHSPVPSEAGIHKALENSFVTSESGFLNSLSSDDTSSLSSNHDHLTVPDKPAGSKIMDKEETKVSEDDEMEKLYKSLEQASLSPLGDRRPSTKKELRKSFVKRCKNPSINEKLHKIRTLNSTLKCKEHDLAMINQLLDDPKLTARKYREWKVMNTLLIQDIYQQQRASPAPDDTDDTPQELKKSPSSPSVENSI

SEQ ID NO: 29272 - protein, 438 aa, Homo sapiens
MTSYMAIDGSALQVPLRQKPRRKTQGFLTMSRRRISCKDLGHADCQGWLYKKKEKGSFLSNKWKKFWVILKGSSLYWYSNQMAEKADGFVNLPDFTVERASECKKKHAFKISHPQIKTFYFAAENVQEMNVWLNKLGSAVIHQESTTKDEECYSESEQEDPEIAAETPPPPHASQTQSLTAQQASSSSPSLSGTSYSFSSLENTVKTPSSFPSSLSKERQSLPDTVNSLSAAEDEGQPITFAVQVHSPVPSEAGIHKALENSFVTSESGFLNSLSSDDTSSLSSNHDHLTVPDKPAGSKIMDKEETKVSEDDEMEKLYKSLEQASLSPLGDRRPSTKKELRKSFVKRCKNPSINEKLHKIRTLNSTLKCKEHDLAMINQLLDDPKLTARKYREWKVMNTLLIQDIYQQQRASPAPDDTDDTPQELKKSPSSPSVENSI

SEQ ID NO: 29273 - protein, 2266 aa, Homo sapiens
MMPGETHSAAPGTAADLSRCQGCASLQQNLNEYVEALITLKQKIINTDNLLTEYQKKCDELQFARRENSNLHHQVEEMLQKISPLQKCQEELGSLKAELEEKKSSLKLYQDTHQEYARVKEECLKSDAQKKKLEAKVKKLQEAAVKQTQDFKQLRNEKKILEKEFKKTQERLDEFSKQKNEKELRHIGTQISSDSYGSIDKRKVKLLLKELWLCVNTTHRLPGEGSRCVPEKPAKAITSSRVPGEDGTLPPTQGSPLRTSNVQTCLTKLSMEIKEDFLCQNVEKQSSSGTNCSSDHVFNENGNLEVLVQSHRDGGSTEFVDHDHFFDEDLQAAIDFFKLPPPLLSPVPSPPPMSSPHPGSLPSSFAPETYFGEYTDSSDNDSVQLRNSAECVSEDDTTESQNYFGSLRKNKGSGTWEEKPKSHEAIQALNTWEVNKVTTSGLETFTATLRESSATHSLVGEKHWTTASRSMSDRKRDILHETKTQMEVREMDKSVQTEKTIHKLTRGLCIERLSASPAQEKEAAPGKSELCSSPLGKRPLNELMESEGKTVLSKMMGSPKSEFTKWTRINEITSEPDRITVSGHFHRLSRELEKEKEDTQGFTLGESPESEDDDSGDGMDVAGLDIETSFSSSSTLVALSVGSNPQSSSGLDCGNDTDITTKVFSTEPHHSEHKLQTKTLNTLHLQSEPPECSIGGNNLENSLCALSPELGASNFNDQKSSGIEYTKVVKGLTKIHSLPRSVFMKATKDGQCESQDPRIELTLNKPDFTSLIGSQAALIKSGLGFVKSTSWHHSDLLRKGGEESLRAKSEHEQKTSHQLQKAMPFLQNRGPTPKPDLLRENNNPVEFKTTASVLPNQVSVITKQTRPEKVQSAKLEHLRPHRVEPTLVTENSGNKTGMSTVAKCDGERDDTTQNITEVAAVKSISPEVSASRRKLDFNSPGGSSPVENSDCSTNSRLSFSPENILIQNQDIVREAAVQGDGQKQRQPQATDLDSSGTHGSEMLPATEVTVSGGFSVEETSCGDTGRSGGEALAVANDSTSTPQNANGLWKLKSTTPGGALPECFGTTDTTFSSAFCRKHGETQDTSQSSLPGTLHCYTGIREGGDDTEVESEAFSCSEGSEQQDAPDDSQKNLGDTDAAVAEVRPSLEVGYLTSALQDFNISTFSELDRLSTSEVVMFLESCQLGDYSSGDSVSECSSKGTLSKEMNKELKASEIGEKYRKQPCEEETLGTCEEWIESEEDDYSLKNTSQLTQCSLETLSEVLTKIRQELQTNSEDCNGKDTGSLLLLNVNNNMTTENLKEKSPFRETTGSSSHASEPTPQAAALDTEGSSPISGMPQNENPQSRPEARSDAGRQTDGGEEDLPEPVEPSALCSDSVMEPSIEQSSNCEAETTFQCQIATVTSEVINVLINKDQNLVIEKGDNWTIISGVAVLPHVDQVTLCDIPGDIPISQDQGELEAGCIPVTSAEKSPEASHTGPAFQEAPCGNNLSCPQEDVSSSGQSTNFDKSRLRNRPVKPSIWISSQIYDQNFETQIVASDHTYYNSKLEPSGKNKNRSKISNKDQSNKPVKTSASSRVETHQSEVAQSFSGEKANTKTQRSQTQTILANADTSTPTDCSPDTLSKIRQEVGPPLPPLLAPLIATPPRTSQPLSPLISSSSPSSPASPVGQVSPFRETPVPPAMSPWPEDPRRASPPDPSPSPSAASASERVVPSPLQFCAATPKHALPVPGRLPPCASGHAAVGGPQENSVKILDTMYPELSARARTLNILKGNIQLTRGPPADCKNLPGPASAMIGFKTITSAATAFVKTGSSSGGDCNQDKSRDLGTQQDSSGKRTLSTSTLRSAKRLRLDTGSPEPETRGVTAEGIHKNLPGNLPPAEVATTNEERSCSSPAVSAVSQLPLSPKETVESHDKAIANALKKIAEFSFDLLPVIRSHVYVGNISKKPVMRDQEKEVVYEFSTTKKHLAECLLHSILSELKIQKISMDHNYIHALCRVYVGICRQLGDLERARLFCYSLLKEDFPESEKLTLFIANMWHDIFLSQSVINKAMQLVARQRAKGEVLNCLRAFLNWEKNAPVDVGFMVSKLLLTIQLCPKTEFQPSEKFGEDLSDNTWEYIFAIDLLCCHQKWIWTHDNIISKELWPVMDKWIKYRKGHANIAYTPDIIIASILRLIGRLGQLGLKEGFPSAVKNISSVIGMFIQHAHDEDIPWGIQLAAVYALCDLSPSNPAEISKILEAWRREASKSVPSAIVSCLEEVSALSTEELG

SEQ ID NO: 29274 - protein, 982 aa, Homo sapiens
MSSKMVISEPGLNWDISPKNGLKTFFSRENYKDHSMAPSLKELRVLSNRRIGENLNASASSVENEPAVSSATQAKEKVKTTIGMVLLPKPRVPYPRFSRFSQREQRSYVDLLVKYAKIPANSKAVGINKNDYLQYLDMKKHVNEEVTEFLKFLQNSAKKCAQDYNMLSDDARLFTEKILRACIEQVKKYSEFYTLHEVTSLMGFFPFRVEMGLKLEKTLLALGSVKYVKTVFPSMPIKLQLSKDDIATIETSEQTAEAMHYDISKDPNAEKLVSRYHPQIALTSQSLFTLLNNHGPTYKEQWEIPVCIQVIPVAGSKPVKVIYINSPLPQKKMTMRERNQIFHEVPLKFMMSKNTSVPVSAVFMDKPEEFISEMDMSCEVNECRKIESLENLYLDFDDDVTELETFGVTTTKVSKSPSPASTSTVPNMTDAPTAPKAGTTTVAPSAPDISANSRSLSQILMEQLQKEKQLVTGMDGGPEECKNKDDQGFESCEKVSNSDKPLIQDSDLKTSDALQLENSQEIETSNKNDMTIDILHADGERPNVLENLDNSKEKTVGSEAAKTEDTVLCSSDTDEECLIIDTECKNNSDGKTAVVGSNLSSRPASPNSSSGQASVGNQTNTACSPEESCVLKKPIKRVYKKFDPVGEILKMQDELLKPISRKVPELPLMNLENSKQPSVSEQLSGPSDSSSWPKSGWPSAFQKPKGRLPYELQDYVEDTSEYLAPQEGNFVYKLFSLQDLLLLVRCSVQRIETRPRSKKRKKIRRQFPVYVLPKVEYQACYGVEALTESELCRLWTESLLHSNSSFYVGHIDAFTSKLFLLEEITSEELKEKLSALKISNLFNILQHILKKLSSLQEGSYLLSHAAEDSSLLIYKASDGKVTRTAYNLYKTHCGLPGVPSSLSVPWVPLDPSLLLPYHIHHGRIPCTFPPKSLDTTTQQKIGGTRMPTRSHRNPVSMETKSSCLPAQQVETEGVAPHKRKIT

SEQ ID NO: 29275 - protein, 73 aa, Homo sapiens
MSSKMVISEPGLNWDISPKNGLKTFFSRENYKDHSMAPSLKELRVLSNRESRGVMWTCWLNTQRFLQIPKLLE

SEQ ID NO: 29276 - protein, 355 aa, Homo sapiens
MGPGRCLLTALLLLALAPPPEASQYCGRLEYWNPDNKCCSSCLQRFGPPPCPDYEFRENCGLNDHGDFVTPPFRKCSSGQCNPDGAELCSPCGGGAVTPTPAAGGGRTPWRCRERPVPAKGHCPLTPGNPGAPSSQERSSPASSIAWRTPEPVPQQAWPNFLPLVVLVLLLTLAVIAILLFILLWHLCWPKEKADPYPYPGLVCGVPNTHTPSSSHLSSPGALETGDTWKEASLLPLLSRELSSLASQPLSRLLDELEVLEELIVLLDPEPGPGGGMAHGTTRHLAARYGLPAAWSTFAYSLRPSRSPLRALIEMVVAREPSASLGQLGTHLAQLGRADALRVLSKLGSSGVCWA

SEQ ID NO: 29277 - protein, 167 aa, Homo sapiens
MGPGRCLLTALLLLALAPPPEASQYCGRLEYWNPDNKCCSSCLQRFGPPPCPELSSLASQPLSRLLDELEVLEELIVLLDPEPGPGGGMAHGTTRHLAARYGLPAAWSTFAYSLRPSRSPLRALIEMVVAREPSASLGQLGTHLAQLGRADALRVLSKLGSSGVCWA

SEQ ID NO: 29278 - protein, 133 aa, Homo sapiens
MNHTVQTFFSPVNSGQPPNYEMLKEEHEVAVLGAPHNPAPPTSTVIHIRSETSVPDHVVWSLFNTLFMNPCCLGFIAFAYSVKSRDRKMVGDVTGAQAYASTAKCLNIWALILGILMTILLIVIPVLIFQAYG

SEQ ID NO: 29279 - protein, 206 aa, Homo sapiens
MAATRCLRWGLSRAGVWLLPPPARCPRRALHKQKDGTEFKSIYSLDKLYPESQGSDTAWRVPNGAKQADSDIPLDRLTISYCRSSGPGGQNVNKVNSKAEVRFHLATAEWIAEPVRQKIAITHKNKINRLGELILTSESSRYQFRNLADCLQKIRDMITEASQTPKEPTKEDVKLHRIRIENMNRERLRQKRIHSAVKTSRRVDMD

SEQ ID NO: 29280 - protein, 613 aa, Homo sapiens
MGALRPTLLPPSLPLLLLLMLGMGCWAREVLVPEGPLYRVAGTAVSISCNVTGYEGPAQQNFEWFLYRPEAPDTALGIVSTKDTQFSYAVFKSRVVAGEVQVQRLQGDAVVLKIARLQAQDAGIYECHTPSTDTRYLGSYSGKVELRVLPDVLQVSAAPPGPRGRQAPTSPPRMTVHEGQELALGCLARTSTQKHTHLAVSFGRSVPEAPVGRSTLQEVVGIRSDLAVEAGAPYAERLAAGELRLGKEGTDRYRMVVGGAQAGDAGTYHCTAAEWIQDPDGSWAQIAEKRAVLAHVDVQTLSSQLAVTVGPGERRIGPGEPLELLCNVSGALPPAGRHAAYSVGWEMAPAGAPGPGRLVAQLDTEGVGSLGPGYEGRHIAMEKVASRTYRLRLEAARPGDAGTYRCLAKAYVRGSGTRLREAASARSRPLPVHVREEGVVLEAVAWLAGGTVYRGETASLLCNISVRGGPPGLRLAASWWVERPEDGELSSVPAQLVGGVGQDGVAELGVRPGGGPVSVELVGPRSHRLRLHSLGPEDEGVYHCAPSAWVQHADYSWYQAGSARSGPVTVYPYMHALDTLFVPLLVGTGVALVTGATVLGTITCCFMKRLRKR

SEQ ID NO: 29281 - protein, 372 aa, Homo sapiens
MRGRSWHWAAWRGQAHRSTHTWQCPLGDLCPRHQLGGQLCRKWWESGQTWPWRLELPMLSDWLQGSFVWARKGPIGPGEPLELLCNVSGALPPAGRHAAYSVGWEMAPAGAPGPGRLVAQLDTEGVGSLGPGYEGRHIAMEKVASRTYRLRLEAARPGDAGTYRCLAKAYVRGSGTRLREAASARSRPLPVHVREEGVVLEAVAWLAGGTVYRGETASLLCNISVRGGPPGLRLAASWWVERPEDGELSSVPAQLVGGVGQDGVAELGVRPGGGPVSVELVGPRSHRLRLHSLGPEDEGVYHCAPSAWVQHADYSWYQAGSARSGPVTVYPYMHALDTLFVPLLVGTGVALVTGATVLGTITCCFMKRLRKR

SEQ ID NO: 29282 - protein, 526 aa, Homo sapiens
MGALRPTLLPPSLPLLLLLMLGMGCWAREVLVPEGPLYRVAGTAVSISCNVTGYEGPAQQNFEWFLYRPEAPDTALGIVSTKDTQFSYAVFKSRVVAGEVQVQRLQGDAVVLKIARLQAQDAGIYECHTPSTDTRYLGSYSGKVELRVLPDVLQVSAAPPGPRGRQAPTSPPRMTVHEGQELALGCLARTSTQKHTHLAVSFGRSVPEAPVGRSTLQEVVGIRSDLAVEAGAPYAERLAAGELRLGKEGTDRYRMVVGGAQAGDAGTYHCTAAEWIQDPDGSWAQIAEKRAVLAHVDVQTLSSQLAVTVGPGERRIGPGEPLELLCNVSGALPPAGRHAAYSVGWEMAPAGAPGPGRLVAQLDTEGVGSLGPGYEGRHIAMEKVASRTYRLRLEAARPGDAGTYRCLAKAYVRGSGTRLREAASARSRPLPVHVREEGVVLEAVAWLAGGTVYRGETASLLCNISVRGGPPGLRSARSGPVTVYPYMHALDTLFVPLLVGTGVALVTGATVLGTITCCFMKRLRKR

SEQ ID NO: 29283 - protein, 333 aa, Homo sapiens
MSGDEMIFDPTMSKKKKKKKKPFMLDEEGDTQTEETQPSETKEVEPEPTEDKDLEADEEDTRKKDASDDLDDLNFFNQKKKKKKTKKIFDIDEAEEGVKDLKIESDVQEPTEPEDDLDIMLGNKKKKKKNVKFPDEDEILEKDEALEDEDNKKDDGISFSNQTGPAWAGSERDYTYEELLNRVFNIMREKNPDMVAGEKRKFVMKPPQVVRVGTKKTSFVNFTDICKLLHRQPKHLLAFLLAELGTSGSIDGNNQLVIKGRFQQKQIENVLRRYIKEYVTCHTCRSPDTILQKDTRLYFLQCETCHSRCSVASIKTGFQAVTGKRAQLRAKAN

SEQ ID NO: 29284 - protein, 579 aa, Homo sapiens
MNKLYIGNLSENAAPSDLESIFKDAKIPVSGPFLVKTGYAFVDCPDESWALKAIEALSGKIELHGKPIEVEHSVPKRQRIRKLQIRNIPPHLQWEVLDSLLVQYGVVESCEQVNTDSETAVVNVTYSSKDQARQALDKLNGFQLENFTLKVAYIPDEMAAQQNPLQQPRGRRGLGQRGSSRQGSPGSVSKQKPCDLPLRLLVPTQFVGAIIGKEGATIRNITKQTQSKIDVHRKENAGAAEKSITILSTPEGTSAACKSILEIMHKEAQDIKFTEEIPLKILAHNNFVGRLIGKEGRNLKKIEQDTDTKITISPLQELTLYNPERTITVKGNVETCAKAEEEIMKKIRESYENDIASMNLQAHLIPGLNLNALGLFPPTSGMPPPTSGPPSAMTPPYPQFEQSETETVHLFIPALSVGAIIGKQGQHIKQLSRFAGASIKIAPAEAPDAKVRMVIITGPPEAQFKAQGRIYGKIKEENFVSPKEEVKLEAHIRVPSFAAGRVIGKGGKTVNELQNLSSAEVVVPRDQTPDENDQVVVKITGHFYACQVAQRKIQEILTQVKQHQQQKALQSGPPQSRRK

SEQ ID NO: 29285 - protein, 198 aa, Homo sapiens
MPPPTSGPPSAMTPPYPQFEQSETETVHLFIPALSVGAIIGKQGQHIKQLSRFAGASIKIAPAEAPDAKVRMVIITGPPEAQFKAQGRIYGKIKEENFVSPKEEVKLEAHIRVPSFAAGRVIGKGGKTVNELQNLSSAEVVVPRDQTPDENDQVVVKITGHFYACQVAQRKIQEILTQVKQHQQQKALQSGPPQSRRK

SEQ ID NO: 29286 - protein, 188 aa, Homo sapiens [sequence omitted]

SEQ ID NO: 29287 - protein, 189 aa, Homo sapiens
MALPFVLLMALVVLNCKSICSLGCDLPQTHSLSNRRTLMIMAQMGRISPFSCLKDRHDFGFPQEEFDGNQFQKAQAISVLHEMIQQTFNLFSTKDSSATWDETLLDKFYTELYQQLNDLEACMMQEVGVEDTPLMNVDSILTVRKYFQRITLYLTEKKYSPCAWEVVRAEIMRSFSLSANLQERLRRKE

SEQ ID NO: 29288 - protein, 509 aa, Homo sapiens
MEDIQTNAELKSTQEQSVPAESAAVLNDYSLTKSHEMENVDSGEGPANEDEDIGDDSMKVKDEYSERDENVLKSEPMGNAEEPEIPYSYSREYNEYENIKLERHVVSFDSSRPTSGKMNCDVCGLSCISFNVLMVHKRSHTGERPFQCNQCGASFTQKGNLLRHIKLHTGEKPFKCHLCNYACQRRDALTGHLRTHSVEKPYKCEFCGRSYKQRSSLEEHKERCRTFLQSTDPGDTASAEARHIKAEMGSERALVLDRLASNVAKRKSSMPQKFIGEKRHCFDVNYNSSYMYEKESELIQTRMMDQAINNAISYLGAEALRPLVQTPPAPTSEMVPVISSMYPIALTRAEMSNGAPQELEKKSIHLPEKSVPSERGLSPNNSGHDSTDTDSNHEERQNHIYQQNHMVLSRARNGMPLLKEVPRSYELLKPPPICPRDSVKVINKEGEVMDVYRCDHCRVLFLDYVMFTIHMGCHGFRDPFECNMCGYRSHDRYEFSSHIARGEHRALLK

SEQ ID NO: 29289 - protein, 453 aa, Homo sapiens
MEDIQTNAELKSTQEQSVPAESAAVLNDYSLTKSHEMENVDSGEGPANEDEDIGDDSMKVKDEYSERDENVLKSEPMGNAEEPEIPYSYSREYNEYENIKLERHVVSFDSSRPTSGKMNCDVCGLSCISFNVLMVHKRSHTVEKPYKCEFCGRSYKQRSSLEEHKERCRTFLQSTDPGDTASAEARHIKAEMGSERALVLDRLASNVAKRKSSMPQKFIGEKRHCFDVNYNSSYMYEKESELIQTRMMDQAINNAISYLGAEALRPLVQTPPAPTSEMVPVISSMYPIALTRAEMSNGAPQELEKKSIHLPEKSVPSERGLSPNNSGHDSTDTDSNHEERQNHIYQQNHMVLSRARNGMPLLKEVPRSYELLKPPPICPRDSVKVINKEGEVMDVYRCDHCRVLFLDYVMFTIHMGCHGFRDPFECNMCGYRSHDRYEFSSHIARGEHRALLK

SEQ ID NO: 29290 - protein, 470 aa, Homo sapiens
MEDIQTNAELKSTQEQSVPAESAAVLNDYSLTKSHEMENVDSGEGPANEDEDIGDDSMKVKDEYSERDENVLKSEPMGNAEEPEIPYSYSREYNEYENIKLERHVVSFDSSRPTSGKMNCDVCGLSCISFNVLMVHKRSHTGERPFQCNQCGASFTQKGNLLRHIKLHTGEKPFKCHLCNYACQRRDALTGHLRTHSASAEARHIKAEMGSERALVLDRLASNVAKRKSSMPQKFIGEKRHCFDVNYNSSYMYEKESELIQTRMMDQAINNAISYLGAEALRPLVQTPPAPTSEMVPVISSMYPIALTRAEMSNGAPQELEKKSIHLPEKSVPSERGLSPNNSGHDSTDTDSNHEERQNHIYQQNHMVLSRARNGMPLLKEVPRSYELLKPPPICPRDSVKVINKEGEVMDVYRCDHCRVLFLDYVMFTIHMGCHGFRDPFECNMCGYRSHDRYEFSSHIARGEHRALLK

SEQ ID NO: 29291 - protein, 470 aa, Homo sapiens
MEDIQTNAELKSTQEQSVPAESAAVLNDYSLTKSHEMENVDSGEGPANEDEDIGDDSMKVKDEYSERDENVLKSEPMGNAEEPEIPYSYSREYNEYENIKLERHVVSFDSSRPTSGKMNCDVCGLSCISFNVLMVHKRSHTGERPFQCNQCGASFTQKGNLLRHIKLHTGEKPFKCHLCNYACQRRDALTGHLRTHSVEKPYKCEFCGRSYKQRSSLEEHKERCRTFLQSTDPGDTGEKRHCFDVNYNSSYMYEKESELIQTRMMDQAINNAISYLGAEALRPLVQTPPAPTSEMVPVISSMYPIALTRAEMSNGAPQELEKKSIHLPEKSVPSERGLSPNNSGHDSTDTDSNHEERQNHIYQQNHMVLSRARNGMPLLKEVPRSYELLKPPPICPRDSVKVINKEGEVMDVYRCDHCRVLFLDYVMFTIHMGCHGFRDPFECNMCGYRSHDRYEFSSHIARGEHRALLK

SEQ ID NO: 29292 - protein, 414 aa, Homo sapiens
MEDIQTNAELKSTQEQSVPAESAAVLNDYSLTKSHEMENVDSGEGPANEDEDIGDDSMKVKDEYSERDENVLKSEPMGNAEEPEIPYSYSREYNEYENIKLERHVVSFDSSRPTSGKMNCDVCGLSCISFNVLMVHKRSHTASAEARHIKAEMGSERALVLDRLASNVAKRKSSMPQKFIGEKRHCFDVNYNSSYMYEKESELIQTRMMDQAINNAISYLGAEALRPLVQTPPAPTSEMVPVISSMYPIALTRAEMSNGAPQELEKKSIHLPEKSVPSERGLSPNNSGHDSTDTDSNHEERQNHIYQQNHMVLSRARNGMPLLKEVPRSYELLKPPPICPRDSVKVINKEGEVMDVYRCDHCRVLFLDYVMFTIHMGCHGFRDPFECNMCGYRSHDRYEFSSHIARGEHRALLK

SEQ ID NO: 29293 - protein, 431 aa, Homo sapiens
MEDIQTNAELKSTQEQSVPAESAAVLNDYSLTKSHEMENVDSGEGPANEDEDIGDDSMKVKDEYSERDENVLKSEPMGNAEEPEIPYSYSREYNEYENIKLERHVVSFDSSRPTSGKMNCDVCGLSCISFNVLMVHKRSHTGERPFQCNQCGASFTQKGNLLRHIKLHTGEKPFKCHLCNYACQRRDALTGHLRTHSGEKRHCFDVNYNSSYMYEKESELIQTRMMDQAINNAISYLGAEALRPLVQTPPAPTSEMVPVISSMYPIALTRAEMSNGAPQELEKKSIHLPEKSVPSERGLSPNNSGHDSTDTDSNHEERQNHIYQQNHMVLSRARNGMPLLKEVPRSYELLKPPPICPRDSVKVINKEGEVMDVYRCDHCRVLFLDYVMFTIHMGCHGFRDPFECNMCGYRSHDRYEFSSHIARGEHRALLK

SEQ ID NO: 29294 - protein, 475 aa, Homo sapiens
MEDIQTNAELKSTQEQSVPADDSMKVKDEYSERDENVLKSEPMGNAEEPEIPYSYSREYNEYENIKLERHVVSFDSSRPTSGKMNCDVCGLSCISFNVLMVHKRSHTGERPFQCNQCGASFTQKGNLLRHIKLHTGEKPFKCHLCNYACQRRDALTGHLRTHSVEKPYKCEFCGRSYKQRSSLEEHKERCRTFLQSTDPGDTASAEARHIKAEMGSERALVLDRLASNVAKRKSSMPQKFIGEKRHCFDVNYNSSYMYEKESELIQTRMMDQAINNAISYLGAEALRPLVQTPPAPTSEMVPVISSMYPIALTRAEMSNGAPQELEKKSIHLPEKSVPSERGLSPNNSGHDSTDTDSNHEERQNHIYQQNHMVLSRARNGMPLLKEVPRSYELLKPPPICPRDSVKVINKEGEVMDVYRCDHCRVLFLDYVMFTIHMGCHGFRDPFECNMCGYRSHDRYEFSSHIARGEHRALLK

SEQ ID NO: 29295 - protein, 436 aa, Homo sapiens
MEDIQTNAELKSTQEQSVPADDSMKVKDEYSERDENVLKSEPMGNAEEPEIPYSYSREYNEYENIKLERHVVSFDSSRPTSGKMNCDVCGLSCISFNVLMVHKRSHTGERPFQCNQCGASFTQKGNLLRHIKLHTGEKPFKCHLCNYACQRRDALTGHLRTHSASAEARHIKAEMGSERALVLDRLASNVAKRKSSMPQKFIGEKRHCFDVNYNSSYMYEKESELIQTRMMDQAINNAISYLGAEALRPLVQTPPAPTSEMVPVISSMYPIALTRAEMSNGAPQELEKKSIHLPEKSVPSERGLSPNNSGHDSTDTDSNHEERQNHIYQQNHMVLSRARNGMPLLKEVPRSYELLKPPPICPRDSVKVINKEGEVMDVYRCDHCRVLFLDYVMFTIHMGCHGFRDPFECNMCGYRSHDRYEFSSHIARGEHRALLK

SEQ ID NO: 29296 - protein, 422 aa, Homo sapiens
MEDIQTNAELKSTQEQSVPAESAAVLNDYSLTKSHEMENVDSGEGPANEDEDIGGERPFQCNQCGASFTQKGNLLRHIKLHTGEKPFKCHLCNYACQRRDALTGHLRTHSVEKPYKCEFCGRSYKQRSSLEEHKERCRTFLQSTDPGDTASAEARHIKAEMGSERALVLDRLASNVAKRKSSMPQKFIGEKRHCFDVNYNSSYMYEKESELIQTRMMDQAINNAISYLGAEALRPLVQTPPAPTSEMVPVISSMYPIALTRAEMSNGAPQELEKKSIHLPEKSVPSERGLSPNNSGHDSTDTDSNHEERQNHIYQQNHMVLSRARNGMPLLKEVPRSYELLKPPPICPRDSVKVINKEGEVMDVYRCDHCRVLFLDYVMFTIHMGCHGFRDPFECNMCGYRSHDRYEFSSHIARGEHRALLK

SEQ ID NO: 29297 - protein, 366 aa, Homo sapiens
MEDIQTNAELKSTQEQSVPAESAAVLNDYSLTKSHEMENVDSGEGPANEDEDIGVEKPYKCEFCGRSYKQRSSLEEHKERCRTFLQSTDPGDTASAEARHIKAEMGSERALVLDRLASNVAKRKSSMPQKFIGEKRHCFDVNYNSSYMYEKESELIQTRMMDQAINNAISYLGAEALRPLVQTPPAPTSEMVPVISSMYPIALTRAEMSNGAPQELEKKSIHLPEKSVPSERGLSPNNSGHDSTDTDSNHEERQNHIYQQNHMVLSRARNGMPLLKEVPRSYELLKPPPICPRDSVKVINKEGEVMDVYRCDHCRVLFLDYVMFTIHMGCHGFRDPFECNMCGYRSHDRYEFSSHIARGEHRALLK

SEQ ID NO: 29298 - protein, 327 aa, Homo sapiens
MEDIQTNAELKSTQEQSVPAESAAVLNDYSLTKSHEMENVDSGEGPANEDEDIGASAEARHIKAEMGSERALVLDRLASNVAKRKSSMPQKFIGEKRHCFDVNYNSSYMYEKESELIQTRMMDQAINNAISYLGAEALRPLVQTPPAPTSEMVPVISSMYPIALTRAEMSNGAPQELEKKSIHLPEKSVPSERGLSPNNSGHDSTDTDSNHEERQNHIYQQNHMVLSRARNGMPLLKEVPRSYELLKPPPICPRDSVKVINKEGEVMDVYRCDHCRVLFLDYVMFTIHMGCHGFRDPFECNMCGYRSHDRYEFSSHIARGEHRALLK

SEQ ID NO: 29299 - protein, 288 aa, Homo sapiens
MEDIQTNAELKSTQEQSVPAESAAVLNDYSLTKSHEMENVDSGEGPANEDEDIGGEKRHCFDVNYNSSYMYEKESELIQTRMMDQAINNAISYLGAEALRPLVQTPPAPTSEMVPVISSMYPIALTRAEMSNGAPQELEKKSIHLPEKSVPSERGLSPNNSGHDSTDTDSNHEERQNHIYQQNHMVLSRARNGMPLLKEVPRSYELLKPPPICPRDSVKVINKEGEVMDVYRCDHCRVLFLDYVMFTIHMGCHGFRDPFECNMCGYRSHDRYEFSSHIARGEHRALLK

SEQ ID NO: 29300 - protein, 375 aa, Homo sapiens
MEDIQTNAELKSTQEQSVPAESAAVLNDYSLTKSHEMENVDSGEGPANEDEDIGDDSMKVKDEYSERDENVLKSEPMGNAEEPEIPYSYSREYNEYENIKLERHVVSFDSSRPTSGKMNCDVCGLSCISFNVLMVHKRSHTGEKRHCFDVNYNSSYMYEKESELIQTRMMDQAINNAISYLGAEALRPLVQTPPAPTSEMVPVISSMYPIALTRAEMSNGAPQELEKKSIHLPEKSVPSERGLSPNNSGHDSTDTDSNHEERQNHIYQQNHMVLSRARNGMPLLKEVPRSYELLKPPPICPRDSVKVINKEGEVMDVYRCDHCRVLFLDYVMFTIHMGCHGFRDPFECNMCGYRSHDRYEFSSHIARGEHRALLK

SEQ ID NO: 29301 - protein, 263 aa, Homo sapiens
MEDIQTNAELKSTQEQSVPAESAAVLNDYSLTKSHEMENVDSGEGPANEDEDIGDDSMKVKDEYSERDENVLKSEPMGNAEEPEIPYSYSREYNEYENIKLERHVVSFDSSRPTSGKMNCDVCGLSCISFNVLMVHKRSHTGERPFQCNQCGASFTQKGNLLRHIKLHTGEKPFKCHLCNYACQRRDALTGHLRTHSVEKPYKCEFCGRSYKQRSSLEEHKERCRTFLQSTDPGDTGTGWGWVELSHLGIRLQDLNVPWCRLH

SEQ ID NO: 29302 - protein, 453 aa, Homo sapiens
MEDIQTNAELKSTQEQSVPAESAAVLNDYSLTKSHEMENVDSGEGPANEDEDIGDDSMKVKDEYSERDENVLKSEPMGNAEEPEIPYSYSREYNEYENIKLERHVVSFDSSRPTSGKMNCDVCGLSCISFNVLMVHKRSHTVEKPYKCEFCGRSYKQRSSLEEHKERCRTFLQSTDPGDTGTGWGWVELSHLGIRLQDLNVPWCRLHAKRKSSMPQKFIGEKRHCFDVNYNSSYMYEKESELIQTRMMDQAINNAISYLGAEALRPLVQTPPAPTSEMVPVISSMYPIALTRAEMSNGAPQELEKKSIHLPEKSVPSERGLSPNNSGHDSTDTDSNHEERQNHIYQQNHMVLSRARNGMPLLKEVPRSYELLKPPPICPRDSVKVINKEGEVMDVYRCDHCRVLFLDYVMFTIHMGCHGFRDPFECNMCGYRSHDRYEFSSHIARGEHRALLK

SEQ ID NO: 29303 - protein, 262 aa, Homo sapiens
MGSERALVLDRLASNVAKRKSSMPQKFIGEKRHCFDVNYNSSYMYEKESELIQTRMMDQAINNAISYLGAEALRPLVQTPPAPTSEMVPVISSMYPIALTRAEMSNGAPQELEKKSIHLPEKSVPSERGLSPNNSGHDSTDTDSNHEERQNHIYQQNHMVLSRARNGMPLLKEVPRSYELLKPPPICPRDSVKVINKEGEVMDVYRCDHCRVLFLDYVMFTIHMGCHGFRDPFECNMCGYRSHDRYEFSSHIARGEHRALLK

SEQ ID NO: 29304 - protein, 502 aa, Homo sapiens
MSLVLLSLAALCRSAVPREPTVQCGSETGPSPEWMLQHDLIPGDLRDLRVEPVTTSVATGDYSILMNVSWVLRADASIRLLKATKICVTGKSNFQSYSCVRCNYTEAFQTQTRPSGGKWTFSYIGFPVELNTVYFIGAHNIPNANMNEDGPSMSVNFTSPGCLDHIMKYKKKCVKAGSLWDPNITACKKNEETVEVNFTTTPLGNRYMALIQHSTIIGFSQVFEPHQKKQTRASVVIPVTGDSEGATVQLTPYFPTCGSDCIRHKGTVVLCPQTGVPFPLDNNKSKPGGWLPLLLLSLLVATWVLVAGIYLMWRHERIKKTSFSTTTLLPPIKVLVVYPSEICFHHTICYFTEFLQNHCRSEVILEKWQKKKIAEMGPVQWLATQKKAADKVVFLLSNDVNSVCDGTCGKSEGSPSENSQDLFPLAFNLFCSDLRSQIHLHKYVVVYFREIDTKDDYNALSVCPKYHLMKDATAFCAELLHVKQQVSAGKRSQACHDGCCSL

SEQ ID NO: 29305 - protein, 288 aa, Homo sapiens
MSLVLLSLAALCRSAVPREPTVQCGSETGPSPEWMLQHDLIPGDLRDLRVEPVTTSVATGDYSILMNVSWVLRADASIRLLKATKICVTGKSNFQSYSCVRCNYTEAFQTQTRPSGGKWTFSYIGFPVELNTVYFIGAHNIPNANMNEDGPSMSVNFTSPGCLDHIMKYKKKCVKAGSLWDPNITACKKNEETVEVNFTTTPLGNRYMALIQHSTIIGFSQVFEPHQKKQTRASVVIPVTGDSEGATVQVKFSELLWGGKGHRRLFHHSLLLRMSSLLSNALLPADTS

SEQ ID NO: 29306 - protein, 336 aa, Homo sapiens
MSRSVLEALTSSTAMQCVPSDGCAMLLRVRASITLHERLRGLEACAMSLDTQETQCQSVWVARASHRQQGGQQLQVHFGCFAVSVAQHLYVTLRTIPHFCGVQLDQRHLVEAGKLSYWVDRRRKAILVQVPRASGSPDYYLRLCLKRFTCEDAGAPVRVTANSVSQAVFLPYSQELPCLCLEGWSATPDAVRIQICPFENDTEALEVLWDTVYYHPESQTLSWEPACPVSGHVSLCWRPGPGAGCRKLQQSSQLVHRRVQYPLVDTQPQLCLKFSTSWGSWVRCPFEQRRFPTPPTSRCTCVTGGSHSSLPANAHSRPARSLQPQVTWQPPLLLPS

SEQ ID NO: 29307 - protein, 667 aa, Homo sapiens
MGSSRLAALLLPLLLIVIDLSDSAGIGFRHLPHWNTRCPLASHTDDSFTGSSAYIPCRTWWALFSTKPWCVRVWHCSRCLCQHLLSGGSGLQRGLFHLLVQKSKKSSTFKFYRRHKMPAPAQRKLLPRRHLSEKSHHISIPSPDISHKGLRSKRTQPSDPETWESLPRLDSQRHGGPEFSFDLLPEARAIRVTISSGPEVSVRLCHQWALECEELSSPYDVQKIVSGGHTVELPYEFLLPCLCIEASYLQEDTVRRKKCPFQSWPEAYGSDFWKSVHFTDYSQHTQMVMALTLRCPLKLEAALCQRHDWHTLCKDLPNATARESDGWYVLEKVDLHPQLCFKFSFGNSSHVECPHQTGSLTSWNVSMDTQAQQLILHFSSRMHATFSAAWSLPGLGQDTLVPPVYTVSQARGSSPVSLDLIIPFLRPGCCVLVWRSDVQFAWKHLLCPDVSYRHLGLLILALLALLTLLGVVLALTCRRPQSGPGPARPVLLLHAADSEAQRRLVGALAELLRAALGGGRDVIVDLWEGRHVARVGPLPWLWAARTRVAREQGTVLLLWSGADLRPVSGPDPRAAPLLALLHAAPRPLLLLAYFSRLCAKGDIPPPLRALPRYRLLRDLPRLLRALDARPFAEATSWGRLGARQRRQSRLELCSRLEREAARLADLG

SEQ ID NO: 29308 - protein, 551 aa, Homo sapiens
MPAPAQRKLLPRRHLSEKSHHISIPSPDISHKGLRSKRTQPSDPETWESLPRLDSQRHGGPEFSFDLLPEARAIRVTISSGPEVSVRLCHQWALECEELSSPYDVQKIVSGGHTVELPYEFLLPCLCIEASYLQEDTVRRKKCPFQSWPEAYGSDFWKSVHFTDYSQHTQMVMALTLRCPLKLEAALCQRHDWHTLCKDLPNATARESDGWYVLEKVDLHPQLCFKFSFGNSSHVECPHQTGSLTSWNVSMDTQAQQLILHFSSRMHATFSAAWSLPGLGQDTLVPPVYTVSQARGSSPVSLDLIIPFLRPGCCVLVWRSDVQFAWKHLLCPDVSYRHLGLLILALLALLTLLGVVLALTCRRPQSGPGPARPVLLLHAADSEAQRRLVGALAELLRAALGGGRDVIVDLWEGRHVARVGPLPWLWAARTRVAREQGTVLLLWSGADLRPVSGPDPRAAPLLALLHAAPRPLLLLAYFSRLCAKGDIPPPLRALPRYRLLRDLPRLLRALDARPFAEATSWGRLGARQRRQSRLELCSRLEREAARLADLG

SEQ ID NO: 29309 - protein, 533 aa, Homo sapiens
MGSSRLAALLLPLLLIVIDLSDSAGIGFRHLPHWNTRCPLASHTDDSFTGSSAYIPCRTWWALFSTKPWCVRVWHCSRCLCQHLLSGGSGLQRGLFHLLVQKSKKSSTFKFYRRHKMPAPAQRKLLPRRHLSEKSHHISIPSPDISHKGLRSKRTQPSDPETWESLPRLDSQRHGGPEFSFDLLPEARAIRVTISSGPEVSVRLCHQWALECEELSSPYDVQKIVSGGHTVELPYEFLLPCLCIEASYLQEDTVRRKKCPFQSWPEAYGSDFWKSVHFTDYSQHTQMVMALTLRCPLKLEAALCQRHDWHTLCKDLPNATARESDGWYVLEKVDLHPQLCFKFSFGNSSHVECPHQTGSLTSWNVSMDTQAQQLILHFSSRMHATFSAAWSLPGLGQDTLVPPVYTVSQARGSSPVSLDLIIPFLRPGCCVLLHASLSSPGGEDAWLIGVGGSVPSGVAVRCPVCLEAPLVSGCLLQTPGALDPGTAGPPHPTGCCSGPHLPAPTVRPGPSAASAPPARGGLGGAAAPGGSAG

SEQ ID NO: 29310 - protein, 390 aa, Homo sapiens
MPAPAQRKLLPRRHLSEKSHHISIPSPDISHKGLRSKRTQPSDPETWESLPRLDSQRHGGPEFSFDLLPEARAIRVTISSGPEVSVRLCHQWALECEELSSPYDVQKIVSGGHTVELPYEFLLPCLCIEASYLQEDTVRRKKCPFQSWPEAYGSDFWKSVHFTDYSQHTQMVMALTLRCPLKLEAALCQRHDWHTLCKDLPNATARESDGWYVLEKVDLHPQLCFKFSFGNSSHVECPHQTGSLTSWNVSMDTQAQQLILHFSSRMHATFSAAWSLPGLGQDTLVPPVYTVSQARGSSPVSLDLIIPFLRPGCCVLASSWSRHKPTWEEFPSQWGLPSPPAPCFTQLPGRRRCLAHRGGGLCALRCGGQMSSLPGSTSCVRMSLTDTWGS

SEQ ID NO: 29311 - protein, 271 aa, Homo sapiens
MGSSRLAALLLPLLLIVIDLSDSAGIGFRHLPHWNTRCPLASHTDDSFTGSSAYIPCRTWWALFSTKPWCVRVWHCSRCLCQHLLSGGSGLQRGLFHLLVQKSKKSSTFKFYRRHKMPAPAQRKLLPRRHLSEKSHHISIPSPDISHKGLRSKRTQPSDPETWESLPRLDSQRHGGPEFSFDLLPEARAIRVTISSGPEVSVRLCHQWALECEELSSPYDVQKIVSGGHTVELPYEFLLPCLCIEASYLQEDTVRRKKCPFQSWPEACECC

SEQ ID NO: 29312 - protein, 264 aa, Homo sapiens
MIMSSYLMDSNYIDPKFPPCEEYSQNSYIPEHSPEYYGRTRESGFQHHHQELYPPPPPRPSYPERQYSCTSLQGPGNSRGHGPAQAGHHHPEKSQSLCEPAPLSGASASPSPAPPACSQPAPDHPSSAASKQPIVYPWMKKIHVSTVNPNYNGGEPKRSRTAYTRQQVLELEKEFHYNRYLTRRRRIEIAHSLCLSERQIKIWFQNRRMKWKKDHRLPNTKVRSAPPAGAAPSTLSAATPGTSEDHSQSATPPEQQRAEDITRL

SEQ ID NO: 29313 - protein, 574 aa, Homo sapiens
MRTLLTILTVGSLAAHAPEDPSDLLQHVKFQSSNFENILTWDSGPEGTPDTVYSIEYKTYGERDWVAKKGCQRITRKSCNLTVETGNLTELYYARVTAVSAGGRSATKMTDRFSSLQHTTLKPPDVTCISKVRSIQMIVHPTPTPIRAGDGHRLTLEDIFHDLFYHLELQVNRTYQMHLGGKQREYEFFGLTPDTEFLGTIMICVPTWAKESAPYMCRVKTLPDRTWTYSFSGAFLFSMGFLVAVLCYLSYRYVTKPPAPPNSLNVQRVLTFQPLRFIQEHVLIPVFDLSGPSSLAQPVQYSQIRVSGPREPAGAPQRHSLSEITYLGQPDISILQPSNVPPPQILSPLSYAPNAAPEVGPPSYAPQVTPEAQFPFYAPQAISKVQPSSYAPQATPDSWPPSYGVCMEGSGKDSPTGTLSSPKHLRPKGQLQKEPPAGSCMLGGLSLQEVTSLAMEESQEAKSLHQPLGICTDRTSDPNVLHSGEEGTPQYLKGQLPLLSSVQIEGHPMSLPLQPPSRPCSPSDQGPSPWGLLESLVCPKDEAKSPAPETSDLEQPTELDSLFRGLALTVQWES

SEQ ID NO: 29314 - protein, 193 aa, Homo sapiens
MAAEPVEDNCINFVAMKFIDNTLYFIAEDDENLESDYFGKLESKLSVIRNLNDQVLFIDQGNRPLFEDMTDSDCRDNAPRTIFIISMYKDSQPRGMAVTISVKCEKISTLSCENKIISFKEMNPPDNIKDTKSDIIFFQRSVPGHDNKMQFESSSYEGYFLACEKERDLFKLILKKEDELGDRSIMFTVQNED

SEQ ID NO: 29315 - protein, 189 aa, Homo sapiens
MAAEPVEDNCINFVAMKFIDNTLYFIENLESDYFGKLESKLSVIRNLNDQVLFIDQGNRPLFEDMTDSDCRDNAPRTIFIISMYKDSQPRGMAVTISVKCEKISTLSCENKIISFKEMNPPDNIKDTKSDIIFFQRSVPGHDNKMQFESSSYEGYFLACEKERDLFKLILKKEDELGDRSIMFTVQNED

SEQ ID NO: 29316 - protein, 177 aa, Homo sapiens
MKLQCVSLWLLGTILILCSVDNHGLRRCLISTDMHHIEESFQEIKRAIQAKDTFPNVTILSTLETLQIIKPLDVCCVTKNLLAFYVDRVFKDHQEPNPKILRKISSIANSFLYMQKTLRQCQEQRQCHCRQEATNATRVIHDNYDQLEVHAAAIKSLGELDVFLAWINKNHEVMFSA

SEQ ID NO: 29317 - protein, 215 aa, Homo sapiens
MCTEGAFPHRSACSLPLTHVHTHIHVCVPVLWGSVPRGMKLQCVSLWLLGTILILCSVDNHGLRRCLISTDMHHIEESFQEIKRAIQAKDTFPNVTILSTLETLQIIKPLDVCCVTKNLLAFYVDRVFKDHQEPNPKILRKISSIANSFLYMQKTLRQCQEQRQCHCRQEATNATRVIHDNYDQLEVHAAAIKSLGELDVFLAWINKNHEVMFSA

SEQ ID NO: 29318 - protein, 207 aa, Homo sapiens
MKLQCVSLWLLGTILILCSVDNHGLRRCLISTDMHHIEESFQEIKRAIQAKDTFPNVTILSTLETLQIIKPLDVCCVTKNLLAFYVDRVFKDHQEPNPKILRKISSIANSFLYMQKTLRQCVSHWVRIPASAPCLPKERPGSAGPHRPPDMVLGVKGNSLRTSTGRTVENLSQWPLLPQGSLPADNSSDGLLLDNPPGVTNLCQHIP

SEQ ID NO: 29319 - protein, 179 aa, Homo sapiens
MAALQKSVSSFLMGTLATSCLLLLALLVQGGAAAPISSHCRLDKSNFQQPYITNRTFMLAKEASLADNNTDVRLIGEKLFHGVSMSERCYLMKQVLNFTLEEVLFPQSDRFQPYMQEVVPFLARLSNRLSTCHIEGDDLHIQRNVQKLKDTVKKLGESGEIKAIGELDLLFMSLRNACI

SEQ ID NO: 29320 - protein, 177 aa, Homo sapiens
MRERPRLGEDSSLISLFLQVVAFLAMVMGTHTYSHWPSCCPSKGQDTSEELLRWSTVPVPPLEPARPNRHPESCRASEDGPLNSRAISPWRYELDRDLNRLPQDLYHARCLCPHCVSLQTGSHMDPRGNSELLYHNQTVFYRRPCHGEKGTHKGYCLERRLYRVSLACVCVRPRVMG

SEQ ID NO: 29321 - protein, 161 aa, Homo sapiens
MYQVVAFLAMVMGTHTYSHWPSCCPSKGQDTSEELLRWSTVPVPPLEPARPNRHPESCRASEDGPLNSRAISPWRYELDRDLNRLPQDLYHARCLCPHCVSLQTGSHMDPRGNSELLYHNQTVFYRRPCHGEKGTHKGYCLERRLYRVSLACVCVRPRVMG

SEQ ID NO: 29322 - protein, 629 aa, Homo sapiens
MNQVTIQWDAVIALYILFSWCHGGITNINCSGHIWVEPATIFKMGMNISIYCQAAIKNCQPRKLHFYKNGIKERFQITRINKTTARLWYKNFLEPHASMYCTAECPKHFQETLICGKDISSGYPPDIPDEVTCVIYEYSGNMTCTWNAGKLTYIDTKYVVHVKSLETEEEQQYLTSSYINISTDSLQGGKKYLVWVQAANALGMEESKQLQIHLDDIVIPSAAVISRAETINATVPKTIIYWDSQTTIEKVSCEMRYKATTNQTWNVKEFDTNFTYVQQSEFYLEPNIKYVFQVRCQETGKRYWQPWSSLFFHKTPETVPQVTSKAFQHDTWNSGLTVASISTGHLTSDNRGDIGLLLGMIVFAVMLSILSLIGIFNRSFRTGIKRRILLLIPKWLYEDIPNMKNSNVVKMLQENSELMNNNSSEQVLYVDPMITEIKEIFIPEHKPTDYKKENTGPLETRDYPQNSLFDNTTVVYIPDLNTGYKPQISNFLPEGSHLSNNNEITSLTLKPPVDSLDSGNNPRLQKHPNFAFSVSSVNSLSNTIFLGELSLILNQGECSSPDIQNSVEEETTMLLENDSPSETIPEQTLLPDEFVSCLGIVNEELPSINTYFPQNILESHFNRISLLEK

SEQ ID NO: 29323 - protein, 375 aa, Homo sapiens
MRYKATTNQTWNVKEFDTNFTYVQQSEFYLEPNIKYVFQVRCQETGKRYWQPWSSLFFHKTPETVPQVTSKAFQHDTWNSGLTVASISTGHLTSDNRGDIGLLLGMIVFAVMLSILSLIGIFNRSFRTGIKRRILLLIPKWLYEDIPNMKNSNVVKMLQENSELMNNNSSEQVLYVDPMITEIKEIFIPEHKPTDYKKENTGPLETRDYPQNSLFDNTTVVYIPDLNTGYKPQISNFLPEGSHLSNNNEITSLTLKPPVDSLDSGNNPRLQKHPNFAFSVSSVNSLSNTIFLGELSLILNQGECSSPDIQNSVEEETTMLLENDSPSETIPEQTLLPDEFVSCLGIVNEELPSINTYFPQNILESHFNRISLLEK

SEQ ID NO: 29324 - protein, 356 aa, Homo sapiens
MNQVTIQWDAVIALYILFSWCHGGITNINCSGHIWVEPATIFKMGMNISIYCQAAIKNCQPRKLHFYKNGIKERFQITRINKTTARLWYKNFLEPHASMYCTAECPKHFQETLICGKDISSGYPPDIPDEVTCVIYEYSGNMTCTWNAGKLTYIDTKYVVHVKSLETEEEQQYLTSSYINISTDSLQGGKKYLVWVQAANALGMEESKQLQIHLDDIVIPSAAVISRAETINATVPKTIIYWDSQTTIEKVSCEMRYKATTNQTWNVKEFDTNFTYVQQSEFYLEPNIKYVFQVRCQETGKRYWQPWSSLFFHKTPETVPQVTSKAFQHDTWNSGLTVASISTGHLTSGLKEGSYC

SEQ ID NO: 29325 - protein, 174 aa, Homo sapiens
MNQVTIQWDAVIALYILFSWCHGGITNINCSGHIWVEPATIFKMGMNISIYCQAAIKNCQPRKLHFYKNGIKERFQITRINKTTARLWYKNFLEPHASMYCTAECPKHFQETLICGKDISSGYPPDIPDEVTCVIYEYSGNMTCTWNAGKLTYIDTKYVVHVKSDTFCSRHFQG

SEQ ID NO: 29326 - protein, 264 aa, Homo sapiens
MEFWANSCFHLYRAPYFWIKRRILLLIPKWLYEDIPNMKNSNVVKMLQENSELMNNNSSEQVLYVDPMITEIKEIFIPEHKPTDYKKENTGPLETRDYPQNSLFDNTTVVYIPDLNTGYKPQISNFLPEGSHLSNNNEITSLTLKPPVDSLDSGNNPRLQKHPNFAFSVSSVNSLSNTIFLGELSLILNQGECSSPDIQNSVEEETTMLLENDSPSETIPEQTLLPDEFVSCLGIVNEELPSINTYFPQNILESHFNRISLLEK

SEQ ID NO: 29327 - protein, 374 aa, Homo sapiens
MILRPYQPCGTVKEFDTNFTYVQQSEFYLEPNIKYVFQVRCQETGKRYWQPWSSLFFHKTPETVPQVTSKAFQHDTWNSGLTVASISTGHLTSDNRGDIGLLLGMIVFAVMLSILSLIGIFNRSFRTGIKRRILLLIPKWLYEDIPNMKNSNVVKMLQENSELMNNNSSEQVLYVDPMITEIKEIFIPEHKPTDYKKENTGPLETRDYPQNSLFDNTTVVYIPDLNTGYKPQISNFLPEGSHLSNNNEITSLTLKPPVDSLDSGNNPRLQKHPNFAFSVSSVNSLSNTIFLGELSLILNQGECSSPDIQNSVEEETTMLLENDSPSETIPEQTLLPDEFVSCLGIVNEELPSINTYFPQNILESHFNRISLLEK

SEQ ID NO: 29328 - protein, 227 aa, Homo sapiens
MKNSNVVKMLQENSELMNNNSSEQVLYVDPMITEIKEIFIPEHKPTDYKKENTGPLETRDYPQNSLFDNTTVVYIPDLNTGYKPQISNFLPEGSHLSNNNEITSLTLKPPVDSLDSGNNPRLQKHPNFAFSVSSVNSLSNTIFLGELSLILNQGECSSPDIQNSVEEETTMLLENDSPSETIPEQTLLPDEFVSCLGIVNEELPSINTYFPQNILESHFNRISLLEK

SEQ ID NO: 29329 - protein, 338 aa, Homo sapiens
MNDFDECGQSAASMYLPGCAYYVAPSDFASKPSFLSQPSSCQMTFPYSSNLAPHVQPVREVAFRDYGLERAKWPYRGGGGGGSAGGGSSGGGPGGGGGGAGGYAPYYAAAAAAAAAAAAAEEAAMQRELLPPAGRRPDVLFKAPEPVCAAPGPPHGPAGAASNFYSAVGRNGILPQGFDQFYEAAPGPPFAGPQPPPPPAPPQPEGAADKGDPRTGAGGGGGSPCTKATPGSEPKGAAEGSGGDGEGPPGEAGAEKSSSAVAPQRSRKKRCPYTKYQIRELEREFFFNVYINKEKRLQLSRMLNLTDRQVKIWFQNRRMKEKKLNRDRLQYFTGNPLF

SEQ ID NO: 29330 - protein, 317 aa, Homo sapiens
MFQAAERPQEWAMEGPRDGLKKERLLDDRHDSGLDSMKDEEYEQMVKELQEIRLEPQEVPRGSEPWKQQLTEDGDSFLHLAIIHEEKALTMEVIRQVKGDLAFLNFQNNLQQTPLHLAVITNQPEIAEALLGAGCDPELRDFRGNTPLHLACEQGCLASVGVLTQSCTTPHLHSILKATNYNGHTCLHLASIHGYLGIVELLVSLGADVNAQEPCNGRTALHLAVDLQNPDLVSLLLKCGADVNRVTYQGYSPYQLTWGRPSTRIQQQLGQLTLENLQMLPESEDEESYDTESEFTEFTEDELPYDDCVFGGQRLTL

SEQ ID NO: 29331 - protein, 917 aa, Homo sapiens
MIAAQLLAYYFTELKDDQVKKIDKYLYAMRLSDETLIDIMTRFRKEMKNGLSRDFNPTATVKMLPTFVRSIPDGSEKGDFIALDLGGSSFRILRVQVNHEKNQNVHMESEVYDTPENIVHGSGSQLFDHVAECLGDFMEKRKIKDKKLPVGFTFSFPCQQSKIDEAILITWTKRFKASGVEGADVVKLLNKAIKKRGDYDANIVAVVNDTVGTMMTCGYDDQHCEVGLIIGTGTNACYMEELRHIDLVEGDEGRMCINTEWGAFGDDGSLEDIRTEFDREIDRGSLNPGKQLFEKMVSGMYLGELVRLILVKMAKEGLLFEGRITPELLTRGKFNTSDVSAIEKNKEGLHNAKEILTRLGVEPSDDDCVSVQHVCTIVSFRSANLVAATLGAILNRLRDNKGTPRLRTTVGVDGSLYKTHPQYSRRFHKTLRRLVPDSDVRFLLSESGSGKGAAMVTAVAYRLAEQHRQIEETLAHFHLTKDMLLEVKKRMRAEMELGLRKQTHNNAVVKMLPSFVRRTPDGTENGDFLALDLGGTNFRVLLVKIRSGKKRTVEMHNKIYAIPIEIMQGTGEELFDHIVSCISDFLDYMGIKGPRMPLGFTFSFPCQQTSLDAGILITWTKGFKATDCVGHDVVTLLRDAIKRREEFDLDVVAVVNDTVGTMMTCAYEEPTCEVGLIVGTGSNACYMEEMKNVEMVEGDQGQMCINMEWGAFGDNGCLDDIRTHYDRLVDEYSLNAGKQRYEKMISGMYLGEIVRNILIDFTKKGFLFRGQISETLKTRGIFETKFLSQIESDRLALLQVRAILQQLGLNSTCDDSILVKTVCGVVSRRAAQLCGAGMAAVVDKIRENRGLDRLNVTVGVDGTLYKLHPHFSRIMHQTVKELSPKCNVSFLLSEDGSGKGAALITAVGVRLRTEASS

SEQ ID NO: 29332 - protein, 916 aa, Homo sapiens
MDCEHSLSLPCRGAEAWEIGIDKYLYAMRLSDETLIDIMTRFRKEMKNGLSRDFNPTATVKMLPTFVRSIPDGSEKGDFIALDLGGSSFRILRVQVNHEKNQNVHMESEVYDTPENIVHGSGSQLFDHVAECLGDFMEKRKIKDKKLPVGFTFSFPCQQSKIDEAILITWTKRFKASGVEGADVVKLLNKAIKKRGDYDANIVAVVNDTVGTMMTCGYDDQHCEVGLIIGTGTNACYMEELRHIDLVEGDEGRMCINTEWGAFGDDGSLEDIRTEFDREIDRGSLNPGKQLFEKMVSGMYLGELVRLILVKMAKEGLLFEGRITPELLTRGKFNTSDVSAIEKNKEGLHNAKEILTRLGVEPSDDDCVSVQHVCTIVSFRSANLVAATLGAILNRLRDNKGTPRLRTTVGVDGSLYKTHPQYSRRFHKTLRRLVPDSDVRFLLSESGSGKGAAMVTAVAYRLAEQHRQIEETLAHFHLTKDMLLEVKKRMRAEMELGLRKQTHNNAVVKMLPSFVRRTPDGTENGDFLALDLGGTNFRVLLVKIRSGKKRTVEMHNKIYAIPIEIMQGTGEELFDHIVSCISDFLDYMGIKGPRMPLGFTFSFPCQQTSLDAGILITWTKGFKATDCVGHDVVTLLRDAIKRREEFDLDVVAVVNDTVGTMMTCAYEEPTCEVGLIVGTGSNACYMEEMKNVEMVEGDQGQMCINMEWGAFGDNGCLDDIRTHYDRLVDEYSLNAGKQRYEKMISGMYLGEIVRNILIDFTKKGFLFRGQISETLKTRGIFETKFLSQIESDRLALLQVRAILQQLGLNSTCDDSILVKTVCGVVSRRAAQLCGAGMAAVVDKIRENRGLDRLNVTVGVDGTLYKLHPHFSRIMHQTVKELSPKCNVSFLLSEDGSGKGAALITAVGVRLRTEASS

SEQ ID NO: 29333 - protein, 921 aa, Homo sapiens
MGQICQRESATAAEKPKLHLLAESEIDKYLYAMRLSDETLIDIMTRFRKEMKNGLSRDFNPTATVKMLPTFVRSIPDGSEKGDFIALDLGGSSFRILRVQVNHEKNQNVHMESEVYDTPENIVHGSGSQLFDHVAECLGDFMEKRKIKDKKLPVGFTFSFPCQQSKIDEAILITWTKRFKASGVEGADVVKLLNKAIKKRGDYDANIVAVVNDTVGTMMTCGYDDQHCEVGLIIGTGTNACYMEELRHIDLVEGDEGRMCINTEWGAFGDDGSLEDIRTEFDREIDRGSLNPGKQLFEKMVSGMYLGELVRLILVKMAKEGLLFEGRITPELLTRGKFNTSDVSAIEKNKEGLHNAKEILTRLGVEPSDDDCVSVQHVCTIVSFRSANLVAATLGAILNRLRDNKGTPRLRTTVGVDGSLYKTHPQYSRRFHKTLRRLVPDSDVRFLLSESGSGKGAAMVTAVAYRLAEQHRQIEETLAHFHLTKDMLLEVKKRMRAEMELGLRKQTHNNAVVKMLPSFVRRTPDGTENGDFLALDLGGTNFRVLLVKIRSGKKRTVEMHNKIYAIPIEIMQGTGEELFDHIVSCISDFLDYMGIKGPRMPLGFTFSFPCQQTSLDAGILITWTKGFKATDCVGHDVVTLLRDAIKRREEFDLDVVAVVNDTVGTMMTCAYEEPTCEVGLIVGTGSNACYMEEMKNVEMVEGDQGQMCINMEWGAFGDNGCLDDIRTHYDRLVDEYSLNAGKQRYEKMISGMYLGEIVRNILIDFTKKGFLFRGQISETLKTRGIFETKFLSQIESDRLALLQVRAILQQLGLNSTCDDSILVKTVCGVVSRRAAQLCGAGMAAVVDKIRENRGLDRLNVTVGVDGTLYKLHPHFSRIMHQTVKELSPKCNVSFLLSEDGSGKGAALITAVGVRLRTEASS

SEQ ID NO: 29334 - protein, 905 aa, Homo sapiens
MAKRALHDFIDKYLYAMRLSDETLIDIMTRFRKEMKNGLSRDFNPTATVKMLPTFVRSIPDGSEKGDFIALDLGGSSFRILRVQVNHEKNQNVHMESEVYDTPENIVHGSGSQLFDHVAECLGDFMEKRKIKDKKLPVGFTFSFPCQQSKIDEAILITWTKRFKASGVEGADVVKLLNKAIKKRGDYDANIVAVVNDTVGTMMTCGYDDQHCEVGLIIGTGTNACYMEELRHIDLVEGDEGRMCINTEWGAFGDDGSLEDIRTEFDREIDRGSLNPGKQLFEKMVSGMYLGELVRLILVKMAKEGLLFEGRITPELLTRGKFNTSDVSAIEKNKEGLHNAKEILTRLGVEPSDDDCVSVQHVCTIVSFRSANLVAATLGAILNRLRDNKGTPRLRTTVGVDGSLYKTHPQYSRRFHKTLRRLVPDSDVRFLLSESGSGKGAAMVTAVAYRLAEQHRQIEETLAHFHLTKDMLLEVKKRMRAEMELGLRKQTHNNAVVKMLPSFVRRTPDGTENGDFLALDLGGTNFRVLLVKIRSGKKRTVEMHNKIYAIPIEIMQGTGEELFDHIVSCISDFLDYMGIKGPRMPLGFTFSFPCQQTSLDAGILITWTKGFKATDCVGHDVVTLLRDAIKRREEFDLDVVAVVNDTVGTMMTCAYEEPTCEVGLIVGTGSNACYMEEMKNVEMVEGDQGQMCINMEWGAFGDNGCLDDIRTHYDRLVDEYSLNAGKQRYEKMISGMYLGEIVRNILIDFTKKGFLFRGQISETLKTRGIFETKFLSQIESDRLALLQVRAILQQLGLNSTCDDSILVKTVCGVVSRRAAQLCGAGMAAVVDKIRENRGLDRLNVTVGVDGTLYKLHPHFSRIMHQTVKELSPKCNVSFLLSEDGSGKGAALITAVGVRLRTEASS

SEQ ID NO: 29335 - protein, 626 aa, Homo sapiens
MSKKGRSKGEKPEMETDAVQMANEELRAKLTSIQIEFQQEKSKVGKLRERLQEAKLEREQEQRRHTAYISELKAKLHEEKTKELQALREGLIRQHEQEAARTAKIKEGELQRLQATLNVLRDGAADKVKTALLTEAREEARRAFDGERLRLQQEILELKAARKQAEEALSNCMQADKTKAADLRAAYQAHQDEVHRIKRECERDIRRLMDEIKGKDRVILALEKELGVQAGQTQKLLLQKEALDEQLVQVKEAERHHSSPKRELPPGIGDMVELMGVQDQHMDERDVRRFQLKIAELNSVIRKLEDRNTLLADERNELLKRSRETEVQLKPLVEKNKRMNKKNEDLLQSIQRMEEKIKNLTRENVEMKEKLSAQASLKRHTSLNDLSLTRDEQEIEFLRLQVLEQQHVIDDLSLERERLLRSKRHRGKSLKPPKKHVVETFFGFDEESVDSETLSETSYNTDRTDRTPATPEEDLDDATAREEADLRFCQLTREYQALQRAYALLQEQVGGTLDAEREARTREQLQADLLRCQAKIEDLEKLLVEKGQDSKWVEEKQLLIRTNQDLLEKIYRLEMEENQLKNEMQDAKDQNELLEFRVLELEVRDSICCKLSNGADILFEPKLKFM

SEQ ID NO: 29336 - protein, 831 aa, Homo sapiens
MSKKGRSKGEKPEMETDAVQMANEELRAKLTSIQIEFQQEKSKVGKLRERLQEAKLEREQEQRRHTAYISELKAKLHEEKTKELQALREGLIRQHEQEAARTAKIKEGELQRLQATLNVLRDGAADKVKTALLTEAREEARRAFDGERLRLQQEILELKAARKQAEEALSNCMQADKTKAADLRAAYQAHQDEVHRIKRECERDIRRLMDEIKGKDRVILALEKELGVQAGQTQKLLLQKEALDEQLVQVKEAERHHSSPKRELPPGIGDMVELMGVQDQHMDERDVRRFQLKIAELNSVIRKLEDRNTLLADERNELLKRSRETEVQLKPLVEKNKRMNKKNEDLLQSIQRMEEKIKNLTRENVEMKEKLSAQASLKRHTSLNDLSLTRDEQEIEFLRLQVLEQQHVIDDLSLERERLLRSKRHRGKSLKPPKKHVVETFFGFDEESVDSETLSETSYNTDRTDRTPATPEEDLDDATAREEADLRFCQLTREYQALQRAYALLQEQVGGTLDAEREARTREQLQADLLRCQAKIEDLEKLLVEKGQDSKWVEEKQLLIRTNQDLLEKIYRLEMEENQLKNEMQDAKDQNELLEFRVLELEERERRSPAFNLQITTFPENHSSALQLFCHQEGVKDVNVSELMKKLDILGDNGNLRNEEQVAIIQAGTVLALCEKWLKQIEGTEAALTQKMLDLEKEKDLFSRQKGYLEEELDYRKQALDQAYLKIQDLEATLYTALQQEPGRRAGEALSEGQREDLQAAVEKVRRQILRQSREFDSQILRERMELLQQAQQRIRELEDKLEFQKRHLKELEEKFLFLFLFFSLAFILWP

SEQ ID NO: 29337 - protein, 431 aa, Homo sapiens
MSKKGRSKGEKPEMETDAVQMANEELRAKLTSIQIEFQQEKSKVGKLRERLQEAKLEREQEQRRHTAYISELKAKLHEEKTKELQALREGLIRQHEQEAARTAKIKEGELQRLQATLNVLRDGAADKVKTALLTEAREEARRAFDGERLRLQQEILELKAARKQAEEALSNCMQADKTKAADLRAAYQAHQDEVHRIKRECERDIRRLMDEIKGKDRVILALEKELGVQAGQTQKLLLQKEALDEQLVQVKEAERHHSSPKRELPPGIGDMVELMGVQDQHMDERDVRRFQLKIAELNSVIRKLEDRNTLLADERNELLKRSRETEVQLKPLVEKNKRMNKKNEDLLQSIQRMEEKIKNLTRENVEMKEKLSAHGAAAAGPAENPRTGGQTGVSEAAPERTGGKVFVPFFVFLTSIHSVALMTSVSQELGL

SEQ ID NO: 29338 - protein, 569 aa, Homo sapiens
MSKKGRSKGEKPEMETDAVQMANEELRAKLTSIQIEFQQEKSKVGKLRERLQEAKLEREQEQRRHTAYISELKAKLHEEKTKELQALREGLIRQHEQEAARTAKIKEGELQRLQATLNVLRDGAADKVKTALLTEAREEARRAFDGERLRLQQEILELKAARKQAEEALSNCMQADKTKAADLRAAYQAHQDEVHRIKRECERDIRRLMDEIKGKDRVILALEKELGVQAGQTQKLLLQKEALDEQLVQVKEAERHHSSPKRELPPGIGDMVELMGVQDQHMDERDVRRFQLKIAELNSVIRKLEDRNTLLADERNELLKRSRETEVQLKPLVEKNKRMNKKNEDLLQSIQRMEEKIKNLTRENVEMKEKLSAQASLKRHTSLNDLSLTRDEQEIEFLRLQVLEQQHVIDDLSLERERLLRSKRHRGKSLKPPKKHVVETFFGFDEESVDSETLSETSYNTDRTDRTPATPEEDLDDATAREEADLRFCQLTREDLQAAVEKVRRQILRQSREFDSQILRERMELLQQAQQRIRELEDKLEFQKRHLKELEEKFLFLFLFFSLAFILWP

SEQ ID NO: 29339 - protein, 646 aa, Homo sapiens
MSKKGRSKGEKPEMETDAVQMANEELRAKLTSIQIEFQQEKSKMDEIKGKDRVILALEKELGVQAGQTQKLLLQKEALDEQLVQVKEAERHHSSPKRELPPGIGDMVELMGVQDQHMDERDVRRFQLKIAELNSVIRKLEDRNTLLADERNELLKRSRETEVQLKPLVEKNKRMNKKNEDLLQSIQRMEEKIKNLTRENVEMKEKLSAQASLKRHTSLNDLSLTRDEQEIEFLRLQVLEQQHVIDDLSLKHVVETFFGFDEESVDSETLSETSYNTDRTDRTPATPEEDLDDATAREEADLRFCQLTREYQALQRAYALLQEQVGGTLDAEREARTREQLQADLLRCQAKIEDLEKLLVEKGQDSKWVEEKQLLIRTNQDLLEKIYRLEMEENQLKNEMQDAKDQNELLEFRVLELEERERRSPAFNLQITTFPENHSSALQLFCHQEGVKDVNVSELMKKLDILGDNGNLRNEEQVAIIQAGTVLALCEKWLKQIEGTEAALTQKMLDLEKEKDLFSRQKGYLEEELDYRKQALDQAYLKIQDLEATLYTALQQEPGRRAGEALSEGQREDLQAAVEKVRRQILRQSREFDSQILRERMELLQQAQQRIRELEDKLEFQKRHLKELEEKFLFLFLFFSLAFILWP

SEQ ID NO: 29340 - protein, 391 aa, Homo sapiens
MDEIKGKDRVILALEKELGVQAGQTQKLLLQKEALDEQLVQVKEAERHHSSPKRELPPGIGDMVELMGVQDQHMDERDVRRFQLKIAELNSVIRKLEDRNTLLADERNELLKRSRETEVQLKPLVEKNKRMNKKNEDLLQSIQRMEEKIKNLTRENVEMKEKLSAQASLKRHTSLNDLSLTRDEQEIEFLRLQVLEQQHVIDDLSLERERLLRSKRHRGKSLKPPKKHVVETFFGFDEESVDSETLSETSYNTDRTDRTPATPEEDLDDATAREEADLRFCQLTRTREQLQADLLRCQAKIEDLEKLLVEKGQDSKWVEEKQLLIRTNQDLLEKIYRLEMEENQLKNEMQDAKDQNELLEFRVLELEVRDSICCKLSNGADILFEPKLKFM

SEQ ID NO: 29341 - protein, 461 aa, Homo sapiens
MSKKGRSKGEKPEMETDAVQMANEELRAKLTSIQIEFQQEKSKMDEIKGKDRVILALEKELGVQAGQTQKLLLQKEALDEQLVQVKEAERHHSSPKRELPPGIGDMVELMGVQDQHMDERDVRRFQLKIAELNSVIRKLEDRNTLLADERNELLKRSRETEVQLKPLVEKNKRMNKKNEDLLQSIQRMEEKIKNLTRENVEMKEKLSAQASLKRHTSLNDLSLTRDEQEIEFLRLQVLEQQHVIDDLSLERERLLRSKRHRGKSLKPPKKHVVETFFGFDEESVDSETLSETSYNTDRTDRTPATPEEDLDDATAREEADLRFCQLTREYQALQRAYALLQEQVGGTLDAEREARTREQLQADLLRCQAKIEDLEKLLVEKGQDSKWVEEKQLLIRTNQDLLEKIYRLEMEENQLKNEMQDAKDQNELLEFRVLELEVRDSICCKLSNGADILFEPKLKFM

SEQ ID NO: 29342 - protein, 313 aa, Homo sapiens
MEAGPWRVSAPPSGPPQFPAVVPGPSLEVARAHMLALGPQQLLAQDEEGDTLLHLFAARGLRWAAYAAAEVLQVYRRLDIREHKGKTPLLVAAAANQPLIVEDLLNLGAEPNAADHQGRSVLHVAATYGLPGVLLAVLNSGVQVDLEARDFEGLTPLHTAILALNVAMRPSDLCPRVLSTQARDRLDCVHMLLQMGANHTSQEIKSNKTVLHLAVQAANPTLVQLLLELPRGDLRTFVNMKAHGNTALHMAAALPPGPAQEAIVRHLLAAGADPTLRNLENEQPVHLLRPGPGPEGLRQLLKRSRVAPPGLSS

SEQ ID NO: 29343 - protein, 465 aa, Homo sapiens
MWVCLRGILDSQAFWHETLRRWECLLAEMKVSRGERSHCPTQTVKKLLEEQRRRQQQQPDAGGVQGQFLPPPEQPLTPSVNEAVTGHPPFPAHSETVGSGPSSLGFPDWDPNTHAAYTDSPYSCPASAAENFLPPDFYPPSDPGQPCPFPQGMEAGPWRVSAPPSGPPQFPAVVPGPSLEVARAHMLALGPQQLLAQDEEGDTLLHLFAARGLRWAAYAAAEVLQVYRRLDIREHKGKTPLLVAAAANQPLIVEDLLNLGAEPNAADHQGRSVLHVAATYGLPGVLLAVLNSGVQVDLEARDFEGLTPLHTAILALNVAMRPSDLCPRVLSTQARDRLDCVHMLLQMGANHTSQEIKSNKTVLHLAVQAANPTLVQLLLELPRGDLRTFVNMKAHGNTALHMAAALPPGPAQEAIVRHLLAAGADPTLRNLENEQPVHLLRPGPGPEGLRQLLKRSRVAPPGLSS

SEQ ID NO: 29344 - protein, 150 aa, Homo sapiens
MRSCCVVQAGLQLLASSDPPSSASQSARITGVNHRTPPREIKSNKTVLHLAVQAANPTLVQLLLELPRGDLRTFVNMKAHGNTALHMAAALPPGPAQEAIVRHLLAAGADPTLRNLENEQPVHLLRPGPGPEGLRQLLKRSRVAPPGLSS

SEQ ID NO: 29345 - protein, 566 aa, Homo sapiens
MPRGFLVKRTKRTGGLYRVRLAERVFPLLGPQGAPPFLEEAPSASLPGAERATPPTREEPGKGLTAEAAREQSGSPCRAAGVSPGTGGREGAEWRAGGREGPGPSPSPSPSPAKPAGAELRRAFLERCLSSPVSAESFPGGAAAVAAFSCSVAPAAAPTPGEQFLLPLRAPFPEPALQPDPAPLSAALQSLKRAAGGERRGKAPTDCASGPAAAGIKKPKAMRKLSFADEVTTSPVLGLKIKEEEPGAPSRGLGGSRTPLGEFICQLCKEQYADPFALAQHRCSRIVRVEYRCPECDKVFSCPANLASHRRWHKPRPAAANAATVSSADGKPPSSSSSSSRDSGAIASFLAEGKENSRIERTADQHPQARDSSGADQHPDSAPRQGLQVLTHPEPPLPQGPYTEGVLGRRVPVPGSTSGGRGSEIFVCPYCHKKFRRQAYLRKHLSTHEAGSARALAPGFGSERGAPLAFACPLCGAHFPTADIREKHRLWHAVREELLLPALAGAPPETSGPSGPSDGSAQQIFSCKHCPSTFFSSPGLTRHINKCHPSESRQVLLLQMPLRPGC

SEQ ID NO: 29346 - protein, 419 aa, Homo sapiens
MLAARTGAAGSQISEENTKLRRQSGFSVAGKDKSPKKASENAKDSSLSPSGESQLRARQLALLREVEMNWYLKLCDLSSEHTTVCTTGMPHRNLGKSGLRVSCLGLGTWVTFGGQISDEVAERLMTIAYESGVNLFDTAEVYAAGKAEVILGSIIKKKGWRRSSLVITTKLYWGGKAETERGLSRKHIIEGLKGSLQRLQLEYVDVVFANRPDSNTPMEEIVRAMTHVINQGMAMYWGTSRWSAMEIMEAYSVARQFNMIPPVCEQAEYHLFQREKVEVQLPELYHKIGVGAMTWSPLACGIISGKYGNGVPESSRASLKCYQWLKERIVSEEGRKQQNKLKDLSPIAERLGCTLPQLAVAWCLRNEGVSSVLLGSSTPEQLIENLGAIQVLPKMTSHVVNEIDNILRNKPYSKKDYRS

SEQ ID NO: 29347 - protein, 401 aa, Homo sapiens
MQVSIACTEHNLKSRNGEDRLLSKQSSTAPNVVNAARAKFRTVAIIARSLGTFTPQHHISLKESTAKQTGMKYRNLGKSGLRVSCLGLGTWVTFGGQISDEVAERLMTIAYESGVNLFDTAEVYAAGKAEVILGSIIKKKGWRRSSLVITTKLYWGGKAETERGLSRKHIIEGLKGSLQRLQLEYVDVVFANRPDSNTPMEEIVRAMTHVINQGMAMYWGTSRWSAMEIMEAYSVARQFNMIPPVCEQAEYHLFQREKVEVQLPELYHKIGVGAMTWSPLACGIISGKYGNGVPESSRASLKCYQWLKERIVSEEGRKQQNKLKDLSPIAERLGCTLPQLAVAWCLRNEGVSSVLLGSSTPEQLIENLGAIQVLPKMTSHVVNEIDNILRNKPYSKKDYRS

SEQ ID NO: 29348 - protein, 408 aa, Homo sapiens
MHLYKPACADIPSPKLGLPKSSESALKCRWHLAVTKTQPQAACKPVRPSGAAEQKYVEKFLRVHGISLQETTRAETGMAYRNLGKSGLRVSCLGLGTWVTFGGQISDEVAERLMTIAYESGVNLFDTAEVYAAGKAEVILGSIIKKKGWRRSSLVITTKLYWGGKAETERGLSRKHIIEGLKGSLQRLQLEYVDVVFANRPDSNTPMEEIVRAMTHVINQGMAMYWGTSRWSAMEIMEAYSVARQFNMIPPVCEQAEYHLFQREKVEVQLPELYHKIGVGAMTWSPLACGIISGKYGNGVPESSRASLKCYQWLKERIVSEEGRKQQNKLKDLSPIAERLGCTLPQLAVAWCLRNEGVSSVLLGSSTPEQLIENLGAIQVLPKMTSHVVNEIDNILRNKPYSKKDYRS

SEQ ID NO: 29349 - protein, 989 aa, Homo sapiens
MTMAGGRRGLVAPQNTFLENIVRRSNDTNFVLGNAQIVDWPIVYSNDGFCKLSGYHRAEVMQKSSTCSFMYGELTDKDTIEKVRQTFENYEMNSFEILMYKKNRTPVWFFVKIAPIRNEQDKVVLFLCTFSDITAFKQPIEDDSCKGWGKFARLTRALTSSRGVLQQLAPSVQKGENVHKHSRLAEVLQLGSDILPQYKQEAPKTPPHIILHYCVFKTTWDWIILILTFYTAILVPYNVSFKTRQNNVAWLVVDSIVDVIFLVDIVLNFHTTFVGPAGEVISDPKLIRMNYLKTWFVIDLLSCLPYDVINAFENVDEVSAFMGDPGKIGFADQIPPPLEGRESQGISSLFSSLKVVRLLRLGRVARKLDHYIEYGAAVLVLLVCVFGLAAHWMACIWYSIGDYEIFDEDTKTIRNNSWLYQLAMDIGTPYQFNGSGSGKWEGGPSKNSVYISSLYFTMTSLTSVGFGNIAPSTDIEKIFAVAIMMIGSLLYATIFGNVTTIFQQMYANTNRYHEMLNSVRDFLKLYQVPKGLSERVMDYIVSTWSMSRGIDTEKVLQICPKDMRADICVHLNRKVFKEHPAFRLASDGCLRALAMEFQTVHCAPGDLIYHAGESVDSLCFVVSGSLEVIQDDEVVAILGKGDVFGDVFWKEATLAQSCANVRALTYCDLHVIKRDALQKVLEFYTAFSHSFSRNLILTYNLRKRIVFRKISDVKREEEERMKRKNEAPLILPPDHPVRRLFQRFRQQKEARLAAERGGRDLDDLDVEKGNVLTEHASANHSLVKASVVTVRESPATPVSFQAASTSGVPDHAKLQAPGSECLGPKGGGGDCAKRKSWARFKDACGKSEDWNKVSKAESMETLPERTKASGEATLKKTDSCDSGITKSDLRLDNVGEARSPQDRSPILAEVKHSFYPIPEQTLQATVLEVRHELKEDIKALNAKMTNIEKQLSEILRILTSRRSSQSPQELFEISRPQSPESERDIFGAS

SEQ ID NO: 29350 - protein, 962 aa, Homo sapiens
MTMAGGRRGLVAPQNTFLENIVRRSNDTNFVLGNAQIVDWPIVYSNDGFCKLSGYHRAEVMQKSSTCSFMYGELTDKDTIEKVRQTFENYEMNSFEILMYKKNRTPVWFFVKIAPIRNEQDKVVLFLCTFSDITAFKQPIEDDSCKGWGKFARLTRALTSSRGVLQQLAPSVQKGENVHKHSRLAEVLQLGSDILPQYKQEAPKTPPHIILHYCVFKTTWDWIILILTFYTAILVPYNVSFKTRQNNVAWLVVDSIVDVIFLVDIVLNFHTTFVGPAGEVISDPKLIRMNYLKTWFVIDLLSCLPYDVINAFENVDEGISSLFSSLKVVRLLRLGRVARKLDHYIEYGAAVLVLLVCVFGLAAHWMACIWYSIGDYEIFDEDTKTIRNNSWLYQLAMDIGTPYQFNGSGSGKWEGGPSKNSVYISSLYFTMTSLTSVGFGNIAPSTDIEKIFAVAIMMIGSLLYATIFGNVTTIFQQMYANTNRYHEMLNSVRDFLKLYQVPKGLSERVMDYIVSTWSMSRGIDTEKVLQICPKDMRADICVHLNRKVFKEHPAFRLASDGCLRALAMEFQTVHCAPGDLIYHAGESVDSLCFVVSGSLEVIQDDEVVAILGKGDVFGDVFWKEATLAQSCANVRALTYCDLHVIKRDALQKVLEFYTAFSHSFSRNLILTYNLRKRIVFRKISDVKREEEERMKRKNEAPLILPPDHPVRRLFQRFRQQKEARLAAERGGRDLDDLDVEKGNVLTEHASANHSLVKASVVTVRESPATPVSFQAASTSGVPDHAKLQAPGSECLGPKGGGGDCAKRKSWARFKDACGKSEDWNKVSKAESMETLPERTKASGEATLKKTDSCDSGITKSDLRLDNVGEARSPQDRSPILAEVKHSFYPIPEQTLQATVLEVRHELKEDIKALNAKMTNIEKQLSEILRILTSRRSSQSPQELFEISRPQSPESERDIFGAS

SEQ ID NO: 29351 - protein, 578 aa, Homo sapiens
MVRNVDDLDFHLPSHAQDMLDGLQRLRSQPKLADVTLLVGGRELPCHRGLLALSSPYFHAMFAGDFAESFSARVELRDVEPAVVGQLVDFVYTGRLTITQGNVEALTRTAARLHFPSVQKVCGRYLQQQLDAANCLGICEFGEQQGLLGVAAKAWAFLRENFEAVAREDEFLQLPRERLVTCLAGDLLQVQPEQSRLEALMRWVRHDPQARAAHLPELLSLVHLDAVPRPCVQQLLASEPLIQESEACRAALSQGHDGAPLALQQKLEEVLVVVGGQALEEEEAGEEPTPGLGNFAFYNSKAKRWMALPDFPDYHKWGFSLAALNNNIYVTGGSRGTKTDTWSTTQAWCFPLKEASWKPVAPMLKPRTNHASAALNGEIYVIGGTTLDVVEVESYDPYTDSWTPVSPALKYVSNFSAAGCRGRLYLVGSSACKYNALALQCYNPVTDAWSVIASPFLPKYLSSPRCAALHGELYLIGDNTKKVYVYDPGANLWQKVQSQHSLHENGALVPLGDALYVTGGRWQGMEGDYHVEMEAYDTVRDTWTRHGALPRLWLYHGASTVFLDVSKWTQPSGPTQEH

SEQ ID NO: 29352 - protein, 606 aa, Homo sapiens
MDSQRELAEELRLYQSTLLQDGLKDLLDEKKFIDCTLKAGDKSLPCHRLILSACSPYFREYFLSEIDEAKKKEVVLDNVDPAILDLIIKYLYSASIDLNDGNVQDIFALASRFQIPSVFTVCVSYLQKRLAPGNCLAILRLGLLLDCPRLAISAREFVSDRFVQICKEEDFMQLSPQELISVISNDSLNVEKEEAVFEAVMKWVRTDKENRVKNLSEVFDCIRFRLMTEKYFKDHVEKDDIIKSNPDLQKKIKVLKDAFAGKLPEPSKNAAKTGAGEVNGDVGDEDLLPGYLNDIPRHGMFVKDLILLVNDTAAVAYDPTENECYLTALAEQIPRNHSSIVTQQNQIYVVGGLYVDEENKDQPLQSYFFQLDSIASEWVGLPPLPSARCLFGLGEVDDKIYVVAGKDLQTEASLDSVLCYDPVAAKWNEVKKLPIKVYGHNVISHKGMIYCLGGKTDDKKCTNRVFIFNPKKGDWKDLAPMKIPRSMFGVAVHKGKIVIAGGVTEDGLSASVEAFDLTTNKWDVMTEFPQERSSISLVSLAGSLYAIGGFAMIQLESKEFAPTEVNDIWKYEDDKKEWAGMLKEIRYASGASCLATRLNLFKLSKL

SEQ ID NO: 29353 - protein, 596 aa, Homo sapiens
MRLYQSTLLQDGLKDLLDEKKFIDCTLKAGDKSLPCHRLILSACSPYFREYFLSEIDEAKKKEVVLDNVDPAILDLIIKYLYSASIDLNDGNVQDIFALASRFQIPSVFTVCVSYLQKRLAPGNCLAILRLGLLLDCPRLAISAREFVSDRFVQICKEEDFMQLSPQELISVISNDSLNVEKEEAVFEAVMKWVRTDKENRVKNLSEVFDCIRFRLMTEKYFKDHVEKDDIIKSNPDLQKKIKVLKDAFAGKLPEPSKNAAKTGAGEVNGDVGDEDLLPGYLNDIPRHGMFVKDLILLVNDTAAVAYDPTENECYLTALAEQIPRNHSSIVTQQNQIYVVGGLYVDEENKDQPLQSYFFQLDSIASEWVGLPPLPSARCLFGLGEVDDKIYVVAGKDLQTEASLDSVLCYDPVAAKWNEVKKLPIKVYGHNVISHKGMIYCLGGKTDDKKCTNRVFIFNPKKGDWKDLAPMKIPRSMFGVAVHKGKIVIAGGVTEDGLSASVEAFDLTTNKWDVMTEFPQERSSISLVSLAGSLYAIGGFAMIQLESKEFAPTEVNDIWKYEDDKKEWAGMLKEIRYASGASCLATRLNLFKLSKL

SEQ ID NO: 29354 - protein, 589 aa, Homo sapiens
MSVSVHETRKSRSSTGSMNVTLFHKASHPDCVLAHLNTLRKHCMFTDVTLWAGDRAFPCHRAVLAASSRYFEAMFSHGLRESRDDTVNFQDNLHPEVLELLLDFAYSSRIAINEENAESLLEAGDMLQFHDVRDAAAEFLEKNLFPSNCLGMMLLSDAHQCRRLYEFSWRMCLVHFETVRQSEDFNSLSKDTLLDLISSDELETEDERVVFEAILQWVKHDLEPRKVHLPELLRSVRLALLPSDCLQEAVSSEALLMADERTKLIMDEALRCKTRILQNDGVVTSPCARPRKAGHTLLILGGQTFMCDKIYQVDHKAKEIIPKADLPSPRKEFSASAIGCKVYVTGGRGSENGVSKDVWVYDTVHEEWSKAAPMLIARFGHGSAELENCLYVVGGHTSLAGVFPASPSVSLKQVEKYDPGANKWMMVAPLRDGVSNAAVVSAKLKLFVFGGTSIHRDMVSKVQCYDPSENRWTIKAECPQPWRYTAAAVLGSQIFIMGGDTEFTAASAYRFDCETNQWTRIGDMTAKRMSCHALASGNKLYVVGGYFGTQRCKTLDCYDPTSDTWNCITTVPYSLIPTAFVSTWKHLPA

SEQ ID NO: 29355 - protein, 583 aa, Homo sapiens
MRQGHAPEESEPGCEAPCAGPCHAQRVLQALNAYRRSGTLTDVVLRAGGRDFPCHRAALSAGSAYFRSLFAAGRPERGPAVVPVVPVAPEAPGTSPAGAAAALAVVLDYVYGAGVRLRAEDEAAAVLALAERLGVAGLREACVRFLEGRLRAANSLALRRVAAAFSLAPLAERCGRVLRQAFAEVARHADFLELAPDEVVALLADPALGVAREEAVFEAAMRWVRHDAPARRGQLRRLLEHVRLPLLAPAYFLEKVEADELLQACGECRPLLLEARACFILGREAGALRTRPRRFMDLAEVIVVIGGCDRKGLLKLPFADAYHPESQRWTPLPSLPGYTRSEFAACALRNDVYVSGGHINSHDVWMFSSHLHTWIKVASLHKGRWRHKMAVVQGQLFAVGGFDGLRRLHSVERYDPFSNTWAAAAPLPEAVSSAAVASCAGKLFVIGGARQGGVNTDKVQCFDPKEDRWSLRSPAPFSQRCLEAVSLEDTIYVMGGLMSKIFTYDPGTDVWGEAAVLPSPVESCGVTVCDGKVHILGGRDDRGESTDKVFTFDPSSGQVEVQPSLQRCTSSHGCVTIIQSLGR

SEQ ID NO: 29356 - protein, 427 aa, Homo sapiens
MRQGHAPEESEPGCEAPCAGPCHAQRVLQALNAYRRSGTLTDVVLRAGGRDFPCHRAALSAGSAYFRSLFAAGRPERGPAVVPVVPVAPEAPGTSPAGAAAALAVVLDYVYGAGVRLRAEDEAAAVLALAERLGVAGLREACVRFLEGRLRAANSLALRRVAAAFSLAPLAERCGRVLRQAFAEVARHADFLELAPDEVVALLADPALGVAREEAVFEAAMRWVRHDAPARRGQLRRLLEHVRLPLLAPAYFLEKVEADELLQACGECRPLLLEARACFILGREAGALRTRPRRHWAYPHARFMDLAEVIVVIGGCDRKGLLKLPFADAYHPESQRWTPLPSLPGYTRSEFAACALRNDVYVSGGHINSHDVWMFSSHLHTWIKVASLHKGRWRHKMAVVQGQVGTSCSGCPGTQGTDLWMCWREVL

SEQ ID NO: 29357 - protein, 253 aa, Homo sapiens
MARSLLLPLQILLLSLALETAGEEAQGDKIIDGAPCARGSHPWQVALLSGNQLHCGGVLVNERWVLTAAHCKMNEYTVHLGSDTLGDRRAQRIKASKSFRHPGYSTQTHVNDLMLVKLNSQARLSSMVKKVRLPSRCEPPGTTCTVSGWGTTTSPDVTFPSDLMCVDVKLISPQDCTKVYKDLLENSMLCAGIPDSKKNACNGDSGGPLVCRGTLQGLVSWGTFPCGQPNDPGVYTQVCKFTKWINDTMKKHR

SEQ ID NO: 29358 - protein, 181 aa, Homo sapiens
MNEYTVHLGSDTLGDRRAQRIKASKSFRHPGYSTQTHVNDLMLVKLNSQARLSSMVKKVRLPSRCEPPGTTCTVSGWGTTTSPDVTFPSDLMCVDVKLISPQDCTKVYKDLLENSMLCAGIPDSKKNACNGDSGGPLVCRGTLQGLVSWGTFPCGQPNDPGVYTQVCKFTKWINDTMKKHR

SEQ ID NO: 29359 - protein, 466 aa, Homo sapiens
MEPWPCSPGGGGGTRARHVIINVGGCRVRLAWAALARCPLARLERLRACRGHDDLLRVCDDYDVSRDEFFFDRSPCAFRAIVALLRAGKLRLLRGPCALAFRDELAYWGIDEARLERCCLRRLRRREEEAAEARAGPTERGAQGSPARALGPRGRLQRGRRRLRDVVDNPHSGLAGKLFACVSVSFVAVTAVGLCLSTMPDIRAEEERGECSPKCRSLFVLETVCVAWFSFEFLLRSLQAESKCAFLRAPLNIIDILALLPFYVSLLLGLAAGPGGTKLLERAGLVLRLLRALRVLYVMRLARHSLGLRSLGLTMRRCAREFGLLLLFLCVAMALFAPLVHLAERELGARRDFSSVPASYWWAVISMTTVGYGDMVPRSLPGQVVALSSILSGILLMAFPVTSIFHTFSRSYSELKEQQQRAASPEPALQEDSTHSATATEDSSQGPDSAGLADDSADALWVRAGR

SEQ ID NO: 29360 - protein, 419 aa, Homo sapiens
MAGDSRNAMNQDMEIGVTPWDPKKIPKQARDYVPIATDRTRLLAEGKKPRQRYMEKSGKCNVHHGNVQETYRYLSDLFTTLVDLKWRFNLLVFTMVYTVTWLFFGFIWWLIAYIRGDLDHVGDQEWIPCVENLSGFVSAFLFSIETETTIGYGFRVITEKCPEGIILLLVQAILGSIVNAFMVGCMFVKISQPKKRAETLMFSNNAVISMRDEKLCLMFRVGDLRNSHIVEASIRAKLIKSRQTKEGEFIPLNQTDINVGFDTGDDRLFLVSPLIISHEINQKSPFWEMSQAQLHQEEFEVVVILEGMVEATGMTCQARSSYMDTEVLWGHRFTPVLTLEKGFYEVDYNTFHDTYETNTPSCCAKELAEMKREGRLLQYLPSPPLLGGCAEAGLDAEAEQNEEDEPKGLGGSREARGSV

SEQ ID NO: 29361 - protein, 393 aa, Homo sapiens
MAQENAAFSPGQEEPPRRRGRQRYVEKDGRCNVQQGNVRETYRYLTDLFTTLVDLQWRLSLLFFVLAYALTWLFFGAIWWLIAYGRGDLEHLEDTAWTPCVNNLNGFVAAFLFSIETETTIGYGHRVITDQCPEGIVLLLLQAILGSMVNAFMVGCMFVKISQPNKRAATLVFSSHAVVSLRDGRLCLMFRVGDLRSSHIVEASIRAKLIRSRQTLEGEFIPLHQTDLSVGFDTGDDRLFLVSPLVISHEIDAASPFWEASRRALERDDFEIVVILEGMVEATGMTCQARSSYLVDEVLWGHRFTSVLTLEDGFYEVDYASFHETFEVPTPSCSARELAEAAARLDAHLYWSIPSRLDEKVEEEGAGEGAGGEAGADKEQNGCLPPPESESKV

SEQ ID NO: 29362 - protein, 370 aa, Homo sapiens
MLGAVEGPRWKQAEDIRDIYDFRDVLGTGAFSEVILAEDKRTQKLVAIKCIAKEALEGKEGSMENEIAVLHKIKHPNIVALDDIYESGGHLYLIMQLVSGGELFDRIVEKGFYTERDASRLIFQVLDAVKYLHDLGIVHRDLKPENLLYYSLDEDSKIMISDFGLSKMEDPGSVLSTACGTPGYVAPEVLAQKPYSKAVDCWSIGVIAYILLCGYPPFYDENDAKLFEQILKAEYEFDSPYWDDISDSAKDFIRHLMEKDPEKRFTCEQALQHPWIAGDTALDKNIHQSVSEQIKKNFAKSKWKQAFNATAVVRHMRKLQLGTSQEGQGQTASHGELLTPVAGGPAAGCCCRDCCVEPGTELSPTLPHQL

SEQ ID NO: 29363 - protein, 317 aa, Homo sapiens
MTSRTRVTWPSPPRPLPVPAAAAVAFGAKGTDPAEARSSRGIEEAGPRAHGRAGREPERRRSRQQRRGGLQARRSTLLKTCARARATAPGAMKMVAPWTRFYSNSCCLCCHVRTGTILLGVWYLIINAVVLLILLSALADPDQYNFSSSELGGDFEFMDDANMCIAIAISLLMILICAMATYGAYKQRAAWIIPFFCYQIFDFALNMLVAITVLIYPNSIQEYIRQLPPNFPYRDDVMSVNPTCLVLIILLFISIILTFKGYLISCVWNCYRYINGRNSSDVLVYVTSNDTTVLLPPYDDATVNGAAKEPPPPYVSA

SEQ ID NO: 29364 - protein, 226 aa, Homo sapiens
MKMVAPWTRFYSNSCCLCCHVRTGTILLGVWYLIINAVVLLILLSALADPDQYNFSSSELGGDFEFMDDANMCIAIAISLLMILICAMATYGAYKQRAAWIIPFFCYQIFDFALNMLVAITVLIYPNSIQEYIRQLPPNFPYRDDVMSVNPTCLVLIILLFISIILTFKGYLISCVWNCYRYINGRNSSDVLVYVTSNDTTVLLPPYDDATVNGAAKEPPPPYVSA

SEQ ID NO: 29365 - protein, 394 aa, Homo sapiens
MKRQNVRTLALIVCTFTYLLVGAAVFDALESEPELIERQRLELRQQELRARYNLSQGGYEELERVVLRLKPHKAGVQWRFAGSFYFAITVITTIGYGHAAPSTDGGKVFCMFYALLGIPLTLVMFQSLGERINTLVRYLLHRAKKGLGMRRADVSMANMVLIGFFSCISTLCIGAAAFSHYEHWTFFQAYYYCFITLTTIGFGDYVALQKDQALQTQPQYVAFSFVYILTGLTVIGAFLNLVVLRFMTMNAEDEKRDAEHRALLTRNGQAGGGGGGGSAHTTDTASSTAAAGGGGFRNVYAEVLHFQSMCSCLWYKSREKLQYSIPMIIPRDLSTSDTCVEQSHSSPGGGGRYSDTPSRRCLCSGAPRSAISSVSTGLHSLSTFRGLMKRRSSV

SEQ ID NO: 29366 - protein, 510 aa, Homo sapiens
MYTSHEDIGYDFEDGPKDKKTLKPHPNIDGGWAWMMVLSSFFVHILIMGSQMALGVLNVEWLEEFHQSRGLTAWVSSLSMGITLIVGPFIGLFINTCGCRQTAIIGGLVNSLGWVLSAYAANVHYLFITFGVAAGLGSGMAYLPAVVMVGRYFQKRRALAQGLSTTGTGFGTFLMTVLLKYLCAEYGWRNAMLIQGAVSLNLCVCGALMRPLSPGKNPNDPGEKDVRGLPAHSTESVKSTGQQGRTEEKDGGLGNEETLCDLQAQECPDQAGHRKNMCALRILKTVSWLTMRVRKGFEDWYSGYFGTASLFTNRMFVAFIFWALFAYSSFVIPFIHLPEIVNLYNLSEQNDVFPLTSIIAIVHIFGKVILGVIADLPCISVWNVFLLANFTLVLSIFILPLMHTYAGLAVICALIGFSSGYFSLMPVVTEDLVGIEHLANAYGIIICANGISALLGPPFAGWIYDITQKYDFSFYICGLLYMIGILFLLIQPCIRIIEQSRRKYMDGAHV

SEQ ID NO: 29367 - protein, 336 aa, Homo sapiens
MTVLLKYLCAEYGWRNAMLIQGAVSLNLCVCGALMRPLSPGKNPNDPGEKDVRGLPAHSTESVKSTGQQGRTEEKDGGLGNEETLCDLQAQECPDQAGHRKNMCALRILKTVSWLTMRVRKGFEDWYSGYFGTASLFTNRMFVAFIFWALFAYSSFVIPFIHLPEIVNLYNLSEQNDVFPLTSIIAIVHIFGKVILGVIADLPCISVWNVFLLANFTLVLSIFILPLMHTYAGLAVICALIGFSSGYFSLMPVVTEDLVGIEHLANAYGIIICANGISALLGPPFAGWIYDITQKYDFSFYICGLLYMIGILFLLIQPCIRIIEQSRRKYMDGAHV

SEQ ID NO: 29368 - protein, 330 aa, Homo sapiens
MRRPSVRAAGLVLCTLCYLLVGAAVFDALESEAESGRQRLLVQKRGALRRKFGFSAEDYRELERLALQAEPHRAGRQWKFPGSFYFAITVITTIGYGHAAPGTDSGKVFCMFYALLGIPLTLVTFQSLGERLNAVVRRLLLAAKCCLGLRWTCVSTENLVVAGLLACAATLALGAVAFSHFEGWTFFHAYYYCFITLTTIGFGDFVALQSGEALQRKLPYVAFSFLYILLGLTVIGAFLNLVVLRFLVASADWPERAARPPSPRPPGAPESRGLWLPRRPARSVGSASVFCHVHKLERCARDNLGFSPPSSPGVVRGGQAPRPGARWKSI

SEQ ID NO: 29369 - protein, 904 aa, Homo sapiens
MAHRGGERDFQTSARRMGTSLLFQLSVHERELDLVFLDHSYAKPWSAHPDASSARPTRMLFVTPRRQHESTIESDVPIDVETVTSTPMPLYDNQKARSVMNECERHVIFARTDADAPPPPEDWEEHVNRTGWTMAQNKLFNKILKALQSDRLARLANEGACNEPVLRRVAVDKCARRVRQALASVSWDTKLIQWLHTTLVETLSLPMLAAYLDALQTLKGKIPTLIDRMLVSSNTKTGAAGAEALSLLLKRPWDPAVGVLSHNKPSKLPGSPLILIASSGPSSSVFPTSRRHRFWQSQLSCLGKVIPVATHLLNNGSGVGVLQCLEHMIGAVRSKVLEIHSHFPHKPIILIGWNTGALVACHVSVMEYVTAVVCLGFPLLTVDGPRGDVDDPLLDMKTPVLFVIGQNSLQCHPEAMEDFREKIRAENSLVVVGGADDNLRISKAKKKSEGLTQSMVDRCIQDEIVDFLTGVLTRAEGHMGSEPRDQDAEKKKKPRDVARRDLAFEVPERGSRPASPAAKLPASPSGSEDLSSVSSSPTSSPKTKVTTVTSAQKSSQIGSSQLLKRHVQRTEAVLTHKQAQAQFAAFLKQNMLVRKALPPGTSSCLFVPISSEPPEEGEKEDLRVQLKRHHPSSPLPGSKTSKRPKIKVSLISQGDTAGGPCAPSQGSAPEAAGGKPITMTLGQASAGAKELTGLLTTAKSSSSEGGVSASPVPSVVSSSTAPSALHTLQSRLVATSPGSSLPGATSASSLLQGLSFSLQDISSKTSGLPANPSPGPAPQATSVKLPTPMQSLGAITTGTSTIVRTIPVATTLSSLGATPGGKPTAIHQLLTNGGLAKLASSLPGLAQISNQASGLKVPTTITLTLRGQPSRITTLSPMGSGAAPSEESSSQVLPSSSQRLPPAP

SEQ ID NO: 29370 - protein, 780 aa, Homo sapiens
MAHRGGERDFQTSARRMGTSLLFQLSVHERELDLVFLDHSYAKPWSAHPDASSARPTRMLFVTPRRQHESTIESDVPIDVETVTSTPMPLYDNQKARSVMNECERHVIFARTDADAPPPPEDWEEHVNRTGWTMAQNKLFNKILKALQSDRLARLANEGACNEPVLRRVAVDKCARRVRQALASVSWDTKLIQWLHTTLVETLSLPMLAAYLDALQTLKGKIPTLIDRMLVSSNTKTGAAGAEALSLLLKRPWDPAVGVLSHNKPSKLPGSPLILIASSGPSSSVFPTSRRHRFWQSQLSCLGKVIPVATHLLNNGSGVGVLQCLEHMIGAVRSKVLEIHSHFPHKPIILIGWNTGALVACHVSVMEYVTAVVCLGFPLLTVDGPRGDVDDPLLDMKTPVLFVIGQNSLQCHPEAMEDFREKIRAENSLVVVGGADDNLRISKAKKKSEGLTQSMVDRCIQDEIVDFLTGVLTRAEGHMGSEPRDQDAEKKKKPRDVARRDLAFEVPERGSRPASPAAKLPASPSGSEDLSSVSSSPTSSPKTKVTTVTSAQKSSQIGSSQLLKRHVQRTEAVLTHKQAQAQFAAFLKQNMLVRKALPPGTSSCLFVPISSEPPEEGEKEDLRVQLKRHHPSSPLPGSKTSKRPKIKVSLISQGDTAGGPCAPSQGSAPEAAGGKPITMTLGQASAGAKELTGLLTTAKSSSSEGGVSASPVPSVVSSSTAPSALHTLQSRLVATSPGSSLPGATSASSLLQGLSFSLQDISSKTSGLPANPSPGPAPQA

SEQ ID NO: 29371 - protein, 878 aa, Homo sapiens
MAHRGGERDFQTSARRMGTSLLFQLSVHERELDLVFLDHSYAKPWSAHPDASSARPTRMLFVTPRRQHESTIESDVPIDVETVTSTPMPLYDNQKARSVMNECERHVIFARTDADAPPPPEDWEEHVNRTGWTMAQNKLFNKILKALQSDRLARLANEGACNEPVLRRVAVDKCARRVRQALASVSWDTKLIQWLHTTLVETLSLPMLAAYLDALQTLKGKIPTLIDRMLVSSNTKTGAAGAEALSLLLKRPWDPAVGVLSHNKPSKLPGSPLILIASSGPSSSVFPTSRRHRFWQSQLSCLGKVIPVATHLLNNGSGVGVLQCLEHMIGAVRSKVLEIHSHFPHKPIILIGWNTGALVACHVSVMEYVTAVVCLGFPLLTVDGPRGDVDDPLLDMKTPVLFVIGQNSLQCHPEAMEDFREKIRAENSLVVVGGADDNLRISKAKKKSEGLTQSMVDRCIQDEIVDFLTGVLTRAEGHMGSEPRDQDAEKKKKPRDVARRDLAFEVPERGSRPASPAAKLPASPSGSEDLSSVSSSPTSSPKTKVTTVTSAQKSSQIGSSQLLKRHVQRTEAVLTHKQAQVPISSEPPEEGEKEDLRVQLKRHHPSSPLPGSKTSKRPKIKVSLISQGDTAGGPCAPSQGSAPEAAGGKPITMTLGQASAGAKELTGLLTTAKSSSSEGGVSASPVPSVVSSSTAPSALHTLQSRLVATSPGSSLPGATSASSLLQGLSFSLQDISSKTSGLPANPSPGPAPQATSVKLPTPMQSLGAITTGTSTIVRTIPVATTLSSLGATPGGKPTAIHQLLTNGGLAKLASSLPGLAQISNQASGLKVPTTITLTLRGQPSRITTLSPMGSGAAPSEESSSQVLPSSSQRLPPAP

SEQ ID NO: 29372 - protein, 791 aa, Homo sapiens
MPLYDNQKARSVMNECERHVIFARTDADAPPPPEDWEEHVNRTGWTMAQNKLFNKILKALQSDRLARLANEGACNEPVLRRVAVDKCARRVRQALASVSWDTKLIQWLHTTLVETLSLPMLAAYLDALQTLKGKIPTLIDRMLVSSNTKTGAAGAEALSLLLKRPWDPAVGVLSHNKPSKLPGSPLILIASSGPSSSVFPTSRRHRFWQSQLSCLGKVIPVATHLLNNGSGVGVLQCLEHMIGAVRSKVLEIHSHFPHKPIILIGWNTGALVACHVSVMEYVTAVVCLGFPLLTVDGPRGDVDDPLLDMKTPVLFVIGQNSLQCHPEAMEDFREKIRAENSLVVVGGADDNLRISKAKKKSEGLTQSMVDRCIQDEIVDFLTGVLTRAEGHMGSEPRDQDAEKKKKPRDVARRDLAFEVPERGSRPASPAAKLPASPSGSEDLSSVSSSPTSSPKTKVTTVTSAQKSSQIGSSQLLKRHVQRTEAVLTHKQAQVPISSEPPEEGEKEDLRVQLKRHHPSSPLPGSKTSKRPKIKVSLISQGDTAGGPCAPSQGSAPEAAGGKPITMTLGQASAGAKELTGLLTTAKSSSSEGGVSASPVPSVVSSSTAPSALHTLQSRLVATSPGSSLPGATSASSLLQGLSFSLQDISSKTSGLPANPSPGPAPQATSVKLPTPMQSLGAITTGTSTIVRTIPVATTLSSLGATPGGKPTAIHQLLTNGGLAKLASSLPGLAQISNQASGLKVPTTITLTLRGQPSRITTLSPMGSGAAPSEESSSQVLPSSSQRLPPAP

SEQ ID NO: 29373 - protein, 789 aa, Homo sapiens
MPLYDNQKARSVMNECERHVIFARTDADAPPPPEDWEEHVNRTGWTMAQNKLFNKILKALQSDRLARLANEGACNEPVLRRVAVDKCARRVRQALASVSWDTKLIQWLHTTLVETLSLPMLAAYLDALQTLKGKIPTLIDRMLVSSNTKTGAAGAEALSLLLKRPWDPAVGVLSHNKPSKLPGSPLILIASSGPSSSVFPTSRRHRFWQSQLSCLGKVIPVATHLLNNGSGVGVLQCLEHMIGAVRSKVLEIHSHFPHKPIILIGWNTGALVACHVSVMEYVTAVVCLGFPLLTVDGPRGDVDDPLLDMKTPVLFVIGQNSLQCHPEAMEDFREKIRAENSLVVVGGADDNLRISKAKKKSEGLTQSMVDRCIQDEIVDFLTGVLTRAEGHMGSEPRDQDAEKKKKPRDVARRDLAFEVPERGSRPASPAAKLPASPSGSEDLSSVSSSPTSSPKTKVTTVTSAQKSSQIGSSQLLKRHVQRTEAVLTHKQAQVPISSEPPEEGEKEDLRVQLKRHHPSSPLPGSKTSKRPKIKVSLISQGDTAGGPCAPSQGSAPEGGKPITMTLGQASAGAKELTGLLTTAKSSSSEGGVSASPVPSVVSSSTAPSALHTLQSRLVATSPGSSLPGATSASSLLQGLSFSLQDISSKTSGLPANPSPGPAPQATSVKLPTPMQSLGAITTGTSTIVRTIPVATTLSSLGATPGGKPTAIHQLLTNGGLAKLASSLPGLAQISNQASGLKVPTTITLTLRGQPSRITTLSPMGSGAAPSEESSSQVLPSSSQRLPPAP

SEQ ID NO: 29374 - protein, 764 aa, Homo sapiens
MTLPHCHRLMLTHHLFWTGWTMAQNKLFNKILKALQSDRLARLANEGACNEPVLRRVAVDKCARRVRQALASVSWDTKLIQWLHTTLVETLSLPMLAAYLDALQTLKGKIPTLIDRMLVSSNTKTGAAGAEALSLLLKRPWDPAVGVLSHNKPSKLPGSPLILIASSGPSSSVFPTSRRHRFWQSQLSCLGKVIPVATHLLNNGSGVGVLQCLEHMIGAVRSKVLEIHSHFPHKPIILIGWNTGALVACHVSVMEYVTAVVCLGFPLLTVDGPRGDVDDPLLDMKTPVLFVIGQNSLQCHPEAMEDFREKIRAENSLVVVGGADDNLRISKAKKKSEGLTQSMVDRCIQDEIVDFLTGVLTRAEGHMGSEPRDQDAEKKKKPRDVARRDLAFEVPERGSRPASPAAKLPASPSGSEDLSSVSSSPTSSPKTKVTTVTSAQKSSQIGSSQLLKRHVQRTEAVLTHKQAQVPISSEPPEEGEKEDLRVQLKRHHPSSPLPGSKTSKRPKIKVSLISQGDTAGGPCAPSQGSAPEGGKPITMTLGQASAGAKELTGLLTTAKSSSSEGGVSASPVPSVVSSSTAPSALHTLQSRLVATSPGSSLPGATSASSLLQGLSFSLQDISSKTSGLPANPSPGPAPQATSVKLPTPMQSLGAITTGTSTIVRTIPVATTLSSLGATPGGKPTAIHQLLTNGGLAKLASSLPGLAQISNQASGLKVPTTITLTLRGQPSRITTLSPMGSGAAPSEESSSQVLPSSSQRLPPAP

SEQ ID NO: 29375 - protein, 141 aa, Homo sapiens
MPLYDNQKARSVMNECERHVIFARTDADAPPPPEDWEEHVNRTGWTMAQNKLFNKILKALQSDRLARLANEGACNEPVLRRVAVDKCARRVRQALASVSWDTKLIQWLHTTLVETLSLPMLAAYLDALQTLKGKVILTFCG

SEQ ID NO: 29376 - protein, 530 aa, Homo sapiens
MPLYDNQKARSVMNECERHVIFARTDADAPPPPEDWEEHVNRTGWTMAQNKLFNKILKALQSDRLARLANEGACNEPVLRRVAVDKCARRVRQALASVSWDTKLIQWLHTTLVETLSLPMLAAYLDALQTLKGKIPTLIDRMLVSSNTKTGAAGAEALSLLLKRPWDPAVGVLSHNKPSKLPGSPLILIASSGPSSSVFPTSRRHRFWQSQLSCLGKVIPVATHLLNNGSGVGVLQCLEHMIGAVRSKVLEIHSHFPHKPIILIGWNTGALVACHVSVMEYVTAVVCLGFPLLTVDGPRGDVDDPLLDMKTPVLFVIGQNSLQCHPEAMEDFREKIRAENSLVVVGGADDNLRISKAKKKSEGLTQSMVDRCIQDEIVDFLTGVLTRAEGHMGSEPRDQDAEKKKKPRDVARRDLAFEVPERGSRPASPAAKLPASPSGSEDLSSVSSSPTSSPKTKVTTVTSAQKSSQIGSSQLLKRHVQRTEAVLTHKQAQVPISSEPPEEGEKEDLRVQLKRHHPSSPLPVYSWFHH

SEQ ID NO: 29377 - protein, 235 aa, Homo sapiens
MFIWTSGRTSSSYRHDEKRNIYQKIRDHDLLDKRKTVTALKAGEDRAILLGLAMMVCSIMMYFLLGITLLRSYMQSVWTEESQCTLLNASITETFNCSFSCGPDCWKLSQYPCLQVYVNLTSSGEKLLLYHTEETIKINQKCSYIPKCGKNFEESMSLVNVVMENFRKYQHFSCYSDPEGNQKSVILTKLYSSNVLFHSLFWPTCMMAGGVAIVAMVKLTQYLSLLCERIQRINR

SEQ ID NO: 29378 - protein, 241 aa, Homo sapiens
MEKRGESLDLGVRCKRGEERDRRPCWKPSRPGAARGGRGLWTVGGGGSPTETAESQQLGKPPEFWVSAHPGWLQVSCAHRASRWDASRWHPLQRFFARRGVRRPNPSVPSPLPKPPVPSAGSCEPLAPPPTSASGASRSWVTQTLAEAGAYRGCRPAPGSAAGWPRSDRRARLPRKASKPCSPALPSLAACCPQGFLRSGTKRVMCKVLGPGAGVRGTAVECSEQAGVWAHCRPQLTATFS

SEQ ID NO: 29379 - protein, 545 aa, Homo sapiens
MLKQSERRRSWSYRPWNTTENEGSQHRRSICSLGARSGSQASIHGWTEGNYNYYIEEDEDGEEEDQWKDDLAEEDQQAGEVTTAKPEGPSDPPALLSTLNVNVGGHSYQLDYCELAGFPKTRLGRLATSTSRSRQLSLCDDYEEQTDEYFFDRDPAVFQLVYNFYLSGVLLVLDGLCPRRFLEELGYWGVRLKYTPRCCRICFEERRDELSERLKIQHELRAQAQVEEAEELFRDMRFYGPQRRRLWNLMEKPFSSVAAKAIGVASSTFVLVSVVALALNTVEEMQQHSGQGEGGPDLRPILEHVEMLCMGFFTLEYLLRLASTPDLRRFARSALNLVDLVAILPLYLQLLLECFTGEGHQRGQTVGSVGKVGQVLRVMRLMRIFRILKLARHSTGLRAFGFTLRQCYQQVGCLLLFIAMGIFTFSAAVYSVEHDVPSTNFTTIPHSWWWAAVSISTVGYGDMYPETHLGRFFAFLCIAFGIILNGMPISILYNKFSDYYSKLKAYEYTTIRRERGEVNFMQRARKKIAECLLGSNPQLTPRQEN

SEQ ID NO: 29380 - protein, 445 aa, Homo sapiens
MGESIPLAAPVPVEQAVLETFFSHLGIFSYDKAKDNVEKEREANKSAGGSWLSLLAALAHLAAAEKVYHSLTYLGQKLGGQSFFSRKDSIRTIYTSLHNELKKVVTGRGALGGTAPHVEELLSHLSEQLCFFVQARMEMADFYEKMYTLSTQKFINAEELVGLLDAIMKKYSSRFHHPILSPLESSFQLEVDVLCHLLKAQAQVSEWKFLPSLVNLHSAHTKLQTWGQIFEKQRETKKHLFGGQSQKAVQPPHLFLWLMKLKNMLLAKFSFYFHEALSRQTTASEMKTLTAKANPDFFGKISSFIRKYDAANVSLIFDNRGSESFQGHGYHHPHSYREAPKGVDQYPAVVSLPSDRPVMHWPNVIMIMTDRTSDLNSLEKVVHFYDDKVQSTYFLTRPEPHFTIVIIFESKKSERDSHFISFLNEVSLALKNPKVFASLKPGAKG

SEQ ID NO: 29381 - protein, 987 aa, Homo sapiens
MTPALREATAKGISFSSLPSTMESDKMLYMESPRTVDEKLKGDTFSQMLGFPTPEPTLNTNFVNLKHFGSPQSSKHYQTVFLMRSNSTLNKHNENYKQKKLGEPSCNKLKNILYNGSNIQLSKICLSHSEEFIKKEPLSDTTSQCMKDVQIILDSNITKDTNVDKVQLQNCKWYQENALLDKVTDAEIKKGLLHCTQKKIVPGHSNVPVSSSAAEKEEEVHARLLHCVSKQKILLSQARRTQKHLQMLLAKHVVKHYGQQMKLSMKHQLPKMKTFHEPTTILGNSLPKCTEIKPEVNTLTAENKLWDDAKNGFARCTAAEIQRFAFSATGLLSHVEEGLDSDATDSSSDDDLDEYTLRKNVAVNCSTEWKWLVDRARVGSRWTWLQAQISDLECKIQQLTDIHRQIRASKGIVVLEECQLPKDILKKQMQFADQAASLNILGNPQVPQECQDPVPEQDFEMSPSSPTLLLRNIEKQSAQLTEIINSLIAPLNLSPTSSPLSSKSCSHKCLANGIYRSASENLDELSSSSSWLLNQKHSKKKRKDRTRLKSSSLTFMSTSARTRPLQSFHKRKLYRLSPTFYWTPQTLPSKETAFLNTTQMPCLQSASTWSSYEHNSESYLLREHVSELDSSFHSVLSLPSDVPLHFHFETLLKKTEIKGNLAENKFVDEYIISPSPVHSTLNQWRNGYSPICKPQIRSESSAQLLQGRKKRHLSETALGERTKLEESDFQHTESGSHSNFTAVSNVNVLSRIQNSSRNTARRRLRSESSYDIDNIVIPMSLVAPAKLEKLQYKEILTPSWRMVVLQPLDEYNLGKEEIEDLSDEVFSLRHKKYEEREQARWSLWEQSKWHRRNSRAYSKNVEGQDLLLKEYPNNFSSSQQCAAASPPGLPSENQDLCAYGLPSLNQSQETKSLWWERRAFPLKGEDMAALLCQDEKKDQVERSSTAFHGEIFGTSVPENGHHPKKQSDGMEEYKTFGLGLTNVKKNR

SEQ ID NO: 29382 - protein, 945 aa, Homo sapiens
MTPALREATAKGISFSSLPSTMESDKMLYMESPRTVDEKLKGDTFSQMLGFPTPEPTLNTNFVNLKHFGSPQSSKHYQTVFLMRSNSTLNKHNENYKQKKLGEPSCNKLKNILYNGSNIQLSKICLSHSEEFIKKEPLSDTTSQCMKDVQIILDSNITKDTNVDKVQLQNCKWYQENALLDKVTDAEIKKGLLHCTQKKIVPGHSNVPVSSSAAEKEEEVHARLLHCVSKQKILLSQARRTQKHLQMLLAKHVVKHYGQQMKLSMKHQLPKMKTFHEPTTILGNSLPKCTEIKPEVNTLTAENKLWDDAKNGFARCTAAEIQRFAFSATGLLSHVEEGLDSDATDSSSDDDLDEYTLRKNVAVNCSTEWKWLVDRARVGSRWTWLQAQISDLECKIQQLTDIHRQIRASKGIVVLEECQLPKDILKKQMQFADQAASLNILGNPQVPQECQDPVPEQDFEMSPSSPTLLLRNIEKQSAQLTEIINSLIAPLNLSPTSSPLSSKSCSHKCLANGIYRSASENLDELSSSSSWLLNQKHSKKKRKDRTRLKSSSLTFMSTSARTRPLQSFHKRKLYRLSPTFYWTPQTLPSKETAFLNTTQMPCLQSASTWSSYEHNSESYLLREHVSELDSSFHSVLSLPSDVPLHFHFETLLKKTEIKGNLAENKFVDEYIISPSPGERTKLEESDFQHTESGSHSNFTAVSNVNVLSRIQNSSRNTARRRLRSESSYDIDNIVIPMSLVAPAKLEKLQYKEILTPSWRMVVLQPLDEYNLGKEEIEDLSDEVFSLRHKKYEEREQARWSLWEQSKWHRRNSRAYSKNVEGQDLLLKEYPNNFSSSQQCAAASPPGLPSENQDLCAYGLPSLNQSQETKSLWWERRAFPLKGEDMAALLCQDEKKDQVERSSTAFHGEIFGTSVPENGHHPKKQSDGMEEYKTFGLGLTNVKKNR

SEQ ID NO: 29383 - protein, 705 aa, Homo sapiens
MTPALREATAKGISFSSLPSTMESDKMLYMESPRTVDEKLKGDTFSQMLGFPTPEPTLNTNFVNLKHFGSPQSSKHYQTVFLMRSNSTLNKHNENYKQKKLGEPSCNKLKNILYNGSNIQLSKICLSHSEEFIKKEPLSDTTSQCMKDVQIILDSNITKDTNVDKVQLQNCKWYQENALLDKVTDAEIKKGLLHCTQKKIVPGHSNVPVSSSAAEKEEEVHARLLHCVSKQKILLSQARRTQKHLQMLLAKHVVKHYGQQMKLSMKHQLPKMKTFHEPTTILGNSLPKCTEIKPEVNTLTAENKLWDDAKNGFARCTAAEIQRFAFSATGLLSHVEEGLDSDATDSSSDDDLDEYTLRKNVAVNCSTEWKWLVDRARVGSRWTWLQAQISDLECKIQQLTDIHRQIRASKGIVVLEECQLPKDILKKQMQFADQAASLNILGNPQVPQECQDPVPEQDFEMSPSSPTLLLRNIEKQSAQLTEIINSLIAPLNLSPTSSPLSSKSCSHKCLANGIYRSASENLDELSSSSSWLLNQKHSKKKRKDRTRLKSSSLTFMSTSARTRPLQSFHKRKLYRLSPTFYWTPQTLPSKETAFLNTTQMPCLQSASTWSSYEHNSESYLLREHVSELDSSFHSVLSLPSDVPLHFHFETLLKKTEIKGNLAENKFVDEYIISPSPGMSHLQFLYSICLFMSLYLLFLHSKKNKI

SEQ ID NO: 29384 - protein, 648 aa, Homo sapiens
MTPALREATAKGISFSSLPSTMESDKMLYMESPRTVDEKLKGDTFSQMLGFPTPEPTLNTNFVNLKHFGSPQSSKHYQTVFLMRSNSTLNKHNENYKQKKLGEPSCNKLKNILYNGSNIQLSKICLSHSEEFIKKEPLSDTTSQCMKDVQIILDSNITKDTNVDKVQLQNCKWYQENALLDKVTDAEIKKGLLHCTQKKIVPGHSNVPVSSSAAEKEEEVHARLLHCVSKQKILLSQARRTQKHLQMLLAKHVVKHYGQQMKLSMKHQLPKMKTFHEPTTILGNSLPKCTEIKPEVNTLTAENKLWDDAKNGFARCTAAEIQRFAFSATGLLSHVEEGLDSDATDSSSDDDLDEYTLRKNVAVNCSTEWKWLVDRARVGSRWTWLQAQISDLECKIQQLTDIHRQIRASKGIVVLEECQLPKDILKKQMQFADQAASLNILGNPQVPQECQDPVPEQDFEMSPSSPTLLLRNIEKQSAQLTEIINSLIAPLNLSPTSSPLSSKSCSHKCLANGIYRSASENLDELSSSSSWLLNQKHSKKKRKDRTRLKSSSLTFMSTSARTRPLQSFHKRKLYRLSPTFYWTPQTLPSKETAFLNTTQMPCLQSASTWSSYEHNSESYLLREHVSELDSSFHSVLSLPSGKPPCNNF

SEQ ID NO: 29385 - protein, 191 aa, Homo sapiens
MGKSCKVVVCGQASVGKTSILEQLLYGNHVVGSEMIETQEDIYVGSIETDRGVREQVRFYDTRGLRDGAELPRHCFSCTDGYVLVYSTDSRESFQRVELLKKEIDKSKDKKEVTIVVLGNKCDLQEQRRVDPDVAQHWAKSEKVKLWEVSVADRRSLLEPFVYLASKMTQPQSKSAFPLSRKNKGSGSLDG

SEQ ID NO: 29386 - protein, 189 aa, Homo sapiens
MGKSCKVVVCGQASVGKTSILEQLLYGNHVVGMIETQEDIYVGSIETDRGVREQVRFYDTRGLRDGAELPRHCFSCTDGYVLVYSTDSRESFQRVELLKKEIDKSKDKKEVTIVVLGNKCDLQEQRRVDPDVAQHWAKSEKVKLWEVSVADRRSLLEPFVYLASKMTQPQSKSAFPLSRKNKGSGSLDG

SEQ ID NO: 29387 - protein, 135 aa, Homo sapiens
MGKSCKVVVCGQASVGKTSILEQLLYGNHVVGSEMIETQEDIYVGSIETDRGVREQVTIVVLGNKCDLQEQRRVDPDVAQHWAKSEKVKLWEVSVADRRSLLEPFVYLASKMTQPQSKSAFPLSRKNKGSGSLDG

SEQ ID NO: 29388 - protein, 97 aa, Homo sapiens
MGKSCKVVVCGQASVGKTSILEQLLYGNHVVGSEMIETQEDIYVGSIETDRGVREQIAESLFSVWSCSRRRLTNPRTRRRSPSWSLATSVTYRSSGV

SEQ ID NO: 29389 - protein, 390 aa, Homo sapiens
MGRGARVPSEAPGAGVERRWLGAALVALCLLPALVLLARLGAPAVPAWSAAQGDVAALGLSAVPPTRVPGPLAPRRRRYTLTPARLRWDHFNLTYRILSFPRNLLSPRETRRALAAAFRMWSDVSPFSFREVAPEQPSDLRIGFYPINHTDCLVSALHHCFDGPTGELAHAFFPPHGGIHFDDSEYWVLGPTRYSWKKGVWLTDLVHVAAHEIGHALGLMHSQHGRALMHLNATLRGWKALSQDELWGLHRLYGCLDRLFVCASWARRGFCDARRRLMKRLCPSSCDFCYEFPFPTVATTPPPPRTKTRLVPEGRNVTFRCGQKILHKKGKVYWYKDQEPLEFSYPGYLALGEAHLSIIANAVNEGTYTCVVRRQQRVLTTYSWRVRVRG

SEQ ID NO: 29390 - protein, 431 aa, Homo sapiens
MGRGARVPSEAPGAGVERRWLGAALVALCLLPALVLLARLGAPAVPAWSAAQGDVAALGLSAVPPTRVPGPLAPRRRRYTLTPARLRWDHFNLTYRILSFPRNLLSPRETRRALAAAFRMWSDVSPFSFREVAPEQPSDLRIGFYPINHTDCLVSALHHCFDGPTGELAHAFFPPHGGIHFDDSEYWVLGPTRYSWKKGDRPGSSWRPLLCSTVGCRGRALGQTAGGTFRGGGCHWSLAGVWLTDLVHVAAHEIGHALGLMHSQHGRALMHLNATLRGWKALSQDELWGLHRLYGCLDRLFVCASWARRGFCDARRRLMKRLCPSSCDFCYEFPFPTVATTPPPPRTKTRLVPEGRNVTFRCGQKILHKKGKVYWYKDQEPLEFSYPGYLALGEAHLSIIANAVNEGTYTCVVRRQQRVLTTYSWRVRVRG

SEQ ID NO: 29391 - protein, 415 aa, Homo sapiens
MGRGARVPSEAPGAGVERRWLGAALVALCLLPALVLLARLGAPAVPAWSAAQGDVAALGLSAVPPTRVPGPLAPRRRRYTLTPARLRWDHFNLTYRILSFPRNLLSPRETRRALAAAFRMWSDVSPFSFREVAPEQPSDLRIGFYPINHTDCLVSALHHCFDGPTGELAHAFFPPHGGIHFDDSEYWVLGPTRYSWKKGVWLTDLVHVAAHEIGHALGLMHSQHGRALMHLNATLRGWKALSQDELWGLHRLYGESLCRAGGRGPGGPEPGVLPTLPIGCLDRLFVCASWARRGFCDARRRLMKRLCPSSCDFCYEFPFPTVATTPPPPRTKTRLVPEGRNVTFRCGQKILHKKGKVYWYKDQEPLEFSYPGYLALGEAHLSIIANAVNEGTYTCVVRRQQRVLTTYSWRVRVRG

SEQ ID NO: 29392 - protein, 562 aa, Homo sapiens
MRLRLRLLALLLLLLAPPARAPKPSAQDVSLGVDWLTRYGYLPPPHPAQAQLQSPEKLRDAIKVMQRFAGLPETGRMDPGTVATMRKPRCSLPDVLGVAGLVRRRRRYALSGSVWKKRTLTWRVRSFPQSSQLSQETVRVLMSYALMAWGMESGLTFHEVDSPQGQEPDILIDFARAFHQDSYPFDGLGGTLAHAFFPGEHPISGDTHFDDEETWTFGSKDGEGTDLFAVAVHEFGHALGLGHSSAPNSIMRPFYQGPVGDPDKYRLSQDDRDGLQQLYGKAPQTPYDKPTRKPLAPPPQPPASPTHSPSFPIPDRCEGNFDAIANIRGETFFFKGPWFWRLQPSGQLVSPRPARLHRFWEGLPAQVRVVQAAYARHRDGRILLFSGPQFWVFQDRQLEGGARPLTELGLPPGEEVDAVFSWPQNGKTYLVRGRQYWRYDEAAARPDPGYPRDLSLWEGAPPSPDDVTVSNAGDTYFFKGAHYWRFPKNSIKTEPDAPQPMGPNWLDCPAPSSGPRAPRPPKATPVSETCDCQCELNQAAGRWPAPIPLLLLPLLVGGVASR

SEQ ID NO: 29393 - protein, 127 aa, Homo sapiens
MRPLDIDEVEAPEEVEVLEPEEDFEQFLLPVINEMREDIASLIREHGRAYLRTRSKLWEMDNMLIQIKTQVEASEESALNHVQHPSGEADERVSELCEKAEEKAKEIAKMAEMLVELVWRIERSESS

SEQ ID NO: 29394 - protein, 660 aa, Homo sapiens
MEALMARGALTGPLRALCLLGCLLSHAAAAPSPIIKFPGDVAPKTDKELAVQYLNTFYGCPKESCNLFVLKDTLKKMQKFFGLPQTGDLDQNTIETMRKPRCGNPDVANYNFFPRKPKWDKNQITYRIIGYTPDLDPETVDDAFARAFQVWSDVTPLRFSRIHDGEADIMINFGRWEHGDGYPFDGKDGLLAHAFAPGTGVGGDSHFDDDELWTLGEGQVVRVKYGNADGEYCKFPFLFNGKEYNSCTDTGRSDGFLWCSTTYNFEKDGKYGFCPHEALFTMGGNAEGQPCKFPFRFQGTSYDSCTTEGRTDGYRWCGTTEDYDRDKKYGFCPETAMSTVGGNSEGAPCVFPFTFLGNKYESCTSAGRSDGKMWCATTANYDDDRKWGFCPDQGYSLFLVAAHEFGHAMGLEHSQDPGALMAPIYTYTKNFRLSQDDIKGIQELYGASPDIDLGTGPTPTLGPVTPEICKQDIVFDGIAQIRGEIFFFKDRFIWRTVTPRDKPMGPLLVATFWPELPEKIDAVYEAPQEEKAVFFAGNEYWIYSASTLERGYPKPLTSLGLPPDVQRVDAAFNWSKNKKTYIFAGDKFWRYNEVKKKMDPGFPKLIADAWNAIPDNLDAVVDLQGGGHSYFFKGAYYLKLENQSLKSVKFGSIKSDWLGC

SEQ ID NO: 29395 - protein, 584 aa, Homo sapiens
MQKFFGLPQTGDLDQNTIETMRKPRCGNPDVANYNFFPRKPKWDKNQITYRIIGYTPDLDPETVDDAFARAFQVWSDVTPLRFSRIHDGEADIMINFGRWEHGDGYPFDGKDGLLAHAFAPGTGVGGDSHFDDDELWTLGEGQVVRVKYGNADGEYCKFPFLFNGKEYNSCTDTGRSDGFLWCSTTYNFEKDGKYGFCPHEALFTMGGNAEGQPCKFPFRFQGTSYDSCTTEGRTDGYRWCGTTEDYDRDKKYGFCPETAMSTVGGNSEGAPCVFPFTFLGNKYESCTSAGRSDGKMWCATTANYDDDRKWGFCPDQGYSLFLVAAHEFGHAMGLEHSQDPGALMAPIYTYTKNFRLSQDDIKGIQELYGASPDIDLGTGPTPTLGPVTPEICKQDIVFDGIAQIRGEIFFFKDRFIWRTVTPRDKPMGPLLVATFWPELPEKIDAVYEAPQEEKAVFFAGNEYWIYSASTLERGYPKPLTSLGLPPDVQRVDAAFNWSKNKKTYIFAGDKFWRYNEVKKKMDPGFPKLIADAWNAIPDNLDAVVDLQGGGHSYFFKGAYYLKLENQSLKSVKFGSIKSDWLGC

SEQ ID NO: 29396 - protein, 610 aa, Homo sapiens
MQYLNTFYGCPKESCNLFVLKDTLKKMQKFFGLPQTGDLDQNTIETMRKPRCGNPDVANYNFFPRKPKWDKNQITYRIIGYTPDLDPETVDDAFARAFQVWSDVTPLRFSRIHDGEADIMINFGRWEHGDGYPFDGKDGLLAHAFAPGTGVGGDSHFDDDELWTLGEGQVVRVKYGNADGEYCKFPFLFNGKEYNSCTDTGRSDGFLWCSTTYNFEKDGKYGFCPHEALFTMGGNAEGQPCKFPFRFQGTSYDSCTTEGRTDGYRWCGTTEDYDRDKKYGFCPETAMSTVGGNSEGAPCVFPFTFLGNKYESCTSAGRSDGKMWCATTANYDDDRKWGFCPDQGYSLFLVAAHEFGHAMGLEHSQDPGALMAPIYTYTKNFRLSQDDIKGIQELYGASPDIDLGTGPTPTLGPVTPEICKQDIVFDGIAQIRGEIFFFKDRFIWRTVTPRDKPMGPLLVATFWPELPEKIDAVYEAPQEEKAVFFAGNEYWIYSASTLERGYPKPLTSLGLPPDVQRVDAAFNWSKNKKTYIFAGDKFWRYNEVKKKMDPGFPKLIADAWNAIPDNLDAVVDLQGGGHSYFFKGAYYLKLENQSLKSVKFGSIKSDWLGC

SEQ ID NO: 29397 - protein, 205 aa, Homo sapiens
MSAQRLISNRTSQQSASNSDYTWEYEYYEIGPVSFEGLKAHKYSIVIGFWVGLAVFVIFMFFVLTLLTKTGAPHQDNAESSEKRFRMNSFVSDFGRPLEPDKVFSRQGNEESRSLFHCYINEVERLDRAKACHQTTALDSDVQLQEAIRSSGQPEEELNRLMKFDIPNFVNTDQNYFGEDDLLISEPPIVLETKPLSQTSHKDLD

SEQ ID NO: 29398 - protein, 172 aa, Homo sapiens
MANGTNASAPYYSYEYYLDYLDLIPVDEKKLKAHKHSIVIAFWVSLAAFVVLLFLILLYMSWSASPQMRNSPKHHQTCPWSHGLNLHLCIQKCLPCHREPLATSQAQASSVEPGSRTGPDQPLRQESSSTLPLGGFQTHPTLLWELTLNGGPLVRSKPSEPPPGDRTSQLQS

SEQ ID NO: 29399 - protein, 173 aa, Homo sapiens
MANGTNASAPYYSYEYYLDYLDLIPVDEKKLKAHKHSIVIAFWVSLAAFVVLLFLILLYMSWSASPQMRRNSPKHHQTCPWSHGLNLHLCIQKCLPCHREPLATSQAQASSVEPGSRTGPDQPLRQESSSTLPLGGFQTHPTLLWELTLNGGPLVRSKPSEPPPGDRTSQLQS

SEQ ID NO: 29400 - protein, 102 aa, Homo sapiens
MANGTNASAPYYSYEYYLDYLDLIPVDEKKLKAHKHSIVIAFWVSLAAFVVLLFLILLYMSWSASPQMSFNTDESLLHSEVLPQTRAISCDELQAPREEGAA

SEQ ID NO: 29401 - protein, 113 aa, Homo sapiens
MSWSASPQMRNSPKHHQTCPWSHGLNLHLCIQKCLPCHREPLATSQAQASSVEPGSRTGPDQPLRQESSSTLPLGGFQTHPTLLWELTLNGGPLVRSKPSEPPPGDRTSQLQS

SEQ ID NO: 29402 - protein, 246 aa, Homo sapiens
MAGYLKLVCVSFQRQGFHTVGSRCKNRTGAEHLWLTRHLRDPFVKAAKVESYRCRSAFKLLEVNERHQILRPGLRVLDCGAAPGAWSQVAVQKVNAAGTDPSSPVGFVLGVDLLHIFPLEGATFLCPADVTDPRTSQRILEVLPGRRADVILSDMAPNATGFRDLDHDRLISLCLTLLSVTPDILQPGGTFLCKTWAGSQSRRLQRRLTEEFQNVRIIKPEASRKESSEVYFLATQYHGRKGTVKQ

SEQ ID NO: 29403 - protein, 1560 aa, Homo sapiens
MEPGSDDFLPPPECPVFEPSWAEFRDPLGYIAKIRPIAEKSGICKIRPPADWQPPFAVEVDNFRFTPRIQRLNELEAQTRVKLNYLDQIAKFWEIQGSSLKIPNVERRILDLYSLSKIVVEEGGYEAICKDRRWARVAQRLNYPPGKNIGSLLRSHYERIVYPYEMYQSGANLVQCNTRPFDNEEKDKEYKPHSIPLRQSVQPSKFNSYGRRAKRLQPDPEPTEEDIEKNPELKKLQIYGAGPKMMGLGLMAKDKTLRKKDKEGPECPPTVVVKEELGGDVKVESTSPKTFLESKEELSHSPEPCTKMTMRLRRNHSNAQFIESYVCRMCSRGDEDDKLLLCDGCDDNYHIFCLLPPLPEIPKGVWRCPKCVMAECKRPPEAFGFEQATREYTLQSFGEMADSFKADYFNMPVHMVPTELVEKEFWRLVNSIEEDVTVEYGADIHSKEFGSGFPVSDSKRHLTPEEEEYATSGWNLNVMPVLEQSVLCHINADISGMKVPWLYVGMVFSAFCWHIEDHWSYSINYLHWGEPKTWYGVPSLAAEHLEEVMKKLTPELFDSQPDLLHQLVTLMNPNTLMSHGVPVVRTNQCAGEFVITFPRAYHSGFNQGYNFAEAVNFCTADWLPAGRQCIEHYRRLRRYCVFSHEELICKMAACPEKLDLNLAAAVHKEMFIMVQEERRLRKALLEKGITEAEREAFELLPDDERQCIKCKTTCFLSALACYDCPDGLVCLSHINDLCKCSSSRQYLRYRYTLDELPAMLHKLKVRAESFDTWANKVRVALEVEDGRKRSLEELRALESEARERRFPNSELLQQLKNCLSEAEACVSRALGLVSGQEAGPHRVAGLQMTLTELRAFLDQMNNLPCAMHQIGDVKGVLEQVEAYQAEAREALASLPSSPGLLQSLLERGRQLGVEVPEAQQLQRQVEQARWLDEVKRTLAPSARRGTLAVMRGLLVAGASVAPSPAVDKAQAELQELLTIAERWEEKAHLCLEARQKHPPATLEAIIREAENIPVHLPNIQALKEALAKARAWIADVDEIQNGDHYPCLDDLEGLVAVGRDLPVGLEELRQLELQVLTAHSWREKASKTFLKKNSCYTLLEVLCPCADAGSDSTKRSRWMEKELGLYKSDTELLGLSAQDLRDPGSVIVAFKEGEQKEKEGILQLRRTNSAKPSPLASSSTASSTTSICVCGQVLAGAGALQCDLCQDWFHGRCVSVPRLLSSPRPNPTSSPLLAWWEWDTKFLCPLCMRSRRPRLETILALLVALQRLPVRLPEGEALQCLTERAISWQGRARQALASEDVTALLGRLAELRQRLQAEPRPEEPPNYPAAPASDPLREGSGKDMPKVQGLLENGDSVTSPEKVAPEEGSGKRDLELLSSLLPQLTGPVLELPEATRAPLEELMMEGDLLEVTLDENHSIWQLLQAGQPPDLERIRTLLELEKAERHGSRARGRALERRRRRKVDRGGEGDDPAREELEPKRVRSSGPEAEEVQEEEELEEETGGEGPPAPIPTTGSPSTQENQNGLEPAEGTTSGPSAPFSTLTPRLHLPCPQQPPQQQL

SEQ ID NO: 29404 - protein, 1557 aa, Homo sapiens
MEPGSDDFLPPPECPVFEPSWAEFRDPLGYIAKIRPIAEKSGICKIRPPADWQPPFAVEVDNFRFTPRIQRLNELEAQTRVKLNYLDQIAKFWEIQGSSLKIPNVERRILDLYSLSKIVVEEGGYEAICKDRRWARVAQRLNYPPGKNIGSLLRSHYERIVYPYEMYQSGANLVQCNTRPFDNEEKDKEYKPHSIPLRQSVQPSKFNSYGRRAKRLQPDPEPTEEDIEKNPELKKLQIYGAGPKMMGLGLMAKDKTLRKKDKEGPECPPTVVVKEELGGDVKVESTSPKTFLESKEELSHSPEPCTKMTMRLRRNHSNAQFIESYVCRMCSRGDEDDKLLLCDGCDDNYHIFCLLPPLPEIPKGVWRCPKCVMAECKRPPEAFGFEQATREYTLQSFGEMADSFKADYFNMPVHMVPTELVEKEFWRLVNSIEEDVTVEYGADIHSKEFGSGFPVSDSKRHLTPEEEEYATSGWNLNVMPVLEQSVLCHINADISGMKVPWLYVGMVFSAFCWHIEDHWSYSINYLHWGEPKTWYGVPSLAAEHLEEVMKKLTPELFDSQPDLLHQLVTLMNPNTLMSHGVPVVRTNQCAGEFVITFPRAYHSGFNQGYNFAEAVNFCTADWLPAGRQCIEHYRRLRRYCVFSHEELICKMAACPEKLDLNLAAAVHKEMFIMVQEERRLRKALLEKGITEAEREAFELLPDDERQCIKCKTTCFLSALACYDCPDGLVCLSHINDLCKCSSSRQYLRYRYTLDELPAMLHKLKVRAESFDTWANKVRVALEVEDGRKRSLEELRALESEARERRFPNSELLQQLKNCLSEAEACVSRALGLVSGQEAGPHRVAGLQMTLTELRAFLDQMNNLPCAMHQIGDVKGVLEQVEAYQAEAREALASLPSSPGLLQSLLERGRQLGVEVPEAQQLQRQVEQARWLDEVKRTLAPSARRGTLAVMRGLLVAGASVAPSPAVDKAQAELQELLTIAERWEEKAHLCLEARQKHPPATLEAIIREAENIPVHLPNIQALKEALAKARAWIADVDEIQNGDHYPCLDDLEGLVAVGRDLPVGLEELRQLELQVLTAHSWREKASKTFLKKNSCYTLLEVLCPCADAGSDSTKRSRWMEKELGLYKSDTELLGLSAQDLRDPGSVIVAFKEGEQKEKEGILQLRRTNSAKPSPLASSSTASSTTSICVCGQVLAGAGALQCDLCQDWFHGRCVSVPRLLSSPRPNPTSSPLLAWWEWDTKFLCPLCMRSRRPRLETILALLVALQRLPVRLPEGEALQCLTERAISWQGRARQALASEDVTALLGRLAELRQRLQAEPRPEEPPNYPAAPASDPLREGSGKDMPKVQGLLENGDSVTSPEKVAPEEGSDLELLSSLLPQLTGPVLELPEATRAPLEELMMEGDLLEVTLDENHSIWQLLQAGQPPDLERIRTLLELEKAERHGSRARGRALERRRRRKVDRGGEGDDPAREELEPKRVRSSGPEAEEVQEEEELEEETGGEGPPAPIPTTGSPSTQENQNGLEPAEGTTSGPSAPFSTLTPRLHLPCPQQPPQQQL

SEQ ID NO: 29405 - protein, 1516 aa, Homo sapiens
MEPGSDDFLPPPECPVFEPSWAEFRDPLGYIAKIRPIAEKSGICKIRPPADWQPPFAVEVDNFRFTPRIQRLNELEIVVEEGGYEAICKDRRWARVAQRLNYPPGKNIGSLLRSHYERIVYPYEMYQSGANLVQCNTRPFDNEEKDKEYKPHSIPLRQSVQPSKFNSYGRRAKRLQPDPEPTEEDIEKNPELKKLQIYGAGPKMMGLGLMAKDKTLRKKDKEGPECPPTVVVKEELGGDVKVESTSPKTFLESKEELSHSPEPCTKMTMRLRRNHSNAQFIESYVCRMCSRGDEDDKLLLCDGCDDNYHIFCLLPPLPEIPKGVWRCPKCVMAECKRPPEAFGFEQATREYTLQSFGEMADSFKADYFNMPVHMVPTELVEKEFWRLVNSIEEDVTVEYGADIHSKEFGSGFPVSDSKRHLTPEEEEYATSGWNLNVMPVLEQSVLCHINADISGMKVPWLYVGMVFSAFCWHIEDHWSYSINYLHWGEPKTWYGVPSLAAEHLEEVMKKLTPELFDSQPDLLHQLVTLMNPNTLMSHGVPVVRTNQCAGEFVITFPRAYHSGFNQGYNFAEAVNFCTADWLPAGRQCIEHYRRLRRYCVFSHEELICKMAACPEKLDLNLAAAVHKEMFIMVQEERRLRKALLEKGITEAEREAFELLPDDERQCIKCKTTCFLSALACYDCPDGLVCLSHINDLCKCSSSRQYLRYRYTLDELPAMLHKLKVRAESFDTWANKVRVALEVEDGRKRSLEELRALESEARERRFPNSELLQQLKNCLSEAEACVSRALGLVSGQEAGPHRVAGLQMTLTELRAFLDQMNNLPCAMHQIGDVKGVLEQVEAYQAEAREALASLPSSPGLLQSLLERGRQLGVEVPEAQQLQRQVEQARWLDEVKRTLAPSARRGTLAVMRGLLVAGASVAPSPAVDKAQAELQELLTIAERWEEKAHLCLEARQKHPPATLEAIIREAENIPVHLPNIQALKEALAKARAWIADVDEIQNGDHYPCLDDLEGLVAVGRDLPVGLEELRQLELQVLTAHSWREKASKTFLKKNSCYTLLEVLCPCADAGSDSTKRSRWMEKELGLYKSDTELLGLSAQDLRDPGSVIVAFKEGEQKEKEGILQLRRTNSAKPSPLASSSTASSTTSICVCGQVLAGAGALQCDLCQDWFHGRCVSVPRLLSSPRPNPTSSPLLAWWEWDTKFLCPLCMRSRRPRLETILALLVALQRLPVRLPEGEALQCLTERAISWQGRARQALASEDVTALLGRLAELRQRLQAEPRPEEPPNYPAAPASDPLREGSGKDMPKVQGLLENGDSVTSPEKVAPEEGSDLELLSSLLPQLTGPVLELPEATRAPLEELMMEGDLLEVTLDENHSIWQLLQAGQPPDLERIRTLLELEKAERHGSRARGRALERRRRRKVDRGGEGDDPAREELEPKRVRSSGPEAEEVQEEEELEEETGGEGPPAPIPTTGSPSTQENQNGLEPAEGTTSGPSAPFSTLTPRLHLPCPQQPPQQQL

SEQ ID NO: 29406 - protein, 1379 aa, Homo sapiens
MEPGSDDFLPPPECPVFEPSWAEFRDPLGYIAKIRPIAEKSGICKIRPPAIVVEEGGYEAICKDRRWARVAQRLNYPPGKNIGSLLRSHYERIVYPYEMYQSGANLVQCNTRPFDNEEKDKEYKPHSIPLRQSVQPSKFNSYGRRAKRLQPDPEPTEEDIEKNPELKKLQIYGAGPKMMGLGLMAKDKTLRKKDKEGPECPPTVVVKEELGGDVKVESTSPKTFLESKEELSHSPEPCTKMTMRLRRNHSNAQFIESYVCRMCSRGDEDDKLLLCDGCDDNYHIFCLLPPLPEIPKGVWRCPKCVMAECKRPPEAFGFEQATREYTLQSFGEMADSFKADYFNMPVHMVPTELVEKEFWRLVNSIEEDVTVEYGADIHSKEFGSGFPVSDSKRHLTPEEEEYATSGWNLNVMPVLEQSVLCHINADISGMKVPWLYVGMVFSAFCWHIEDHWSYSINYLHWGEPKTWYGVPSLAAEHLEEVMKKLTPELFDSQPDLLHQLVTLMNPNTLMSHGVPVVRTNQCAGEFVITFPRAYHSGFNQGYNFAEAVNFCTADWLPAGRQCIEHYRRLRRYCVFSHEELICKMAACPEKLDLNLAAAVHKEMFIMVQEERRLRKALLEKGITEAEREAFELLPDDERQCIKCKTTCFLSALACYDCPDGLVCLSHINDLCKCSSSRQYLRYRYTLDELPAMLHKLKVRAESFDTWANKVRVALEVEDGRKRSLEELRALESEARERRFPNSELLQQLKNCLSEAEACVSRALGLVSGQEAGPHRVAGLQMTLTELRAFLDQMNNLPCAMHQIGDVKGVLEQVEAYQAEAREALASLPSSPGLLQSLLERGRQLGVEVPEAQQLQRQVEQARWLDEVKRTLAPSARRGTLAVMRGLLVAGASVAPSPAVDKAQAELQELLTIAERWEEKAHLCLEARQKHPPATLEAIIREAENIPVHLPNIQALKEALAKARAWIADVDEIQNGDHYPCLDDLEGLVAVGRDLPVGLEELRQLELQVLTAHSWREKASKTFLKKNSCYTLLEVLCPCADAGSDSTKRSRWMEKELGLYKSDTELLGLSAQDLRDPGSVIVAFKEGEQKEKEGILQLRRTNSAKPSPLASSSTASSTTSICVCGQVLAGAGALQCDLCQDWFHGRCVSVPRLLSSPRPNPTSSPLLAWWEWDTKFLCPLCMRSRRPRLETILALLVALQRLPVRLPEGEALQCLTERAISWQGRARQALASEDVTALLGRLAELRQRLQAEPRPEEPPNYPAAPASDPLREGSGKDMPKVQGLLENGDSVTSPEKVAPEEGSDLELLSSLLPQLTGPVLELPEATRAPLEELMMEGDLLEVTLDENHSIPESLDFCILTPRYCSDLSSWGPAPGVFPPW

SEQ ID NO: 29407 - protein, 1559 aa, Homo sapiens
MEPGSDDFLPPPECPVFEPSWAEFRDPLGYIAKIRPIAEKSGICKIRPPADWQPPFAVEVDNFRFTPRIQRLNELEAQTRVKLNYLDQIAKFWEIQGSSLKIPNVERRILDLYSLSKIVVEEGGYEAICKDRRWARVAQRLNYPPGKNIGSLLRSHYERIVYPYEMYQSGANLVCNTRPFDNEEKDKEYKPHSIPLRQSVQPSKFNSYGRRAKRLQPDPEPTEEDIEKNPELKKLQIYGAGPKMMGLGLMAKDKTLRKKDKEGPECPPTVVVKEELGGDVKVESTSPKTFLESKEELSHSPEPCTKMTMRLRRNHSNAQFIESYVCRMCSRGDEDDKLLLCDGCDDNYHIFCLLPPLPEIPKGVWRCPKCVMAECKRPPEAFGFEQATREYTLQSFGEMADSFKADYFNMPVHMVPTELVEKEFWRLVNSIEEDVTVEYGADIHSKEFGSGFPVSDSKRHLTPEEEEYATSGWNLNVMPVLEQSVLCHINADISGMKVPWLYVGMVFSAFCWHIEDHWSYSINYLHWGEPKTWYGVPSLAAEHLEEVMKKLTPELFDSQPDLLHQLVTLMNPNTLMSHGVPVVRTNQCAGEFVITFPRAYHSGFNQGYNFAEAVNFCTADWLPAGRQCIEHYRRLRRYCVFSHEELICKMAACPEKLDLNLAAAVHKEMFIMVQEERRLRKALLEKGITEAEREAFELLPDDERQCIKCKTTCFLSALACYDCPDGLVCLSHINDLCKCSSSRQYLRYRYTLDELPAMLHKLKVRAESFDTWANKVRVALEVEDGRKRSLEELRALESEARERRFPNSELLQQLKNCLSEAEACVSRALGLVSGQEAGPHRVAGLQMTLTELRAFLDQMNNLPCAMHQIGDVKGVLEQVEAYQAEAREALASLPSSPGLLQSLLERGRQLGVEVPEAQQLQRQVEQARWLDEVKRTLAPSARRGTLAVMRGLLVAGASVAPSPAVDKAQAELQELLTIAERWEEKAHLCLEARQKHPPATLEAIIREAENIPVHLPNIQALKEALAKARAWIADVDEIQNGDHYPCLDDLEGLVAVGRDLPVGLEELRQLELQVLTAHSWREKASKTFLKKNSCYTLLEVLCPCADAGSDSTKRSRWMEKELGLYKSDTELLGLSAQDLRDPGSVIVAFKEGEQKEKEGILQLRRTNSAKPSPLASSSTASSTTSICVCGQVLAGAGALQCDLCQDWFHGRCVSVPRLLSSPRPNPTSSPLLAWWEWDTKFLCPLCMRSRRPRLETILALLVALQRLPVRLPEGEALQCLTERAISWQGRARQALASEDVTALLGRLAELRQRLQAEPRPEEPPNYPAAPASDPLREGSGKDMPKVQGLLENGDSVTSPEKVAPEEGSGKRDLELLSSLLPQLTGPVLELPEATRAPLEELMMEGDLLEVTLDENHSIWQLLQAGQPPDLERIRTLLELEKAERHGSRARGRALERRRRRKVDRGGEGDDPAREELEPKRVRSSGPEAEEVQEEEELEEETGGEGPPAPIPTTGSPSTQENQNGLEPAEGTTSGPSAPFSTLTPRLHLPCPQQPPQQQL

SEQ ID NO: 29408 - protein, 1539 aa, Homo sapiens
MEPGCDEFLPPPECPVFEPSWAEFQDPLGYIAKIRPIAEKSGICKIRPPADWQPPFAVEVDNFRFTPRVQRLNELEAQTRVKLNYLDQIAKFWEIQGSSLKIPNVERKILDLYSLSKIVIEEGGYEAICKDRRWARVAQRLHYPPGKNIGSLLRSHYERIIYPYEMFQSGANHVQCNTHPFDNEVKDKEYKPHSIPLRQSVQPSKFSSYSRRAKRLQPDPEPTEEDIEKHPELKKLQIYGPGPKMMGLGLMAKDKDKTVHKKVTCPPTVTVKDEQSGGGNVSSTLLKQHLSLEPCTKTTMQLRKNHSSAQFIDSYICQVCSRGDEDDKLLFCDGCDDNYHIFCLLPPLPEIPRGIWRCPKCILAECKQPPEAFGFEQATQEYSLQSFGEMADSFKSDYFNMPVHMVPTELVEKEFWRLVSSIEEDVTVEYGADIHSKEFGSGFPVSNSKQNLSPEEKEYATSGWNLNVMPVLDQSVLCHINADISGMKVPWLYVGMVFSAFCWHIEDHWSYSINYLHWGEPKTWYGVPSLAAEHLEEVMKMLTPELFDSQPDLLHQLVTLMNPNTLMSHGVPVVRTNQCAGEFVITFPRAYHSGFNQGYNFAEAVNFCTADWLPAGRQCIEHYRRLRRYCVFSHEELICKMAAFPETLDLNLAVAVHKEMFIMVQEERRLRKALLEKGVTEAEREAFELLPDDERQCIKCKTTCFLSALACYDCPDGLVCLSHINDLCKCSSSRQYLRYRYTLDELPTMLHKLKIRAESFDTWANKVRVALEVEDGRKRSFEELRALESEARERRFPNSELLQRLKNCLSEVEACIAQVLGLVSGQVARMDTPQLTLTELRVLLEQMGSLPCAMHQIGDVKDVLEQVEAYQAEAREALATLPSSPGLLRSLLERGQQLGVEVPEAHQLQQQVEQAQWLDEVKQALAPSAHRGSLVIMQGLLVMGAKIASSPSVDKARAELQELLTIAERWEEKAHFCLEARQKHPPATLEAIIRETENIPVHLPNIQALKEALTKAQAWIADVDEIQNGDHYPCLDDLEGLVAVGRDLPVGLEELRQLELQVLTAHSWREKASKTFLKKNSCYTLLEVLCPCADAGSDSTKRSRWMEKALGLYQCDTELLGLSAQDLRDPGSVIVAFKEGEQKEKEGILQLRRTNSAKPSPLAPSLMASSPTSICVCGQVPAGVGVLQCDLCQDWFHGQCVSVPHLLTSPKPSLTSSPLLAWWEWDTKFLCPLCMRSRRPRLETILALLVALQRLPVRLPEGEALQCLTERAIGWQDRARKALASEDVTALLRQLAELRQQLQAKPRPEEASVYTSATACDPIREGSGNNISKVQGLLENGDSVTSPENMAPGKGSDLELLSSLLPQLTGPVLELPEAIRAPLEELMMEGDLLEVTLDENHSIWQLLQAGQPPDLDRIRTLLELEKFEHQGSRTRSRALERRRRRQKVDQGRNVENLVQQELQSKRARSSGIMSQVGREEEHYQEKADRENMFLTPSTDHSPFLKGNQNSLQHKDSGSSAACPSLMPLLQLSYSDEQQL

SEQ ID NO: 29409 - protein, 1482 aa, Homo sapiens
MEPGCDEFLPPPECPVFEPSWAEFQDPLGYIAKIRPIAEKSGICKIRPPADWQPPFAVEVDNFRFTPRVQRLNELEAQTRVKLNYLDQIAKFWEIQGSSLKIPNVERKILDLYSLSKQCNTHPFDNEVKDKEYKPHSIPLRQSVQPSKFSSYSRRAKRLQPDPEPTEEDIEKHPELKKLQIYGPGPKMMGLGLMAKDKDKTVHKKVTCPPTVTVKDEQSGGGNVSSTLLKQHLSLEPCTKTTMQLRKNHSSAQFIDSYICQVCSRGDEDDKLLFCDGCDDNYHIFCLLPPLPEIPRGIWRCPKCILAECKQPPEAFGFEQATQEYSLQSFGEMADSFKSDYFNMPVHMVPTELVEKEFWRLVSSIEEDVTVEYGADIHSKEFGSGFPVSNSKQNLSPEEKEYATSGWNLNVMPVLDQSVLCHINADISGMKVPWLYVGMVFSAFCWHIEDHWSYSINYLHWGEPKTWYGVPSLAAEHLEEVMKMLTPELFDSQPDLLHQLVTLMNPNTLMSHGVPVVRTNQCAGEFVITFPRAYHSGFNQGYNFAEAVNFCTADWLPAGRQCIEHYRRLRRYCVFSHEELICKMAAFPETLDLNLAVAVHKEMFIMVQEERRLRKALLEKGVTEAEREAFELLPDDERQCIKCKTTCFLSALACYDCPDGLVCLSHINDLCKCSSSRQYLRYRYTLDELPTMLHKLKIRAESFDTWANKVRVALEVEDGRKRSFEELRALESEARERRFPNSELLQRLKNCLSEVEACIAQVLGLVSGQVARMDTPQLTLTELRVLLEQMGSLPCAMHQIGDVKDVLEQVEAYQAEAREALATLPSSPGLLRSLLERGQQLGVEVPEAHQLQQQVEQAQWLDEVKQALAPSAHRGSLVIMQGLLVMGAKIASSPSVDKARAELQELLTIAERWEEKAHFCLEARQKHPPATLEAIIRETENIPVHLPNIQALKEALTKAQAWIADVDEIQNGDHYPCLDDLEGLVAVGRDLPVGLEELRQLELQVLTAHSWREKASKTFLKKNSCYTLLEVLCPCADAGSDSTKRSRWMEKALGLYQCDTELLGLSAQDLRDPGSVIVAFKEGEQKEKEGILQLRRTNSAKPSPLAPSLMASSPTSICVCGQVPAGVGVLQCDLCQDWFHGQCVSVPHLLTSPKPSLTSSPLLAWWEWDTKFLCPLCMRSRRPRLETILALLVALQRLPVRLPEGEALQCLTERAIGWQDRARKALASEDVTALLRQLAELRQQLQAKPRPEEASVYTSATACDPIREGSGNNISKVQGLLENGDSVTSPENMAPGKGSDLELLSSLLPQLTGPVLELPEAIRAPLEELMMEGDLLEVTLDENHSIWQLLQAGQPPDLDRIRTLLELEKFEHQGSRTRSRALERRRRRQKVDQGRNVENLVQQELQSKRARSSGIMSQVGREEEHYQEKADRENMFLTPSTDHSPFLKGNQNSLQHKDSGSSAACPSLMPLLQLSYSDEQQL

SEQ ID NO: 29410 - protein, 1570 aa, Homo sapiens
MEPGCDEFLPPPECPVFEPSWAEFQDPLGYIAKIRPIAEKSGICKIRPPADWQPPFAVEVDNFRFTPRVQRLNELEAQTRVKLNYLDQIAKFWEIQGSSLKIPNVERKILDLYSLSKIVIEEGGYEAICKDRRWARVAQRLHYPPGKNIGSLLRSHYERIIYPYEMFQSGANHVQCNTHPFDNEVKDKEYKPHSIPLRQSVQPSKFSSYSRRAKRLQPDPEPTEEDIEKHPELKKLQIYGPGPKMMGLGLMAKDKDKTVHKKVTCPPTVTVKDEQSGGGNVSSTLLKQHLSLEPCTKTTMQLRKNHSSAQFIDSYICQVCSRGDEDDKLLFCDGCDDNYHIFCLLPPLPEIPRGIWRCPKCILAECKQPPEAFGFEQATQEYSLQSFGEMADSFKSDYFNMPVHMVPTELVEKEFWRLVSSIEEDVTVEYGADIHSKEFGSGFPVSNSKQNLSPEEKRQSLTVLTRLISSFWAQAVLPPWPPKVLGLQEYATSGWNLNVMPVLDQSVLCHINADISGMKVPWLYVGMVFSAFCWHIEDHWSYSINYLHWGEPKTWYGVPSLAAEHLEEVMKMLTPELFDSQPDLLHQLVTLMNPNTLMSHGVPVVRTNQCAGEFVITFPRAYHSGFNQGYNFAEAVNFCTADWLPAGRQCIEHYRRLRRYCVFSHEELICKMAAFPETLDLNLAVAVHKEMFIMVQEERRLRKALLEKGVTEAEREAFELLPDDERQCIKCKTTCFLSALACYDCPDGLVCLSHINDLCKCSSSRQYLRYRYTLDELPTMLHKLKIRAESFDTWANKVRVALEVEDGRKRSFEELRALESEARERRFPNSELLQRLKNCLSEVEACIAQVLGLVSGQVARMDTPQLTLTELRVLLEQMGSLPCAMHQIGDVKDVLEQVEAYQAEAREALATLPSSPGLLRSLLERGQQLGVEVPEAHQLQQQVEQAQWLDEVKQALAPSAHRGSLVIMQGLLVMGAKIASSPSVDKARAELQELLTIAERWEEKAHFCLEARQKHPPATLEAIIRETENIPVHLPNIQALKEALTKAQAWIADVDEIQNGDHYPCLDDLEGLVAVGRDLPVGLEELRQLELQVLTAHSWREKASKTFLKKNSCYTLLEVLCPCADAGSDSTKRSRWMEKALGLYQCDTELLGLSAQDLRDPGSVIVAFKEGEQKEKEGILQLRRTNSAKPSPLAPSLMASSPTSICVCGQVPAGVGVLQCDLCQDWFHGQCVSVPHLLTSPKPSLTSSPLLAWWEWDTKFLCPLCMRSRRPRLETILALLVALQRLPVRLPEGEALQCLTERAIGWQDRARKALASEDVTALLRQLAELRQQLQAKPRPEEASVYTSATACDPIREGSGNNISKVQGLLENGDSVTSPENMAPGKGSDLELLSSLLPQLTGPVLELPEAIRAPLEELMMEGDLLEVTLDENHSIWQLLQAGQPPDLDRIRTLLELEKFEHQGSRTRSRALERRRRRQKVDQGRNVENLVQQELQSKRARSSGIMSQVGREEEHYQEKADRENMFLTPSTDHSPFLKGNQNSLQHKDSGSSAACPSLMPLLQLSYSDEQQL

SEQ ID NO: 29411 - protein, 1401 aa, Homo sapiens
MKSCGVSLATAAAAAAAFGDEEKKMAAGKASGESEEASPSLTAEEREALGGLDSRLFGFVRFHEDGARTKALLGKAVRCYESLILKAEGKVESDFFCQLGHFNLLLEDYPKALSAYQRYYSLQSDYWKNAAFLYGLGLVYFHYNAFQWAIKAFQEVLYVDPSFCRAKEIHLRLGLMFKVNTDYESSLKHFQLALVDCNPCTLSNAEIQFHIAHLYETQRKYHSAKEAYEQLLQTENLSAQVKATVLQQLGWMHHTVDLLGDKATKESYAIQYLQKSLEADPNSGQSWYFLGRCYSSIGKVQDAFISYRQSIDKSEASADTWCSIGVLYQQQNQPMDALQAYICAVQLDHGHAAAWMDLGTLYESCNQPQDAIKCYLNATRSKSCSNTSALAARIKYLQAQLCNLPQGSLQNKTKLLPSIEEAWSLPIPAELTSRQGAMNTAQQNTSDNWSGGHAVSHPPVQQQAHSWCLTPQKLQHLEQLRANRNNLNPAQKLMLEQLESQFVLMQQHQMRPTGVAQVRSTGIPNGPTADSSLPTNSVSGQQPQLALTRVPSVSQPGVRPACPGQPLANGPFSAGHVPCSTSRTLGSTDTILIGNNHITGSGSNGNVPYLQRNALTLPHNRTNLTSSAEEPWKNQLSNSTQGLHKGQSSHSAGPNGERPLSSTGPSQHLQAAGSGIQNQNGHPTLPSNSVTQGAALNHLSSHTATSGGQQGITLTKESKPSGNILTVPETSRHTGETPNSTASVEGLPNHVHQMTADAVCSPSHGDSKSPGLLSSDNPQLSALLMGKANNNVGTGTCDKVNNIHPAVHTKTDNSVASSPSSAISTATPSPKSTEQTTTNSVTSLNSPHSGLHTINGEGMEESQSPMKTDLLLVNHKPSPQIIPSMSVSIYPSSAEVLKACRNLGKNGLSNSSILLDKCPPPRPPSSPYPPLPKDKLNPPTPSIYLENKRDAFFPPLHQFCTNPNNPVTVIRGLAGALKLDLGLFSTKTLVEANNEHMVEVRTQLLQPADENWDPTGTKKIWHCESNRSHTTIAKYAQYQASSFQESLREENEKRSHHKDHSDSESTSSDNSGRRRKGPFKTIKFGTNIDLSDDKKWKLQLHELTKLPAFVRVVSAGNLLSHVGHTILGMNTVQLYMKVPGSRTPGHQENNNFCSVNINIGPGDCEWFVVPEGYWGVLNDFCEKNNLNFLMGSWWPNLEDLYEANVPVYRFIQRPGDLVWINAGTVHWVQAIGWCNNIAWNVGPLTACQYKLAVERYEWNKLQSVKSIVPMVHLSWNMARNIKVSDPKLFEMIKYCLLRTLKQCQTLREALIAAGKEIIWHGRTKEEPAHYCSICEVEVFDLLFVTNESNSRKTYIVHCQDCARKTSGNLENFVVLEQYKMEDLMQVYDQFTLAPPLPSASS

SEQ ID NO: 29412 - protein, 239 aa, Homo sapiens
MAPSVPAAEPEYPKGIRAVLLGPPGAGKGTQAPRLAENFCVCHLATGDMLRAMVASGSELGKKLKATMDAGKLVSDEMVVELIEKNLETPLCKNGFLLDGFPRTVRQAEMLDDLMEKRKEKLDSVIEFSIPDSLLIRRITGRLIHPKSGRSYHEEFNPPKEPMKDDITGEPLIRRSDDNEKALKIRLQAYHTQTTPLIEYYRKRGIHSAIDASQTPDVVFASILAAFSKATCKDLVMFI

SEQ ID NO: 29413 - protein, 232 aa, Homo sapiens
MAPSVPAAEPEYPKGIRAVLLGPPGAGKGTQAPRLAENFCVCHLATGDMLRAMVASGSELGKKLKATMDAGKLVSDEMVVELIEKNLETPLCKNGFLLDGFPRTVRQAEMLDDLMEKRKEKLDSVIEFSIPDSLLIRRITGRLIHPKSGRSYHEEFNPPKEPMKDDITGEPLIRRSDDNEKALKIRLQAYHTQTTPLIEYYRKRGIHSAIDASQTPDVVFASILAAFSKATS

SEQ ID NO: 29414 - protein, 202 aa, Homo sapiens
MAPSVPAAEPEYPKGIRAVLLGPPGAGKGTQAPRLAENFCVCHLATGDMLRAMVASGSELGKKLKATMDAGKLVSDEMVVELIEKNLETPLCKNGFLLDGFPRTVRQAEMLDDLMEKRKEKLDSVIEFSIPDSLLIRRITGRLIHPKSGRSYHEEFNPPKEPMKDDITGEPLIRRSDIGQAKRSFLRLAKISFDVLIKKALA

SEQ ID NO: 29415 - protein, 130 aa, Homo sapiens
MLRAMVASGSELGKKLKATMDAGKLVSDEMVVELIEKNLETPLCKNGFLLDGFPRTVRQAEMLDDLMEKRKEKLDSVIEFSIPDSLLIRRITGRLIHPKSGRSYHEEFNPPKEPMKDDITGEPLIRRSGL

SEQ ID NO: 29416 - protein, 224 aa, Homo sapiens
MAPSVPAAEPEYPKGIRAVLLGPPGAGKGTQAPRLAENFCVCHLATGDMLRAMVASGSELGKKLKATMDAGKLVSDEMVVELIEKNLETPLCKNGFLLDGFPRTVRQAEMLDDLMEKRKEKLDSVIEFSIPDSLLIHPKSGRSYHEEFNPPKEPMKDDITGEPLIRRSDDNEKALKIRLQAYHTQTTPLIEYYRKRGIHSAIDASQTPDVVFASILAAFSKATS

SEQ ID NO: 29417 - protein, 191 aa, Homo sapiens
MLRAMVASGSELGKKLKATMDAGKLVSDEMVVELIEKNLETPLCKNGFLLDGFPRTVRQAEMLDDLMEKRKEKLDSVIEFSIPDSLLIRRITGRLIHPKSGRSYHEEFNPPKEPMKDDITGEPLIRRSDDNEKALKIRLQAYHTQTTPLIEYYRKRGIHSAIDASQTPDVVFASILAAFSKATCKDLVMFI

SEQ ID NO: 29418 - protein, 1531 aa, Homo sapiens
MALRGFCSADGSDPLWDWNVTWNTSNPDFTKCFQNTVLVWVPCFYLWACFPFYFLYLSRHDRGYIQMTPLNKTKTALGFLLWIVCWADLFYSFWERSRGIFLAPVFLVSPTLLGITMLLATFLIQLERRKGVQSSGIMLTFWLVALVCALAILRSKIMTALKEDAQVDLFRDITFYVYFSLLLIQLVLSCFSDRSPLFSETIHDPNPCPESSASFLSRITFWWITGLIVRGYRQPLEGSDLWSLNKEDTSEQVVPVLVKNWKKECAKTRKQPVKVVYSSKDPAQPKESSKVDANEEVEALIVKSPQKEWNPSLFKVLYKTFGPYFLMSFFFKAIHDLMMFSGPQILKLLIKFVNDTKAPDWQGYFYTVLLFVTACLQTLVLHQYFHICFVSGMRIKTAVIGAVYRKALVITNSARKSSTVGEIVNLMSVDAQRFMDLATYINMIWSAPLQVILALYLLWLNLGPSVLAGVAVMVLMVPVNAVMAMKTKTYQVAHMKSKDNRIKLMNEILNGIKVLKLYAWELAFKDKVLAIRQEELKVLKKSAYLSAVGTFTWVCTPFLVALCTFAVYVTIDENNILDAQTAFVSLALFNILRFPLNILPMVISSIVQASVSLKRLRIFLSHEELEPDSIERRPVKDGGGTNSITVRNATFTWARSDPPTLNGITFSIPEGALVAVVGQVGCGKSSLLSALLAEMDKVEGHVAIKGSVAYVPQQAWIQNDSLRENILFGCQLEEPYYRSVIQACALLPDLEILPSGDRTEIGEKGVNLSGGQKQRVSLARAVYSNADIYLFDDPLSAVDAHVGKHIFENVIGPKGMLKNKTRILVTHSMSYLPQVDVIIVMSGGKISEMGSYQELLARDGAFAEFLRTYASTEQEQDAEENGVTGVSGPGKEAKQMENGMLVTDSAGKQLQRQLSSSSSYSGDISRHHNSTAELQKAEAKKEETWKLMEADKAQTGQVKLSVYWDYMKAIGLFISFLSIFLFMCNHVSALASNYWLSLWTDDPIVNGTQEHTKVRLSVYGALGISQGIAVFGYSMAVSIGGILASRCLHVDLLHSILRSPMSFFERTPSGNLVNRFSKELDTVDSMIPEVIKMFMGSLFNVIGACIVILLATPIAAIIIPPLGLIYFFVQRFYVASSRQLKRLESVSRSPVYSHFNETLLGVSVIRAFEEQERFIHQSDLKVDENQKAYYPSIVANRWLAVRLECVGNCIVLFAALFAVISRHSLSAGLVGLSVSYSLQVTTYLNWLVRMSSEMETNIVAVERLKEYSETEKEAPWQIQETAPPSSWPQVGRVEFRNYCLRYREDLDFVLRHINVTINGGEKVGIVGRTGAGKSSLTLGLFRINESAEGEIIIDGINIAKIGLHDLRFKITIIPQDPVLFSGSLRMNLDPFSQYSDEEVWTSLELAHLKDFVSALPDKLDHECAEGGENLSVGQRQLVCLARALLRKTKILVLDEATAAVDLETDDLIQSTIRTQFEDCTVLTIAHRLNTIMDYTRVIVLDKGEIQEYGAPSDLLQQRGLFYSMAKDAGLV

SEQ ID NO: 29419 - protein, 1472 aa, Homo sapiens
MALRGFCSADGSDPLWDWNVTWNTSNPDFTKCFQNTVLVWVPCFYLWACFPFYFLYLSRHDRGYIQMTPLNKTKTALGFLLWIVCWADLFYSFWERSRGIFLAPVFLVSPTLLGITMLLATFLIQLERRKGVQSSGIMLTFWLVALVCALAILRSKIMTALKEDAQVDLFRDITFYVYFSLLLIQLVLSCFSDRSPLFSETIHDPNPCPESSASFLSRITFWWITGLIVRGYRQPLEGSDLWSLNKEDTSEQVVPVLVKNWKKECAKTRKQPVKVVYSSKDPAQPKESSKVDANEEVEALIVKSPQKEWNPSLFKVLYKTFGPYFLMSFFFKAIHDLMMFSGPQILKLLIKFVNDTKAPDWQGYFYTVLLFVTACLQTLVLHQYFHICFVSGMRIKTAVIGAVYRKALVITNSARKSSTVGEIVNLMSVDAQRFMDLATYINMIWSAPLQVILALYLLWLNLGPSVLAGVAVMVLMVPVNAVMAMKTKTYQVAHMKSKDNRIKLMNEILNGIKVLKLYAWELAFKDKVLAIRQEELKVLKKSAYLSAVGTFTWVCTPFLVALCTFAVYVTIDENNILDAQTAFVSLALFNILRFPLNILPMVISSIVQASVSLKRLRIFLSHEELEPDSIERRPVKDGGGTNSITVRNATFTWARSDPPTLNGITFSIPEGALVAVVGQVGCGKSSLLSALLAEMDKVEGHVAIKGVNLSGGQKQRVSLARAVYSNADIYLFDDPLSAVDAHVGKHIFENVIGPKGMLKNKTRILVTHSMSYLPQVDVIIVMSGGKISEMGSYQELLARDGAFAEFLRTYASTEQEQDAEENGVTGVSGPGKEAKQMENGMLVTDSAGKQLQRQLSSSSSYSGDISRHHNSTAELQKAEAKKEETWKLMEADKAQTGQVKLSVYWDYMKAIGLFISFLSIFLFMCNHVSALASNYWLSLWTDDPIVNGTQEHTKVRLSVYGALGISQGIAVFGYSMAVSIGGILASRCLHVDLLHSILRSPMSFFERTPSGNLVNRFSKELDTVDSMIPEVIKMFMGSLFNVIGACIVILLATPIAAIIIPPLGLIYFFVQRFYVASSRQLKRLESVSRSPVYSHFNETLLGVSVIRAFEEQERFIHQSDLKVDENQKAYYPSIVANRWLAVRLECVGNCIVLFAALFAVISRHSLSAGLVGLSVSYSLQVTTYLNWLVRMSSEMETNIVAVERLKEYSETEKEAPWQIQETAPPSSWPQVGRVEFRNYCLRYREDLDFVLRHINVTINGGEKVGIVGRTGAGKSSLTLGLFRINESAEGEIIIDGINIAKIGLHDLRFKITIIPQDPVLFSGSLRMNLDPFSQYSDEEVWTSLELAHLKDFVSALPDKLDHECAEGGENLSVGQRQLVCLARALLRKTKILVLDEATAAVDLETDDLIQSTIRTQFEDCTVLTIAHRLNTIMDYTRVIVLDKGEIQEYGAPSDLLQQRGLFYSMAKDAGLV

SEQ ID NO: 29420 - protein, 1475 aa, Homo sapiens
MALRGFCSADGSDPLWDWNVTWNTSNPDFTKCFQNTVLVWVPCFYLWACFPFYFLYLSRHDRGYIQMTPLNKTKTALGFLLWIVCWADLFYSFWERSRGIFLAPVFLVSPTLLGITMLLATFLIQLERRKGVQSSGIMLTFWLVALVCALAILRSKIMTALKEDAQVDLFRDITFYVYFSLLLIQLVLSCFSDRSPLFSETIHDPNPCPESSASFLSRITFWWITGLIVRGYRQPLEGSDLWSLNKEDTSEQVVPVLVKNWKKECAKTRKQPVKVVYSSKDPAQPKESSKVDANEEVEALIVKSPQKEWNPSLFKVLYKTFGPYFLMSFFFKAIHDLMMFSGPQILKLLIKFVNDTKAPDWQGYFYTVLLFVTACLQTLVLHQYFHICFVSGMRIKTAVIGAVYRKALVITNSARKSSTVGEIVNLMSVDAQRFMDLATYINMIWSAPLQVILALYLLWLNLGPSVLAGVAVMVLMVPVNAVMAMKTKTYQVAHMKSKDNRIKLMNEILNGIKVLKLYAWELAFKDKVLAIRQEELKVLKKSAYLSAVGTFTWVCTPFLVALCTFAVYVTIDENNILDAQTAFVSLALFNILRFPLNILPMVISSIVQASVSLKRLRIFLSHEELEPDSIERRPVKDGGGTNSITVRNATFTWARSDPPTLNGITFSIPEGALVAVVGQVGCGKSSLLSALLAEMDKVEGHVAIKGSVAYVPQQAWIQNDSLRENILFGCQLEEPYYRSVIQACALLPDLEILPSGDRTEIGEKTRILVTHSMSYLPQVDVIIVMSGGKISEMGSYQELLARDGAFAEFLRTYASTEQEQDAEENGVTGVSGPGKEAKQMENGMLVTDSAGKQLQRQLSSSSSYSGDISRHHNSTAELQKAEAKKEETWKLMEADKAQTGQVKLSVYWDYMKAIGLFISFLSIFLFMCNHVSALASNYWLSLWTDDPIVNGTQEHTKVRLSVYGALGISQGIAVFGYSMAVSIGGILASRCLHVDLLHSILRSPMSFFERTPSGNLVNRFSKELDTVDSMIPEVIKMFMGSLFNVIGACIVILLATPIAAIIIPPLGLIYFFVQRFYVASSRQLKRLESVSRSPVYSHFNETLLGVSVIRAFEEQERFIHQSDLKVDENQKAYYPSIVANRWLAVRLECVGNCIVLFAALFAVISRHSLSAGLVGLSVSYSLQVTTYLNWLVRMSSEMETNIVAVERLKEYSETEKEAPWQIQETAPPSSWPQVGRVEFRNYCLRYREDLDFVLRHINVTINGGEKVGIVGRTGAGKSSLTLGLFRINESAEGEIIIDGINIAKIGLHDLRFKITIIPQDPVLFSGSLRMNLDPFSQYSDEEVWTSLELAHLKDFVSALPDKLDHECAEGGENLSVGQRQLVCLARALLRKTKILVLDEATAAVDLETDDLIQSTIRTQFEDCTVLTIAHRLNTIMDYTRVIVLDKGEIQEYGAPSDLLQQRGLFYSMAKDAGLV

SEQ ID NO: 29421 - protein, 1466 aa, Homo sapiens
MALRGFCSADGSDPLWDWNVTWNTSNPDFTKCFQNTVLVWVPCFYLWACFPFYFLYLSRHDRGYIQMTPLNKTKTALGFLLWIVCWADLFYSFWERSRGIFLAPVFLVSPTLLGITMLLATFLIQLERRKGVQSSGIMLTFWLVALVCALAILRSKIMTALKEDAQVDLFRDITFYVYFSLLLIQLVLSCFSDRSPLFSETIHDPNPCPESSASFLSRITFWWITGLIVRGYRQPLEGSDLWSLNKEDTSEQVVPVLVKNWKKECAKTRKQPVKVVYSSKDPAQPKESSKVDANEEVEALIVKSPQKEWNPSLFKVLYKTFGPYFLMSFFFKAIHDLMMFSGPQILKLLIKFVNDTKAPDWQGYFYTVLLFVTACLQTLVLHQYFHICFVSGMRIKTAVIGAVYRKALVITNSARKSSTVGEIVNLMSVDAQRFMDLATYINMIWSAPLQVILALYLLWLNLGPSVLAGVAVMVLMVPVNAVMAMKTKTYQVAHMKSKDNRIKLMNEILNGIKVLKLYAWELAFKDKVLAIRQEELKVLKKSAYLSAVGTFTWVCTPFLVALCTFAVYVTIDENNILDAQTAFVSLALFNILRFPLNILPMVISSIVQASVSLKRLRIFLSHEELEPDSIERRPVKDGGGTNSITVRNATFTWARSDPPTLNGITFSIPEGALVAVVGQVGCGKSSLLSALLAEMDKVEGHVAIKGSVAYVPQQAWIQNDSLRENILFGCQLEEPYYRSVIQACALLPDLEILPSGDRTEIGEKGVNLSGGQKQRVSLARAVYSNADIYLFDDPLSAVDAHVGKHIFENVIGPKGMLKNKTRILVTHSMSYLPQVDVIIVMSGGKISEMGSYQELLARDGAFAEFLRTYASTEQEQDAEENGVTGVSGPGKEAKQMENGMLVTDSAGKQLQRQLSSSSSYSGDISRHHNSTAELQKAEAKKEETWKLMEADKAQTGQVKLSVYWDYMKAIGLFISFLSIFLFMCNHVSALASNYWLSLWTDDPIVNGTQEHTKVRLSVYGALGISQGIAVFGYSMAVSIGGILASRCLHVDLLHSILRSPMSFFERTPSGNLVNRFSKELDTVDSMIPEVIKMFMGSLFNVIGACIVILLATPIAAIIIPPLGLIYFFVQRFYVASSRQLKRLESVSRSPVYSHFNETLLGVSVIRAFEEQERFIHQSDLKVDENQKAYYPSIVANRWLAVRLECVGNCIVLFAALFAVISRHSLSAGLVGLSVSYSLQVTTYLNWLVRMSSEMETNIVAVERLKEYSETEKEAPWQIQETAPPSSWPQVGRVEFRNYCLRYREDLDFVLRHINVTINGGEKVGIVGRTGAGKSSLTLGLFRINESAEGEIIIDGINIAKIGLHDLRFKITIIPQDPVLFSGSLRMNLDPFSQYSDEEVWTSLELAHLKDFVSALPDKLDHECAEGGENLRVIVLDKGEIQEYGAPSDLLQQRGLFYSMAKDAGLV

SEQ ID NO: 29422 - protein, 1416 aa, Homo sapiens
MALRGFCSADGSDPLWDWNVTWNTSNPDFTKCFQNTVLVWVPCFYLWACFPFYFLYLSRHDRGYIQMTPLNKTKTALGFLLWIVCWADLFYSFWERSRGIFLAPVFLVSPTLLGITMLLATFLIQLERRKGVQSSGIMLTFWLVALVCALAILRSKIMTALKEDAQVDLFRDITFYVYFSLLLIQLVLSCFSDRSPLFSETIHDPNPCPESSASFLSRITFWWITGLIVRGYRQPLEGSDLWSLNKEDTSEQVVPVLVKNWKKECAKTRKQPVKVVYSSKDPAQPKESSKVDANEEVEALIVKSPQKEWNPSLFKVLYKTFGPYFLMSFFFKAIHDLMMFSGPQILKLLIKFVNDTKAPDWQGYFYTVLLFVTACLQTLVLHQYFHICFVSGMRIKTAVIGAVYRKALVITNSARKSSTVGEIVNLMSVDAQRFMDLATYINMIWSAPLQVILALYLLWLNLGPSVLAGVAVMVLMVPVNAVMAMKTKTYQVAHMKSKDNRIKLMNEILNGIKVLKLYAWELAFKDKVLAIRQEELKVLKKSAYLSAVGTFTWVCTPFLVALCTFAVYVTIDENNILDAQTAFVSLALFNILRFPLNILPMVISSIVQASVSLKRLRIFLSHEELEPDSIERRPVKDGGGTNSITVRNATFTWARSDPPTLNGITFSIPEGALVAVVGQVGCGKSSLLSALLAEMDKVEGHVAIKTRILVTHSMSYLPQVDVIIVMSGGKISEMGSYQELLARDGAFAEFLRTYASTEQEQDAEENGVTGVSGPGKEAKQMENGMLVTDSAGKQLQRQLSSSSSYSGDISRHHNSTAELQKAEAKKEETWKLMEADKAQTGQVKLSVYWDYMKAIGLFISFLSIFLFMCNHVSALASNYWLSLWTDDPIVNGTQEHTKVRLSVYGALGISQGIAVFGYSMAVSIGGILASRCLHVDLLHSILRSPMSFFERTPSGNLVNRFSKELDTVDSMIPEVIKMFMGSLFNVIGACIVILLATPIAAIIIPPLGLIYFFVQRFYVASSRQLKRLESVSRSPVYSHFNETLLGVSVIRAFEEQERFIHQSDLKVDENQKAYYPSIVANRWLAVRLECVGNCIVLFAALFAVISRHSLSAGLVGLSVSYSLQVTTYLNWLVRMSSEMETNIVAVERLKEYSETEKEAPWQIQETAPPSSWPQVGRVEFRNYCLRYREDLDFVLRHINVTINGGEKVGIVGRTGAGKSSLTLGLFRINESAEGEIIIDGINIAKIGLHDLRFKITIIPQDPVLFSGSLRMNLDPFSQYSDEEVWTSLELAHLKDFVSALPDKLDHECAEGGENLSVGQRQLVCLARALLRKTKILVLDEATAAVDLETDDLIQSTIRTQFEDCTVLTIAHRLNTIMDYTRVIVLDKGEIQEYGAPSDLLQQRGLFYSMAKDAGLV

SEQ ID NO: 29423 - protein, 1407 aa, Homo sapiens
MALRGFCSADGSDPLWDWNVTWNTSNPDFTKCFQNTVLVWVPCFYLWACFPFYFLYLSRHDRGYIQMTPLNKTKTALGFLLWIVCWADLFYSFWERSRGIFLAPVFLVSPTLLGITMLLATFLIQLERRKGVQSSGIMLTFWLVALVCALAILRSKIMTALKEDAQVDLFRDITFYVYFSLLLIQLVLSCFSDRSPLFSETIHDPNPCPESSASFLSRITFWWITGLIVRGYRQPLEGSDLWSLNKEDTSEQVVPVLVKNWKKECAKTRKQPVKVVYSSKDPAQPKESSKVDANEEVEALIVKSPQKEWNPSLFKVLYKTFGPYFLMSFFFKAIHDLMMFSGPQILKLLIKFVNDTKAPDWQGYFYTVLLFVTACLQTLVLHQYFHICFVSGMRIKTAVIGAVYRKALVITNSARKSSTVGEIVNLMSVDAQRFMDLATYINMIWSAPLQVILALYLLWLNLGPSVLAGVAVMVLMVPVNAVMAMKTKTYQVAHMKSKDNRIKLMNEILNGIKVLKLYAWELAFKDKVLAIRQEELKVLKKSAYLSAVGTFTWVCTPFLVALCTFAVYVTIDENNILDAQTAFVSLALFNILRFPLNILPMVISSIVQASVSLKRLRIFLSHEELEPDSIERRPVKDGGGTNSITVRNATFTWARSDPPTLNGITFSIPEGALVAVVGQVGCGKSSLLSALLAEMDKVEGHVAIKGVNLSGGQKQRVSLARAVYSNADIYLFDDPLSAVDAHVGKHIFENVIGPKGMLKNKTRILVTHSMSYLPQVDVIIVMSGGKISEMGSYQELLARDGAFAEFLRTYASTEQEQDAEENGVTGVSGPGKEAKQMENGMLVTDSAGKQLQRQLSSSSSYSGDISRHHNSTAELQKAEAKKEETWKLMEADKAQTGQVKLSVYWDYMKAIGLFISFLSIFLFMCNHVSALASNYWLSLWTDDPIVNGTQEHTKVRLSVYGALGISQGIAVFGYSMAVSIGGILASRCLHVDLLHSILRSPMSFFERTPSGNLVNRFSKELDTVDSMIPEVIKMFMGSLFNVIGACIVILLATPIAAIIIPPLGLIYFFVQRFYVASSRQLKRLESVSRSPVYSHFNETLLGVSVIRAFEEQERFIHQSDLKVDENQKAYYPSIVANRWLAVRLECVGNCIVLFAALFAVISRHSLSAGLVGLSVSYSLQVTTYLNWLVRMSSEMETNIVAVERLKEYSETEKEAPWQIQETAPPSSWPQVGRVEFRNYCLRYREDLDFVLRHINVTINGGEKVGIVGRTGAGKSSLTLGLFRINESAEGEIIIDGINIAKIGLHDLRFKITIIPQDPVLFSGSLRMNLDPFSQYSDEEVWTSLELAHLKDFVSALPDKLDHECAEGGENLRVIVLDKGEIQEYGAPSDLLQQRGLFYSMAKDAGLV

SEQ ID NO: 29424 - protein, 1410 aa, Homo sapiens
MALRGFCSADGSDPLWDWNVTWNTSNPDFTKCFQNTVLVWVPCFYLWACFPFYFLYLSRHDRGYIQMTPLNKTKTALGFLLWIVCWADLFYSFWERSRGIFLAPVFLVSPTLLGITMLLATFLIQLERRKGVQSSGIMLTFWLVALVCALAILRSKIMTALKEDAQVDLFRDITFYVYFSLLLIQLVLSCFSDRSPLFSETIHDPNPCPESSASFLSRITFWWITGLIVRGYRQPLEGSDLWSLNKEDTSEQVVPVLVKNWKKECAKTRKQPVKVVYSSKDPAQPKESSKVDANEEVEALIVKSPQKEWNPSLFKVLYKTFGPYFLMSFFFKAIHDLMMFSGPQILKLLIKFVNDTKAPDWQGYFYTVLLFVTACLQTLVLHQYFHICFVSGMRIKTAVIGAVYRKALVITNSARKSSTVGEIVNLMSVDAQRFMDLATYINMIWSAPLQVILALYLLWLNLGPSVLAGVAVMVLMVPVNAVMAMKTKTYQVAHMKSKDNRIKLMNEILNGIKVLKLYAWELAFKDKVLAIRQEELKVLKKSAYLSAVGTFTWVCTPFLVALCTFAVYVTIDENNILDAQTAFVSLALFNILRFPLNILPMVISSIVQASVSLKRLRIFLSHEELEPDSIERRPVKDGGGTNSITVRNATFTWARSDPPTLNGITFSIPEGALVAVVGQVGCGKSSLLSALLAEMDKVEGHVAIKGSVAYVPQQAWIQNDSLRENILFGCQLEEPYYRSVIQACALLPDLEILPSGDRTEIGEKTRILVTHSMSYLPQVDVIIVMSGGKISEMGSYQELLARDGAFAEFLRTYASTEQEQDAEENGVTGVSGPGKEAKQMENGMLVTDSAGKQLQRQLSSSSSYSGDISRHHNSTAELQKAEAKKEETWKLMEADKAQTGQVKLSVYWDYMKAIGLFISFLSIFLFMCNHVSALASNYWLSLWTDDPIVNGTQEHTKVRLSVYGALGISQGIAVFGYSMAVSIGGILASRCLHVDLLHSILRSPMSFFERTPSGNLVNRFSKELDTVDSMIPEVIKMFMGSLFNVIGACIVILLATPIAAIIIPPLGLIYFFVQRFYVASSRQLKRLESVSRSPVYSHFNETLLGVSVIRAFEEQERFIHQSDLKVDENQKAYYPSIVANRWLAVRLECVGNCIVLFAALFAVISRHSLSAGLVGLSVSYSLQVTTYLNWLVRMSSEMETNIVAVERLKEYSETEKEAPWQIQETAPPSSWPQVGRVEFRNYCLRYREDLDFVLRHINVTINGGEKVGIVGRTGAGKSSLTLGLFRINESAEGEIIIDGINIAKIGLHDLRFKITIIPQDPVLFSGSLRMNLDPFSQYSDEEVWTSLELAHLKDFVSALPDKLDHECAEGGENLRVIVLDKGEIQEYGAPSDLLQQRGLFYSMAKDAGLV

SEQ ID NO: 29425 - protein, 1351 aa, Homo sapiens
MALRGFCSADGSDPLWDWNVTWNTSNPDFTKCFQNTVLVWVPCFYLWACFPFYFLYLSRHDRGYIQMTPLNKTKTALGFLLWIVCWADLFYSFWERSRGIFLAPVFLVSPTLLGITMLLATFLIQLERRKGVQSSGIMLTFWLVALVCALAILRSKIMTALKEDAQVDLFRDITFYVYFSLLLIQLVLSCFSDRSPLFSETIHDPNPCPESSASFLSRITFWWITGLIVRGYRQPLEGSDLWSLNKEDTSEQVVPVLVKNWKKECAKTRKQPVKVVYSSKDPAQPKESSKVDANEEVEALIVKSPQKEWNPSLFKVLYKTFGPYFLMSFFFKAIHDLMMFSGPQILKLLIKFVNDTKAPDWQGYFYTVLLFVTACLQTLVLHQYFHICFVSGMRIKTAVIGAVYRKALVITNSARKSSTVGEIVNLMSVDAQRFMDLATYINMIWSAPLQVILALYLLWLNLGPSVLAGVAVMVLMVPVNAVMAMKTKTYQVAHMKSKDNRIKLMNEILNGIKVLKLYAWELAFKDKVLAIRQEELKVLKKSAYLSAVGTFTWVCTPFLVALCTFAVYVTIDENNILDAQTAFVSLALFNILRFPLNILPMVISSIVQASVSLKRLRIFLSHEELEPDSIERRPVKDGGGTNSITVRNATFTWARSDPPTLNGITFSIPEGALVAVVGQVGCGKSSLLSALLAEMDKVEGHVAIKTRILVTHSMSYLPQVDVIIVMSGGKISEMGSYQELLARDGAFAEFLRTYASTEQEQDAEENGVTGVSGPGKEAKQMENGMLVTDSAGKQLQRQLSSSSSYSGDISRHHNSTAELQKAEAKKEETWKLMEADKAQTGQVKLSVYWDYMKAIGLFISFLSIFLFMCNHVSALASNYWLSLWTDDPIVNGTQEHTKVRLSVYGALGISQGIAVFGYSMAVSIGGILASRCLHVDLLHSILRSPMSFFERTPSGNLVNRFSKELDTVDSMIPEVIKMFMGSLFNVIGACIVILLATPIAAIIIPPLGLIYFFVQRFYVASSRQLKRLESVSRSPVYSHFNETLLGVSVIRAFEEQERFIHQSDLKVDENQKAYYPSIVANRWLAVRLECVGNCIVLFAALFAVISRHSLSAGLVGLSVSYSLQVTTYLNWLVRMSSEMETNIVAVERLKEYSETEKEAPWQIQETAPPSSWPQVGRVEFRNYCLRYREDLDFVLRHINVTINGGEKVGIVGRTGAGKSSLTLGLFRINESAEGEIIIDGINIAKIGLHDLRFKITIIPQDPVLFSGSLRMNLDPFSQYSDEEVWTSLELAHLKDFVSALPDKLDHECAEGGENLRVIVLDKGEIQEYGAPSDLLQQRGLFYSMAKDAGLV

SEQ ID NO: 29426 - protein, 1541 aa, Homo sapiens
MALRGFCSADGSDPLWDWNVTWNTSNPDFTKCFQNTVLVWVPCFYLWACFPFYFLYLSRHDRGYIQMTPLNKTKTALGFLLWIVCWADLFYSFWERSRGIFLAPVFLVSPTLLGITMLLATFLIQLERRKGVQSSGIMLTFWLVALVCALAILRSKIMTALKEDAQVDLFRDITFYVYFSLLLIQLVLSCFSDRSPLFSETIHDPNPCPESSASFLSRITFWWITGLIVRGYRQPLEGSDLWSLNKEDTSEQVVPVLVKNWKKECAKTRKQPVKVVYSSKDPAQPKESSKVDANEEVEALIVKSPQKEWNPSLFKVLYKTFGPYFLMSFFFKAIHDLMMFSGPQILKLLIKFVNDTKAPDWQGYFYTVLLFVTACLQTLVLHQYFHICFVSGMRIKTAVIGAVYRKALVITNSARKSSTVGEIVNLMSVDAQRFMDLATYINMIWSAPLQVILALYLLWLNLGPSVLAGVAVMVLMVPVNAVMAMKTKTYQVAHMKSKDNRIKLMNEILNGIKVLKLYAWELAFKDKVLAIRQEELKVLKKSAYLSAVGTFTWVCTPFLVALCTFAVYVTIDENNILDAQTAFVSLALFNILRFPLNILPMVISSIVQASVSLKRLRIFLSHEELEPDSIERRPVKDGGGTNSITVRNATFTWARSDPPTLNGITFSIPEGALVAVVGQVGCGKSSLLSALLAEMDKVEGHVAIKGSVAYVPQQAWIQNDSLRENILFGCQLEEPYYRSVIQACALLPDLEILPSGDRTEIGEKGVNLSGGQKQRVSLARAVYSNADIYLFDDPLSAVDAHVGKHIFENVIGPKGMLKNKTRILVTHSMSYLPQVDVIIVMSGGKISEMGSYQELLARDGAFAEFLRTYASTEQEQDAEENGSTVMDEEEAGVTGVSGPGKEAKQMENGMLVTDSAGKQLQRQLSSSSSYSGDISRHHNSTAELQKAEAKKEETWKLMEADKAQTGQVKLSVYWDYMKAIGLFISFLSIFLFMCNHVSALASNYWLSLWTDDPIVNGTQEHTKVRLSVYGALGISQGIAVFGYSMAVSIGGILASRCLHVDLLHSILRSPMSFFERTPSGNLVNRFSKELDTVDSMIPEVIKMFMGSLFNVIGACIVILLATPIAAIIIPPLGLIYFFVQRFYVASSRQLKRLESVSRSPVYSHFNETLLGVSVIRAFEEQERFIHQSDLKVDENQKAYYPSIVANRWLAVRLECVGNCIVLFAALFAVISRHSLSAGLVGLSVSYSLQVTTYLNWLVRMSSEMETNIVAVERLKEYSETEKEAPWQIQETAPPSSWPQVGRVEFRNYCLRYREDLDFVLRHINVTINGGEKVGIVGRTGAGKSSLTLGLFRINESAEGEIIIDGINIAKIGLHDLRFKITIIPQDPVLFSGSLRMNLDPFSQYSDEEVWTSLELAHLKDFVSALPDKLDHECAEGGENLSVGQRQLVCLARALLRKTKILVLDEATAAVDLETDDLIQSTIRTQFEDCTVLTIAHRLNTIMDYTRVIVLDKGEIQEYGAPSDLLQQRGLFYSMAKDAGLV

SEQ ID NO: 29427 - protein, 914 aa, Homo sapiens
MENWPTPSELVNTGFQSVLSQGNKKPQNRKEKEEKVEKRSNSDSKENRETKLNGPGENVSEDEAQSSNQRKRANKHKWVPLHLDVVRSESQERPGSRNSSRCQPEANKPTHNNRRNDTRSWKRDREKRDDQDDVSSVRSEGGNIRGSFRGRGRGRGRGRGRGRGNPRLNFDYSYGYQEHGERTDQPFQTELNTSMMYYYDDGTGVQVYPVEEALLKEYIKRQIEYYFSVENLERDFFLRGKMDEQGFLPISLIAGFQRVQALTTNLNLILEALKDSTEVEIVDEKMRKKIEPEKWPIPGPPPRSVPPTDFSQLIDCPEFVPGQAFCSHTESAPNSPRIGSPLSPKKNSETSILQAMSRGLSTSLPDLDSEPWIEVKKRHQPAPVKLRESVSVPEGSLNQLCSSEEPEQEELDFLFDEEIEQIGRKNTFTDWSDNDSDYEIDDQDLNKILIVTQTPPYVKKHPGGDRTGTHMSRAKITSELAKVINDGLYYYEQDLWMEEDENKHTAIKQEVENFKKLNLISKEQFENLTPELPFEPNQEVPVAPSQSRQGGVQGVLHIPKKDLTDELAQKLFDVSEITSAAMVHSLPTAVPESPRIHPTRTPKTPRTPRLQDPNKTPRFYPVVKEPKAIDVKSPRKRKTRHSTNPPLECHVGWVMDSRDRGPGTSSVSTSNASPSEGAPLAGSYGCTPHSFPKFQHPSHELLKENGFTQQVYHKYRRRCLSERKRLGIGQSQEMNTLFRFWSFFLRDHFNKKMYEEFRQLAWEDAKENYRYGLECLFRFYSYGLEKKFRREIFQDFQEETKKDYESGQLYGLEKFWAYLKYSQSKTQSIDPKLQEYLCSFKRLEDFRVDPPISDEFGRKRHSSTSGEESNRHRLPPNSSTKPPNAAKPTSTSELQVPINSPRRNISPESSDNSH

SEQ ID NO: 29428 - protein, 855 aa, Homo sapiens
MENWPTPSELVNTGFQSVLSQGNKKPQNRKEKEEKVEKRSNSDSKENRETKLNGPGENVSEDEAQSSNQRKRGWKRDREKRDDQDDVSSVRSEGGNIRGSFRGRGRGRGRGRGRGRGNPRLNFDYSYGYQEHGERTDQPFQTELNTSMMYYYDDGTGVQVYPVEEALLKEYIKRQIEYYFSVENLERDFFLRGKMDEQGFLPISLIAGFQRVQALTTNLNLILEALKDSTEVEIVDEKMRKKIEPEKWPIPGPPPRSVPPTDFSQLIDCPEFVPGQAFCSHTESAPNSPRIGSPLSPKKNSETSILQAMSRGLSTSLPDLDSEPWIEVKKRHQPAPVKLRESVSVPEGSLNQLCSSEEPEQEELDFLFDEEIEQIGRKNTFTDWSDNDSDYEIDDQDLNKILIVTQTPPYVKKHPGGDRTGTHMSRAKITSELAKVINDGLYYYEQDLWMEEDENKHTAIKQEVENFKKLNLISKEQFENLTPELPFEPNQEVPVAPSQSRQDLTDELAQKLFDVSEITSAAMVHSLPTAVPESPRIHPTRTPKTPRTPRLQDPNKTPRFYPVVKEPKAIDVKSPRKRKTRHSTNPPLECHVGWVMDSRDRGPGTSSVSTSNASPSEGAPLAGSYGCTPHSFPKFQHPSHELLKENGFTQQVYHKYRRRCLSERKRLGIGQSQEMNTLFRFWSFFLRDHFNKKMYEEFRQLAWEDAKENYRYGLECLFRFYSYGLEKKFRREIFQDFQEETKKDYESGQLYGLEKFWAYLKYSQSKTQSIDPKLQEYLCSFKRLEDFRVDPPISDEFGRKRHSSTSGEESNRHRLPPNSSTKPPNAAKPTSTSELQVPINSPRRNISPESSDNSH

SEQ ID NO: 29429 - protein, 335 aa, Homo sapiens
MENWPTPSELVNTGFQSVLSQGNKKPQNRKEKEEKVEKRSNSDSKENRETKLNGPGENVSEDEAQSSNQRKRANKHKWVPLHLDVVRSESQERPGSRNSSRCQPEANKPTHNNRRNDTRSWKRDREKRDDQDDVSSVRSEGGNIRGSFRGRGRGRGRGRGRGRGNPRLNFDYSYGYQEHGERTDQPFQTELNTSMMYYYDDGTGVQVYPVEEALLKEYIKRQIEYYFSVENLERDFFLRGKMDEQGFLPISLIAGFQRVQALTTNLNLILEALKDSTEVEIVDEKMRKKIEPEKWPIPGPPPRSVPPTDFSQLIDCPEFVPGQAFCSHTVRVMIF

SEQ ID NO: 29430 - protein, 328 aa, Homo sapiens
MMYYYDDGTGVQVYPVEEALLKEYIKRQIEYYFSVENLERDFFLRGKMDEQGFLPISLIAGFQRVQALTTNLNLILEALKDSTEVEIVDEKMRKKIEPEKWPIPGPPPRSVPPTDFSQLIDCPEFVPGQAFCSHTESAPNSPRIGSPLSPKKNSETSILQAMSRGLSTSLPDLDSEPWIEVKKRHQPAPVKLRESVSVPEGSLNQLCSSEEPEQEELDFLFDEEIEQIGRKNTFTDWSDNDSDYEIDDQDLNKILIVTQTPPYVKKHPGGDRTGTHMSRAKITSELAKVINDGLYYYEQDLWMEEDENKHTAIKVIVSGQHLSTDALF

SEQ ID NO: 29431 - protein, 281 aa, Homo sapiens
MVHSLPTAVPESPRIHPTRTPKTPRTPRLQDPNKTPRFYPVVKEPKAIDVKSPRKRKTRHSTNPPLECHVGWVMDSRDRGPGTSSVSTSNASPSEGAPLAGSYGCTPHSFPKFQHPSHELLKENGFTQQVYHKYRRRCLSERKRLGIGQSQEMNTLFRFWSFFLRDHFNKKMYEEFRQLAWEDAKENYRYGLECLFRFYSYGLEKKFRREIFQDFQEETKKDYESGQLYGLEKFWAYLKYSQSKTQSIDPKLQEYLCSFKRLEDFRVDNHHDRLLLLIINI

SEQ ID NO: 29432 - protein, 247 aa, Homo sapiens
MDSRDRGPGTSSVSTSNASPSEGAPLAGSYGCTPHSFPKFQHPSHELLKENGFTQQVYHKYRRRCLSERKRLGIGQSQEMNTLFRFWSFFLRDHFNKKMYEEFRQLAWEDAKENYRYGLECLFRFYSYGLEKKFRREIFQDFQEETKKDYESGQLYGLEKFWAYLKYSQSKTQSIDPKLQEYLCSFKRLEDFRVDPPISDEFGRKRHSSTSGEESNRHRLPPNSSTKPPNAAKPTSTSELQEADPIE

SEQ ID NO: 29433 - protein, 201 aa, Homo sapiens
MDSRDRGPGTSSVSTSNASPSEGAPLAGSYGCTPHSFPKFQHPSHELLKENGFTQQVYHKYRRRCLSERKRLGIGQSQEMNTLFRFWSFFLRDHFNKKMYEEFRQLAWEDAKENYRYGLECLFRFYSYGLEKKFRREIFQDFQEETKKDYESGQLYGLEKFWAYLKYSQSKTQSIDPKLQEYLCSFKRLEDFRVDEADPIE

SEQ ID NO: 29434 - protein, 124 aa, Homo sapiens
MRNLDNLLGKMQKKITGQLYGLEKFWAYLKYSQSKTQSIDPKLQEYLCSFKRLEDFRVDPPISDEFGRKRHSSTSGEESNRHRLPPNSSTKPPNAAKPTSTSELQVPINSPRRNISPESSDNSH

SEQ ID NO: 29435 - protein, 787 aa, Homo sapiens
MENWPTPSELVNTGFQSVLSQGNKKPQNRKEKEEKVEKRSNSDSKENRETKLNGPGENVSEDEAQSSNQRKRANKHKWVPLHLDVVRSESQERPGSRNSSRCQPEANKPTHNNRRNDTRSWKRDREKRDDQDDVSSVRSEGGNIRGSFRGRGRGRGRGRGRGRGNPRLNFDYSYGYQEHGERTDQPFQTELNTSMMYYYDDGTGVQVYPVEEALLKEYIKRQIEYYFSVENLERDFFLRGKMDEQGFLPISLIAGFQRVQALTTNLNLILEALKDSTEVEIVDEKMRKKIEPEKWPIPGPPPRSVPPTDFSQLIDCPEFVPGQAFCSHTESAPNSPRIGSPLSPKKNSETSILQAMSRGLSTSLPDLDSEPWIEVKKRHQPAPVKLRESVSVPEGSLNQLCSSEEPEQEELDFLFDEEIEQIGRKNTFTDWSDNDSDYEIDDQDLNKILIVTQTPPYVKKHPGGDRTGTHMSRAKITSELAKVINDGLYYYEQDLWMEEDENKHTAIKQEVENFKKLNLISKEQFENLTPELPFEPNQEVPVAPSQSRQGGVQGVLHIPKKDLTDELAQKLFDVSEITSAAMVHSLPTAVPESPRIHPTRTPKTPRTPRLQDPNKTPRFYPVVKEPKAIDVKSPRKRKTRHSTNPPLECHVGWVMDSRDRGPGTSSVSTSNASPSEGAPLAGSYGCTPHSFPKFQHPSHELLKENGFTQQVYHKYRRRCLSERKRLGIGQSQEMNTLFRFWSFFLRDHFNKKMYEEFRQLAWEDAKENYRSAVWTRKVLGLFEIFSI

SEQ ID NO: 29436 - protein, 370 aa, Homo sapiens
MAITLEEAPWLGWLLVKALMRFAFMVVNNLVAIPSYICYVIILQPLRVLDSKRFWYIEGIMYKWLLGMVASWGWYAGYTVMEWGEDIKAVSKDEAVMLVNHQATGDVCTLMMCLQDKGLVVAQMMWLMDHIFKYTNFGIVSLVHGDFFIRQGRSYRDQQLLLLKKHLENNYRSRDRKWIVLFPEGGFLRKRRETSQAFAKKNNLPFLTNVTLPRSGATKIILNALVAQQKNGSPAGGDAKELDSKSKGLQWIIDTTIAYPKAEPIDIQTWILGYRKPTVTHVHYRIFPIKDVPLETDDLTTWLYQRFVEKEDLLSHFYETGAFPPSKGHKEAVSREMTLSNLWIFLIQSFAFLSGYMWYNIIQYFYHCLF

SEQ ID NO: 29437 - protein, 721 aa, Homo sapiens
MLPRGRPRALGAAALLLLLLLLGFLLFGGDLGCERREPGGRAGAPGCFPGPLMPRVPPDGRLRRAAALDGDPGAGPGDHNRSDCGPQPPPPPKCELLHVAIVCAGHNSSRDVITLVKSMLFYRKNPLHLHLVTDAVARNILETLFHTWMVPAVRVSFYHADQLKPQVSWIPNKHYSGLYGLMKLVLPSALPAELARVIVLDTDVTFASDISELWALFAHFSDTQAIGLVENQSDWYLGNLWKNHRPWPALGRGFNTGVILLRLDRLRQAGWEQMWRLTARRELLSLPATSLADQDIFNAVIKEHPGLVQRLPCVWNVQLSDHTLAERCYSEASDLKVIHWNSPKKLRVKNKHVEFFRNFYLTFLEYDGNLLRRELFVCPSQPPPGAEQLQQALAQLDEEDPCFEFRQQQLTVHRVHVTFLPHEPPPPRPHDVTLVAQLSMDRLQMLEALCRHWPGPMSLALYLTDAEAQQFLHFVEASPVLAARQDVAYHVVYREGPLYPVNQLRNVALAQALTPYVFLSDIDFLPAYSLYDYLRASIEQLGLGSRRKAALVVPAFETLRYRFSFPHSKVELLALLDAGTLYTFRYHEWPRGHAPTDYARWREAQAPYRVQWAANYEPYVVVPRDCPRYDPRFVGFGWNKVAHIVELDAQEYELLVLPEAFTIHLPHAPSLDISRFRSSPTYRDCLQALKDEFHQDLSRHHGAAALKYLPALQQPQSPARG

SEQ ID NO: 29438 - protein, 1437 aa, Homo sapiens
MKDIDIGKEYIIPSPGYRSVRERTSTSGTHRDREDSKFRRTRPLECQDALETAARAEGLSLDASMHSQLRILDEEHPKGKYHHGLSALKPIRTTSKHQHPVDNAGLFSCMTFSWLSSLARVAHKKGELSMEDVWSLSKHESSDVNCRRLERLWQEELNEVGPDAASLRRVVWIFCRTRLILSIVCLMITQLAGFSGPAFMVKHLLEYTQATESNLQYSLLLVLGLLLTEIVRSWSLALTWALNYRTGVRLRGAILTMAFKKILKLKNIKEKSLGELINICSNDGQRMFEAAAVGSLLAGGPVVAILGMIYNVIILGPTGFLGSAVFILFYPAMMFASRLTAYFRRKCVAATDERVQKMNEVLTYIKFIKMYAWVKAFSQSVQKIREEERRILEKAGYFQSITVGVAPIVVVIASVVTFSVHMTLGFDLTAAQAFTVVTVFNSMTFALKVTPFSVKSLSEASVAVDRFKSLFLMEEVHMIKNKPASPHIKIEMKNATLAWDSSHSSIQNSPKLTPKMKKDKRASRGKKEKVRQLQRTEHQAVLAEQKGHLLLDSDERPSPEEEEGKHIHLGHLRLQRTLHSIDLEIQEGKLVGICGSVGSGKTSLISAILGQMTLLEGSIAISGTFAYVAQQAWILNATLRDNILFGKEYDEERYNSVLNSCCLRPDLAILPSSDLTEIGERGANLSGGQRQRISLARALYSDRSIYILDDPLSALDAHVGNHIFNSAIRKHLKSKTVLFVTHQLQYLVDCDEVIFMKEGCITERGTHEELMNLNGDYATIFNNLLLGETPPVEINSKKETSGSQKKSQDKGPKTGSVKKEKAVKPEEGQLVQLEEKGQGSVPWSVYGVYIQAAGGPLAFLVIMALFMLNVGSTAFSTWWLSYWIKQGSGNTTVTRGNETSVSDSMKDNPHMQYYASIYALSMAVMLILKAIRGVVFVKGTLRASSRLHDELFRRILRSPMKFFDTTPTGRILNRFSKDMDEVDVRLPFQAEMFIQNVILVFFCVGMIAGVFPWFLVAVGPLVILFSVLHIVSRVLIRELKRLDNITQSPFLSHITSSIQGLATIHAYNKGQEFLHRYQELLDDNQAPFFLFTCAMRWLAVRLDLISIALITTTGLMIVLMHGQIPPAYAGLAISYAVQLTGLFQFTVRLASETEARFTSVERINHYIKTLSLEAPARIKNKAPSPDWPQEGEVTFENAEMRYRENLPLVLKKVSFTIKPKEKIGIVGRTGSGKSSLGMALFRLVELSGGCIKIDGVRISDIGLADLRSKLSIIPQEPVLFSGTVRSNLDPFNQYTEDQIWDALERTHMKECIAQLPLKLESEVMENGDNFSVGERQLLCIARALLRHCKILILDEATAAMDTETDLLIQETIREAFADCTMLTIAHRLHTVLGSDRIMVLAQGQVVEFDTPSVLLSNDSSRFYAMFAAAENKVAVKG

SEQ ID NO: 29439 - protein, 225 aa, Homo sapiens
MKDIDIGKEYIIPSPGYRSVRERTSTSGTHRDREDSKFRRTRPLECQDALETAARAEGLSLDASMHSQLRILDEEHPKGKYHHGLSALKPIRTTSKHQHPVDNAGLFSCMTFSWLSSLARVAHKKGELSMEDVWSLSKHESSDVNCRRLERLWQEELNEVGPDAASLRRVVWIFCRTRLILSIVCLMITQLAGFSGPPSFGDCSISAEVCGNRLHCTAILLSCFT

SEQ ID NO: 29440 - protein, 212 aa, Homo sapiens
MKDIDIGKEYIIPSPGYRSVRERTSTSGTHRDREDSKFRRTRPLECQDALETAARAEGLSLDASMHSQLRILDEEHPKGKYHHGLSALKPIRTTSKHQHPVDNAGLFSCMTFSWLSSLARVAHKKGELSMEDVWSLSKHESSDVNCRRLERLWQEELNEVGPDAASLRRVVWIFCRTRLILSIVCLMITQLAGFSGPLAWCCQDLDLGGVSL

SEQ ID NO: 29441 - protein, 208 aa, Homo sapiens
MKDIDIGKEYIIPSPGYRSVRERTSTSGTHRDREDSKFRRTRPLECQDALETAARAEGLSLDASMHSQLRILDEEHPKGKYHHGLSALKPIRTTSKHQHPVDNAGLFSCMTFSWLSSLARVAHKKGELSMEDVWSLSKHESSDVNCRRLERLWQEELNEVGPDAASLRRVVWIFCRTRLILSIVCLMITQLAGFSGPNFQDGCILRSE

SEQ ID NO: 29442 - protein, 1394 aa, Homo sapiens
MKDIDIGKEYIIPSPGYRSVRERTSTSGTHRDREDSKFRRTRPLECQDALETAARAEGLSLDASMHSQLRILDEEHPKGKYHHGLSALKPIRTTSKHQHPVDNAGLFSCMTFSWLSSLARVAHKKGELSMEDVWSLSKHESSDVNCRRLERLWQEELNEVGPDAASLRRVVWIFCRTRLILSIVCLMITQLAGFSGPAFMVKHLLEYTQATESNLQYSLLLVLGLLLTEIVRSWSLALTWALNYRTGVRLRGAILTMAFKKILKLKNIKEKSLGELINICSNDGQRMFEAAAVGSLLAGGPVVAILGMIYNVIILGPTGFLGSAVFILFYPAMMFASRLTAYFRRKCVAATDERVQKMNEVLTYIKFIKMYAWVKAFSQSVQKIREEERRILEKAGYFQSITVGVAPIVVVIASVVTFSVHMTLGFDLTAAQAFTVVTVFNSMTFALKVTPFSVKSLSEASVAVDRFKSLFLMEEVHMIKNKPASPHIKIEMKNATLAWDSSHSSIQNSPKLTPKMKKDKRASRGKKEKVRQLQRTEHQAVLAEQKGHLLLDSDERPSPEEEEGKHIHLGHLRLQRTLHSIDLEIQEGKLVGICGSVGSGKTSLISAILGQMTLLEGSIAISGTFAYVAQQAWILNATLRDNILFGKEYDEERYNSVLNSCCLRPDLAILPSSDLTEIGERGANLSGGQRQRISLARALYSDRSIYILDDPLSALDAHVGNHIFNSAIRKHLKSKTVLFVTHQLQYLVDCDEVIFMKEGCITERGTHEELMNLNGDYATIFNNLLLGETPPVEINSKKETSGSQKKSQDKGPKTGSVKKEKAVKPEEGQLVQLEEKGQGSVPWSVYGVYIQAAGGPLAFLVIMALFMLNVGSTAFSTWWLSYWIKQGSGNTTVTRGNETSVSDSMKDNPHMQYYASIYALSMAVMLILKAIRGVVFVKGTLRASSRLHDELFRRILRSPMKFFDTTPTGRILNRFSKDMDEVDVRLPFQAEMFIQNVILVFFCVGMIAGVFPWFLVAVGPLVILFSVLHIVSRYQELLDDNQAPFFLFTCAMRWLAVRLDLISIALITTTGLMIVLMHGQIPPAYAGLAISYAVQLTGLFQFTVRLASETEARFTSVERINHYIKTLSLEAPARIKNKAPSPDWPQEGEVTFENAEMRYRENLPLVLKKVSFTIKPKEKIGIVGRTGSGKSSLGMALFRLVELSGGCIKIDGVRISDIGLADLRSKLSIIPQEPVLFSGTVRSNLDPFNQYTEDQIWDALERTHMKECIAQLPLKLESEVMENGDNFSVGERQLLCIARALLRHCKILILDEATAAMDTETDLLIQETIREAFADCTMLTIAHRLHTVLGSDRIMVLAQGQVVEFDTPSVLLSNDSSRFYAMFAAAENKVAVKG

SEQ ID NO: 29443 - protein, 292 aa, Homo sapiens
MLGAWAVEGTAVALLRLLLLLLPPAIRGPGLGVAGVAGAAGAGLPESVIWAVNAGGEAHVDVHGIHFRKDPLEGRVGRASDYGMKLPILRSNPEDQILYQTERYNEETFGYEVPIKEEGDYVLVLKFAEVYFAQSQQKVFDVRLNGHVVVKDLDIFDRVGHSTAHDEIIPMSIRKGKLSVQGEVSTFTGKLYIEFVKGYYDNPKVCALYIMAGTVDDVPKLQPHPGLEKKEEEEEEEEYDEGSNLKKQTNKNRVQSGPRTPNPYASDNSSLMFPILVAFGVFIPTLFCLCRL

SEQ ID NO: 29444 - protein, 190 aa, Homo sapiens
MDLSVLPNNNHPDKFLQLDVKSLTRSSALLQASLVRFPGGNYPAAQHWQNLVYSQREKKNIAAQRIRGSSADSLVTADSPPPSMSSVMKNNPLYGDLSLEEAMEERKKNPSWTIEEYDKHSLHTNLSGHLKENPNDLRFWLGDMYTPGFDTLLKKEEKQEKHSKFCRMGLILLVVISILVTIVTIITFFT

SEQ ID NO: 29445 - protein, 433 aa, Homo sapiens
MVWKVAVFLSVALGIGAVPIDDPEDGGKHWVVIVAGSNGWYNYRHQADACHAYQIIHRNGIPDEQIVVMMYDDIAYSEDNPTPGIVINRPNGTDVYQGVPKDYTGEDVTPQNFLAVLRGDAEAVKGIGSGKVLKSGPQDHVFIYFTDHGSTGILVFPNEDLHVKDLNETIHYMYKHKMYRKMVFYIEACESGSMMNHLPDNINVYATTAANPRESSYACYYDEKRSTYLGDWYSVNWMEDSDVEDLTKETLHKQYHLVKSHTNTSHVMQYGNKTISTMKVMQFQGMKRKASSPVPLPPVTHLDLTPSPDVPLTIMKRKLMNTNDLEESRQLTEEIQRHLDARHLIEKSVRKIVSLLAASEAEVEQLLSERAPLTGHSCYPEALLHFRTHCFNWHSPTYEYALRHLYVLVNLCEKPYPLHRIKLSMDHVCLGHY

SEQ ID NO: 29446 - protein, 376 aa, Homo sapiens
MVWKVAVFLSVALGIGAVPIDDPEDGGKHWVVIVAGSNGWYNYRHQADACHAYQIIHRNGIPDEQIVVMMYDDIAYSEDNPTPGIVINRPNGTDVYQGVPKDYTGEDVTPQNFLAVLRGDAEAVKGIGSGKVLKSGPQDHVFIYFTDHGSTGILVFPNEDLHVKDLNETIHYMYKHKMYRKMVFYIEACESGSMMNHLPDNINVYATTAANPRESSYACYYDEKRSTYLGDWYSVNWMEDSDVEDLTKETLHKQYHLVKSHTNTSHVMQYGNKTISTMKVMQFQGMKRKASSPVPLPPVTHLDLTPSPDVPLTIMKRKLMNTNDLEESRQLTEEIQRHLDYEYALRHLYVLVNLCEKPYPLHRIKLSMDHVCLGHY

SEQ ID NO: 29447 - protein, 372 aa, Homo sapiens
MVWKVAVFLSVALGIGAVPIDDPEDGGKHWVVIVAGSNGWYNYRHQADACHAYQIIHRNGIPDEQIVVMMYDDIAYSEDNPTPGIVINRPNGTDVYQGVPKDYTGEDVTPQNFLAVLRGDAEAVKGIGSGKVLKSGPQDHVFIYFTDHGSTGILVFPNEDLHVKDLNETIHYMYKHKMYRKMVFYIEACESGSMMNHLPDNINVYATTAANPRESSYACYYDEKRSTYLGDWYSVNWMEDSDVEDLTKETLHKQYHLVKSHTNTSHVMQYGNKTISTMKVMQFQGMKRKASSPVPLPPVTHLDLTPSPDVPLTIMKRKLMNTNDLEESRQLTEEIQRHLDDKIVHGPRVPWSLLKSCLLEAFPSVSAPPTVC

SEQ ID NO: 29448 - protein, 734 aa, Homo sapiens
MSWESGAGPGLGSQGMDLVWSAWYGKCVKGKGSLPLSAHGIVVAWLSRAEWDQVTVYLFCDDHKLQRYALNRITVWRSRSGNELPLAVASTADLIRCKLLDVTGGLGTDELRLLYGMALVRFVNLISERKTKFAKVPLKCLAQEVNIPDWIVDLRHELTHKKMPHINDCRRGCYFVLDWLQKTYWCRQLENSLRETWELEEFREGIEEEDQEEDKNIVVDDITEQKPEPQDDGKSTESDVKADGDSKGSEEVDSHCKKALSHKELYERARELLVSYEEEQFTVLEKFRYLPKAIKAWNNPSPRVECVLAELKGVTCENREAVLDAFLDDGFLVPTFEQLAALQIEYEDGQTEVQRGEGTDPKSHKNVDLNDVLVPKPFSQFWQPLLRGLHSQNFTQALLERMLSELPALGISGIRPTYILRWTVELIVANTKTGRNARRFSAGQWEARRGWRLFNCSASLDWPRMVESCLGSPCWASPQLLRIIFKAMGQGLPDEEQEKLLRICSIYTQSGENSLVQEGSEASPIGKSPYTLDSLYWSVKPASSSFGSEAKAQQQEEQGSVNDVKEEEKEEKEVLPDQVEEEEENDDQEEEEEDEDDEDDEEEDRMEVGPFSTGQESPTAENARLLAQKRGALQGSAWQVSSEDVRWDTFPLGRMPGQTEDPAELMLENYDTMYLLDQPVLEQRLEPSTCKTDTLGLSCGVGSGNCSNSSSSNFEGLLWSQGQLHGLKTGLQLF

SEQ ID NO: 29449 - protein, 717 aa, Homo sapiens
MSWESGAGPGLGSQGMDLVWSAWYGKCVKGKGSLPLSAHGIVVAWLSRAEWDQVTVYLFCDDHKLQRYALNRITVWRSRSGNELPLAVASTADLIRCKLLDVTGGLGTDELRLLYGMALVRFVNLISERKTKFAKVPLKCLAQEVNIPDWIVDLRHELTHKKMPHINDCRRGCYFVLDWLQKTYWCRQLENSLRETWELEEFREGIEEEDQEEDKNIVVDDITEQKPEPQDDGKSTESDVKADGDSKGSEEVDSHCKKALSHKELYERARELLVSYEEEQFTVLEKFRYLPKAIKAWNNPSPRVECVLAELKGVTCENREAVLDAFLDDGFLVPTFEQLAALQIEYEENVDLNDVLVPKPFSQFWQPLLRGLHSQNFTQALLERMLSELPALGISGIRPTYILRWTVELIVANTKTGRNARRFSAGQWEARRGWRLFNCSASLDWPRMVESCLGSPCWASPQLLRIIFKAMGQGLPDEEQEKLLRICSIYTQSGENSLVQEGSEASPIGKSPYTLDSLYWSVKPASSSFGSEAKAQQQEEQGSVNDVKEEEKEEKEVLPDQVEEEEENDDQEEEEEDEDDEDDEEEDRMEVGPFSTGQESPTAENARLLAQKRGALQGSAWQVSSEDVRWDTFPLGRMPGQTEDPAELMLENYDTMYLLDQPVLEQRLEPSTCKTDTLGLSCGVGSGNCSNSSSSNFEGLLWSQGQLHGLKTGLQLF

SEQ ID NO: 29450 - protein, 675 aa, Homo sapiens
MSWESGAGPGLGSQGMDLVWSAWYGKCVKGKGSLPLSAHGIVVAWLSRAEWDQVTVYLFCDDHKLQRYALNRITVWRSRFVNLISERKTKFAKVPLKCLAQEVNIPDWIVDLRHELTHKKMPHINDCRRGCYFVLDWLQKTYWCRQLENSLRETWELEEFREGIEEEDQEEDKNIVVDDITEQKPEPQDDGKSTESDVKADGDSKGSEEVDSHCKKALSHKELYERARELLVSYEEEQFTVLEKFRYLPKAIKAWNNPSPRVECVLAELKGVTCENREAVLDAFLDDGFLVPTFEQLAALQIEYEENVDLNDVLVPKPFSQFWQPLLRGLHSQNFTQALLERMLSELPALGISGIRPTYILRWTVELIVANTKTGRNARRFSAGQWEARRGWRLFNCSASLDWPRMVESCLGSPCWASPQLLRIIFKAMGQGLPDEEQEKLLRICSIYTQSGENSLVQEGSEASPIGKSPYTLDSLYWSVKPASSSFGSEAKAQQQEEQGSVNDVKEEEKEEKEVLPDQVEEEEENDDQEEEEEDEDDEDDEEEDRMEVGPFSTGQESPTAENARLLAQKRGALQGSAWQVSSEDVRWDTFPLGRMPGQTEDPAELMLENYDTMYLLDQPVLEQRLEPSTCKTDTLGLSCGVGSGNCSNSSSSNFEGLLWSQGQLHGLKTGLQLF

SEQ ID NO: 29451 - protein, 291 aa, Homo sapiens
MSWESGAGPGLGSQGMDLVWSAWYGKCVKGKGSLPLSAHGIVVAWLSRAEWDQVTVYLFCDDHKLQRYALNRITVWRSRSGNELPLAVASTADLIRCKLLDVTGGLGTDELRLLYGMALVRFVNLISERKTKFAKVPLKCLAQEVNIPDWIVDLRHELTHKKMPHINDCRRGCYFVLDWLQKTYWCRQLENSLRETWELEEFREGIEEEDQEEDKNIVVDDITEQKPEPQDDGKSTESDVKADGDSKGSEEVDSHCKKALSHKELYERARELLVSYEEEQFTGGCAGCFSG

SEQ ID NO: 29452 - protein, 967 aa, Homo sapiens
MPSPPGLRALWLCAALCASRRAGGAPQPGPGPTACPAPCHCQEDGIMLSADCSELGLSAVPGDLDPLTAYLDLSMNNLTELQPGLFHHLRFLEELRLSGNHLSHIPGQAFSGLYSLKILMLQNNQLGGIPAEALWELPSLQSLRLDANLISLVPERSFEGLSSLRHLWLDDNALTEIPVRALNNLPALQAMTLALNRISHIPDYAFQNLTSLVVLHLHNNRIQHLGTHSFEGLHNLETLDLNYNKLQEFPVAIRTLGRLQELGFHNNNIKAIPEKAFMGNPLLQTIHFYDNPIQFVGRSAFQYLPKLHTLSLNGAMDIQEFPDLKGTTSLEILTLTRAGIRLLPSGMCQQLPRLRVLELSHNQIEELPSLHRCQKLEEIGLQHNRIWEIGADTFSQLSSLQALDLSWNAIRSIHPEAFSTLHSLVKLDLTDNQLTTLPLAGLGGLMHLKLKGNLALSQAFSKDSFPKLRILEVPYAYQCCPYGMCASFFKASGQWEAEDLHLDDEESSKRPLGLLARQAENHYDQDLDELQLEMEDSKPHPSVQCSPTPGPFKPCEYLFESWGIRLAVWAIVLLSVLCNGLVLLTVFAGGPVPLPPVKFVVGAIAGANTLTGISCGLLASVDALTFGQFSEYGARWETGLGCRATGFLAVLGSEASVLLLTLAAVQCSVSVSCVRAYGKSPSLGSVRAGVLGCLALAGLAAALPLASVGEYGASPLCLPYAPPEGQPAALGFTVALVMMNSFCFLVVAGAYIKLYCDLPRGDFEAVWDCAMVRHVAWLIFADGLLYCPVAFLSFASMLGLFPVTPEAVKSVLLVVLPLPACLNPLLYLLFNPHFRDDLRRLRPRAGDSGPLAYAAAGELEKSSCDSTQALVAFSDVDLILEASEAGRPPGLETYGFPSVTLISCQQPGAPRLEGSHCVEPEGNHFGNPQPSMDGELLLRAEGSTPAGGGLSGGGGFQPSGLAFASHV

SEQ ID NO: 29453 - protein, 828 aa, Homo sapiens
MRLEGEGRSARAGQNLSRAGSARRGAPRDLSMNNLTELQPGLFHHLRFLEELRLSGNHLSHIPGQAFSGLYSLKILMLQNNQLGGIPAEALWELPSLQSLDLNYNKLQEFPVAIRTLGRLQELGFHNNNIKAIPEKAFMGNPLLQTIHFYDNPIQFVGRSAFQYLPKLHTLSLNGAMDIQEFPDLKGTTSLEILTLTRAGIRLLPSGMCQQLPRLRVLELSHNQIEELPSLHRCQKLEEIGLQHNRIWEIGADTFSQLSSLQALDLSWNAIRSIHPEAFSTLHSLVKLDLTDNQLTTLPLAGLGGLMHLKLKGNLALSQAFSKDSFPKLRILEVPYAYQCCPYGMCASFFKASGQWEAEDLHLDDEESSKRPLGLLARQAENHYDQDLDELQLEMEDSKPHPSVQCSPTPGPFKPCEYLFESWGIRLAVWAIVLLSVLCNGLVLLTVFAGGPVPLPPVKFVVGAIAGANTLTGISCGLLASVDALTFGQFSEYGARWETGLGCRATGFLAVLGSEASVLLLTLAAVQCSVSVSCVRAYGKSPSLGSVRAGVLGCLALAGLAAALPLASVGEYGASPLCLPYAPPEGQPAALGFTVALVMMNSFCFLVVAGAYIKLYCDLPRGDFEAVWDCAMVRHVAWLIFADGLLYCPVAFLSFASMLGLFPVTPEAVKSVLLVVLPLPACLNPLLYLLFNPHFRDDLRRLRPRAGDSGPLAYAAAGELEKSSCDSTQALVAFSDVDLILEASEAGRPPGLETYGFPSVTLISCQQPGAPRLEGSHCVEPEGNHFGNPQPSMDGELLLRAEGSTPAGGGLSGGGGFQPSGLAFASHV

SEQ ID NO: 29454 - protein, 915 aa, Homo sapiens
MGRPRLTLVCQVSIIISARDLSMNNLTELQPGLFHHLRFLEELRLSGNHLSHIPGQAFSGLYSLKILMLQNNQLGGIPAEALWELPSLQSLRLDANLISLVPERSFEGLSSLRHLWLDDNALTEIPVRALNNLPALQAMTLALNRISHIPDYAFQNLTSLVVLHLHNNRIQHLGTHSFEGLHNLETLDLNYNKLQEFPVAIRTLGRLQELGFHNNNIKAIPEKAFMGNPLLQTIHFYDNPIQFVGRSAFQYLPKLHTLSLNGAMDIQEFPDLKGTTSLEILTLTRAGIRLLPSGMCQQLPRLRVLELSHNQIEELPSLHRCQKLEEIGLQHNRIWEIGADTFSQLSSLQALDLSWNAIRSIHPEAFSTLHSLVKLDLTDNQLTTLPLAGLGGLMHLKLKGNLALSQAFSKDSFPKLRILEVPYAYQCCPYGMCASFFKASGQWEAEDLHLDDEESSKRPLGLLARQAENHYDQDLDELQLEMEDSKPHPSVQCSPTPGPFKPCEYLFESWGIRLAVWAIVLLSVLCNGLVLLTVFAGGPVPLPPVKFVVGAIAGANTLTGISCGLLASVDALTFGQFSEYGARWETGLGCRATGFLAVLGSEASVLLLTLAAVQCSVSVSCVRAYGKSPSLGSVRAGVLGCLALAGLAAALPLASVGEYGASPLCLPYAPPEGQPAALGFTVALVMMNSFCFLVVAGAYIKLYCDLPRGDFEAVWDCAMVRHVAWLIFADGLLYCPVAFLSFASMLGLFPVTPEAVKSVLLVVLPLPACLNPLLYLLFNPHFRDDLRRLRPRAGDSGPLAYAAAGELEKSSCDSTQALVAFSDVDLILEASEAGRPPGLETYGFPSVTLISCQQPGAPRLEGSHCVEPEGNHFGNPQPSMDGELLLRAEGSTPAGGGLSGGGGFQPSGLAFASHV

SEQ ID NO: 29455 - protein, 248 aa, Homo sapiens
MFRFMRDVEPEDPMFLMDPFAIHRQHMSRMLSGGFGYSPFLSITDGNMPGTRPASRRMQQAGAVSPFGMLGMSGGFMDMFGMMNDMIGNMEHMTAGGNCQTFSSSTVISYSNTGDGAPKVYQETSEMRSAPGGIRETRRTVRDSDSGLEQMSIGHHIRDRAHILQRSRNHRTGDQEERQDYINLDESEAAAFDDEWRRETSRFRQQRPLEFRRLESSGAGGRRAEGPPRLAIQGPEDSPSRQSRRYDW

SEQ ID NO: 29456 - protein, 311 aa, Homo sapiens
MSNPSAPPPYEDRNPLYPGPPPPGGYGQPSVLPGGYPAYPGYPQPGYGHPAGYPQPMPPTHPMPMNYGPGHGYDGEERAVSDSFGPGEWDDRKVRHTFIRKVYSIISVQLLITVAIIAIFTFVEPVSAFVRRNVAVYYVSYAVFVVTYLILACCQGPRRRFPWNIILLTLFTFAMGFMTGTISSMYQTKAVIIAMIITAVVSISVTIFCFQTKVDFTSCTGLFCVLGIVLLVTGIVTSIVLYFQYVYWLHMLYAALGAICFTLFLAYDTQLVLGNRKHTISPEDYITGALQIYTDIIYIFTFVLQLMGDRN

SEQ ID NO: 29457 - protein, 852 aa, Homo sapiens
MAGALAGLAAGLQVPRVAPSPDSDSDTDSEDPSLRRSAGGLLRSQVIHSGHFMVSSPHSDSLPRRRDQEGSVGPSDFGPRSIDPTLTRLFECLSLAYSGKLVSPKWKNFKGLKLLCRDKIRLNNAIWRAWYIQYVKRRKSPVCGFVTPLQGPEADAHRKPEAVVLEGNYWKRRIEVVMREYHKWRIYYKKRLRKPSREDDLLAPKQAEGRWPPPEQWCKQLFSSVVPVLLGDPEEEPGGRQLLDLNCFLSDISDTLFTMTQSGPSPLQLPPEDAYVGNADMIQPDLTPLQPSLDDFMDISDFFTNSRLPQPPMPSNFPEPPSFSPVVDSLFSSGTLGPEVPPASSAMTHLSGHSRLQARNSCPGPLDSSAFLSSDFLLPEDPKPRLPPPPVPPPLLHYPPPAKVPGLEPCPPPPFPPMAPPTALLQEEPLFSPRFPFPTVPPAPGVSPLPAPAAFPPTPQSVPSPAPTPFPIELLPLGYSEPAFGPCFSMPRGKPPAPSPRGQKASPPTLAPATASPPTTAGSNNPCLTQLLTAAKPEQALEPPLVSSTLLRSPGSPQETVPEFPCTFLPPTPAPTPPRPPPGPATLAPSRPLLVPKAERLSPPAPSGSERRLSGDLSSMPGPGTLSVRVSPPQPILSRGRPDSNKTENRRITHISAEQKRRFNIKLGFDTLHGLVSTLSAQPSLKVSKATTLQKTAEYILMLQQERAGLQEEAQQLRDEIEELNAAINLCQQQLPATGVPITHQRFDQMRDMFDDYVRTRTLHNWKFWVFSILIRPLFESFNGMVSTASVHTLRQTSLAWLDQYCSLPALRPTVLNSLRQLGTSTSILTDPGRIPEQATRAVTEGTLGKPL

SEQ ID NO: 29458 - protein, 833 aa, Homo sapiens
MAGALAGLAAGLQVPRVAPSPDSDSDTDSEDPSLRRSAGGLLRSQVIHSGHFMVSSPHSDSLPRRRDQEGSVGPSDFGPRSIDPTLTRLFECLSLAYSGKLVSPKWKNFKGLKLLCRDKIRLNNAIWRAWYIQYVKRRKSPVCGFVTPLQGPEADAHRKPEAVVLEGNYWKRRIEVVMREYHKWRIYYKKRLRKPSREDDLLAPKQAEGRWPPPEQWCKQLFSSVVPVLLGDPEEEPGGRQLLDLNCFLSDISDTLFTMTQSGPSPLQLPPEDAYVGNADMIQPDLTPLQPSLDDFMDISDFFTNSRLPQPPMPSNFPEPPSFSPVVDSLFSSGTLGPEVPPASSAMTHLSGHSRLQARNSCPGPLDSSAFLSSDFLLPEDPKPRLPPPPVPPPLLHYPPPAKVPGLEPCPPPPFPPMAPPTALLQEEPLFSPRFPFPTVPPAPGVSPLPAPAAFPPTPQSVPSPAPTPFPIELLPLGYSEPAFGPCFSMPRGKPPAPSPRGQKASPPTLAPATASPPTTAGSNNPCLTQLLTAAKPEQALEPPLVSSTLLRSPGSPQETVPEFPCTFLPPTPAPTPPRPPPGPATLAPSRPLLVPKAERLSPPAPSGSERRLSGDLSSMPGPGTLSVRVSPPQPILSRGRPDSNKTENRRITHISAEQKRRFNIKLGFDTLHGLVSTLSAQPSLKERAGLQEEAQQLRDEIEELNAAINLCQQQLPATGVPITHQRFDQMRDMFDDYVRTRTLHNWKFWVFSILIRPLFESFNGMVSTASVHTLRQTSLAWLDQYCSLPALRPTVLNSLRQLGTSTSILTDPGRIPEQATRAVTEGTLGKPL

SEQ ID NO: 29459 - protein, 850 aa, Homo sapiens
MAGALAGLAAGLQVPRVAPSPDSDSDTDSEDPSLRRSAGGLLRSQVIHSGHFMVSSPHSDSLPRRRDQEGSVGPSDFGPRSIDPTLTRLFECLSLAYSGKLVSPKWKNFKGLKLLCRDKIRLNNAIWRAWYIQYVKRRKSPVCGFVTPLQGPEADAHRKPEAVVLEGNYWKRRIEVVMREYHKWRIYYKKRLRKPSREDDLLAPKQAEGRWPPPEQWCKQLFSSVVPVLLGDPEEEPGGRQLLDLNCFLSDISDTLFTMTQSGPSPLQLPPEDAYVGNADMIQPDLTPLQPSLDDFMDISDFFTNSRLPQPPMPSNFPEPPSFSPVVDSLFSSGTLGPEVPPASSAMTHLSGHSRLQARNSCPGPLDSSAFLSSDFLLPEDPKPRLPPPPVPPPLLHYPPPAKVPGLEPCPPPPFPPMAPPTALLQEEPLFSPRFPFPTVPPAPGVSPLPAPAAFPPTPQSVPSPAPTPFPIELLPLGYSEPAFGPCFSMPRGKPPAPSPRGQKASPPTLAPATASPPTTAGSNNPCLTQLLTAAKPEQALEPPLVSSTLLRSPGSPQETVPEFPCTFLPPTPAPTPPRPPPGPATLAPSRPLLVPKAERLSPPAPSGSERRLSGDLSSMPGPGTLSVRVSPPQPILSRGRPDSNKNRRITHISAEQKRRFNIKLGFDTLHGLVSTLSAQPSLKVSKATTLQKTAEYILMLQQERAGLQEEAQQLRDEIEELNAAINLCQQQLPATGVPITHQRFDQMRDMFDDYVRTRTLHNWKFWVFSILIRPLFESFNGMVSTASVHTLRQTSLAWLDQYCSLPALRPTVLNSLRQLGTSTSILTDPGRIPEQATRAVTEGTLGKPL

SEQ ID NO: 29460 - protein, 831 aa, Homo sapiens
MAGALAGLAAGLQVPRVAPSPDSDSDTDSEDPSLRRSAGGLLRSQVIHSGHFMVSSPHSDSLPRRRDQEGSVGPSDFGPRSIDPTLTRLFECLSLAYSGKLVSPKWKNFKGLKLLCRDKIRLNNAIWRAWYIQYVKRRKSPVCGFVTPLQGPEADAHRKPEAVVLEGNYWKRRIEVVMREYHKWRIYYKKRLRKPSREDDLLAPKQAEGRWPPPEQWCKQLFSSVVPVLLGDPEEEPGGRQLLDLNCFLSDISDTLFTMTQSGPSPLQLPPEDAYVGNADMIQPDLTPLQPSLDDFMDISDFFTNSRLPQPPMPSNFPEPPSFSPVVDSLFSSGTLGPEVPPASSAMTHLSGHSRLQARNSCPGPLDSSAFLSSDFLLPEDPKPRLPPPPVPPPLLHYPPPAKVPGLEPCPPPPFPPMAPPTALLQEEPLFSPRFPFPTVPPAPGVSPLPAPAAFPPTPQSVPSPAPTPFPIELLPLGYSEPAFGPCFSMPRGKPPAPSPRGQKASPPTLAPATASPPTTAGSNNPCLTQLLTAAKPEQALEPPLVSSTLLRSPGSPQETVPEFPCTFLPPTPAPTPPRPPPGPATLAPSRPLLVPKAERLSPPAPSGSERRLSGDLSSMPGPGTLSVRVSPPQPILSRGRPDSNKNRRITHISAEQKRRFNIKLGFDTLHGLVSTLSAQPSLKERAGLQEEAQQLRDEIEELNAAINLCQQQLPATGVPITHQRFDQMRDMFDDYVRTRTLHNWKFWVFSILIRPLFESFNGMVSTASVHTLRQTSLAWLDQYCSLPALRPTVLNSLRQLGTSTSILTDPGRIPEQATRAVTEGTLGKPL

SEQ ID NO: 29461 - protein, 575 aa, Homo sapiens
MAGALAGLAAGLQVPRVAPSPDSDSDTDSEDPSLRRSAGGLLRSQVIHSGHFMVSSPHSDSLPRRRDQEGSVGPSDFGPRSIDPTLTRLFECLSLAYSGKLVSPKWKNFKGLKLLCRDKIRLNNAIWRAWYIQYVKRRKSPVCGFVTPLQGPEADAHRKPEAVVLEGNYWKRRIEVVMREYHKWRIYYKKRLRKPSREDDLLAPKQAEGRWPPPEQWCKQLFSSVVPVLLGDPEEEPGGRQLLDLNCFLSDISDTLFTMTQSGPSPLQLPPEDAYVGNADMIQPDLTPLQPSLDDFMDISDFFTNSRLPQPPMPSNFPEPPSFSPVVDSLFSSGTLGPEVPPASSAMTHLSGHSRLQARNSCPGPLDSSAFLSSDFLLPEDPKPRLPPPPVPPPLLHYPPPAKVPGLEPCPPPPFPPMAPPTALLQEEPLFSPRFPFPTVPPAPGVSPLPAPAAFPPTPQSVPSPAPTPFPIELLPLGYSEPAFGPCFSMPRGKPPAPSPRGQKASPPTLAPATASPPTTAGSNNPCLTQLLTAAKPEQALEPPLVSSTLLRSPGSPAVNGGCQGTSAPCQALGL

SEQ ID NO: 29462 - protein, 722 aa, Homo sapiens
MAGALAGLAAGLQVPRVAPSPDSDSDTDSEDPSLRRSAGGLLRSQVIHSGHFMVSSPHSDSLPRRRDQEGSVGPSDFGPRSIDPTLTRLFECLSLAYSGKLVSPKWKNFKGLKLLCRDKIRLNNAIWRAWYIQYVKRRKSPVCGFVTPLQGPEADAHRKPEAVVLEGNYWKRRIELPPEDAYVGNADMIQPDLTPLQPSLDDFMDISDFFTNSRLPQPPMPSNFPEPPSFSPVVDSLFSSGTLGPEVPPASSAMTHLSGHSRLQARNSCPGPLDSSAFLSSDFLLPEDPKPRLPPPPVPPPLLHYPPPAKVPGLEPCPPPPFPPMAPPTALLQEEPLFSPRFPFPTVPPAPGVSPLPAPAAFPPTPQSVPSPAPTPFPIELLPLGYSEPAFGPCFSMPRGKPPAPSPRGQKASPPTLAPATASPPTTAGSNNPCLTQLLTAAKPEQALEPPLVSSTLLRSPGSPQETVPEFPCTFLPPTPAPTPPRPPPGPATLAPSRPLLVPKAERLSPPAPSGSERRLSGDLSSMPGPGTLSVRVSPPQPILSRGRPDSNKTENRRITHISAEQKRRFNIKLGFDTLHGLVSTLSAQPSLKVSKATTLQKTAEYILMLQQERAGLQEEAQQLRDEIEELNAAINLCQQQLPATGVPITHQRFDQMRDMFDDYVRTRTLHNWKFWVFSILIRPLFESFNGMVSTASVHTLRQTSLAWLDQYCSLPALRPST

SEQ ID NO: 29463 - protein, 756 aa, Homo sapiens
MSFVAGVIRRLDETVVNRIAAGEVIQRPANAIKEMIENCLDAKSTSIQVIVKEGGLKLIQIQDNGTGIRKEDLDIVCERFTTSKLQSFEDLASISTYGFRGEALASISHVAHVTITTKTADGKCAYRASYSDGKLKAPPKPCAGNQGTQITVEDLFYNIATRRKALKNPSEEYGKILEVVGRYSVHNAGISFSVKKQGETVADVRTLPNASTVDNIRSIFGNAVSRELIEIGCEDKTLAFKMNGYISNANYSVKKCIFLLFINHRLVESTSLRKAIETVYAAYLPKNTHPFLYLSLEISPQNVDVNVHPTKHEVHFLHEESILERVQQHIESKLLGSNSSRMYFTQTLLPGLAGPSGEMVKSTTSLTSSSTSGSSDKVYAHQMVRTDSREQKLDAFLQPLSKPLSSQPQAIVTEDKTDISSGRARQQDEEMLELPAPAEVAAKNQSLEGDTTKGTSEMSEKRGPTSSNPRKRHREDSDVEMVEDDSRKEMTAACTPRRRIINLTSVLSLQEEINEQGHEVLREMLHNHSFVGCVNPQWALAQHQTKLYLLNTTKLSEELFYQILIYDFANFGVLRLSEPAPLFDLAMLALDSPESGWTEEDGPKEGLAEYIVEFLKKKAEMLADYFSLEIDEEGNLIGLPLLIDNYVPPLEGLPIFILRLATEVNWDEEKECFESLSKECAMFYSIRKQYISEESTLSGQQSEVPGSIPNSWKWTVEHIVYKALRSHILPPKHFTEDGNILQLANLPDLYKVFERC

SEQ ID NO: 29464 - protein, 515 aa, Homo sapiens
MNGYISNANYSVKKCIFLLFINHRLVESTSLRKAIETVYAAYLPKNTHPFLYLSLEISPQNVDVNVHPTKHEVHFLHEESILERVQQHIESKLLGSNSSRMYFTQTLLPGLAGPSGEMVKSTTSLTSSSTSGSSDKVYAHQMVRTDSREQKLDAFLQPLSKPLSSQPQAIVTEDKTDISSGRARQQDEEMLELPAPAEVAAKNQSLEGDTTKGTSEMSEKRGPTSSNPRKRHREDSDVEMVEDDSRKEMTAACTPRRRIINLTSVLSLQEEINEQGHEVLREMLHNHSFVGCVNPQWALAQHQTKLYLLNTTKLSEELFYQILIYDFANFGVLRLSEPAPLFDLAMLALDSPESGWTEEDGPKEGLAEYIVEFLKKKAEMLADYFSLEIDEEGNLIGLPLLIDNYVPPLEGLPIFILRLATEVNWDEEKECFESLSKECAMFYSIRKQYISEESTLSGQQSEVPGSIPNSWKWTVEHIVYKALRSHILPPKHFTEDGNILQLANLPDLYKVFERC

SEQ ID NO: 29465 - protein, 658 aa, Homo sapiens
MAFEALASISHVAHVTITTKTADGKCAYRASYSDGKLKAPPKPCAGNQGTQITVEDLFYNIATRRKALKNPSEEYGKILEVVGRYSVHNAGISFSVKKQGETVADVRTLPNASTVDNIRSIFGNAVSRELIEIGCEDKTLAFKMNGYISNANYSVKKCIFLLFINHRLVESTSLRKAIETVYAAYLPKNTHPFLYLSLEISPQNVDVNVHPTKHEVHFLHEESILERVQQHIESKLLGSNSSRMYFTQTLLPGLAGPSGEMVKSTTSLTSSSTSGSSDKVYAHQMVRTDSREQKLDAFLQPLSKPLSSQPQAIVTEDKTDISSGRARQQDEEMLELPAPAEVAAKNQSLEGDTTKGTSEMSEKRGPTSSNPRKRHREDSDVEMVEDDSRKEMTAACTPRRRIINLTSVLSLQEEINEQGHEVLREMLHNHSFVGCVNPQWALAQHQTKLYLLNTTKLSEELFYQILIYDFANFGVLRLSEPAPLFDLAMLALDSPESGWTEEDGPKEGLAEYIVEFLKKKAEMLADYFSLEIDEEGNLIGLPLLIDNYVPPLEGLPIFILRLATEVNWDEEKECFESLSKECAMFYSIRKQYISEESTLSGQQSEVPGSIPNSWKWTVEHIVYKALRSHILPPKHFTEDGNILQLANLPDLYKVFERC

SEQ ID NO: 29466 - protein, 443 aa, Homo sapiens
MECLRSLPCLLPRAMRLPRRTLCALALDVTSVGPPVAACGRRANLIGRSRAAQLCGPDRLRVAGEVHRFRTSDVSQATLASVAPVFTVTKFDKQGNVTSFERKKTELYQELGLQARDLRFQHVMSITVRNNRIIMRMEYLKAVITPECLLILDYRNLNLEQWLFRELPSQLSGEGQLVTYPLPFEFRAIEALLQYWINTLQGKLSILQPLILETLDALVDPKHSSVDRSKLHILLQNGKSLSELETDIKIFKESILEILDEEELLEELCVSKWSDPQVFEKSSAGIDHAEEMELLLENYYRLADDLSNAARELRVLIDDSQSIIFINLDSHRNVMMRLNLQLTMGTFSLSLFGLMGVAFGMNLESSLEEDHRIFWLITGIMFMGSGLIWRRLLSFLGRQLEAPLPPMMASLPKKTLLADRSMELKNSLRLDGLGSGRSILTNR

SEQ ID NO: 29467 - protein, 408 aa, Homo sapiens
MECLRSLPCLLPRAMRLPRRTLCALALDVTSVGPPVAACGRRANLIGRSRAAQLCGPDRLRVAGEVHRFRTSDVSQATLASVAPVFTVTKFDKQGNVTSFERKKTELYQELGLQARDLRFQHVMSITVRNNRIIMRMEYLKAVITPECLLILDYRNLNLEQWLFRELPSQLSGEGQLVTYPLPFEFRAIEALLQYWINTLQGKLSILQPLILETLDALVDPKHSSVDRSKLHILLQNGKSLSELETDIKIFKESILEILDEEELLEELCVSKWSDPQVFEKSSAGIDHAEEMELLLENYYRLADDLSNAARELRVLIDDSQSIIFINLDSHRNVMMRLNLQLTMGTFSLSLFGLMGVAFGMNLESSLEEDHRIFWLITGIMFMGSGLIWRRLLSFLGRQLEAPLPPMV

SEQ ID NO: 29468 - protein, 117 aa, Homo sapiens
MECLRSLPCLLPRAMRLPRRTLCALALDVTSVGPPVAACGRRANLIGRSRAAQLCGPDRLRVAGEVHRFRTSDVSQATLASVAPVFTVTKFDKQGNVTSFVFESCDNSRVSSDIRLS

SEQ ID NO: 29469 - protein, 446 aa, Homo sapiens
MECLRSLPCLLPRAMRLPRRTLCALALDVTSVGPPVAACGRRANLIGRSRAAQLCGPDRLRVAGEVHRFRTSDVSQATLASVAPVFTVTKFDKQGNVTSFERKKTELYQELGLQARDLRFQHVMSITVRNNRIIMRMEKYSLLLESVASILQNSVSFMERQTEQWLFRELPSQLSGEGQLVTYPLPFEFRAIEALLQYWINTLQGKLSILQPLILETLDALVDPKHSSVDRSKLHILLQNGKSLSELETDIKIFKESILEILDEEELLEELCVSKWSDPQVFEKSSAGIDHAEEMELLLENYYRLADDLSNAARELRVLIDDSQSIIFINLDSHRNVMMRLNLQLTMGTFSLSLFGLMGVAFGMNLESSLEEDHRIFWLITGIMFMGSGLIWRRLLSFLGRQLEAPLPPMMASLPKKTLLADRSMELKNSLRLDGLGSGRSILTNR

SEQ ID NO: 29470 - protein, 399 aa, Homo sapiens
MPQLSGGGGGGGGDPELCATDEMIPFKDEGDPQKEKIFAEISHPEEEGDLADIKSSLVNESEIIPASNGHEVARQAQTSQEPYHDKAREHPDDGKHPDGGLYNKGPSYSSYSGYIMMPNMNNDPYMSNGSLSPPIPRTSNKVPVVQPSHAVHPLTPLITYSDEHFSPGSHPSHIPSDVNSKQGMSRHPPAPDIPTFYPLSPGGVGQITPPLGWQGQPVYPITGGFRQPYPSSLSVDTSMSRFSHHMIPGPPGPHTTGIPHPAIVTPQVKQEHPHTDSDLMHVKPQHEQRKEQEPKRPHIKKPLNAFMLYMKEMRANVVAECTLKESAAINQILGRRWHALSREEQAKYYELARKERQLHMQLYPGWSARDNYGKKKKRKREKLQESASGTGPRMTAAYI

SEQ ID NO: 29471 - protein, 329 aa, Homo sapiens
MPQLSGGGGGGGGDPELCATDEMIPFKDEGDPQKEKIFAEISHPEEEGDLADIKSSLVNESEIIPASNGHEVARQAQTSQEPYHDKAREHPDDGKHPDGGLYNKGPSYSSYSGYIMMPNMNNDPYMSNGSLSPPIPRTSNKVPVVQPSHAVHPLTPLITYSDEHFSPGSHPSHIPSDVNSKQGMSRHPPAPDIPTFYPLSPGGVGQITPPLGWQGQPVYPITGGFRQPYPSSLSVDTSMSRFSHHMIPGPPGPHTTGIPHPAIVTPQVKQEHPHTDSDLMHVCSAFLLPHPFLIPSTPSPNHHHHHLLGSLSMNRERSRSQKDLTLRSL

SEQ ID NO: 29472 - protein, 284 aa, Homo sapiens
MMPNMNNDPYMSNGSLSPPIPRTSNKVPVVQPSHAVHPLTPLITYSDEHFSPGSHPSHIPSDVNSKQGMSRHPPAPDIPTFYPLSPGGVGQITPPLGWQGQPVYPITGGFRQPYPSSLSVDTSMSRFSHHMIPGPPGPHTTGIPHPAIVTPQVKQEHPHTDSDLMHVKPQHEQRKEQEPKRPHIKKPLNAFMLYMKEMRANVVAECTLKESAAINQILGRRWHALSREEQAKYYELARKERQLHMQLYPGWSARDNYGKKKKRKREKLQESASGTGPRMTAAYI

SEQ ID NO: 29473 - protein, 214 aa, Homo sapiens
MMPNMNNDPYMSNGSLSPPIPRTSNKVPVVQPSHAVHPLTPLITYSDEHFSPGSHPSHIPSDVNSKQGMSRHPPAPDIPTFYPLSPGGVGQITPPLGWQGQPVYPITGGFRQPYPSSLSVDTSMSRFSHHMIPGPPGPHTTGIPHPAIVTPQVKQEHPHTDSDLMHVCSAFLLPHPFLIPSTPSPNHHHHHLLGSLSMNRERSRSQKDLTLRSL

SEQ ID NO: 29474 - protein, 371 aa, Homo sapiens
MPQLSGGGGGGGGDPELCATDEMIPFKDEGDPQKEKIFAEISHPEEEGDLADIKSSLVNESEIIPASNGHEVARQAQTSQEPYHDKAREHPDDGKHPDGGLYNKGPSYSSYSGYIMMPNMNNDPYMSNGSLSPPIPRTSNKVPVVQPSHAVHPLTPLITYSDEHFSPGSHPSHIPSDVNSKQGMSRHPPAPDIPTFYPLSPGGVGQITPPLGWFSHHMIPGPPGPHTTGIPHPAIVTPQVKQEHPHTDSDLMHVKPQHEQRKEQEPKRPHIKKPLNAFMLYMKEMRANVVAECTLKESAAINQILGRRWHALSREEQAKYYELARKERQLHMQLYPGWSARDNYGKKKKRKREKLQESASGTGPRMTAAYI

SEQ ID NO: 29475 - protein, 386 aa, Homo sapiens
MPQLSGGGGGGGGDPELCATDEMIPFKDEGDPQKEKIFAEISHPEEEGDLADIKSSLVNESEIIPASNGHEVARQAQTSQEPYHDKAREHPDDGKHPDGGLYNKGPSYSSYSGYIMMPNMNNDPYMSNGSLSPPIPRTSNKVPVVQPSHAVHPLTPLITYSDEHFSPGSHPSHIPSDVNSKQGMSRHPPAPDIPTFYPLSPGGVGQITPPLGWFSHHMIPGPPGPHTTGIPHPAIVTPQVKQEHPHTDSDLMHVKPQHEQRKEQEPKRPHIKKPLNAFMLYMKEMRANVVAECTLKESAAINQILGRRWHALSREEQAKYYELARKERQLHMQLYPGWSARDNYGKKKKRKREKLQESASGGKRSSFPTCKAKAATPGPLLEMEAC

SEQ ID NO: 29476 - protein, 303 aa, Homo sapiens
MAEVARQAQTSQEPYHDKAREHPDDGKHPDGGLYNKGPSYSSYSGYIMMPNMNNDPYMSNGSLSPPIPRTSNKVPVVQPSHAVHPLTPLITYSDEHFSPGSHPSHIPSDVNSKQGMSRHPPAPDIPTFYPLSPGGVGQITPPLGWFSHHMIPGPPGPHTTGIPHPAIVTPQVKQEHPHTDSDLMHVKPQHEQRKEQEPKRPHIKKPLNAFMLYMKEMRANVVAECTLKESAAINQILGRRWHALSREEQAKYYELARKERQLHMQLYPGWSARDNYGKKKKRKREKLQESASGTGPRMTAAYI

SEQ ID NO: 29477 - protein, 264 aa, Homo sapiens
MNILPKKSWHVRNKDNVARVRRDEAQAREEEKERERRVLLAQQEARTEFLRKKARHQNSLPELEAAEAGAPGSGPVDLFRELLEEGKGVIRGNKEYEEEKRQEKERQEKALGILTYLGQSAAEAQTQPPWYQLPPGRGGPPPGPAPDEKIKSRLDPLREMQKHLGKKRQHGGDEGSRSRKEKEGSEKQRPKEPPSLDQLRAERLRREAAERSRAEALLARVQGRALQEGQPEEDETDDRRRRYNSQFNPQLARRPRQQDPHLTH

SEQ ID NO: 29478 - protein, 432 aa, Homo sapiens
MISAAQLLDELMGRDRNLAPDEKRSNVRWDHESVCKYYLCGFCPAELFTNTRSDLGPCEKIHDENLRKQYEKSSRFMKVGYERDFLRYLQSLLAEVERRIRRGHARLALSQNQQSSGAAGPTGKNEEKIQVLTDKIDVLLQQIEELGSEGKVEEAQGMMKLVEQLKEERELLRSTTSTIESFAAQEKQMEVCEVCGAFLIVGDAQSRVDDHLMGKQHMGYAKIKATVEELKEKLRKRTEEPDRDERLKKEKQEREEREKEREREREERERKRRREEEEREKERARDRERRKRSRSRSRHSSRTSDRRCSRSRDHKRSRSRERRRSRSRDRRRSRSHDRSERKHRSRSRDRRRSKSRDRKSYKHRSKSRDREQDRKSKEKEKRGSDDKKSSVKSGSREKQSEDTNTESKESDTKNEVNGTSEDIKSEGDTQSN

SEQ ID NO: 29479 - protein, 79 aa, Homo sapiens
MISAAQLLDELMGRDRNLAPDEKRSNVRWDHESVCKYYLCGFCPAELFTNTRSDLDVFGRGDNISDVSKFLEDDKWMEE

SEQ ID NO: 29480 - protein, 114 aa, Homo sapiens
MLPSQLIGFLLLWVPASRGEIVLTQSPDFQSVTPKEKVTITCRASQSIGSSLHWYQQKPDQSPKLLIKYASQSFSGVPSRFSGSGSGTDFTLTINSLEAEDAATYYCHQSSSLP

SEQ ID NO: 29481 - protein, 119 aa, Homo sapiens
MEPWKPQHSFFFLLLLWLPDTTGEIVMTQSPATLSLSPGERATLSCRASQSVSSSYLSWYQQKPGQAPRLLIYGASTRATGIPARFSGSGSGTDFTLTISSLQPEDFAVYYCQQDYNLP

SEQ ID NO: 29482 - protein, 115 aa, Homo sapiens
MEAPAQLLFLLLLWLPDTTGEIVMTQSPATLSVSPGERATLSCRASQSVSSNLAWYQQKPGQAPRLLIYGASIRATGIPARFSGSGSGTEFTLTISILQSEDFAVYYCQQYNNWP

SEQ ID NO: 29483 - protein, 281 aa, Homo sapiens
MTSKEDGKAAPGEERRRSPLDHLPPPANSNKPLTPFSIEDILNKPSVRRSYSLCGAAHLLAAADKHAQGGLPLAGRALLSQTSPLCALEELASKTFKGLEVSVLQAAEGRDGMTIFGQRQTPKKRRKSRTAFTNHQIYELEKRFLYQKYLSPADRDQIAQQLGLTNAQVITWFQNRRAKLKRDLEEMKADVESAKKLGPSGQMDIVALAELEQNSEATAGGGGGCGRAKSRPGSPVLPPGAPKAPGAGALQLSPASPLTDQPASSQDCSEDEEDEEIDVDD

SEQ ID NO: 29484 - protein, 1798 aa, Homo sapiens
MELTSRERGRGQPLPWELRLGLLLSVLAATLAQAPAPDVPGCSRGSCYPATGDLLVGRADRLTASSTCGLNGPQPYCIVSHLQDEKKCFLCDSRRPFSARDNPHSHRIQNVVTSFAPQRRAAWWQSENGIPAVTIQLDLEAEFHFTHLIMTFKTFRPAAMLVERSADFGRTWHVYRYFSYDCGADFPGVPLAPPRHWDDVVCESRYSEIEPSTEGEVIYRVLDPAIPIPDPYSSRIQNLLKITNLRVNLTRLHTLGDNLLDPRREIREKYYYALYELVVRGNCFCYGHASECAPAPGAPAHAEGMVHGACICKHNTRGLNCEQCQDFYRDLPWRPAEDGHSHACRKCECHGHTHSCHFDMAVYLASGNVSGGVCDGCQHNTAGRHCELCRPFFYRDPTKDLRDPAVCRSCDCDPMGSQDGGRCDSHDDPALGLVSGQCRCKEHVVGTRCQQCRDGFFGLSISDRLGCRRCQCNARGTVPGSTPCDPNSGSCYCKRLVTGRGCDRCLPGHWGLSHDLLGCRPCDCDVGGALDPQCDEGTGQCHCRQHMVGRRCEQVQPGYFRPFLDHLIWEAEDTRGQVLDVVERLVTPGETPSWTGSGFVRLQEGQTLEFLVASVPKAMDYDLLLRLEPQVPEQWAELELIVQRPGPVPAHSLCGHLVPKDDRIQGTLQPHARYLIFPNPVCLEPGISYKLHLKLVRTGGSAQPETPYSGPGLLIDSLVLLPRVLVLEMFSGGDAAALERQATFERYQCHEEGLVPSKTSPSEACAPLLISLSTLIYNGALPCQCNPQGSLSSECNPHGGQCLCKPGVVGRRCDLCAPGYYGFGPTGCQACQCSHEGALSSLCEKTSGQCLCRTGAFGLRCDRCQRGQWGFPSCRPCVCNGHADECNTHTGACLGCRDHTGGEHCERCIAGFHGDPRLPYGGQCRPCPCPEGPGSQRHFATSCHQDEYSQQIVCHCRAGYTGLRCEACAPGHFGDPSRPGGRCQLCECSGNIDPMDPDACDPHTGQCLRCLHHTEGPHCAHCKPGFHGQAARQSCHRCTCNLLGTNPQQCPSPDQCHCDPSSGQCPCLPNVQGPSCDRCAPNFWNLTSGHGCQPCACHPSRARGPTCNEFTGQCHCRAGFGGRTCSECQELHWGDPGLQCHACDCDSRGIDTPQCHRFTGHCSCRPGVSGVRCDQCARGFSGIFPACHPCHACFGDWDRVVQDLAARTQRLEQRAQELQQTGVLGAFESSFWHMQEKLGIVQGIVGARNTSAASTAQLVEATEELRREIGEATEHLTQLEADLTDVQDENFNANHALSGLERDRLALNLTLRQLDQHLDLLKHSNFLGAYDSIRHAHSQSAEAERRANTSALAVPSPVSNSASARHRTEALMDAQKEDFNSKHMANQRALGKLSAHTHTLSLTDINELVCGAPGDAPCATSPCGGAGCRDEDGQPRCGGLSCNGAAATADLALGRARHTQAELQRALAEGGSILSRVAETRRQASEAQQRAQAALDKANASRGQVEQANQELQELIQSVKDFLNQEGADPDSIEMVATRVLELSIPASAEQIQHLAGAIAERVRSLADVDAILARTVGDVRRAEQLLQDARRARSWAEDEKQKAETVQAALEEAQRAQGIAQGAIRGAVADTRDTEQTLYQVQERMAGAERALSSAGERARQLDALLEALKLKRAGNSLAASTAEETAGSAQGRAQEAEQLLRGPLGDQYQTVKALAERKAQGVLAAQARAEQLRDEARDLLQAAQDKLQRLQELEGTYEENERALESKAAQLDGLEARMRSVLQAINLQVQIYNTCQ

SEQ ID NO: 29485 - protein, 117 aa, Homo sapiens; identical to SEQ ID NO: 12103

SEQ ID NO: 29486 - protein, 1761 aa, Homo sapiens
MQFQLTLFLHLGWLSYSKAQDDCNRGACHPTTGDLLVGRNTQLMASSTCGLSRAQKYCILSYLEGEQKCFICDSRFPYDPYDQPNSHTIENVIVSFEPDREKKWWQSENGLDHVSIRLDLEALFRFSHLILTFKTFRPAAMLVERSTDYGHNWKVFKYFAKDCATSFPNITSGQAQGVGDIVCDSKYSDIEPSTGGEVVLKVLDPSFEIENPYSPYIQDLVTLTNLRINFTKLHTLGDALLGRRQNDSLDKYYYALYEMIVRGSCFCNGHASECRPMQKMRGDVFSPPGMVHGQCVCQHNTDGPNCERCKDFFQDAPWRPAADLQDNACRSCSCNSHSSRCHFDMTTYLASGGLSGGVCEDCQHNTEGQHCDRCRPLFYRDPLKTISDPYACIPCECDPDGTISGGICVSHSDPALGSVAGQCLCKENVEGAKCDQCKPNHYGLSATDPLGCQPCDCNPLGSLPFLTCDVDTGQCLCLSYVTGAHCEECTVGYWGLGNHLHGCSPCDCDIGGAYSNVCSPKNGQCECRPHVTGRSCSEPAPGYFFAPLNFYLYEAEEATTLQGLAPLGSETFGQSPAVHVVLGEPVPGNPVTWTGPGFARVLPGAGLRFAVNNIPFPVDFTIAIHYETQSAADWTVQIVVNPPGGSEHCIPKTLQSKPQSFALPAATRIMLLPTPICLEPDVQYSIDVYFSQPLQGESHAHSHVLVDSLGLIPQINSLENFCSKQDLDEYQLHNCVEIASAMGPQVLPGACERLIISMSAKLHDGAVACKCHPQGSVGSSCSRLGGQCQCKPLVVGRCCDRCSTGSYDLGHHGCHPCHCHPQGSKDTVCDQVTGQCPCHGEVSGRRCDRCLAGYFGFPSCHPCPCNRFAELCDPETGSCFNCGGFTTGRNCERCIDGYYGNPSSGQPCRPCLCPDDPSSNQYFAHSCYQNLWSSDVICNCLQGYTGTQCGECSTGFYGNPRISGAPCQPCACNNNIDVTDPESCSRVTGECLRCLHNTQGANCQLCKPGHYGSALNQTCRRCSCHASGVSPMECPPGGGACLCDPVTGACPCLPNVTGLACDRCADGYWNLVPGRGCQSCDCDPRTSQSSHCDQLTGQCPCKLGYGGKRCSECQENYYGDPPGRCIPCDCNRAGTQKPICDPDTGMCRCREGVSGQRCDRCARGHSQEFPTCLQCHLCFDQWDHTISSLSKAVQGLMRLAANMEDKRETLPVCEADFKDLRGNVSEIERILKHPVFPSGKFLKVKDYHDSVRRQIMQLNEQLKAVYEFQDLKDTIERAKNEADLLLEDLQEEIDLQSSVLNASIADSSENIKKYYHISSSAEKKINETSSTINTSANTRNDLLTILDTLTSKGNLSLERLKQIKIPDIQILNEKVCGDPGNVPCVPLPCGGALCTGRKGHRKCRGPGCHGSLTLSTNALQKAQEAKSIIRNLDKQVRGLKNQIESISEQAEVSKNNALQLREKLGNIRNQSDSEEENINLFIKKVKNFLLEENVPPEDIEKVANGVLDIHLPIPSQNLTDELVKIQKHMQLCEDYRTDENRLNEEADGAQKLLVKAKAAEKAANILLNLDKTLNQLQQAQITQGRANSTITQLTANITKIKKNVLQAENQTREMKSELELAKQRSGLEDGLSLLQTKLQRHQDHAVNAKVQAESAQHQAGSLEKEFVELKKQYAILQRKTSTTGLTKETLGKVKQLKDAAEKLAGDTEAKIRRITDLERKIQDLNLSRQAKADQLRILEDQVVAIKNEIVEQEKKYARCYS

SEQ ID NO: 29487 - protein, 772 aa, Homo sapiens
MQFQLTLFLHLGWLSYSKAQDDCNRGACHPTTGDLLVGRNTQLMASSTCGLSRAQKYCILSYLEGEQKCFICDSRFPYDPYDQPNSHTIENVIVSFEPDREKKWWQSENGLDHVSIRLDLEALFRFSHLILTFKTFRPAAMLVERSTDYGHNWKVFKYFAKDCATSFPNITSGQAQGVGDIVCDSKYSDIEPSTGGEVVLKVLDPSFEIENPYSPYIQDLVTLTNLRINFTKLHTLGDALLGRRQNDSLDKYYYALYEMIVRGSCFCNGHASECRPMQKMRGDVFSPPGMVHGQCVCQHNTDGPNCERCKDFFQDAPWRPAADLQDNACRSCSCNSHSSRCHFDMTTYLASGGLSGGVCEDCQHNTEGQHCDRCRPLFYRDPLKTISDPYACIPCECDPDGTISGGICVSHSDPALGSVAGQCLCKENVEGAKCDQCKPNHYGLSATDPLGCQPCDCNPLGSLPFLTCDVDTGQCLCLSYVTGAHCEECTVGYWGLGNHLHGCSPCDCDIGGAYSNVCSPKNGQCECRPHVTGRSCSEPAPGYFFAPLNFYLYEAEEATTLQGLAPLGSETFGQSPAVHVVLGEPVPGNPVTWTGPGFARVLPGAGLRFAVNNIPFPVDFTIAIHYETQSAADWTVQIVVNPPGGSEHCIPKTLQSKPQSFALPAATRIMLLPTPICLEPDVQYSIDVYFSQPLQGESHAHSHVLVDSAAVQWHNLGSLQPPPPECKQFSCFSFPSSWDYRHPPPHLASFCIFSRDGVSPHWPGWSRTPDLR

SEQ ID NO: 29488 - protein, 1723 aa, Homo sapiens
MQFQLTLFLHLGWLSYSKAQDDCNRGACHPTTGDLLVGRNTQLMASSTCGLSRAQKYCILSYLEGEQKCFICDSRFPYDPYDQPNSHTIENVIVSFEPDREKKWWQSENGLDHVSIRLDLEALFRFSHLILTFKTFRPAAMLVERSTDYGHNWKVFKYFAKDCATSFPNITSGQAQGVGDIVCDSKYSDIEPSTGGEVVLKVLDPSFEIENPYSPYIQDLVTLTNLRINFTKLHTLGDALLGRRQNDSLDKYYYALYEMIVRGSCFCNGHASECRPMQKMRGDVFSPPGMVHGQCVCQHNTDGPNCERCKDFFQDAPWRPAADLQDNACRSCSCNSHSSRCHFDMTTYLASGGLSGGVCEDCQHNTEGQHCDRCRPLFYRDPLKTISDPYACIPCECDPDGTISGGICVSHSDPALGSVAGQCLCKENVEGAKCDQCKPNHYGLSATDPLGCQPCDCNPLGSLPFLTCDVDTGQCLCLSYVTGAHCEECTVGYWGLGNHLHGCSPCDCDIGGAYSNVCSPKNGQCECRPHVTGRSCSEPAPGYFFAPLNFYLYEAEEATTLQGLAPLGSETFGQSPAVHVVLGEPVPGNPVTWTGPGFARVLPGAGLRFAVNNIPFPVDFTIAIHYETQSAADWTVQIVVNPPGGSEHCIPKTLQSKPQSFALPAATRIMLLPTPICLEPDVQYSIDVYFSQPLQGESHAHSHVLVDSLGLIPQINSLENFCSKQDLDEYQLHNCVEIASAMGPQVLPGACERLIISMSAKLHDGAVACKCHPQGSVGSSCSRLGGQCQCKPLVVGRCCDRCSTGSYDLGHHGCHPCHCHPQGSKDTVCDQVTGQCPCHGEVSGRRCDRCLAGYFGFPSCHPCPCNRFAELCDPETGSCFNCGGFTTGRNCERCIDGYYGNPSSGQPCRPCLCPDDPSSNQYFAHSCYQNLWSSDVICNCLQGYTGTQCGECSTGFYGNPRISGAPCQPCACNNNIDVTDPESCSRVTGECLRCLHNTQGANCQLCKPGHYGSALNQTCRRCSCHASGVSPMECPPGGGACLCDPVTGACPCLPNVTGLACDRCADGYWNLVPGRGCQSCDCDPRTSQSSHCDQLTGQCPCKLGYGGKRCSECQENYYGDPPGRCIPCDCNRAGTQKPICDPDTGMCRCREGVSGQRCDRCARGHSQEFPTCLQCHLCFDQWDHTISSLSKAVQGLMRLAANMEDKRETLPVCEADFKDLRGNVSEIERILKHPVFPSGKFLKVKDYHDSVRRQIMQLNEQLKAVYEFQDLKDTIERAKNEADLLLEDLQEEIDLQSSVLNASIADSSENIKKYYHISSSAEKKINETSSTINTSANTRNDLLTILDTLTSKGNLSLERLKQIKIPDIQILNEKVCGDPGNVPCVPLPCGGALCTGRKGHRKCRGPGCHGSLTLSTNALQKAQEAKSIIRNLDKQVRGLKNQIESISEQAEVSKNNALQLREKLGNIRNQSDSEEENINLFIKKVKNFLLEENVPPEDIEKVANGVLDIHLPIPSQNLTDELVKIQKHMQLCEDYRTDENRLNEEADGAQKLLVKAKAAEKAANILLNLDKTLNQLQQAQITQGRANSTITQLTANITKIKKNVLQAENQTREMKSELELAKQRSGLEDGLSLLQTKLQRHQDHAVNAKVQAESAQHQAGSLEKEFVELKKQYAILQRKTSTTGLTKETLGKVKQLKDAAEKLAGDTEAKIRRITGCFQNSAR

SEQ ID NO: 29489 - protein, 116 aa, Homo sapiens
METPAQLLFLLLLWLPDTTGEIVLTQSPATLSLSPGERATLSCGASQSVSSSYLAWYQQKPGLAPRLLIYDASSRATGIPDRFSGSGSGTDFTLTISRLEPEDFAVYYCQQYGSSP

SEQ ID NO: 29490 - protein, 373 aa, Homo sapiens
MSSTPHDPFYSSPFGPFYRRHTPYMVQPEYRIYEMNKRLQSRTEDSDNLWWDAFATEFFEDDATLTLSFCLEDGPKRYTIGRTLIPRYFSTVFEGGVTDLYYILKHSKESYHNSSITVDCDQCTMVTQHGKPMFTKVCTEGRLILEFTFDDLMRIKTWHFTIRQYRELVPRSILAMHAQDPQVLDQLSKNITRMGLTNFTLNYLRLCVILEPMQELMSRHKTYNLSPRDCLKTCLFQKWQRMVAPPAEPTRQPTTKRRKRKNSTSSTSNSSAGNNANSTGSKKKTTAANLSLSSQVPDVMVVGEPTLMGGEFGDEDERLITRLENTQYDAANGMDDEEDFNNSPALGNNSPWNSKPPATQETKSENPPPQASQ

SEQ ID NO: 29491 - protein, 331 aa, Homo sapiens
MSSTPHDPFYSSPFGPFYRRHTPYMVQPEYRIYEMNKRLQSRTEDSDNLWWDAFATEFFEDDATLTLSFCLEDGPKRYTIGRTLIPRYFSTVFEGGVTDLYYILKHSKESYHNSSITVDCDQCTMVTQHGKPMFTKVCTEGRLILEFTFDDLMRIKTWHFTIRQYRELVPRSILAMHAQDPQVLDQLSKNITRMGLTNFTLNYLRLCVILEPMQELMSRHKTYNLSPRDCLKTCLFQKWQRMVAPPAEPTRQPTTKRRKRKNSTSSTSNSSAGNNANSTGSKKKTTAANLSLSSQVPGLGAIPNCSLNPGRDGDLCHSTAVTPSGQFKEKH

SEQ ID NO: 29492 - protein, 347 aa, Homo sapiens
MVQPEYRIYEMNKRLQSRTEDSDNLWWDAFATEFFEDDATLTLSFCLEDGPKRYTIGRTLIPRYFSTVFEGGVTDLYYILKHSKESYHNSSITVDCDQCTMVTQHGKPMFTKVCTEGRLILEFTFDDLMRIKTWHFTIRQYRELVPRSILAMHAQDPQVLDQLSKNITRMGLTNFTLNYLRLCVILEPMQELMSRHKTYNLSPRDCLKTCLFQKWQRMVAPPAEPTRQPTTKRRKRKNSTSSTSNSSAGNNANSTGSKKKTTAANLSLSSQDVMVVGEPTLMGGEFGDEDERLITRLENTQYDAANGMDDEEDFNNSPALGNNSPWNSKPPATQETKSENPPPQASQ

SEQ ID NO: 29493 - protein, 61 aa, Homo sapiens
MQPRTQPLAQTLPFFLGGAPRDTGLRVPVIKMGTGWEGFQRTLKEVAYILLCCWCIKELLD

SEQ ID NO: 29494 - protein, 117 aa, Homo sapiens; identical to SEQ ID NO: 26655

SEQ ID NO: 29495 - protein, 77 aa, Homo sapiens
MWHLKLCAVLMIFLLLLGQIDGSPIPEVSSAKRRPRRMTPFWRGVSLRPIGASCRDDSECITRLCRKRRCSLSVAQE

SEQ ID NO: 29496 - protein, 118 aa, Homo sapiens
MSCQQNQQQCQPPPKCIPKCPPKCLTPRCPPKCPPKCPPVSSCCSVSSGGCCGSSSGGSCGSSSGGCCSSGGGGCCLSHHRRRRSHCHRPQSSGCCSQPSGGSSCCGGGSGQHSGGCC

SEQ ID NO: 29497 - protein, 860 aa, Homo sapiens [sequence omitted]

SEQ ID NO: 29498 - protein, 682 aa, Homo sapiens
MGPWGWKLRWTVALLLAAAGTAVGDRCERNEFQCQDGKCISYKWVCDGSAECQDGSDESQETCLSVTCKSGDFSCGGRVNRCIPQFWRCDGQVDCDNGSDEQGCPVATCRPDEFQCSDGNCIHGSRQCDREYDCKDMSDEVGCVNVTLCEGPNKFKCHSGECITLDKVCNMARDCRDWSDEPIKECGTNECLDNNGGCSHVCNDLKIGYECLCPDGFQLVAQRRCEDIDECQDPDTCSQLCVNLEGGYKCQCEEGFQLDPHTKACKAVGSIAYLFFTNRHEVRKMTLDRSEYTSLIPNLRNVVALDTEVASNRIYWSDLSQRMICSTQLDRAHGVSSYDTVISRDIQAPDGLAVDWIHSNIYWTDSVLGTVSVADTKGVKRKTLFRENGSKPRAIVVDPVHGFMYWTDWGTPAKIKKGGLNGVDIYSLVTENIQWPNGITLDLLSGRLYWVDSKLHSISSIDVNGGNRKTILEDEKRLAHPFSLAVFEDKVFWTDIINEAIFSANRLTGSDVNLLAENLLSPEDMVLFHNLTQPREAEAAVATQETSTVRLKVSSTAVRTQHTTTRPVPDTSRLPGATPGLTTVEIVTMSHQALGDVAGRGNEKKPSSVRALSIVLPIVLLVFLCLGVFLLWKNWRLKNINSINFDNPVYQKTTEDEVHICHNQDGYSYPSRQMVSLEDDVA

SEQ ID NO: 29499 - protein, 692 aa, Homo sapiens
MGPWGWKLRWTVALLLAAAGTAVGDRCERNEFQCQDGKCISYKWVCDGSAECQDGSDESQETCLSVTCKSGDFSCGGRVNRCIPQFWRCDGQVDCDNGSDEQGCLTLCEGPNKFKCHSGECITLDKVCNMARDCRDWSDEPIKECGTNECLDNNGGCSHVCNDLKIGYECLCPDGFQLVAQRRCEDIDECQDPDTCSQLCVNLEGGYKCQCEEGFQLDPHTKACKAVGSIAYLFFTNRHEVRKMTLDRSEYTSLIPNLRNVVALDTEVASNRIYWSDLSQRMICSTQLDRAHGVSSYDTVISRDIQAPDGLAVDWIHSNIYWTDSVLGTVSVADTKGVKRKTLFRENGSKPRAIVVDPVHGFMYWTDWGTPAKIKKGGLNGVDIYSLVTENIQWPNGITLDLLSGRLYWVDSKLHSISSIDVNGGNRKTILEDEKRLAHPFSLAVFEDKVFWTDIINEAIFSANRLTGSDVNLLAENLLSPEDMVLFHNLTQPRGVNWCERTTLSNGGCQYLCLPAPQINPHSPKFTCACPDGMLLARDMRSCLTEAEAAVATQETSTVRLKVSSTAVRTQHTTTRPVPDTSRLPGATPGLTTVEIVTMSHQALGDVAGRGNEKKPSSVRALSIVLPIVLLVFLCLGVFLLWKNWRLKNINSINFDNPVYQKTTEDEVHICHNQDGYSYPSRQMVSLEDDVA

SEQ ID NO: 29500 - protein, 819 aa, Homo sapiens
MGPWGWKLRWTVALLLAAAGTAVGDRCERNEFQCQDGKCISYKWVCDGSAECQDGSDESQETCSPKTCSQDEFRCHDGKCISRQFVCDSDRDCLDGSDEASCPVLTCGPASFQCNSSTCIPQLWACDNDPDCEDGSDEWPQRCRGLYVFQGDSSPCSAFEFHCLSGECIHSSWRCDGGPDCKDKSDEENCAVATCRPDEFQCSDGNCIHGSRQCDREYDCKDMSDEVGCVNVTLCEGPNKFKCHSGECITLDKVCNMARDCRDWSDEPIKECGTNECLDNNGGCSHVCNDLKIGYECLCPDGFQLVAQRRCEDIDECQDPDTCSQLCVNLEGGYKCQCEEGFQLDPHTKACKAVGSIAYLFFTNRHEVRKMTLDRSEYTSLIPNLRNVVALDTEVASNRIYWSDLSQRMICSTQLDRAHGVSSYDTVISRDIQAPDGLAVDWIHSNIYWTDSVLGTVSVADTKGVKRKTLFRENGSKPRAIVVDPVHGFMYWTDWGTPAKIKKGGLNGVDIYSLVTENIQWPNGITLDLLSGRLYWVDSKLHSISSIDVNGGNRKTILEDEKRLAHPFSLAVFEDKVFWTDIINEAIFSANRLTGSDVNLLAENLLSPEDMVLFHNLTQPRGVNWCERTTLSNGGCQYLCLPAPQINPHSPKFTCACPDGMLLARDMRSCLTEAEAAVATQETSTVRLKVSSTAVRTQHTTTRPVPDTSRLPGATPGLTTVEIVTMSHQALGDVAGRGNEKKPSSVRALSIVLPIVLLVFLCLGVFLLWKNWRLKNINSINFDNPVYQKTTEDEVHICHNQDGYSYPSRQMVSLEDDVA

SEQ ID NO: 29501 - protein, 858 aa, Homo sapiens
MGPWGWKLRWTVALLLAAAGTAVGDRCERNEFQCQDGKCISYKWVCDGSAECQDGSDESQETCLSVTCKSGDFSCGGRVNRCIPQFWRCDGQVDCDNGSDEQGCPPKTCSQDEFRCHDGKCISRQFVCDSDRDCLDGSDEASCPVLTCGPASFQCNSSTCIPQLWACDNDPDCEDGSDEWPQRCRGLYVFQGDSSPCSAFEFHCLSGECIHSSWRCDGGPDCKDKSDEENCAVATCRPDEFQCSDGNCIHGSRQCDREYDCKDMSDEVGCVNVTLCEGPNKFKCHSGECITLDKVCNMARDCRDWSDEPIKECGTNECLDNNGGCSHVCNDLKIGYECLCPDGFQLVAQRRCEDIDECQDPDTCSQLCVNLEGGYKCQCEEGFQLDPHTKACKAVGSIAYLFFTNRHEVRKMTLDRSEYTSLIPNLRNVVALDTEVASNRIYWSDLSQRMICSTQLDRAHGVSSYDTVISRDIQAPDGLAVDWIHSNIYWTDSVLGTVSVADTKGVKRKTLFRENGSKPRAIVVDPVHGFMYWTDWGTPAKIKKGGLNGVDIYSLVTENIQWPNGITLDLLSGRLYWVDSKLHSISSIDVNGGNRKTILEDEKRLAHPFSLAVFEDKVFWTDIINEAIFSANRLTGSDVNLLAENLLSPEDMVLFHNLTQPRGVNWCERTTLSNGGCQYLCLPAPQINPHSPKFTCACPDGMLLARDMRSCLTEAEAAVATQETSTVRLKVSSTAVRTQHTTTRPVPDTSRLPGATPGLTTVEIVTMSHQALGDVAGRGNEKKPSSVRALSIVLPIVLLVFLCLGVFLLWKNWRLKNINSINFDNPVYQKTTEDEVHICHNQDGYSYPSMVSLEDDVA

SEQ ID NO: 29502 - protein, 739 aa, Homo sapiens
MGPWGWKLRWTVALLLAAAGTAVGDRCERNEFQCNSSTCIPQLWACDNDPDCEDGSDEWPQRCRGLYVFQGDSSPCSAFEFHCLSGECIHSSWRCDGGPDCKDKSDEENCAVATCRPDEFQCSDGNCIHGSRQCDREYDCKDMSDEVGCVNVTLCEGPNKFKCHSGECITLDKVCNMARDCRDWSDEPIKECGTNECLDNNGGCSHVCNDLKIGYECLCPDGFQLVAQRRCEDIDECQDPDTCSQLCVNLEGGYKCQCEEGFQLDPHTKACKAVGSIAYLFFTNRHEVRKMTLDRSEYTSLIPNLRNVVALDTEVASNRIYWSDLSQRMICSTQLDRAHGVSSYDTVISRDIQAPDGLAVDWIHSNIYWTDSVLGTVSVADTKGVKRKTLFRENGSKPRAIVVDPVHGFMYWTDWGTPAKIKKGGLNGVDIYSLVTENIQWPNGITLDLLSGRLYWVDSKLHSISSIDVNGGNRKTILEDEKRLAHPFSLAVFEDKVFWTDIINEAIFSANRLTGSDVNLLAENLLSPEDMVLFHNLTQPRGVNWCERTTLSNGGCQYLCLPAPQINPHSPKFTCACPDGMLLARDMRSCLTEAEAAVATQETSTVRLKVSSTAVRTQHTTTRPVPDTSRLPGATPGLTTVEIVTMSHQALGDVAGRGNEKKPSSVRALSIVLPIVLLVFLCLGVFLLWKNWRLKNINSINFDNPVYQKTTEDEVHICHNQDGYSYPSRQMVSLEDDVA

SEQ ID NO: 29503 - protein, 221 aa, Homo sapiens
MASPAPLVASISHQMVALQTLQLLQQEWGWGDGPVAPGNPRDPDHVSTAPARRSGPPRARPGPGREERGGGVGTRSRRTAARANSPEEEVVRGAEGGAELLPFPRDRGPCTLAQMAMRSALARVVDSTSELVSVEQTLLGPLQQERSFPIHLKDSVEFRNICSHLALQIEGQQFDRDLNAAHQCLKTIVKKLIQSLANFPSDAHMVACASLRQILQNLPDI

SEQ ID NO: 29504 - protein, 160 aa, Homo sapiens
MASPAPLVASISHQMVALQTLQLLQQEWGWGDGPVAPGNPRDPDHVSTAPARRSGPPRARPGPGREERGGGVGTRSRRTAARANSPEEEVVRGAEGGAELLPFPRDRGPCTLAQMAMRSALARVVDSTSELVSVEQTLLGPLQQERSFPIHLKLQLLANE

SEQ ID NO: 29505 - protein, 110 aa, Homo sapiens
MSCQQNQQQCQPPPKCPPKCTPKCPPKCPPKCLPQCPAPCSPAVSSCCGPISGGCCGPSSGGCCNSGAGGCCLSHHRPRLFHRRRHQSPDCCESEPSGGSGCCHSSGGCC

SEQ ID NO: 29506 - protein, 89 aa, Homo sapiens
MSCQQNQQQCQPPPKCPAKSPAQCLPPASSSCAPSSGGCGPSSERSCCLSHHRCRRSHRCRCQSSNSCDRGSGQQGGSSSCGHSSAGCC

SEQ ID NO: 29507 - protein, 332 aa, Homo sapiens
MATLKDQLIYNLLKEEQTPQNKITVVGVGAVGMACAISILMKDLADELALVDVIEDKLKGEMMDLQHGSLFLRTPKIVSGKDYNVTANSKLVIITAGARQQEGESRLNLVQRNVNIFKFIIPNVVKYSPNCKLLIVSNPVDILTYVAWKISGFPKNRVIGSGCNLDSARFRYLMGERLGVHPLSCHGWVLGEHGDSSVPVWSGMNVAGVSLKTLHPDLGTDKDKEQWKEVHKQVVESAYEVIKLKGYTSWAIGLSVADLAESIMKNLRRVHPVSTMIKGLYGIKDDVFLSVPCILGQNGISDLVKVTLTSEEEARLKKSADTLWGIQKELQF

SEQ ID NO: 29508 - protein, 274 aa, Homo sapiens
MATLKDQLIYNLLKEEQTPQNKITVVGVGAVGMACAISILMKDLADELALVDVIEDKLKGEMMDLQHGSLFLRTPKIVSGKDYNVTANSKLVIITAGARQQEGESRLNLVQRNVNIFKFIIPNVVKYSPNCKLLIVSNPVDILTYVAWKISGFPKNRVIGSGCNLDSARFRYLMGERLGVHPLSCHGWVLGEHGDSSVPVWSGMNVAGVSLKTLHPDLGTDKDKEQWKECRYTLGDPKGAAILKSSDVISFHCLGYNRILGGGCACCPFYLICD

SEQ ID NO: 29509 - protein, 361 aa, Homo sapiens
MGEPSGGYTYTQTSIFLFHAKIPFGSKSNMATLKDQLIYNLLKEEQTPQNKITVVGVGAVGMACAISILMKDLADELALVDVIEDKLKGEMMDLQHGSLFLRTPKIVSGKDYNVTANSKLVIITAGARQQEGESRLNLVQRNVNIFKFIIPNVVKYSPNCKLLIVSNPVDILTYVAWKISGFPKNRVIGSGCNLDSARFRYLMGERLGVHPLSCHGWVLGEHGDSSVPVWSGMNVAGVSLKTLHPDLGTDKDKEQWKEVHKQVVESAYEVIKLKGYTSWAIGLSVADLAESIMKNLRRVHPVSTMIKGLYGIKDDVFLSVPCILGQNGISDLVKVTLTSEEEARLKKSADTLWGIQKELQF

SEQ ID NO: 29510 - protein, 274 aa, Homo sapiens
MATLKDQLIYNLLKEEQTPQNKITVVGVGAVGMACAISILMKDLADELALVDVIEDKLKGEMMDLQHGSLFLRTPKIVSGKVDILTYVAWKISGFPKNRVIGSGCNLDSARFRYLMGERLGVHPLSCHGWVLGEHGDSSVPVWSGMNVAGVSLKTLHPDLGTDKDKEQWKEVHKQVVESAYEVIKLKGYTSWAIGLSVADLAESIMKNLRRVHPVSTMIKGLYGIKDDVFLSVPCILGQNGISDLVKVTLTSEEEARLKKSADTLWGIQKELQF

SEQ ID NO: 29511 - protein, 241 aa, Homo sapiens
MATLKDQLIYNLLKEEQTPQNKITVVGVGAVGMACAISILMKDLADELALVDVIEDKLKGEMMDLQHGSLFLRTPKIVSGKDYNVTANSKLVIITAGARQQEGESRLNLVQRNVNIFKFIIPNVVKYSPNCKLLIVSNPVDILTYVAWKISGFPKNRVIGSGCNLDSARFRYLMGERLGVHPLSCHGWVLGEHGDSSVPVWSGMNVAGVSLKTLHPDLGTDKDKEQWKEVHKQVVERVFTE

SEQ ID NO: 29512 - protein, 517 aa, Homo sapiens
MAVSRKDWSALSSLARQRTLEDEEEQERERRRRHRNLSSTTDDEAPRLSQNGDRQASASERLPSVEEAEVPKPLPPASKDEDEDIQSILRTRQERRQRRQVVEAAQAPIQERLEAEEGRNSLSPVQATQKPLVSKKELEIPPRRRLSREQRGPWALEEESLVGREPEERKKGVPEKSPVLEKSSMPKKTAPEKSLVSDKTSISEKVLASEKTSLSEKIAVSEKRNSSEKKSVLEKTSVSEKSLAPGMALGSGRRLVSEKASIFEKALASEKSPTADAKPAPKRATASEQPLAQEPPASGGSPATTKEQRGRALPGKNLPSLAKQGASDPPTVASRLPPVTLQVKIPSKEEEADMSSPTQRTYSSSLKRSSPRTISFRMKPKKENSETTLTRSASMKLPDNTVKLGEKLERYHTAIRRSESVKSRGLPCTELFVAPVGVASKRHLFEKELAGQSRAEPASSRKENLRLSGVVTSRLNLWISRTQESGDQDPQEAQKASSATERTQWGQKSDSSLDAEV

SEQ ID NO: 29513 - protein, 1905 aa, Homo sapiens
METLNGPAGGGAPDAKLQPPGQHHRHHHLHPVAERRRLHRAPSPARPFLKDLHARPAAPGPAVPSSGRAPAPAAPRSPNLAGKAPPSPGSLAAPGRLSRRSGGVPGAKDKPPPGAGARAAGGAKAALGSRRAARVAPAEPLSRAGKPPGAEPPSAAAKGRKAKRGSRAPPARTVGPPTPAARIPAVTLAVTSVAGSPARCSRISHTDSSSDLSDCPSEPLSDEQRLLPAASSDAESGTGSSDREPPRGAPTPSPAARGAPPGSPEPPALLAAPLAAGACPGGRSIPSGVSGGFAGPGVAEDVRGRSPPERPVPGTPKEPSLGEQSRLVPAAEEEELLREMEELRSENDYLKDELDELRAEMEEMRDSYLEEDVYQLQELRRELDRANKNCRILQYRLRKAEQKSLKVAETGQVDGELIRSLEQDLKVAKDVSVRLHHELKTVEEKRAKAEDENETLRQQMIEVEISKQALQNELERLKESSLKRRSTREMYKEKKTFNQDDSADLRCQLQFAKEEAFLMRKKMAKLGREKDELEQELQKYKSLYGDVDSPLPTGEAGGPPSTREAELKLRLKLVEEEANILGRKIVELEVENRGLKAEMEDMRGQQEREGPGRDHAPSIPTSPFGDSLESSTELRRHLQFVEEEAELLRRSISEIEDHNRQLTHELSKFKFEPPREPGWLGEGASPGAGGGAPLQEELKSARLQISELSGKVLKLQHENHALLSNIQRCDLAAHLGLRAPSPRDSDAESDAGKKESDGEESRLPQPKREGPVGGESDSEEMFEKTSGFGSGKPSEASEPCPTELLKAREDSEYLVTLKHEAQRLERTVERLITDTDSFLHDAGLRGGAPLPGPGLQGEEEQGEGDQQEPQLLGTINAKMKAFKKELQAFLEQVNRIGDGLSPLPHLTESSSFLSTVTSVSRDSPIGNLGKELGPDLQSRLKEQLEWQLGPARGDERESLRLRAARELHRRADGDTGSHGLGGQTCFSLEMEEEHLYALRWKELEMHSLALQNTLHERTWSDEKNLMQQELRSLKQNIFLFYVKLRWLLKHWRQGKQMEEEGEEFTEGEHPETLSRLGELGVQGGHQADGPDHDSDRGCGFPVGEHSPHSRVQIGDHSLRLQTADRGQPHKQVVENQQLFSAFKALLEDFRAELREDERARLRLQQQYASDKAAWDVEWAVLKCRLEQLEEKTENKLGELGSSAESKGALKKEREVHQKLLADSHSLVMDLRWQIHHSEKNWNREKVELLDRLDRDRQEWERQKKEFLWRIEQLQKENSPRRGGSFLCDQKDGNVRPFPHQGSLRMPRPVAMWPCADADSIPFEDRPLSKLKESDRCSASENLYLDALSLDDEPEEPPAHRPEREFRNRLPEEEENHKGNLQRAVSVSSMSEFQRLMDISPFLPEKGLPSTSSKEDVTPPLSPDDLKYIEEFNKSWDYTPNRGHNGGGPDLWADRTEVGRAGHEDSTEPFPDSSWYLTTSVTMTTDTMTSPEHCQKQPLRSHVLTEQSGLRVLHSPPAVRRVDSITAAGGEGPFPTSRARGSPGDTKGGPPEPMLSRWPCTSPRHSRDYVEGARRPLDSPLCTSLGFASPLHSLEMSKNLSDDMKEVAFSVRNAICSGPGELQVKDMACQTNGSRTMGTQTVQTISVGLQTEALRGSGVTSSPHKCLTPKAGGGATPVSSPSRSLRSRQVAPAIEKVQAKFERTCCSPKYGSPKLQRKPLPKADQPNNRTSPGMAQKGYSESAWARSTTTRESPVHTTINDGLSSLFNIIDHSPVVQDPFQKGLRAGSRSRSAEPRPELGPGQETGTNSRGRSPSPIGVGSEMCREEGGEGTPVKQDLSAPPGYTLTENVARILNKKLLEHALKEERRQAAHGPPGLHSDSHSLGDTAEPGPMENQTVLLTAPWGL

SEQ ID NO: 29514 - protein, 1545 aa, Homo sapiens
MEEMRDSYLEEDVYQLQELRRELDRANKNCRILQYRLRKAEQKSLKVAETGQVDGELIRSLEQDLKVAKDVSVRLHHELKTVEEKRAKAEDENETLRQQMIEVEISKQALQNELERLKESSLKRRSTREMYKEKKTFNQDDSADLRCQLQFAKEEAFLMRKKMAKLGREKDELEQELQKYKSLYGDVDSPLPTGEAGGPPSTREAELKLRLKLVEEEANILGRKIVELEVENRGLKAEMEDMRGQQEREGPGRDHAPSIPTSPFGDSLESSTELRRHLQFVEEEAELLRRSISEIEDHNRQLTHELSKFKFEPPREPGWLGEGASPGAGGGAPLQEELKSARLQISELSGKVLKLQHENHALLSNIQRCDLAAHLGLRAPSPRDSDAESDAGKKESDGEESRLPQPKREGPVGGESDSEEMFEKTSGFGSGKPSEASEPCPTELLKAREDSEYLVTLKHEAQRLERTVERLITDTDSFLHDAGLRGGAPLPGPGLQGEEEQGEGDQQEPQLLGTINAKMKAFKKELQAFLEQVNRIGDGLSPLPHLTESSSFLSTVTSVSRDSPIGNLGKELGPDLQSRLKEQLEWQLGPARGDERESLRLRAARELHRRADGDTGSHGLGGQTCFSLEMEEEHLYALRWKELEMHSLALQNTLHERTWSDEKNLMQQELRSLKQNIFLFYVKLRWLLKHWRQGKQMEEEGEEFTEGEHPETLSRLGELGVQGGHQADGPDHDSDRGCGFPVGEHSPHSRVQIGDHSLRLQTADRGQPHKQVVENQQLFSAFKALLEDFRAELREDERARLRLQQQYASDKAAWDVEWAVLKCRLEQLEEKTENKLGELGSSAESKGALKKEREVHQKLLADSHSLVMDLRWQIHHSEKNWNREKVELLDRLDRDRQEWERQKKEFLWRIEQLQKENSPRRGGSFLCDQKDGNVRPFPHQGSLRMPRPVAMWPCADADSIPFEDRPLSKLKESDRCSASENLYLDALSLDDEPEEPPAHRPEREFRNRLPEEEENHKGNLQRAVSVSSMSEFQRLMDISPFLPEKGLPSTSSKEDVTPPLSPDDLKYIEEFNKSWDYTPNRGHNGGGPDLWADRTEVGRAGHEDSTEPFPDSSWYLTTSVTMTTDTMTSPEHCQKQPLRSHVLTEQSGLRVLHSPPAVRRVDSITAAGGEGPFPTSRARGSPGDTKGGPPEPMLSRWPCTSPRHSRDYVEGARRPLDSPLCTSLGFASPLHSLEMSKNLSDDMKEVAFSVRNAICSGPGELQVKDMACQTNGSRTMGTQTVQTISVGLQTEALRGSGVTSSPHKCLTPKAGGGATPVSSPSRSLRSRQVAPAIEKVQAKFERTCCSPKYGSPKLQRKPLPKADQPNNRTSPGMAQKGYSESAWARSTTTRESPVHTTINDGLSSLFNIIDHSPVVQDPFQKGLRAGSRSRSAEPRPELGPGQETGTNSRGRSPSPIGVGSEMCREEGGEGTPVKQDLSAPPGYTLTENVARILNKKLLEHALKEERRQAAHGPPGLHSDSHSLGDTAEPGPMENQTVLLTAPWGL

SEQ ID NO: 29515 - protein, 1586 aa, Homo sapiens
MEEMRDSYLEEDVYQLQELRRELDRANKNCRILQYRLRKAEQKSLKVAETGQVDGELIRSLEQDLKVAKDVSVRLHHELKTVEEKRAKAEDENETLRQQMIEVEISKQALQNELERLKESSLKRRSTREMYKEKKTFNQDDSADLRCQLQFAKEEAFLMRKKMAKLGREKDELEQELQKYKSLYGDVDSPLPTGEAGGPPSTREAELKLRLKLVEEEANILGRKIVELEVENRGLKAEMEDMRGQQEREGPGRDHAPSIPTSPFGDSLESSTELRRHLQFVEEEAELLRRSISEIEDHNRQLTHELSKFKFEPPREPGWLGEGASPGAGGGAPLQEELKSARLQISELSGKVLKLQHENHALLSNIQRCDLAAHLGLRAPSPRDSDAESDAGKKESDGEESRLPQPKREGPVGGESDSEEMFEKTSGFGSGKPSEASEPCPTELLKAREDSEYLVTLKHEAQRLERTVERLITDTDSFLHDAGLRGGAPLPGPGLQGEEEQGEGDQQEPQLLGTINAKMKAFKKELQAFLEQVNRIGDGLSPLPHLTESSSFLSTVTSVSRDSPIGNLGKELGPDLQSRLKEQLEWQLGPARGDERESLRLRAARELHRRADGDTGSHGLGGQTCFSLELRGPPVLPEQSVSIEELQGQLVQAARLHQEETETFTNKIHKMEEEHLYALRWKELEMHSLALQNTLHERTWSDEKNLMQQELRSLKQNIFLFYVKLRWLLKHWRQGKQMEEEGEEFTEGEHPETLSRLGELGVQGGHQADGPDHDSDRGCGFPVGEHSPHSRVQIGDHSLRLQTADRGQPHKQVVENQQLFSAFKALLEDFRAELREDERARLRLQQQYASDKAAWDVEWAVLKCRLEQLEEKTENKLGELGSSAESKGALKKEREVHQKLLADSHSLVMDLRWQIHHSEKNWNREKVELLDRLDRDRQEWERQKKEFLWRIEQLQKENSPRRGGSFLCDQKDGNVRPFPHQGSLRMPRPVAMWPCADADSIPFEDRPLSKLKESDRCSASENLYLDALSLDDEPEEPPAHRPEREFRNRLPEEEENHKGNLQRAVSVSSMSEFQRLMDISPFLPEKGLPSTSSKEDVTPPLSPDDLKYIEEFNKSWDYTPNRGHNGGGPDLWADRTEVGRAGHEDSTEPFPDSSWYLTTSVTMTTDTMTSPEHCQKQPLRSHVLTEQSGLRVLHSPPAVRRVDSITAAGGEGPFPTSRARGSPGDTKGGPPEPMLSRWPCTSPRHSRDYVEGARRPLDSPLCTSLGFASPLHSLEMSKNLSDDMKEVAFSVRNAICSGPGELQVKDMACQTNGSRTMGTQTVQTISVGLQTEALRGSGVTSSPHKCLTPKAGGGATPVSSPSRSLRSRQVAPAIEKVQAKFERTCCSPKYGSPKLQRKPLPKADQPNNRTSPGMAQKGYSESAWARSTTTRESPVHTTINDGLSSLFNIIDHSPVVQDPFQKGLRAGSRSRSAEPRPELGPGQETGTNSRGRSPSPIGVGSEMCREEGGEGTPVKQDLSAPPGYTLTENVARILNKKLLEHALKEERRQAAHGPPGLHSDSHSLGDTAEPGPMENQTVLLTAPWGL

SEQ ID NO: 29516 - protein, 976 aa, Homo sapiens
MHSLALQNTLHERTWSDEKNLMQQELRSLKQNIFLFYVKLRWLLKHWRQGKQMEEEGEEFTEGEHPETLSRLGELGVQGGHQADGPDHDSDRGCGFPVGEHSPHSRVQIGDHSLRLQTADRGQPHKQVVENQQLFSAFKALLEDFRAELREDERARLRLQQQYASDKAAWDVEWAVLKCRLEQNCCGYPRINIEEETLGFTRLPAGSTVKTLKSLGLQRLELEEKTENKLGELGSSAESKGALKKEREVHQKLLADSHSLVMDLRWQIHHSEKNWNREKVELLDRLDRDRQEWERQKKEFLWRIEQGSLRMPRPVAMWPCADADSIPFEDRPLSKLKESDRCSASENLYLDALSLDDEPEEPPAHRPEREFRNRLPEEEENHKGNLQRAVSVSSMSEFQRLMDISPFLPEKGLPSTSSKEDVTPPLSPDDLKYIEEFNKSWDYTPNRGHNGGGPDLWADRTEVGRAGHEDSTEPFPDSSWYLTTSVTMTTDTMTSPEHCQKQPLRSHVLTEQSGLRVLHSPPAVRRVDSITAAGGEGPFPTSRARGSPGDTKGGPPEPMLSRWPCTSPRHSRDYVEGARRPLDSPLCTSLGFASPLHSLEMSKNLSDDMKEVAFSVRNAICSGPGELQVKDMACQTNGSRTMGTQTVQTISVGLQTEALRGSGVTSSPHKCLTPKAGGGATPVSSPSRSLRSRQVAPAIEKVQAKFERTCCSPKYGSPKLQRKPLPKADQPNNRTSPGMAQKGYSESAWARSTTTRESPVHTTINDGLSSLFNIIDHSPVVQDPFQKGLRAGSRSRSAEPRPELGPGQETGTNSRGRSPSPIGVGSEMCREEGGEGTPVKQDLSAPPGYTLTENVARILNKKLLEHALKEERRQAAHGPPGLHSDSHSLGDTAEPGPMEELPCSALAPSLEPCFSRPERPANRRPPSRWAPHSPTASQPQSPGDPTSLEEHGGEEPPEEQPHRDASLHGLSQYNSL

SEQ ID NO: 29517 - protein, 1066 aa, Homo sapiens
MTSYRERSADLARFYTVTEPQRHPRGYTVYKVTARVVSRRNPEDVQEIIVWKRYSDFKKLHKELWQIHKNLFRHSELFPPFAKGIVFGRFDETVIEERRQCAEDLLQFSANIPALYNSKQLEDFFKGGIINDSSELIGPAEAHSDSLIDTFPECSTEGFSSDSDLVSLTVDVDSLAELDDGMASNQNSPIRTFGLNLSSDSSALGAVASDSEQSKTEEERESRSLFPGSLKPKLGKRDYLEKAGELIKLALKKEEEDDYEAASDFYRKGVDLLLEGVQGESSPTRREAVKRRTAEYLMRAESISSLYGKPQLDDVSQPPGSLSSRPLWNLRSPAEELKAFRVLGVIDKVLLVMDTRTEQTFILKGLRKSSEYSRNRKTIIPRCVPNMVCLHKYIISEESVFLVLQHAEGGKLWSYISKFLNRSPEESFDIKEVKKPTLAKVHLQQPTSSPQDSSSFESRGSDGGSMLKALPLKSSLTPSSQDDSNQEDDGQDSSPKWPDSGSSSEEECTTSYLTLCNEYGQEKIEPGSLNEEPFMKTEGNGVDTKAIKSFPAHLAADSDSPSTQLRAHELKFFPNDDPEAVSSPRTSDSLSRSKNSPMEFFRIDSKDSASELLGLDFGEKLYSLKSEPLKPFFTLPDGDSASRSFNTSESKVEFKAQDTISRGSDDSVPVISFKDAAFDDVSGTDEGRPDLLVNLPGELESTREAAAMGPTKFTQTNIGIIENKLLEAPDVLCLRLSTEQCQAHEEKGIEELSDPSGPKSYSITEKHYAQEDPRMLFVAAVDHSSSGDMSLLPSSDPKFQGLGVVESAVTANNTEESLFRICSPLSGANEYIASTDTLKTEEVLLFTDQTDDLAKEEPTSLFQRDSETKGESGLVLEGDKEIHQIFEDLDKKLALASRFYIPEGCIQRWAAEMVVALDALHREGIVCRDLNPNNILLNDRGHIQLTYFSRWSEVEDSCDSDAIERMYCAPEVGAITEETEACDWWSLGAVLFELLTGKTLVECHPAGINTHTTLNMPECVSEEARSLIQQLLQFNPLERLGAGVAGVEDIKSHPFFTPVDWAELMR

SEQ ID NO: 29518 - protein, 1054 aa, Homo sapiens
MTSYRERSADLARFYTVTEPQRHPRGYTVYKVTARIIVWKRYSDFKKLHKELWQIHKNLFRHSELFPPFAKGIVFGRFDETVIEERRQCAEDLLQFSANIPALYNSKQLEDFFKGGIINDSSELIGPAEAHSDSLIDTFPECSTEGFSSDSDLVSLTVDVDSLAELDDGMASNQNSPIRTFGLNLSSDSSALGAVASDSEQSKTEEERESRSLFPGSLKPKLGKRDYLEKAGELIKLALKKEEEDDYEAASDFYRKGVDLLLEGVQGESSPTRREAVKRRTAEYLMRAESISSLYGKPQLDDVSQPPGSLSSRPLWNLRSPAEELKAFRVLGVIDKVLLVMDTRTEQTFILKGLRKSSEYSRNRKTIIPRCVPNMVCLHKYIISEESVFLVLQHAEGGKLWSYISKFLNRSPEESFDIKEVKKPTLAKVHLQQPTSSPQDSSSFESRGSDGGSMLKALPLKSSLTPSSQDDSNQEDDGQDSSPKWPDSGSSSEEECTTSYLTLCNEYGQEKIEPGSLNEEPFMKTEGNGVDTKAIKSFPAHLAADSDSPSTQLRAHELKFFPNDDPEAVSSPRTSDSLSRSKNSPMEFFRIDSKDSASELLGLDFGEKLYSLKSEPLKPFFTLPDGDSASRSFNTSESKVEFKAQDTISRGSDDSVPVISFKDAAFDDVSGTDEGRPDLLVNLPGELESTREAAAMGPTKFTQTNIGIIENKLLEAPDVLCLRLSTEQCQAHEEKGIEELSDPSGPKSYSITEKHYAQEDPRMLFVAAVDHSSSGDMSLLPSSDPKFQGLGVVESAVTANNTEESLFRICSPLSGANEYIASTDTLKTEEVLLFTDQTDDLAKEEPTSLFQRDSETKGESGLVLEGDKEIHQIFEDLDKKLALASRFYIPEGCIQRWAAEMVVALDALHREGIVCRDLNPNNILLNDRGHIQLTYFSRWSEVEDSCDSDAIERMYCAPEVGAITEETEACDWWSLGAVLFELLTGKTLVECHPAGINTHTTLNMPECVSEEARSLIQQLLQFNPLERLGAGVAGVEDIKSHPFFTPVDWAELMR

SEQ ID NO: 29519 - protein, 507 aa, Homo sapiens
MSCRSYRISSGCGVTRNFSSCSAVAPKTGNRCCISAAPYRGVSCYRGLTGFGSRSLCNLGSCGPRIAVGGFRAGSCGRSFGYRSGGVCGPSPPCITTVSVNESLLTPLNLEIDPNAQCVKQEEKEQIKSLNSRFAAFIDKVRFLEQQNKLLETKWQFYQNQRCCESNLEPLFSGYIETLRREAECVEADSGRLASELNHVQEVLEGYKKKYEEEVALRATAENEFVVLKKDVDCAYLRKSDLEANVEALVEESSFLRRLYEEEIRVLQAHISDTSVIVKMDNSRDLNMDCIIAEIKAQYDDVASRSRAEAESWYRSKCEEMKATVIRHGETLRRTKEEINELNRMIQRLTAEIENAKCQRAKLEAAVAEAEQQGEAALSDARCKLAELEGALQKAKQDMACLLKEYQEVMNSKLGLDIEIATYRRLLEGEEHRLCEGVGSVNVCVSSSRGGVSCGGLSYSTTPGRQITSGPSAIGGSITVVAPDSCAPCQPRSSSFSCGSSRSVRFA

SEQ ID NO: 29520 - protein, 513 aa, Homo sapiens
MSYHSFQPGSRCGSQSFSSYSAVMPRMVTHYAVSKGPCRPGGGRGLRALGCLGSRSLCNVGFGRPRVASRCGGTLPGFGYRLGATCGPSACITPVTINESLLVPLALEIDPTVQRVKRDEKEQIKCLNNRFASFINKVRFLEQKNKLLETKWNFMQQQRCCQTNIEPIFEGYISALRRQLDCVSGDRVRLESELCSLQAALEGYKKKYEEELSLRPCVENEFVALKKDVDTAFLMKADLETNAEALVQEIDFLKSLYEEEICLLQSQISETSVIVKMDNSRELDVDGIIAEIKAQYDDIASRSKAEAEAWYQCRYEELRVTAGNHCDNLRNRKNEILEMNKLIQRLQQETENVKAQRCKLEGAIAEAEQQGEAALNDAKCKLAGLEEALQKAKQDMACLLKEYQEVMNSKLGLDIEIATYRRLLEGEEHRLCEGIGPVNISVSSSKGAFLYEPCGVSTPVLSTGVLRSNGGCSIVGTGELYVPCEPQGLLSCGSGRKSSMTLGAGGSSPSHKH

SEQ ID NO: 29521 - protein, 53 aa, Homo sapiens
MEAAGGFQVHFHPSNGDGRFIETSSAADLEVISYSSKVSVTERCFIKVCTVLF

SEQ ID NO: 29522 - protein, 852 aa, Homo sapiens
MSSVSPIQIPSRLPLLLTHEGVLLPGSTMRTSVDSARNLQLVRSRLLKGTSLQSTILGVIPNTPDPASDAQDLPPLHRIGTAALAVQVVGSNWPKPHYTLLITGLCRFQIVQVLKEKPYPIAEVEQLDRLEEFPNTCKMREELGELSEQFYKYAVQLVEMLDMSVPAVAKLRRLLDSLPREALPDILTSIIRTSNKEKLQILDAVSLEERFKMTIPLLVRQIEGLKLLQKTRKPKQDDDKRVIAIRPIRRITHISGTLEDEDEDEDNDDIVMLEKKIRTSSMPEQAHKVCVKEIKRLKKMPQSMPEYALTRNYLELMVELPWNKSTTDRLDIRAARILLDNDHYAMEKLKKRVLEYLAVRQLKNNLKGPILCFVGPPGVGKTSVGRSVAKTLGREFHRIALGGVCDQSDIRGHRRTYVGSMPGRIINGLKTVGVNNPVFLLDEVDKLGKSLQGDPAAALLEVLDPEQNHNFTDHYLNVAFDLSQVLFIATANTTATIPAALLDRMEIIQVPGYTQEEKIEIAHRHLIPKQLEQHGLTPQQIQIPQVTTLDIITRYTREAGVRSLDRKLGAICRAVAVKVAEGQHKEAKLDRSDVTEREGCREHILEDEKPESISDTTDLALPPEMPILIDFHALKDILGPPMYEMEVSQRLSQPGVAIGLAWTPLGGEIMFVEASRMDGEGQLTLTGQLGDVMKESAHLAISWLRSNAKKYQLTNAFGSFDLLDNTDIHLHFPAGAVTKDGPSAGVTIVTCLASLFSGRLVRSDVAMTGEITLRGLVLPVGGIKDKVLAAHRAGLKQVIIPRRNEKDLEGIPGNVRQDLSFVTASCLDEVLNAAFDGGFTVKTRPGLLNSKL

SEQ ID NO: 29523 - protein, 808 aa, Homo sapiens
MSSVSPIQIPSRLPLLLTHEGVLLPGSTMRTSVDSARNLQLVRSRLLKGTSLQSTILGVIPNTPDPASDAQDLPPLHRIGTAALAVQVVGSNWPKPHYTLLITGLCRFQIVQVLKEKPYPIAEVEQLDRLEEFPNTCKMREELGELSEQFYKYAVQILDAVSLEERFKMTIPLLVRQIEGLKLLQKTRKPKQDDDKRVIAIRPIRRITHISGTLEDEDEDEDNDDIVMLEKKIRTSSMPEQAHKVCVKEIKRLKKMPQSMPEYALTRNYLELMVELPWNKSTTDRLDIRAARILLDNDHYAMEKLKKRVLEYLAVRQLKNNLKGPILCFVGPPGVGKTSVGRSVAKTLGREFHRIALGGVCDQSDIRGHRRTYVGSMPGRIINGLKTVGVNNPVFLLDEVDKLGKSLQGDPAAALLEVLDPEQNHNFTDHYLNVAFDLSQVLFIATANTTATIPAALLDRMEIIQVPGYTQEEKIEIAHRHLIPKQLEQHGLTPQQIQIPQVTTLDIITRYTREAGVRSLDRKLGAICRAVAVKVAEGQHKEAKLDRSDVTEREGCREHILEDEKPESISDTTDLALPPEMPILIDFHALKDILGPPMYEMEVSQRLSQPGVAIGLAWTPLGGEIMFVEASRMDGEGQLTLTGQLGDVMKESAHLAISWLRSNAKKYQLTNAFGSFDLLDNTDIHLHFPAGAVTKDGPSAGVTIVTCLASLFSGRLVRSDVAMTGEITLRGLVLPVGGIKDKVLAAHRAGLKQVIIPRRNEKDLEGIPGNVRQDLSFVTASCLDEVLNAAFDGGFTVKTRPGLLNSKL

SEQ ID NO: 29524 - protein, 670 aa, Homo sapiens
MEEFRRSYSRLCRESGAEPQEAVLQQLHQLPRGRLDLATQSLTVETCRALGKLLPRETLCTELVLSDCMLSEEGATLLLRGLCANTVLRFLDLKGNNLRAAGAEALGKLLQQNKSIQSLTLEWNSLGTWDDAFATFCGGLAANGALQRLDLRNNQISHKGAEELALALKGNTTLQQLDLRWNNVGLLGGRALMNCLPSNRTLWRLDLAGNNIPGDVLRAVEQAMGHSQDRLTTFQENQARTHVLSKEVQHLREEKSKQFLDLMETIDKQREEMAKSSRASAARVGQLQEALNERHSIINALKAKLQMTEAALALSEQKAQDLGELLATAEQEQLSLSQRQAKELKLEQQEAAERESKLLRDLSAANEKNLLLQNQVDELERKFRCQQEQLFQTRQEMTSMSAELKMRAIQAEERLDMEKRRCRQSLEDSESLRIKEVEHMTRHLEESEKAMQERVQRLEAARLSLEEELSRVKAAALSERGQAEEELIKAKSQARLEEQQRLAHLEDKLRLLAQARDEAQGACLQQKQVVAEAQTRVSQLGLQVEGLRRRLEELQQELSLKDQERVAEVSRVRVELQEQNGRLQAELAAQEALREKAAALERQLKVMASDHREALLDRESENASLREKLRLREAEIARIRDEEAQRASFLQNAVLAYVQASPVRTLSPPK

SEQ ID NO: 29525 - protein, 586 aa, Homo sapiens
MATATPVPPRMGSRAGGPTTPLSPTRLSRLQEKEELRELNDRLAVYIDKVRSLETENSALQLQVTEREEVRGRELTGLKALYETELADARRALDDTARERAKLQIELGKCKAEHDQLLLNYAKKESDLNGAQIKLREYEAALNSKDAALATALGDKKSLEGDLEDLKDQIAQLEASLAAAKKQLADETLLKVDLENRCQSLTEDLEFRKSMYEEEINETRRKHETRLVEVDSGRQIEYEYKLAQALHEMREQHDAQVRLYKEELEQTYHAKLENARLSSEMNTSTVNSAREELMESRMRIESLSSQLSNLQKESRACLERIQELEDLLAKEKDNSRRMLTDKEREMAEIRDQMQQQLNDYEQLLDVKLALDMEISAYRKLLEGEEERLKLSPSPSSRVTVSRASSSRSVRTTRGKRKRVDVEESEASSSVSISHSASATGNVCIEEIDVDGKFIRLKNTSEQDQPMGGWEMIRKIGDTSVSYKYTSRYVLKAGQTVTIWAANAGVTASPPTDLIWKNQNSWGTGEDVKVILKNSQGEEVAQRSTVFKTTIPEEEEEEEEAAGVVVEEELFHQQGTPRASNRSCAIM

SEQ ID NO: 29526 - protein, 382 aa, Homo sapiens
MLDGLKMEENFQSAIDTSASFSSLLGRAVSPKSVCEGCQRVILDRFLLRLNDSFWHEQCVQCASCKEPLETTCFYRDKKLYCKYDYEKLFAVKCGGCFEAIAPNEFVMRAQKSVYHLSCFCCCVCERQLQKGDEFVLKEGQLLCKGDYEKERELLSLVSPAASDSGKSDDEESLCKSAHGAGKGTAEEGKDHKRPKRPRTILTTQQRRAFKASFEVSSKPCRKVRETLAAETGLSVRVVQVWFQNQRAKMKKLARRQQQQQQDQQNTQRLSSAQTNGGGSAGMEGIMNPYTALPTPQQLLAIEQSVYSSDPFRQGLTPPQMPGDHMHPYGAEPLFHDLDSDDTSLSNLGDCFLATSEAGPLQSRVGNPIDHLYSMQNSYFTS

SEQ ID NO: 29527 - protein, 133 aa, Homo sapiens
MKKLARRQQQQQQDQQNTQRLSSAQTNGGGSAGMEGIMNPYTALPTPQQLLAIEQSVYSSDPFRQGLTPPQMPGDHMHPYGAEPLFHDLDSDDTSLSNLGDCFLATSEAGPLQSRVGNPIDHLYSMQNSYFTS

SEQ ID NO: 29528 - protein, 360 aa, Homo sapiens
MEERERGARSAGAGSPARPPSPRLDVSSDSFDPLLALYAPRLPPIPYPNAPCFNNVAEYESFLRTGVRGGGRGRGRARGAAAGSGVPAAPGPSGRTRRRPDAPAPDPERIQRLRRLMVAKEEGDGAAGAGRRGPGRSRKAPRNVLTRMPLHEGSPLGELHRCIREGVKVNVHIRTFKGLRGVCTGFLVAFDKFWNMALTDVDETYRKPVLGKAYERDSSLTLTRLFDRLKLQDSSKKEADSKSAVEDSTLSRYSQTSTWKLASVWGRADTGRGSHKRSRSVPSSLQASAREESRSELSGRTTRTDGSSVGGTFSRATTLSRGQSRKKKRKPKVDYQQVFTRHINQIFIRGENVLLVHLAQ

SEQ ID NO: 29529 - protein, 634 aa, Homo sapiens
MRWLRPAGRRREQESVSGHLGPPAGAPAAPETPTCLPDTTPHPAPVVCSADPQLALESLDPRTLRLLWRQRELEIQALRWAIQNGEDARLCHILEEVAGLPPKRSSHSQEKLLQNQVQKLIQELKEQKERAQWEKEHLEERLLQTTRTLQEMEAELQNLQKSCLLQLARSSWVGRMLRSQTGSVEVVTAETLMDPSDLSENIQAPTGEGFRLEDVDWNSVARRYPNLFTNMEPSSKQKQPRPWPQLDTGSPESSGKHSERHHKTVEWGSLPCLNTSSSGGADSDSSSCRPGLPSFVQVIGHPPRDHRASSEQALVQAGSYSRDSEDLQKTHSPRHGEPVLSPQPCTDPDHWSPELLQSPTGLKIVAVSCREKFVRIFNPSQESTADLSGMVLKQLVRGFPERLYRFPPGTLLAPRHHVTVWGEATRSAKKPLRASSSREPVPLLSIRGCATLLLSPKGEVLSEHRIPRRETPAPRVFADGTDLSIDRFPLPEAGPGADTRKPPRPPRPLRKGRVREPRVSRRRPGTRGLLPPVSSGKLFHAREGPARPENPEIPAPQHLPAIPGDPTLPSPPAEAGLGLEDCRLQKEHRVRVCRKSVDRSCPLVALSVQNTAESRFGFRFLSCLPVTADTCRGA

SEQ ID NO: 29530 - protein, 312 aa, Homo sapiens
MSYQKKQPTPQPPVDCVKTSGGGGGGGGSGGGGCGFFGGGGSGGGSSGSGCGYSGGGGYSGGGCGGGSSGGGGGGGIGGCGGGSGGSVKYSGGGGSSGGGSGCFSSGGGGSGCFSSGGGGSSGGGSGCFSSGGGGSSGGGSGCFSSGGGGFSGQAVQCQSYGGVSSGGSSGGGSGCFSSGGGGGSVCGYSGGGSGCGGGSSGGSGSGYVSSQQVTQTSCAPQPSYGGGSSGGGGSGGSGCFSSGGGGGSSGCGGGSSGIGSGCIISGGGSVCGGGSSGGGGGGSSVGGSGSGKGVPICHQTQQKQAPTWPSK

SEQ ID NO: 29531 - protein, 248 aa, Homo sapiens
MSLFPSLPLLLLSMVAASYSETVTCEDAQKTCPAVIACSSPGINGFPGKDGRDGTKGEKGEPGQGLRGLQGPPGKLGPPGNPGPSGSPGPKGQKGDPGKSPDGDSSLAASERKALQTEMARIKKWLTFSLGKQVGNKFFLTNGEIMTFEKVKALCVKFQASVATPRNAAENGAIQNLIKEEAFLGITDEKTEGQFVDLTGNRLTYTNWNEGEPNNAGSDEDCVLLLKNGQWNDVPCSTSHLAVCEFPI

SEQ ID NO: 29532 - protein, 265 aa, Homo sapiens
MESNLQGTFLLNNTPLAQFPEMKAPVCQYSVQNSFYKLSPPGLGPQLAAGTPHGITDILSRPVAAPNNSLLSGYPHVAGFGGLSSQGVYYSPQVGNFSKAGNEYPTRTRNCWADTGQDWRGGRQCSNTPDPLSDSIHKKKHTRPTFTGHQIFALEKTFEQTKYLAGPERARLAYSLGMTESQVKVWFQNRRTKWRKKSALEPSSSTPRAPGGAGAGAGGDRAPSENEDDEYNKPLDPDSDDEKIRLLLRKHRAAFSVLSLGAHSV

SEQ ID NO: 29533 - protein, 135 aa, Homo sapiens
MQQGQLAPGSRLCSGPWGLPELQPAAPSSSAAQLPWGESWGEEADTPACLSASGVWFQNRRTKWRKKSALEPSSSTPRAPGGAGAGAGGDRAPSENEDDEYNKPLDPDSDDEKIRLLLRKHRAAFSVLSLGAHSV

SEQ ID NO: 29534 - protein, 88 aa, Homo sapiens
MAASRLPPATLTLKQFVRRQQVLLLYRRILQTIRQVPNDSDRKYLKDWAREEFRRNKSATEEDTIRMMITQGNMQLKELEKTLALAKS

SEQ ID NO: 29535 - protein, 353 aa, Homo sapiens
MAAELAMGAELPSSPLAIEYVNDFDLMKFEVKKEPPEAERFCHRLPPGSLSSTPLSTPCSSVPSSPSFCAPSPGTGGGGGAGGGGGSSQAGGAPGPPSGGPGAVGGTSGKPALEDLYWMSGYQHHLNPEALNLTPEDAVEALIGSGHHGAHHGAHHPAAAAAYEAFRGPGFAGGGGADDMGAGHHHGAHHAAHHHHAAHHHHHHHHHHGGAGHGGGAGHHVRLEERFSDDQLVSMSVRELNRQLRGFSKEEVIRLKQKRRTLKNRGYAQSCRFKRVQQRHILESEKCQLQSQVEQLKLEVGRLAKERDLYKEKYEKLAGRGGPGSAGGAGFPREPSPPQAGPGGAKGTADFFL

SEQ ID NO: 29536 - protein, 332 aa, Homo sapiens [sequence omitted]

SEQ ID NO: 29537 - protein, 173 aa, Homo sapiens
MLPPPPRQPPPQARAARGAVRLQRPFLRSPLGVLRLLQLLAGAAFWITIATSKYQGPVHFALFVSVLFWLLTLGLYFLTLLGKHELVPVLGSRWLMVNVAHDVLAAALYGAATGIMSDQMQRHSYCNLKDYPLPCAYHAFLAAAVCGGVCHGLYLLSALYGCGRRCQGKQEVA

SEQ ID NO: 29538 - protein, 647 aa, Homo sapiens
MSDEVFSTTLAYTKSPKVTKRTTFQDELIRAITARSARQRSSEYSDDFDSDEIVSLGDFSDTSADENSVNKKMNDFHISDDEEKNPSKLLFLKTNKSNGNITKDEPVCAIKNEEEMAPDGCEDIVVKSFSESQNKDEEFEKDKIKMKPKPRILSIKSTSSAENNSLDTDDHFKPSPRPRSMLKKKSHMEEKDGLEDKETALSEELELHSAPSSLPTPNGIQLEAEKKAFSENLDPEDSCLTSLASSSLKQILGDSFSPGSEGNASGKDPNEEITENHNSLKSDENKENSFSADHVTTAVEKSKESQVTADDLEEEKAKAELIMDDDRTVDPLLSKSQSILISTSATASSKKTIEDRNIKNKKSTNNRASSASARLMTSEFLKKSSSKRRTPSTTTSSHYLGTLKVLDQKPSQKQSIEPDRADNIRAAVYQEWLEKKNVYLHEMHRIKRIESENLRIQNEQKKAAKREEALASFEAWKAMKEKEAKKIAAKKRLEEKNKKKTEEENAARKGEALQAFEKWKEKKMEYLKEKNRKEREYERAKKQKEEETVAEKKKDNLTAVEKWNEKKEAFFKQKEKEKINEKRKEELKRAEKKDKDKQAINEYEKWLENKEKQERIERKQKKRHSFLESEALPPWSPPSRTVFAKVF

SEQ ID NO: 29539 - protein, 377 aa, Homo sapiens
MSDEVFSTTLAYTKSPKVTKRTTFQDELIRAITARSARQRSSEYSDDFDSDEIVSLGDFSDTSADENSVNKKMNDFHISDDEEKNPSKLLFLKTNKSNGNITKDEPVCAIKNEEEMAPDGCEDIVVKSFSESQNKDEEFEKDKIKMKPKPRILSIKSTSSAENNSLDTDDHFKPSPRPRSMLKKKSHMEEKDGLEDKETALSEELELHSAPSSLPTPNGIQLEAEKKAFSENLDPEDSCLTSLASSSLKQILGDSFSPGSEGNASGKDPNEEITENHNSLKSDENKENSFSADHVTTAVEKSKESQVTADDLEEEKAKAELIMDDDRTVDPLLSKSQSILISTSATASSKKTIEDRNIKNKKSTNNRASSASAARSG

SEQ ID NO: 29540 - protein, 190 aa, Homo sapiens
MASRGKTETSKLKQNLEEQLDRLMQQLQDLEECREELDTDEYEETKKETLEQLSEFNDSLKKIMSGNMTLVDELSGMQLAIQAAISQAFKTPEVIRLFAKKQPGQLRTRLAEMDRDLMVGKLERDLYTQQKVEILTALRKLGEKLTADDEAFLSANAGAILSQFEKVSTDLGSGDKILALASFEVEKTKK

SEQ ID NO: 29541 - protein, 211 aa, Homo sapiens
MNNFIFLKFMTLGTSRTGEIKMASRGKTETSKLKQNLEEQLDRLMQQLQDLEECREELDTDEYEETKKETLEQLSEFNDSLKKIMSGNMTLVDELSGMQLAIQAAISQAFKTPEVIRLFAKKQPGQLRTRLAEMDRDLMVGKLERDLYTQQKVEILTALRKLGEKLTADDEAFLSANAGAILSQFEKVSTDLGSGDKILALASFEVEKTKK

SEQ ID NO: 29542 - protein, 473 aa, Homo sapiens
MSEESDMDKAIKETSILEEYSINWTQKLGAGISGPVRVCVKKSTQERFALKILLDRPKARNEVRLHMMCATHPNIVQIIEVFANSVQFPHESSPRARLLIVMEMMEGGELFHRISQHRHFTEKQASQVTKQIALALRHCHLLNIAHRDLKPENLLFKDNSLDAPVKLCDFGFAKIDQGDLMTPQFTPYYVAPQVLEAQRRHQKEKSGIIPTSPTPYTYNKSCDLWSLGVIIYVMLCGYPPFYSKHHSRTIPKDMRRKIMTGSFEFPEEEWSQISEMAKDVVRKLLKVKPEERLTIEGVLDHPWLNSTEALDNVLPSAQLMMDKAVVAGIQQAHAEQLANMRIQDLKVSLKPLHSVNNPILRKRKLLGTKPKDSVYIHDHENGAEDSNVALEKLRDVIAQCILPQAGKGENEDEKLNEVMQEAWKYNRECKLLRDTLQSFSWNGRGFTDKVDRLKLAEIVKQVIEEQTTSHESQ

SEQ ID NO: 29543 - protein, 471 aa, Homo sapiens
MSEESDMDKAIKETSILEEYSINWTQKLGAGISGPVRVCVKKSTQERFALKILLDRPKARNEVRLHMMCATHPNIVQIIEVFANSVQFPHESSPRARLLIVMEMMEGGELFHRISQHRHFTEKQASQVTKQIALALRHCHLLNIAHRDLKPENLLFKDNSLDAPVKLCDFGFAKIDQGDLMTPQFTPYYVAPQVLEAQRRHQKEKSGIIPTSPTPYTYNKSCDLWSLGVIIYVMLCGYPPFYSKHHSRTIPKDMRRKIMTGSFEFPEEEWSQISEMAKDVVRKLLKVKPEERLTIEGVLDHPWLNSTEALDNVLPSAQLMMDKAVVAGIQQAHAEQLANMRIQDLKVSLKPLHSVNNPILRKRKLLGTKPKDSVYIHDHENGAEDSNVALEKLRDVIAQCILPQAGENEDEKLNEVMQEAWKYNRECKLLRDTLQSFSWNGRGFTDKVDRLKLAEIVKQVIEEQTTSHESQ

SEQ ID NO: 29544 - protein, 115 aa, Homo sapiens
MAWATLLLPLLNLYTGSVASYELTQLPSVSVSPGQTARITCSGDVLGENYADWYQQKPGQAPELVIYEDSERYPGIPERFSGSTSGNTTTLTISRVLTEDEADYYCLSGDEDNPS

SEQ ID NO: 29545 - protein, 419 aa, Homo sapiens
MNRHLWKSQLCEMVQPSGGPAADQDVLGEESPLGKPAMLHLPSEQGAPETLQRCLEENQELRDAIRQSNQILRERCEELLHFQASQREEKEFLMCKFQEARKLVERLGLEKLDLKRQKEQALREVEHLKRCQQQMAEDKASVKAQVTSLLGELQESQSRLEAATKECQALEGRARAASEQARQLESEREALQQQHSVQVDQLRMQGQSVEAALRMERQAASEEKRKLAQLQVAYHQLFQEYDNHIKSSVVGSERKRGMQLEDLKQQLQQAEEALVAKQEVIDKLKEEAEQHKIVMETVPVLKAQADIYKADFQAERQAREKLAEKKELLQEQLEQLQREYSKLKASCQESARIEDMRKRHVEVSQAPLPPAPAYLSSPLALPSQRRSPPEEPPDFCCPKCQYQAPDMDTLQIHVMECIE

SEQ ID NO: 29546 - protein, 487 aa, Homo sapiens
MALVIQVGKLRPREVRTPQTINPSLFPSLPVKLSSIIEVPSGGERCCSRRTLVYKARAFWKGAPLPCWMNRHLWKSQLCEMVQPSGGPAADQDVLGEESPLGKPAMLHLPSEQGAPETLQRCLEENQELRDAIRQSNQILRERCEELLHFQASQREEKEFLMCKFQEARKLVERLGLEKLDLKRQKEQALREVEHLKRCQQQMAEDKASVKAQVTSLLGELQESQSRLEAATKECQALEGRARAASEQARQLESEREALQQQHSVQVDQLRMQGQSVEAALRMERQAASEEKRKLAQLQVAYHQLFQEYDNHIKSSVVGSERKRGMQLEDLKQQLQQAEEALVAKQEVIDKLKEEAEQHKIVMETVPVLKAQADIYKADFQAERQAREKLAEKKELLQEQLEQLQREYSKLKASCQESARIEDMRKRHVEVSQAPLPPAPAYLSSPLALPSQRRSPPEEPPDFCCPKCQYQAPDMDTLQIHVMECIE

SEQ ID NO: 29547 - protein, 320 aa, Homo sapiens
MNRHLWKSQLCEMVQPSGGPAADQDVLGEESPLGKPAMLHLPSEQGAPETLQRCLEENQELRDAIRQSNQILRERCEELLHFQASQREEKEFLMCKFQEARKLVERLGLEKLDLKRQKEQALREVEHLKRCQQQMAEDKASVKAQVTSLLGELQESQSRLEAATKECQALEGRRKLAQLQVAYHQLFQEYDNHIKSSVVGSERKRADIYKADFQAERQAREKLAEKKELLQEQLEQLQREYSKLKASCQESARIEDMRKRHVEVSQAPLPPAPAYLSSPLALPSQRRSPPEEPPDFCCPKCQYQAPDMDTLQIHVMECIE

SEQ ID NO: 29548 - protein, 120 aa, Homo sapiens
MAWALLLLTLLTQGTGSWAQSALTQPASVSGSPGQSITISCTGTSSDVGGYNYVSWYQQHPGKAPKLMIYEVSNRPSGVSNRFSGSKSGNTASLTISGLQAEDEADYYCSSYTSSSTLHS

SEQ ID NO: 29549 - protein, 113 aa, Homo sapiens
MAWIPLLLPLLILCTVSVASYELTQPSSVSVSPGQTARITCSGDVLAKKYARWFQQKPGQAPVLVIYKDSERPSGIPERFSGSSSGTTVTLTISGAQVEDEADYYCYSAADNN

SEQ ID NO: 29550 - protein, 115 aa, Homo sapiens
MAWIPLFLGVLAYCTGSVASYELTQPPSVSVSPGQTASITCSGDKLGDKYACWYQQKPGQSPVLVIYQDSKRPSGIPERFSGSNSGNTATLTISGTQAMDEADYYCQAWDSSTAH

SEQ ID NO: 29551 - protein, 114 aa, Homo sapiens
MAWTPPLLVLTLCTGSVISSGPTQVPAVSVALGQMARITCQGDSMEGSYEHWYQQKPGQAPVLVIYDSSDRPSRIPERFSGSKSGNTTTLTITGAQAEDEADYYYQLIDNHATQ

SEQ ID NO: 29552 - protein, 117 aa, Homo sapiens
MAWTVLLLGLLSHCTGSVTSYVLTQPPSVSVAPGQTARITCGGNNIGSKSVHWYQQKPGQAPVLVVYDDSDRPSGIPERFSGSNSGNTATLTISRVEAGDEADYYCQVWDSSSDHPT

SEQ ID NO: 29553 - protein, 124 aa, Homo sapiens
MADDLKRFLYKKLPSVEGLHAIVVSDRDGVPVIKVANDNAPEHALRPGFLSTFALATDQGSKLGLSKNKSIICYYNTYQVVQFNRLPLVVSFIASSSANTGLIVSLEKELAPLFEELRQVVEVS

SEQ ID NO: 29554 - protein, 117 aa, Homo sapiens
MADDLKRFLYKKLPSVEGLHAIVVSDRDGVPVIKEHALRPGFLSTFALATDQGSKLGLSKNKSIICYYNTYQVVQFNRLPLVVSFIASSSANTGLIVSLEKELAPLFEELRQVVEVS

SEQ ID NO: 29555 - protein, 415 aa, Homo sapiens
MTLAASSQRSQIIRSKFRSVLQLRIHRRNQEQISDPDPWISASDPPLAPALPSGTAPFLFSPGVLLPEPEYCPPWRSPKKESPKISQRWRESKPRGNLTYHQYMPPEPRQGSRADPQAEGSALGPPGPSLWEGTDSQQPHPRMKPSPLTPCPPGVPSPSPPPHKLELQTLKLEELTVSELRQQLRLRGLPVSGTKSMLLERMRGGAPPRERPKPRREDSPAGAPWPRLKPKALAAARRQGSVKPSAASHRPPLPRAADTPGTAPAPTPTPAPAAAPALTPSSGPGSAALTLEEELQEAIRRAQLLPNRGIDDILEDQVEPDDPLPPIPLDFPGSFDVLSPSPDSEGLSSVFSSSLPSPTNSSSPSPRDPTDSLDWLEALSGGPPLGSGPPPPSIFSADLSDSSSSRLWDLLEDPW

SEQ ID NO: 29556 - protein, 312 aa, Homo sapiens
MPPEPRQGSRADPQAEGSALGPPGPSLWEGTDSQQPHPRMKPSPLTPCPPGVPSPSPPPHKLELQTLKLEELTVSELRQQLRLRGLPVSGTKSMLLERMRGGAPPRERPKPRREDSPAGAPWPRLKPKALAAARRQGSVKPSAASHRPPLPRAADTPGTAPAPTPTPAPAAAPALTPSSGPGSAALTLEEELQEAIRRAQLLPNRGIDDILEDQVEPDDPLPPIPLDFPGSFDVLSPSPDSEGLSSVFSSSLPSPTNSSSPSPRDPTDSLDWLEALSGGPPLGSGPPPPSIFSADLSDSSSSRLWDLLEDPW

SEQ ID NO: 29557 - protein, 247 aa, Homo sapiens
MPPEPRQGSRADPQAEGSALGPPGPSLWEGTDSQQPHPRMKPSPLTPCPPGVPSPSPPPHKLELQTLKLEELTVKPSAASHRPPLPRAADTPGTAPAPTPTPAPAAAPALTPSSGPGSAALTLEEELQEAIRRAQLLPNRGIDDILEDQVEPDDPLPPIPLDFPGSFDVLSPSPDSEGLSSVFSSSLPSPTNSSSPSPRDPTDSLDWLEALSGGPPLGSGPPPPSIFSADLSDSSSSRLWDLLEDPW

SEQ ID NO: 29558 - protein, 372 aa, Homo sapiens [sequence omitted]

SEQ ID NO: 29559 - protein, 385 aa, Homo sapiens
MGCRRTREGPSKAMIFPWKCQSTQRDLWNIFKLWGWTMLCCDFLAHHGTDCWTYHYSEKPMNWQRARRFCRDNYTDLVAIQNKAEIEYLEKTLPFSRSYYWIGIRKIGGIWTWVGTNKSLTEEAENWGDGEPNNKKNKEDCVEIYIKRNKDAGKWNDDACHKLKAALCYTASCQPWSCSGHGECVEIINNYTCNCDVGYYGPQCQFVIQCEPLEAPELGTMDCTHPLGNFSFSSQCAFSCSEGTNLTGIEETTCGPFGNWSSPEPTCQVIQCEPLSAPDLGIMNCSHPLASFSFTSACTFICSEGTELIGKKKTICESSGIWSNPSPICQKLDKSFSMIKEGDYNPLFIPVAVMVTAFSGLAFIIWLARRLKKGKKSKRSMNDPY

SEQ ID NO: 29560 - protein, 91 aa, Homo sapiens
MEATLEQHLEDTMKNPSIVGVLCTDSQGLNLGCRGTLSDEHAGVISVLAQQAAKLTSDPTDIPVVCLESDNGNIMIQKHDGITVAVHKMAS

SEQ ID NO: 29561 - protein, 533 aa, Homo sapiens
MIHGRSVLHIVASLIILHLSGATKKGTEKQTTSETQKSVQCGTWTKHAEGGIFTSPNYPSKYPPDRECIYIIEAAPRQCIELYFDEKYSIEPSWECKFDHIEVRDGPFGFSPIIGRFCGQQNPPVIKSSGRFLWIKFFADGELESMGFSARYNFTPDPDFKDLGALKPLPACEFEMGGSEGIVESIQIMKEGKATASEAVDCKWYIRAPPRSKIYLRFLDYEMQNSNECKRNFVAVYDGSSSVEDLKAKFCSTVANDVMLRTGLGVIRMWADEGSRNSRFQMLFTSFQEPPCEGNTFFCHSNMCINNTLVCNGLQNCVYPWDENHCKEKRKTSLLDQLTNTSGTVIGVTSCIVIILIIISVIVQIKQPRKKYVQRKSDFDQTVFQEVFEPPHYELCTLRGTGATADFADVADDFENYHKLRRSSSKCIHDHHCGSQLSSTKGSRSNLSTRDASILTEMPTQPGKPLIPPMNRRNILVMKHSYSQDAADACDIDEIEEVPTTSHRLSRHDKAVQRFCLIGSLSKHESEYNTTRV

SEQ ID NO: 29562 - protein, 156 aa, Homo sapiens
MLAEPFPKVVASLIILHLSGATKKGTEKQTTSETQKSVQCGTWTKHAEGGIFTSPNYPSKYPPDRECIYIIEAAPRQCIELYFDEKYSIEPSWECKFDHIEVRDGPFGFSPIIGRFCGQQNPPVIKSSGRFLWIKFFADGELESMGFSARYNFTPE

SEQ ID NO: 29563 - protein, 532 aa, Homo sapiens
MLAEPFPKVVASLIILHLSGATKKGTEKQTTSETQKSVQCGTWTKHAEGGIFTSPNYPSKYPPDRECIYIIEAAPRQCIELYFDEKYSIEPSWECKFDHIEVRDGPFGFSPIIGRFCGQQNPPVIKSSGRFLWIKFFADGELESMGFSARYNFTPDPDFKDLGALKPLPACEFEMGGSEGIVESIQIMKEGKATASEAVDCKWYIRAPPRSKIYLRFLDYEMQNSNECKRNFVAVYDGSSSVEDLKAKFCSTVANDVMLRTGLGVIRMWADEGSRNSRFQMLFTSFQEPPCEGNTFFCHSNMCINNTLVCNGLQNCVYPWDENHCKEKRKTSLLDQLTNTSGTVIGVTSCIVIILIIISVIVQIKQPRKKYVQRKSDFDQTVFQEVFEPPHYELCTLRGTGATADFADVADDFENYHKLRRSSSKCIHDHHCGSQLSSTKGSRSNLSTRDASILTEMPTQPGKPLIPPMNRRNILVMKHSYSQDAADACDIDEIEEVPTTSHRLSRHDKAVQRFCLIGSLSKHESEYNTTRV

SEQ ID NO: 29564 - protein, 525 aa, Homo sapiens
MALERLCSVLKVLLITVLVVEGIAVAQKTQDGQNIGIKHIPATQCGIWVRTSNGGHFASPNYPDSYPPNKECIYILEAAPRQRIELTFDEHYYIEPSFECRFDHLEVRDGPFGFSPLIDRYCGVKSPPLIRSTGRFMWIKFSSDEELEGLGFRAKYSFIPDPDFTYLGGILNPIPDCQFELSGADGIVRSSQVEQEEKTKPGQAVDCIWTIKATPKAKIYLRFLDYQMEHSNECKRNFVAVYDGSSSIENLKAKFCSTVANDVMLKTGIGVIRMWADEGSRLSRFRMLFTSFVEPPCTSSTFFCHSNMCINNSLVCNGVQNCAYPWDENHCKEKKKAGVFEQITKTHGTIIGITSGIVLVLLIISILVQVKQPRKKVMACKTAFNKTGFQEVFDPPHYELFSLRDKEISADLADLSEELDNYQKMRRSSTASRCIHDHHCGSQASSVKQSRTNLSSMELPFRNDFAQPQPMKTFNSTFKKSSYTFKQGHECPEQALEDRVMEEIPCEIYVRGREDSAQASISIDF

SEQ ID NO: 29565 - protein, 201 aa, Homo sapiens
MLFTSFVEQKKKAGVFEQITKTHGTIIGITSGIVLVLLIISILVQVKQPRKKVMACKTAFNKTGFQEVFDPPHYELFSLRDKEISADLADLSEELDNYQKMRRSSTASRCIHDHHCGSQASSVKQSRTNLSSMELPFRNDFAQPQPMKTFNSTFKKSSYTFKQGHECPEQALEDRVMEEIPCEIYVRGREDSAQASISIDF

SEQ ID NO: 29566 - protein, 518 aa, Homo sapiens
MALERLCSVLKVLLITVLVVEGIAVAQKTQDGQNIGIKHIPATQCGIWVRTSNGGHFASPNYPDSYPPNKECIYILEAAPRQRIELTFDEHYYIEPSFECRFDHLEVRDGPFGFSPLIDRYCGVKSPPLIRSTGRFMWIKFSSDEELEGLGFRAKYSFIPDPDFTYLGDCQFELSGADGIVRSSQVEQEEKTKPGQAVDCIWTIKATPKAKIYLRFLDYQMEHSNECKRNFVAVYDGSSSIENLKAKFCSTVANDVMLKTGIGVIRMWADEGSRLSRFRMLFTSFVEPPCTSSTFFCHSNMCINNSLVCNGVQNCAYPWDENHCKEKKKAGVFEQITKTHGTIIGITSGIVLVLLIISILVQVKQPRKKVMACKTAFNKTGFQEVFDPPHYELFSLRDKEISADLADLSEELDNYQKMRRSSTASRCIHDHHCGSQASSVKQSRTNLSSMELPFRNDFAQPQPMKTFNSTFKKSSYTFKQGHECPEQALEDRVMEEIPCEIYVRGREDSAQASISIDF

SEQ ID NO: 29567 - protein, 207 aa, Homo sapiens
MDKDCEMKRTTLDSPLGKLELSGCEQGLHEIKLLGKGTSAADAVEVPAPAAVLGGPEPLMQCTAWLNAYFHQPEAIEEFPVPALHHPVFQQESFTRQVLWKLLKVVKFGEVISYQQLAALAGNPKAARAVGGAMRGNPVPILIPCHRVVCSSGAVGNYSGGLAVKEWLLAHEGHRLGKPGLGGSSGLAGAWLKGAGATSGSPPAGRN

SEQ ID NO: 29568 - protein, 364 aa, Homo sapiens
MELEGRGAGGVAGGPAAGPGRSPGESALLDGWLQRGVGRGAGGGEAGACRPPVRQDPDSGPDYEALPAGATVTTHMVAGAVAGILEHCVMYPIDCVKTRMQSLQPDPAARYRNVLEALWRIIRTEGLWRPMRGLNVTATGAGPAHALYFACYEKLKKTLSDVIHPGGNSHIANGAAGCVATLLHDAAMNPAEVVKQRMQMYNSPYHRVTDCVRAVWQNEGAGAFYRSYTTQLTMNVPFQAIHFMTYEFLQEHFNPQRRYNPSSHVLSGACAGAVAAAATTPLDVCKTLLNTQESLALNSHITGHITGMASAFRTVYQVGGVTAYFRGVQARVIYQIPSTAIAWSVYEFFKYLITKRQEEWRAGK

SEQ ID NO: 29569 - protein, 177 aa, Homo sapiens
MNPAEVVKQRMQMYNSPYHRVTDCVRAVWQNEGAGAFYRSYTTQLTMNVPFQAIHFMTYEFLQEHFNPQRRYNPSSHVLSGACAGAVAAAATTPLDVCKTLLNTQESLALNSHITGHITGMASAFRTVYQVGGVTAYFRGVQARVIYQIPSTAIAWSVYEFFKYLITKRQEEWRAGK

SEQ ID NO: 29570 - protein, 176 aa, Homo sapiens
MALLVVKQRMQMYNSPYHRVTDCVRAVWQNEGAGAFYRSYTTQLTMNVPFQAIHFMTYEFLQEHFNPQRRYNPSSHVLSGACAGAVAAAATTPLDVCKTLLNTQESLALNSHITGHITGMASAFRTVYQVGGVTAYFRGVQARVIYQIPSTAIAWSVYEFFKYLITKRQEEWRAGK

SEQ ID NO: 29571 - protein, 2002 aa, Homo sapiens
MEERKHETMNPAHVLFDRFVQATTCKGTLKAFQELCDHLELKPKDYRSFYHKLKSKLNYWKAKALWAKLDKRGSHKDYKKGKACTNTKCLIIGAGPCGLRTAIDLSLLGAKVVVIEKRDAFSRNNVLHLWPFTIHDLRGLGAKKFYGKFCAGAIDHISIRQLQLILLKVALILGIEIHVNVEFQGLIQPPEDQENERIGWRALVHPKTHPVSEYEFEVIIGGDGRRNTLEGFRRKEFRGKLAIAITANFINRNTTAEAKVEEISGVAFIFNQKFFQELREATGIDLENIVYYKDDTHYFVMTAKKQSLLDKGVILHDYADTELLLSRENVDQEALLSYAREAADFSTQQQLPSLDFAINHYGQPDVAMFDFTCMYASENAALVREQNGHQLLVALVGDSLLEPFWPMGTGIARGFLAAMDSAWMVRSWSLGTSPLEVLAERESIYRLLPQTTPENVSKNFSQYSIDPVTRYPNINVNFLRPSQVRHLYDTGETKDIHLEMESLVNSRTTPKLTRNESVARSSKLLGWCQRQTDGYAGVNVTDLTMSWKSGLALCAIIHRYRPDLIDFDSLDEQNVEKNNQLAFDIAEKELGISPIMTGKEMASVGEPDKLSMVMYLTQFYEMFKDSLPSSDTLDLNAEEKAVLIASTRSPISFLSKLGQTISRKRSPKDKKEKDLDGAGKRRKTSQSEEEEAPRGHRGERPTLVSTLTDRRMDVAVGNQNKVKYMATQLLAKFEENAPAQSIGIRRQGSMKKEFPQNLGGSDTCYFCQKRVYVMERLSAEGKFFHRSCFKCEYCATTLRLSAYAYDIEDGKFYCKPHYCYRLSGYAQRKRPAVAPLSGKEAKGPLQDGATTDANGRANAVASSTERTPGSGVNGLEEPSIAKRLRGTPERIELENYRLSLRQAEALQEVPEETQAEHNLSSVLDTGAEEDVASSSSESEMEEEGEEEEEEPRLPPSDLGGVPWKEAVRIHALLKGKSEEELEASKSFGPGNEEEEEEEEEYEEEEEEDYDEEEEESSEAGNQRLQQVMHAADPLEIQADVHWTHIREREEEERMAPASESSASGAPLDENDLEEDVDSEPAEIEGEAAEDGDPGDTGAELDDDQHWSDSPSDADRELRLPCPAEGEAELELRVSEDEEKLPASPKHQERGPSQATSPIRSPQESALLFIPVHSPSTEGPQLPPVPAATQEKSPEERLFPEPLLPKEKPKADAPSDLKAVHSPIRSQPVTLPEARTPVSPGSPQPQPPVAASTPPPSPLPICSQPQPSTEATVPSPTQSPIRFQPAPAKTSTPLAPLPVQSQSDTKDRLGSPLAVDEALRRSDLVEEFWMKSAEIRRSLGLTPVDRSKGPEPSFPTPAFRPVSLKSYSVEKSPQDEGLHLLKPLSIPKRLGLPKPEGEPLSLPTPRSPSDRELRSAQEERRELSSSSGLGLHGSSSNMKTLGSQSFNTSDSAMLTPPSSPPPPPPPGEEPATLRRKLREAEPNASVVPPPLPATWMRPPREPAQPPREEVRKSFVESVEEIPFADDVEDTYDDKTEDSSLQEKFFTPPSCWPRPEKPRHPPLAKENGRLPALEGTLQPQKRGLPLVSAEAKELAEERMRAREKSVKSQALRDAMARQLSRMQQMELASGAPRPRKASSAPSQGKERRPDSPTRPTLRGSEEPTLKHEATSEEVLSPPSDSGGPDGSFTSSEGSSGKSKKRSSLFSPRRNKKEKKSKGEGRPPEKPSSNLLEEAAAKPKSLWKSVFSGYKKDKKKKADDKSCPSTPSSGATVDSGKHRVLPVVRAELQLRRQLSFSEDSDLSSDDVLEKSSQKSRREPRTYTEEELNAKLTRRVQKAARRQAKQEELKRLHRAQIIQRQLQQVEERQRRLEERGVAVEKALRGEAGMGKKDDPKLMQEWFKLVQEKNAMVRYESELMIFARELELEDRQSRLQQELRERMAVEDHLKTEEELSEEKQILNEMLEVVEQRDSLVALLEEQRLREREEDKDLEAAMLSKGFSLNWS

SEQ ID NO: 29572 - protein, 948 aa, Homo sapiens
MEERKHETMNPAHVLFDRFVQATTCKGTLKAFQELCDHLELKPKDYRSFYHKLKSKLNYWKAKALWAKLDKRGSHKDYKKGKACTNTKCLIIGAGPCGLRTAIDLSLLGAKVVVIEKRDAFSRNNVLHLWPFTIHDLRGLGAKKFYGKFCAGAIDHISIRQLQLILLKVALILGIEIHVNVEFQGLIQPPEDQENERIGWRALVHPKTHPVSEYEFEVIIGGDGRRNTLEGFRRKEFRGKLAIAITANFINRNTTAEAKVEEISGVAFIFNQKFFQELREATGIDLENIVYYKDDTHYFVMTAKKQSLLDKGVILHDYADTELLLSRENVDQEALLSYAREAADFSTQQQLPSLDFAINHYGQPDVAMFDFTCMYASENAALVREQNGHQLLVALVGDSLLEPFWPMGTGIARGFLAAMDSAWMVRSWSLGTSPLEVLAERESIYRLLPQTTPENVSKNFSQYSIDPVTRYPNINVNFLRPSQVRHLYDTGETKDIHLEMESLVNSRTTPKLTRNESVARSSKLLGWCQRQTDGYAGVNVTDLTMSWKSGLALCAIIHRYRPDLIDFDSLDEQNVEKNNQLAFDIAEKELGISPIMTGKEMASVGEPDKLSMVMYLTQFYEMFKDSLPSSDTLDLNAEEKAVLIASTRSPISFLSKLGQTISRKRSPKDKKEKDLDGAGKRRKTSQSEEEEAPRGHRGERPTLVSTLTDRRMDVAVGNQNKVKYMATQLLAKFEENAPAQSIGIRRQGSMKKEFPQNLGGSDTCYFCQKRVYVMERLSAEGKFFHRSCFKCEYCATTLRLSAYAYDIEDGKFYCKPHYCYRLSGYAQRKRPAVAPLSGKEAKGPLQDGATTDANGRANAVASSTERTPGSGVNGLEEPSIAKRLRGTPERIELENYRLSLRQAEALQEVPEETQAEHNLSSVLDTGAEEDVASRSARRAAGRPPATRP

SEQ ID NO: 29573 - protein, 976 aa, Homo sapiens
MEERKHETMNPAHVLFDRFVQATTCKGTLKAFQELCDHLELKPKDYRSFYHKLKSKLNYWKAKALWAKLDKRGSHKDYKKGKACTNTKCLIIGAGPCGLRTAIDLSLLGAKVVVIEKRDAFSRNNVLHLWPFTIHDLRGLGAKKFYGKFCAGAIDHISIRQLQLILLKVALILGIEIHVNVEFQGLIQPPEDQENERIGWRALVHPKTHPVSEYEFEVIIGGDGRRNTLEGFRRKEFRGKLAIAITANFINRNTTAEAKVEEISGVAFIFNQKFFQELREATGIDLENIVYYKDDTHYFVMTAKKQSLLDKGVILHDYADTELLLSRENVDQEALLSYAREAADFSTQQQLPSLDFAINHYGQPDVAMFDFTCMYASENAALVREQNGHQLLVALVGDSLLEPFWPMGTGIARGFLAAMDSAWMVRSWSLGTSPLEVLAERESIYRLLPQTTPENVSKNFSQYSIDPVTRYPNINVNFLRPSQVRHLYDTGETKDIHLEMESLVNSRTTPKLTRNESVARSSKLLGWCQRQTDGYAGVNVTDLTMSWKSGLALCAIIHRYRPDLIDFDSLDEQNVEKNNQLAFDIAEKELGISPIMTGKEMASVGEPDKLSMVMYLTQFYEMFKDSLPSSDTLDLNAEEKAVLIASTRSPISFLSKLGQTISRKRSPKDKKEKDLDGAGKRRKTSQSEEEEAPRGHRGERPTLVSTLTDRRMDVAVGNQNKVKYMATQLLAKFEENAPAQSIGIRRQLTQERGASQPSCCLPGQVRPAPTPRWKQGSMKKEFPQNLGGSDTCYFCQKRVYVMERLSAEGKFFHRSCFKCEYCATTLRLSAYAYDIEDGKFYCKPHYCYRLSGYAQRKRPAVAPLSGKEAKGPLQDGATTDANGRANAVASSTERTPGSGVNGLEEPSIAKRLRGTPERIELENYRLSLRQAEALQEVPEETQAEHNLSSVLDTGAEEDVASRSARRAAGRPPATRP

SEQ ID NO: 29574 - protein, 966 aa, Homo sapiens
MEERKHETMNPAHVLFDRFVQATTCKGTLKAFQELCDHLELKPKDYRSFYHKLKSKLNYWKAKALWAKLDKRGSHKDYKKGKACTNTKCLIIGAGPCGLRTAIDLSLLGAKVVVIEKRDAFSRNNVLHLWPFTIHDLRGLGAKKFYGKFCAGAIDHISIRQLQLILLKVALILGIEIHVNVEFQGLIQPPEDQENERIGWRALVHPKTHPVSEYEFEVIIGGDGRRNTLEGFRRKEFRGKLAIAITANFINRNTTAEAKVEEISGVAFIFNQKFFQELREATGIDLENIVYYKDDTHYFVMTAKKQSLLDKGVILHDYADTELLLSRENVDQEALLSYAREAADFSTQQQLPSLDFAINHYGQPDVAMFDFTCMYASENAALVREQNGHQLLVALVGDSLLEPFWPMGTGIARGFLAAMDSAWMVRSWSLGTSPLEVLAERESIYRLLPQTTPENVSKNFSQYSIDPVTRYPNINVNFLRPSQVRHLYDTGETKDIHLEMESLVNSRTTPKLTRNESVARSSKLLGWCQRQTDGYAGVNVTDLTMSWKSGLALCAIIHRYRPDLIDFDSLDEQNVEKNNQLAFDIAEKELGISPIMTGKEMASVGEPDKLSMVMYLTQFYEMFKDSLPSSDTLDLNAEEKAVLIASTRSPISFLSKLGQTISRKRSPKDKKEKDLDGAGKRRKTSQSEEEEAPRGHRGERPTLVSTLTDRRMDVAVGNQNKVKYMATQLLAKFEENAPAQSIGIRRQGSMKKEFPQNLGGSDTCYFCQKRVYVMERLSAEGKFFHRSCFKCEYCATTLRLSAYAYDIEDGKFYCKPHYCYRLSGYAQRKRPAVAPLSGKEAKGPLQDGATTDANGRANAVASSTERTPGSGVNGLEEPSIAKRLRGTPERIELENYRLSLRQAEALQEVPEETQAEHNLSSVLDTGAEEDVASRDWVSPWLPRMVSNSWAQMIHPPQPPTVLGSQM

SEQ ID NO: 29575 - protein, 1073 aa, Homo sapiens
MEERKHETMNPAHVLFDRFVQATTCKGTLKAFQELCDHLELKPKDYRSFYHKLKSKLNYWKAKALWAKLDKRGSHKDYKKGKACTNTKCLIIGAGPCGLRTAIDLSLLGAKVVVIEKRDAFSRNNVLHLWPFTIHDLRGLGAKKFYGKFCAGAIDHISIRQLQLILLKVALILGIEIHVNVEFQGLIQPPEDQENERIGWRALVHPKTHPVSEYEFEVIIGGDGRRNTLEGFRRKEFRGKLAIAITANFINRNTTAEAKVEEISGVAFIFNQKFFQELREATGIDLENIVYYKDDTHYFVMTAKKQSLLDKGVILHDYADTELLLSRENVDQEALLSYAREAADFSTQQQLPSLDFAINHYGQPDVAMFDFTCMYASENAALVREQNGHQLLVALVGDSLLEPFWPMGTGIARGFLAAMDSAWMVRSWSLGTSPLEVLAERESIYRLLPQTTPENVSKNFSQYSIDPVTRYPNINVNFLRPSQVRHLYDTGETKDIHLEMESLVNSRTTPKLTRNESVARSSKLLGWCQRQTDGYAGVNVTDLTMSWKSGLALCAIIHRYRPDLIDFDSLDEQNVEKNNQLAFDIAEKELGISPIMTGKEMASVGEPDKLSMVMYLTQFYEMFKDSLPSSDTLDLNAEEKAVLIASTRSPISFLSKLGQTISRKRSPKDKKEKDLDGAGKRRKTSQSEEEEAPRGHRGERPTLVSTLTDRRMDVAVGNQNKVKYMATQLLAKFEENAPAQSIGIRRQQREKECSRTCPKKVITLSPPPTPPPCRAHGGQQTYRDLDADNRGKQSPHHERPEPEPPRRFFVDQWELSLSLRSSARPASPSSDSLRQKYIKMYTGGVSSLAEQIANQLQRKEQPKALLDKKELGSMKKEFPQNLGGSDTCYFCQKRVYVMERLSAEGKFFHRSCFKCEYCATTLRLSAYAYDIEDGKFYCKPHYCYRLSGYAQRKRPAVAPLSGKEAKGPLQDGATTDANGRANAVASSTERTPGSLTSLFGWVARHSLGLCDKAKGMSQHLQSNISSFGQQVAQNPLDSFFMCQLLAFGVPFLYGLSEVLVQIRGEFHWQAVAQ

SEQ ID NO: 29576 - protein, 552 aa, Homo sapiens
MGSILSRRIAGVEDIDIQANSAYRYPPKSGNYFASHFFMGGEKFDTPHPEGYLFGENMDLNFLGSRPVQFPYVTPAPHEPVKTLRSLVNIRKDSLRLVRYKDDADSPTEDGDKPRVLYSLEFTFDADARVAITIYCQASEEFLNGRAVYSPKSPSLQSETVHYKRGVSQQFSLPSFKIDFSEWKDDELNFDLDRGVFPVVIQAVVDEGDVVEVTGHAHVLLAAFEKHMDGSFSVKPLKQKQIVDRVSYLLQEIYGIENKNNQETKPSDDENSDNSNECVVCLSDLRDTLILPCRHLCLCTSCADTLRYQANNCPICRLPFRALLQIRAVRKKPGALSPVSFSPVLAQSLEHDEHSCPFKKSKPHPASLASKKPKRETNSDSVPPGYEPISLLEALNGLRAVSPAIPSAPLYEEITYSGISDGLSQASCPLAAIDHILDSSRQKGRPQSKAPDSTLRSPSSPIHEEDEEKLSEDVDAPPPLGGAELALRESSSPESFITEEVDESSSPQQGTRAASIENVLQDSSPEHCGRGPPADIYLPALGPDSCSVGIDE

SEQ ID NO: 29577 - protein, 576 aa, Homo sapiens
MGSILSRRIAGVEDIDIQANSAYRYPPKSGNYFASHFFMGGEKFDTPHPEGYLFGENMDLNFLGSRPVQFPYVTPAPHEPVKTLRSLVNIRKDSLRLVRYKDDADSPTEDGDKPRVLYSLEFTFDADARVAITIYCQASEEFLNGRAVYSPKSPSLQSETVHYKRGVSQQFSLPSFKIDFSEWKDDELNFDLDRGVFPVVIQAVVDEGDVVEVTGHAHVLLAAFEKHMDGSFSVKPLKQKQIVDRVSYLLQEIYGIENKNNQETKPSDDENSDNSNECVVCLSDLRDTLILPCRHLCLCTSCADTLRYQANNCPICRLPFRALLQIRAVRKKPGALSPVSFSPVLAQSLEHDEHSCPFKKSKPHPASLASKKPKRETNSDSVPPGYEPISLLEALNGLRAVSPAIPSAPLYEEITYSGISDGLSQASCPLAAIDHILDSSRQKGRPQSKAPDSTLRSPSSPIHEEDEEKLSEDVDAPPPLGGAELALRESSSPESFITEEVDESSSPQQGTRAASIENVLQDSSPEHCGRGPPADIYLPGRPTSMETAHGLATTSPTWPPLGGPSPDPSAAELTPL

SEQ ID NO: 29578 - protein, 554 aa, Homo sapiens
MGSILSRRIAGVEDIDIQANSAYRYPPKSGNYFASHFFMGGEKFDTPHPEGYLFGENMDLNFLGSRPVQFPYVTPAPHEPVKTLRSLVNIRKDSLRLVRYKDDADSPTEDGDKPRVLYSLEFTFDADARVAITIYCQASEEFLNGRAVYSPKSPSLQSETVHYKRGVSQQFSLPSFKIDFSEWKDDELNFDLDRGVFPVVIQAVVDEGDVVEVTGHAHVLLAAFEKHMDGSFSVKPLKQKQIVDRVSYLLQEIYGIENKNNQETKPSDDENSDNSNECVVCLSDLRDTLILPCRHLCLCTSCADTLRYQANNCPICRLPFRALLQIRAVRKKPGALSPVSFSPVLAQSLEHDEHSNSDSVPPGYEPISLLEALNGLRAVSPAIPSAPLYEEITYSGISDGLSQASCPLAAIDHILDSSRQKGRPQSKAPDSTLRSPSSPIHEEDEEKLSEDVDAPPPLGGAELALRESSSPESFITEEVDESSSPQQGTRAASIENVLQDSSPEHCGRGPPADIYLPGRPTSMETAHGLATTSPTWPPLGGPSPDPSAAELTPL

SEQ ID NO: 29579 - protein, 530 aa, Homo sapiens
MGSILSRRIAGVEDIDIQANSAYRYPPKSGNYFASHFFMGGEKFDTPHPEGYLFGENMDLNFLGSRPVQFPYVTPAPHEPVKTLRSLVNIRKDSLRLVRYKDDADSPTEDGDKPRVLYSLEFTFDADARVAITIYCQASEEFLNGRAVYSPKSPSLQSETVHYKRGVSQQFSLPSFKIDFSEWKDDELNFDLDRGVFPVVIQAVVDEGDVVEVTGHAHVLLAAFEKHMDGSFSVKPLKQKQIVDRVSYLLQEIYGIENKNNQETKPSDDENSDNSNECVVCLSDLRDTLILPCRHLCLCTSCADTLRYQANNCPICRLPFRALLQIRAVRKKPGALSPVSFSPVLAQSLEHDEHSNSDSVPPGYEPISLLEALNGLRAVSPAIPSAPLYEEITYSGISDGLSQASCPLAAIDHILDSSRQKGRPQSKAPDSTLRSPSSPIHEEDEEKLSEDVDAPPPLGGAELALRESSSPESFITEEVDESSSPQQGTRAASIENVLQDSSPEHCGRGPPADIYLPALGPDSCSVGIDE

SEQ ID NO: 29580 - protein, 395 aa, Homo sapiens
MNGPVDGLCDHSLSEGVFMFTSESVGEGHPDKICDQISDAVLDAHLKQDPNAKVACETVCKTGMVLLCGEITSMAMVDYQRVVRDTIKHIGYDDSAKGFDFKTCNVLVALEQQSPDIAQCVHLDRNEEDVGAGDQGLMFGYATDETEECMPLTIILAHKLNARMADLRRSGLLPWLRPDSKTQVTVQYMQDNGAVIPVRIHTIVISVQHNEDITLEEMRRALKEQVIRAVVPAKYLDEDTVYHLQPSGRFVIGGPQGDAGVTGRKIIVDTYGGWGAHGGGAFSGKDYTKVDRSAAYAARWVAKSLVKAGLCRRVLVQVSYAIGVAEPLSISIFTYGTSQKTERELLDVVHKNFDLRPGVIVRDLDLKKPIYQKTACYGHFGRSEFPWEVPRKLVF

SEQ ID NO: 29581 - protein, 383 aa, Homo sapiens
MGLGRVLLFLAVAFPFAPPAAAAEPHSLRYNLMVLSQDGSVQSGFLAEGHLDGQPFLRYDRQKRRAKPQGQWAENVLGAKTWDTETEDLTENGQDLRRTLTHIKDQKGGLHSLQEIRVCEIHEDSSTRGSRHFYYDGELFLSQNLETQESTVPQSSRAQTLAMNVTNFWKEDAMKTKTHYRAMQADCLQKLQRYLKSGVAIRRTVPPMVNVTCSEVSEGNITVTCRASSFYPRNITLTWRQDGVSLSHNTQQWGDVLPDGNGTYQTWVATRIRQGEEQRFTCYMEHSGNHGTHPVPSGKALVLQSQRTDFPYVSAAMPCFVIIIILCVPCCKKKTSAAEGPELVSLQVLDQHPVGTGDHRDAAQLGFQPLMSATGSTGSTEGT

SEQ ID NO: 29582 - protein, 340 aa, Homo sapiens
MGLGRVLLFLAVAFPFAPPAAAAEPHSLRYNLMVLSQDGSVQSGFLAEGHLDGQPFLRYDRQKRRAKPQGQWAENVLGAKTWDTETEDLTENGQDLRRTLTHIKDQKGVPQSSRAQTLAMNVTNFWKEDAMKTKTHYRAMQADCLQKLQRYLKSGVAIRRTVPPMVNVTCSEVSEGNITVTCRASSFYPRNITLTWRQDGVSLSHNTQQWGDVLPDGNGTYQTWVATRIRQGEEQRFTCYMEHSGNHGTHPVPSGKALVLQSQRTDFPYVSAAMPCFVIIIILCVPCCKKKTSAAEGPELVSLQVLDQHPVGTGDHRDAAQLGFQPLMSATGSTGSTEGT

SEQ ID NO: 29583 - protein, 41 aa, Homo sapiens
MGLGRVLLFLAVAFPFAPPAAAAVEMGFHRVSQDGLDLLTS

SEQ ID NO: 29584 - protein, 383 aa, Homo sapiens
MGLGPVFLLLAGIFPFAPPGAAAEPHSLRYNLTVLSWDGSVQSGFLTEVHLDGQPFLRCDRQKCRAKPQGQWAEDVLGNKTWDRETRDLTGNGKDLRMTLAHIKDQKEGLHSLQEIRVCEIHEDNSTRSSQHFYYDGELFLSQNLETKEWTMPQSSRAQTLAMNVRNFLKEDAMKTKTHYHAMHADCLQELRRYLKSGVVLRRTVPPMVNVTRSEASEGNITVTCRASGFYPWNITLSWRQDGVSLSHDTQQWGDVLPDGNGTYQTWVATRICQGEEQRFTCYMEHSGNHSTHPVPSGKVLVLQSHWQTFHVSAVAAAAIFVIIIFYVRCCKKKTSAAEGPELVSLQVLDQHPVGTSDHRDATQLGFQPLMSDLGSTGSTEGA

SEQ ID NO: 29585 - protein, 287 aa, Homo sapiens
MGLGPVFLLLAGIFPFAPPGAAAEPHSLRYNLTVLSWDGSVQSGFLTEVHLDGQPFLRCDRQKCRAKPQGQWAEDVLGNKTWDRETRDLTGNGKDLRMTLAHIKDQKEVPPMVNVTRSEASEGNITVTCRASGFYPWNITLSWRQDGVSLSHDTQQWGDVLPDGNGTYQTWVATRICQGEEQRFTCYMEHSGNHSTHPVPSGKVLVLQSHWQTFHVSAVAAAAIFVIIIFYVRCCKKKTSAAEGPELVSLQVLDQHPVGTSDHRDATQLGFQPLMSDLGSTGSTEGA

SEQ ID NO: 29586 - protein, 395 aa, Homo sapiens
MNGQLNGFHEAFIEEGTFLFTSESVGEGHPDKICDQISDAVLDAHLQQDPDAKVACETVAKTGMILLAGEITSRAAVDYQKVVREAVKHIGYDDSSKGFDYKTCNVLVALEQQSPDIAQGVHLDRNEEDIGAGDQGLMFGYATDETEECMPLTIVLAHKLNAKLAELRRNGTLPWLRPDSKTQVTVQYMQDRGAVLPIRVHTIVISVQHDEEVCLDEMRDALKEKVIKAVVPAKYLDEDTIYHLQPSGRFVIGGPQGDAGLTGRKIIVDTYGGWGAHGGGAFSGKDYTKVDRSAAYAARWVAKSLVKGGLCRRVLVQVSYAIGVSHPLSISIFHYGTSQKSERELLEIVKKNFDLRPGVIVRDLDLKKPIYQRTAAYGHFGRDSFPWEVPKKLKY

SEQ ID NO: 29587 - protein, 299 aa, Homo sapiens
MILLAGEITSRAAVDYQKVVREAVKHIGYDDSSKGFDYKTCNVLVALEQQSPDIAQGVHLDRNEEDIGAGDQGLMFGYATDETEECMPLTIVLAHKLNAKLAELRRNGTLPWLRPDSKTQVTVQYMQDRGAVLPIRVHTIVISVQHDEEVCLDEMRDALKEKVIKAVVPAKYLDEDTIYHLQPSGRFVIGGPQGDAGLTGRKIIVDTYGGWGAHGGGAFSGKDYTKVDRSAAYAARWVAKSLVKGGLCRRVLVQVSYAIGVSHPLSISIFHYGTSQKSERELLEIVKKNFDLRPGVIVR

SEQ ID NO: 29588 - protein, 476 aa, Homo sapiens
MFRLNSLSALAELAVGSRWYHGGSQPIQIRRRLMMVAFLGASAVTASTGLLWKRAHAESPPCVDNLKSDIGDKGKNKDEGDVCNHEKKTADLAPHPEEKKKKRSGFRDRKVMEYENRIRAYSTPDKIFRYFATLKVISEPGEAEVFMTPEDFVRSITPNEKQPEHLGLDQYIIKRFDGKKISQEREKFADEGSIFYTLGECGLISFSDYIFLTTVLSTPQRNFEIAFKMFDLNGDGEVDMEEFEQVQSIIRSQTSMGMRHRDRPTTGNTLKSGLCSALTTYFFGADLKGKLTIKNFLEFQRKLQHDVLKLEFERHDPVDGRITERQFGGMLLAYSGVQSKKLTAMQRQLKKHFKEGKGLTFQEVENFFTFLKNINDVDTALSFYHMAGASLDKVTMQQVARTVAKVELSDHVCDVVFALFDCDGNGELSNKEFVSIMKQRLMRGLEKPKDMGFTRLMQAMWKCAQETAWDFALPKQ

SEQ ID NO: 29589 - protein, 403 aa, Homo sapiens
MFRLNSLSALAELAVGSRWYHGGSQPIQIRRRLMMVAFLGASAVTASTGLLWKRAHAESPPCVDNLKSDIGDKGKNKDEGDVCNHEKKTADLAPHPEEKKKKRSGFRDRKVMEYENRIRAYSTPDKIFRYFATLKVISEPGEAEVFMTPEDFVRSITPNEKQPEHLGLDQYIIKRFDGKKISQEREKFADEGSIFYTLGECGLISFSDYIFLTTVLSTPQRNFEIAFKMFDLNGDGEVDMEEFEQVQSIIRSQTSMGMRHRDRPTTGNTLKSGLCSALTTYFFGADLKGKLTIKNFLEFQRKLQHDVLKLEFERHDPVDGRITERQFGGMLLAYSGVQSKKLTAMQRQLKKHFKEGKGLTFQEVENFFTFLKNINDVDTALSFYHMAGASLDKGKGTIFMGRR

SEQ ID NO: 29590 - protein, 478 aa, Homo sapiens
MFRLNSLSALAELAVGSRWYHGGSQPIQIRRRLMMVAFLGASAVTASTGLLWKRAHAESPPCVDNLKSDIGDKGKNKDEGDVCNHEKKTADLAPHPEEKKKKRSGFRDRKVMEYENRIRAYSTPDKIFRYFATLKVISEPGEAEVFMTPEDFVRSITPNEKQPEHLGLDQYIIKRFDGKTEKISQEREKFADEGSIFYTLGECGLISFSDYIFLTTVLSTPQRNFEIAFKMFDLNGDGEVDMEEFEQVQSIIRSQTSMGMRHRDRPTTGNTLKSGLCSALTTYFFGADLKGKLTIKNFLEFQRKLQHDVLKLEFERHDPVDGRITERQFGGMLLAYSGVQSKKLTAMQRQLKKHFKEGKGLTFQEVENFFTFLKNINDVDTALSFYHMAGASLDKVTMQQVARTVAKVELSDHVCDVVFALFDCDGNGELSNKEFVSIMKQRLMRGLEKPKDMGFTRLMQAMWKCAQETAWDFALPKQ

SEQ ID NO: 29591 - protein, 278 aa, Homo sapiens
MKRIYTYRRAKEIFKDTPKAPQRNFEIAFKMFDLNGDGEVDMEEFEQVQSIIRSQTSMGMRHRDRPTTGNTLKSGLCSALTTYFFGADLKGKLTIKNFLEFQRKLQHDVLKLEFERHDPVDGRITERQFGGMLLAYSGVQSKKLTAMQRQLKKHFKEGKGLTFQEVENFFTFLKNINDVDTALSFYHMAGASLDKVTMQQVARTVAKVELSDHVCDVVFALFDCDGNGELSNKEFVSIMKQRLMRGLEKPKDMGFTRLMQAMWKCAQETAWDFALPKQ

SEQ ID NO: 29592 - protein, 278 aa, Homo sapiens
MVSLKAKLNHLRQSMLKQKAPQRNFEIAFKMFDLNGDGEVDMEEFEQVQSIIRSQTSMGMRHRDRPTTGNTLKSGLCSALTTYFFGADLKGKLTIKNFLEFQRKLQHDVLKLEFERHDPVDGRITERQFGGMLLAYSGVQSKKLTAMQRQLKKHFKEGKGLTFQEVENFFTFLKNINDVDTALSFYHMAGASLDKVTMQQVARTVAKVELSDHVCDVVFALFDCDGNGELSNKEFVSIMKQRLMRGLEKPKDMGFTRLMQAMWKCAQETAWDFALPKQ

SEQ ID NO: 29593 - protein, 468 aa, Homo sapiens
MEPQPGGARSCRRGAPGGACELGPAAEAAPMSLAIHSTTGTRYDLAVPPDETVEGLRKRLSQRLKVPKERLALLHKDTRLSSGKLQEFGVGDGSKLTLVPTVEAGLMSQASRPEQSVMQALESLTETQVSDFLSGRSPLTLALRVGDHMMFVQLQLAAQHAPLQHRHVLAAAAAAAAARGDPSIASPVSSPCRPVSSAARVPPVPTSPSPASPSPITAGSFRSHAASTTCPEQMDCSPTASSSASPGASTTSTPGASPAPRSRKPGAVIESFVNHAPGVFSGTFSGTLHPNCQDSSGRPRRDIGTILQILNDLLSATRHYQGMPPSLAQLRCHAQCSPASPAPDLAPRTTSCEKLTAAPSASLLQGQSQIRMCKPPGDRLRQTENRATRCKVERLQLLLQQKRLRRKARRDARGPYHWSPSRKAGRSDSSSSGGGGSPSEASGLGLDFEDSVWKPEVNPDIKSEFVVA

SEQ ID NO: 29594 - protein, 115 aa, Homo sapiens
MPMFIVNTNVPRASVPDGFLSELTQQLAQATGKPPQYIAVHVVPDQLMAFGGSSEPCALCSLHSIGKIGGAQNRSYSKLLCGLLAERLRISPDRVYINYYDMNAANVGWNNSTFA

SEQ ID NO: 29595 - protein, 374 aa, Homo sapiens
MRTKQVNLLITLVAVALFSFSCFSIYRITQTNNQLINCRNHILEFKENMLHLRNKTEKNTQEMMKVLNRMKYEITKREILSGNLVAQKADILNKNETVSNTFEDLKFFFPHLRKEGRIYPDVIIGKGKTGVSFALGISTVNRGNYSYLKQTLTSVVSRMTLSQEKDSVVIVLVADSNEDYLHSVVKMITKKFKRQVRSGSLEVISIPAFLYSSMLNAKHLAEASQKLASWRIKQVLDFCILLLYAQPKAKYYLQLEDDIIAKEMYFTKITDFVGNISSNNWFFIEFSMLGFIGKLFRSEDLTHFVRFFLMFYKEKPIDWLLNDIFQVKVCDAGEDLRNCMKRKKQIRIQYKPSLFQHVGIHSSFPRKEQYEKKI

SEQ ID NO: 29596 - protein, 293 aa, Homo sapiens
MATFSGPAGPILSLNPQEDVEFQKEVAQVRKRITQRKKQEQLTPGVVYVRHLPNLLDETQIFSYFSQFGTVTRFRLSRSKRTGNSKGYAFVEFESEDVAKIVAETMNNYLFGERLLECHFMPPEKVHKELFKDWNIPFKQPSYPSVKRYNRNRTLTQKLRMEERFKKKERLLRKKLAKKGIDYDFPSLILQKTESISKTNRQTSTKGQVLRKKKKKVSGTLDTPEKTVDSQGPTPVCTPTFLERRKSQVAELNDDDKDDEIVFKQPISCVKEEIQETQTPTHSRKKRRRSSNQ

SEQ ID NO: 29597 - protein, 478 aa, Homo sapiens
MFKFHQMKHIFEILDKMRCLRKRSTVSFLGVLVIFLLFMNLYIEDSYVLEGDKQLIRETSTHQLNSERYVHTFKDLSNFSGAINVTYRYLAATPLQRKRYLTIGLSSVKRKKGNYLLETIKSIFEQSSYEELKEISVVVHLADFNSSWRDAMVQDITQKFAHHIIAGRLMVIHAPEEYYPILDGLKRNYNDPEDRVKFRSKQNVDYAFLLNFCANTSDYYVMLEDDVRCSKNFLTAIKKVIASLEGTYWVTLEFSKLGYIGKLYHSHDLPRLAHFLLMFYQEMPCDWLLTHFRGLLAQKNVIRFKPSLFQHMGYYSSYKGTENKLKDDDFEEESFDIPDNPPASLYTNMNVFENYEASKAYSSVDEYFWGKPPSTGDVFVIVFENPIIIKKIKVNTGTEDRQNDILHHGALDVGENVMPSKQRRQCSTYLRLGEFKNGNFEMSGVNQKIPFDIHCMRIYVTKTQKEWLIIRSISIWTS

SEQ ID NO: 29598 - protein, 507 aa, Homo sapiens
MLGKDMVRFVVRKTVQRSVAKGSRRCKKRMFKFHQMKHIFEILDKMRCLRKRSTVSFLGVLVIFLLFMNLYIEDSYVLEGDKQLIRETSTHQLNSERYVHTFKDLSNFSGAINVTYRYLAATPLQRKRYLTIGLSSVKRKKGNYLLETIKSIFEQSSYEELKEISVVVHLADFNSSWRDAMVQDITQKFAHHIIAGRLMVIHAPEEYYPILDGLKRNYNDPEDRVKFRSKQNVDYAFLLNFCANTSDYYVMLEDDVRCSKNFLTAIKKVIASLEGTYWVTLEFSKLGYIGKLYHSHDLPRLAHFLLMFYQEMPCDWLLTHFRGLLAQKNVIRFKPSLFQHMGYYSSYKGTENKLKDDDFEEESFDIPDNPPASLYTNMNVFENYEASKAYSSVDEYFWGKPPSTGDVFVIVFENPIIIKKIKVNTGTEDRQNDILHHGALDVGENVMPSKQRRQCSTYLRLGEFKNGNFEMSGVNQKIPFDIHCMRIYVTKTQKEWLIIRSISIWTS

SEQ ID NO: 29599 - protein, 388 aa, Homo sapiens
MVEAEELAQLRLLNLELLRQLWVGQDAVRRSVARAASESSLESSSSYNSETPSTPETSSTSLSTSCPRGRSSVWGPPDACRGDLRDVARSGVASLPPAKCQHQESLGRPRPHSAPSLGTSSLRDPEPSGRLGDPGPQEAQTPRSILAQQSKLSKPRVTFSEESAVPKRSWRLRPYLGYDWIAGSLDTSSSITSQPEAFFSKLQEFRETNKEECICSHPEPQLPGLRESSGSGVEEDHECVYCYRVNRRLFPVPVDPGTPCRLCRTPRDQQGPGTLAQPAHVRVSIPLSILEPPHRYHIHRRKSFDASDTLALPRHCLLGWDIFPPKSEKSSAPRNLDLWSSVSAEAQHQKLSGTSSPFHPASPMQMLPPTPTWSVPQVPRPHVPRQKP

SEQ ID NO: 29600 - protein, 359 aa, Homo sapiens
MVEAEELAQLRLLNLELLRQLWVGQDAVRRSVARAASESSLESSSSYNSETPSTPETSSTSLSTSCPRGRSSVWGPPDACRGDLRDVARSGVASLPPAKCQHQESLGRPRPHSAPSLGTSSLRDPEPSGRLGDPGPQEAQTPRSILAQQSKLSKPRVTFSEESAVPKRSWRLRPYLGYDWIAGSLDTSSSITSQPEAFFSKLQEFRETNKEECICSHPEPQLPGLRESSGSGVEEDHECVYCYRVNRRLFPVPVDPGTPCRLCRTPRDQQGPGTLAQPAHVSTACWAGTFFLRSLRKAQPPGTWTSGPLYPLRPSTRSCPAPAQALFTRPHQCRCCPRPRPGQCPRSLGPTSHGRSPED

SEQ ID NO: 29601 - protein, 164 aa, Homo sapiens
MKCKPNQTRTYDPEGFKKRAACLCFRSEREDEVLLVSSSRYPDRWIVPGGGMEPEEEPGGAAVREVYEEAGVKGKLGRLLGVFEQNQDRKHRTYVYVLTVTELLEDWEDSVSIGRKREWFKVEDAIKVLQCHKPVHAEYLEKLKLGGSPTNGNSMAPSSPDSDP

SEQ ID NO: 29602 - protein, 447 aa, Homo sapiens
MSLWLGAPVPDIPPDSAVELWKPGAQDASSQAQGGSSCILREEARMPHSAGGTAGVGLEAAEPTALLTRAEPPSEPTEIRPQKRKKGPAPKMLGNELCSVCGDKASGFHYNVLSCEGCKGFFRRSVIKGAHYICHSGGHCPMDTYMRRKCQECRLRKCRQAGMREECVLSEEQIRLKKLKRQEEEQAHATSLPPRASSPPQILPQLSPEQLGMIEKLVAAQQQCNRRSFSDRLRVTPWPMAPDPHSREARQQRFAHFTELAIVSVQEIVDFAKQLPGFLQLSREDQIALLKTSAIEVMLLETSRRYNPGSESITFLKDFSYNREDFAKAGLQVEFINPIFEFSRAMNELQLNDAEFALLIAISIFSADRPNVQDQLQVERLQHTYVEALHAYVSIHHPHDRLMFPRMLMKLVSLRTLSSVHSEQVFALRLQDKKLPPLLSEIWDVHE

SEQ ID NO: 29603 - protein, 387 aa, Homo sapiens
MSLWLGAPVPDIPPDSAVELWKPGAQDASSQAQGGSSCILREEARMPHSAGGTAGVGLEAAEPTALLTRAEPPSEPTEIRPQKRKKGPAPKMLGNELCSVCGDKASGFHYNVLSCEGCKGFFRRSVIKGAHYICHSGGHCPMDTYMRRKCQECRLRKCRQAGMREECVLSEEQIRLKKLKRQEEEQAHATSLPPRASSPPQILPQLSPEQLGMIEKLVAAQQQCNRRSFSDRLRVTVMLLETSRRYNPGSESITFLKDFSYNREDFAKAGLQVEFINPIFEFSRAMNELQLNDAEFALLIAISIFSADRPNVQDQLQVERLQHTYVEALHAYVSIHHPHDRLMFPRMLMKLVSLRTLSSVHSEQVFALRLQDKKLPPLLSEIWDVHE

SEQ ID NO: 29604 - protein, 402 aa, Homo sapiens
MPHSAGGTAGVGLEAAEPTALLTRAEPPSEPTEIRPQKRKKGPAPKMLGNELCSVCGDKASGFHYNVLSCEGCKGFFRRSVIKGAHYICHSGGHCPMDTYMRRKCQECRLRKCRQAGMREECVLSEEQIRLKKLKRQEEEQAHATSLPPRASSPPQILPQLSPEQLGMIEKLVAAQQQCNRRSFSDRLRVTPWPMAPDPHSREARQQRFAHFTELAIVSVQEIVDFAKQLPGFLQLSREDQIALLKTSAIEVMLLETSRRYNPGSESITFLKDFSYNREDFAKAGLQVEFINPIFEFSRAMNELQLNDAEFALLIAISIFSADRPNVQDQLQVERLQHTYVEALHAYVSIHHPHDRLMFPRMLMKLVSLRTLSSVHSEQVFALRLQDKKLPPLLSEIWDVHE

SEQ ID NO: 29605 - protein, 190 aa, Homo sapiens
MARHVFLTGPPGVGKTTLIHKASEVLKSSGVPVDGFYTEEVRQGGRRIGFDVVTLSGTRGPLSRVGLEPPPGKRECRVGQYVVDLTSFEQLALPVLRNADCSSGPGQRVCVIDEIGKMELFSQLFIQAVRQTLSTPGTIILGTIPVPKGKPLALVEEIRNRKDVKVFNVTKENRNHLLPDIVTCVQSSRK

SEQ ID NO: 29606 - protein, 462 aa, Homo sapiens
MSSVKRSLKQEIVTQFHCSAAEGDIAKLTGILSHSPSLLNETSENGWTALMYAARNGHPEIVQFLLEKGCDRSIVNKSRQTALDIAVFWGYKHIANLLATAKGGKKPWFLTNEVEECENYFSKTLLDRKSEKRNNSDWLLAKESHPATVFILFSDLNPLVTLGGNKESFQQPEVRLCQLNYTDIKDYLAQPEKITLIFLGVELEIKDKLLNYAGEVPREEEDGLVAWFALGIDPIAAEEFKQRHENCYFLHPPMPALLQLKEKEAGVVAQARSVLAWHSRYKFCPTCGNATKIEEGGYKRLCLKEDCPSLNGVHNTSYPRVDPVVIMQVIHPDGTKCLLGRQKRFPPGMFTCLAGFIEPGETIEDAVRREVEEESGVKVGHVQYVACQPWPMPSSLMIGCLALAVSTEIKVDKNEIEDARWFTREQVLDVLTKGKQQAFFVPPSRAIAHQLIKHWIRINPNL

SEQ ID NO: 29607 - protein, 444 aa, Homo sapiens
MSSVKRSLKQEIVTQFHCSAAEGDIAKLTGILSHSPSLLNETSENGWTALMCDRSIVNKSRQTALDIAVFWGYKHIANLLATAKGGKKPWFLTNEVEECENYFSKTLLDRKSEKRNNSDWLLAKESHPATVFILFSDLNPLVTLGGNKESFQQPEVRLCQLNYTDIKDYLAQPEKITLIFLGVELEIKDKLLNYAGEVPREEEDGLVAWFALGIDPIAAEEFKQRHENCYFLHPPMPALLQLKEKEAGVVAQARSVLAWHSRYKFCPTCGNATKIEEGGYKRLCLKEDCPSLNGVHNTSYPRVDPVVIMQVIHPDGTKCLLGRQKRFPPGMFTCLAGFIEPGETIEDAVRREVEEESGVKVGHVQYVACQPWPMPSSLMIGCLALAVSTEIKVDKNEIEDARWFTREQVLDVLTKGKQQAFFVPPSRAIAHQLIKHWIRINPNL

SEQ ID NO: 29608 - protein, 172 aa, Homo sapiens
MMKLKSNQTRTYDGDGYKKRAACLCFRSESEEEVLLVSSSRHPDRWIVPGGGMEPEEEPSVAAVREVCEEAGVKGTLGRLVGIFENQERKHRTYVYVLIVTEVLEDWEDSVNIGRKREWFKIEDAIKVLQYHKPVQASYFETLRQGYSANNGTPVVATTYSVSAQSSMSGIR

SEQ ID NO: 29609 - protein, 260 aa, Homo sapiens
MPQNEYIELHRKRYGYRLDYHEKKRKKESREAHERSKKAKKMIGLKAKLYHKQRHAEKIQMKKTIKMHEKRNTKQKNDEKTPQGAVPAYLLDREGQSRAKVLSNMIKQKRKEKAGKWEVPLPKVRAQGETEVLKVIRTGKRKKKAWKRMVTKVCFVGDGFTRKPPKYERFIRPMGLRFKKAHVTHPELKATFCLPILGVKKNPSSPLYTTLGVITKGTVIEVNVSELGLVTQGGKVIWGKYAQVTNNPENDGCINAVLLV

SEQ ID NO: 29610 - protein, 486 aa, Homo sapiens
MVMQFQGLENPIQISPHCSCTPSGFFMEMMSMKPAKGVLTEQVAGPLGQNLEVEPYSQYSNVQFPQVQPQISSSSYYSNLGFYPQQPEEWYSPGIYELRRMPAETLYQGETEVAEMPVTKKPRMGASAGRIKGDELCVVCGDRASGYHYNALTCEGCKGFFRRSITKNAVYKCKNGGNCVMDMYMRRKCQECRLRKCKEMGMLAECMYTGLLTEIQCKSKRLRKNVKQHADQTVNEDSEGRDLRQVTSTTKSCREKTELTPDQQTLLHFIMDSYNKQRMPQEITNKILKEEFSAEENFLILTEMATNHVQVLVEFTKKLPGFQTLDHEDQIALLKGSAVEAMFLRSAEIFNKKLPSGHSDLLEERIRNSGISDEYITPMFSFYKSIGELKMTQEEYALLTAIVILSPDRQYIKDREAVEKLQEPLLDVLQKLCKIHQPENPQHFACLLGRLTELRTFNHHHAEMLMSWRVNDHKFTPLLCEIWDVQ

SEQ ID NO: 29611 - protein, 482 aa, Homo sapiens
MVMQFQGLENPIQISPHCSCTPSGFFMEMMSMKPAKGVLTEQVAGPLGQNLEVEPYSQYSNVQFPQVQPQISSSSYYSNLGFYPQQPEEWYSPGIYELRRMPAETLYQGETEVAEMPVTKKPRMGASAGRIKGDELCVVCGDRASGYHYNALTCEGCKGFFRRSITKNAVYKCKNGGNCVMDMYMRRKCQECRLRKCKEMGMLAECLLTEIQCKSKRLRKNVKQHADQTVNEDSEGRDLRQVTSTTKSCREKTELTPDQQTLLHFIMDSYNKQRMPQEITNKILKEEFSAEENFLILTEMATNHVQVLVEFTKKLPGFQTLDHEDQIALLKGSAVEAMFLRSAEIFNKKLPSGHSDLLEERIRNSGISDEYITPMFSFYKSIGELKMTQEEYALLTAIVILSPDRQYIKDREAVEKLQEPLLDVLQKLCKIHQPENPQHFACLLGRLTELRTFNHHHAEMLMSWRVNDHKFTPLLCEIWDVQ

SEQ ID NO: 29612 - protein, 476 aa, Homo sapiens
MGSKMNLIEHSHLPTTDEFSFSENLFGVLTEQVAGPLGQNLEVEPYSQYSNVQFPQVQPQISSSSYYSNLGFYPQQPEEWYSPGIYELRRMPAETLYQGETEVAEMPVTKKPRMGASAGRIKGDELCVVCGDRASGYHYNALTCEGCKGFFRRSITKNAVYKCKNGGNCVMDMYMRRKCQECRLRKCKEMGMLAECMYTGLLTEIQCKSKRLRKNVKQHADQTVNEDSEGRDLRQVTSTTKSCREKTELTPDQQTLLHFIMDSYNKQRMPQEITNKILKEEFSAEENFLILTEMATNHVQVLVEFTKKLPGFQTLDHEDQIALLKGSAVEAMFLRSAEIFNKKLPSGHSDLLEERIRNSGISDEYITPMFSFYKSIGELKMTQEEYALLTAIVILSPDRQYIKDREAVEKLQEPLLDVLQKLCKIHQPENPQHFACLLGRLTELRTFNHHHAEMLMSWRVNDHKFTPLLCEIWDVQ

SEQ ID NO: 29613 - protein, 472 aa, Homo sapiens
MGSKMNLIEHSHLPTTDEFSFSENLFGVLTEQVAGPLGQNLEVEPYSQYSNVQFPQVQPQISSSSYYSNLGFYPQQPEEWYSPGIYELRRMPAETLYQGETEVAEMPVTKKPRMGASAGRIKGDELCVVCGDRASGYHYNALTCEGCKGFFRRSITKNAVYKCKNGGNCVMDMYMRRKCQECRLRKCKEMGMLAECLLTEIQCKSKRLRKNVKQHADQTVNEDSEGRDLRQVTSTTKSCREKTELTPDQQTLLHFIMDSYNKQRMPQEITNKILKEEFSAEENFLILTEMATNHVQVLVEFTKKLPGFQTLDHEDQIALLKGSAVEAMFLRSAEIFNKKLPSGHSDLLEERIRNSGISDEYITPMFSFYKSIGELKMTQEEYALLTAIVILSPDRQYIKDREAVEKLQEPLLDVLQKLCKIHQPENPQHFACLLGRLTELRTFNHHHAEMLMSWRVNDHKFTPLLCEIWDVQ

SEQ ID NO: 29614 - protein, 425 aa, Homo sapiens
MGSKMNLIEHSHLPTTDEFSFSENLFGVLTEQVAGPLGQNLEVEPYSQYSNVQFPQVQPQISSSSYYSNLGFYPQQPEEWYSPGIYELRRMPAETLYQGETEVAEMPVTKKPRMGASAGRIKGDELCVVCGDRASGYHYNALTCEGCKGLLTEIQCKSKRLRKNVKQHADQTVNEDSEGRDLRQVTSTTKSCREKTELTPDQQTLLHFIMDSYNKQRMPQEITNKILKEEFSAEENFLILTEMATNHVQVLVEFTKKLPGFQTLDHEDQIALLKGSAVEAMFLRSAEIFNKKLPSGHSDLLEERIRNSGISDEYITPMFSFYKSIGELKMTQEEYALLTAIVILSPDRQYIKDREAVEKLQEPLLDVLQKLCKIHQPENPQHFACLLGRLTELRTFNHHHAEMLMSWRVNDHKFTPLLCEIWDVQ

SEQ ID NO: 29615 - protein, 352 aa, Homo sapiens
MSLYCGIACRRKFFWCYRLLSTYVTKTRYLFELKEDDDACKKAQQTGAFYLFHSLAPLLQTSAHQYLAPRHSLLELERLLGKFGQDAQRIEDSVLIGCSEQQEAWFALDLGLDSSFSISASLHKPEMETELKGSFIELRKALFQLNARDASLLSTAQALLRWHDAHQFCSRSGQPTKKNVAGSKRVCPSNNIIYYPQMAPVAITLVSDGTRCLLARQSSFPKGMYSALAGFCDIGESVEETIRREVAEEVGLEVESLQYYASQHWPFPSGSLMIACHATVKPGQTEIQVNLRELETAAWFSHDEVATALKRKGPYTQQQNGTFPFWLPPKLAISHQLIKEWVEKQTCSSLPA

SEQ ID NO: 29616 - protein, 263 aa, Homo sapiens
MSLYCGIACRRKFFWCYRLLSTYVTKTRYLFELKEDDDACKKAQQTGAFYLFHSLAPLLQTSAHQYLAPRHSLLELERLLGKFGQDAQRIEDSVLIGCSEQQEAWFALDLGLDSSFSISASLHKPEMETELKGSFIELRKALFQLNARDASLLSTAQALLRWHDAHQFCSRSGQPTKKNVAGSKRVCPSNNIIYYPQIQVNLRELETAAWFSHDEVATALKRKGPYTQQQNGTFPFWLPPKLAISHQLIKEWVEKQTCSSLPA

SEQ ID NO: 29617 - protein, 226 aa, Homo sapiens
METELKGSFIELRKALFQLNARDASLLSTAQALLRWHDAHQFCSRSGQPTKKNVAGSKRVCPSNNIIYYPQMAPVAITLVSDGTRCLLARQSSFPKGMYSALAGFCDIGESVEETIRREVAEEVGLEVESLQYYASQHWPFPSGSLMIACHATVKPGQTEIQVNLRELETAAWFSHDEVATALKRKGPYTQQQNGTFPFWLPPKLAISHQLIKEWVEKQTCSSLPA

SEQ ID NO: 29618 - protein, 235 aa, Homo sapiens
MSLYCGIACRRKFFWCYRLLSTYVTKTRYLFELKEDDDACKKAQQTGAFYLFHSLAPLLQTSAHQYLAPRHSLLELERLLGKFGQDAQRIEDSVLIGCSEQQEAWFALDLGLDSSFSISASLHKPEMETELKGSFIELRKALFQLNARDASLLSTAQALLRWHDAHQFCSRSGQPTKKNVAGSKRVCPSNNIIYYPQVKVWKRPSAEKLQKRWDWRWKACSTMHPSIGPSLVAHS

SEQ ID NO: 29619 - protein, 180 aa, Homo sapiens
MMKFKPNQTRTYDREGFKKRAACLCFRSEQEDEVLLVSSSRYPDQWIVPGGGMEPEEEPGGAAVREVYEEAGVKGKLGRLLGIFENQDRKHRTYVYVLTVTEILEDWEDSVNIGRKREWFKVEDAIKVLQCHKPVHAEYLEKLKLGCSPANGNSTVPSLPDNNALFVTAAQTSGLPSSVR

SEQ ID NO: 29620 - protein, 181 aa, Homo sapiens
MMKFKPNQTRTYDREGFKKRAACLCFRSEQEDEVLLVSSSRYPDQWIVPGGGMEPEEEPGGAAVREVYEEAGVKGKLGRLLGIFEQNQDRKHRTYVYVLTVTEILEDWEDSVNIGRKREWFKVEDAIKVLQCHKPVHAEYLEKLKLGCSPANGNSTVPSLPDNNALFVTAAQTSGLPSSVR

SEQ ID NO: 29621 - protein, 129 aa, Homo sapiens
MEPEEEPGGAAVREVYEEAGVKGKLGRLLGIFEQNQDRKHRTYVYVLTVTEILEDWEDSVNIGRKREWFKVEDAIKVLQCHKPVHAEYLEKLKLGCSPANGNSTVPSLPDNNALFVTAAQTSGLPSSVR

SEQ ID NO: 29622 - protein, 222 aa, Homo sapiens
MERIEGASVGRCAASPYLRPLTLHYRQNGAQKSWDFMKTHDSVTVLLFNSSRRSLVLVKQFRPAVYAGEVERRFPGSLAAVDQDGPRELQPALPGSAGVTVELCAGLVDQPGLSLEEVACKEAWEECGYHLAPSDLRRVATYWSGVGLTGSRQTMFYTEVTDAQRSGPGGGLVEEGELIEVVHLPLEGAQAFADDPDIPKTLGVIFGVSWFLSQVAPNLDLQ

SEQ ID NO: 29623 - protein, 434 aa, Homo sapiens
MEVRPKESWNHADFVHCEDTESVPGKPSVNADEEVGGPQICRVCGDKATGYHFNVMTCEGCKGFFRRAMKRNARLRCPFRKGACEITRKTRRQCQACRLRKCLESGMKKEMIMSDEAVEERRALIKRKKSERTGTQPLGVQGLTEEQRMMIRELMDAQMKTFDTTFSHFKNFRLPGVLSSGCELPESLQAPSREEAAKWSQVRKDLCSLKVSLQLRGEDGSVWNYKPPADSGGKEIFSLLPHMADMSTYMFKGIISFAKVISYFRDLPIEDQISLLKGAAFELCQLRFNTVFNAETGTWECGRLSYCLEDTAGGFQQLLLEPMLKFHYMLKKLQLHEEEYVLMQAISLFSPDRPGVLQHRVVDQLQEQFAITLKSYIECNRPQPAHRFLFLKIMAMLTELRSINAQHTQRLLRIQDIHPFATPLMQELFGITGS

SEQ ID NO: 29624 - protein, 379 aa, Homo sapiens
MTCEGCKGFFRRAMKRNARLRCPFRKGACEITRKTRRQCQACRLRKCLESGMKKEMIMSDEAVEERRALIKRKKSERTGTQPLGVQGLTEEQRMMIRELMDAQMKTFDTTFSHFKNFRLPGVLSSGCELPESLQAPSREEAAKWSQVRKDLCSLKVSLQLRGEDGSVWNYKPPADSGGKEIFSLLPHMADMSTYMFKGIISFAKVISYFRDLPIEDQISLLKGAAFELCQLRFNTVFNAETGTWECGRLSYCLEDTAGGFQQLLLEPMLKFHYMLKKLQLHEEEYVLMQAISLFSPDRPGVLQHRVVDQLQEQFAITLKSYIECNRPQPAHRFLFLKIMAMLTELRSINAQHTQRLLRIQDIHPFATPLMQELFGITGS

SEQ ID NO: 29625 - protein, 457 aa, Homo sapiens
MDPRGEVGAKNLPPNSPRGPEANLEVRPKESWNHADFVHCEDTESVPGKPSVNADEEVGGPQICRVCGDKATGYHFNVMTCEGCKGFFRRAMKRNARLRCPFRKGACEITRKTRRQCQACRLRKCLESGMKKEMIMSDEAVEERRALIKRKKSERTGTQPLGVQGLTEEQRMMIRELMDAQMKTFDTTFSHFKNFRLPGVLSSGCELPESLQAPSREEAAKWSQVRKDLCSLKVSLQLRGEDGSVWNYKPPADSGGKEIFSLLPHMADMSTYMFKGIISFAKVISYFRDLPIEDQISLLKGAAFELCQLRFNTVFNAETGTWECGRLSYCLEDTAGGFQQLLLEPMLKFHYMLKKLQLHEEEYVLMQAISLFSPDRPGVLQHRVVDQLQEQFAITLKSYIECNRPQPAHRFLFLKIMAMLTELRSINAQHTQRLLRIQDIHPFATPLMQELFGITGS

SEQ ID NO: 29626 - protein, 397 aa, Homo sapiens
MEVRPKESWNHADFVHCEDTESVPGKPSVNADEEVGGPQICRVCGDKATGYHFNVMTCEGCKGFFRRAMKRNARLRCPFRKGACEITRKTRRQCQACRLRKCLESGMKKEMIMSDEAVEERRALIKRKKSERTGTQPLGVQGLTEEQRMMIRELMDAQMKTFDTTFSHFKNFRVSLQLRGEDGSVWNYKPPADSGGKEIFSLLPHMADMSTYMFKGIISFAKVISYFRDLPIEDQISLLKGAAFELCQLRFNTVFNAETGTWECGRLSYCLEDTAGGFQQLLLEPMLKFHYMLKKLQLHEEEYVLMQAISLFSPDRPGVLQHRVVDQLQEQFAITLKSYIECNRPQPAHRFLFLKIMAMLTELRSINAQHTQRLLRIQDIHPFATPLMQELFGITGS

SEQ ID NO: 29627 - protein, 342 aa, Homo sapiens
MTCEGCKGFFRRAMKRNARLRCPFRKGACEITRKTRRQCQACRLRKCLESGMKKEMIMSDEAVEERRALIKRKKSERTGTQPLGVQGLTEEQRMMIRELMDAQMKTFDTTFSHFKNFRVSLQLRGEDGSVWNYKPPADSGGKEIFSLLPHMADMSTYMFKGIISFAKVISYFRDLPIEDQISLLKGAAFELCQLRFNTVFNAETGTWECGRLSYCLEDTAGGFQQLLLEPMLKFHYMLKKLQLHEEEYVLMQAISLFSPDRPGVLQHRVVDQLQEQFAITLKSYIECNRPQPAHRFLFLKIMAMLTELRSINAQHTQRLLRIQDIHPFATPLMQELFGITGS

SEQ ID NO: 29628 - protein, 420 aa, Homo sapiens
MDPRGEVGAKNLPPNSPRGPEANLEVRPKESWNHADFVHCEDTESVPGKPSVNADEEVGGPQICRVCGDKATGYHFNVMTCEGCKGFFRRAMKRNARLRCPFRKGACEITRKTRRQCQACRLRKCLESGMKKEMIMSDEAVEERRALIKRKKSERTGTQPLGVQGLTEEQRMMIRELMDAQMKTFDTTFSHFKNFRVSLQLRGEDGSVWNYKPPADSGGKEIFSLLPHMADMSTYMFKGIISFAKVISYFRDLPIEDQISLLKGAAFELCQLRFNTVFNAETGTWECGRLSYCLEDTAGGFQQLLLEPMLKFHYMLKKLQLHEEEYVLMQAISLFSPDRPGVLQHRVVDQLQEQFAITLKSYIECNRPQPAHRFLFLKIMAMLTELRSINAQHTQRLLRIQDIHPFATPLMQELFGITGS

SEQ ID NO: 29629 - protein, 473 aa, Homo sapiens
MTVTRTHHFKEGSLRAPAIPLHSAAAELASNHPRGPEANLEVRPKESWNHADFVHCEDTESVPGKPSVNADEEVGGPQICRVCGDKATGYHFNVMTCEGCKGFFRRAMKRNARLRCPFRKGACEITRKTRRQCQACRLRKCLESGMKKEMIMSDEAVEERRALIKRKKSERTGTQPLGVQGLTEEQRMMIRELMDAQMKTFDTTFSHFKNFRLPGVLSSGCELPESLQAPSREEAAKWSQVRKDLCSLKVSLQLRGEDGSVWNYKPPADSGGKEIFSLLPHMADMSTYMFKGIISFAKVISYFRDLPIEDQISLLKGAAFELCQLRFNTVFNAETGTWECGRLSYCLEDTAGGFQQLLLEPMLKFHYMLKKLQLHEEEYVLMQAISLFSPDRPGVLQHRVVDQLQEQFAITLKSYIECNRPQPAHRFLFLKIMAMLTELRSINAQHTQRLLRIQDIHPFATPLMQELFGITGS

SEQ ID NO: 29630 - protein, 219 aa, Homo sapiens
MESQEPTESSQNGKQYIISEELISEGKWVKLEKTTYMDPTGKTRTWESVKRTTRKEQTADGVAVIPVLQRTLHYECIVLVKQFRPPMGGYCIEFPAGLIDDGETPEAAALRELEEETGYKGDIAECSPAVCMDPGLSNCTIHIVTVTINGDDAENARPKPKPGDGEFVEVISLPKNDLLQRLDALVAEEHLTVDARVYSYALALKHANAKPFEVPFLKF

SEQ ID NO: 29631 - protein, 164 aa, Homo sapiens [sequence omitted]

SEQ ID NO: 29632 - protein, 134 aa, Homo sapiens
MQTLATGHLAHEGSSPHKLSGGRTQESSGFSEAKGGHGAPRHSASHGATPSGLRRGLHCREGPSDSGFQPHPGPPLSVPSGPLAPRARRHPNPLGMSVLRMWHTRPGRAILLLLHPPQPWIRGLYRGQKFTQSR

SEQ ID NO: 29633 - protein, 352 aa, Homo sapiens
MASREDELRNCVVCGDQATGYHFNALTCEGCKGFFRRTVSKSIGPTCPFAGSCEVSKTQRRHCPACRLQKCLDAGMRKDMILSAEALALRRAKQAQRRAQQTPVQLSKEQEELIRTLLGAHTRHMGTMFEQFVQFRPPAHLFIHHQPLPTLAPVLPLVTHFADINTFMVLQVIKFTKDLPVFRSLPIEDQISLLKGAAVEICHIVLNTTFCLQTQNFLCGPLRYTIEDGARVSPTVGFQVEFLELLFHFHGTLRKLQLQEPEYVLLAAMALFSPDRPGVTQRDEIDQLQEEMALTLQSYIKGQQRRPRDRFLYAKLLGLLAELRSINEAYGYQIQHIQGLSAMMPLLQEICS

SEQ ID NO: 29634 - protein, 348 aa, Homo sapiens
MASREDELRNCVVCGDQATGYHFNALTCEGCKGFFRRTVSKSIGPTCPFAGSCEVSKTQRRHCPACRLQKCLDAGMRKDMILSAEALALRRAKQAQRRAQQTPVQLSKEQEELIRTLLGAHTRHMGTMFEQFVQFRPPAHLFIHHQPLPTLAPVLPLVTHFADINTFMVLQVIKFTKDLPVFRSLPIEDQISLLKGAAVEICHIVLNTTFCLQTQNFLCGPLRYTIEDGARVGFQVEFLELLFHFHGTLRKLQLQEPEYVLLAAMALFSPDRPGVTQRDEIDQLQEEMALTLQSYIKGQQRRPRDRFLYAKLLGLLAELRSINEAYGYQIQHIQGLSAMMPLLQEICS

SEQ ID NO: 29635 - protein, 314 aa, Homo sapiens
MASREDELRNCVVCGDQATGYHFNALTCEGCKGFFRRTVSKSIGPTCPFAGSCEVSKTQRRHCPACRLQKCLDAGMRKDMILSAEALALRRAKQAQRRAQQTPVQLSKEQEELIRTLLGAHTRHMGTMFEQFVQFRPPAHLFIHHQPLPTLAPVLPLVTHFADINTFMVLQVIKFTKDLPVFRSLPIEDQISLLKGAAVEICHIVLNTTFCLQTQNFLCGPLRYTIEDGARAPYLTDRPGVTQRDEIDQLQEEMALTLQSYIKGQQRRPRDRFLYAKLLGLLAELRSINEAYGYQIQHIQGLSAMMPLLQEICS

SEQ ID NO: 29636 - protein, 280 aa, Homo sapiens
MLPKRSRRTVSKSIGPTCPFAGSCEVSKTQRRHCPACRLQKCLDAGMRKDMILSAEALALRRAKQAQRRAQQTPVQLSKEQEELIRTLLGAHTRHMGTMFEQFVQFRPPAHLFIHHQPLPTLAPVLPLVTHFADINTFMVLQVIKFTKDLPVFRSLPIEDQISLLKGAAVEICHIVLNTTFCLQTQNFLCGPLRYTIEDGARDRPGVTQRDEIDQLQEEMALTLQSYIKGQQRRPRDRFLYAKLLGLLAELRSINEAYGYQIQHIQGLSAMMPLLQEICS

SEQ ID NO: 29637 - protein, 319 aa, Homo sapiens
MLPKRSRRTVSKSIGPTCPFAGSCEVSKTQRRHCPACRLQKCLDAGMRKDMILSAEALALRRAKQAQRRAQQTPVQLSKEQEELIRTLLGAHTRHMGTMFEQFVQFRPPAHLFIHHQPLPTLAPVLPLVTHFADINTFMVLQVIKFTKDLPVFRSLPIEDQISLLKGAAVEICHIVLNTTFCLQTQNFLCGPLRYTIEDGARVGFQVEFLELLFHFHGTLRKLQLQEPEYVLLAAMALFSPDRPGVTQRDEIDQLQEEMALTLQSYIKGQQRRPRDRFLYAKLLGLLAELRSINEAYGYQIQHIQGLSAMMPLLQEICS

SEQ ID NO: 29638 - protein, 324 aa, Homo sapiens
MLPKRSRRTVSKSIGPTCPFAGSCEVSKTQRRHCPACRLQKCLDAGMRKDMILSAEALALRRAKQAQRRAQQTPVQLSKEQEELIRTLLGAHTRHMGTMFEQFVQFRPPAHLFIHHQPLPTLAPVLPLVTHFADINTFMVLQVIKFTKDLPVFRSLPIEDQISLLKGAAVEICHIVLNTTFCLQTQNFLCGPLRYTIEDGARVGFQVEFLELLFHFHGTLRKLQLQEPEYVLLAAMALFSPAPYLTDRPGVTQRDEIDQLQEEMALTLQSYIKGQQRRPRDRFLYAKLLGLLAELRSINEAYGYQIQHIQGLSAMMPLLQEICS

SEQ ID NO: 29639 - protein, 309 aa, Homo sapiens
MASREDELRNCVVCGDQATGYHFNALTCEGCKGFFRRTVSKSIGPTCPFAGSCEVSKTQRRHCPACRLQKCLDAGMRKDMILSAEALALRRAKQAQRRAQQTPVQLSKEQEELIRTLLGAHTRHMGTMFEQFVQFRPPAHLFIHHQPLPTLAPVLPLVTHFADINTFMVLQVIKFTKDLPVFRSLPIEDQISLLKGAAVEICHIVLNTTFCLQTQNFLCGPLRYTIEDGARDRPGVTQRDEIDQLQEEMALTLQSYIKGQQRRPRDRFLYAKLLGLLAELRSINEAYGYQIQHIQGLSAMMPLLQEICS

SEQ ID NO: 29640 - protein, 357 aa, Homo sapiens
MASREDELRNCVVCGDQATGYHFNALTCEGCKGFFRRTVSKSIGPTCPFAGSCEVSKTQRRHCPACRLQKCLDAGMRKDMILSAEALALRRAKQAQRRAQQTPVQLSKEQEELIRTLLGAHTRHMGTMFEQFVQFRPPAHLFIHHQPLPTLAPVLPLVTHFADINTFMVLQVIKFTKDLPVFRSLPIEDQISLLKGAAVEICHIVLNTTFCLQTQNFLCGPLRYTIEDGARVSPTVGFQVEFLELLFHFHGTLRKLQLQEPEYVLLAAMALFSPAPYLTDRPGVTQRDEIDQLQEEMALTLQSYIKGQQRRPRDRFLYAKLLGLLAELRSINEAYGYQIQHIQGLSAMMPLLQEICS

SEQ ID NO: 29641 - protein, 306 aa, Homo sapiens
MLPKRSRRTVSKSIGPTCPFAGSCEVSKTQRRHCPACRLQKCLDAGMRKDMILSAEALALRRAKQAQRRAQQTPVQLSKEQEELIRTLLGAHTRHMGTMFEQFVQFRPPAHLFIHHQPLPTLAPVLPLVTHFADINTFMVLQVIKFTKDLPVFRSLPIEDQISLLKGAAVEICHIVLNTTFCLQTQNFLCGPLRYTIEDGARVGFQVEFLELLFHFHGTLRKLQLQEPEYVLLAAMALFSPDRPGVTQRDEIDQLQEEMALTLQSYIKGQQRRPRDRSPGTPWIHWSGKMLGPKIGPGSKGAQWLQ

SEQ ID NO: 29642 - protein, 311 aa, Homo sapiens
MLPKRSRRTVSKSIGPTCPFAGSCEVSKTQRRHCPACRLQKCLDAGMRKDMILSAEALALRRAKQAQRRAQQTPVQLSKEQEELIRTLLGAHTRHMGTMFEQFVQFRPPAHLFIHHQPLPTLAPVLPLVTHFADINTFMVLQVIKFTKDLPVFRSLPIEDQISLLKGAAVEICHIVLNTTFCLQTQNFLCGPLRYTIEDGARVGFQVEFLELLFHFHGTLRKLQLQEPEYVLLAAMALFSPAPYLTDRPGVTQRDEIDQLQEEMALTLQSYIKGQQRRPRDRSPGTPWIHWSGKMLGPKIGPGSKGAQWLQ

SEQ ID NO: 29643 - protein, 315 aa, Homo sapiens
MLPKRSRRTVSKSIGPTCPFAGSCEVSKTQRRHCPACRLQKCLDAGMRKDMILSAEALALRRAKQAQRRAQQTPVQLSKEQEELIRTLLGAHTRHMGTMFEQFVQFRPPAHLFIHHQPLPTLAPVLPLVTHFADINTFMVLQVIKFTKDLPVFRSLPIEDQISLLKGAAVEICHIVLNTTFCLQTQNFLCGPLRYTIEDGARVSPTVGFQVEFLELLFHFHGTLRKLQLQEPEYVLLAAMALFSPAPYLTDRPGVTQRDEIDQLQEEMALTLQSYIKGQQRRPRDRSPGTPWIHWSGKMLGPKIGPGSKGAQWLQ

SEQ ID NO: 29644 - protein, 339 aa, Homo sapiens
MASREDELRNCVVCGDQATGYHFNALTCEGCKGFFRRTVSKSIGPTCPFAGSCEVSKTQRRHCPACRLQKCLDAGMRKDMILSAEALALRRAKQAQRRAQQTPVQLSKEQEELIRTLLGAHTRHMGTMFEQFVQFRPPAHLFIHHQPLPTLAPVLPLVTHFADINTFMVLQVIKFTKDLPVFRSLPIEDQISLLKGAAVEICHIVLNTTFCLQTQNFLCGPLRYTIEDGARVSPTVGFQVEFLELLFHFHGTLRKLQLQEPEYVLLAAMALFSPDRPGVTQRDEIDQLQEEMALTLQSYIKGQQRRPRDRSPGTPWIHWSGKMLGPKIGPGSKGAQWLQ

SEQ ID NO: 29645 - protein, 340 aa, Homo sapiens
MASREDELRNCVVCGDQATGYHFNALTCEGCKGFFRRTVSKSIGPTCPFAGSCEVSKTQRRHCPACRLQKCLDAGMRKDMILSAEALALRRAKQAQRRAQQTPVQLSKEQEELIRTLLGAHTRHMGTMFEQFVQFRPPAHLFIHHQPLPTLAPVLPLVTHFADINTFMVLQVIKFTKDLPVFRSLPIEDQISLLKGAAVEICHIVLNTTFCLQTQNFLCGPLRYTIEDGARVGFQVEFLELLFHFHGTLRKLQLQEPEYVLLAAMALFSPAPYLTDRPGVTQRDEIDQLQEEMALTLQSYIKGQQRRPRDRSPGTPWIHWSGKMLGPKIGPGSKGAQWLQ

SEQ ID NO: 29646 - protein, 296 aa, Homo sapiens
MASREDELRNCVVCGDQATGYHFNALTCEGCKGFFRRTVSKSIGPTCPFAGSCEVSKTQRRHCPACRLQKCLDAGMRKDMILSAEALALRRAKQAQRRAQQTPVQLSKEQEELIRTLLGAHTRHMGTMFEQFVQFRPPAHLFIHHQPLPTLAPVLPLVTHFADINTFMVLQVIKFTKDLPVFRSLPIEDQISLLKGAAVEICHIVLNTTFCLQTQNFLCGPLRYTIEDGARDRPGVTQRDEIDQLQEEMALTLQSYIKGQQRRPRDRSPGTPWIHWSGKMLGPKIGPGSKGAQWLQ

SEQ ID NO: 29647 - protein, 267 aa, Homo sapiens
MLPKRSRRTVSKSIGPTCPFAGSCEVSKTQRRHCPACRLQKCLDAGMRKDMILSAEALALRRAKQAQRRAQQTPVQLSKEQEELIRTLLGAHTRHMGTMFEQFVQFRPPAHLFIHHQPLPTLAPVLPLVTHFADINTFMVLQVIKFTKDLPVFRSLPIEDQISLLKGAAVEICHIVLNTTFCLQTQNFLCGPLRYTIEDGARDRPGVTQRDEIDQLQEEMALTLQSYIKGQQRRPRDRSPGTPWIHWSGKMLGPKIGPGSKGAQWLQ

SEQ ID NO: 29648 - protein, 570 aa, Homo sapiens
MSRLEAKKPSLCKSEPLTTERVRTTLSVLKRIVTSCYGPSGRLKQLHNGFGGYVCTTSQSSALLSHLLVTHPILKILTASIQNHVSSFSDCGLFTAILCCNLIENVQRLGLTPTTVIRLNKHLLSLCISYLKSETCGCRIPVDFSSTQILLCLVRSILTSKPACMLTRKETEHVSALILRAFLLTIPENAEGHIILGKSLIVPLKGQRVIDSTVLPGILIEMSEVQLMRLLPIKKSTALKVALFCTTLSGDTSDTGEGTVVVSYGVSLENAVLDQLLNLGRQLISDHVDLVLCQKVIHPSLKQFLNMHRIIAIDRIGVTLMEPLTKMTGTQPIGSLGSICPNSYGSVKDVCTAKFGSKHFFHLIPNEATICSLLLCNRNDTAWDELKLTCQTALHVLQLTLKEPWALLGGGCTETHLAAYIRHKTHNDPESILKDDECTQTELQLIAEAFCSALESVVGSLEHDGGEILTDMKYGHLWSVQADSPCVANWPDLLSQCGCGLYNSQEELNWSFLRSTRRPFVPQSCLPHEAVGSASNLTLDCLTAKLSGLQVAVETANLILDLSYVIEDKN

SEQ ID NO: 29649 - protein, 1114 aa, Homo sapiens
MLSCLKEEMPPQELTRRLATVITHVDEIMQQEVRPLMAVEIIEQLHRQFAILSGGRGEDGAPIITFPEFSGFKHIPDEDFLNVMTYLTSIPSVEAASIGFIVVIDRRRDKWSSVKASLTRIAVAFPGNLQLIFILRPSRFIQRTFTDIGIKYYRNEFKTKVPIIMVNSVSDLHGYIDKSQLTRELGGTLEYRHGQWVNHRTAIENFALTLKTTAQMLQTFGSCLATAELPRSMLSTEDLLMSHTRQRDKLQDELKLLGKQGTTLLSCIQEPATKCPNSKLNLNQLENVTTMERLLVQLDETEKAFSHFWSEHHLKLNQCLQLQHFEHDFCKAKLALDNLLEEQAEFTGIGDSVMHVEQILKEHKKLEEKSQEPLEKAQLLALVGDQLIQSHHYAADAIRPRCVELRHLCDDFINGNKKKWDILGKSLEFHRQLDKVSQWCEAGIYLLASQAVDKCQSREGVDIALNDIATFLGTVKEYPLLSPKEFYNEFELLLTLDAKAKAQKVLQRLDDVQEIFHKRQVSLMKLAAKQTRPVQPVAPHPESSPKWVSSKTSQPSTSVPLARPLRTSEEPYTETELNSRGKEDDETKFEVKSEEIFESHHERGNPELEQQARLGDLSPRRRIIRDLLETEEIYIKEIKSIIDGYITPMDFIWLKHLIPDVLQNNKDFLFGNIRELYEFHNRTFLKELEKCAENPELLAHCFLKRKEDLQIYFKYHKNLPRARAIWQECQDCAYFGVCQRQLDHNLPLFKYLKGPSQRLIKYQMLLKGLLDFESPEDMEIDPGELGGSAKDGPKRTKDSAFSTELQQALAVIEDLIKSCELAVDLAAVTECPDDIGKLGKLLLHGPFSVWTIHKDRYKMKDLIRFKPSQRQIYLFERGIVFCKIRMEPGDQGLSPHYSFKKTMKLMTLSIRQLGRGSHRKFEIASRNGLEKYILQAASKEIRDCWFSEISKLLMEQQNNIKDQGNPQFEMSTSKGSGAGSGPWIKNMERATTSKEDPASSTGGIKGCSSREFSSMDTFEDCEGAEDMEKESSALSLAGLFQSDDSHETCSSKSAFLERGESSQGEKEERDEEETATRSTEEERAGASTGRLAPAGATAGFQARALRPRTSAQES

SEQ ID NO: 29650 - protein, 711 aa, Homo sapiens
MLSCLKEEMPPQELTRRLATVITHVDEIMQQEVRPLMAVEIIEQLHRQFAILSGGRGEDGAPIITFPEFSGFKHIPDEDFLNVMTYLTSIPSVEAASIGFIVVIDRRRDKWSSVKASLTRIAVAFPGNLQLIFILRPSRFIQRTFTDIGIKYYRNEFKTKVPIIMVNSVSDLHGYIDKSQLTRELGGTLEYRHGQWVNHRTAIENFALTLKTTAQMLQTFGSCLATAELPRSMLSTEDLLMSHTRQRDKLQDELKLLGKQGTTLLSCIQEPATKCPNSKLNLNQLENVTTMERLLVQLDETEKAFSHFWSEHHLKLNQCLQLQHFEHDFCKAKLALDNLLEEQAEFTGIGDSVMHVEQILKEHKKLEEKSQEPLEKAQLLALVGDQLIQSHHYAADAIRPRCVELRHLCDDFINGNKKKWDILGKSLEFHRQLDKVSQWCEAGIYLLASQAVDKCQSREGVDIALNDIATFLGTVKEYPLLSPKEFYNEFELLLTLDAKAKAQKVLQRLDDVQEIFHKRQVSLMKLAAKQTRPVQPVAPHPESSPKWVSSKTSQPSTSVPLARPLRTSEEPYTETELNSRGKEDDETKFEVKSEEIFESHHERGNPELEQQARLGDLSPRRRIIRDLLETEEIYIKEIKSIIDGYITPMDFIWLKHLIPDVLQNNKDFLFGNIRELYEFHNRTFLKELEKCAENPELLAHCFLKRVSLYSQ

SEQ ID NO: 29651 - protein, 628 aa, Homo sapiens
MLSCLKEEMPPQELTRRLATVITHVDEIMQQEVRPLMAVEIIEQLHRQFAILSGGRGEDGAPIITFPEFSGFKHIPDEDFLNVMTYLTSIPSVEAASIGFIVVIDRRRDKWSSVKASLTRIAVAFPGNLQLIFILRPSRFIQRTFTDIGIKYYRNEFKTKVPIIMVNSVSDLHGYIDKSQLTRELGGTLEYRHGQWVNHRTAIENFALTLKTTAQMLQTFGSCLATAELPRSMLSTEDLLMSHTRQRDKLQDELKLLGKQGTTLLSCIQEPATKCPNSKLNLNQLENVTTMERLLVQLDETEKAFSHFWSEHHLKLNQCLQLQHFEHDFCKAKLALDNLLEEQAEFTGIGDSVMHVEQILKEHKKLEEKSQEPLEKAQLLALVGDQLIQSHHYAADAIRPRCVELRHLCDDFINGNKKKWDILGKSLEFHRQLDKVSQWCEAGIYLLASQAVDKCQSREGVDIALNDIATFLGTVKEYPLLSPKEFYNEFELLLTLDAKAKAQKVLQRLDDVQEIFHKRQVSLMKLAAKQTRPVQPVAPHPESSPKWVSSKTSQPSTSVPLARPLRTSEEPYTETELNSRGKEDDETKFEVKSEEIFESHHERGNPELEQQARLGDLSPRRYSSQYFK

SEQ ID NO: 29652 - protein, 1074 aa, Homo sapiens
MLSCLKEEMPPQELTRRLATVITHVDEIMQQEVRPLMAVEIIEQLHRQFAILSGGRGEDGAPIITFPEFSGFKHIPDEDFLNVMTYLTSIPSVEAASIGFIVVIDRRRDKWSSVKASLTRIAVAFPGNLQLIFILRPSRFIQRTFTDIGIKYYRNEFKTKVPIIMVNSVSDLHGYIDKSQLTRELGGTLEYRHGQWVNHRTAIENFALTLKTTAQMLQTFGSCLATAELPRSMLSTEDLLMSHTRQRDKLQDELKLLGKQGTTLLSCIQEPATKCPNSKLNLNQLENVTTMERLLVQLDETEKAFSHFWSEHHLKLNQCLQLQHFEHDFCKAKLALDNLLEEQAEFTGIGDSVMHVEQILKEHKKLEEKSQEPLEKAQLLALVGDQLIQSHHYAADAIRPRCVELRHLCDDFINGNKKKWDILGKSLEFHRQLDKVSQWCEAGIYLLASQAVDKCQSREGVDIALNDIATFLGTVKEYPLLSPKEFYNEFELLLTLDAKAKAQKVLQRLDDVQEIFHKRQVSLMKLAAKQTRPVQPVAPHPESSPKWVSSKTSQPSTSVPLARPLRTSEEPYTETELNSRGKEDDETKFEVKSEEIFESHHERGNPELEQQARLGDLSPRRRIIRDLLETEEIYIKEIKSIIDGYITPMDFIWLKHLIPDVLQNNKDFLFGNIRELYEFHNRTFLKELEKCAENPELLAHCFLKRKEDLQIYFKYHKNLPRARAIWQECQDCAYFGVCQRQLDHNLPLFKYLKGPSQRLIKYQMLLKGLLDFESPEDMEIDPGELGGSAKDGPKRTKDSAFSTELQQALAVIEDLIKSCELAVDLAAVTECPDDIGKLGKLLLHGPFSVWTIHKDRYKMKDLIRFKPSQRQIYLFERGIVFCKIRMEPGDQGLSPHYSFKKTMKLMTLSIRQLGRGSHRKFEIASRNGLEKYILQAASKEIRDCWFSEISKLLMEQQNNIKDQGNPQFEMSTSKGSGAGSGPWIKNMERATTSKEDPASSTGGIKGCSSREFSSMDTFEDCEGAEDMEKESSALSLAGLFQSDDSHETCSSKSAFLERGESSQGEKEERDEEET

SEQ ID NO: 29653 - protein, 316 aa, Homo sapiens
MRQPLSWGRWRAMLARTYGPGPSAGYRWASGAQGYVRNPPVGACDLQGELDRFGGISVRLARLDALDRLDAAAFQKGLQAAVQQWRSEGRTAVWLHIPILQSRFIAPAASLGFCFHHAESDSSTLTLWLREGPSRLPGYASHQVGVAGAVFDESTRKILVVQDRNKLKNMWKFPGGLSEPEEDIGDTAVREVFEETGIKSEFRSVLSIRQQHTNPGAFGKSDMYIICRLKPYSFTINFCQEECLRCEWMDLNDLAKTENTTPITSRVARLLLYGYREGFDKIDLTVEELPAVYTGLFYKLYHKELPENYKTMKGID

SEQ ID NO: 29654 - protein, 147 aa, Homo sapiens
MWKFPGGLSEPEEDIGDTAVREVFEETGIKSEFRSVLSIRQQHTNPGAFGKSDMYIICRLKPYSFTINFCQEECLRCEWMDLNDLAKTENTTPITSRVARLLLYGYREGFDKIDLTVEELPAVYTGLFYKLYHKELPENYKTMKGID

SEQ ID NO: 29655 - protein, 735 aa, Homo sapiens
MAAGGAVAAAPECRLLPYALHKWSSFSSTYLPENILVDKPNDQSSRWSSESNYPPQYLILKLERPAIVQNITFGKYEKTHVCNLKKFKVFGGMNEENMTELLSSGLKNDYNKETFTLKHKIDEQMFPCRFIKIVPLLSWGPSFNFSIWYVELSGIDDPDIVQPCLNWYSKYREQEAIRLCLKHFRQHNYTEAFESLQKKTKIALEHPMLTDIHDKLVLKGDFDACEELIEKAVNDGLFNQYISQQEYKPRWSQIIPKSTKGDGEDNRPGMRGGHQMVIDVQTETVYLFGGWDGTQDLADFWAYSVKENQWTCISRDTEKENGPSARSCHKMCIDIQRRQIYTLGRYLDSSVRNSKSLKSDFYRYDIDTNTWMLLSEDTAADGGPKLVFDHQMCMDSEKHMIYTFGGRILTCNGSVDDSRASEPQFSGLFAFNCQCQTWKLLREDSCNAGPEDIQSRIGHCMLFHSKNRCLYVFGGQRSKTYLNDFFSYDVDSDHVDIISDGTKKDSGMVPMTGFTQRATIDPELNEIHVLSGLSKDKEKREENVRNSFWIYDIVRNSWSCVYKNDQAAKDNPTKSLQEEEPCPRFAHQLVYDELHKVHYLFGGNPGKSCSPKMRLDDFWSLKLCRPSKDYLLRHCKYLIRKHRFEEKAQVDPLSALKYLQNDLYITVDHSDPEETKEFQLLASALFKSGSDFTALGFSDVDHTYAQRTQLFDTLVNFFPDSMTPPKGNLVDLITL

SEQ ID NO: 29656 - protein, 528 aa, Homo sapiens
MLTDIHDKLVLKGDFDACEELIEKAVNDGLFNQYISQQEYKPRWSQIIPKSTKGDGEDNRPGMRGGHQMVIDVQTETVYLFGGWDGTQDLADFWAYSVKENQWTCISRDTEKENGPSARSCHKMCIDIQRRQIYTLGRYLDSSVRNSKSLKSDFYRYDIDTNTWMLLSEDTAADGGPKLVFDHQMCMDSEKHMIYTFGGRILTCNGSVDDSRASEPQFSGLFAFNCQCQTWKLLREDSCNAGPEDIQSRIGHCMLFHSKNRCLYVFGGQRSKTYLNDFFSYDVDSDHVDIISDGTKKDSGMVPMTGFTQRATIDPELNEIHVLSGLSKDKEKREENVRNSFWIYDIVRNSWSCVYKNDQAAKDNPTKSLQEEEPCPRFAHQLVYDELHKVHYLFGGNPGKSCSPKMRLDDFWSLKLCRPSKDYLLRHCKYLIRKHRFEEKAQVDPLSALKYLQNDLYITVDHSDPEETKEFQLLASALFKSGSDFTALGFSDVDHTYAQRTQLFDTLVNFFPDSMTPPKGNLVDLITL

SEQ ID NO: 29657 - protein, 195 aa, Homo sapiens
MAGARRLELGEALALGSGWRHACHALLYAPDPGMLFGRIPLRYAILMQMRFDGRLGFPGGFVDTQDRSLEDGLNRELREELGEAAAAFRVERTDYRSSHVGSGPRVVAHFYAKRLTLEELLAVEAGATRAKDHGLEVLGLVRVPLYTLRDGVGGLPTFLENSFIGSAREQLLEALQDLGLLQSGSISGLKIPAHH

SEQ ID NO: 29658 - protein, 194 aa, Homo sapiens
MLFGRIPLRYAILMQMRFDGRLGFPGGFVDTQDRSLEDGLNRELREELGEAAAAFRVERTDYRSSHVGSGPRVVAHFYAKRLTLEELLAVEAGATRAKDHGLEVGPAWDSVPFPISSSPKAFSPPRKHPWRKVFAPLTLPSPQLSWWSWDRDHLYSELVLPTWAFCKGLSHPLPGEILSRTHSSMSLCCSLLTV

SEQ ID NO: 29659 - protein, 159 aa, Homo sapiens
MQMRFDGRLGFPGGFVDTQDRSLEDGLNRELREELGEAAAAFRVERTDYRSSHVGSGPRVVAHFYAKRLTLEELLAVEAGATRAKDHGLEVLGLVRVPLYTLRDGVGGLPTFLENSFIGSAREQLLEAALHGPMKTEMRTLVLGREGRTWECFLIGSER

SEQ ID NO: 29660 - protein, 227 aa, Homo sapiens
MAGARRLELGEALALGSGWRHACHALLYAPDPGMLFGRIPLRYAILMQMRFDGRLGFPGGFVDTQDRSLEDGLNRELREELGEAAAAFRVERTDYRSSHVGSGPRVVAHFYAKRLTLEELLAVEAGATRAKDHGLEVGPAWDSVPFPISSSPKAFSPPRKHPWRKVFAPLTLPSPQLSWWSWDRDHLYSELVLPTWAFCKGLSHPLPGEILSRTHSSMSLCCSLLTV

SEQ ID NO: 29661 - protein, 343 aa, Homo sapiens
MWSHLNRLLFWSIFSSVTCRKAVLDCEAMKTNEFPSPCLDSKTKVVMKGQNVSMFCSHKNKSLQITYSLFRRKTHLGTQDGKGEPAIFNLSITEAHESGPYKCKAQVTSCSKYSRDFSFTIVDPVTSPVLNIMVIQTETDRHITLHCLSVNGSLPINYTFFENHVAISPAISKYDREPAEFNLTKKNPGEEEEYRCEAKNRLPNYATYSHPVTMPSTGGDSCPFCLKLLLPGLLLLLVVIILILAFWVLPKYKTRKAMRNNVPRDRGDTAMEVGIYANILEKQAKEESVPEVGSRPCVSTAQDEAKHSQELQYATPVFQEVAPREQEACDSYKSGYVYSELNF

SEQ ID NO: 29662 - protein, 248 aa, Homo sapiens
MWSHLNRLLFWSIFSSVTCRKAVLDCEAMKTNEFPSPCLDSKTKVVMKGQNVSMFCSHKNKSLQITYSLFRRKTHLGTQDGKGEPAIFNLSITEAHESGPYKCKAQVTSCSKYSRDFSFTIVGGDSCPFCLKLLLPGLLLLLVVIILILAFWVLPKYKTRKAMRNNVPRDRGDTAMEVGIYANILEKQAKEESVPEVGSRPCVSTAQDEAKHSQELQYATPVFQEVAPREQEACDSYKSGYVYSELNF

SEQ ID NO: 29663 - protein, 253 aa, Homo sapiens
MWSHLNRLLFWSIFSSVTCRKAVLDCEAMKTNDPVTSPVLNIMVIQTETDRHITLHCLSVNGSLPINYTFFENHVAISPAISKYDREPAEFNLTKKNPGEEEEYRCEAKNRLPNYATYSHPVTMPSTGGDSCPFCLKLLLPGLLLLLVVIILILAFWVLPKYKTRKAMRNNVPRDRGDTAMEVGIYANILEKQAKEESVPEVGSRPCVSTAQDEAKHSQELQYATPVFQEVAPREQEACDSYKSGYVYSELNF

SEQ ID NO: 29664 - protein, 465 aa, Homo sapiens
MVSSQKLEKPIEMGSSEPLPIADGDRRRKKKRRGRATDSLPGKFEDMYKLTSELLGEGAYAKVQGAVSLQNGKEYAVKIIEKQAGHSRSRVFREVETLYQCQGNKNILELIEFFEDDTRFYLVFEKLQGGSILAHIQKQKHFNEREASRVVRDVAAALDFLHTKDKVSLCHLGWSAMAPSGLTAAPTSLGSSDPPTSASQVAGTTGIAHRDLKPENILCESPEKVSPVKICDFDLGSGMKLNNSCTPITTPELTTPCGSAEYMAPEVVEVFTDQATFYDKRCDLWSLGVVLYIMLSGYPPFVGHCGADCGWDRGEVCRVCQNKLFESIQEGKYEFPDKDWAHISSEAKDLISKLLVRDAKQRLSAAQVLQHPWVQGQAPEKGLPTPQVLQRNSSTMDLTLFAAEAIALNRQLSQHEENELAEEPEALADGLCSMKLSPPCKSRLARRRALAQAGRGEDRSPPTAL

SEQ ID NO: 29665 - protein, 424 aa, Homo sapiens
MVSSQKLEKPIEMGSSEPLPIADGDRRRKKKRRGRATDSLPGKFEDMYKLTSELLGEGAYAKVQGAVSLQNGKEYAVKIIEKQAGHSRSRVFREVETLYQCQGNKNILELIEFFEDDTRFYLVFEKLQGGSILAHIQKQKHFNEREASRVVRDVAAALDFLHTKGIAHRDLKPENILCESPEKVSPVKICDFDLGSGMKLNNSCTPITTPELTTPCGSAEYMAPEVVEVFTDQATFYDKRCDLWSLGVVLYIMLSGYPPFVGHCGADCGWDRGEVCRVCQNKLFESIQEGKYEFPDKDWAHISSEAKDLISKLLVRDAKQRLSAAQVLQHPWVQGQAPEKGLPTPQVLQRNSSTMDLTLFAAEAIALNRQLSQHEENELAEEPEALADGLCSMKLSPPCKSRLARRRALAQAGRGEDRSPPTAL

SEQ ID NO: 29666 - protein, 347 aa, Homo sapiens
MVSSQKLEKPIEMGSSEPLPIADGDRRRKKKRRGRATDSLPGKFEDMYKLTSELLGEGAYAKVQGAVSLQNGKEYAVKIIEKQAGHSRSRVFREVETLYQCQGNKNILELIEFFEDDTRFYLVFEKLQGGSILAHIQKQKHFNEREASRVVRDVAAALDFLHTKGIAHRDLKPENILCESPEKVSPVKICDFDLGSGMKLNNSCTPITTPELTTPCGSAEYMAPEVVEVFTDQATFYDKRCDLWSLGVVLYIMLSGYPPFVGHCGADCGWDRGEVCRVCQNKLFESIQEGKYEFPDKDWAHISSEAKDLISKLLVRDAKQRLSAAQVLQHPWVQGEQQHNGPDALRS

SEQ ID NO: 29667 - protein, 465 aa, Homo sapiens
MVQKKPAELQGFHRSFKGQNPFELAFSLDQPDHGDSDFGLQCSARPDMPASQPIDIPDAKKRGKKKKRGRATDSFSGRFEDVYQLQEDVLGEGAHARVQTCINLITSQEYAVKIIEKQPGHIRSRVFREVEMLYQCQGHRNVLELIEFFEEEDRFYLVFEKMRGGSILSHIHKRRHFNELEASVVVQDVASALDFLHNKGIAHRDLKPENILCEHPNQVSPVKICDFDLGSGIKLNGDCSPISTPELLTPCGSAEYMAPEVVEAFSEEASIYDKRCDLWSLGVILYILLSGYPPFVGRCGSDCGWDRGEACPACQNMLFESIQEGKYEFPDKDWAHISCAAKDLISKLLVRDAKQRLSAAQVLQHPWVQGCAPENTLPTPMVLQRNSCAKDLTSFAAEAIAMNRQLAQHDEDLAEEEAAGQGQPVLVRATSRCLQLSPPSQSKLAQRRQRASLSSAPVVLVGDHA

SEQ ID NO: 29668 - protein, 414 aa, Homo sapiens
MVQKKPAELQGFHRSFKGQNPFELAFSLDQPDHGDSDFGLQCSARPDMPASQPIDIPDAKKRGKKKKRGRATDSFSGRFEDVYQLQEDVLGEGAHARVQTCINLITSQEYAVKIIEKQPGHIRSRVFREVEMLYQCQGHRNVLELIEFFEEEDRFYLVFEKMRGGSILSHIHKRRHFNELEASVVVQDVASALDFLHNKGIAHRDLKPENILCEHPNQVSPVKICDFDLGSGIKLNGDCSPISTPELLTPCGSAEYMAPEVVEAFSEEASIYDKRCDLWSLGVILYILLSGYPPFVGRCGSDCGWDRGEACPACQNMLFESIQEGKYEFPDKDWAHISCAAKDLISKLLVRDAKQRLSAAQVLQHPWVQGCAPENTLPTPMVLQRWDSHFLLPPHPCRIHVRPGGLVRTVTVNE

SEQ ID NO: 29669 - protein, 482 aa, Homo sapiens
MAEAATPGTTATTSGAGAAAATAAAASPTPIPTVTAPSLGAGGGGGGSDGSGGGWTKQVTCRYFMHGVCKEGDNCRYSHDLSDSPYSVVCKYFQRGYCIYGDRCRYEHSKPLKQEEATATELTTKSSLAASSSLSSIVGPLVEMNTGEAESRNSNFATVGAGSEDWVNAIEFVPGQPYCGRTAPSCTEAPLQGSVTKEESEKEQTAVETKKQLCPYAAVGECRYGENCVYLHGDSCDMCGLQVLHPMDAAQRSQHIKSCIEAHEKDMELSFAVQRSKDMVCGICMEVVYEKANPSERRFGILSNCNHTYCLKCIRKWRSAKQFESKIIKSCPECRITSNFVIPSEYWVEEKEEKQKLILKYKEAMSNKACRYFDEGRGSCPFGGNCFYKHAYPDGRREEPQRQKVGTSSRYRAQRRNHFWELIEERENSNPFDNDEEEVVTFELGEMLLMLLAAGGDDELTDSEDEWDLFHDELEDFYDLDL

SEQ ID NO: 29670 - protein, 418 aa, Homo sapiens
MHGVCKEGDNCRYSHDLSDSPYSVVCKYFQRGYCIYGDRCRYEHSKPLKQEEATATELTTKSSLAASSSLSSIVGPLVEMNTGEAESRNSNFATVGAGSEDWVNAIEFVPGQPYCGRTAPSCTEAPLQGSVTKEESEKEQTAVETKKQLCPYAAVGECRYGENCVYLHGDSCDMCGLQVLHPMDAAQRSQHIKSCIEAHEKDMELSFAVQRSKDMVCGICMEVVYEKANPSERRFGILSNCNHTYCLKCIRKWRSAKQFESKIIKSCPECRITSNFVIPSEYWVEEKEEKQKLILKYKEAMSNKACRYFDEGRGSCPFGGNCFYKHAYPDGRREEPQRQKVGTSSRYRAQRRNHFWELIEERENSNPFDNDEEEVVTFELGEMLLMLLAAGGDDELTDSEDEWDLFHDELEDFYDLDL

SEQ ID NO: 29671 - protein, 412 aa, Homo sapiens
MAEAATPGTTATTSGAGAAAATAAAASPTPIPTVTAPSLGAGGGGGGSDGSGGGWTKQVTCRYFMHGVCKEGDNCRYSHDLSDSPYSVVCKYFQRGYCIYGDRCRYEHSKPLKQEEATATELTTKSSLAASSSLSSIVGPLVEMNTGEAESRNSNFATVGAGSEDWVNAIEFVPGQPYCGRTAPSCTEAPLQGSVTKEESEKEQTAVETKKQLCPYAAVGECRYGENCVYLHGDSCDMCGLQVLHPMDAAQRSQHIKSCIEAHEKDMELSFAVQRSKDMVCGICMEVVYEKANPSERRFGILSNCNHTYCLKCIRKWRSAKQFESKIIKSCPECRITSNFVIPSEYWVEEKEEKQKLILKYKEAMRYEHCSLFSSEEPNRAWVHFEKNGAALYTPTSFLPFFDFPGQFILSP

SEQ ID NO: 29672 - protein, 329 aa, Homo sapiens
MAEAATPGTTATTSGAGAAAATAAAASPTPIPTVTAPSLGAGGGGGGSDGSGGGWTKQVTCRYFMHGVCKEGDNCRYSHDLSDSPYSVVCKYFQRGYCIYGDRCRYEHSKPLKQEEATATELTTKSSLAASSSLSSIVGPLVEMNTGEAESRNSNFATVGAGSEDWVNAIEFVPGQPYCGRTAPSCTEAPLQGSVTKEESEKEQTAVETKKQLCPYAAVGECRYGENCVYLHGDSCDMCGLQVLHPMDAAQRSQHIKSCIEAHEKDMELSFAVQRSKDMVCGICMEVVYEKANPSERRFGILSNCNHTYCLKCIRKWRSAKQFESKIIK

SEQ ID NO: 29673 - protein, 352 aa, Homo sapiens
MNTIVFNKLSGAVLFEDGGASERERGGRPYSGVLDSPHARPEVGIPDGPPLKDNLGLRHRRTGARQNGGKVRHKRQALQDMARPLKQWLYKHRDNPYPTKTEKILLALGSQMTLVQVSNWFANARRRLKNTVRQPDLSWALRIKLYNKYVQGNAERLSVSSDDSCSEDGENPPRTHMNEGGYNTPVHHPVIKSENSVIKAGVRPESRASEDYVAPPKYKSSLLNRYLNDSLRHVMATNTTMMGKTRQRNHSGSFSSNEFEEELVSPSSSETEGNFVYRTDTLENGSNKGESAANRKGPSKDDTYWKEINAAMALTNLAQGKDKLQGTTSCIIQKSSHIAEVKTVKVPLVQQF

SEQ ID NO: 29674 - protein, 163 aa, Homo sapiens
MATLLAWVGVSCCELAEEDFLAVSPLDPRYREVHYVLLDPSCSGSGMPSRQLEDPGAGTPSPVRLHALAGFQQRALCHALTFPSLQRLVYSMCSLCQEENEDMVPDALQQNPGAFRLAPALPARPHRGLSTFPGAEHCLRASPKTTLSGGFFVAVIERVEMPT

SEQ ID NO: 29675 - protein, 117 aa, Homo sapiens
MPSRQLEDPGAGTPSPVRLHALAGFQQRALCHALTFPSLQRLVYSMCSLCQEENEDMVPDALQQNPGAFRLAPALPARPHRGLSTFPGAEHCLRASPKTTLSGGFFVAVIERVEMPT

SEQ ID NO: 29676 - protein, 154 aa, Homo sapiens
MPSRQLEDPGAGTPSPVRLHALAGFQQRALCHALTFPSLQRLVYSMCSLCQEENEDMVPDALQQNPGAFRLAPALPARPHRGLSTFPGAEHCLRASPKTTLSGGFFVAVIERVEMPTSASQAKASAPERTPSPAPKRKKRQQRAAAGACTPPCT

SEQ ID NO: 29677 - protein, 1052 aa, Homo sapiens
MAGMDSGNLKTARLWRDAALRARKLRSNLRQLTLTAAGACPGAGADALESPASPQLVLPANLGDIEALNLGNNGLEEVPEGLGSALGSLRVLVLRRNRFARLPPAVAELGHHLTELDVSHNRLTALGAEVVSALRELRKLNLSHNQLPALPAQLGALAHLEELDVSFNRLAHLPDSLSCLSRLRTLDVDHNQLTAFPRQLLQLVALEELDVSSNRLRGLPEDISALRALKILWLSGAELGTLPAGFCELASLESLMLDNNGLQALPAQFSCLQRLKMLNLSSNLFEEFPAALLPLAGLEELYLSRNQLTSVPSLISGLGRLLTLWLDNNRIRYLPDSIVELTGLEELVLQGNQIAVLPDHFGQLSRVGLWKIKDNPLIQPPYEVCMKGIPYIAAYQKELAHSQPAVQPRLKLLLMGHKAAGKTLLRHCLTEERVEGCPGGGDKEKCYPPSPPPVSKGIEVTSWTADASRGLRFIVYDLAGDESYEVIQPFFLSPGALYVLVVNLATYEPRHFPTTVGSFLHRVGARVPHAVVCIVGTHADLCGERELEEKCLDIHRQIALQEKHDAEGLSRLAKVVDEALARDFELRSASPHAAYYGVSDKNLRRRKAHFQYLLNHRLQILSPVLPVSCRDPRHLRRLRDKLLSVAEHREIFPNLHRVLPRSWQVLEELHFQPPQAQRLWLSWWDSARLGLQAGLTEDRLQSALSYLHESGKLLYFEDSPALKEHVFHNLTRLIDILNVFFQRDPSLLLHKLLLGTSGEGKAEGESSPPMARSTPSQELLRATQLHQYVEGFLLHGLLPAHVIRLLLKPHVQAQQDLQLLLELLEKMGLCYCLNKPKGKPLNGSTAWYKFPCYVQNEVPHAEAWINGTNLAGQSFVAEQLQIEYSFPFTFPLGLFARYSVQINSHVVHRSDGKFQIFAYRGKVPVVVSYRPARGVLQPDTLSIASHASLPNIWTAWQAITPLVEELNVLLQEWPGLHYTVHILCSKCLKRGSPNPHAFPGELLSQPRPEGVAEIICPKNGSERVNVALVYPPTPTVISPCSKKNVGEKHRNQ

SEQ ID NO: 29678 - protein, 144 aa, Homo sapiens
MADRLTQLQDAVNSLADQFCNAIGVLQQCGPPASFNNIQTAINKDQPANPTEEYAQLFAALIARTAKDIDVLIDSLPSEESTAALQAASLYKLEEENHEAATCLEDVVYRGDMLLEKIQSALADIAQSQLKTRSGTHSQSLPDS

SEQ ID NO: 29679 - protein, 1032 aa, Homo sapiens
MAFTNYSSLNRAQLTFEYLHTNSTTHEFLFGALAELVDNARDADATRIDIYAERREDLRGGFMLCFLDDGAGMDPSDAASVIQFGKSAKRTPESTQIGQYGNGLKSGSMRIGKDFILFTKKEDTMTCLFLSRTFHEEEGIDEVIVPLPTWNARTREPVTDNVEKFAIETELIYKYSPFRTEEEVMTQFMKIPGDSGTLVIIFNLKLMDNGEPELDIISNPRDIQMAETSPEGTKPERRSFRAYAAVLYIDPRMRIFIHGHKVQTKRLSCCLYKPRMYKYTSSRFKTRAEQEVKKAEHVARIAEEKAREAESKARTLEVRLGGDLTRDSRVMLRQVQNRAITLRREADVKKRIKEAKQRALKEPKELNFVFGVNIEHRDLDGMFIYNCSRLIKMYEKVGPQLEGGMACGGVVGVVDVPYLVLEPTHNKQDFADAKEYRHLLRAMGEHLAQYWKDIAIAQRGIIKFWDEFGYLSANWNQPPSSELRYKRRRAMEIPTTIQCDLCLKWRTLPFQLSSVEKDYPDTWVCSMNPDPEQDRCEASEQKQKVPLGTFRKDMKTQEEKQKQLTEKIRQQQEKLEALQKTTPIRSQADLKKLPLEVTTRPSTEEPVRRPQRPRSPPLPAVIRNAPSRPPSLPTPRPASQPRKAPVISSTPKLPALAAREEASTSRLLQPPEAPRKPANTLVKTASRPAPLVQQLSPSLLPNSKSPREVPSPKVIKTPVVKKTESPIKLSPATPSRKRSVAVSDEEEVEEEAERRKERCKRGRFVVKEEKKDSNELSDSAGEEDSADLKRAQKDKGLHVEVRVNREWYTGRVTAVEVGKHVVRWKVKFDYVPTDTTPRDRWVEKGSEDVRLMKPPSPEHQSLDTQQEGGEEEVGPVAQQAIAVAEPSTSECLRIEPDTTALSTNHETIDLLVQILRNCLRYFLPPSFPISKKQLSAMNSDELISFPLKEYFKQYEVGLQNLCNSYQSRADSRAKASEESLRTSERKLRETEEKLQKLRTNIVALLQKVQEDIDINTDDELDAYIEDLITKGD

SEQ ID NO: 29680 - protein, 970 aa, Homo sapiens
MLCFLDDGAGMDPSDAASVIQFGKSAKRTPESTQIGQYGNGLKSGSMRIGKDFILFTKKEDTMTCLFLSRTFHEEEGIDEVIVPLPTWNARTREPVTDNVEKFAIETELIYKYSPFRTEEEVMTQFMKIPGDSGTLVIIFNLKLMDNGEPELDIISNPRDIQMAETSPEGTKPERRSFRAYAAVLYIDPRMRIFIHGHKVQTKRLSCCLYKPRMYKYTSSRFKTRAEQEVKKAEHVARIAEEKAREAESKARTLEVRLGGDLTRDSRVMLRQVQNRAITLRREADVKKRIKEAKQRALKEPKELNFVFGVNIEHRDLDGMFIYNCSRLIKMYEKVGPQLEGGMACGGVVGVVDVPYLVLEPTHNKQDFADAKEYRHLLRAMGEHLAQYWKDIAIAQRGIIKFWDEFGYLSANWNQPPSSELRYKRRRAMEIPTTIQCDLCLKWRTLPFQLSSVEKDYPDTWVCSMNPDPEQDRCEASEQKQKVPLGTFRKDMKTQEEKQKQLTEKIRQQQEKLEALQKTTPIRSQADLKKLPLEVTTRPSTEEPVRRPQRPRSPPLPAVIRNAPSRPPSLPTPRPASQPRKAPVISSTPKLPALAAREEASTSRLLQPPEAPRKPANTLVKTASRPAPLVQQLSPSLLPNSKSPREVPSPKVIKTPVVKKTESPIKLSPATPSRKRSVAVSDEEEVEEEAERRKERCKRGRFVVKEEKKDSNELSDSAGEEDSADLKRAQKDKGLHVEVRVNREWYTGRVTAVEVGKHVVRWKVKFDYVPTDTTPRDRWVEKGSEDVRLMKPPSPEHQSLDTQQEGGEEEVGPVAQQAIAVAEPSTSECLRIEPDTTALSTNHETIDLLVQILRNCLRYFLPPSFPISKKQLSAMNSDELISFPLKEYFKQYEVGLQNLCNSYQSRADSRAKASEESLRTSERKLRETEEKLQKLRTNIVALLQKVQEDIDINTDDELDAYIEDLITKGD

SEQ ID NO: 29681 - protein, 602 aa, Homo sapiens
MNGGAERAMRSLPSLGGLALLCCAAAAAAAAVASAASAGNVTGGGGAAGQVDASPGPGLRGEPSHPFPRATAPTAQAPRTGPPRATVHRPLAATSPAQSPETTPLWATAGPSSTTFQAPLGPSPTTPPAAERTSTTSQAPTRPAPTTLSTTTGPAPTTPVATTVPAPTTPRTPTPDLPSSSNSSVLPTPPATEAPSSPPPEYVCNCSVVGSLNVNRCNQTTGQCECRPGYQGLHCETCKEGFYLNYTSGLCQPCDCSPHGALSIPCNSSGKCQCKVGVIGSICDRCQDGYYGFSKNGCLPCQCNNRSASCDALTGACLNCQENSKGNHCEECKEGFYQSPDATKECLRCPCSAVTSTGSCSIKSSELEPECDQCKDGYIGPNCNKCENGYYNFDSICRKCQCHGHVDPVKTPKICKPESGECINCLHNTTGFWCENCLEGYVHDLEGNCIKKEVILPTPEGSTILVSNASLTTSVPTPVINSTFTPTTLQTIFSVSTSENSTSALADVSWTQFNIIILTVIIIVVVLLMGFVGAVYMYREYQNRKLNAPFWTIELKEDNISFSSYHDSIPNADVSGLLEDDGNEVAPNGQLTLTTPIHNYKA

SEQ ID NO: 29682 - protein, 125 aa, Homo sapiens
MPSEKTFKQRRTFEQRVEDVRLIREQHPTKIPVIIERYKGEKQLPVLDKTKFLVPDHVNMSELIKIIRRRLQLNANQAFFLLVNGHSMVSVSTPISEVYESEKDEDGFLYMVCASQETFGMKLSV

SEQ ID NO: 29683 - protein, 1140 aa, Homo sapiens
MVISLNSCLSFICLLLCHWIGTASPLNLEDPNVCSHWESYSVTVQESYPHPFDQIYYTSCTDILNWFKCTRHRVSYRTAYRHGEKTMYRRKSQCCPGFYESGEMCVPHCADKCVHGRCIAPNTCQCEPGWGGTNCSSACDGDHWGPHCTSRCQCKNGALCNPITGACHCAAGFRGWRCEDRCEQGTYGNDCHQRCQCQNGATCDHVTGECRCPPGYTGAFCEDLCPPGKHGPQCEQRCPCQNGGVCHHVTGECSCPSGWMGTVCGQPCPEGRFGKNCSQECQCHNGGTCDAATGQCHCSPGYTGERCQDECPVGTYGVLCAETCQCVNGGKCYHVSGACLCEAGFAGERCEARLCPEGLYGIKCDKRCPCHLENTHSCHPMSGECACKPGWSGLYCNETCSPGFYGEACQQICSCQNGADCDSVTGKCTCAPGFKGIDCSTPCPLGTYGINCSSRCGCKNDAVCSPVDGSCTCKAGWHGVDCSIRCPSGTWGFGCNLTCQCLNGGACNTLDGTCTCAPGWRGEKCELPCQDGTYGLNCAERCDCSHADGCHPTTGHCRCLPGWSGVHCDSVCAEGRWGPNCSLPCYCKNGASCSPDDGICECAPGFRGTTCQRICSPGFYGHRCSQTCPQCVHSSGPCHHITGLCDCLPGFTGALCNEVCPSGRFGKNCAGICTCTNNGTCNPIDRSCQCYPGWIGSDCSQPCPPAHWGPNCIHTCNCHNGAFCSAYDGECKCTPGWTGLYCTQRCPLGFYGKDCALICQCQNGADCDHISGQCTCRTGFMGRHCEQKCPSGTYGYGCRQICDCLNNSTCDHITGTCYCSPGWKGARCDQAGVIIVGNLNSLSRTSTALPADSYQIGAIAGIIILVLVVLFLLALFIIYRHKQKGKESSMPAVTYTPAMRVVNADYTISGTLPHSNGGNANSHYFTNPSYHTLTQCATSPHVNNRDRMTVTKSKNNQLFVNLKNVNPGKRGPVGDCTGTLPADWKHGGYLNELGAFGLDRSYMGKSLKDLGKNSEYNSSNCSLSSSENPYATIKDPPVLIPKSSECGYVEMKSPARRDSPYAEINNSTSANRNVYEVEPTVSVVQGVFSNNGRLSQDPYDLPKNSHIPCHYDLLPVRDSSSSPKQEDSGGSSSNSSSSSE

SEQ ID NO: 29684 - protein, 567 aa, Homo sapiens
MVISLNSCLSFICLLLCHWIGTASPLNLEDPNVCSHWESYSVTVQESYPHPFDQIYYTSCTDILNWFKCTRHRVSYRTAYRHGEKTMYRRKSQCCPGFYESGEMCVPHCADKCVHGRCIAPNTCQCEPGWGGTNCSSACDGDHWGPHCTSRCQCKNGALCNPITGACHCAAGFRGWRCEDRCEQGTYGNDCHQRCQCQNGATCDHVTGECRCPPGYTGAFCEDLCPPGKHGPQCEQRCPCQNGGVCHHVTGECSCPSGWMGTVCGQPCPEGRFGKNCSQECQCHNGGTCDAATGQCHCSPGYTGERCQDECPVGTYGVLCAETCQCVNGGKCYHVSGACLCEAGFAGERCEARLCPEGLYGIKCDKRCPCHLENTHSCHPMSGECACKPGWSGLYCNETCSPGFYGEACQQICSCQNGADCDSVTGKCTCAPGFKGIDCSTPCPLGTYGINCSSRCGCKNDAVCSPVDGSCTCKAGWHGVDCSIRCPSGTWGFGCNLTCQCLNGGACNTLDGTCTCAPGWRGEKCELPCQDGTYGLNCAERCDCSHADGCHPTTGHCRCLPGWSGLF

SEQ ID NO: 29685 - protein, 31 aa, Homo sapiens
MWRDSLCAAAGYALGAGTRLRSVLSSRKLQP

SEQ ID NO: 29686 - protein, 311 aa, Homo sapiens
MADVINVSVNLEAFSQAISAIQALRSSVSRVFDCLKDGMRNKETLEGREKAFIAHFQDNLHSVNRDLNELERLSNLVGKPSENHPLHNSGLLSLDPVQDKTPLYSQLLQAYKWSNKLQYHAGLASGLLNQQSLKRSANQMGVSAKRRPKAQPTTLVLPPQYVDDVISRIDRMFPEMSIHLSRPNGTSAMLLVTLGKVLKVIVVMRSLFIDRTIVKGYNENVYTEDGKLDIWSKSNYQVFQKVTDHATTALLHYQLPQMPDVVVRSFMTWLRSYIKLFQAPCQRCGKFLQDGLPPTWRDFRTLEAFHDTCRQ

SEQ ID NO: 29687 - protein, 275 aa, Homo sapiens
MADVINVSVNLEAFSQAISAIQALRSSVSRVFDCLKDGMRNKETLEGREKAFIAHFQDNLHSVNRDLNELERLSNLVGKPSENHPLHNSGLLSLDPVQDKTPLYSQLLQAYKWSNKLQYHAGLASGLLNQQSLKRSANQMGVSAKRRPKAQPTTLVLPPQYVDDVISRIDRMFPEMSIHLSRPNGTSAMLLLDIWSKSNYQVFQKVTDHATTALLHYQLPQMPDVVVRSFMTWLRSYIKLFQAPCQRCGKFLQDGLPPTWRDFRTLEAFHDTCRQ

SEQ ID NO: 29688 - protein, 130 aa, Homo sapiens
MADVINVSVNLEAFSQAISAIQALRSSVSRVFDCLKDGMRNKETLEGREKAFIAHFQDNLHSVNRDLNELERLSNLVGKPSENHPLHNSGLLSLDPVQDKTPLYSQLLQAYKWSNKKEQLSIPRIFHWKV

SEQ ID NO: 29689 - protein, 277 aa, Homo sapiens
MFPFYSCWRTGLLLLLLAVAVRESWQTEEKTCDLVGEKGKESEKELALVKRLKPLFNKSFESTVGQGSDTYIYIFRVCREAGNHTSGAGLVQINKSNGKETVVGRLNETHIFNGSNWIMLIYKGGDEYDNHCGKEQRRAVVMISCNRHTLADNFNPVSEERGKVQDCFYLFEMDSSLACSPEISHLSVGSILLVTFASLVAVYVVGGFLYQRLVVGAKGMEQFPHLAFWQDLGNLVADGCDFVCRSKPRNVPAAYRGVGDDQLGEESEERDDHLLPM

SEQ ID NO: 29690 - protein, 499 aa, Homo sapiens
MAHDLLFRLFPLLALGVPLQSNRLGPTSRLRYSRFLDPSNVIFLRWDFDLEAEIISFELQVRTAGWVGFGVTNRYTNVGSDLVVGGVLPNGNVYFSDQHLVEEDTLKEDGSQDAELLGLTEDAVYTTMHFSRPFRSCDPHDLDITSNTVRVLAAYGLDDTLKLYRERTFVKSIFLLQVVHPDDLDVPEDTIIHDLEITNFLIPEDDTTYACTFLPLPIVSEKHHIYKFEPKLVYHNETTVHHILVYACGNASVLPTGISDCYGADPAFSLCSQVIVGSAVGGTSYQFPDDVGVSIGTPLDPQWILEIHYSNFNNLPGVYDSSGIRVYYTSQLCKYDTDVLQLGFFTFPIHFIPPGAESFMSYGLCRTEKFEEMNGAPMPDIQVYGYLLHTHLAGRALQAVQYRNGTQLRKICKDDSYDFNLQETRDLPSRVEIKPGDELLVECHYQTLDRDSMTFGGPSTINEMCLIFLFYYPQNNISSCMGYPDIIYVAHELGEEASE

SEQ ID NO: 29691 - protein, 524 aa, Homo sapiens
MELGPEPPHRRRLLFACSPPPASQPVVKALFGASAAGGLSPVTNLTVTMDQLQGLGSDYEQPLEVKNNSNLQRMGSSESTDSGFCLDSPGPLDSKENLENPMRRIHSLPQKLLGCSPALKRSHSDSLDHDIFQLIDPDENKENEAFEFKKPVRPVSRGCLHSHGLQEGKDLFTQRQNSAPARMLSSNERDSSEPGNFIPLFTPQSPVTATLSDEDDGFVDLLDGENLKNEEETPSCMASLWTAPLVMRTTNLDNRCKLFDSPSLCSSSTRSVLKRPERSQEESPPGSTKRRKSMSGASPKESTNPEKAHETLHQSLSLASSPKGTIENILDNDPRDLIGDFSKGYLFHTVAGKHQDLKYISPEIMASVLNGKFANLIKEFVIIDCRYPYEYEGGHIKGAVNLHMEEEVEDFLLKKPIVPTDGKRVIVVFHCEFSSERGPRMCRYVRERDRLGNEYPKLHYPELYVLKGGYKEFFMKCQSYCEPPSYRPMHHEDFKEDLKKFRTKSRTWAGEKSKREMYSRLKKL

SEQ ID NO: 29692 - protein, 484 aa, Homo sapiens
MELGPEPPHRRRLLFACSPPPASQPVVKALFGASAAGGLSPVTNLTVTMDQLQGLGSDYEQPLEVKNNSNLQRMGSSESTDSGFCLDSPGPLDSKENLENPMRRIHSLPQKLLGCSPALKRSHSDSLDHDIFQLIDPDENKENLSSNERDSSEPGNFIPLFTPQSPVTATLSDEDDGFVDLLDGENLKNEEETPSCMASLWTAPLVMRTTNLDNRCKLFDSPSLCSSSTRSVLKRPERSQEESPPGSTKRRKSMSGASPKESTNPEKAHETLHQSLSLASSPKGTIENILDNDPRDLIGDFSKGYLFHTVAGKHQDLKYISPEIMASVLNGKFANLIKEFVIIDCRYPYEYEGGHIKGAVNLHMEEEVEDFLLKKPIVPTDGKRVIVVFHCEFSSERGPRMCRYVRERDRLGNEYPKLHYPELYVLKGGYKEFFMKCQSYCEPPSYRPMHHEDFKEDLKKFRTKSRTWAGEKSKREMYSRLKKL

SEQ ID NO: 29693 - protein, 343 aa, Homo sapiens
MAGNCSWEAHPGNRNKMCPGLSEAPELYSRGFLTIEQIAMLPPPAVMNYIFLLLCLCGLVGNGLVLWFFGFSIKRNPFSIYFLHLASADVGYLFSKAVFSILNTGGFLGTFADYIRSVCRVLGLCMFLTGVSLLPAVSAERCASVIFPAWYWRRRPKRLSAVVCALLWVLSLLVTCLHNYFCVFLGRGAPGAACRHMDIFLGILLFLLCCPLMVLPCLALILHVECRARRRQRSAKLNHVILAMVSVFLVSSIYLGIDWFLFWVFQIPAPFPEYVTDLCICINSSAKPIVYFLAGRDKSQRLWEPLRVVFQRALRDGAELGEAGGSTPNTVTMEMQCPPGNAS

SEQ ID NO: 29694 - protein, 837 aa, Homo sapiens
MARGERRRRAVPAEGVRTAERAARGGPGRRDGRGGGPRSTAGGVALAVVVLSLALGMSGRWVLAWYRARRAVTLHSAPPVLPADSSSPAVAPDLFWGTYRPHVYFGMKTRSPKPLLTGLMWAQQGTTPGTPKLRHTCEQGDGVGPYGWEFHDGLSFGRQHIQDGALRLTTEFVKRPGGQHGGDWSWRVTVEPQDSGTSALPLVSLFFYVVTDGKEVLLPEVGAKGQLKFISGHTSELGDFRFTLLPPTSPGDTAPKYGSYNVFWTSNPGLPLLTEMVKSRLNSWFQHRPPGAPPERYLGLPGSLKWEDRGPSGQGQGQFLIQQVTLKIPISIEFVFESGSAQAGGNQALPRLAGSLLTQALESHAEGFRERFEKTFQLKEKGLSSGEQVLGQAALSGLLGGIGYFYGQGLVLPDIGVEGSEQKVDPALFPPVPLFTAVPSRSFFPRGFLWDEGFHQLVVQRWDPSLTREALGHWLGLLNADGWIGREQILGDEARARVPPEFLVQRAVHANPPTLLLPVAHMLEVGDPDDLAFLRKALPRLHAWFSWLHQSQAGPLPLSYRWRGRDPALPTLLNPKTLPSGLDDYPRASHPSVTERHLDLRCWVALGARVLTRLAEHLGEAEVAAELGPLAASLEAAESLDELHWAPELGVFADFGNHTKAVQLKPRPPQGLVRVVGRPQPQLQYVDALGYVSLFPLLLRLLDPTSSRLGPLLDILADSRHLWSPFGLRSLAASSSFYGQRNSEHDPPYWRGAVWLNVNYLALGALHHYGHLEGPHQARAAKLHGELRANVVGNVWRQYQATGFLWEQYSDRDGRGMGCRPFHGWTSLVLLAMAEDY

SEQ ID NO: 29695 - protein, 731 aa, Homo sapiens
MKTRSPKPLLTGLMWAQQGTTPGTPKLRHTCEQGDGVGPYGWEFHDGLSFGRQHIQDGALRLTTEFVKRPGGQHGGDWSWRVTVEPQDSGTSALPLVSLFFYVVTDGKEVLLPEVGAKGQLKFISGHTSELGDFRFTLLPPTSPGDTAPKYGSYNVFWTSNPGLPLLTEMVKSRLNSWFQHRPPGAPPERYLGLPGSLKWEDRGPSGQGQGQFLIQQVTLKIPISIEFVFESGSAQAGGNQALPRLAGSLLTQALESHAEGFRERFEKTFQLKEKGLSSGEQVLGQAALSGLLGGIGYFYGQGLVLPDIGVEGSEQKVDPALFPPVPLFTAVPSRSFFPRGFLWDEGFHQLVVQRWDPSLTREALGHWLGLLNADGWIGREQILGDEARARVPPEFLVQRAVHANPPTLLLPVAHMLEVGDPDDLAFLRKALPRLHAWFSWLHQSQAGPLPLSYRWRGRDPALPTLLNPKTLPSGLDDYPRASHPSVTERHLDLRCWVALGARVLTRLAEHLGEAEVAAELGPLAASLEAAESLDELHWAPELGVFADFGNHTKAVQLKPRPPQGLVRVVGRPQPQLQYVDALGYVSLFPLLLRLLDPTSSRLGPLLDILADSRHLWSPFGLRSLAASSSFYGQRNSEHDPPYWRGAVWLNVNYLALGALHHYGHLEGPHQARAAKLHGELRANVVGNVWRQYQATGFLWEQYSDRDGRGMGCRPFHGWTSLVLLAMAEDY

SEQ ID NO: 29696 - protein, 247 aa, Homo sapiens
MASLSRPSLPSCLCSFLLLLLLQVSSSYAGQFRVIGPRHPIRALVGDEVELPCRISPGKNATGMEVGWYRPPFSRVVHLYRNGKDQDGDQAPEYRGRTELLKDAIGEGKVTLRIRNVRFSDEGGFTCFFRDHSYQEEAAMELKVEDPFYWVSPGVLVLLAVLPVLLLQITVGLIFLCLQYRLRGKLRAEIENLHRTFDPHFLRVPCWKITLFVIVPVLGPLVALIICYNWLHRRLAGQFLEELRNPF

SEQ ID NO: 29697 - protein, 208 aa, Homo sapiens
MASLSRPSLPSCLCSFLLLLLLQVSSSYAGQFRVIGPRHPIRALVGDEVELPCRISPGKNATGMEVGWYRPPFSRVVHLYRNGKDQDGDQAPEYRGRTELLKDAIGEGKVTLRIRNVRFSDEGGFTCFFRDHSYQEEAAMELKVEDPFYWVSPGVLVLLAVLPVLLLQITVGLIFLCLQYRLRGKLRAEIENLHRTFGQFLEELRNPF

SEQ ID NO: 29698 - protein, 224 aa, Homo sapiens
MASLSRPSLPSCLCSFLLLLLLQVSSSYAGQFRVIGPRHPIRALVGDEVELPCRISPGKNATGMEVGWYRPPFSRVVHLYRNGKDQDGDQAPEYRGRTELLKDAIGEGKVTLRIRNVRFSDEGGFTCFFRDHSYQEEAAMELKVEDPFYWVSPGVLVLLAVLPVLLLQITVGLIFLCLQYRLRGKLRAEIENLHRTFESFGVLGPQVKEPKKTGQFLEELRNPF

SEQ ID NO: 29699 - protein, 131 aa, Homo sapiens
MASLSRPSLPSCLCSFLLLLLLQVSSSYADPFYWVSPGVLVLLAVLPVLLLQITVGLIFLCLQYRLRGKLRAEIENLHRTFDPHFLRVPCWKITLFVIVPVLGPLVALIICYNWLHRRLAGQFLEELRNPF

SEQ ID NO: 29700 - protein, 252 aa, Homo sapiens
MASLSRPSLPSCLCSFLLLLLLQVSSSYAGQFRVIGPRHPIRALVGDEVELPCRISPGKNATGMEVGWYRPPFSRVVHLYRNGKDQDGDQAPEYRGRTELLKDAIGEGKVTLRIRNVRFSDEGGFTCFFRDHSYQEEAAMELKVEDPFYWVSPGVLVLLAVLPVLLLQITVGLIFLCLQYRLRGKLRAEIENLHRTFDPHFLRVPCWKITLFVIVPVLGPLVALIICYNWLHRRLAGQFLEELLFHLEALSG

SEQ ID NO: 29701 - protein, 213 aa, Homo sapiens
MASLSRPSLPSCLCSFLLLLLLQVSSSYAGQFRVIGPRHPIRALVGDEVELPCRISPGKNATGMEVGWYRPPFSRVVHLYRNGKDQDGDQAPEYRGRTELLKDAIGEGKVTLRIRNVRFSDEGGFTCFFRDHSYQEEAAMELKVEDPFYWVSPGVLVLLAVLPVLLLQITVGLIFLCLQYRLRGKLRAEIENLHRTFGQFLEELLFHLEALSG

SEQ ID NO: 29702 - protein, 229 aa, Homo sapiens
MASLSRPSLPSCLCSFLLLLLLQVSSSYAGQFRVIGPRHPIRALVGDEVELPCRISPGKNATGMEVGWYRPPFSRVVHLYRNGKDQDGDQAPEYRGRTELLKDAIGEGKVTLRIRNVRFSDEGGFTCFFRDHSYQEEAAMELKVEDPFYWVSPGVLVLLAVLPVLLLQITVGLIFLCLQYRLRGKLRAEIENLHRTFESFGVLGPQVKEPKKTGQFLEELLFHLEALSG

SEQ ID NO: 29703 - protein, 206 aa, Homo sapiens
MASLSRPSLPSCLCSFLLLLLLQVSSSYAGQFRVIGPRHPIRALVGDEVELPCRISPGKNATGMEVGWYRPPFSRVVHLYRNGKDQDGDQAPEYRGRTELLKDAIGEGKVTLRIRNVRFSDEGGFTCFFRDHSYQEEAAMELKVEDPFYWVSPGVLVLLAVLPVLLLQITVGLIFLCLQYRLRGKLRAEIENLHRTFLFHLEALSG

SEQ ID NO: 29704 - protein, 203 aa, Homo sapiens
MASLSRPSLPSCLCSFLLLLLLQVSSSYAGQFRVIGPRHPIRALVGDEVELPCRISPGKNATGMEVGWYRPPFSRVVHLYRNGKDQDGDQAPEYRGRTELLKDAIGEGKVTLRIRNVRFSDEGGFTCFFRDHSYQEEAAMELKVEDPFYWVSPGVLVLLAVLPVLLLQITVGLIFLCLQYRLRGKLRAEIENLHRTFGKFRHV

SEQ ID NO: 29705 - protein, 171 aa, Homo sapiens
MASLSRPSLPSCLCSFLLLLLLQVSSSYAGQFRVIGPRHPIRALVGDEVELPCRISPGKNATGMEVGWYRPPFSRVVHLYRNGKDQDGDQAPEYRGRTELLKDAIGEGKVTLRIRNVRFSDEGGFTCFFRDHSYQEEAAMELKVEVSHSVTQDWLQWHDHGSLQPPPPRLK

SEQ ID NO: 29706 - protein, 206 aa, Homo sapiens
MASLSRPSLPSCLCSFLLLLLLQVSSSYAGQFRVIGPRHPIRALVGDEVELPCRISPGKNATGMEVGWYRPPFSRVVHLYRNGKDQDGDQAPEYRGRTELLKDAIGEGKVTLRIRNVRFSDEGGFTCFFRDHSYQEEAAMELKVEDPFYWVSPGVLVLLAVLPVLLLQITVGLIFLCLQYRLRGKLRAEIENLHRTFVFHLEALSG

SEQ ID NO: 29707 - protein, 108 aa, Homo sapiens
MASLSRPSLPSCLCSFLLLLLLQVSSSYADPFYWVSPGVLVLLAVLPVLLLQITVGLIFLCLQYRLRGKLRAEIENLHRTFESFGVLGPQVKEPKKTGQFLEELRNPF

SEQ ID NO: 29708 - protein, 295 aa, Homo sapiens
MASLSRPSLPSCLCSFLLLLLLQVSSSYAGQFRVIGPRHPIRALVGDEVELPCRISPGKNATGMEVGWYRPPFSRVVHLYRNGKDQDGDQAPEYRGRTELLKDAIGEGKVTLRIRNVRFSDEGGFTCFFRDHSYQEEAAMELKVEDPFYWVSPGVLVLLAVLPVLLLQITVGLIFLCLQYRLRGKLRAEIENLHRTFDPHFLRVPCWKITLFVIVPVLGPLVALIICYNWLHRRLAGQFLEELRKFSSLCYKQRIKSQERETEATRGRGGLLRDHIPRGKEELESLGGGKTPPGR

SEQ ID NO: 29709 - protein, 525 aa, Homo sapiens
MAAVVLAATRLLRGSGSWGCSRLRFGPPAYRRFSSGGAYPNIPLSSPLPGVPKPVFATVDGQEKFETKVTTLDNGLRVASQNKFGQFCTVGILINSGSRYEAKYLSGIAHFLEKLAFSSTARFDSKDEILLTLEKHGGICDCQTSRDTTMYAVSADSKGLDTVVALLADVVLQPRLTDEEVEMTRMAVQFELEDLNLRPDPEPLLTEMIHEAAYRENTVGLHRFCPTENVAKINREVLHSYLRNYYTPDRMVLAGVGVEHEHLVDCARKYLLGVQPAWGSAEAVDIDRSVAQYTGGIAKLERDMSNVSLGPTPIPELTHIMVGLESCSFLEEDFIPFAVLNMMMGGGGSFSAGGPGKGMFSRLYLNVLNRHHWMYNATSYHHSYEDTGLLCIHASADPRQVREMVEIITKEFILMGGTVDTVELERAKTQLTSMLMMNLESRPVIFEDVGRQVLATRSRKLPHELCTLIRNVKPEDVKRVASKMLRGKPAVAALGDLTDLPTYEHIQTALSSKDGRLPRTYRLFR

SEQ ID NO: 29710 - protein, 394 aa, Homo sapiens
MKRNTLVELLTFWKNWHFRLLLDLTAKMKFCLRWKSMGVSVTARHQDEEVEMTRMAVQFELEDLNLRPDPEPLLTEMIHEAAYRENTVGLHRFCPTENVAKINREVLHSYLRNYYTPDRMVLAGVGVEHEHLVDCARKYLLGVQPAWGSAEAVDIDRSVAQYTGGIAKLERDMSNVSLGPTPIPELTHIMVGLESCSFLEEDFIPFAVLNMMMGGGGSFSAGGPGKGMFSRLYLNVLNRHHWMYNATSYHHSYEDTGLLCIHASADPRQVREMVEIITKEFILMGGTVDTVELERAKTQLTSMLMMNLESRPVIFEDVGRQVLATRSRKLPHELCTLIRNVKPEDVKRVASKMLRGKPAVAALGDLTDLPTYEHIQTALSSKDGRLPRTYRLFR

SEQ ID NO: 29711 - protein, 229 aa, Homo sapiens
MAAQPLRHRSRCATPPRGDFCGGTERAIDQASFTTSMEWDTQVVKGSSPLGPAGLGAEEPAAGPQLPSWLQPERCAVFQCAQCHAVLADSVHLAWDLSRSLGAVVFSRVTNNVVLEAPFLVGIEGSLKGSTYNLLFCGSCGIPVGFHLYSTHAALAALRGHFCLSSDKMVCYLLKTKAIVNASEMDIQNVPLSEKIAELKEKIVLTHNRLKSLMKILSEVTPDQSKPEN

SEQ ID NO: 29712 - protein, 583 aa, Homo sapiens
MTFYLFGIRSFPKLWKSPYLGLGPGHSYVSLFLADRCGIRNQQRLFSLKTMSPQNTKATNLIAKARYLRKDEGSNKQVYSVPHFFLAGAAKERSQMNSQTEDHALAPVRNTIQLPTQPLNSEEWDKLKEDLKENTGKTSFESWIISQMAGCHSSIDVAKSLLAWVAAKNNGIVSYDLLVKYLYLCVFHMQTSEVIDVFEIMKARYKTLEPRGYSLLIRGLIHSDRWREALLLLEDIKKVITPSKKNYNDCIQGALLHQDVNTAWNLYQELLGHDIVPMLETLKAFFDFGKDIKDDNYSNKLLDILSYLRNNQLYPGESFAHSIKTWFESVPGKQWKGQFTTVRKSGQCSGCGKTIESIQLSPEEYECLKGKIMRDVIDGGDQYRKTTPQELKRFENFIKSRPPFDVVIDGLNVAKMFPKVRESQLLLNVVSQLAKRNLRLLVLGRKHMLRRSSQWSRDEMEEVQKQASCFFADDISEDDPFLLYATLHSGNHCRFITRDLMRDHKACLPDAKTQRLFFKWQQGHQLAIVNRFPGSKLTFQRILSYDTVVQTTGDSWHIPYDEDLVERCSCEVPTKWLCLHQKT

SEQ ID NO: 29713 - protein, 567 aa, Homo sapiens
MTFYLFGIRSFPKLWKSPYLGLGPGHSYVSLFLADRCGIRNQQRLFSLKTMSPQNTKATNLIAKARYLRKDEGSNKQVYSVPHFFLAGAAKERSQMNSQTEDHALAPVRNTIQLPTQPLNSEEWDKLKEDLKENTGKTSFESWIISQMAGCHSSIDVAKSLLAWVAAKNNGIVSYDLLVKYLYLCVFHMQTSEVIDVFEIMKARYKTLEPRGYSLLIRGLIHSDRWREALLLLEDIKKVITPSKKNYNDCIQGALLHQDVNTAWNLYQELLGHDIVPMLETLKAFFDFGKDIKDDNYSNKLLDILSYLRNNQLYPGESFAHSIKTWFESGQCSGCGKTIESIQLSPEEYECLKGKIMRDVIDGGDQYRKTTPQELKRFENFIKSRPPFDVVIDGLNVAKMFPKVRESQLLLNVVSQLAKRNLRLLVLGRKHMLRRSSQWSRDEMEEVQKQASCFFADDISEDDPFLLYATLHSGNHCRFITRDLMRDHKACLPDAKTQRLFFKWQQGHQLAIVNRFPGSKLTFQRILSYDTVVQTTGDSWHIPYDEDLVERCSCEVPTKWLCLHQKT

SEQ ID NO: 29714 - protein, 211 aa, Homo sapiens
MRDVIDGGDQYRKTTPQELKRFENFIKSRPPFDVVIDGLNVAKMFPKVRESQLLLNVVSQLAKRNLRLLVLGRKHMLRRSSQWSRDEMEEVQKQASCFFADDISEDDPFLLYATLHSGNHCRFITRDLMRDHKACLPDAKTQRLFFKWQQGHQLAIVNRFPGSKLTFQRILSYDTVVQTTGDSWHIPYDEDLVERCSCEVPTKWLCLHQKT

SEQ ID NO: 29715 - protein, 488 aa, Homo sapiens
MNSQTEDHALAPVRNTIQLPTQPLNSEEWDKLKEDLKENTGKTSFESWIISQMAGCHSSIDVAKSLLAWVAAKNNGIVSYDLLVKYLYLCVFHMQTSEVIDVFEIMKARYKTLEPRGYSLLIRGLIHSDRWREALLLLEDIKKVITPSKKNYNDCIQGALLHQDVNTAWNLYQELLGHDIVPMLETLKAFFDFGKDIKDDNYSNKLLDILSYLRNNQLYPGESFAHSIKTWFESVPGKQWKGQFTTVRKSGQCSGCGKTIESIQLSPEEYECLKGKIMRDVIDGGDQYRKTTPQELKRFENFIKSRPPFDVVIDGLNVAKMFPKVRESQLLLNVVSQLAKRNLRLLVLGRKHMLRRSSQWSRDEMEEVQKQASCFFADDISEDDPFLLYATLHSGNHCRFITRDLMRDHKACLPDAKTQRLFFKWQQGHQLAIVNRFPGSKLTFQRILSYDTVVQTTGDSWHIPYDEDLVERCSCEVPTKWLCLHQKT

SEQ ID NO: 29716 - protein, 377 aa, Homo sapiens
MKTLPLFVCICALSACFSFSEGRERDHELRHRRHHHQSPKSHFELPHYPGLLAHQKPFIRKSYKCLHKRCRPKLPPSPNNPPKFPNPHQPPKHPDKNSSVVNPTLVATTQIPSVTFPSASTKITTLPNVTFLPQNATTISSRENVNTSSSVATLAPVNSPAPQDTTAAPPTPSATTPAPPSSSAPPETTAAPPTPSATTQAPPSSSAPPETTAAPPTPPATTPAPPSSSAPPETTAAPPTPSATTPAPLSSSAPPETTAVPPTPSATTLDPSSASAPPETTAAPPTPSATTPAPPSSPAPQETTAAPITTPNSSPTTLAPDTSETSAAPTHQTTTSVTTQTTTTKQPTSAPGQNKISRFLLYMKNLLNRIIDDMVEQ

SEQ ID NO: 29717 - protein, 406 aa, Homo sapiens
MAPARCFSARLRTVFQGVGHWALSTWAGLKPSRLLPQRASPRLLSVGRADLAKHQELPGKKLLSEKKLKRYFVDYRRVLVCGGNGGAGASCFHSEPRKEFGGPDGGDGGNGGHVILRVDQQVKSLSSVLSRYQGFSGEDGGSKNCFGRSGAVLYIRVPVGTLVKEGGRVVADLSCVGDEYIAALGGAGGKGNRFFLANNNRAPVTCTPGQPGQQRVLHLELKTVAHAGMVGFPNAGKSSLLRAISNARPAVASYPFTTLKPHVGIVHYEGHLQIAVADIPGIIRGAHQNRGLGSAFLRHIERCRFLLFVVDLSQPEPWTQVDDLKYELEMYEKGLSARPHAIVANKIDLPEAQANLSQLRDHLGQEVIVLSALTGENLEQLLLHLKVLYDAYAEAELGQGRQPLRW

SEQ ID NO: 29718 - protein, 178 aa, Homo sapiens
MVGFPNAGKSSLLRAISNARPAVASYPFTTLKPHVGIVHYEGHLQIAVADIPGIIRGAHQNRGLGSAFLRHIERCRFLLFVVDLSQPEPWTQVDDLKYELEMYEKGLSARPHAIVANKIDLPEAQANLSQLRDHLGQEVIVLSALTGENLEQLLLHLKVLYDAYAEAELGQGRQPLRW

SEQ ID NO: 29719 - protein, 604 aa, Homo sapiens
MISVKRNTWRALSLVIGDCRKKGNFEYCQDRTEKHSTMPDSPVDVKTQSRLTPPTMPPPPTTQGAPRTSSFTPTTLTNGTSHSPTALNGAPSPPNGFSNGPSSSSSSSLANQQLPPACGARQLSKLKRFLTTLQQFGNDISPEIGERVRTLVLGLVNSTLTIEEFHSKLQEATNFPLRPFVIPFLKANLPLLQRELLHCARLAKQNPAQYLAQHEQLLLDASTTSPVDSSELLLDVNENGKRRTPDRTKENGFDREPLHSEHPSKRPCTISPGQRYSPNNGLSYQPNGLPHPTPPPPQHYRLDDMAIAHHYRDSYRHPSHRDLRDRNRPMGLHGTRQEEMIDHRLTDREWAEEWKHLDHLLNCIMDMVEKTRRSLTVLRRCQEADREELNYWIRRYSDAEDLKKGGGSSSSHSRQQSPVNPDPVALDAHREFLHRPASGYVPEEIWKKAEEAVNEVKRQAMTELQKAVSEAERKAHDMITTERAKMERTVAEAKRQAAEDALAVINQQEDSSESCWNCGRKASETCSGCNTARYCGSFCQHKDWEKHHHICGQTLQAQQQGDTPAVSSSVTPNSGAGSPMDTPPAATPRSTTPGTPSTIETTPR

SEQ ID NO: 29720 - protein, 577 aa, Homo sapiens
MPDRTEKHSTMPDSPVDVKTQSRLTPPTMPPPPTTQGAPRTSSFTPTTLTNGTSHSPTALNGAPSPPNGFSNGPSSSSSSSLANQQLPPACGARQLSKLKRFLTTLQQFGNDISPEIGERVRTLVLGLVNSTLTIEEFHSKLQEATNFPLRPFVIPFLKANLPLLQRELLHCARLAKQNPAQYLAQHEQLLLDASTTSPVDSSELLLDVNENGKRRTPDRTKENGFDREPLHSEHPSKRPCTISPGQRYSPNNGLSYQPNGLPHPTPPPPQHYRLDDMAIAHHYRDSYRHPSHRDLRDRNRPMGLHGTRQEEMIDHRLTDREWAEEWKHLDHLLNCIMDMVEKTRRSLTVLRRCQEADREELNYWIRRYSDAEDLKKGGGSSSSHSRQQSPVNPDPVALDAHREFLHRPASGYVPEEIWKKAEEAVNEVKRQAMTELQKAVSEAERKAHDMITTERAKMERTVAEAKRQAAEDALAVINQQEDSSESCWNCGRKASETCSGCNTARYCGSFCQHKDWEKHHHICGQTLQAQQQGDTPAVSSSVTPNSGAGSPMDTPPAATPRSTTPGTPSTIETTPR

SEQ ID NO: 29721 - protein, 615 aa, Homo sapiens
MCHPDKAFTSDKLQCVFNEYKAAVWVPPRPRPLSRAPLPEDRTEKHSTMPDSPVDVKTQSRLTPPTMPPPPTTQGAPRTSSFTPTTLTNGTSHSPTALNGAPSPPNGFSNGPSSSSSSSLANQQLPPACGARQLSKLKRFLTTLQQFGNDISPEIGERVRTLVLGLVNSTLTIEEFHSKLQEATNFPLRPFVIPFLKANLPLLQRELLHCARLAKQNPAQYLAQHEQLLLDASTTSPVDSSELLLDVNENGKRRTPDRTKENGFDREPLHSEHPSKRPCTISPGQRYSPNNGLSYQPNGLPHPTPPPPQHYRLDDMAIAHHYRDSYRHPSHRDLRDRNRPMGLHGTRQEEMIDHRLTDREWAEEWKHLDHLLNCIMDMVEKTRRSLTVLRRCQEADREELNYWIRRYSDAEDLKKGGGSSSSHSRQQSPVNPDPVALDAHREFLHRPASGYVPEEIWKKAEEAVNEVKRQAMTELQKAVSEAERKAHDMITTERAKMERTVAEAKRQAAEDALAVINQQEDSSESCWNCGRKASETCSGCNTARYCGSFCQHKDWEKHHHICGQTLQAQQQGDTPAVSSSVTPNSGAGSPMDTPPAATPRSTTPGTPSTIETTPR

SEQ ID NO: 29722 - protein, 567 aa, Homo sapiens
MPDSPVDVKTQSRLTPPTMPPPPTTQGAPRTSSFTPTTLTNGTSHSPTALNGAPSPPNGFSNGPSSSSSSSLANQQLPPACGARQLSKLKRFLTTLQQFGNDISPEIGERVRTLVLGLVNSTLTIEEFHSKLQEATNFPLRPFVIPFLKANLPLLQRELLHCARLAKQNPAQYLAQHEQLLLDASTTSPVDSSELLLDVNENGKRRTPDRTKENGFDREPLHSEHPSKRPCTISPGQRYSPNNGLSYQPNGLPHPTPPPPQHYRLDDMAIAHHYRDSYRHPSHRDLRDRNRPMGLHGTRQEEMIDHRLTDREWAEEWKHLDHLLNCIMDMVEKTRRSLTVLRRCQEADREELNYWIRRYSDAEDLKKGGGSSSSHSRQQSPVNPDPVALDAHREFLHRPASGYVPEEIWKKAEEAVNEVKRQAMTELQKAVSEAERKAHDMITTERAKMERTVAEAKRQAAEDALAVINQQEDSSESCWNCGRKASETCSGCNTARYCGSFCQHKDWEKHHHICGQTLQAQQQGDTPAVSSSVTPNSGAGSPMDTPPAATPRSTTPGTPSTIETTPR

SEQ ID NO: 29723 - protein, 427 aa, Homo sapiens
MISVKRNTWRALSLVIGDCRKKGNFEYCQDRTEKHSTMPDSPVDVKTQSRLTPPTMPPPPTTQGAPRTSSFTPTTLTNGTSHSPTALNGAPSPPNGFSNGPSSSSSSSLANQQLPPACGARQLSKLKRFLTTLQQFGNDISPEIGERVRTLVLGLVNSTLTIEEFHSKLQEATNFPLRPFVIPFLKANLPLLQRELLHCARLAKQNPAQYLAQHEQLLLDASTTSPVDSSELLLDVNENGKRRTPDRTKENGFDREPLHSEHPSKRPCTISPGQRYSPNNGLSYQPNGLPHPTPPPPQHYRLDDMAIAHHYRDSYRHPSHRDLRDRNRPMGLHGTRQEEMIDHRLTDREWAEEWKHLDHLLNCIMDMVEKTRRSLTVLRRCQEADREELNYWIRRYSDAEDLKKGGGSSSSHSRQQSPVNPDPVALG

SEQ ID NO: 29724 - protein, 400 aa, Homo sapiens
MPDRTEKHSTMPDSPVDVKTQSRLTPPTMPPPPTTQGAPRTSSFTPTTLTNGTSHSPTALNGAPSPPNGFSNGPSSSSSSSLANQQLPPACGARQLSKLKRFLTTLQQFGNDISPEIGERVRTLVLGLVNSTLTIEEFHSKLQEATNFPLRPFVIPFLKANLPLLQRELLHCARLAKQNPAQYLAQHEQLLLDASTTSPVDSSELLLDVNENGKRRTPDRTKENGFDREPLHSEHPSKRPCTISPGQRYSPNNGLSYQPNGLPHPTPPPPQHYRLDDMAIAHHYRDSYRHPSHRDLRDRNRPMGLHGTRQEEMIDHRLTDREWAEEWKHLDHLLNCIMDMVEKTRRSLTVLRRCQEADREELNYWIRRYSDAEDLKKGGGSSSSHSRQQSPVNPDPVALG

SEQ ID NO: 29725 - protein, 213 aa, Homo sapiens
MEIVILPTETTINIQKMEQENTAQGSEKPSVQSVKPWSDQEIRSFLQEWEFLEREVYRVKKKYHIVSKAIAQRLKQRGINKSWKECLQMLISLQDLYFTIQEANQRPRCQPLPCPYGEALHRILGYRWKISVFSGPPCADVVNLAPPEHPPQAYGVPIVFQEPMWAPTPVIYVENPQVPGWEPWNMNGHVPYMYPALPPAAPGPLTQWAISTD

SEQ ID NO: 29726 - protein, 328 aa, Homo sapiens
MEANGSQGTSGSANDSQHDPGKMFIGGLSWQTSPDSLRDYFSKFGEIRECMVMRDPTTKRSRGFGFVTFADPASVDKVLGQPHHELDSKTIDPKVAFPRRAQPKMVTRTKKIFVGGLSANTVVEDVKQYFEQFGKVEDAMLMFDKTTNRHRGFGFVTFENEDVVEKVCEIHFHEINNKMVECKKAQPKEVMFPPGTRGRARGLPYTMDAFMLGMGMLGYPNFVATYGRGYPGFAPSYGYQFPGFPAAAYGPVAAAAVAAARGSGSNPARPGGFPGANSPGPVADLYGPASQDSGVGNYISAASPQPGSGFGHGIAGPLIATAFTNGYH

SEQ ID NO: 29727 - protein, 251 aa, Homo sapiens
MADLTSVLTSVMFSPSSKMFIGGLSWQTSPDSLRDYFSKFGEIRECMVMRDPTTKRSRGFGFVTFADPASVDKVLGQPHHELDSKTIDPKVAFPRRAQPKMVTRTKKIFVGGLSANTVVEDVKQYFEQFGKVEDAMLMFDKTTNRHRGFGFVTFENEDVVEKVCEIHFHEINNKMVECKKAQPKEVMFPPGTRGRARGLPYTMDAFMLGMGMLGYPNFVATYGRGYPGFAPSYGYQFPDYLPVSQDIIFIN

SEQ ID NO: 29728 - protein, 151 aa, Homo sapiens
MVTRTKKIFVGGLSANTVVEDVKQYFEQFGKVEDAMLMFDKTTNRHRGFGFVTFENEDVVEKVCEIHFHEINNKMVECKKAQPKEVMFPPGTRGRARGLPYTMDAFMLGMGMLGYPNFVATYGRGYPGFAPSYGYQFPDYLPVSQDIIFIN

SEQ ID NO: 29729 - protein, 82 aa, Homo sapiens
MSQAGAQEAPIKKKRPPVKDEDLKGARGNLTKNQEIKSKTYQVMRECEQAGSAAPSVFSRTRTGTETVFEKPKAGPTKSVFG

SEQ ID NO: 29730 - protein, 934 aa, Homo sapiens [sequence omitted]

SEQ ID NO: 29731 - protein, 868 aa, Homo sapiens
MGPAGAKNLQSVVLSKMNFESFVKDLLLVRQYRVEVYKNRAGNKASKENDWYLAYKASPGNLSQFEDILFGNNDMSASIGVVGVKMSAVDGQRQVGVGYVDSIQRKLGLCEFPDNDQFSNLEALLIQIGPKECVLPGGETAGDMGKLRQIIQRGGILITERKKADFSTKDIYQDLNRLLKGKKGEQMNSAVLPEMENQVAVSSLSAVIKFLELLSDDSNFGQFELTTFDFSQYMKLDIAAVRALNLFQGSVEDTTGSQSLAALLNKCKTPQGQRLVNQWIKQPLMDKNRIEERLNLVEAFVEDAELRQTLQEDLLRRFPDLNRLAKKFQRQAANLQDCYRLYQGINQLPNVIQALEKHEGKHQKLLLAVFVTPLTDLRSDFSKFQEMIETTLDMDQVENHEFLVKPSFDPNLSELREIMNDLEKKMQSTLISAARDLGLDPGKQIKLDSSAQFGYYFRVTCKEEKVLRNNKNFSTVDIQKNGVKFTNSKLTSLNEEYTKNKTEYEEAQDAIVKEIVNISSGYVEPMQTLNDVLAQLDAVVSFAHVSNGAPVPYVRPAILEKGQGRIILKASRHACVEVQDEIAFIPNDVYFEKDKQMFHIITGPNMGGKSTYIRQTGVIVLMAQIGCFVPCESAEVSIVDCILARVGAGDSQLKGVSTFMAEMLETASILRSATKDSLIIIDELGRGTSTYDGFGLAWAISEYIATKIGAFCMFATHFHELTALANQIPTVNNLHVTALTTEETLTMLYQVKKGVCDQSFGIHVAELANFPKHVIECAKQKALELEEFQYIGESQGYDIMEPAAKKCYLEREQGEKIIQEFLSKVKQMPFTEMSEENITIKLKQLKAEVIAKNNSFVNEIISRIKVTT

SEQ ID NO: 29732 - protein, 198 aa, Homo sapiens
MRAPAQVRTLRWSLGWPGSRGRDVFAALRCAQALRCQPLGSALPPQAPTRDLGRPQAFDSSRTPGPRPPRSTLRMMETKSPTSPSYGARGKVPPGAGPGSPLSRGAGQGAPLSETRFHHVAQAFLKLLSSSNPPTSASESARIIGVSHCTQPQVASLSDRHCSKVNHTVLSPRKGVPLQLTAAHSSSQEVLATVPFHG

SEQ ID NO: 29733 - protein, 235 aa, Homo sapiens
MRTQVYEGLCKNYFSLAVLQRDRIKLLFFDILVFLSVFLLFLLFLVDIMANNTTSLGSPWPENFWEDLIMSFTVSMAIGLVLGGFIWAVFICLSRRRRASAPISQWSSSRRSRSSYTHGLNRTGFYRHSGCERRSNLSLASLTFQRQASLEQANSFPRKSSFRASTFHPFLQCPPLPVETESQLVTLPSSNISPTISTSHSLSRPDYWSSNSLRVGLSTPPPPAYESIIKAFPDS

SEQ ID NO: 29734 - protein, 1530 aa, Homo sapiens
MKEASGVGGGHSPMCPPHCHMPPGPAGEWPGATVQQPRQRAPTALLQPDAAGPGGGGVSAGVAVLGACPSASEGVLPRPPGRSAPQPPEYPGRPDMAVPGWSAMVRSRLTATSTSQATDHTFLQKSHYHHGDHPSYAKPRLPLPVFTVRHYAGTVTYQVHKFLNRNRDQLDPAVVEMLGQSQLQLVGSLFQEAEPQSRGGRGRPTLASRFQQALEDLIARLGRSHVYFIQCLTPNPGKLPGLFDVGHVTEQLHQAAILEAVGTRSANFPVRVPFEAFLASFQALGSEGQEDLSDREKCGAVLSQVLGAESPLYHLGATKVLLQEQGWQRLEELRDQQRSQALVDLHRSFHTCISRQRVLPRMQARMRGFQARKRYLRRRAALGQLNTILLVAQPLLQRRQRLQLGRWQGWHSSERALERVPSMELGRLEIPAELAVMLKTAESHRDALAGSITECLPPEVPARPSLTLPADIDLFPFSSFVAIGFQEPSLPRPGQPLAKPLTQLDGDNPQRALDINKVMLRLLGDGSLESWQRQIMGAYLVRQGQCRPGLRNELFSQLVAQLWQNPDEQQSQRGWALMAVLLSAFPPLPVLQKPLLKFVSDQAPRGMAALCQHKLLGALEQSQLASGATRAHPPTQLEWLAGWRRGRMALDVFTFSEECYSAEVESWTTGEQLAGWILQSRGLEAPPRGWSVSLHSRDAWQDLAGCDFVLDLISQTEDLGDPARPRSYPITPLGSAEAIPLAPGIQAPSLPPGPPPGPAPTLPSRDHTGEVQRSGSLDGFLDQIFQPVISSGLSDLEQSWALSSRMKGGGAIGPTQQGYPMVYPGMIQMPAYQPGMVPAPMPMMPAMGTVPAMPAMVVPPQPPLPSLDAGQLAVQQQNFIQQQALILAQQMTAQAMSLSLEQQMQQRQQQARASEAASQASPSAVTSKPRKPPTPPEKPQRDLGSEGGCLRETSEEAEDRPYQPKSFQQKRNYFQRMGQPQITVRTMKPPAKVHIPQGEAQEEEEEEEEEEEQEEQEVETRAVPSPPPPPIVKKPLKQGGAKAPKEAEAEPAKETAAKGHGQGPAQGRGTVVRSSDSKPKRPQPSREIGNIIRMYQSRPGPVPVPVQPSRPPKAFLRKIDPKDEALAKLGINGAHSSPPMLSPSPGKGPPPAVAPRPKAPLQLGPSSSIKEKQGPLLDLFGQKLPIAHTPPPPPAPPLPLPEDPGTLSAERRCLTQPVEDQGVSTQLLAPSGSVCFSYTGTPWKLFLRKEVFYPRENFSHPYYLRLLCEQILRDTFSESCIRISQNERRKMKDLLGGLEVDLDSLTTTEDSVKKRIVVAARDNWANYFSRFFPVSGESGSDVQLLAVSHRGLRLLKVTQGPGLRPDQLKILCSYSFAEVLGVECRGGSTLELSLKSEQLVLHTARARAIEALVELFLNELKKDSGYVIALRSYITDNCSLLSFHRGDLIKLLPVATLEPGWQFGSAGGRSGLFPADIVQPAAAPDFSFSKEQRSGWHKGQLSNGEPGLARWDRASEVRKMGEGQAEARPA

SEQ ID NO: 29735 - protein, 938 aa, Homo sapiens
MTLLGSEHSLLIRSKFRSVLQLRLQQRRTQEQLANQGIIPPLKRPAEFHEQRKHLDSDKAKNSLKRKARNRCNSADLVNMHILQASTAERSIPTAQMKLKRARLADDLNEKIALRPGPLELVEKNILPVDSAVKEAIKGNQVSFSKSTDAFAFEEDSSSDGLSPDQTRSEDPQNSAGSPPDAKASDTPSTGSLGTNQDLASGSENDRNDSASQPSHQSDAGKQGLGPPSTPIAVHAAVKSKSLGDSKNRHKKPKDPKPKVKKLKYHQYIPPDQKAEKSPPPMDSAYARLLQQQQLFLQLQILSQQQQQQQHRFSYLGMHQAQLKEPNEQMVRNPNSSSTPLSNTPLSPVKNSFSGQTGVSSFKPGPLPPNLDDLKVSELRQQLRIRGLPVSGTKTALMDRLRPFQDCSGNPVPNFGDITTVTFPVTPNTLPNYQSSSSTSALSNGFYHFGSTSSSPPISPASSDLSVAGSLPDTFNDASPSFGLHPSPVHVCTEESLMSSLNGGSVPSELDGLDSEKDKMLVEKQKVINELTWKLQQEQRQVEELRMQLQKQKRNNCSEKKPLPFLAASIKQEEAVSSCPFASQVPVKRQSSSSECHPPACEAAQLQPLGNAHCVESSDQTNVLSSTFLSPQCSPQHSPLGAVKSPQHISLPPSPNNPHFLPSSSGAQGEGHRVSSPISSQVCTAQMAGLHSSDKVGPKFSIPSPTFSKSSSAISEVTQPPSYEDAVKQQMTRSQQMDELLDVLIESGEMPADAREDHSCLQKVPKIPRSSRSPTAVLTKPSASFEQASSGSQIPFDPYATDSDEHLEVLLNSQSPLGKMSDVTLLKIGSEEPHFDGIMDGFSGKAAEDLFNAHEILPGPLSPMQTQFSPSSVDSNGLQLSFTESPWETMEWLDLTPPNSTPGFSALTTSSPSIFNIDFLDVTDLNLNSSMDLHLQQW

SEQ ID NO: 29736 - protein, 684 aa, Homo sapiens
MKLKRARLADDLNEKIALRPGPLELVEKNILPVDSAVKEAIKGNQVSFSKSTDAFAFEEDSSSDGLSPDQTRSEDPQNSAGSPPDAKASDTPSTGSLGTNQDLASGSENDRNDSASQPSHQSDAGKQGLGPPSTPIAVHAAVKSKSLGDSKNRHKKPKDPKPKVKKLKYHQYIPPDQKAEKSPPPMDSAYARLLQQQQLFLQLQILSQQQQQQQHRFSYLGMHQAQLKEPNEQMVRNPNSSSTPLSNTPLSPVKNSFSGQTGVSSFKPGPLPPNLDDLKVSELRQQLRIRGLPVSGTKTALMDRLRPFQDCSGNPVPNFGDITTVTFPVTPNTLPNYQSSSSTSALSNGFYHFGSTSSSPPISPASSDLSVAGSLPDTFNDASPSFGLHPSPVHVCTEESLMSSLNGGSVPSELDGLDSEKDKMLVEKQKVINELTWKLQQEQRQVEELRMQLQKQKRNNCSEKKPLPFLAASIKQEEAVSSCPFASQVPVKRQSSSSECHPPACEAAQLQPLGNAHCVESSDQTNVLSSTFLSPQCSPQHSPLGAVKSPQHISLPPSPNNPHFLPSSSGAQGEGHRVSSPISSQVCTAQNSGAHDGHPPSFSPHSSSLHPPFSGAQADSSHGAGGNPCPKSPCVQQKMAGLHSSDKVGPKFSIPSPTFSKSSSAISEVTQPPSYEDAVKQVTM

SEQ ID NO: 29737 - protein, 986 aa, Homo sapiens
MTLLGSEHSLLIRSKFRSVLQLRLQQRRTQEQLANQGIIPPLKRPAEFHEQRKHLDSDKAKNSLKRKARNRCNSADLVNMHILQASTAERSIPTAQMKLKRARLADDLNEKIALRPGPLELVEKNILPVDSAVKEAIKGNQVSFSKSTDAFAFEEDSSSDGLSPDQTRSEDPQNSAGSPPDAKASDTPSTGSLGTNQDLASGSENDRNDSASQPSHQSDAGKQGLGPPSTPIAVHAAVKSKSLGDSKNRHKKPKDPKPKVKKLKYHQYIPPDQKAEKSPPPMDSAYARLLQQQQLFLQLQILSQQQQQQQHRFSYLGMHQAQLKEPNEQMVRNPNSSSTPLSNTPLSPVKNSFSGQTGVSSFKPGPLPPNLDDLKVSELRQQLRIRGLPVSGTKTALMDRLRPFQDCSGNPVPNFGDITTVTFPVTPNTLPNYQSSSSTSALSNGFYHFGSTSSSPPISPASSDLSVAGSLPDTFNDASPSFGLHPSPVHVCTEESLMSSLNGGSVPSELDGLDSEKDKMLVEKQKVINELTWKLQQEQRQVEELRMQLQKQKRNNCSEKKPLPFLAASIKQEEAVSSCPFASQVPVKRQSSSSECHPPACEAAQLQPLGNAHCVESSDQTNVLSSTFLSPQCSPQHSPLGAVKSPQHISLPPSPNNPHFLPSSSGAQGEGHRVSSPISSQVCTAQNSGAHDGHPPSFSPHSSSLHPPFSGAQADSSHGAGGNPCPKSPCVQQKMAGLHSSDKVGPKFSIPSPTFSKSSSAISEVTQPPSYEDAVKQQMTRSQQMDELLDVLIESGEMPADAREDHSCLQKVPKIPRSSRSPTAVLTKPSASFEQASSGSQIPFDPYATDSDEHLEVLLNSQSPLGKMSDVTLLKIGSEEPHFDGIMDGFSGKAAEDLFNAHEILPGPLSPMQTQFSPSSVDSNGLQLSFTESPWETMEWLDLTPPNSTPGFSALTTSSPSIFNIDFLDVTDLNLNSSMDLHLQQW

SEQ ID NO: 29738 - protein, 1321 aa, Homo sapiens
MGAPFVWALGLLMLQMLLFVAGEQGTQDITDASERGLHMQKLGSGSVQAALAELVALPCLFTLQPRPSAARDAPRIKWTKVRTASGQRQDLPILVAKDNVVRVAKSWQGRVSLPSYPRRRANATLLLGPLRASDSGLYRCQVVRGIEDEQDLVPLEVTGVVFHYRSARDRYALTFAEAQEACRLSSAIIAAPRHLQAAFEDGFDNCDAGWLSDRTVRYPITQSRPGCYGDRSSLPGVRSYGRRNPQELYDVYCFARELGGEVFYVGPARRLTLAGARAQCRRQGAALASVGQLHLAWHEGLDQCDPGWLADGSVRYPIQTPRRRCGGPAPGVRTVYRFANRTGFPSPAERFDAYCFRAHHPTSQHGDLETPSSGDEGEILSAEGPPVRELEPTLEEEEVVTPDFQEPLVSSGEEETLILEEKQESQQTLSPTPGDPMLASWPTGEVWLSTVAPSPSDMGAGTAASSHTEVAPTDPMPRRRGRFKGLNGRYFQQQEPEPGLQGGMEASAQPPTSEAAVNQMEPPLAMAVTEMLGSGQSRSPWADLTNEVDMPGAGSAGGKSSPEPWLWPPTMVPPSISGHSRAPVLELEKAEGPSARPATPDLFWSPLEATVSAPSPAPWEAFPVATSPDLPMMAMLRGPKEWMLPHPTPISTEANRVEAHGEATATAPPSPAAETKVYSLPLSLTPTGQGGEAMPTTPESPRADFRETGETSPAQVNKAEHSSSSPWPSVNRNVAVGFVPTETATEPTGLRGIPGSESGVFDTAESPTSGLQATVDEVQDPWPSVYSKGLDASSPSAPLGSPGVFLVPKVTPNLEPWVATDEGPTVNPMDSTVTPAPSDASGIWEPGSQVFEEAESTTLSPQVALDTSIVTPLTTLEQGDKVGVPAMSTLGSSSSQPHPEPEDQVETQGTSGASVPPHQSSPLGKPAVPPGTPTAASVGESASVSSGEPTVPWDPSSTLLPVTLGIEDFELEVLAGSPGVESFWEEVASGEEPALPGTPMNAGAEEVHSDPCENNPCLHGGTCNANGTMYGCSCDQGFAGENCEIDIDDCLCSPCENGGTCIDEVNGFVCLCLPSYGGSFCEKDTEGCDRGWHKFQGHCYRYFAHRRAWEDAEKDCRRRSGHLTSVHSPEEHSFINSFGHENTWIGLNDRIVERDFQWTDNTGLQFENWRENQPDNFFAGGEDCVVMVAHESGRWNDVPCNYNLPYVCKKGTVLCGPPPAVENASLIGARKAKYNVHATVRYQCNEGFAQHHVATIRCRSNGKWDRPQIVCTKPRRSHRMRRHHHHHQHHHQHHHHKSRKERRKHKKHPTEDWEKDEGNFC

SEQ ID NO: 29739 - protein, 734 aa, Homo sapiens
MRPAVLGSPDRAPPEDEGPVMVKLEDSEEEGEAALWDPGPEAARLRFRCFRYEEATGPQEALAQLRELCRQWLRPEVRSKEQMLELLVLEQFLGALPPEIQARVQGQRPGSPEEAAALVDGLRREPGGPRRWVTVQVQGQEVLSEKMEPSSFQPLPETEPPTPEPGPKTPPRTMQESPLGLQVKEESEVTEDSDFLESGPLAATQESVPTLLPEEAQRCGTVLDQIFPHSKTGPEGPSWREHPRALWHEEAGGIFSPGFALQLGSISAGPGSVSPHLHVPWDLGMAGLSGQIQSPSREGGFAHALLLPSDLRSEQDPTDEDPCRGVGPALITTRWRSPRGRSRGRPSTGGGVVRGGRCDVCGKVFSQRSNLLRHQKIHTGERPFVCSECGRSFSRSSHLLRHQLTHTEERPFVCGDCGQGFVRSARLEEHRRVHTGEQPFRCAECGQSFRQRSNLLQHQRIHGDPPGPGAKPPAPPGAPEPPGPFPCSECRESFARRAVLLEHQAVHTGDKSFGCVECGERFGRRSVLLQHRRVHSGERPFACAECGQSFRQRSNLTQHRRIHTGERPFACAECGKAFRQRPTLTQHLRVHTGEKPFACPECGQRFSQRLKLTRHQRTHTGEKPYHCGECGLGFTQVSRLTEHQRIHTGERPFACPECGQSFRQHANLTQHRRIHTGERPYACPECGKAFRQRPTLTQHLRTHRREKPFACQDCGRRFHQSTKLIQHQRVHSAE

SEQ ID NO: 29740 - protein, 485 aa, Homo sapiens
MNGPLVYAGFALQLGSISAGPGSVSPHLHVPWDLGMAGLSGQIQSPSREGGFAHALLLPSDLRSEQDPTDEDPCRGVGPALITTRWRSPRGRSRGRPSTGGGVVRGGRCDVCGKVFSQRSNLLRHQKIHTGERPFVCSECGRSFSRSSHLLRHQLTHTEERPFVCGDCGQGFVRSARLEEHRRVHTGEQPFRCAECGQSFRQRSNLLQHQRIHGDPPGPGAKPPAPPGAPEPPGPFPCSECRESFARRAVLLEHQAVHTGDKSFGCVECGERFGRRSVLLQHRRVHSGERPFACAECGQSFRQRSNLTQHRRIHTGERPFACAECGKAFRQRPTLTQHLRVHTGEKPFACPECGQRFSQRLKLTRHQRTHTGEKPYHCGECGLGFTQVSRLTEHQRIHTGERPFACPECGQSFRQHANLTQHRRIHTGERPYACPECGKAFRQRPTLTQHLRTHRREKPFACQDCGRRFHQSTKLIQHQRVHSAE

SEQ ID NO: 29741 - protein, 290 aa, Homo sapiens
MRPAVLGSPDRAPPEDEGPVMVKLEDSEEEGEAALWDPGPEAARLRFRCFRYEEATGPQEALAQLRELCRQWLRPEVRSKEQMLELLVLEQFLGALPPEIQARVQGQRPGSPEEAAALVDGLRREPGGPRRWVTVQVQGQEVLSEKMEPSSFQPLPETEPPTPEPGPKTPPRTMQESPLGLQVKEESEVTEDSDFLESGPLAATQESVPTLLPEEAQRCGTVLDQIFPHSKTGPEGPSWREHPRALWHEEAGGIFSPGAGAGAAPALGAGWLGAAVAMYVARCSANAATC

SEQ ID NO: 29742 - protein, 2078 aa, Homo sapiens
MPGEATETVPATEQELPQPQAETAVLPMSSALSVTAALGQPGPTLPPPCSPAPQQCPLSAANQASPFPSPSTIASTPLEVPFPQSSSGTALPLGTAPEAPTFLPNLIGPPISPAALALASPMIAPTLKGTPSSSAPLALVALAPHSVQKSSAFPPNLLTSPPSVAVAESGSVITLSAPIAPSEPKTNLNKVPSEVVPNPKGTPSPPCIVSTVPYHCVTPMASIQSGVASLPQTTPTTTLAIASPQVKDTTISSVLISPQNPGSLSLKGPVSPPAALSLSTQSLPVVTSSQKTAGPNTPPDFPISLGSHLAPLHQSSFGSVQLLGQTGPSALSDPTVKTISVDHSSTGASYPSQRSVIPPLPSRNEVVPATVAAFPVVAPSVDKGPSTISSITCSPSGSLNVATSFSLSPTTSLILKSSPNATYHYPLVAQMPVSSVGTTPLVVTNPCTIAAAPTTTFEVATCVSPPMSSGPISNIEPTSPAALVMAPVAPKEPSTQVATTLRIPVSPPLPDPEDLKNLPSSVLVKFPTQKDLQTVPASLEGAPFSPAQAGLTTKKDPTVLPLVQAAPKNSPSFQSTSSSPEIPLSPEATLAKKSLGEPLPIGKPASSMTSPLGVNSSASVIKTDSYAGPDSAGPLLKSSLITPTVAAFPLESADPAGVAPTTAKGTSTYTTTASPFLEGTVSLAPKNHPVKEGTLTTLPLVPTASENCPVAPSPQNTCAPLATLVLAPEIPKSVPSPSLPPAGTPPGTKKVDGISHTSALAPVASSPKECPTEDSGASATASSKGTLTYLADSPSPLGVSVSPQTKRPPTKKGSAGPDTPIGNLSSPVSPVEASFLPENSLSFQGSKDSPATTHSPTPPSPKGAPTPSAVTPLSPKGVTLPPKETPTPSVVNLPFPKEGPATPAPKQAPALSMTSSSPKKARATPAPKGIPASPSPKGAPTPPAATPPSPKGGPATPSPKWAPTPPAATPPSPKGGPATPSPKGAPTPPAATPPSPKGGPATPSPKGAPTPPAVTPPSPKGSPAATPFPKGASTPPAATPPSPKGSPAATPLPKGAPTTPAATLPSPKGGPATPSLKGAPTPPAATPPSPKGGPATPSPKGAPMPPAATPPSPKGGLATPPHKGAPTTPAATPPSPKGGLATPPPKGAPTTPAATPPSPKGGLATPPPKGAPTTPAATPPSPKGGLATPSPKGAPTTPAATPPSPKGGLATPSPKGAPTTPAATPPSPKGGLATPSPKGAPTTPAATPPSPKGGPATPPPKGAPTPPAATPPSLKGGLATPPHKGAPNPAVVTPPSPKGGPATSPPKGAPTPPAATPPSPKGSPGTPPPKGAPTPPAVTPPSPKGTPTLPATTPSSKGGPTTPSSKEGPTPPAATPSHKGGPAMTPPSPKRGPAIPSPKGDPTSPAVIPLSPKKAPATPVTREGAATPSKGDLTPPAVTPVSLKKAPATSAPKGGPATPSSKGDPTLPAVTPPSPKEPPAPKQVATSSSPKKAPATPAPMGAPTLPAVIPSSPKEVPATPSSRRDPIAPTATLLSKKTPATLAPKEALIPPAMTVPSPKKTPAIPTPKEAPATPSSKEASSPPAVTPSTYKGAPSPKELLIPPAVTSPSPKEAPTPPAVTPPSPEKGPATPAPKGTPTSPPVTPSSLKDSPTSPASVTCKMGATVPQASKGLPAKKGPTALKEVLVAPAPESTPIITAPTRKGPQTKKSSATSPPICPDPSAKNGSKGPLSTVAPAPLLPVQKDSSKTAKGKDASHSPKGPLAPPESKASTPLTAAAFEKVLPKPESASVSAAPSPPVSLPLAPSPVPTLPPKQQFLPSSPGLVLESPSKPLAPADEDELLPLIPPEPISGGVPFQSVLVNMPTPKSAGIPVPTPSAKQPVTKNNKGSGTESDSDESVPELEEQDSTQATTQQAQLAAAAEIDEEPVSKAKQSRSEKKARKAMSKLGLRQVTGVTRVTIRKSKNILFVITKPDVYKSPASDTYIVFGEAKIEDLSQQAQLAAAEKFKVQGEAVSNIQENTQTPTVQEESEEEEVDETGVEVKDIELVMSQANVSRAKAVRALKNNSNDIVNAIMELTM

SEQ ID NO: 29743 - protein, 925 aa, Homo sapiens
MPGEATETVPATEQELPQPQAETAVLPMSSALSVTAALGQPGPTLPPPCSPAPQQCPLSAANQASPFPSPSTIASTPLEVPFPQSSSGTALPLGTAPEAPTFLPNLIGPPISPAALALASPMIAPTLKGTPSSSAPLALVALAPHSVQKSSAFPPNLLTSPPSVAVAESGSVITLSAPIAPSEPKTNLNKVPSEVVPNPKGTPSPPCIVSTVPYHCVTPMASIQSGVASLPQTTPTTTLAIASPQVKDTTISSVLISPQNPGSLSLKGPVSPPAALSLSTQSLPVVTSSQKTAGPNTPPDFPISLGSHLAPLHQSSFGSVQLLGQTGPSALSDPTVKTISVDHSSTGASYPSQRSVIPPLPSRNEVVPATVAAFPVVAPSVDKGPSTISSITCSPSGSLNVATSFSLSPTTSLILKSSPNATYHYPLVAQMPVSSVGTTPLVVTNPCTIAAAPTTTFEVATCVSPPMSSGPISNIEPTSPAALVMAPVAPKEPSTQVATTLRIPVSPPLPDPEDLKNLPSSVLVKFPTQKDLQTVPASLEGAPFSPAQAGLTTKKDPTVLPLVQAAPKNSPSFQSTSSSPEIPLSPEATLAKKSLGEPLPIVAAFPLESADPAGVAPTTAKAAAFEKVLPKPESASVSAAPSPPVSLPLAPSPVPTLPPKQQFLPSSPGLVLESPSKPLAPADEDELLPLIPPEPISGGVPFQSVLVNMPTPKSAGIPVPTPSAKQPVTKNNKGSGTESDSDESVPELEEQDSTQATTQQAQLAAAAEIDEEPVSKAKQSRSEKKARKAMSKLGLRQVTGVTRVTIRKSKNILFVITKPDVYKSPASDTYIVFGEAKIEDLSQQAQLAAAEKFKVQGEAVSNIQENTQTPTVQEESEEEEVDETGVEVKDIELVMSQANVSRAKAVRALKNNSNDIVNAIMELTM

SEQ ID NO: 29744 - protein, 610 aa, Homo sapiens
MQQEAAQRESEELQHVQWRPRAVSGWGVPQLLWYLVFLQPIITEVHLRRRNVQFLFIRFSAWQYAGTDKLWAGLVTTLCEGIRRHYGALPFSVYSVLGNKPATRQDCCQSEWHCRRRVCLGLLALLAALGLGVGLLYLSLGGHALGHGSPSGSLLKVFGGAATTLSGSGLLMAVYSVGKHLFVSQRKKIERLVSREKFGSQLGFMCEVKKEVELLTDFLCFLEIYQRRRLRVVLEVTGLDTCYPERVVGVLNAINTLLSDSHAPFIFILVVDPSILAACLESAGNMKGTADNGYLFLNRTVTLPFSVPIMGRRTKLQFLHDAVQSRDDLLYREMTRKPWLPGDAGGESAQLLAVQAQAGTERGQGRIDDEAARRIQEALFCLHDERDCLYEYVPDNVVSMRRIVNTVPITVRLLQQQQQQGDFGGPTPRQAVAWVVLANQWPCRLSWALQCLEDRQQTGGAPEGRARLWDVFRDNSRELHTMTKALQNVLDLDGDPELFERFLGADFPFTVAEAQSLLRCTVNLDHSIRRRMGLIRAVSALKPPSPPKSPTRDTPHAAHRANSASRAPPSGRASGQAGEGHHTGDLAHRGKLWPVACALFRPGQSSPGGP

SEQ ID NO: 29745 - protein, 503 aa, Homo sapiens
MEEHGVTQTEHMATIEAHAVAQQVQQVHVATYTEHSMLSADEDSPSSPEDTSYDDSDILNSTAADEVTAHLAAAGPVGMAAAAAVATGKKRKRPHVFESNPSIRKRQQTRLLRKLRATLDEYTTRVGQQAIVLCISPSKPNPVFKVFGAAPLENVVRKYKSMILEDLESALAEHAPAPQEVNSELPPLTIDGIPVSVDKMTQAQLRAFIPEMLKYSTGRGKPGWGKESCKPIWWPEDIPWANVRSDVRTEEQKQRVSWTQALRTIVKNCYKQHGREDLLYAFEDQQTQTQATATHSIAHLVPSQTVVQTFSNPDGTVSLIQVGTGATVATLADASELPTTVTVAQVNYSAVADGEVEQNWATLQGGEMTIQTTQASEATQAVASLAEAAVAASQEMQQGATVTMALNSEAAAHAVATLAEATLQGGGQIVLSGETAAAVGALTGVQDANGLVQIPVSMYQTVVTSLAQGNGPVQVAMAPVTTRISDSAVTMDGQAVEVVTLEQ

SEQ ID NO: 29746 - protein, 437 aa, Homo sapiens
MEEHGVTQTEHMATIEAHAVAQQVQQVHVATYTEHSMLSADEDSPSSPEDTSYDDSDILNSTAADEVTAHLAAAGPVGMAAAAAVATGKKRKRPHVFESNPSIRKRQQTRLLRKLRATLDEYTTRVGQQAIVLCISPSKPNPVFKVFGAAPLENVVRKYKSMILEDLESALAEHAPAPQEVNSELPPLTIDGIPVSVDKMTQAQLRAFIPEMLKYSTGRGKPGWGKESCKPIWWPEDIPWANVRSDVRTEEQKQRVGTGATVATLADASELPTTVTVAQVNYSAVADGEVEQNWATLQGGEMTIQTTQASEATQAVASLAEAAVAASQEMQQGATVTMALNSEAAAHAVATLAEATLQGGGQIVLSGETAAAVGALTGVQDANGLVQIPVSMYQTVVTSLAQGNGPVQVAMAPVTTRISDSAVTMDGQAVEVVTLEQ

SEQ ID NO: 29747 - protein, 342 aa, Homo sapiens
MILEDLESALAEHAPAPQEVNSELPPLTIDGIPVSVDKMTQAQLRAFIPEMLKYSTGRGKPGWGKESCKPIWWPEDIPWANVRSDVRTEEQKQRVSWTQALRTIVKNCYKQHGREDLLYAFEDQQTQTQATATHSIAHLVPSQTVVQTFSNPDGTVSLIQVGTGATVATLADASELPTTVTVAQVNYSAVADGEVEQNWATLQGGEMTIQTTQASEATQAVASLAEAAVAASQEMQQGATVTMALNSEAAAHAVATLAEATLQGGGQIVLSGETAAAVGALTGVQDANGLVQIPVSMYQTVVTSLAQGNGPVQVAMAPVTTRISDSAVTMDGQAVEVVTLEQ

SEQ ID NO: 29748 - protein, 522 aa, Homo sapiens
MEEHGVTQTEHMATIEAHAVAQQVQQVHVATYTEHSMLSADEDSPSSPEDTSYDDSDILNSTAADEVTAHLAAAGPVGMAAAAAVATGKKRKRPHVFESNPSIRKRQQTRLLRKLRATLDEYTTRVGQQAIVLCISPSKPNPVFKVFGAAPLENVVRKYKSMILEDLESALAEHAPAPQEVNSELPPLTIDGIPVSVDKMTQAQLRAFIPEMLKYSTGRGKPGWGKESCKPIWWPEDIPWANVRSDVRTEEQKQRVSWTQALRTIVKNCYKQHGREDLLYAFEDQQTQTQATATHSIAHLVPSQTVVQTFSNPDGTVSLIQVGTGATVATLADASELPTTVTVAQVNYSAVADGEVEQNWATLQGGEMTIQTTQASEATQAVASLAEAAVAASQEMQQGATVTMALNSEAAAHAVATLAEATLQGGGQIVLSGETAAAVGALTGVQDANGLFMADRAGRKWILTDKATGLVQIPVSMYQTVVTSLAQGNGPVQVAMAPVTTRISDSAVTMDGQAVEVVTLEQ

SEQ ID NO: 29749 - protein, 1749 aa, Homo sapiens
MAAAAGGPCVRSSRELWTILLGRSALRELSQIEAELNKHWRRLLEGLSYYKPPSPSSAEKVKANKDVASPLKELGLRISKFLGLDEEQSVQLLQCYLQEDYRGTRDSVKTVLQDERQSQALILKIADYYYEERTCILRCVLHLLTYFQDERHPYRVEYADCVDKLEKELVSKYRQQFEELYKTEAPTWETHGNLMTERQVSRWFVQCLREQSMLLEIIFLYYAYFEMAPSDLLVLTKMFKEQGFGSRQTNRHLVDETMDPFVDRIGYFSALILVEGMDIESLHKCALDDRRELHQFAQDGLICQDMDCLMLTFGDIPHHAPVLLAWALLRHTLNPEETSSVVRKIGGTAIQLNVFQYLTRLLQSLASGGNDCTTSTACMCVYGLLSFVLTSLELHTLGNQQDIIDTACEVLADPSLPELFWGTEPTSGLGIILDSVCGMFPHLLSPLLQLLRALVSGKSTAKKVYSFLDKMSFYNELYKHKPHDVISHEDGTLWRRQTPKLLYPLGGQTNLRIPQGTVGQVMLDDRAYLVRWEYSYSSWTLFTCEIEMLLHVVSTADVIQHCQRVKPIIDLVHKVISTDLSIADCLLPITSRIYMLLQRLTTVISPPVDVIASCVNCLTVLAARNPAKVWTDLRHTGFLPFVAHPVSSLSQMISAEGMNAGGYGNLLMNSEQPQGEYGVTIAFLRLITTLVKGQLGSTQSQGLVPCVMFVLKEMLPSYHKWRYNSHGVREQIGCLILELIHAILNLCHETDLHSSHTPSLQFLCICSLAYTEAGQTVINIMGIGVDTIDMVMAAQPRSDGAEGQGQGQLLIKTVKLAFSVTNNVIRLKPPSNVVSPLEQALSQHGAHGNNLIAVLAKYIYHKHDPALPRLAIQLLKRLATVAPMSVYACLGNDAAAIRDAFLTRLQSKIEDMRIKVMILEFLTVAVETQPGLIELFLNLEVKDGSDGSKEFSLGMWSCLHAVLELIDSQQQDRYWCPPLLHRAAIAFLHALWQDRRDSAMLVLRTKPKFWENLTSPLFGTLSPPSETSEPSILETCALIMKIICLEIYYVVKGSLDQSLKDTLKKFSIEKRFAYWSGYVKSLAVHVAETEGSSCTSLLEYQMLVSAWRMLLIIATTHADIMHLTDSVVRRQLFLDVLDGTKALLLVPASVNCLRLGSMKCTLLLILLRQWKRELGSVDEILGPLTEILEGVLQADQQLMEKTKAKVFSAFITVLQMKEMKVSDIPQYSQLVLNVCETLQEEVIALFDQTRHSLALGSATEDKDSMETDDCSRSRHRDQRDGVCVLGLHLAKELCEVDEDGDSWLQVTRRLPILPTLLTTLEVSLRMKQNLHFTEATLHLLLTLARTQQGATAVAGAGITQSICLPLLSVYQLSTNGTAQTPSASRKSLDAPSWPGVYRLSMSLMEQLLKTLRYNFLPEALDFVGVHQERTLQCLNAVRTVQSLACLEEADHTVGFILQLSNFMKEWHFHLPQLMRDIQVNLGYLCQACTSLLHSRKMLQHYLQNKNGDGLPSAVAQRVQRPPSAASAAPSSSKQPAADTEASEQQALHTVQYGLLKILSKTLAALRHFTPDVCQILLDQSLDLAEYNFLFALSFTTPTFDSEVAPSFGTLLATVNVALNMLGELDKKKEPLTQAVGLSTQAEGTRTLKSLLMFTMENCFYLLISQAMRYLRDPAVHPRDKQRMKQELSSELSTLLSSLSRYFRRGAPSSPATGVLPSPQGKSTSLSKASPESQEPLIQLVQAFVRHMQR

SEQ ID NO: 29750 - protein, 1638 aa, Homo sapiens
MAAAAGGPCVRSSRELWTILLGRSALRELSQIEAELNKHWRRLLEGLSYYKPPSPSSAEKVKANKDVASPLKELGLRISKFLGLDEEQSVQLLQCYLQEDYRGTRDSVKTVLQDEMAPSDLLVLTKMFKEQGFGSRQTNRHLVDETMDPFVDRIGYFSALILVEGMDIESLHKCALDDRRELHQFAQDGLICQDMDCLMLTFGDIPHHAPVLLAWALLRHTLNPEETSSVVRKIGGTAIQLNVFQYLTRLLQSLASGGNDCTTSTACMCVYGLLSFVLTSLELHTLGNQQDIIDTACEVLADPSLPELFWGTEPTSGLGIILDSVCGMFPHLLSPLLQLLRALVSGKSTAKKVYSFLDKMSFYNELYKHKPHDVISHEDGTLWRRQTPKLLYPLGGQTNLRIPQGTVGQVMLDDRAYLVRWEYSYSSWTLFTCEIEMLLHVVSTADVIQHCQRVKPIIDLVHKVISTDLSIADCLLPITSRIYMLLQRLTTVISPPVDVIASCVNCLTVLAARNPAKVWTDLRHTGFLPFVAHPVSSLSQMISAEGMNAGGYGNLLMNSEQPQGEYGVTIAFLRLITTLVKGQLGSTQSQGLVPCVMFVLKEMLPSYHKWRYNSHGVREQIGCLILELIHAILNLCHETDLHSSHTPSLQFLCICSLAYTEAGQTVINIMGIGVDTIDMVMAAQPRSDGAEGQGQGQLLIKTVKLAFSVTNNVIRLKPPSNVVSPLEQALSQHGAHGNNLIAVLAKYIYHKHDPALPRLAIQLLKRLATVAPMSVYACLGNDAAAIRDAFLTRLQSKIEDMRIKVMILEFLTVAVETQPGLIELFLNLEVKDGSDGSKEFSLGMWSCLHAVLELIDSQQQDRYWCPPLLHRAAIAFLHALWQDRRDSAMLVLRTKPKFWENLTSPLFGTLSPPSETSEPSILETCALIMKIICLEIYYVVKGSLDQSLKDTLKKFSIEKRFAYWSGYVKSLAVHVAETEGSSCTSLLEYQMLVSAWRMLLIIATTHADIMHLTDSVVRRQLFLDVLDGTKALLLVPASVNCLRLGSMKCTLLLILLRQWKRELGSVDEILGPLTEILEGVLQADQQLMEKTKAKVFSAFITVLQMKEMKVSDIPQYSQLVLNVCETLQEEVIALFDQTRHSLALGSATEDKDSMETDDCSRSRHRDQRDGVCVLGLHLAKELCEVDEDGDSWLQVTRRLPILPTLLTTLEVSLRMKQNLHFTEATLHLLLTLARTQQGATAVAGAGITQSICLPLLSVYQLSTNGTAQTPSASRKSLDAPSWPGVYRLSMSLMEQLLKTLRYNFLPEALDFVGVHQERTLQCLNAVRTVQSLACLEEADHTVGFILQLSNFMKEWHFHLPQLMRDIQVNLGYLCQACTSLLHSRKMLQHYLQNKNGDGLPSAVAQRVQRPPSAASAAPSSSKQPAADTEASEQQALHTVQYGLLKILSKTLAALRHFTPDVCQILLDQSLDLAEYNFLFALSFTTPTFDSEVAPSFGTLLATVNVALNMLGELDKKKEPLTQAVGLSTQAEGTRTLKSLLMFTMENCFYLLISQAMRYLRDPAVHPRDKQRMKQELSSELSTLLSSLSRYFRRGAPSSPATGVLPSPQGKSTSLSKASPESQEPLIQLVQAFVRHMQR

SEQ ID NO: 29751 - protein, 174 aa, Homo sapiens
MMYALFLLSVGLVMGFVGFSSKPSPIYGGLVLIVSGVVGCVIILNFGGGYMGLMVFLIYLGGMMVVFGYTTAMAIEEYPEAWGSGVEVLVSVLVGLAMEVGLVLWVKEYDGVVVVVNFNSVGSWMIYEGEGSGLIREDPIGAGALYDYGRWLVVVTGWTLFVGVYIVIEIARGN

SEQ ID NO: 29752 - protein, 454 aa, Homo sapiens
MSSGAPQKSSPMASGAEETPGFLDTLLQDFPALLNPEDPLPWKAPGTVLSQEEVEGELAELAMGFLGSRKAPPPLAAALAHEAVSQLLQTDLSEFRKLPREEEEEEEDDDEEEKAPVTLLDAQSLAQSFFNRLWEVAGQWQKQVPLAARASQRQWLVSIHAIRNTRRKMEDRHVSLPSFNQLFGLSDPVNRAYFAVFDGHGGVDAARYAAVHVHTNAARQPELPTDPEGALREAFRRTDQMFLRKAKRERLQSGTTGVCALIAGATLHVAWLGDSQVILVQQGQVVKLMEPHRPERQDEKARIEALGGFVSHMDCWRVNGTLAVSRAIGDVFQKPYVSGEADAASRALTGSEDYLLLACDGFFDVVPHQEVVGLVQSHLTRQQGSGLRVAEELVAAARERGSHDNITVMVVFLRDPQELLEGGNQGEGDPQAEGRRQDLPSSLPEPETQAPPRS

SEQ ID NO: 29753 - protein, 350 aa, Homo sapiens
MGLCPSTRETAPPAVLDAQSLAQSFFNRLWEVAGQWQKQVPLAARASQRQWLVSIHAIRNTRRKMEDRHVSLPSFNQLFGLSDPVNRAYFAVFDGHGGVDAARYAAVHVHTNAARQPELPTDPEGALREAFRRTDQMFLRKAKRERLQSGTTGVCALIAGATLHVAWLGDSQVILVQQGQVVKLMEPHRPERQDEKARIEALGGFVSHMDCWRVNGTLAVSRAIGDVFQKPYVSGEADAASRALTGSEDYLLLACDGFFDVVPHQEVVGLVQSHLTRQQGSGLRVAEELVAAARERGSHDNITVMVVFLRDPQELLEGGNQGEGDPQAEGRRQDLPSSLPEPETQAPPRS

SEQ ID NO: 29754 - protein, 201 aa, Homo sapiens
MARSVRVLVDMDGVLADFEAGLLRGFRRRFPEEPHVPLEQRRGFLAREQYRALRPDLADKVASVYEAPGFFLDLEPIPGALDAVREMNDLPDTQVFICTSPLLKYHHCVGEKYRWVEQHLGPQFVERIILTRDKTVVLGDLLIDDKDTVRGQEETPSWEHILFTCCHNRHLVLPPTRRRLLSWSDNWREILDSKRGAAQRE

SEQ ID NO: 29755 - protein, 117 aa, Homo sapiens
MARSVRVLVDMDGVLADFEAGLLRGFRRRFPEEPHVPLEQRRGFLAREQYRALRPDLADKVASVYEAPGFFLDLEPIPGALDAVREMNDLPDPLLKYHHCVGEKVWLPRPYSARGAA

SEQ ID NO: 29756 - protein, 472 aa, Homo sapiens
MYQRMLRCGAELGSPGGGGGGGGGGGAGGRLALLWIVPLTLSGLLGVAWGASSLGAHHIHHFHGSSKHHSVPIAIYRSPASLRGGHAGTTYIFSKGGGQITYKWPPNDRPSTRADRLAIGFSTVQKEAVLVRVDSSSGLGDYLELHIHQGKIGVKFNVGTDDIAIEESNAIINDGKYHVVRFTRSGGNATLQVDSWPVIERYPAGNNDNERLAIARQRIPYRLGRVVDEWLLDKGRQLTIFNSQATIIIGGKEQGQPFQGQLSGLYYNGLKVLNMAAENDANIAIVGNVRLVGEVPSSMTTESTATAMQSEMSTSIMETTTTLATSTARRGKPPTKEPISQTTDDILVASAECPSDDEDIDPCEPSSGGLANPTRAGGREPYPGSAEVIRESSSTTGMVVGIVAAAALCILILLYAMYKYRNRDEGSYHVDESRNYISNSAQSNGAVVKEKQPSSAKSSNKNKKNKDKEYYV

SEQ ID NO: 29757 - protein, 442 aa, Homo sapiens
MYQRMLRCGAELGSPGGGGGGGGGGGAGGRLALLWIVPLTLSGLLGVAWGASSLGAHHIHHFHGSSKHHSVPIAIYRSPASLRGGHAGTTYIFSKGGGQITYKWPPNDRPSTRADRLAIGFSTVQKEAVLVRVDSSSGLGDYLELHIHQGKIGVKFNVGTDDIAIEESNAIINDGKYHVVRFTRSGGNATLQVDSWPVIERYPAGRQLTIFNSQATIIIGGKEQGQPFQGQLSGLYYNGLKVLNMAAENDANIAIVGNVRLVGEVPSSMTTESTATAMQSEMSTSIMETTTTLATSTARRGKPPTKEPISQTTDDILVASAECPSDDEDIDPCEPSSGGLANPTRAGGREPYPGSAEVIRESSSTTGMVVGIVAAAALCILILLYAMYKYRNRDEGSYHVDESRNYISNSAQSNGAVVKEKQPSSAKSSNKNKKNKDKEYYV

SEQ ID NO: 29758 - protein, 1477 aa, Homo sapiens
MGTALLQRGGCFLLCLSLLLLGCWAELGSGLEFPGAEGQWTRFPKWNACCESEMSFQLKTRSARGLVLYFDDEGFCDFLELILTRGGRLQLSFSIFCAEPATLLADTPVNDGAWHSVRIRRQFRNTTLFIDQVEAKWVEVKSKRRDMTVFSGLFVGGLPPELRAAALKLTLASVREREPFKGWIRDVRVNSSQVLPVDSGEVKLDDEPPNSGGGSPCEAGEEGEGGVCLNGGVCSVVDDQAVCDCSRTGFRGKDCSQEDNNVEGLAHLMMGDQGKSKGKEEYIATFKGSEYFCYDLSQNPIQSSSDEITLSFKTLQRNGLMLHTGKSADYVNLALKNGAVSLVINLGSGAFEALVEPVNGKFNDNAWHDVKVTRNLRQHSGIGHAMVTISVDGILTTTGYTQEDYTMLGSDDFFYVGGSPSTADLPGSPVSNNFMGCLKEVVYKNNDVRLELSRLAKQGDPKMKIHGVVAFKCENVATLDPITFETPESFISLPKWNAKKTGSISFDFRTTEPNGLILFSHGKPRHQKDAKHPQMIKVDFFAIEMLDGHLYLLLDMGSGTIKIKALLKKVNDGEWYHVDFQRDGRSGTISVNTLRTPYTAPGESEILDLDDELYLGGLPENKAGLVFPTEVWTALLNYGYVGCIRDLFIDGQSKDIRQMAEVQSTAGVKPSCSKETAKPCLSNPCKNNGMCRDGWNRYVCDCSGTGYLGRSCEREATVLSYDGSMFMKIQLPVVMHTEAEDVSLRFRSQRAYGILMATTSRDSADTLRLELDAGRVKLTVNLDCIRINCNSSKGPETLFAGYNLNDNEWHTVRVVRRGKSLKLTVDDQQAMTGQMAGDHTRLEFHNIETGIITERRYLSSVPSNFIGHLQSLTFNGMAYIDLCKNGDIDYCELNARFGFRNIIADPVTFKTKSSYVALATLQAYTSMHLFFQFKTTSLDGLILYNSGDGNDFIVVELVKGYLHYVFDLGNGANLIKGSSNKPLNDNQWHNVMISRDTSNLHTVKIDTKITTQITAGARNLDLKSDLYIGGVAKETYKSLPKLVHAKEGFQGCLASVDLNGRLPDLISDALFCNGQIERGCEGPSTTCQEDSCSNQGVCLQQWDGFSCDCSMTSFSGPLCNDPGTTYIFSKGGGQITYKWPPNDRPSTRADRLAIGFSTVQKEAVLVRVDSSSGLGDYLELHIHQGKIGVKFNVGTDDIAIEESNAIINDGKYHVVRFTRSGGNATLQVDSWPVIERYPAGRQLTIFNSQATIIIGGKEQGQPFQGQLSGLYYNGLKVLNMAAENDANIAIVGNVRLVGEVPSSMTTESTATAMQSEMSTSIMETTTTLATSTARRGKPPTKEPISQTTDDILVASAECPSDDEDIDPCEPSSGGLANPTRAGGREPYPGSAEVIRESSSTTGMVVGIVAAAALCILILLYAMYKYRNRDEGSYHVDESRNYISNSAQSNGAVVKEKQPSSAKSSNKNKKNKDKEYYV

SEQ ID NO: 29759 - protein, 1496 aa, Homo sapiens
MGTALLQRGGCFLLCLSLLLLGCWAELGSGLEFPGAEGQWTRFPKWNACCESEMSFQLKTRSARGLVLYFDDEGFCDFLELILTRGGRLQLSFSIFCAEPATLLADTPVNDGAWHSVRIRRQFRNTTLFIDQVEAKWVEVKSKRRDMTVFSGLFVGGLPPELRAAALKLTLASVREREPFKGWIRDVRVNSSQVLPVDSGEVKLDDEPPNSGGGSPCEAGEEGEGGVCLNGGVCSVVDDQAVCDCSRTGFRGKDCSQEDNNVEGLAHLMMGDQGKSKGKEEYIATFKGSEYFCYDLSQNPIQSSSDEITLSFKTLQRNGLMLHTGKSADYVNLALKNGAVSLVINLGSGAFEALVEPVNGKFNDNAWHDVKVTRNLRQVTISVDGILTTTGYTQEDYTMLGSDDFFYVGGSPSTADLPGSPVSNNFMGCLKEVVYKNNDVRLELSRLAKQGDPKMKIHGVVAFKCENVATLDPITFETPESFISLPKWNAKKTGSISFDFRTTEPNGLILFSHGKPRHQKDAKHPQMIKVDFFAIEMLDGHLYLLLDMGSGTIKIKALLKKVNDGEWYHVDFQRDGRSGTISVNTLRTPYTAPGESEILDLDDELYLGGLPENKAGLVFPTEVWTALLNYGYVGCIRDLFIDGQSKDIRQMAEVQSTAGVKPSCSKETAKPCLSNPCKNNGMCRDGWNRYVCDCSGTGYLGRSCEREATVLSYDGSMFMKIQLPVVMHTEAEDVSLRFRSQRAYGILMATTSRDSADTLRLELDAGRVKLTVNLDCIRINCNSSKGPETLFAGYNLNDNEWHTVRVVRRGKSLKLTVDDQQAMTGQMAGDHTRLEFHNIETGIITERRYLSSVPSNFIGHLQSLTFNGMAYIDLCKNGDIDYCELNARFGFRNIIADPVTFKTKSSYVALATLQAYTSMHLFFQFKTTSLDGLILYNSGDGNDFIVVELVKGYLHYVFDLGNGANLIKGSSNKPLNDNQWHNVMISRDTSNLHTVKIDTKITTQITAGARNLDLKSDLYIGGVAKETYKSLPKLVHAKEGFQGCLASVDLNGRLPDLISDALFCNGQIERGCEGPSTTCQEDSCSNQGVCLQQWDGFSCDCSMTSFSGPLCNDPGTTYIFSKGGGQITYKWPPNDRPSTRADRLAIGFSTVQKEAVLVRVDSSSGLGDYLELHIHQGKIGVKFNVGTDDIAIEESNAIINDGKYHVVRFTRSGGNATLQVDSWPVIERYPAGNNDNERLAIARQRIPYRLGRVVDEWLLDKGRQLTIFNSQATIIIGGKEQGQPFQGQLSGLYYNGLKVLNMAAENDANIAIVGNVRLVGEVPSSMTTESTATAMQSEMSTSIMETTTTLATSTARRGKPPTKEPISQTTDDILVASAECPSDDEDIDPCEPSSANPTRAGGREPYPGSAEVIRESSSTTGMVVGIVAAAALCILILLYAMYKYRNRDEGSYHVDESRNYISNSAQSNGAVVKEKQPSSAKSSNKNKKNKDKEYYV

SEQ ID NO: 29760 - protein, 1547 aa, Homo sapiens
MGTALLQRGGCFLLCLSLLLLGCWAELGSGLEFPGAEGQWTRFPKWNACCESEMSFQLKTRSARGLVLYFDDEGFCDFLELILTRGGRLQLSFSIFCAEPATLLADTPVNDGAWHSVRIRRQFRNTTLFIDQVEAKWVEVKSKRRDMTVFSGLFVGGLPPELRAAALKLTLASVREREPFKGWIRDVRVNSSQVLPVDSGEVKLDDEPPNSGGGSPCEAGEEGEGGVCLNGGVCSVVDDQAVCDCSRTGFRGKDCSQEIKFGLQCVLPVLLHDNDQGKYCCINTAKPLTEKDNNVEGLAHLMMGDQGKSKGKEEYIATFKGSEYFCYDLSQNPIQSSSDEITLSFKTLQRNGLMLHTGKSADYVNLALKNGAVSLVINLGSGAFEALVEPVNGKFNDNAWHDVKVTRNLRQHSGIGHAMVNKLHCSVTISVDGILTTTGYTQEDYTMLGSDDFFYVGGSPSTADLPGSPVSNNFMGCLKEVVYKNNDVRLELSRLAKQGDPKMKIHGVVAFKCENVATLDPITFETPESFISLPKWNAKKTGSISFDFRTTEPNGLILFSHGKPRHQKDAKHPQMIKVDFFAIEMLDGHLYLLLDMGSGTIKIKALLKKVNDGEWYHVDFQRDGRSGTISVNTLRTPYTAPGESEILDLDDELYLGGLPENKAGLVFPTEVWTALLNYGYVGCIRDLFIDGQSKDIRQMAEVQSTAGVKPSCSKETAKPCLSNPCKNNGMCRDGWNRYVCDCSGTGYLGRSCEREATVLSYDGSMFMKIQLPVVMHTEAEDVSLRFRSQRAYGILMATTSRDSADTLRLELDAGRVKLTVNLDCIRINCNSSKGPETLFAGYNLNDNEWHTVRVVRRGKSLKLTVDDQQAMTGQMAGDHTRLEFHNIETGIITERRYLSSVPSNFIGHLQSLTFNGMAYIDLCKNGDIDYCELNARFGFRNIIADPVTFKTKSSYVALATLQAYTSMHLFFQFKTTSLDGLILYNSGDGNDFIVVELVKGYLHYVFDLGNGANLIKGSSNKPLNDNQWHNVMISRDTSNLHTVKIDTKITTQITAGARNLDLKSDLYIGGVAKETYKSLPKLVHAKEGFQGCLASVDLNGRLPDLISDALFCNGQIERGCEGPSTTCQEDSCSNQGVCLQQWDGFSCDCSMTSFSGPLCNDPGTTYIFSKGGGQITYKWPPNDRPSTRADRLAIGFSTVQKEAVLVRVDSSSGLGDYLELHIHQGKIGVKFNVGTDDIAIEESNAIINDGKYHVVRFTRSGGNATLQVDSWPVIERYPAGNNDNERLAIARQRIPYRLGRVVDEWLLDKGRQLTIFNSQATIIIGGKEQGQPFQGQLSGLYYNGLKVLNMAAENDANIAIVGNVRLVGEVPSSMTTESTATAMQSEMSTSIMETTTTLATSTARRGKPPTKEPISQTTDDILVASAECPSDDEDIDPCEPSSGGLANPTRAGGREPYPGSAEVIRESSSTTGMVVGIVAAAALCILILLYAMYKYRNRDEGSYHVDESRNYISNSAQSNGAVVKEKQPSSAKSSNKNKKNKDKEYYV

SEQ ID NO: 29761 - protein, 139 aa, Homo sapiens
MDMRWHCENSQTTDDILVASAECPSDDEDIDPCEPSSANPTRAGGREPYPGSAEVIRESSSTTGMVVGIVAAAALCILILLYAMYKYRNRDEGSYHVDESRNYISNSAQSNGAVVKEKQPSSAKSSNKNKKNKDKEYYV

SEQ ID NO: 29762 - protein, 294 aa, Homo sapiens
MEDSMDMDMSPLRPQNYLFGCELKADKDYHFKVDNDENEHQLSLRTVSLGAGAKDELHIVEAEAMNYEGSPIKVTLATLKMSVQPTVSLGGFEITPPVVLRLKCGSGPVHISGQHLVAVEEDAESEDEEEEDVKLLSISGKRSAPGGGSKVPQKKVKLAADEDDDDDDEEDDDEDDDDDDFDDEEAEEKAPVKKSIRDTPAKNAQKSNQNGKDSKPSSTPRSKGQESFKKQEKTPKTPKGPSSVEDIKAKMQASIEKGGSLPKVEAKFINYVKNCFRMTDQEAIQDLWQWRKSL

SEQ ID NO: 29763 - protein, 265 aa, Homo sapiens
MEDSMDMDMSPLRPQNYLFGCELKADKDYHFKVDNDENEHQLSLRTVSLGAGAKDELHIVEAEAMNYEGSPIKVTLATLKMSVQPTVSLGGFEITPPVVLRLKCGSGPVHISGQHLVAVEEDAESEDEEEEDVKLLSISGKRSAPGGGSKVPQKKVKLAADEDDDDDDEEDDDEDDDDDDFDDEEAEEKAPVKKGQESFKKQEKTPKTPKGPSSVEDIKAKMQASIEKGGSLPKVEAKFINYVKNCFRMTDQEAIQDLWQWRKSL

SEQ ID NO: 29764 - protein, 259 aa, Homo sapiens
MEDSMDMDMSPLRPQNYLFGCELKADKDYHFKVDNDENEHQLSLRTVSLGAGAKDELHIVEAEAMNYEGSPIKVTLATLKMSVQPTVSLGGFEITPPVVLRLKCGSGPVHISGQHLVAVEEDAESEDEEEEDVKLLSISGKRSAPGGGSKVPQKKVKLAADEDDDDDDEEDDDEDDDDDDFDDEEAEEKAPVKKSIRDTPAKNAQKSNQNGKDSKPSSTPRSKGQESFKKQEKTPKTPKGPSSVEDIKAKMQASIEKAH

SEQ ID NO: 29765 - protein, 565 aa, Homo sapiens
MDFLLALVLVSSLYLQAAAEFDGRWPRQIVSSIGLCRYGGRIDCCWGWARQSWGQCQPVCQPRCKHGECIGPNKCKCHPGYAGKTCNQDLNECGLKPRPCKHRCMNTYGSYKCYCLNGYMLMPDGSCSSALTCSMANCQYGCDVVKGQIRCQCPSPGLQLAPDGRTCVDVDECATGRASCPRFRQCVNTFGSYICKCHKGFDLMYIGGKYQCHDIDECSLGQYQCSSFARCYNIRGSYKCKCKEGYQGDGLTCVYIPKVMIEPSGPIHVPKGNGTILKGDTGNNNWIPDVGSTWWPPKTPYIPPIITNRPTSKPTTRPTPKPTPIPTPPPPPPLPTELRTPLPPTTPERPTTGLTTIAPAASTPPGGITVDNRVQTDPQKPRGDVFIPRQPSNDLFEIFEIERGVSADDEAKDDPGVLVHSCNFDHGLCGWIREKDNDLHWEPIRDPAGGQYLTVSAAKAPGGKAARLVLPLGRLMHSGDLCLSFRHKVTGLHSGTLQVFVRKHGAHGAALWGRNGGHGWRQTQITLRGADIKSVVFKGEKRRGHTGEIGLDDVSLKKGHCSEER

SEQ ID NO: 29766 - protein, 509 aa, Homo sapiens
MDFLLALVLVSSLYLQAAAEFDGRWPRQIVSSIGLCRYGGRIDCCWGWARQSWGQCQPVCQPRCKHGECIGPNKCKCHPGYAGKTCNQDLNECGLKPRPCKHRCMNTYGSYKCYCLNGYMLMPDGSCSSALTCSMANCQYGCDVVKGQIRCQCPSPGLQLAPDGRTCVDVDECATGRASCPRFRQCVNTFGSYICKCHKGFDLMYIGGKYQCHDIDECSLGQYQCSSFARCYNIRGSYKCKCKEGYQGDGLTCVYIPKVMIEPSGPIHVPKGNGTILKGDTGNNNWIPDVGSTWWPPKTPYIPPIITNRPTSKPTTRPTPKPTPIPTPPPPPPLPTELRTPLPPTTPERPTTGLTTIAPAASTPPGGITVDNRVQTDPQKPRGDVFSVLVHSCNFDHGLCGWIREKDNDLHWEPIRDPAGGQYLTVSAAKAPGGKAARLVLPLGRLMHSGDLCLSFRHKVTGLHSGTLQVFVRKHGAHGAALWGRNGGHGWRQTQITLRGADIKSESQR

SEQ ID NO: 29767 - protein, 595 aa, Homo sapiens
MDFLLALVLVSSLYLQAAAEFDGRWPRQIVSSIGLCRYGGRIDCCWGWARQSWGQCQPVCQPRCKHGECIGPNKCKCHPGYAGKTCNQDEHIPAPLDQGSEQPLFQPLDHQATSLPSRDLNECGLKPRPCKHRCMNTYGSYKCYCLNGYMLMPDGSCSSALTCSMANCQYGCDVVKGQIRCQCPSPGLQLAPDGRTCVDVDECATGRASCPRFRQCVNTFGSYICKCHKGFDLMYIGGKYQCHDIDECSLGQYQCSSFARCYNIRGSYKCKCKEGYQGDGLTCVYIPKVMIEPSGPIHVPKGNGTILKGDTGNNNWIPDVGSTWWPPKTPYIPPIITNRPTSKPTTRPTPKPTPIPTPPPPPPLPTELRTPLPPTTPERPTTGLTTIAPAASTPPGGITVDNRVQTDPQKPRGDVFIPRQPSNDLFEIFEIERGVSADDEAKDDPGVLVHSCNFDHGLCGWIREKDNDLHWEPIRDPAGGQYLTVSAAKAPGGKAARLVLPLGRLMHSGDLCLSFRHKVTGLHSGTLQVFVRKHGAHGAALWGRNGGHGWRQTQITLRGADIKSVVFKGEKRRGHTGEIGLDDVSLKKGHCSEER

SEQ ID NO: 29768 - protein, 566 aa, Homo sapiens
MDFLLALVLVSSLYLQAAAEFDGRWPRQIVSSIGLCRYGGRIDCCWGWARQSWGQCQPVCQPRCKHGECIGPNKCKCHPGYAGKTCNQDEHIPAPLDQGSEQPLFQPLDHQATSLPSRDLNECGLKPRPCKHRCMNTYGSYKCYCLNGYMLMPDGSCSSALTCSMANCQYGCDVVKGQIRCQCPSPGLQLAPDGRTCVDVDECATGRASCPRFRQCVNTFGSYICKCHKGFDLMYIGGKYQCHDIDECSLGQYQCSSFARCYNIRGSYKCKCKEGYQGDGLTCVYIPKVMIEPSGPIHVPKGNGTILKGDTGNNNWIPDVGSTWWPPKTPYIPPIITNRPTSKPTTRPTPKPTPIPTPPPPPPLPTELRTPLPPTTPERPTTGLTTIAPAASTPPGGITVDNRVQTDPQKPRGDVFSVLVHSCNFDHGLCGWIREKDNDLHWEPIRDPAGGQYLTVSAAKAPGGKAARLVLPLGRLMHSGDLCLSFRHKVTGLHSGTLQVFVRKHGAHGAALWGRNGGHGWRQTQITLRGADIKSVVFKGEKRRGHTGEIGLDDVSLKKGHCSEER

SEQ ID NO: 29769 - protein, 536 aa, Homo sapiens
MDFLLALVLVSSLYLQAAAEFDGRWPRQIVSSIGLCRYGGRIDCCWGWARQSWGQCQPVCQPRCKHGECIGPNKCKCHPGYAGKTCNQDLNECGLKPRPCKHRCMNTYGSYKCYCLNGYMLMPDGSCSSALTCSMANCQYGCDVVKGQIRCQCPSPGLQLAPDGRTCVDVDECATGRASCPRFRQCVNTFGSYICKCHKGFDLMYIGGKYQCHDIDECSLGQYQCSSFARCYNIRGSYKCKCKEGYQGDGLTCVYIPKVMIEPSGPIHVPKGNGTILKGDTGNNNWIPDVGSTWWPPKTPYIPPIITNRPTSKPTTRPTPKPTPIPTPPPPPPLPTELRTPLPPTTPERPTTGLTTIAPAASTPPGGITVDNRVQTDPQKPRGDVFSVLVHSCNFDHGLCGWIREKDNDLHWEPIRDPAGGQYLTVSAAKAPGGKAARLVLPLGRLMHSGDLCLSFRHKVTGLHSGTLQVFVRKHGAHGAALWGRNGGHGWRQTQITLRGADIKSVVFKGEKRRGHTGEIGLDDVSLKKGHCSEER

SEQ ID NO: 29770 - protein, 582 aa, Homo sapiens
MDFLLALVLVSSLYLQAAAEFDGRWPRQIVSSIGLCRYGGRIDCCWGWARQSWGQCQPFYVLRQRIARIRCQLKAVCQPRCKHGECIGPNKCKCHPGYAGKTCNQDLNECGLKPRPCKHRCMNTYGSYKCYCLNGYMLMPDGSCSSALTCSMANCQYGCDVVKGQIRCQCPSPGLQLAPDGRTCVDVDECATGRASCPRFRQCVNTFGSYICKCHKGFDLMYIGGKYQCHDIDECSLGQYQCSSFARCYNIRGSYKCKCKEGYQGDGLTCVYIPKVMIEPSGPIHVPKGNGTILKGDTGNNNWIPDVGSTWWPPKTPYIPPIITNRPTSKPTTRPTPKPTPIPTPPPPPPLPTELRTPLPPTTPERPTTGLTTIAPAASTPPGGITVDNRVQTDPQKPRGDVFIPRQPSNDLFEIFEIERGVSADDEAKDDPGVLVHSCNFDHGLCGWIREKDNDLHWEPIRDPAGGQYLTVSAAKAPGGKAARLVLPLGRLMHSGDLCLSFRHKVTGLHSGTLQVFVRKHGAHGAALWGRNGGHGWRQTQITLRGADIKSVVFKGEKRRGHTGEIGLDDVSLKKGHCSEER

SEQ ID NO: 29771 - protein, 420 aa, Homo sapiens
MATKTELSPTARESKNAQDMQVDETLIPRKVPSLCSARYGIALVLHFCNFTTIAQNVIMNITMVAMVNSTSPQSQLNDSSEVLPVDSFGGLSKAPKSLPAKSSILGGQFAIWEKWGPPQERSRLCSIALSGMLLGCFTAILIGGFISETLGWPFVFYIFGGVGCVCCLLWFVVIYDDPVSYPWISTSEKEYIISSLKQQVGSSKQPLPIKAMLRSLPIWSICLGCFSHQWLVSTMVVYIPTYISSVYHVNIRDNGLLSALPFIVAWVIGMVGGYLADFLLTKKFRLITVRKIATILGSLPSSALIVSLPYLNSGYITATALLTLSCGLSTLCQSGIYINVLDIAPRYSSFLMGASRGFSSIAPVIVPTVSGFLLSQDPEFGWRNVFFLLFAVNLLGLLFYLIFGEADVQEWAKERKLTRL

SEQ ID NO: 29772 - protein, 498 aa, Homo sapiens
MATKTELSPTARESKNAQDMQVDETLIPRKVPSLCSARYGIALVLHFCNFTTIAQNVIMNITMVAMVNSTSPQSQLNDSSEVLPVDSFGGLSKAPKSLPAKAPVYDWSPQIQGIIFGAVGYGGILTMAPSGYLAGRVGTKRVVGISLFATSFLTLCIPLATDFGIVLLIVTRIVQGLSQSSILGGQFAIWEKWGPPQERSRLCSIALSGMLLGCFTAILIGGFISETLGWPFVFYIFGGVGCVCCLLWFVVIYDDPVSYPWISTSEKEYIISSLKQQVGSSKQPLPIKAMLRSLPIWSICLGCFSHQWLVSTMVVYIPTYISSVYHVNIRDNGLLSALPFIVAWVIGMVGGYLADFLLTKKFRLITVRKIATILGSLPSSALIVSLPYLNSGYITATALLTLSCGLSTLCQSGIYINVLDIAPRYSSFLMGASRGFSSIAPVIVPTVSGFLLSQDPEFGWRNVFFLLFAVNLLGLLFYLIFGEADVQEWAKERKLTRL

SEQ ID NO: 29773 - protein, 252 aa, Homo sapiens
MGVLLTQRTLLSLVLALLFPSMASMAAIGSCSKEYRVLLGQLQKQTDLMQDTSRLLDPYIRIQGLDVPKLREHCRERPGAFPSEETLRGLGRRGFLQTLNATLGCVLHRLADLEQRLPKAQDLERSGLNIEDLEKLQMARPNILGLRNNIYCMAQLLDNSDTAEPTKAGRGASQPPTPTPASDAFQRKLEGCRFLHGYHRFMHSVGRVFSKWGESPNRSRRHSPHQALRKGVRRTRPSRKGKRLMTRGQLPR

SEQ ID NO: 29774 - protein, 153 aa, Homo sapiens
MNVGVAHSEVNPNTRVMNSRGMWLTYALGVGLLHIVLLSIPFFSVPVAWTLTNIIHNLGMYVFLHAVKGTPFETPDQGKARLLTHWEQLDYGVQFTSSRKFFTISPIILYFLASFYTKYDPTHFILNTASLLSVLIPKMPQLHGVRIFGINKY

SEQ ID NO: 29775 - protein, 406 aa, Homo sapiens
MGPSTPLLILFLLSWSGPLQGQQHHLVEYMERRLAALEERLAQCQDQSSRHAAELRDFKNKMLPLLEVAEKEREALRTEADTISGRVDRLEREVDYLETQNPALPCVEFDEKVTGGPGTKGKGRRNEKYDMVTDCGYTISQVRSMKILKRFGGPAGLWTKDPLGQTEKIYVLDGTQNDTAFVFPRLRDFTLAMAARKASRVRVPFPWVGTGQLVYGGFLYFARRPPGRPGGGGEMENTLQLIKFHLANRTVVDSSVFPAEGLIPPYGLTADTYIDLAADEEGLWAVYATREDDRHLCLAKLDPQTLDTEQQWDTPCPRENAEAAFVICGTLYVVYNTRPASRARIQCSFDASGTLTPERAALPYFPRRYGAHASLRYNPRERQLYAWDDGYQIVYKLEMRKKEEEV

SEQ ID NO: 29776 - protein, 386 aa, Homo sapiens
MAQWHCSQRTQAGGHGVGERLAQCQDQSSRHAAELRDFKNKMLPLLEVAEKEREALRTEADTISGRVDRLEREVDYLETQNPALPCVEFDEKVTGGPGTKGKGRRNEKYDMVTDCGYTISQVRSMKILKRFGGPAGLWTKDPLGQTEKIYVLDGTQNDTAFVFPRLRDFTLAMAARKASRVRVPFPWVGTGQLVYGGFLYFARRPPGRPGGGGEMENTLQLIKFHLANRTVVDSSVFPAEGLIPPYGLTADTYIDLAADEEGLWAVYATREDDRHLCLAKLDPQTLDTEQQWDTPCPRENAEAAFVICGTLYVVYNTRPASRARIQCSFDASGTLTPERAALPYFPRRYGAHASLRYNPRERQLYAWDDGYQIVYKLEMRKKEEEV

SEQ ID NO: 29777 - protein, 287 aa, Homo sapiens
MGPSTPLLILFLLSWSGPLQGQQHHLVEYMERRLAALEERLAQCQDQSSRHAAELRDFKNKMLPLLEVAEKEREALRTEADTISGRVDRLEREVDYLETQNPALPCVEFDEKVTGGPGTKGKGRRNEKYDMVTGKQSESRPLTLLRTDILPSLLLTLFFTLSQSIVALSSGICFRETSVMPGLLRRGSGDPGRCGTRSFSILPKIGGNRWANAHYSPDHPPWGSSCWRHLILASISFSCAFLIRLWLHNLSSEINEDSEAIWWPSWSMDQGSTGANREDLRVRWDTE

SEQ ID NO: 29778 - protein, 109 aa, Homo sapiens
MSITDVLSADDIAAALQECQDPDTFEPQKFFQTSGLSKMSASQVKDVFRFIDNDQSGYLDEEELKFFLQKFESGARELTESETKSLMAAADNDGDGKIGAEEFQEMVHS

SEQ ID NO: 29779 - protein, 308 aa, Homo sapiens
MRLLPEWFLLLFGPWLLRKAVSAQIPESGRPQYLGLRPAAAGAGAPGQQLPEPRSSDGLGVGRAWSWAWPTNHTGALARAGAAGALPAQRTKRKPSIKAARAKKIFGWGDFYFRVHTLKFSLLVTGKIVDHVNGTFSVYFRHNSSSLGNLSVSIVPPSKRVEFGGVWLPGPVPHPLQSTLALEGVLPGLGPPLGMAAAAAGPGLGGSLGGALAGPLGGALGVPGAKESRAFNCHVEYEKTNRARKHRPCLYDPSQVCFTEHTQSQAAWLCAKPFKVICIFVSFLSFDYKLVQKVCPDYNFQSEHPYFG

SEQ ID NO: 29780 - protein, 313 aa, Homo sapiens
MEQVNKTVVREFVVLGFSSLARLQQLLFVIFLLLYLFTLGTNAIIISTIVLDRALHTPMYFFLAILSCSEICYTFVIVPKMLVDLLSQKKTISFLGCAIQMFSFLFFGSSHSFLLAAMGYDRYMAICNPLRYSVLMGHGVCMGLMAAACACGFTVSLVTTSLVFHLPFHSSNQLHHFFCDISPVLKLASQHSGFSQLVIFMLGVFALVIPLLLILVSYIRIISAILKIPSSVGRYKTFSTCASHLIVVTVHYSCASFIYLRPKTNYTSSQDTLISVSYTILTPLFNPMIYSLRNKEFKSALRRTIGQTFYPLS

SEQ ID NO: 29781 - protein, 370 aa, Homo sapiens
MEPLFPAPFWEVIYGSHLQGNLSLLSPNHSLLPPHLLLNASHGAFLPLGLKVTIVGLYLAVCVGGLLGNCLVMYVILRHTKMKTATNIYIFNLALADTLVLLTLPFQGTDILLGFWPFGNALCKTVIAIDYYNMFTSTFTLTAMSVDRYVAICHPIRALDVRTSSKAQAVNVAIWALASVVGVPVAIMGSAQVEDEEIECLVEIPTPQDYWGPVFAICIFLFSFIVPVLVISVCYSLMIRRLRGVRLLSGSREKDRNLRRITRLVLVVVAVFVGCWTPVQVFVLAQGLGVQPSSETAVAILRFCTALGYVNSCLNPILYAFLDENFKACFRKFCCASALRRDVQVSDRVRSIAKDVALACKTSETVPRPA

SEQ ID NO: 29782 - protein, 365 aa, Homo sapiens
MEPLFPAPFWEVIYGSHLQGNLSLLSPNHSLLPPHLLLNASHGAFLPLGLKVTIVGLYLAVCVGGLLGNCLVMHTKMKTATNIYIFNLALADTLVLLTLPFQGTDILLGFWPFGNALCKTVIAIDYYNMFTSTFTLTAMSVDRYVAICHPIRALDVRTSSKAQAVNVAIWALASVVGVPVAIMGSAQVEDEEIECLVEIPTPQDYWGPVFAICIFLFSFIVPVLVISVCYSLMIRRLRGVRLLSGSREKDRNLRRITRLVLVVVAVFVGCWTPVQVFVLAQGLGVQPSSETAVAILRFCTALGYVNSCLNPILYAFLDENFKACFRKFCCASALRRDVQVSDRVRSIAKDVALACKTSETVPRPA

SEQ ID NO: 29783 - protein, 152 aa, Homo sapiens
MASSLNEDPEGSRITYVKGDLFACPKTDSLAHCISEDCRMGAGIAVLFKKKFGGVQELLNQQKKSGEVAVLKRDGRYIYYLITKKRASHKPTYENLQKSLEAMKSHCLKNGVTDLSMPRIGCGLDRLQWENVSAMIEEVFEATDIKITVYTL

SEQ ID NO: 29784 - protein, 314 aa, Homo sapiens
MAKNNLTRVTEFILMGFMDHPKLEIPLFLVFLSFYLVTLLGNVGMIMLIQVDVKLYTPMYFFLSHLSLLDACYTSVITPQILATLATGKTVISYGHCAAQFFLFTICAGTECFLLAVMAYDRYAAIRNPLLYTVAMNPRLCWSLVVGAYVCGVSGAILRTTCTFTLSFCKDNQINFFFCDLPPLLKLACSDTANIEIVIIFFGNFVILANASVILISYLLIIKTILKVKSSGGRAKTFSTCASHITAVALFFGALIFMYLQSGSGKSLEEDKVVSVFYTVVIPMLNPLIYSLRNKDVKDAFRKVARRLQVSLSM

SEQ ID NO: 29785 - protein, 577 aa, Homo sapiens
MSHQPLSCLTEKEDSPSESTGNGPPHLAHPNLDTFTPEELLQQMKELLTENHQLKEAMKLNNQAMKGRFEELSAWTEKQKEERQFFEIQSKEAKERLMALSHENEKLKEELGKLKGKSERSSEDPTDDSRLPRAEAEQEKDQLRTQVVRLQAEKADLLGIVSELQLKLNSSGSSEDSFVEIRMAEGEAEGSVKEIKHSPGPTRTVSTGTALSKYRSRSADGAKNYFEHEELTVSQLLLCLREGNQKVERLEVALKEAKERVSDFEKKTSNRSEIETQTEGSTEKENDEEKGPETVGSEVEALNLQVTSLFKELQEAHTKLSEAELMKKRLQEKCQALERKNSAIPSELNEKQELVYTNKKLELQVESMLSEIKMEQAKTEDEKSKLTVLQMTHNKLLQEHNNALKTIEELTRKESEKVDRAVLKELSEKLELAEKALASKQLQMDEMKQTIAKQEEDLETMTILRAQMEVYCSDFHAERAAREKIHEEKEQLALQLAVLLKENDAFEDGGRQSLMEMQSRHGARTSDSDQQAYLVQRGAEDRDWRQQRNIPIHSCPKCGEVLPDIDTLQIHVMDCII

SEQ ID NO: 29786 - protein, 571 aa, Homo sapiens
MSHQPLSCLTEKEDSPSESTGNGPPHLAHPNLDTFTPEELLQQMKELLTENHQLKEAMKLNNQAMKGRFEELSAWTEKQKEERQFFEIQSKEAKERLMALSHENEKLKEELGKLKGKSERSSEDPTDDSRLPRAEAEQEKDQLRTQVVRLQAEKADLLGIVSELQLKLNSSGSSEDSFVEIRMAEGEAEGSVKEIKHSPGPTRTVSTGTSRSADGAKNYFEHEELTVSQLLLCLREGNQKVERLEVALKEAKERVSDFEKKTSNRSEIETQTEGSTEKENDEEKGPETVGSEVEALNLQVTSLFKELQEAHTKLSEAELMKKRLQEKCQALERKNSAIPSELNEKQELVYTNKKLELQVESMLSEIKMEQAKTEDEKSKLTVLQMTHNKLLQEHNNALKTIEELTRKESEKVDRAVLKELSEKLELAEKALASKQLQMDEMKQTIAKQEEDLETMTILRAQMEVYCSDFHAERAAREKIHEEKEQLALQLAVLLKENDAFEDGGRQSLMEMQSRHGARTSDSDQQAYLVQRGAEDRDWRQQRNIPIHSCPKCGEVLPDIDTLQIHVMDCII

SEQ ID NO: 29787 - protein, 520 aa, Homo sapiens
MKLNNQAMKGRFEELSAWTEKQKEERQFFEIQSKEAKERLMALSHENEKLKEELGKLKGKSERSSEDPTDDSRLPRAEAEQEKDQLRTQVVRLQAEKADLLGIVSELQLKLNSSGSSEDSFVEIRMAEGEAEGSVKEIKHSPGPTRTVSTGTALSKYRSRSADGAKNYFEHEELTVSQLLLCLREGNQKVERLEVALKEAKERVSDFEKKTSNRSEIETQTEGSTEKENDEEKGPETVGSEVEALNLQVTSLFKELQEAHTKLSEAELMKKRLQEKCQALERKNSAIPSELNEKQELVYTNKKLELQVESMLSEIKMEQAKTEDEKSKLTVLQMTHNKLLQEHNNALKTIEELTRKESEKVDRAVLKELSEKLELAEKALASKQLQMDEMKQTIAKQEEDLETMTILRAQMEVYCSDFHAERAAREKIHEEKEQLALQLAVLLKENDAFEDGGRQSLMEMQSRHGARTSDSDQQAYLVQRGAEDRDWRQQRNIPIHSCPKCGEVLPDIDTLQIHVMDCII

SEQ ID NO: 29788 - protein, 566 aa, Homo sapiens
MPGHPGAAEQLVKTGWRSWHLGFWKALAPLQAAWDAFSQPVPASCGQLLTQLLLCASLAAAAAGLVYHWLASLLLYPPGPSAMVATVCGLLVFLSLGLVPPVRCLFALSVPTLGMEQGRRLLLSYSTATLAIAVVPNVLANVGAAGQVLRCVTEGSLESLLNTTHQLHAASRALGPTGQAGSRGLTFEAQDNGSAFYLHMLRVTQQVLEDFSGLESLARAAALGTQRVVTGLFMLGLLVESAWYLHCYLTDLRFDNIYATQQLTQRLAQAQATHLLAPPPTWLLQAAQLRLSQEELLSCLLRLGLLALLLVATAVAVATDHVAFLLAQATVDWAQKLPTVPITLTVKYDVAYTVLGFIPFLFNQLAPESPFLSVHSSYQWELRLTSARCPLLPARRPRAAAPLAAGALQLLAGSTVLLEAYARRLRHAIAASFFTAQEARRVRHLHARLQRRHDRHQGQQLPLGDPSCVPTPRPACKPPAWIDYRLDALRTESSEGEGKELWSCRDLSCNLGPVPPPCVTLGKSLHLSEPRFLHLHNDSIFTIDVTYFPRRDVVRMEGNTGHDRPG

SEQ ID NO: 29789 - protein, 1288 aa, Homo sapiens
MGSPEGRFHFAIDRGGTFTDVFAQCPGGHVRVLKLLSEDPANYADAPTEGIRRILEQEAGMLLPRDQPLDSSHIASIRMGTTVATNALLERKGERVALLVTRGFRDLLHIGTQARGDLFDLAVPMPEVLYEEVLEVDERVVLHRGEAGTGTPVKGRTGDLLEVQQPVDLGALRGKLEGLLSRGIRSLAVVLMHSYTWAQHEQQVGVLARELGFTHVSLSSEAMPMVRIVPRGHTACADAYLTPAIQRYVQGFCRGFQGQLKDVQVLFMRSDGGLAPMDTFSGSSAVLSGPAGGVVGYSATTYQQEGGQPVIGFDMGGTSTDVSRYAGEFEHVFEASTAGVTLQAPQLDINTVAAGGGSRLFFRSGLFVVGPESAGAHPGPACYRKGGPVTVTDANLVLGRLLPASFPCIFGPGENQPLSPEASRKALEAVATEVNSFLTNGPCPASPLSLEEVAMGFVRVANEAMCRPIRALTQARGHDPSAHVLACFGGAGGQHACAIARALGMDTVHIHRHSGLLSALGLALADVVHEAQEPCSLLYAPETFVQLDQRLSRLEEQCVDALQAQGFPRSQISTESFLHLRYQGTDCALMVSAHQHPATARSPRAGDFGAAFVERYMREFGFVIPERPVVVDDVRVRGTGRSGLRLEDAPKAQTGPPRVDKMTQCYFEGGYQETPVYLLAELGYGHKLHGPCLIIDSNSTILVEPGCQAEVTKTGDICISVGAEVPGTVGPQLDPIQLSIFSHRFMSIAEQMGRILQRTAISTNIKERLDFSCALFGPDGGLVSNAPHIPVHLGAMQETVQFQIQHLGADLHPGDVLLSNHPSAGGSHLPDLTVITPVFWPGQTRPVFYVASRGHHADIGGITPGSMPPHSTMLQQEGAVFLSFKLVQGGVFQEEAVTEALRAPGKVPNCSGTRNLHDNLSDLRAQVAANQKGIQLVGELIGQYGLDVVQAYMGHIQANAELAVRDMLRAFGTSRQARGLPLEVSSEDHMDDGSPIRLRVQISLSQGSAVFDFSGTGPEVFGNLNAPRAVTLSALIYCLRCLVGRDIPLNQGCLAPVRVVIPRGSILDPSPEAAVVGGNVLTSQRVVDVILGAFGACAASQGCMNNVTLGNAHMGYYETVAGGAGAGPSWHGRSGVHSHMTNTRITDPEILESRYPVILRRFELRRGSGGRGRFRGGDGVTRELLFREEALLSVLTERRAFRPYGLHGGEPGARGLNLLIRKNGRTVNLGGKTSVTVYPGDVFCLHTPGGGGYGDPEDPAPPPGSPPQALAFPEHGSVYEYRRAQEAV

SEQ ID NO: 29790 - protein, 599 aa, Homo sapiens
MSTGFSFGSGTLGSTTVAAGGTSTGGVFSFGTGASSNPSVGLNFGNLGSTSTPATTSAPSSGFGTGLFGSKPATGFTLGGTNTGIATTITTGLTLGTPATTSAATTGFSLGFNKPAASATPFALPITSTSASGLTLSSALTSTPAASTGFTLNNLGGTTATTTTASTGLSLGGALAGLGGSLFQSTNTGTSGLGQNALGLTLGTTAATSTAGNEGLGGIDFSSSSDKKSDKTGTRPEDSKALKDENLPPVICQDVENLQKFVKEQKQVQEEISRMSSKAMLKVQEDIKALKQLLSLAANGIQRNTLNIDKLKIETAQELKNAEIALRTQKTPPGLQHEYAAPADYFRILVQQFEVQLQQYRQQIEELENHLATQANNSHITPQDLSMAMQKIYQTFVALAAQLQSIHENVKVLKEQYLGYRKMFLGDAVDVFETRRAEAKKWQNTPRVTTGPTPFSTMPNAAAVAMAATLTQQQQPATGPQPSLGVSFGTPFGSGIGTGLQSSGLGSSNLGGFGTSSGFGCSTTGASTFGFGTTNKPSGSLSAGFGSSSTSGFNFSNPGITASAGLTFGVSNPASAGFGTGGQLLQLKKPPAGNKRGKR

SEQ ID NO: 29791 - protein, 485 aa, Homo sapiens
MSTGFSFGSGTLGSTTVAAGGTSTGGVFSFGTGASSNPSVGLNFGNLGSTSTPATTSAPSSGFGTGLFGSKPATGFTLGGTNTGIATTITTGLTLGTPATTSAATTGFSLGFNKPAASATPFALPITSTSASGLTLSSALTSTPAASTGFTLNNLGGTTATTTTASTGLSLGGALAGLGGSLFQSTNTGTSGLGQNALGLTLGTTAATSTAGNEGLGGIDFSSSSDKKSDKTGTRPEDSKALKDENLPPVICQDVENLQKFVKEQKQVQEEISRMSSKAMLKVQEDIKALKQLLSLAANGIQRNTLNIDKLKIETAQELKNAEIALRTQKTPPGLQHEYAAPADYFRILVQQFEVQLQQYRQQIEELENHLATQANNSHITPQDLSMAMQKIYQTFVALAAQLQSIHENVKVLKEQYLGYRKMFLGDAVDVFETRRAEAKKWQNTPRVTTGPTPFSTMPNAAAVAMAATLTQQQQPATGLNAFKL

SEQ ID NO: 29792 - protein, 587 aa, Homo sapiens
MSTGFSFGSGTLGSTTVAAGGTSTGGVFSFGTGASSNPSVGLNFGNLGSTSTPATTSAPSSGFGTGLFGSKPATGFTLGGTNTGTPATTSAATTGFSLGFNKPAASATPFALPITSTSASGLTLSSALTSTPAASTGFTLNNLGGTTATTTTASTGLSLGGALAGLGGSLFQSTNTGTSGLGQNALGLTLGTTAATSTAGNEGLGGIDFSSSSDKKSDKTGTRPEDSKALKDENLPPVICQDVENLQKFVKEQKQVQEEISRMSSKAMLKVQEDIKALKQLLSLAANGIQRNTLNIDKLKIETAQELKNAEIALRTQKTPPGLQHEYAAPADYFRILVQQFEVQLQQYRQQIEELENHLATQANNSHITPQDLSMAMQKIYQTFVALAAQLQSIHENVKVLKEQYLGYRKMFLGDAVDVFETRRAEAKKWQNTPRVTTGPTPFSTMPNAAAVAMAATLTQQQQPATGPQPSLGVSFGTPFGSGIGTGLQSSGLGSSNLGGFGTSSGFGCSTTGASTFGFGTTNKPSGSLSAGFGSSSTSGFNFSNPGITASAGLTFGVSNPASAGFGTGGQLLQLKKPPAGNKRGKR

SEQ ID NO: 29793 - protein, 330 aa, Homo sapiens
MGLTQDFFPPTSELLEGGNQTSTFEFLLWGLSDQPQQQHIFFLLFLWMYVVTVAGNLLIVLAIGTDTHLHTPMYFFLASLSCADIFSTSTTVPKALVNIQTQSRSISYAGCLAQLYFFLTFGDMDIFLPATMAYDRYVAICHLLHYMMIMSLHRCAFLVTACWTLTSLLAMTRTFLIFRLSLCSAILPGFFCDLGPLMKVSCSDAQVNELVLLFLGGAVILIPFMLILVSYIRIVSAILRAPSAQGRRKAFSTCDSHLVVVALFFGTVIRAYLCPSSSSSNSVKEDTAAAVMYTVVTPLLNPFIYSMRNKDMKAAVVRLLKGRVSFSQGQ

SEQ ID NO: 29794 - protein, 315 aa, Homo sapiens
MANITRMANHTGRLDFILMGLFRQSKHPALLSVVIFVVFLKALSGNAVLILLIHCDAHLHSPMYFFISQLSLMDMAYISVTVPKMLLDQVMGVNKVSAPECGMQMFLYLTLAGSEFFLLATMAYDRYVAICHPLRYPVLMNHRVCLFLASGCWFLGSVDGFMLTPITMSFPFCRSWEIHHFFCEVPAVTILSCSDTSLYETLMYLCCVLMLLIPVTIISSSYLLILLTVHRMNSAEGRKKAFATCSSHLTVVILFYGAAVYTYMLPSSYHTPEKDMMVSVFYTILTPVLNPLIYSLRNKDVMGALKKMLTVRFVL

SEQ ID NO: 29795 - protein, 318 aa, Homo sapiens
MSDSNLSDNHLPDTFFLTGIPGLEAAHFWIAIPFCAMYLVALVGNAALILVIAMDNALHAPMYLFLCLLSLTDLALSSTTVPKMLAILWLHAGEISFGGCLAQMFCVHSIYALESSILLAMAFDRYVAICNPLRYTTILNHAVIGRIGFVGLFRSVAIVSPFIFLLRRLPYCGHRVMTHTYCEHMGIARLACANITVNIVYGLTVALLAMGLDSILIAISYGFILHAVFHLPSHDAQHKALSTCGSHIGIILVFYIPAFFSFLTHRFGHHEVPKHVHIFLANLYVLVPPVLNPILYGARTKEIRSRLLKLLHLGKTSI

SEQ ID NO: 29796 - protein, 310 aa, Homo sapiens
MDKENSSMVTEFIFMGITQDPQMEIIFFVVFLIVYLVNVVGNIGMIILITTDTQLHTPMYFFLCNLSFVDLGYSSAIAPRMLADFLTNHKVISFSSCATQFAFFVGFVDAECYVLAAMAYGRFVAICRPLHYSTFMSKQVCLALMLGSYLAGLVSLVAHTTLTFSLSYCGSNIINHFFCEIPPLLALSCSDTYISEILLFSLCGFIEFSTILIIFISYTFILVAIIRMRSAEGRLKAFSTCGSHLTGITLFYGTVMFMYLRPTSSYSLDQDKWASVFYTVIIPMLNPLIYSLRNKDVKAAFKKLIGKKSQ

SEQ ID NO: 29797 - protein, 315 aa, Homo sapiens
MAWSNQSAVTEFILRGLSSSLELQIFYFLFFSIVYAATVLGNLLIVVTIASEPHLHSPMYFLLGNLSFIDMSLASFATPKMIADFLREHKAISFEGCMTQMFFLHLLGGAEIVLLISMSFDRYVAICKPLHYLTIMSRRMCVGLVILSWIVGIFHALSQLAFTVNLPFCGPNEVDSFFCDLPLVIKLACVDTYILGVFMISTSGMIALVCFILLVISYTIILVTVRQRSSGGSSKALSTCSAHFTVVTLFFGPCTFIYVWPFTNFPIDKVLSVFYTIYTPLLNPVIYTVRNKDVKYSMRKLSSHIFKSRKTDHTP

SEQ ID NO: 29798 - protein, 385 aa, Homo sapiens
MWGRLLLWPLVLGFSLSGGTQTPSVYDESGSTGGGDDSTPSILPAPRGYPGQVCANDSDTLELPDSSRALLLGWVPTRLVPALYGLVLVVGLPANGLALWVLATQAPRLPSTMLLMNLAAADLLLALALPPRIAYHLRGQRWPFGEAACRLATAALYGHMYGSVLLLAAVSLDRYLALVHPLRARALRGRRLALGLCMAAWLMAAALALPLTLQRQTFRLARSDRVLCHDALPLDAQASHWQPAFTCLALLGCFLPLLAMLLCYGATLHTLAASGRRYGHALRLTAVVLASAVAFFVPSNLLLLLHYSDPSPSAWGNLYGAYVPSLALSTLNSCVDPFIYYYVSAEFRDKVRAGLFQRSPGDTVASKASAEGGSRGMGTHSSLLQ

SEQ ID NO: 29799 - protein, 313 aa, Homo sapiens
MLLTDRNTSGTTFTLLGFSDYPELQVPLFLVFLAIYNVTVLGNIGLIVIIKINPKLHTPMYFFLSQLSFVDFCYSSIIAPKMLVNLVVKDRTISFLGCVVQFFFFCTFVVTESFLLAVMAYDRFVAICNPLLYTVNMSQKLCVLLVVGSYAWGVSCSLELTCSALKLCFHGFNTINHFFCEFSSLLSLSCSDTYINQWLLFFLATFNEISTLLIVLTSYAFIVVTILKMRSVSGRRKAFSTCASHLTAITIFHGTILFLYCVPNSKNSRHTVKVASVFYTVVIPMLNPLIYSLRNKDVKDTVTEILDTKVFSY

SEQ ID NO: 29800 - protein, 151 aa, Homo sapiens
MVSANQTASVTEFILLGLSAHPKLEKTFFVLILLMYLVILLGNGVLILMTVSNSHLHMPMYFFLGNLSFLDICYTTSSVPLILDSFLTPRKTISFSACAVQMFLSFAMGATECVLLSMMAFDRYVAICNPLRYPVVMSKAAYMPIRLPAPG

SEQ ID NO: 29801 - protein, 926 aa, Homo sapiens
MVSSVLPNPTSAECWAALLHDPMTLDMDAVLSDFVRSTGAEPGLARDLLEGKNWDLTAALSDYEQLRQVHTANLPHVFNEGRGPKQPEREPQPGHKVERPCLQRQDDIAQEKRLSRGISHASSAIVSLARSHVASECNNEQFPLEMPIYTFQLPDLSVYSEDFRSFIERDLIEQATMVALEQAGRLNWWSTVCTSCKRLLPLATTGDGNCLLHAASLGMWGFHDRDLVLRKALYTMMRTGAEREALKRRWRWQQTQQNKEEEWEREWTELLKLASSEPRTHFSKNGGTGGGVDNSEDPVYESLEEFHVFVLAHILRRPIVVVADTMLRDSGGEAFAPIPFGGIYLPLEVPPNRCHCSPLVLAYDQAHFSALVSMEQRDQQREQAVIPLTDSEHKLLPLHFAVDPGKDWEWGKDDNDNARLAHLILSLEAKLNLLHSYMNVTWIRIPSETRAPLAQPESPTASAGEDVQSLADSLDSDRDSVCSNSNSNNGKNGKDKEKEKQRKEKDKTRADSVANKLGSFSKTLGIKLKKNMGGLGGLVHGKMGRANSANGKNGDSAERGKEKKAKSRKGSKEESGASASTSPSEKTTPSPTDKAAGASPAEKGGGPRGDAWKYSTDVKLSLNILRAAMQGERKFIFAGLLLTSHRHQFHEEMIGYYLTSAQERFSAEQEQRRRDAATAAAAAAAAAAATAKRPPRRPETEGVPVPERASPGPPTQLVLKLKERPSPGPAAGRAARAAAGGTASPGGGARRASASGPVPGRSPPAPARQSVIHVQASGARDEACAPAVGALRPCATYPQQNRSLSSQSYSPARAAALRTVNTVESLARAVPGALPGAAGTAGAAEHKSQTYTNGFGALRDGLEFADADAPTARSNGECGRGGPGPVQRRCQRENCAFYGRAETEHYCSYCYREELRRRREARGARP

SEQ ID NO: 29802 - protein, 933 aa, Homo sapiens
MVSSVLPNPTSAECWAALLHDPMTLDMDAVLSDFVRSTGAEPGLARDLLEGKNWDLTAALSDYEQLRQVHTANLPHVFNEGRGPKQPEREPQPGHKVERPCLQRQDDIAQEKRLSRGISHASSAIVSLARSHVASECNNEQFPLEMPIYTFQLPDLSVYSEDFRSFIERDLIEQATMVALEQAGRLNWWSTVCTSCKRLLPLATTGDGNCLLHAASLGMWGFHDRDLVLRKALYTMMRTGAEREALKRRWRWQQTQQNKESGLVYTEEEWEREWTELLKLASSEPRTHFSKNGGTGGGVDNSEDPVYESLEEFHVFVLAHILRRPIVVVADTMLRDSGGEAFAPIPFGGIYLPLEVPPNRCHCSPLVLAYDQAHFSALVSMEQRDQQREQAVIPLTDSEHKLLPLHFAVDPGKDWEWGKDDNDNARLAHLILSLEAKLNLLHSYMNVTWIRIPSETRAPLAQPESPTASAGEDVQSLADSLDSDRDSVCSNSNSNNGKNGKDKEKEKQRKEKDKTRADSVANKLGSFSKTLGIKLKKNMGGLGGLVHGKMGRANSANGKNGDSAERGKEKKAKSRKGSKEESGASASTSPSEKTTPSPTDKAAGASPAEKGGGPRGDAWKYSTDVKLSLNILRAAMQGERKFIFAGLLLTSHRHQFHEEMIGYYLTSAQERFSAEQEQRRRDAATAAAAAAAAAAATAKRPPRRPETEGVPVPERASPGPPTQLVLKLKERPSPGPAAGRAARAAAGGTASPGGGARRASASGPVPGRSPPAPARQSVIHVQASGARDEACAPAVGALRPCATYPQQNRSLSSQSYSPARAAALRTVNTVESLARAVPGALPGAAGTAGAAEHKSQTYTNGFGALRDGLEFADADAPTARSNGECGRGGPGPVQRRCQRENCAFYGRAETEHYCSYCYREELRRRREARGARP

SEQ ID NO: 29803 - protein, 306 aa, Homo sapiens
MAAAAAAAAAAGAAGGRGSGPGRRRHLVPGAGGEAGEGAPGGAGDYGNGLESEELEPEELLLEPEPEPEPEEEPPRPRAPPGAPGPGPGSGAPGSQEEEEEPGLVEGDPGDGAIEDPELEAIKARVREMEEEAEKLKELQNEVEKQMNMSPPPGNAGPVIMSIEEKMEADARSIYVGNVDYGATAEELEAHFHGCGSVNRVTILCDKFSGHPKGFAYIEFSDKESVRTSLALDESLFRGRQIKVIPKRTNRPGISTTDRGFPRARYRARTTNYNSSRSRFYSGFNSRPRGRVYRGRARATSWYSPY

SEQ ID NO: 29804 - protein, 296 aa, Homo sapiens
MAAAAAAAAAAGAAGGRGSGPGRRRHLVPGAGGEAGEGAPGGAGDYGNGLESEELEPEELLLEPEPEPEPEEEPPRPRAPPGAPGPGPGSGAPGSQEEEEEPGLVEGDPGDGAIEDPELEAIKARVREMEEEAEKLKELQNEVEKQMNMSPPPGNAGPVIMSIEEKMEADARSIYVGNVDYGATAEELEAHFHGCGSVNRVTILCDKFSGHPKGFAYIEFSDKESVRTSLALDESLFRGRQIKVIPKRTNRPGISTTDRGFPRARYRARTTNYNSSRSRFYSGFNSRPRGRVYRSG

SEQ ID NO: 29805 - protein, 441 aa, Homo sapiens
MCPQLAGAGSMGSPGATTGWGLLDYKTEKYVMTRNWRVGALQRLLQFGIVVYVVGWALLAKKGYQERDLEPQFSIITKLKGVSVTQIKELGNRLWDVADFVKPPQGENVFFLVTNFLVTPAQVQGRCPEHPSVPLANCWVDEDCPEGEGGTHSHGVKTGQCVVFNGTHRTCEIWSWCPVESGVVPSRPLLAQAQNFTLFIKNTVTFSKFNFSKSNALETWDPTYFKHCRYEPQFSPYCPVFRIGDLVAKAGGTFEDLALLGGSVGIRVHWDCDLDTGDSGCWPHYSFQLQEKSYNFRTATHWWEQPGVEARTLLKLYGIRFDILVTGQAGKFGLIPTAVTLGTGAAWLGVVTFFCDLLLLYVDREAHFYWRTKYEEAKAPKATANSVWRELALASQARLAECLRRSSAPAPTATAAGSQTQTPGWPCPSSDTHLPTHSGSL

SEQ ID NO: 29806 - protein, 415 aa, Homo sapiens
MCPQLAGAGSMGSPGATTGWGLLDYKTEKWALLAKKGYQERDLEPQFSIITKLKGVSVTQIKELGNRLWDVADFVKPPQGENVFFLVTNFLVTPAQVQGRCPEHPSVPLANCWVDEDCPEGEGGTHSHGVKTGQCVVFNGTHRTCEIWSWCPVESGVVPSRPLLAQAQNFTLFIKNTVTFSKFNFSKSNALETWDPTYFKHCRYEPQFSPYCPVFRIGDLVAKAGGTFEDLALLGGSVGIRVHWDCDLDTGDSGCWPHYSFQLQEKSYNFRTATHWWEQPGVEARTLLKLYGIRFDILVTGQAGKFGLIPTAVTLGTGAAWLGVVTFFCDLLLLYVDREAHFYWRTKYEEAKAPKATANSVWRELALASQARLAECLRRSSAPAPTATAAGSQTQTPGWPCPSSDTHLPTHSGSL

SEQ ID NO: 29807 - protein, 519 aa, Homo sapiens
MAEERVATRTQFPVSTESQKPRQKKAPEFPILEKQNWLIHLHYIRKDYEACKAVIKEQLQETQGLCEYAIYVQALIFRLEGNIQESLELFQTCAVLSPQSADNLKQVARSLFLLGKHKAAIEVYNEAAKLNQKDWEISHNLGVCYIYLKQFNKAQDQLHNALNLNRHDLTYIMLGKIHLLEGDLDKAIEVYKKAVEFSPENTELLTTLGLLYLQLGIYQKAFEHLGNALTYDPTNYKAILAAGSMMQTHGDFDVALTKYRVVACAVPESPPLWNNIGMCFFGKKKYVAAISCLKRANYLAPFDWKILYNLGLVHLTMQQYASAFHFLSAAINFQPKMGELYMLLAVALTNLEDIENAKRAYAEAVHLDKCNPLVNLNYAVLLYNQGEKKNALAQYQEMEKKVSLLKDNSSLEFDSEMVEMAQKLGAALQVGEALVWTKPVKDPKSKHQTTSTSKPASFQQPLGSNQALGQAMSSAAAYRTLPSGAGGTSQFTKPPSLPLEPEPAVESSPTETSEQIREK

SEQ ID NO: 29808 - protein, 527 aa, Homo sapiens
MALTVVPSFSVSGVWKRTQFPVSTESQKPRQKKAPEFPILEKQNWLIHLHYIRKDYEACKAVIKEQLQETQGLCEYAIYVQALIFRLEGNIQESLELFQTCAVLSPQSADNLKQVARSLFLLGKHKAAIEVYNEAAKLNQKDWEISHNLGVCYIYLKQFNKAQDQLHNALNLNRHDLTYIMLGKIHLLEGDLDKAIEVYKKAVEFSPENTELLTTLGLLYLQLGIYQKAFEHLGNALTYDPTNYKAILAAGSMMQTHGDFDVALTKYRVVACAVPESPPLWNNIGMCFFGKKKYVAAISCLKRANYLAPFDWKILYNLGLVHLTMQQYASAFHFLSAAINFQPKMGELYMLLAVALTNLEDIENAKRAYAEAVHLDKCNPLVNLNYAVLLYNQGEKKNALAQYQEMEKKVSLLKDNSSLEFDSEMVEMAQKLGAALQVGEALVWTKPVKDPKSKHQTTSTSKPASFQQPLGSNQALGQAMSSAAAYRTLPSGAGGTSQFTKPPSLPLEPEPAVESSPTETSEQIREK

SEQ ID NO: 29809 - protein, 347 aa, Homo sapiens
MLGKIHLLEGDLDKAIEVYKKAVEFSPENTELLTTLGLLYLQLGIYQKAFEHLGNALTYDPTNYKAILAAGSMMQTHGDFDVALTKYRVVACAVPESPPLWNNIGMCFFGKKKYVAAISCLKRANYLAPFDWKILYNLGLVHLTMQQYASAFHFLSAAINFQPKMGELYMLLAVALTNLEDIENAKRAYAEAVHLDKCNPLVNLNYAVLLYNQGEKKNALAQYQEMEKKVSLLKDNSSLEFDSEMVEMAQKLGAALQVGEALVWTKPVKDPKSKHQTTSTSKPASFQQPLGSNQALGQAMSSAAAYRTLPSGAGGTSQFTKPPSLPLEPEPAVESSPTETSEQIREK

SEQ ID NO: 29810 - protein, 449 aa, Homo sapiens
MLAEWGACLLLAVALLGPGLQAQAMEGVKCGGVLSAPSGNFSSPNFPRLYPYNTECSWLIVVAEGSSVLLTFHAFDLEYHDTCSFDFLEIYNGASPDKGNLLGRFCGKVPPPPFTSSWHVMSVIFHSDKHVASHGFSAGYQKDVCGGVLTGLSGVLTSPEYPNNYPNSMECHWVIRAAGPAHVKLVFVDFQVEGNEECTYDYVAVLGGPGPTRGHHYCGSTRPPTLVSLGHELQVVFKSDFNIGGRGFKAYYFSGECQEVYMAMRGNFSSPQYPSSYPNNIRCHWTIRLPPGYQVKVFFLDLDLEEPNSLTKTCDFDHLAAFDGASEEAPLLGNWCGHHLPPPVTSSHNQLLLLLHTDRSTTRRGFSVAYIGGQLGCGSGSTEGEGEALQPQSLQSPSSIPPVCPAPPMNGLLQLLLHWLHPCPLSGPLRLDGTAPACFHYCRASFPSF

SEQ ID NO: 29811 - protein, 157 aa, Homo sapiens
MLAEWGACLLLAVALLGPGLQAQAMEGVKCGGVLSAPSGNFSSPNFPRLYPYNTECSWLIVVAEGSSVLLTFHAFDLEYHDTCSFDFLEIYNGASPDKGNLLGRFCGKVPPPPFTSSWHVMSVIFHSDKHVASHGFSAGYQKGQRGALGTCCSGSHL

SEQ ID NO: 29812 - protein, 580 aa, Homo sapiens
MKENKENSSPSVTSANLDHTKPCWYWDKKDLAHTPSQLEGLDPATEARYRREGARFIFDVGTRLGLHYDTLATGIIYFHRFYMFHSFKQFPRYVTGACCLFLAGKVEETPKKCKDIIKTARSLLNDVQFGQFGDDPKEEVMVLERILLQTIKFDLQVEHPYQFLLKYAKQLKGDKNKIQKLVQMAWTFVNDSLCTTLSLQWEPEIIAVAVMYLAGRLCKFEIQEWTSKPMYRRWWEQFVQDVPVDVLEDICHQILDLYSQGKQQMPHHTPHQLQQPPSLQPTPQVPQVQQSQPSQSSEPSQPQQKDPQQPAQQQQPAQQPKKPSPQPSSPRQVKRAVVVSPKEENKAAEPPPPKIPKIETTHPPLPPAHPPPDRKPPLAAALGEAEPPGPVDATDLPKVQIPPPAHPAPVHQPPPLPHRPPPPPPSSYMTGMSTTSSYMSGEGYQSLQSMMKTEGPSYGALPPAYGPPAHLPYHPHVYPPNPPPPPVPPPPASFPPPAIPPPTPGYPPPPPTYNPNFPPPPPRLPPTHAVPPHPPPGLGLPPASYPPPAVPPGGQPPVPPPIPPPGMPPVGGLGRAAWMR

SEQ ID NO: 29813 - protein, 354 aa, Homo sapiens
MKENKENSSPSVTSANLDHTKPCWYWDKKDLAHTPSQLEGLDPATEARYRREGARFIFDVGTRLGLHYDTLATGIIYFHRFYMFHSFKQFPRYVTGACCLFLAGKVEETPKKCKDIIKTARSLLNDVQFGQFGDDPKEEVMVLERILLQTIKFDLQVEHPYQFLLKYAKQLKGDKNKIQKLVQMAWTFVNDSLCTTLSLQWEPEIIAVAVMYLAGRLCKFEIQEWTSKPMYRRWWEQFVQDVPVDVLEDICHQILDLYSQGKQQMPHHTPHQLQQPPSLQPTPQVPQVQQSQPSQSSEPSQPQQKDPLILLQGWACRQPATHLLPSPLEDSLLCPRPFPHPACLQLGGWGGQPG

SEQ ID NO: 29814 - protein, 357 aa, Homo sapiens
MKENKENSSPSVTSANLDHTKPCWYWDKKDLAHTPSQLEGLDPATEARYRREGARFIFDVGTRLGLHYDTLATGIIYFHRFYMFHSFKQFPRYVTGACCLFLAGKVEETPKKCKDIIKTARSLLNDVQFGQFGDDPKEEVMVLERILLQTIKFDLQVEHPYQFLLKYAKQLKGDKNKIQKLVQMAWTFVNDSLCTTLSLQWEPEIIAVAVMYLAGRLCKFEIQEWTSKPMYRRWWEQFVQDVPVDVLEDICHQILDLYSQGKQQMPHHTPHQLQQPPSLQPTPQVPQVQQSQPSQSSEPSQPQQKDPQQPAQQQQPAQQPKKPSPQPSSPRQVKRAVVVSPKEENKAAEPAPSQHLW

SEQ ID NO: 29815 - protein, 600 aa, Homo sapiens
MKENKENSSPSVTSANLDHTKPCWYWDKKDLAHTPSQLEGLDPATEARYRREGARFIFDVGTRLGLHYDTLATGIIYFHRFYMFHSFKQFPRYVTGACCLFLAGKVEETPKKCKDIIKTARSLLNDVQFGQFGDDPKEEVMVLERILLQTIKFDLQVEHPYQFLLKYAKQLKGDKNKIQKLVQMAWTFVNDSLCTTLSLQWEPEIIAVAVMYLAGRLCKFEIQEWTSKPMYRRWWEQFVQDVPVDVLEDICHQILDLYSQGKQQMPHHTPHQLQQPPSLQPTPQVPQVQQSQPSQSSEPSQPQQKDPQQPAQQQQPAQQPKKPSPQPSSPRQVKRAVVSGLKQALGRAGFPGGGNTQVVSPKEENKAAEPPPPKIPKIETTHPPLPPAHPPPDRKPPLAAALGEAEPPGPVDATDLPKVQIPPPAHPAPVHQPPPLPHRPPPPPPSSYMTGMSTTSSYMSGEGYQSLQSMMKTEGPSYGALPPAYGPPAHLPYHPHVYPPNPPPPPVPPPPASFPPPAIPPPTPGYPPPPPTYNPNFPPPPPRLPPTHAVPPHPPPGLGLPPASYPPPAVPPGGQPPVPPPIPPPGMPPVGGLGRAAWMR

SEQ ID NO: 29816 - protein, 269 aa, Homo sapiens
MIRTLLLSTLVAGALSCGDPTYPPYVTRVVGGEEARPNSWPWQVSLQYSSNGKWYHTCGGSLIANSWVLTAAHCISSSRTYRVGLGRHNLYVAESGSLAVSVSKIVVHKDWNSNQISKGNDIALLKLANPVSLTDKIQLACLPPAGTILPNNYPCYVTGWGRLQTNGAVPDVLQQGRLLVVDYATCSSSAWWGSSVKTSMICAGGDGVISSCNGDSGGPLNCQASDGRWQVHGIVSFGSRLGCNYYHKPSVFTRVSNYIDWINSVIANN

SEQ ID NO: 29817 - protein, 551 aa, Homo sapiens
MADGVDHIDIYADVGEEFNQEAEYGGHDQIDLYDDVISPSANNGDAPEDRDYMDTLPPTVGDDVGKGAAPNVVYTYTGKRIALYIGNLTWWTTDEDLTEAVHSLGVNDILEIKFFENRANGQSKGFALVGVGSEASSKKLMDLLPKRELHGQNPVVTPCNKQFLSQFEMQSRKTTQSGQMSGEGKAGPPGGSSRAAFPQGGRGRGRFPGAVPGGDRFPGPAGPGGPPPPFPAGQTPPRPPLGPPGPPGPPGPPPPGQVLPPPLAGPPNRGDRPPPPVLFPGQPFGQPPLGPLPPGPPPPVPGYGPPPGPPPPQQGPPPPPGPFPPRPPGPLGPPLTLAPPPHLPGPPPGAPPPAPHVNPAFFPPPTNSGMPTSDSRGPPPTDPYGRPPPYDRGDYGPPGREMDTARTPLSEAEFEEIMNRNRAISSSAISRAVSDASAGDYGSAIETLVTAISLIKQSKVSADDRCKVLISSLQDCLHGIESKSYGSGSRRERSRERDHSRSREKSRRHKSRSRDRHDDYYRERSRERERHRDRDRDRDRERDREREYRHR

SEQ ID NO: 29818 - protein, 588 aa, Homo sapiens
MADGVDHIDIYADVGEEFNQEAEYGGHDQIDLYDDVISPSANNGDAPEDRDYMDTLPPTVGDDVGKGAAPNVVYTYTGKRIALYIGNLTWWTTDEDLTEAVHSLGVNDILEIKFFENRANGQSKGFALVGVGSEASSKKLMDLLPKRELHGQNPVVTPCNKQFLSQFEMQSRKTTQSGQMSGEGKAGPPGGSSRAAFPQGGRGRGRFPGAVPGGDRFPGPAGPGGPPPPFPGNLIKHLVKGTRPLFLETRIPWHMGHSIEEIPIFGLKAGQTPPRPPLGPPGPPGPPGPPPPGQVLPPPLAGPPNRGDRPPPPVLFPGQPFGQPPLGPLPPGPPPPVPGYGPPPGPPPPQQGPPPPPGPFPPRPPGPLGPPLTLAPPPHLPGPPPGAPPPAPHVNPAFFPPPTNSGMPTSDSRGPPPTDPYGRPPPYDRGDYGPPGREMDTARTPLSEAEFEEIMNRNRAISSSAISRAVSDASAGDYGSAIETLVTAISLIKQSKVSADDRCKVLISSLQDCLHGIESKSYGSGSRRERSRERDHSRSREKSRRHKSRSRDRHDDYYRERSRERERHRDRDRDRDRERDREREYRHR

SEQ ID NO: 29819 - protein, 478 aa, Homo sapiens
MADGVDHIDIYADVGEEFNQEAEYGGHDQIDLYDDVISPSANNGDAPEDRDYMDTLPPTVGDDVGKGAAPNVVYTYTGKRIALYIGNLTWWTTDEDLTEAVHSLGVNDILEIKFFENRANGQSKGFALVGVGSEASSKKLMDLLPKRELHGQNPVVTPCNKQFLSQFEMQSRKTTQSGQMSGEGKAGPPLAGPPNRGDRPPPPVLFPGQPFGQPPLGPLPPGPPPPVPGYGPPPGPPPPQQGPPPPPGPFPPRPPGPLGPPLTLAPPPHLPGPPPGAPPPAPHVNPAFFPPPTNSGMPTSDSRGPPPTDPYGRPPPYDRGDYGPPGREMDTARTPLSEAEFEEIMNRNRAISSSAISRAVSDASAGDYGSAIETLVTAISLIKQSKVSADDRCKVLISSLQDCLHGIESKSYGSGSRRERSRERDHSRSREKSRRHKSRSRDRHDDYYRERSRERERHRDRDRDRDRERDREREYRHR

SEQ ID NO: 29820 - protein, 557 aa, Homo sapiens
MKKMSNIYESAANTLGIFNSPCLTKVELRVACKGISDRDALSKPDPCVILKMQSHGQWFEVDRTEVIRTCINPVYSKLFTVDFYFEEVQRLRFEVHDISSNHNGLKEADFLGGMECTLGQIVSQRKLSKSLLKHGNTAGKSSITVIAEELSGNDDYVELAFNARKLDDKDFFSKSDPFLEIFRMNDDATQQLVHRTEVVMNNLSPAWKSFKVSVNSLCSGDPDRRLKCIVWDWDSNGKHDFIGEFTSTFKEMRGAMEGKQVQWECINPKYKAKKKNYKNSGTVILNLCKIHKMHSFLDYIMGGCQIQFTVAIDFTASNGDPRNSCSLHYIHPYQPNEYLKALVAVGEICQDYDSDKMFPAFGFGARIPPEYTVSHDFAINFNEDNPECAGIQGVVEAYQSCLPKLQLYGPTNIAPIIQKVAKSASEETNTKEASQYFILLILTDGVITDMADTREAIVHASHLPMSVIIVGVGNADFSDMQMLDGDDGILRSPKGEPVLRDIVQFVPFRNFKHASPAALAKSVLAEVPNQVVDYYNGKGIKPKCSSEMYESSRTLAP

SEQ ID NO: 29821 - protein, 575 aa, Homo sapiens
MAVEPSSSESIKRRAGRRMKKMSNIYESAANTLGIFNSPCLTKVELRVACKGISDRDALSKPDPCVILKMQSHGQWFEVDRTEVIRTCINPVYSKLFTVDFYFEEVQRLRFEVHDISSNHNGLKEADFLGGMECTLGQIVSQRKLSKSLLKHGNTAGKSSITVIAEELSGNDDYVELAFNARKLDDKDFFSKSDPFLEIFRMNDDATQQLVHRTEVVMNNLSPAWKSFKVSVNSLCSGDPDRRLKCIVWDWDSNGKHDFIGEFTSTFKEMRGAMEGKQVQWECINPKYKAKKKNYKNSGTVILNLCKIHKMHSFLDYIMGGCQIQFTVAIDFTASNGDPRNSCSLHYIHPYQPNEYLKALVAVGEICQDYDSDKMFPAFGFGARIPPEYTVSHDFAINFNEDNPECAGIQGVVEAYQSCLPKLQLYGPTNIAPIIQKVAKSASEETNTKEASQYFILLILTDGVITDMADTREAIVHASHLPMSVIIVGVGNADFSDMQMLDGDDGILRSPKGEPVLRDIVQFVPFRNFKHASPAALAKSVLAEVPNQVVDYYNGKGIKPKCSSEMYESSRTLAP

SEQ ID NO: 29822 - protein, 839 aa, Homo sapiens
MGWVGGRRRDSASPPGRSRSAADDINPAPANMEGGGGSVAVAGLGARGSGAAAATVRELLQDGCYSDFLNEDFDVKTYTSQSIHQAVIAEQLAKLAQGISQLDRELHLQVVARHEDLLAQATGIESLEGVLQMMQTRIGALQGAVDRIKAKIVEPYNKIVARTAQLARLQVACDLLRRIIRILNLSKRLQGQLQGGSREITKAAQSLNELDYLSQGIDLSGIEVIENDLLFIARARLEVENQAKRLLEQGLETQNPTQVGTALQVFYNLGTLKDTITSVVDGYCATLEENINSALDIKVLTQPSQSAVRGGPGRSTMPTPGNTAALRASFWTNMEKLMDHIYAVCGQVQHLQKVLAKKRDPVSHICFIEEIVKDGQPEIFYTFWNSVTQALSSQFHMATNSSMFLKQAFEGEYPKLLRLYNDLWKRLQQYSQHIQGNFNASGTTDLYVDLQHMEDDAQDIFIPKKPDYDPEKALKDSLQPYEAAYLSKSLSRLFDPINLVFPPGGRNPPSSDELDGIIKTIASELNVAAVDTNLTLAVSKNVAKTIQLYSVKSEQLLSTQGDASQVIGPLTEGQRRNVAVVNSLYKLHQSVTKAIHALMENAVQPLLTSVGDAIEAIIITMHQEDFSGSLSSSGKPDVPCSLYMKELQGFIARVMSDYFKHFECLDFVFDNTEAIAQRAVELFIRHASLIRPLGEGGKMRLAADFAQMELAVGPFCRRVSDLGKSYRMLRSFRPLLFQASEHVASSPALGDVIPFSIIIQFLFTRAPAELKSPFQRAEWSHTRFSQWLDDHPSEKDRLLLIRGALEAYVQSVRSREGKEFAPVYPIMVQLLQKAMSALQ

SEQ ID NO: 29823 - protein, 860 aa, Homo sapiens
MGWVGGRRRDSASPPGRSRSAADDINPAPANMEGGGGSVAVAGLGARGSGAAAATVRELLQDGCYSDFLNEDFDVKTYTSQSIHQAVIAEQLAKLAQGISQLDRELHLQVVARHEDLLAQATGIESLEGVLQMMQTRIGALQGAVDRIKAKIVEPYNKIVARTAQLARLQVACDLLRRIIRILNLSKRLQGQLQGGSREITKAAQSLNELDYLSQGIDLSGIEVIENDLLFIARARLEVENQAKRLLEQGLETQNPTQVGTALQVFYNLGTLKDTITSVVDGYCATLEENINSALDIKVLTQPSQSAVRGGPGRSTMPTPGNTAALRASFWTNMEKLMDHIYAVCGQVQHLQKVLAKKRDPVSHICFIEEIVKDGQPEIFYTFWNSVTQALSSQFHMATNSSMFLKQAFEGEYPKLLRLYNDLWKRLQQYSQHIQGNFNASGTTDLYVDLQHMEDDAQDIFIPKKPDYDPEKALKDSLQPYEAAYLSKSLSRLFDPINLVFPPGGRNPPSSDELDGIIKTIASELNVAAVDTNLTLAVSKNVAKTIQLYSVKSEQLLSTQGDASQVIGPLTEGQRRNVAVVNSLYKLHQSVTKVVSSQSSFPLAAEQTIISALKAIHALMENAVQPLLTSVGDAIEAIIITMHQEDFSGSLSSSGKPDVPCSLYMKELQGFIARVMSDYFKHFECLDFVFDNTEAIAQRAVELFIRHASLIRPLGEGGKMRLAADFAQMELAVGPFCRRVSDLGKSYRMLRSFRPLLFQASEHVASSPALGDVIPFSIIIQFLFTRAPAELKSPFQRAEWSHTRFSQWLDDHPSEKDRLLLIRGALEAYVQSVRSREGKEFAPVYPIMVQLLQKAMSALQ

SEQ ID NO: 29824 - protein, 823 aa, Homo sapiens
MGWVGGRRRDSASPPGRSRSAADDINPAPANMEGGGGSVAVAGLGARGSGAAAATVRELLQDGCYSDFLNEDFDVKTYTSQSIHQAVIAEQLAKLAQGISQLDRELHLQVVARHEDLLAQATGIESLEGVLQMMQTRIGALQGAVDRIKAKIVEPYNKIVARTAQLARLQVACDLLRRIIRILNLSKRLQGQLQGGSREITKAAQSLNELDYLSQGIDLSGIEVIENDLLFIARARLEVENQAKRLLEQGLETQNPTQVGTALQVFYNLGTLKDTITSVVDGYCATLEENINSALDIKVLTQPSQSAVRGGPGRSTMPTPGNTAALRASFWTNMEKLMDHIYAVCGQVQHLQKVLAKKRDPVSHICFIEEIVKDGQPEIFYTFWNSVTQALSSQFHMATNSSMFLKQAFEGEYPKLLRLYNDLWKRLQQYSQHIQGNFNASGTTDLYVDLQHMEDDAQDIFIPKKPDYDPEKALKDSLQPYEAAYLSKSLSRLFDPINLVFPPGGRNPPSSDELDGIIKTIASELNVAAVDTNLTLAVSKNVAKTIQLYSVKSEQLLSTQGDASQVIGPLTEGQRRNVAVVNSLYKLHQSVTKVVSSQSSFPLAAEQTIISALKAIHALMENAVQPLLTSVGDAIEAIIITMHQEDFSGSLSSSGKPDVPCSLYMKELQGFIARVMSDYFKHFECLDFVFDNTEAIAQRAVELFIRHASLIRPLGEGGKMRLAADFAQMELAVGPFCRRVSDLGKSYRMLRSFRPLLFQASEHVASSPALGDVIPFSIIIQFLFTRAPAELKSPFQRAEWSHTRFSQWLDDHPSEKDRLLLIR

SEQ ID NO: 29825 - protein, 1500 aa, Homo sapiens
MTRILTAFKVVRTLKTGFGFTNVTAHQKWKFSRPGIRLLSVKAQTAHIVLEDGTKMKGYSFGHPSSVAGEVVFNTGLGGYPEAITDPAYKGQILTMANPIIGNGGAPDTTALDELGLSKYLESNGIKVSGLLVLDYSKDYNHWLATKSLGQWLQEEKVPAIYGVDTRMLTKIIRDKGTMLGKIEFEGQPVDFVDPNKQNLIAEVSTKDVKVYGKGNPTKVVAVDCGIKNNVIRLLVKRGAEVHLVPWNHDFTKMEYDGILIAGGPGNPALAEPLIQNVRKILESDRKEPLFGISTGNLITGLAAGAKTYKMSMANRGQNQPVLNITNKQAFITAQNHGYALDNTLPAGWKPLFVNVNDQTNEGIMHESKPFFAVQFHPEVTPGPIDTEYLFDSFFSLIKKGKATTITSVLPKPALVASRVEVSKVLILGSGGLSIGQAGEFDYSGSQAVKAMKEENVKTVLMNPNIASVQTNEVGLKQADTVYFLPITPQFVTEVIKAEQPDGLILGMGGQTALNCGVELFKRGVLKEYGVKVLGTSVESIMATEDRQLFSDKLNEINEKIAPSFAVESIEDALKAADTIGYPVMIRSAYALGGLGSGICPNRETLMDLSTKAFAMTNQILVEKSVTGWKEIEYEVVRDADDNCVTVCNMENVDAMGVHTGDSVVVAPAQTLSNAEFQMLRRTSINVVRHLGIVGECNIQFALHPTSMEYCIIEVNARLSRSSALASKATGYPLAFIAAKIALGIPLPEIKNVVSGKTSACFEPSLDYMVTKIPRWDLDRFHGTSSRIGSSMKSVGEVMAIGRTFEESFQKALRMCHPSIEGFTPRLPMNKEWPSNLDLRKELSEPSSTRIYAIAKAIDDNMSLDEIEKLTYIDKWFLYKMRDILNMEKTLKGLNSESMTEETLKRAKEIGFSDKQISKCLGLTEAQTRELRLKKNIHPWVKQIDTLAAEYPSVTNYLYVTYNGQEHDVNFDDHGMMVLGCGPYHIGSSVEFDWCAVSSIRTLRQLGKKTVVVNCNPETVSTDFDECDKLYFEELSLERILDIYHQEACGGCIISVGGQIPNNLAVPLYKNGVKIMGTSPLQIDRAEDRSIFSAVLDELKVAQAPWKAVNTLNEALEFAKSVDYPCLLRPSYVLSGSAMNVVFSEDEMKKFLEEATRVSQEHPVVLTKFVEGAREVEMDAVGKDGRVISHAISEHVEDAGVHSGDATLMLPTQTISQGAIEKVKDATRKIAKAFAISGPFNVQFLVKGNDVLVIECNLRASRSFPFVSKTLGVDFIDVATKVMIGENVDEKHLPTLDHPIIPADYVAIKAPMFSWPRLRDADPILRCEMASTGEVACFGEGIHTAFLKAMLSTGFKIPQKGILIGIQQSFRPRFLGVAEQLHNEGFKLFATEATSDWLNANNVPATPVAWPSQEGQNPSLSSIRKLIRDGSIDLVINLPNNNTKFVHDNYVIRRTAVDSGIPLLTNFQVTKLFAEAVQKSRKVDSKSLFHYRQYSAGKAA

SEQ ID NO: 29826 - protein, 1049 aa, Homo sapiens
MKEENVKTVLMNPNIASVQTNEVGLKQADTVYFLPITPQFVTEVIKAEQPDGLILGMGGQTALNCGVELFKRGVLKEYGVKVLGTSVESIMATEDRQLFSDKLNEINEKIAPSFAVESIEDALKAADTIGYPVMIRSAYALGGLGSGICPNRETLMDLSTKAFAMTNQILVEKSVTGWKEIEYEVVRDADDNCVTVCNMENVDAMGVHTGDSVVVAPAQTLSNAEFQMLRRTSINVVRHLGIVGECNIQFALHPTSMEYCIIEVNARLSRSSALASKATGYPLAFIAAKIALGIPLPEIKNVVSGKTSACFEPSLDYMVTKIPRWDLDRFHGTSSRIGSSMKSVGEVMAIGRTFEESFQKALRMCHPSIEGFTPRLPMNKEWPSNLDLRKELSEPSSTRIYAIAKAIDDNMSLDEIEKLTYIDKWFLYKMRDILNMEKTLKGLNSESMTEETLKRAKEIGFSDKQISKCLGLTEAQTRELRLKKNIHPWVKQIDTLAAEYPSVTNYLYVTYNGQEHDVNFDDHGMMVLGCGPYHIGSSVEFDWCAVSSIRTLRQLGKKTVVVNCNPETVSTDFDECDKLYFEELSLERILDIYHQEACGGCIISVGGQIPNNLAVPLYKNGVKIMGTSPLQIDRAEDRSIFSAVLDELKVAQAPWKAVNTLNEALEFAKSVDYPCLLRPSYVLSGSAMNVVFSEDEMKKFLEEATRVSQEHPVVLTKFVEGAREVEMDAVGKDGRVISHAISEHVEDAGVHSGDATLMLPTQTISQGAIEKVKDATRKIAKAFAISGPFNVQFLVKGNDVLVIECNLRASRSFPFVSKTLGVDFIDVATKVMIGENVDEKHLPTLDHPIIPADYVAIKAPMFSWPRLRDADPILRCEMASTGEVACFGEGIHTAFLKAMLSTGFKIPQKGILIGIQQSFRPRFLGVAEQLHNEGFKLFATEATSDWLNANNVPATPVAWPSQEGQNPSLSSIRKLIRDGSIDLVINLPNNNTKFVHDNYVIRRTAVDSGIPLLTNFQVTKLFAEAVQKSRKVDSKSLFHYRQYSAGKAA

SEQ ID NO: 29827 - protein, 1506 aa, Homo sapiens
MPQIIKMTRILTAFKVVRTLKTGFGFTNVTAHQKWKFSRPGIRLLSVKAQTAHIVLEDGTKMKGYSFGHPSSVAGEVVFNTGLGGYPEAITDPAYKGQILTMANPIIGNGGAPDTTALDELGLSKYLESNGIKVSGLLVLDYSKDYNHWLATKSLGQWLQEEKVPAIYGVDTRMLTKIIRDKGTMLGKIEFEGQPVDFVDPNKQNLIAEVSTKDVKVYGKGNPTKVVAVDCGIKNNVIRLLVKRGAEVHLVPWNHDFTKMEYDGILIAGGPGNPALAEPLIQNVRKILESDRKEPLFGISTGNLITGLAAGAKTYKMSMANRGQNQPVLNITNKQAFITAQNHGYALDNTLPAGWKPLFVNVNDQTNEGIMHESKPFFAVQFHPEVTPGPIDTEYLFDSFFSLIKKGKATTITSVLPKPALVASRVEVSKVLILGSGGLSIGQAGEFDYSGSQAVKAMKEENVKTVLMNPNIASVQTNEVGLKQADTVYFLPITPQFVTEVIKAEQPDGLILGMGGQTALNCGVELFKRGVLKEYGVKVLGTSVESIMATEDRQLFSDKLNEINEKIAPSFAVESIEDALKAADTIGYPVMIRSAYALGGLGSGICPNRETLMDLSTKAFAMTNQILVEKSVTGWKEIEYEVVRDADDNCVTVCNMENVDAMGVHTGDSVVVAPAQTLSNAEFQMLRRTSINVVRHLGIVGECNIQFALHPTSMEYCIIEVNARLSRSSALASKATGYPLAFIAAKIALGIPLPEIKNVVSGKTSACFEPSLDYMVTKIPRWDLDRFHGTSSRIGSSMKSVGEVMAIGRTFEESFQKALRMCHPSIEGFTPRLPMNKEWPSNLDLRKELSEPSSTRIYAIAKAIDDNMSLDEIEKLTYIDKWFLYKMRDILNMEKTLKGLNSESMTEETLKRAKEIGFSDKQISKCLGLTEAQTRELRLKKNIHPWVKQIDTLAAEYPSVTNYLYVTYNGQEHDVNFDDHGMMVLGCGPYHIGSSVEFDWCAVSSIRTLRQLGKKTVVVNCNPETVSTDFDECDKLYFEELSLERILDIYHQEACGGCIISVGGQIPNNLAVPLYKNGVKIMGTSPLQIDRAEDRSIFSAVLDELKVAQAPWKAVNTLNEALEFAKSVDYPCLLRPSYVLSGSAMNVVFSEDEMKKFLEEATRVSQEHPVVLTKFVEGAREVEMDAVGKDGRVISHAISEHVEDAGVHSGDATLMLPTQTISQGAIEKVKDATRKIAKAFAISGPFNVQFLVKGNDVLVIECNLRASRSFPFVSKTLGVDFIDVATKVMIGENVDEKHLPTLDHPIIPADYVAIKAPMFSWPRLRDADPILRCEMASTGEVACFGEGIHTAFLKAMLSTGFKIPQKGILIGIQQSFRPRFLGVAEQLHNEGFKLFATEATSDWLNANNVPATPVAWPSQEGQNPSLSSIRKLIRDGSIDLVINLPNNNTKFVHDNYVIRRTAVDSGIPLLTNFQVTKLFAEAVQKSRKVDSKSLFHYRQYSAGKAA

SEQ ID NO: 29828 - protein, 658 aa, Homo sapiens
MDRGTLPLAVALLLASCSLSPTSLAETVHCDLQPVGPERGEVTYTTSQVSKGCVAQAPNAILEVHVLFLEFPTGPSQLELTLQASKQNGTWPREVLLVLSVNSSVFLHLQALGIPLHLAYNSSLVTFQEPPGVNTTELPSFPKTQILEWAAERGPITSAAELNDPQSILLRLGQAQGSLSFCMLEASQDMGRTLEWRPRTPALVRGCHLEGVAGHKEAHILRVLPGHSAGPRTVTVKVELSCAPGDLDAVLILQGPPYVSWLIDANHNMQIWTTGEYSFKIFPEKNIRGFKLPDTPQGLLGEARMLNASIVASFVELPLASIVSLHASSCGGRLQTSPAPIQTTPPKDTCSPELLMSLIQTKCADDAMTLVLKKELVAHLKCTITGLTFWDPSCEAEDRGDKFVLRSAYSSCGMQVSASMISNEAVVNILSSSSPQRKKVHCLNMDSLSFQLGLYLSPHFLQASNTIEPGQQSFVQVRVSPSVSEFLLQLDSCHLDLGPEGGTVELIQGRAAKGNCVSLLSPSPEGDPRFSFLLHFYTVPIPKTGTLSCTVALRPKTGSQDQEVHRTVFMRLNIISPDLSGCTSKGLVLPAVLGITFGAFLIGALLTAALWYIYSHTRSPSKREPVVAVAAPASSESSSTNHSIGSTQSTPCSTSSMA

SEQ ID NO: 29829 - protein, 625 aa, Homo sapiens
MDRGTLPLAVALLLASCSLSPTSLAETVHCDLQPVGPERGEVTYTTSQVSKGCVAQAPNAILEVHVLFLEFPTGPSQLELTLQASKQNGTWPREVLLVLSVNSSVFLHLQALGIPLHLAYNSSLVTFQEPPGVNTTELPSFPKTQILEWAAERGPITSAAELNDPQSILLRLGQAQGSLSFCMLEASQDMGRTLEWRPRTPALVRGCHLEGVAGHKEAHILRVLPGHSAGPRTVTVKVELSCAPGDLDAVLILQGPPYVSWLIDANHNMQIWTTGEYSFKIFPEKNIRGFKLPDTPQGLLGEARMLNASIVASFVELPLASIVSLHASSCGGRLQTSPAPIQTTPPKDTCSPELLMSLIQTKCADDAMTLVLKKELVAHLKCTITGLTFWDPSCEAEDRGDKFVLRSAYSSCGMQVSASMISNEAVVNILSSSSPQRKKVHCLNMDSLSFQLGLYLSPHFLQASNTIEPGQQSFVQVRVSPSVSEFLLQLDSCHLDLGPEGGTVELIQGRAAKGNCVSLLSPSPEGDPRFSFLLHFYTVPIPKTGTLSCTVALRPKTGSQDQEVHRTVFMRLNIISPDLSGCTSKGLVLPAVLGITFGAFLIGALLTAALWYIYSHTREYPRPPQ

SEQ ID NO: 29830 - protein, 218 aa, Homo sapiens
MAMFEQMRANVGKLLKGIDRYNPENLATLERYVETQAKENAYDLEANLAVLKLYQFNPAFFQTTVTAQILLKALTNLPHTDFTLCKCMIDQAHQEERPIRQILYLGDLLETCHFQAFWQALDENMDLLEGITGFEDSVRKFICHVVGITYQHIDRWLLAEMLGDLSDSQLKVWMSKYGWSADESGQIFICSQEESIKPKNIVEKIDFDSVSSIMASSQ

SEQ ID NO: 29831 - protein, 211 aa, Homo sapiens
MAMFEQMRANVGKLLKGIDRYNPENLATLERYVETQAKENAYDLEANLAVLKLYQFNPAFFQTTVTAQILLKALTNLPHTDFTLCKCMIDQAHQEERPIRQILYLGDLLETCHFQAFWQALDENMDLLEGITGFEDSVRKFICHVVGITYQHIDRWLLAEMLGDLSDSQLKVWMSKYGWSADESGQIFICSQEESIKPKNIVEKIDFDSEW

SEQ ID NO: 29832 - protein, 826 aa, Homo sapiens
MVAPVLETSHVFCCPNRVRGVLNWSSGPRGLLAFGTSCSVVLYDPLKRVVVTNLNGHTARVNCIQWICKQDGSPSTELVSGGSDNQVIHWEIEDNQLLKAVHLQGHEGPVYAVHAVYQRRTSDPALCTLIVSAAADSAVRLWSKKGPEVMCLQTLNFGNGFALALCLSFLPNTDVPILACGNDDCRIHIFAQQNDQFQKVLSLCGHEDWIRGVEWAAFGRDLFLASCSQDCLIRIWKLYIKSTSLETQDDDNIRLKENTFTIENESVKIAFAVTLETVLAGHENWVNAVHWQPVFYKDGVLQQPVRLLSASMDKTMILWAPDEESGVWLEQVRVGEVGGNTLGFYDCQFNEDGSMIIAHAFHGALHLWKQNTVNPREWTPEIVISGHFDGVQDLVWDPEGEFIITVGTDQTTRLFAPWKRKDQSQVTWHEIARPQIHGYDLKCLAMINRFQFVSGADEKVLRVFSAPRNFVENFCAITGQSLNHVLCNQDSDLPEGATVPALGLSNKAVFQGDIASQPSDEEELLTSTGFEYQQVAFQPSILTEPPTEDHLLQNTLWPEVQKLYGHGYEIFCVTCNSSKTLLASACKAAKKEHAAIILWNTTSWKQVQNLVFHSLTVTQMAFSPNEKFLLAVSRDRTWSLWKKQDTISPEFEPVFSLFAFTNKITSVHSRIIWSCDWSPDSKYFFTGSRDKKVVVWGECDSTDDCIEHNIGPCSSVLDVGGAVTAVSVCPVLHPSQRYVVAVGLECGKICLYTWKKTDQVPEINDWTHCVETSQSQSHTLAIRKLCWKNCSGKTEQKEAEGAEWLHFASCGEDHTVKIHRVNKCAL

SEQ ID NO: 29833 - protein, 756 aa, Homo sapiens
MVAPVLETSHVFCCPNRVRGVLNWSSGPRGLLAFGTSCSVVLYDPLKRVVVTNLNGHTARVNCIQWICKQDGSPSTELVSGGSDNQVIHWEIEDNQLLKAVHLQGHEGPVYAVHAVYQRRTSDPALCTLIVSAAADSAVRLWSKKGPEVPILACGNDDCRIHIFAQQNDQFQKVLSLCGHEDWIRGVEWAAFGRDLFLASCSQDCLIRIWKLYIKSTSLETQDDDNIRLKENTFTIENESVKIAFAVTLETVLAGHENWVNAVHWQPVFYKDGVLQQPVRLLSASMDKTMILWAPDEESGVWLEQREWTPEIVISGHFDGVQDLVWDPEGEFIITVGTDQTTRLFAPWKRKDQSQVTWHEIARPQIHGYDLKCLAMINRFQFVSGADEKVLRVFSAPRNFVENFCAITGQSLNHVLCNQDSDLPEGATVPALGLSNKAVFQGDIASQPSDEEELLTSTGFEYQQVAFQPSILTEPPTEDHLLQNTLWPEVQKLYGHGYEIFCVTCNSSKTLLASACKAAKKEHAAIILWNTTSWKQVQNLVFHSLTVTQMAFSPNEKFLLAVSRDRTWSLWKKQDTISPEFEPVFSLFAFTNKITSVHSRIIWSCDWSPDSKYFFTGSRDKKVVVWGECDSTDDCIEHNIGPCSSVLDVGGAVTAVSVCPVLHPSQRYVVAVGLECGKICLYTWKKTDQVPEINDWTHCVETSQSQSHTLAIRKLCWKNCSGKTEQKEAEGAEWLHFASCGEDHTVKIHRVNKCAL

SEQ ID NO: 29834 - protein, 800 aa, Homo sapiens
MVAPVLETSHVFCCPNRVRGVLNWSSGPRGLLAFGTSCSVVLYDPLKRVVVTNLNGHTARVNCIQWICKQDGSPSTELVSGGSDNQVIHWEIEDNQLLKAVHLQGHEGPVYAVHAVYQRRTSDPALCTLIVSAAADSAVRLWSKKGPEVPILACGNDDCRIHIFAQQNDQFQKVLSLCGHEDWIRGVEWAAFGRDLFLASCSQDCLIRIWKLYIKSTSLETQDDDNIRLKENTFTIENESVKIAFAVTLETVLAGHENWVNAVHWQPVFYKDGVLQQPVRLLSASMDKTMILWAPDEESGVWLEQVRVGEVGGNTLGFYDCQFNEDGSMIIAHAFHGALHLWKQNTVNPREWTPEIVISGHFDGVQDLVWDPEGEFIITVGTDQTTRLFAPWKRKDQSQVTWHEIARPQIHGYDLKCLAMINRFQFVSGADEKVLRVFSAPRNFVENFCAITGQSLNHVLCNQDSDLPEGATVPALGLSNKAVFQGDIASQPSDEEELLTSTGFEYQQVAFQPSILTEPPTEDHLLQNTLWPEVQKLYGHGYEIFCVTCNSSKTLLASACKAAKKEHAAIILWNTTSWKQVQNLVFHSLTVTQMAFSPNEKFLLAVSRDRTWSLWKKQDTISPEFEPVFSLFAFTNKITSVHSRIIWSCDWSPDSKYFFTGSRDKKVVVWGECDSTDDCIEHNIGPCSSVLDVGGAVTAVSVCPVLHPSQRYVVAVGLECGKICLYTWKKTDQVPEINDWTHCVETSQSQSHTLAIRKLCWKNCSGKTEQKEAEGAEWLHFASCGEDHTVKIHRVNKCAL

SEQ ID NO: 29835 - protein, 705 aa, Homo sapiens
MVAPVLETSHVFCCPNRVRGVLNWSSGPRGLLAFGTSCSVVLYDPLKRVVVTNLNGHTARVNCIQWICKQDGSPSTELVSGGSDNQVIHWEIEDNQLLKAVHLQGHEGPVYAVHAVYQRRTSDPALCTLIVSAAADSAVRLWSKKGPEVMCLQTLNFGNGFALALCLSFLPNTDVPILACGNDDCRIHIFAQQNDQFQKVLSLCGHEDWIRGVEWAAFGRDLFLASCSQDCLIRIWKLYIKSTSLETQDDDNIRLKENTFTIENESVKIAFAVTLETVLAGHENWVNAVHWQPVFYKDGVLQQPVRLLSASMDKTMILWAPDEESGVWLEQVRVGEVGGNTLGFYDCQFNEDGSMIIAHAFHGALHLWKQNTVNPREWTPEIVISGHFDGVQDLVWDPEGEFIITVGTDQTTRLFAPWKRKDQSQVTWHEIARPQIHGYDLKCLAMINRFQFVSGADEKVLRVFSAPRNFVENFCAITGQSLNHVLCNQDSDLPEGATVPALGLSNKAVFQGDIASQPSDEEELLTSTGFEYQQVAFQPSILTEPPTEDHLLQNTLWPEVQKLYGHGYEIFCVTCNSSKTLLASACKAAKKEHAAIILWNTTSWKQVQNLVFHSLTVTQMAFSPNEKFLLAVSRDRTWSLWKKQDTISPEFVELFGLVIGVLTASISSLGVETKRWLSGVSATPLMTVLSTTLAPAPQSWTWVGL

SEQ ID NO: 29836 - protein, 821 aa, Homo sapiens
MVAPVLETSHVFCCPNRVRGVLNWSSGPRGLLAFGTSCSVVLYDPLKRVVVTNLNGHTARVNCIQWICKQDGSPSTELVSGGSDNQVIHWEIEDNQLLKAVHLQGHEGPVYAVHAVYQRRTSDPALCTLIVSAAADSAVRLWSKKGPEVTWKTGQVERGRAWKPPASLALCSRSCDSMVSCYASILCKALWKEKLHTFWHHNRISFLPSAFRPIPILACGNDDCRIHIFAQQNDQFQKVLSLCGHEDWIRGVEWAAFGRDLFLASCSQDCLIRIWKLYIKSTSLETQDDDNIRLKENTFTIENESVKIAFAVTLETVLAGHENWVNAVHWQPVFYKDGVLQQPVRLLSASMDKTMILWAPDEESGVWLEQREWTPEIVISGHFDGVQDLVWDPEGEFIITVGTDQTTRLFAPWKRKDQSQVTWHEIARPQIHGYDLKCLAMINRFQFVSGADEKVLRVFSAPRNFVENFCAITGQSLNHVLCNQDSDLPEGATVPALGLSNKAVFQGDIASQPSDEEELLTSTGFEYQQVAFQPSILTEPPTEDHLLQNTLWPEVQKLYGHGYEIFCVTCNSSKTLLASACKAAKKEHAAIILWNTTSWKQVQNLVFHSLTVTQMAFSPNEKFLLAVSRDRTWSLWKKQDTISPEFEPVFSLFAFTNKITSVHSRIIWSCDWSPDSKYFFTGSRDKKVVVWGECDSTDDCIEHNIGPCSSVLDVGGAVTAVSVCPVLHPSQRYVVAVGLECGKICLYTWKKTDQVPEINDWTHCVETSQSQSHTLAIRKLCWKNCSGKTEQKEAEGAEWLHFASCGEDHTVKIHRVNKCAL

SEQ ID NO: 29837 - protein, 891 aa, Homo sapiens
MVAPVLETSHVFCCPNRVRGVLNWSSGPRGLLAFGTSCSVVLYDPLKRVVVTNLNGHTARVNCIQWICKQDGSPSTELVSGGSDNQVIHWEIEDNQLLKAVHLQGHEGPVYAVHAVYQRRTSDPALCTLIVSAAADSAVRLWSKKGPEVMCLQTLNFGNGFALALCLSFLPNTDVTWKTGQVERGRAWKPPASLALCSRSCDSMVSCYASILCKALWKEKLHTFWHHNRISFLPSAFRPIPILACGNDDCRIHIFAQQNDQFQKVLSLCGHEDWIRGVEWAAFGRDLFLASCSQDCLIRIWKLYIKSTSLETQDDDNIRLKENTFTIENESVKIAFAVTLETVLAGHENWVNAVHWQPVFYKDGVLQQPVRLLSASMDKTMILWAPDEESGVWLEQVRVGEVGGNTLGFYDCQFNEDGSMIIAHAFHGALHLWKQNTVNPREWTPEIVISGHFDGVQDLVWDPEGEFIITVGTDQTTRLFAPWKRKDQSQVTWHEIARPQIHGYDLKCLAMINRFQFVSGADEKVLRVFSAPRNFVENFCAITGQSLNHVLCNQDSDLPEGATVPALGLSNKAVFQGDIASQPSDEEELLTSTGFEYQQVAFQPSILTEPPTEDHLLQNTLWPEVQKLYGHGYEIFCVTCNSSKTLLASACKAAKKEHAAIILWNTTSWKQVQNLVFHSLTVTQMAFSPNEKFLLAVSRDRTWSLWKKQDTISPEFEPVFSLFAFTNKITSVHSRIIWSCDWSPDSKYFFTGSRDKKVVVWGECDSTDDCIEHNIGPCSSVLDVGGAVTAVSVCPVLHPSQRYVVAVGLECGKICLYTWKKTDQVPEINDWTHCVETSQSQSHTLAIRKLCWKNCSGKTEQKEAEGAEWLHFASCGEDHTVKIHRVNKCAL

SEQ ID NO: 29838 - protein, 756 aa, Homo sapiens
MVAPVLETSHVFCCPNRVRGVLNWSSGPRGLLAFGTSCSVVLYDPLKRVVVTNLNGHTARVNCIQWICKQDGSPSTELVSGGSDNQVIHWEIEDNQLLKAVHLQGHEGPVYAVHAVYQRRTSDPALCTLIVSAAADSAVRLWSKKGPEGRDLFLASCSQDCLIRIWKLYIKSTSLETQDDDNIRLKENTFTIENESVKIAFAVTLETVLAGHENWVNAVHWQPVFYKDGVLQQPVRLLSASMDKTMILWAPDEESGVWLEQVRVGEVGGNTLGFYDCQFNEDGSMIIAHAFHGALHLWKQNTVNPREWTPEIVISGHFDGVQDLVWDPEGEFIITVGTDQTTRLFAPWKRKDQSQVTWHEIARPQIHGYDLKCLAMINRFQFVSGADEKVLRVFSAPRNFVENFCAITGQSLNHVLCNQDSDLPEGATVPALGLSNKAVFQGDIASQPSDEEELLTSTGFEYQQVAFQPSILTEPPTEDHLLQNTLWPEVQKLYGHGYEIFCVTCNSSKTLLASACKAAKKEHAAIILWNTTSWKQVQNLVFHSLTVTQMAFSPNEKFLLAVSRDRTWSLWKKQDTISPEFEPVFSLFAFTNKITSVHSRIIWSCDWSPDSKYFFTGSRDKKVVVWGECDSTDDCIEHNIGPCSSVLDVGGAVTAVSVCPVLHPSQRYVVAVGLECGKICLYTWKKTDQVPEINDWTHCVETSQSQSHTLAIRKLCWKNCSGKTEQKEAEGAEWLHFASCGEDHTVKIHRVNKCAL

SEQ ID NO: 29839 - protein, 643 aa, Homo sapiens
MVDAGGVENITQLPQELPQMMAAAADGLGSIAIDTTQLNMSVTDPTAWATAMNNLGMVPVGLPGQQLVSDSICVPGFDPSLNMMTGITPINPMIPGLGLVPPPPPTEVAVVKEIIHCKSCTLFPQNPNLPPPSTRERPPGCKTVFVGGLPENATEEIIQEVFEQCGDITAIRKSKKNFCHIRFAEEFMVDKAIYLSGYRMRLGSSTDKKDSGRLHVDFAQARDDFYEWECKQRMRAREERHRRKLEEDRLRPPSPPAIMHYSEHEAALLAEKLKDDSKFSEAITVLLSWIERGEVNRRSANQFYSMVQSANSHVRRLMNEKATHEQEMEEAKENFKNALTGILTQFEQIVAVFNASTRQKAWDHFSKAQRKNIDIWRKHSEELRNAQSEQLMGIRREEEMEMSDDENCDSPTKKMRVDESALAAQAYALKEENDSLRWQLDAYRNEVELLKQEKEQLFRTEENLTKDQQLQFLQQTMQGMQQQLLTIQEELNNKKSELEQAKEEQSHTQALLKVLQEQLKGTKELVETNGHSHEDSNEINVLTVALVNQDRENNIEKRSQGLKSEKEALLIGIISTFLHVHPFGANIEYLWSYMQQLDSKISANEIEMLLMRLPRMFKQEFTGVGATLEKRWKLCAFEGIKTT

SEQ ID NO: 29840 - protein, 235 aa, Homo sapiens
MVDKAIYLSGYRMRLGSSTDKKDSGRLHVDFAQARDDFYEWECKQRMRAREERHRRKLEEDRLRPPSPPAIMHYSEHEAALLAEKLKDDSKFSEAITVLLSWIERGEVNRRSANQFYSMVQSANSHVRRLMNEKATHEQEMEEAKENFKNALTGILTQFEQIVAVFNASTRQKAWDHFSKAQRKNIDIWRKHSEELRNAQSEQLMGIRREEEMEMSDDENCDSPTKKMRVDESGA

SEQ ID NO: 29841 - protein, 543 aa, Homo sapiens
MAAAKAEMQLMSPLQISDPFGSFPHSPTMDNYPKLEEMMLLSNGAPQFLGAAGAPEGSGSNSSSSSSGGGGGGGGGSNSSSSSSTFNPQADTGEQPYEHLTAESFPDISLNNEKVLVETSYPSQTTRLPPITYTGRFSLEPAPNSGNTLWPEPLFSLVSGLVSMTNPPASSSSAPSPAASSASASQSPPLSCAVPSNDSSPIYSAAPTFPTPNTDIFPEPQSQAFPGSAGTALQYPPPAYPAAKGGFQVPMIPDYLFPQQQGDLGLGTPDQKPFQGLESRTQQPSLTPLSTIKAFATQSGSQDLKALNTSYQSQLIKPSRMRKYPNRPSKTPPHERPYACPVESCDRRFSRSDELTRHIRIHTGQKPFQCRICMRNFSRSDHLTTHIRTHTGEKPFACDICGRKFARSDERKRHTKIHLRQKDKKADKSVVASSATSSLSSYPSPVATSYPSPVTTSYPSPATTSYPSPVPTSFSSPGSSTYPSPVHSGFPSPSVATTYSSVPPAFPAQVSSFPSSAVTNSFSASTGLSDMTATFSPRTIEIC

SEQ ID NO: 29842 - protein, 610 aa, Homo sapiens
MQRDFRWLWVYEIGYAADNSRTLNVDSTAMTLPMSDPTAWATAMNNLGMAPLGIAGQPILPDFDPALGMMTGIPPITPMMPGLGIVPPPIPPDMPVVKEIIHCKSCTLFPPNPNLPPPATRERPPGCKTVFVGGLPENGTEQIIVEVFEQCGEIIAIRKSKKNFCHIRFAEEYMVDKALYLSGYRIRLGSSTDKKDTGRLHVDFAQARDDLYEWECKQRMLAREERHRRRMEEERLRPPSPPPVVHYSDHECSIVAEKLKDDSKFSEAVQTLLTWIERGEVNRRSANNFYSMIQSANSHVRRLVNEKAAHEKDMEEAKEKFKQALSGILIQFEQIVAVYHSASKQKAWDHFTKAQRKNISVWCKQAEEIRNIHNDELMGIRREEEMEMSDDEIEEMTETKETEESALVSQAEALKEENDSLRWQLDAYRNEVELLKQEQGKVHREDDPNKEQQLKLLQQALQGMQQHLLKVQEEYKKKEAELEKLKDDKLQVEKMLENLKEKESCASRLCASNQDSEYPLEKTMNSSPIKSEREALLVGIISTFLHVHPFGASIEYICSYLHRLDNKICTSDVECLMGRLQHTFKQEMTGVGASLEKRWKFCGFEGLKLT

SEQ ID NO: 29843 - protein, 581 aa, Homo sapiens
MTLPMSDPTAWATAMNNLGMAPLGIAGQPILPDFDPALGMMTGIPPITPMMPGLGIVPPPIPPDMPVVKEIIHCKSCTLFPPNPNLPPPATRERPPGCKTVFVGGLPENGTEQIIVEVFEQCGEIIAIRKSKKNFCHIRFAEEYMVDKALYLSGYRIRLGSSTDKKDTGRLHVDFAQARDDLYEWECKQRMLAREERHRRRMEEERLRPPSPPPVVHYSDHECSIVAEKLKDDSKFSEAVQTLLTWIERGEVNRRSANNFYSMIQSANSHVRRLVNEKAAHEKDMEEAKEKFKQALSGILIQFEQIVAVYHSASKQKAWDHFTKAQRKNISVWCKQAEEIRNIHNDELMGIRREEEMEMSDDEIEEMTETKETEESALVSQAEALKEENDSLRWQLDAYRNEVELLKQEQGKVHREDDPNKEQQLKLLQQALQGMQQHLLKVQEEYKKKEAELEKLKDDKLQVEKMLENLKEKESCASRLCASNQDSEYPLEKTMNSSPIKSEREALLVGIISTFLHVHPFGASIEYICSYLHRLDNKICTSDVECLMGRLQHTFKQEMTGVGASLEKRWKFCGFEGLKLT

SEQ ID NO: 29844 - protein, 445 aa, Homo sapiens
MAEYDLTTRIAHFLDRHLVFPLLEFLSVKEIYNEKELLQGKLDLLSDTNMVDFAMDVYKNLYSDDIPHALREKRTTVVAQLKQLQAETEPIVKMFEDPETTRQMQSTRDGRMLFDYLADKHGFRQEYLDTLYRYAKFQYECGNYSGAAEYLYFFRVLVPATDRNALSSLWGKLASEILMQNWDAAMEDLTRLKETIDNNSVSSPLQSLQQRTWLIHWSLFVFFNHPKGRDNIIDLFLYQPQYLNAIQTMCPHILRYLTTAVITNKDVRKRRQVLKDLVKVIQQESYTYKDPITEFVECLYVNFDFDGAQKKLRECESVLVNDFFLVACLEDFIENARLFIFETFCRIHQCISINMLADKLNMTPEEAERWIVNLIRNARLDAKIDSKLGHVVMGNNAVSPYQQVIEKTKSLSFRSQMLAMNIEKKLNQNSRSEAPNWATQDSGFY

SEQ ID NO: 29845 - protein, 547 aa, Homo sapiens
MRQKRKGDLSPAELMMLTIGDVIKQLIEAHEQGKDIDLNKVKTKTAAKYGLSAQPRLVDIIAAVPPQYRKVLMPKLKAKPIRTASGIAVVAVMCKPHRCPHISFTGNICVYCPGGPDSDFEYSTQSYTGYEPTSMRAIRARYDPFLQTRHRIEQLKQLGHSVDKVEFIVMGGTFMALPEEYRDYFIRNLHDALSGHTSNNIYEAVKYSERSLTKCIGITIETRPDYCMKRHLSDMLTYGCTRLEIGVQSVYEDVARDTNRGHTVKAVCESFHLAKDSGFKVVAHMMPDLPNVGLERDIEQFTEFFENPAFRPDGLKLYPTLVIRGTGLYELWKSGRYKSYSPSDLVELVARILALVPPWTRVYRVQRDIPMPLVSSGVEHGNLRELALARMKDLGIQCRDVRTREVGIQEIHHKVRPYQVELVRRDYVANGGWETFLSYEDPDQDILIGLLRLRKCSEETFRFELGGGVSIVRELHVYGSVVPVSSRDPTKFQHQGFGMLLMEEAERIAREEHGSGKIAVISGVGTRNYYRKIGYRLQGPYMVKMLK

SEQ ID NO: 29846 - protein, 533 aa, Homo sapiens
MMLTIGDVIKQLIEAHEQGKDIDLNKVKTKTAAKYGLSAQPRLVDIIAAVPPQYRKVLMPKLKAKPIRTASGIAVVAVMCKPHRCPHISFTGNICVYCPGGPDSDFEYSTQSYTGYEPTSMRAIRARYDPFLQTRHRIEQLKQLGHSVDKVEFIVMGGTFMALPEEYRDYFIRNLHDALSGHTSNNIYEAVKYSERSLTKCIGITIETRPDYCMKRHLSDMLTYGCTRLEIGVQSVYEDVARDTNRGHTVKAVCESFHLAKDSGFKVVAHMMPDLPNVGLERDIEQFTEFFENPAFRPDGLKLYPTLVIRGTGLYELWKSGRYKSYSPSDLVELVARILALVPPWTRVYRVQRDIPMPLVSSGVEHGNLRELALARMKDLGIQCRDVRTREVGIQEIHHKVRPYQVELVRRDYVANGGWETFLSYEDPDQDILIGLLRLRKCSEETFRFELGGGVSIVRELHVYGSVVPVSSRDPTKFQHQGFGMLLMEEAERIAREEHGSGKIAVISGVGTRNYYRKIGYRLQGPYMVKMLK

SEQ ID NO: 29847 - protein, 428 aa, Homo sapiens
MSTHQFYRKYMCPTSMRAIRARYDPFLQTRHRIEQLKQLGHSVDKVEFIVMGGTFMALPEEYRDYFIRNLHDALSGHTSNNIYEAVKYSERSLTKCIGITIETRPDYCMKRHLSDMLTYGCTRLEIGVQSVYEDVARDTNRGHTVKAVCESFHLAKDSGFKVVAHMMPDLPNVGLERDIEQFTEFFENPAFRPDGLKLYPTLVIRGTGLYELWKSGRYKSYSPSDLVELVARILALVPPWTRVYRVQRDIPMPLVSSGVEHGNLRELALARMKDLGIQCRDVRTREVGIQEIHHKVRPYQVELVRRDYVANGGWETFLSYEDPDQDILIGLLRLRKCSEETFRFELGGGVSIVRELHVYGSVVPVSSRDPTKFQHQGFGMLLMEEAERIAREEHGSGKIAVISGVGTRNYYRKIGYRLQGPYMVKMLK

SEQ ID NO: 29848 - protein, 455 aa, Homo sapiens
MCKPHRCPHISFTGNICVYCPGGPDSDFEYSTQSYTGYEPTSMRAIRARYDPFLQTRHRIEQLKQLGHSVDKVEFIVMGGTFMALPEEYRDYFIRNLHDALSGHTSNNIYEAVKYSERSLTKCIGITIETRPDYCMKRHLSDMLTYGCTRLEIGVQSVYEDVARDTNRGHTVKAVCESFHLAKDSGFKVVAHMMPDLPNVGLERDIEQFTEFFENPAFRPDGLKLYPTLVIRGTGLYELWKSGRYKSYSPSDLVELVARILALVPPWTRVYRVQRDIPMPLVSSGVEHGNLRELALARMKDLGIQCRDVRTREVGIQEIHHKVRPYQVELVRRDYVANGGWETFLSYEDPDQDILIGLLRLRKCSEETFRFELGGGVSIVRELHVYGSVVPVSSRDPTKFQHQGFGMLLMEEAERIAREEHGSGKIAVISGVGTRNYYRKIGYRLQGPYMVKMLK

SEQ ID NO: 29849 - protein, 476 aa, Homo sapiens
MMTAKAVDKIPVTLSGFVHQLSDNIYPVEDLAATSVTIFPNAELGGPFDQMNGVAGDGMINIDMTGEKRSLDLPYPSSFAPVSAPRNQTFTYMGKFSIDPQYPGASCYPEGIINIVSAGILQGVTSPASTTASSSVTSASPNPLATGPLGVCTMSQTQPDLDHLYSPPPPPPPYSGCAGDLYQDPSAFLSAATTSTSSSLAYPPPPSYPSPKPATDPGLFPMIPDYPGFFPSQCQRDLHGTAGPDRKPFPCPLDTLRVPPPLTPLSTIRNFTLGGPSAGVTGPGASGGSEGPRLPGSSSAAAAAAAAAAYNPHHLPLRPILRPRKYPNRPSKTPVHERPYPCPAEGCDRRFSRSDELTRHIRIHTGHKPFQCRICMRNFSRSDHLTTHIRTHTGEKPFACDYCGRKFARSDERKRHTKIHLRQKERKSSAPSASVPAPSTASCSGGVQPGGTLCSSNSSSLGGGPLAPCSSRTRTP

SEQ ID NO: 29850 - protein, 426 aa, Homo sapiens
MNGVAGDGMINIDMTGEKRSLDLPYPSSFAPVSAPRNQTFTYMGKFSIDPQYPGASCYPEGIINIVSAGILQGVTSPASTTASSSVTSASPNPLATGPLGVCTMSQTQPDLDHLYSPPPPPPPYSGCAGDLYQDPSAFLSAATTSTSSSLAYPPPPSYPSPKPATDPGLFPMIPDYPGFFPSQCQRDLHGTAGPDRKPFPCPLDTLRVPPPLTPLSTIRNFTLGGPSAGVTGPGASGGSEGPRLPGSSSAAAAAAAAAAYNPHHLPLRPILRPRKYPNRPSKTPVHERPYPCPAEGCDRRFSRSDELTRHIRIHTGHKPFQCRICMRNFSRSDHLTTHIRTHTGEKPFACDYCGRKFARSDERKRHTKIHLRQKERKSSAPSASVPAPSTASCSGGVQPGGTLCSSNSSSLGGGPLAPCSSRTRTP

SEQ ID NO: 29851 - protein, 564 aa, Homo sapiens
MSYPADDYESEAAYDPYAYPSDYDMHTGDPKQDLAYERQYEQQTYQVIPEVIKNFIQYFHKTVSDLIDQKVYELQASRVSSDVIDQKVYEIQDIYENSWTKLTERFFKNTPWPEAEAIAPQVGNDAVFLILYKELYYRHIYAKVSGGPSLEQRFESYYNYCNLFNYILNADGPAPLELPNQWLWDIIDEFIYQFQSFSQYRCKTAKKSEEEIDFLRSNPKIWNVHSVLNVLHSLVDKSNINRQLEVYTSGGDPESVAGEYGRHSLYKMLGYFSLVGLLRLHSLLGDYYQAIKVLENIELNKKSMYSRVPECQVTTYYYVGFAYLMMRRYQDAIRVFANILLYIQRTKSMFQRTTYKYEMINKQNEQMHALLAIALTMYPMRIDESIHLQLREKYGDKMLRMQKGDPQVYEELFSYSCPKFLSPVVPNYDNVHPNYHKEPFLQQLKVFSDEVQQQAQLSTIRSFLKLYTTMPVAKLAGFLDLTEQEFRIQLLVFKHKMKNLVWTSGISALDGEFQSASEVDFYIDKDMIHIADTKVARRYGDFFIRQIHKFEELNRTLKKMGQRP

SEQ ID NO: 29852 - protein, 516 aa, Homo sapiens
MSYPADDYESEAAYDPYAYPSDYDMHTGDPKQDLAYERQYEQQTYQVIPEVIKNFIQYFHKTVSDLIDQKVYELQASRVSSDVIDQKVYEIQDIYENSWTKLTERFFKNTPWPEAEAIAPQVGNDAVFLILYKELYYRHIYAKVSFQSFSQYRCKTAKKSEEEIDFLRSNPKIWNVHSVLNVLHSLVDKSNINRQLEVYTSGGDPESVAGEYGRHSLYKMLGYFSLVGLLRLHSLLGDYYQAIKVLENIELNKKSMYSRVPECQVTTYYYVGFAYLMMRRYQDAIRVFANILLYIQRTKSMFQRTTYKYEMINKQNEQMHALLAIALTMYPMRIDESIHLQLREKYGDKMLRMQKGDPQVYEELFSYSCPKFLSPVVPNYDNVHPNYHKEPFLQQLKVFSDEVQQQAQLSTIRSFLKLYTTMPVAKLAGFLDLTEQEFRIQLLVFKHKMKNLVWTSGISALDGEFQSASEVDFYIDKDMIHIADTKVARRYGDFFIRQIHKFEELNRTLKKMGQRP

SEQ ID NO: 29853 - protein, 308 aa, Homo sapiens
MAPPAPGPASGGSGEVDELFDVKNAFYIGSYQQCINEAQRVKLSSPERDVERDVFLYRAYLAQRKFGVVLDEIKPSSAPELQAVRMFADYLAHESRRDSIVAELDREMSRSVDVTNTTFLLMAASIYLHDQNPDAALRALHQGDSLECTAMTVQILLKLDRLDLARKELKRMQDLDEDATLTQLATAWVSLATGGEKLQDAYYIFQEMADKCSPTLLLLNGQAACHMAQGRWEAAEGLLQEALDKDSGYPETLVNLIVLSQHLGKPPEVTNRYLSQLKDAHRSHPFIKEYQAKENDFDRLVLQYAPSA

SEQ ID NO: 29854 - protein, 257 aa, Homo sapiens
MAPPAPGPASGGSGEVDELFDVKNAFYIGSYQQCINEAQRVKLSSPERDVERDVFLYRAYLAQRKFGVVLDEIKPSSAPELQAVRMFADYLAHESRSTAMTVQILLKLDRLDLARKELKRMQDLDEDATLTQLATAWVSLATGGEKLQDAYYIFQEMADKCSPTLLLLNGQAACHMAQGRWEAAEGLLQEALDKDSGYPETLVNLIVLSQHLGKPPEVTNRYLSQLKDAHRSHPFIKEYQAKENDFDRLVLQYAPSA

SEQ ID NO: 29855 - protein, 256 aa, Homo sapiens
MAPPAPGPASGGSGEVDELFDVKNAFYIGSYQQCINEAQRVKLSSPERDVERDVFLYRAYLAQRKFGVVLDEIKPSSAPELQAVRMFADYLAHESRRDSIVAELDREMSRSVDVTNTTFLLMAASIYLHDQNPDAALRALHQGDSLECTAMTVQILLKLDRLDLARKELKRMQDLDEDATLTQLATAWVSLATDSGYPETLVNLIVLSQHLGKPPEVTNRYLSQLKDAHRSHPFIKEYQAKENDFDRLVLQYAPSA

SEQ ID NO: 29856 - protein, 516 aa, Homo sapiens
MALSQSVPFSATELLLASAIFCLVFWVLKGLRPRVPKGLKSPPEPWGWPLLGHVLTLGKNPHLALSRMSQRYGDVLQIRIGSTPVLVLSRLDTIRQALVRQGDDFKGRPDLYTSTLITDGQSLTFSTDSGPVWAARRRLAQNALNTFSIASDPASSSSCYLEEHVSKEAKALISRLQELMAGPGHFDPYNQVVVSVANVIGAMCFGQHFPESSDEMLSLVKNTHEFVETASSGNPLDFFPILRYLPNPALQRFKAFNQRFLWFLQKTVQEHYQDFDKNSVRDITGALFKHSKKGPRASGNLIPQEKIVNLVNDIFGAGFDTVTTAISWSLMYLVTKPEIQRKIQKELDTVIGRERRPRLSDRPQLPYLEAFILETFRHSSFLPFTIPHSTTRDTTLNGFYIPKKCCVFVNQWQVNHDPELWEDPSEFRPERFLTADGTAINKPLSEKMMLFGMGKRRCIGEVLAKWEIFLFLAILLQQLEFSVPPGVKVDLTPIYGLTMKHARCEHVQARLRFSIN

SEQ ID NO: 29857 - protein, 106 aa, Homo sapiens
MALDPADQHLRHVEKDVLIPKIMREKAKERCSEQVQDFTKCCKNSGVLMVVKCRKENSALKECLTAYYNDPAFYEECKMEYLKEREEFRKTGIPTKKRLQKLPTSM

SEQ ID NO: 29858 - protein, 657 aa, Homo sapiens
MASARKASRPMRDVFGDFSDVSLEDSTMEEIRNFQISRNLTKIAPGHSRFLKRNQTLDEKHLLLKENPVLGSGPRLASCRPPTTASRIRANAALMKLAQLETRIMNRKLQRNLSDTESDSMTADAGLPKRADRILSGGALELASQNTDKTSQNQARELPVTENNAQNAKVSRFLKKKQAPVENISPEAPAGKERTLQTPKQKEPARTFDSPDSDEEEMKVLLGSLMDSSREKNTNQGFSSANVSEEEERKLFSVPSQLRAFTVPSVELSSAKPSQTSHLPTSLAADRTLHSTRSRADYPQSHVSSDTASHTPSVSITGAFSNSVSLKMGHVKLVSSPGRSEAETVDEPVSEGADDSLDEFRINILSLDGLAPAVSENSDLEQEEESAQRQKTAGKIFRAEASTGQDAPRQAQARSWASQGKAASAEGDESEVSEHLSASSASAIQQDSTSSMQPPSEAPMVNTVSSAYSEDFENSPSLTASEPTAHSKESLDRTLDALSESSSSVKTDLPQTAESRKKSGRHVTRVLVKDTAVQTPDPAFTYEWTKVASMAAMGPALGGAYVDPTPIANHVISADAIEALTAYSPAVLALHDVLKQQLSLTQQFIQASRHLHASLLRSLDADSFHYHTLEEAKEYIRCHRPAPLTMEDALEEVNKEL

SEQ ID NO: 29859 - protein, 618 aa, Homo sapiens
MASARKASRPMRDVFGDFSDVSLEDSTMEEIRNFQISRNLTKIAPGHSRFLKRNQTLDEKHLLLKENPVLGSGPRLASCRPPTTASRIRANAALMKLAQLETRIMNRKLQRNLSDTESDSMTADAGLPKRADRILSGGALELASQNTDKTSQNQARELPVTENNAQNAKVSRFLKKKQAPVENISPEAPAGKERTLQTPKQKEPARTFDSPDSDEEEMKVLLGSLMDSSREKNTNQGFSSANVSEEEERKLFSVPSQLRAFTVPSVELSSAKPSQTSHLPTSLAADRTLHSTRSRADYPQSHVSSDTASHTPSVSITGAFSNSVSLKMGHVKLVSSPGRSEAETVDEPVSEGADDSLDEFRINILSLDGLAPAVSENSDLEQEEESAQRQKTAGKIFRAEASTGQDAPRQAQARSWASQGKAASAEGDESEVSEHLSASSASAIQQDSTSSMQPPSEAPMVNTVSSAYSEDFENSPSLTASEPTAHSKESLDRTLDALSESSSSVKTDLPQTAESRKKSGRHVTRVLVKDTAVQTPDPAFTYEWTKVASMAAMGPALGGAYVDPTPIANHVISADAIEAAEPDAAVHPGQPAPARLPPALPGRGLLPLPHPGGSQRVH

SEQ ID NO: 29860 - protein, 412 aa, Homo sapiens
MQKYCIYQHFQFQLLIQHLWIAANCDIADERFDATFHTNVLVNSSGHCQYLPPGIFKSSCYIDVRWFPFDVQHCKLKFGSWSYGGWSLDLQMQEADISGYIPNGEWDLVGIPGKRSERFYECCKEPYPDVTFTVTMRRRTLYYGLNLLIPCVLISALALLVFLLPADSGEKISLGITVLLSLTVFMLLVAEIMPATSDSVPLIAQYFASTMIIVGLSVVVTVIVLQYHHHDPDGGKMPKWTRVILLNWCAWFLRMKRPGEDKVRPACQHKQRRCSLASVEMSAVAPPPASNGNLLYIGFRGLDGVHCVPTPDSGVVCGRMACSPTHDEHLLHGGQPPEGDPDLAKILEEVRYIANRFRCQDESEAVCSEWKFAACVVDRLCLMAFSVFTIICTIGILMSAPNFVEAVSKDFA

SEQ ID NO: 29861 - protein, 154 aa, Homo sapiens
MSATRAKKVKMATKSCPECDQQVPVACKSCPCGYIFISRKLLNAKHSEKSPPSTENKHEAKRRRTERVRREKINSTVNKDLENRKRSRSNSHSDHIRRGRGRPKSASAKKHEEEREKQEKEIDIYANLSDEKAFVFSVALAEINRKIINQRLIL

SEQ ID NO: 29862 - protein, 93 aa, Homo sapiens
MSATRAKKVKMATKSCPECDQQVPVACKSCPCGYIFISRKLLNAKHSEKSPPSTEKQEKEIDIYANLSDEKAFVFSVALAEINRKIINQRLIL

SEQ ID NO: 29863 - protein, 158 aa, Homo sapiens
MRASRSPPSPRRCHHHHEATGAASGAAAGGPGAGCVGLCRLALTPSAQDGRNSTFQTYKKEVCLPRHSMHPGPWAICCECQTRFGGRLPVSRVEAALPYWVPLSLRPRKQHPCWMHAAGTTAGGSAVMSACCPSSSSSRPPTRTSYRLLQRVCCPSAS

SEQ ID NO: 29864 - protein, 275 aa, Homo sapiens
MEERKEEGEAEIQEHGPEHWFSKWERQCLAEAEQDEQLPPELQEEAAAAAQPEHKQQKLWHLFQNSATAVAQLYKDRVCQQPGLSLWVPFQNAATAVTNLYKESVDTHQRSFDIGIQIGYQRRNKDVLAWVKKRRRTIRREDLISFLCGKVPPPRNSRAPPRLTVVSPNRATSTETSSSVETDLQPFREAIALHGLSGAMASISVRSSTPGSPTHVSSGSNASRRRNGLHDVDLNTFISEEMALHLDNGGTRKRTSAQCGDVITDSPTHKRNRMI

SEQ ID NO: 29865 - protein, 80 aa, Homo sapiens
MFPLVKSALNRLQVRSIQQTMARQSHQKRTPDFHDKYGNAVLASGATFCIVTWTYVATQVGIEWNLSPVGRVTPKEWRNQ

SEQ ID NO: 29866 - protein, 161 aa, Homo sapiens
MHRSEPFLKMSLLILLFLGLAEACTPREVATKEKINLLKGIIGLMSRLSPDGLRHNITSLKMPPLVSPQDRTEEEIKKILGLLSLQVLHEETSGCKEEVKPFSGTTPSRKPLPKRKNTWNFLKCAYMVMTYLFVSYNKGDWCYCHYCNLELDIRDDPCCSF

SEQ ID NO: 29867 - protein, 245 aa, Homo sapiens
MTLFPVLLFLVAGLLPSFPANEDKDPAFTALLTTQTQVQREIVNKHNELRRAVSPPARNMLKMEWNKEAAANAQKWANQCNYRHSNPKDRMTSLKCGENLYMSSASSSWSQAIQSWFDEYNDFDFGVGPKTPNAVVGHYTQVVWYSSYLVGCGNAYCPNQKVLKYYYVCQYCPAGNWANRLYVPYEQGAPCASCPDNCDDGLCTNGCKYEDLYSNCKSLKLTLTCKHQLVRDSCKASCNCSNSIY

SEQ ID NO: 29868 - protein, 258 aa, Homo sapiens
MKQILHPALETTAMTLFPVLLFLVAGLLPSFPANEDKDPAFTALLTTQTQVQREIVNKHNELRRAVSPPARNMLKMEWNKEAAANAQKWANQCNYRHSNPKDRMTSLKCGENLYMSSASSSWSQAIQSWFDEYNDFDFGVGPKTPNAVVGHYTQVVWYSSYLVGCGNAYCPNQKVLKYYYVCQYCPAGNWANRLYVPYEQGAPCASCPDNCDDGLCTNGCKYEDLYSNCKSLKLTLTCKHQLVRDSCKASCNCSNSIY

SEQ ID NO: 29869 - protein, 268 aa, Homo sapiens
MKQILHPALETTDPCSTGFVFPAMTLFPVLLFLVAGLLPSFPANEDKDPAFTALLTTQTQVQREIVNKHNELRRAVSPPARNMLKMEWNKEAAANAQKWANQCNYRHSNPKDRMTSLKCGENLYMSSASSSWSQAIQSWFDEYNDFDFGVGPKTPNAVVGHYTQVVWYSSYLVGCGNAYCPNQKVLKYYYVCQYCPAGNWANRLYVPYEQGAPCASCPDNCDDGLCTNGCKYEDLYSNCKSLKLTLTCKHQLVRDSCKASCNCSNSIY

SEQ ID NO: 29870 - protein, 1036 aa, Homo sapiens
MYLVAGDRGLAGCGHLLVSLLGLLLLLARSGTRALVCLPCDESKCEEPRNCPGSIVQGVCGCCYTCASQRNESCGGTFGIYGTCDRGLRCVIRPPLNGDSLTEYEAGVCEDENWTDDQLLGFKPCNENLIAGCNIINGKCECNTIRTCSNPFEFPSQDMCLSALKRIEEEKPDCSKARCEVQFSPRCPEDSVLIEGYAPPGECCPLPSRCVCNPAGCLRKVCQPGNLNILVSKASGKPGECCDLYECKPVFGVDCRTVECPPVQQTACPPDSYETQVRLTADGCCTLPTRCECLSGLCGFPVCEVGSTPRIVSRGDGTPGKCCDVFECVNDTKPACVFNNVEYYDGDMFRMDNCRFCRCQGGVAICFTAQCGEINCERYYVPEGECCPVCEDPVYPFNNPAGCYANGLILAHGDRWREDDCTFCQCVNGERHCVATVCGQTCTNPVKVPGECCPVCEEPTIITVDPPACGELSNCTLTGKDCINGFKRDHNGCRTCQCINTEELCSERKQGCTLNCPFGFLTDAQNCEICECRPRPKKCRPIICDKYCPLGLLKNKHGCDICRCKKCPELSCSKICPLGFQQDSHGCLICKCREASASAGPPILSGTCLTVDGHHHKNEESWHDGCRECYCLNGREMCALITCPVPACGNPTIHPGQCCPSCADDFVVQKPELSTPSICHAPGGEYFVEGETWNIDSCTQCTCHSGRVLCETEVCPPLLCQNPSRTQDSCCPQCTDQPFRPSLSRNNSVPNYCKNDEGDIFLAAESWKPDVCTSCICIDSVISCFSESCPSVSCERPVLRKGQCCPYCIEDTIPKKVVCHFSGKAYADEERWDLDSCTHCYCLQGQTLCSTVSCPPLPCVEPINVEGSCCPMCPEMYVPEPTNIPIEKTNHRGEVDLEVPLWPTPSENDIVHLPRDMGHLQVDYRDNRLHPSEDSSLDSIASVVVPIIICLSIIIAFLFINQKKQWIPLLCWYRTPTKPSSLNNQLVSVDCKKGTRVQVDSSQRMLRIAEPDARFSGFYSMQKQNHLQADNFYQTV

SEQ ID NO: 29871 - protein, 353 aa, Homo sapiens
MRLPRRAALGLLPLLLLLPPAPEAAKKPTPCHRCRGLVDKFNQGMVDTAKKNFGGGNTAWEEKTLSKYESSEIRLLEILEGLCESSDFECNQMLEAQEEHLEAWWLQLKSEYPDLFEWFCVKTLKVCCSPGTYGPDCLACQGGSQRPCSGNGHCSGDGSRQGDGSCRCHMGYQGPLCTDCMDGYFSSLRNETHSICTACDESCKTCSGLTNRDCGECEVGWVLDEGACVDVDECAAEPPPCSAAQFCKNANGSYTCEECDSSCVGCTGEGPGNCKECISGYAREHGQCADVDECSLAEKTCVRKNENCYNTPGSYVCVCPDGFEETEDACVPPAEAEATEGESPTQLPSREDL

SEQ ID NO: 29872 - protein, 321 aa, Homo sapiens
MRLPRRAALGLLPLLLLLPPAPEAAKKPTPCHRCRGLVDKFNQGMVDTAKKNFGGGNTAWEEKTLSKYESSEIRLLEILEGLCESSDFECNQMLEAQEEHLEAWWLQLKSEYPDLFEWFCVKTLKVCCSPGTYGPDCLACQGGSQRPCSGNGHCSGDGSRQGDGSCRCHMGYQGPLCTDCMDGYFSSLRNETHSICTACDESCKTCSGLTNRDCGECEVGWVLDEGACVDVDECAAEPPPCSAAQFCKNANGSYTCEDVDECSLAEKTCVRKNENCYNTPGSYVCVCPDGFEETEDACVPPAEAEATEGESPTQLPSREDL

SEQ ID NO: 29873 - protein, 284 aa, Homo sapiens
MRLPRRAALGLLPLLLLLPPAPEAAKKPTPCHRCRGLVDKFNQGMVDTAKKNFGGGNTAWEEKTLSKYESSEIRLLEILEGLCESSDFECNQMLEAQEEHLEAWWLQLKSEYPDLFEWFCVKTLKVCCSPGTYGPDCLACQGGSQRPCSGNGHCSGDGSRQGDGSCRCHMGYQGPLCTDCMDGYFSSLRNETHSICTACDESCKTCSGLTNRDCGECEVGWVLDEGACVDVDECAAEPPPCSAAQFCKNANGSYTCEGGPGGRVCTPGPAGFRCCLCQHSFMAS

SEQ ID NO: 29874 - protein, 325 aa, Homo sapiens
MRLPRRAALGLLPLLLLLPPAPEAAKKPTPCHRCRGLVDKFNQGMVDTAKKNFGGGNTAWEEKTLSKYESSEIRLLEILEGLCESSDFECNQMLEAQEEHLEAWWLQLKSEYPDLFEWFCVKTLKVCCSPGTYGPDCLACQGGSQRPCSGNGHCSGDGSRQGDGSCRCHMGYQGPLCTDCMDGYFSSLRNETHSICTACDESCKTCSGLTNRDCGECEVGWVLDEGACVECDSSCVGCTGEGPGNCKECISGYAREHGQCADVDECSLAEKTCVRKNENCYNTPGSYVCVCPDGFEETEDACVPPAEAEATEGESPTQLPSREDL

SEQ ID NO: 29875 - protein, 402 aa, Homo sapiens
MRLPRRAALGLLPLLLLLPPAPEAAKKPTPCHRCRGLVDKFNQGMVDTAKKNFGGGNTAWEEKTLSKYESSEIRLLEILEGLCESSDFECNQMLEAQEEHLEAWWLQLKSEYPDLFEWFCVKTLKVCCSPGTYGPDCLACQGGSQRPCSGNGHCSGDGSRQGDGSCRCHMGYQGPLCTDCMDGYFSSLRNETHSICTVRTGLSDSYPPCCLSLGCWRGVGHAWIRGRNTHTQPGYSSRVWIAAFSPACDESCKTCSGLTNRDCGECEVGWVLDEGACVDVDECAAEPPPCSAAQFCKNANGSYTCEECDSSCVGCTGEGPGNCKECISGYAREHGQCADVDECSLAEKTCVRKNENCYNTPGSYVCVCPDGFEETEDACVPPAEAEATEGESPTQLPSREDL

SEQ ID NO: 29876 - protein, 373 aa, Homo sapiens
MRLPRRAALGLLPLLLLLPPAPEAAKKPTPCHRCRGLVDKFNQGMVDTAKKNFGGGNTAWEEKTLSKYESSEIRLLEILEGLCESSDFECNQMLEAQEEHLEAWWLQLKSEYPDLFEWFCVKTLKVCCSPGTYGPDCLACQGGSQRPCSGNGHCSGDGSRQGDGSCRCHMGYQGPLCTDCMDGYFSSLRNETHSICTACDESCKTCSGLTNRDCGECEVGWVLDEGACVDVDECAAEPPPCSAAQFCKNANGSYTCEECDSSCVGCTGEGPGNCKECISGYAREHGQCADVDECSLAEKTCVRKNENCYNTPGSYVCVCPDGFEETEDACVPPAEAGEWHGCPPHRLPSPGPQGLHVDWLLGLKSTQMVALRW

SEQ ID NO: 29877 - protein, 303 aa, Homo sapiens
MSSARFDSSDRSAWYMGPVSRQEAQTRLQGQRHGMFLVRDSSTCPGDYVLSVSENSRVSHYIINSLPNRRFKIGDQEFDHLPALLEFYKIHYLDTTTLIEPAPRYPSPPMGSVSAPNLPTAEDNLEYVRTLYDFPGNDAEDLPFKKGEILVIIEKPEEQWWSARNKDGRVGMIPVPYVEKLVRSSPHGKHGNRNSNSYGIPEPAHAYAQPQTTTPLPAVSGSPGAAITPLPSTQNGPVFAKAIQKRVPCAYDKTALALEVGDIVKVTRMNINGQWEGEVNGRKGLFPFTHVKIFDPQNPDENE

SEQ ID NO: 29878 - protein, 290 aa, Homo sapiens
MSVRRGRRPARPGTRLSWLLCCSALLSPAAGYVIVSSVSWAVTNEVDEELDSASTEEAMPALLEDSGSIWQQSFPASAHKEDAHLRPRAGAARARPPPAPPGMFSYRREGGQTASAPPGPRLRAATARSLAHASVWGCLATVSTHKKIQGLPFGNCLPVSDGPFNNSTGIPFFYMTAKDPVVADLMKNPMASLMLPESEGEFCRKNIVDPEDPRCVQLTLTGQMIAVSPEEVEFAKQAMFSRHPGMRKWPRQYEWFFMKMRIEHIWLQKWYGGASSISREEYFKAVPRKA

SEQ ID NO: 29879 - protein, 1486 aa, Homo sapiens
MAANVGSMFQYWKRFDLRRLQKELNSVASELSARQEESEHSHKHLIELRREFKKNVPEEIREMVAPVLKSFQAEVVALSKRSQEAEAAFLSVYKQLIEAPDPVPVFEAARSLDDRLQPPSFDPSGQPRRDLHTSWKRNPELLSPKEQREGTSPAGPTLTEGSRLPGIPGKALLTETLLQRNEAEKQKGLQEVQITLAARLGEAEEKIKVLHSALKATQAELLELRRKYDEEAASKADEVGLIMTNLEKANQRAEAAQREVESLREQLASVNSSIRLACCSPQGPSGDKVNFTLCSGPRLEAALASKDREILRLLKDVQHLQSSLQELEEASANQIADLERQLTAKSEAIEKLEEKLQAQSDYEEIKTELSILKAMKLASSTCSLPQGMAKPEDSLLIAKEAFFPTQKFLLEKPSLLASPEEDPSEDDSIKDSLGTEQSYPSPQQLPPPPGPEDPLSPSPGQPLLGPSLGPDGTRTFSLSPFPSLASGERLMMPPAAFKGEAGGLLVFPPAFYGAKPPTAPATPAPGPEPLGGPEPADGGGGGAAGPGAEEEQLDTAEIAFQVKEQLLKHNIGQRVFGHYVLGLSQGSVSEILARPKPWRKLTVKGKEPFIKMKQFLSDEQNVLALRTIQVRQRGSITPRIRTPETGSDDAIKSILEQAKKEIESQKGGEPKTSVAPLSIANGTTPASTSEDAIKSILEQARREMQAQQQALLEMEVAPRGRSVPPSPPERPSLATASQNGAPALVKQEEGSGGPAQAPLPVLSPAAFVQSIIRKVKSEIGDAGYFDHHWASDRGLLSRPYASVSPSLSSSSSSGYSGQPNGRAWPRGDEAPVPPEDEAAAGAEDEPPRTGELKAEGATAEAGARLPYYPAYVPRTLKPTVPPLTPEQYELYMYREVDTLELTRQVKEKLAKNGICQRIFGEKVLGLSQGSVSDMLSRPKPWSKLTQKGREPFIRMQLWLSDQLGQAVGQQPGASQASPTEPRSSPSPPPSPTEPEKSSQEPLSLSLESSKENQQPEGRSSSSLSGKMYSGSQAPGGIQEIVAMSPELDTYSITKRVKEVLTDNNLGQRLFGESILGLTQGSVSDLLSRPKPWHKLSLKGREPFVRMQLWLNDPHNVEKLRDMKKLEKKAYLKRRYGLISTGSDSESPATRSECPSPCLQPQDLSLLQIKKPRVVLAPEEKEALRKAYQLEPYPSQQTIELLSFQLNLKTNTVINWFHNYRSRMRREMLVEGTQDEPDLDPSGGPGILPPGHSHPDPTPQSPDSETEDQKPTVKELELQEGPEENSTPLTTQDKAQVRIKQEQMEEDAEEEAGSQPQDSGELDKGQGPPKEEHPDPPGNDGLPKVAPGPLLPGGSTPDCPSLHPQQESEAGERLHPDPLSFKSASESSRCSLEVSLNSPSAASSPGLMMSVSPVPSSSAPISPSPPGAPPAKVPSASPTADMAGALHPSAKVNPNLQRRHEKMANLNNIIYRVERAANREEALEWEF

SEQ ID NO: 29880 - protein, 229 aa, Homo sapiens
MTTAARPTFEPARGGRGKGEGDLSQLSKQYSSRDLPSHTKIKYRQTTQDAPEEVRNRDFRRELEERERAAAREKNRDRPTREHTTSSSVSKKPRLDQIPAANLDADDPLTDEEDEDFEEESDDDDTAALLAELEKIKKERAEEQARKEQEQKAEEERIRMENILSGNPLLNLTGPSQPQANFKVKRRWDDDVVFKNCAKGVDDQKKDKRFVNDTLRSEFHKKFMEKYIK

SEQ ID NO: 29881 - protein, 74 aa, Homo sapiens
MFVIISLHNCVVISFVLFLFGGNNFIQNFYLPQNYIDQFLLTSFPTFTSVGVLIVLVLCSAFLLLWQGEGVNLR

SEQ ID NO: 29882 - protein, 276 aa, Homo sapiens
MDGPAIITQVTNPKEDEGRLPGAGEKASQCNVSLKKQRSRSILSSFFCCFRDYNVEAPPPSSPSVLPPLVEENGGLQKGDQRQVIPIPSPPAKYLLPEVTVLDYGKKCVVIDLDETLVHSSFKPISNADFIVPVEIDGTIHQVYVLKRPHVDEFLQRMGQLFECVLFTASLAKYADPVADLLDRWGVFRARLFRESCVFHRGNYVKDLSRLGRELSKVIIVDNSPASYIFHPENAVPVQSWFDDMTDTELLDLIPFFEGLSREDDVYSMLHRLCNR

SEQ ID NO: 29883 - protein, 265 aa, Homo sapiens
MDGPAIITQVTNPKEDEGRLPGAGEKASQCNVSLKKQRSRSILSSFFCCFRDYNVEAPPPSSPSVLPPLVEENGGLQKPPAKYLLPEVTVLDYGKKCVVIDLDETLVHSSFKPISNADFIVPVEIDGTIHQVYVLKRPHVDEFLQRMGQLFECVLFTASLAKYADPVADLLDRWGVFRARLFRESCVFHRGNYVKDLSRLGRELSKVIIVDNSPASYIFHPENAVPVQSWFDDMTDTELLDLIPFFEGLSREDDVYSMLHRLCNR

SEQ ID NO: 29884 - protein, 380 aa, Homo sapiens
MTPMRKTNPLMKLINHSFIDLPTPSNISAWWNFGSLLGACLILQITTGLFLAMHYSPDASTAFSSIAHITRDVNYGWIIRYLHANGASMFFICLFLHIGRGLYYGSFLYSETWNIGIILLLATMATAFMGYVLPWGQMSFWGATVITNLLSAIPYIGTDLVQWIWGGYSVDSPTLTRFFTFHFILPFIIAALATLHLLFLHETGSNNPLGITSHSDKITFHPYYTIKDALGLLLFLLSLMTLTLFSPDLLGDPDNYTLANPLNTPPHIKPEWYFLFAYTILRSVPNKLGGVLALLLSILILAMIPILHMSKQQSMMFRPLSQSLYWLLAADLLILTWIGGQPVSYPFTIIGQVASVLYFTTILILMPTISLIENKMLKWA

SEQ ID NO: 29885 - protein, 745 aa, Homo sapiens
MRPDSHPYGFPWELVIRAAVAGFFAVLFLWRSFRSVTSRLYVRREKKFAVALSGLIEEKCKLLEKFSLVQKEYEGYEVESSLKNASFEKEATEAQSLEATCEKLNRFNSELVHEILCLEKELKEEKSKHSEQNELMADISKRIQSLEDESKSLKSQVAEAKMTFKRFQANEERLEIEIQDAWKENSELQESQKQLLQEAEVWKEQVSELIKQKRTFEDSKVHAEQVLNDKENHIKTLTERLLKMKDGVAMLEEDVTDDDNLELEMNSESEDGAYLDNPPKGALKKLIHAAKLNASLKTLEGERNQIYIQLSEVDKTKEELTEHIKNLQTEQASLQSENTHFESENQKLQQKLKVMTELYQENEMKLYRKLIVEEKCRLEKEEKLSKVDEMISHATEELETYRKRAKDLKEFEKTIHFYQKKIILHEKKAHDNWSAAWTAERNLNDLRKENAHNRQKLTEIEFKIKLLEKDPYGLDVPNTAFGRQHSPYGPSPLGWPSSETRASLYPPTLLEGPLRLSPLLPRGGGRGSRGPGNPPDHQITKERGESSCDRLTDPHRAPSDAGPLAPPWEQDYRMMFPPPGQSYPDSALPPQRQDRFYSNCARLSGPAELRSFNMPSLDKMDGSMPSEMESSRNDTKDNLGNLKVPDSSLPAENEATGPGFVPPPLAPIRGLLFPVDTRGPFIRRGPPFPPPPPGTVFGASPDYFSPRDVPGPPRAPFAMRNVYLPRGFLPYRPPRPAFFPPAPTF

SEQ ID NO: 29886 - protein, 158 aa, Homo sapiens
MTFKGFQMNEEKLEIGIQDASSENCQLQESQKQLLQEAEVWKEQVSELNKQKITFEDSKVHAEQVLNDKENHIETLTERLLKIKDQAAVLEEDITDDGNLELEMNSELKDGAYLDNPPKGALKKLIHAAKLNASLTTLEGERNQFIFSYLKLIKPGRA

SEQ ID NO: 29887 - protein, 777 aa, Homo sapiens
MEEPGATPQPYLGLVLEELRRVVAALPESMRPDENPYGFPSELVVCAAVIGFFVVLLFLWRSFRSVRSRLYVGREQKLGATLSGLIEEKCKLLEKFSLIQKEYEGYEVESSLEDASFEKAAAEEARSLEATCEKLNRSNSELEDEILCLEKDLKEEKSKHSQQDELMADISKSIQSLEDESKSLKSQIAEAKIICKTFKMSEERRAIAIKDALNENSQLQTSHKQLFQQEAEVWKGEVSELNKQKITFEDSKVHAEQVLNDKENHIKTLTGHLPMMKDQAAVLEEDTTDDDNLELEVNSQWENGANLDDPLKGALKKLIHAAKLNVSLKSLEGERNHIIIQLSEVDKTKEELTEHIKNLQTQQASLQSENIYFESENQKLQQKLKIMTEFYQENEMKLYRKLTVEENYRIEEEEKLSRVEEKISRATEGLETYRKLAKDLEEELERTVHFYQKQVISYEKRGHDNWLAARTAERNLSDLRKENAHNKQKLTETELKFELLEKDPNALDVSNTAFGREHSPCSPSPLGRPSSETRAFPSPQTLLEDPLRLSPVLPGGGGRGPSSPGNPLDHQITNERGEPSYDRLIDPHRAPSDTGSLSSPVEQDRRMMFPPPGQSYPDSTLPPQREDRFYSNSERLSGPAEPRSFKMTSLDKMDRSMPSEMESSRNDAKDDLGNLNVPDSSLPAENEATGPGLIPPPLAPISGPLFPVDTRGPFMRRGPPFPPPPPGTMFGASRGYFPPRDFPGPPHAPFAMRNIYPPRGLPPYLHPRPGFYPNPTF

SEQ ID NO: 29888 - protein, 908 aa, Homo sapiens
MKSSVAQIKPSSGHDRRENLNSYQRNSSPEDRYEEQERSPRDRDYFDYSRSDYEHSRRGRSYDSSMESRNRDREKRRERERDTDRKRSRKSPSPGRRNPETSVTQSSSAQDEPATKKKKDELDPLLTRTGGAYIPPAKLRMMQEQITDKNSLAYQRMSWEALKKSINGLINKVNISNISIIIQELLQENIVRGRGLLSRSVLQAQSASPIFTHVYAALVAIINSKFPQIGELILKRLILNFRKGYRRNDKQLCLTASKFVAHLINQNVAHEVLCLEMLTLLLERPTDDSVEVAIGFLKECGLKLTQVSPRGINAIFERLRNILHESEIDKRVQYMIEVMFAVRKDGFKDHPIILEGLDLVEEDDQFTHMLPLEDDYNPEDVLNVFKMDPNFMENEEKYKAIKKEILDEGDTDSNTDQDAGSSEEDEEEEEEEGEEDEEGQKVTIHDKTEINLVSFRRTIYLAIQSSLDFEECAHKLLKMEFPESQTKELCNMILDCCAQQRTYEKFFGLLAGRFCMLKKEYMESFEGIFKEQYDTIHRLETNKLRNVAKMFAHLLYTDSLPWSVLECIKLSEETTTSSSRIFVKIFFQELCEYMGLPKLNARLKDETLQPFFEGLLPRDNPRNTRFAINFFTSIGLGGLTDELREHLKNTPKVIVAQKPDVEQNKSSPSSSSSASSSSESDSSDSDSDSSDSSSESSSEESDSSSISSHSSASANDVRKKGHGKTRSKEVDKLIRNQQTNDRKQKERRQEHGHQETRTERERRSEKHRDQNSSGSNWRDPITKYTSDKDVPSERNNYSRVANDRDQEMHIDLENKHGDPKKKRGERRNSFSENEKHTHRIKDSENFRRKDRSKSKEMNRKHSGSRSDEDRYQNGAERRWEKSSRYSEQSRESKKNQDRRREKSPAKQK

SEQ ID NO: 29889 - protein, 243 aa, Homo sapiens
MRPQGPAASPQRLRGLLLLLLLQLPAPSSASEIPKGKQKAQLRQREVVDLYNGMCLQGPAGVPGRDGSPGANGIPGTPGIPGRDGFKGEKGECLRESFEESWTPNYKQCSWSSLNYGIDLGKIAECTFTKMRSNSALRVLFSGSLRLKCRNACCQRWYFTFNGAECSGPLPIEAIIYLDQGSPEMNSTINIHRTSSVEGLCEGIGAGLVDVAIWVGTCSDYPKGDASTGWNSVSRIIIEELPK

SEQ ID NO: 29890 - protein, 232 aa, Homo sapiens
MWPPGRSITVKLREKTVSRKLEMNGPSAFQGLICGKYNGMCLQGPAGVPGRDGSPGANGIPGTPGIPGRDGFKGEKGECLRESFEESWTPNYKQCSWSSLNYGIDLGKIAECTFTKMRSNSALRVLFSGSLRLKCRNACCQRWYFTFNGAECSGPLPIEAIIYLDQGSPEMNSTINIHRTSSVEGLCEGIGAGLVDVAIWVGTCSDYPKGDASTGWNSVSRIIIEELPIYML

SEQ ID NO: 29891 - protein, 229 aa, Homo sapiens
MWPPGRSITVKLREKTVSRKLEMNGPSAFQGLICGKYNGMCLQGPAGVPGRDGSPGANGIPGTPGIPGRDGFKGEKGECLRESFEESWTPNYKQCSWSSLNYGIDLGKIAECTFTKMRSNSALRVLFSGSLRLKCRNACCQRWYFTFNGAECSGPLPIEAIIYLDQGSPEMNSTINIHRTSSVEGLCEGIGAGLVDVAIWVGTCSDYPKGDASTGWNSVSRIIIEELPK

SEQ ID NO: 29892 - protein, 1989 aa, Homo sapiens
MTKVPPAFDFSFLNDEEARKILQVLERNEELQRAEKDRISKLQKTKRDIRWLQGVTGEWFEEIQRKKFCNETDVSQMLKQPLTYRLSKEMAKNDPIELPTSRSKNVTNQKKPTPFSSRMSFRSSFASLFSFRKSGKETSKLPSLGQKGCDGHAGPPMPVRGAAVQAKIYNSPLENHLVDSTFVPKPAVMREESGMPPPWDASLLENEFFQVLDDLDSKLAQEQSASSVNTRTPLNYGSRTQFGHFYSSGNRHGNITERHKKHYNETSNMSIYDILRPGTPREGFKTFSPRTSTIYDMYRTREPRVFKEDYVQKNTFGSTSLCFDSRQRSALPATGHFTARSLHFPATTQSKSGFIPPRHQQSPKRTPLSSIIWNRSDSSRDRENQEEFLRAPSPMEIDPADKYVYPRGFQENKRYESYHSQNVYQRVSLNAPMENAMSPDTFENSENMPFYHQSNTFTRSFFSNTFGRSGEQRRFGQGPFWGQEKGHSFWSDFHRSRKSFSSSDRDFEMISMEANSVSAIHGHNVSSEHWESFSSGYGTDVSRGQEEPHPWQFDFQRSTLDSMVVSHGNETQLTPHFGTPNVCSMTGSSYHVKSSELVSQQDSSPVEVHINKEASSFGIAQTLASSFKTSFSQISDDRRNPQSPNLQNPTVTLQKIFPNKPASHPMRSHTEVTVTSSNSVDSLPLAKSQPNILVTEVNNEKDLNESISEEDKQLSKMDQTNKAGEIPQPVSQTGISNSLPDFQNPLSQDSAKSNGFGFNASTIISSKKSPRVFSRKDTSKMYIPHTDKSNDIKQDKRFTENRKLGSTASLPFIQEHRTPPSFPRTDQGCHQELTVNNEDISRIITNNHWSSALTDTQNAQYSKCKLTPGHKTSCDSLDLSSAALPDSSPSKNSSLDAPVVPSTTVFSRRSPSDKDPSLGEREEKDNAGKNQKNQFIVSHSENQERNDSPVPTHDEVVDVKCHSHSPFRNERGKGKIRHHISCIEKLSKTESISVPTSDHRSLIEANQSNSKVSELDTIYCTLPRKSSSFLIHGRQSGSKIMAASLRNGPPPFQIKNNVEDAMGNYMLNKFSPSSPESANECSKVLSDSALEAPEATERMTNVKSSGSTSVRKGPLPFLINRAMSCPSGEPHASTGREGRKKPLTSGMDASELTPRAWERIISPVESDSSVRDCSLTKRQHQKENFQEYTEKEGKMAASRRSVFALSNEDPLPFCSDLSGKERGKTLHKVKTTSTFSVSGDEDNVKCLEVVSIYYTLPRKPSKKFCNLLQQYTQNTNLLIESPQVETETFPNALEKDKQNYSTREQSGTPSCENLKMSVNSDQTLTTENMTAFRLSNRGPLAPTLQEMASVEAAVSLPEEESKAREIFSDNLAKTPLGDSENKKERGKKLQSETLHTSLMLQRKNVSEEKSENCQQSINSSNSGPSSLPALSEVNIGNSQTRRSSWECTGSGRAIPFTGSGKCPQKDHTSTAVGDGSSGSQPREGRGDIGTNCQKMTNKTLSHSESQVFALTPALHKLQLGEETQSDEPNLESLQSEPRELPQRSQEANMTESRKAEDEMQKSAWDQPSLPEGNKNKTNLDDLVKGENRSSVKHRLAAMSKASRKFPAKDVSPRRHVATIFPQSGSRSGFDHLSLGTVECNPLFPEPTPKSAESIGESRLSENGKHVKKSENLLPITVLPNREPSTHVSNQKSNSISQRHQNEFKNVSESPSKHENSKDVTAAQNLVRESGAPSPITFTSLREAEFSDNQRRLSPPFPLEPAQKSRVSSPLASFLQQQRSASSLEWEPEPHLYRSKSLKSINVHGDLLRKSHPPKVRERHFSESTSIDNALSRLTLGNEFSVNNGYSRRFRSFSELPSCDGNESWAYRSGTKTGPRSAISIYRPIDYGIFGKEQQLAFLENVKRSLTQGRLWKPSFLKNPGFLKDDLRNPPNPSESLSSNSPSSQVPEDGLSPSEPLNIYEDDPVDSNCDTDTTTDDEYYLDENDKESEL

SEQ ID NO: 29893 - protein, 1982 aa, Homo sapiens
MSLSFLNDEEARKILQVLERNEELQRAEKDRISKLQKTKRDIRWLQGVTGEWFEEIQRKKFCNETDVSQMLKQPLTYRLSKEMAKNDPIELPTSRSKNVTNQKKPTPFSSRMSFRSSFASLFSFRKSGKETSKLPSLGQKGCDGHAGPPMPVRGAAVQAKIYNSPLENHLVDSTFVPKPAVMREESGMPPPWDASLLENEFFQVLDDLDSKLAQEQSASSVNTRTPLNYGSRTQFGHFYSSGNRHGNITERHKKHYNETSNMSIYDILRPGTPREGFKTFSPRTSTIYDMYRTREPRVFKEDYVQKNTFGSTSLCFDSRQRSALPATGHFTARSLHFPATTQSKSGFIPPRHQQSPKRTPLSSIIWNRSDSSRDRENQEEFLRAPSPMEIDPADKYVYPRGFQENKRYESYHSQNVYQRVSLNAPMENAMSPDTFENSENMPFYHQSNTFTRSFFSNTFGRSGEQRRFGQGPFWGQEKGHSFWSDFHRSRKSFSSSDRDFEMISMEANSVSAIHGHNVSSEHWESFSSGYGTDVSRGQEEPHPWQFDFQRSTLDSMVVSHGNETQLTPHFGTPNVCSMTGSSYHVKSSELVSQQDSSPVEVHINKEASSFGIAQTLASSFKTSFSQISDDRRNPQSPNLQNPTVTLQKIFPNKPASHPMRSHTEVTVTSSNSVDSLPLAKSQPNILVTEVNNEKDLNESISEEDKQLSKMDQTNKAGEIPQPVSQTGISNSLPDFQNPLSQDSAKSNGFGFNASTIISSKKSPRVFSRKDTSKMYIPHTDKSNDIKQDKRFTENRKLGSTASLPFIQEHRTPPSFPRTDQGCHQELTVNNEDISRIITNNHWSSALTDTQNAQYSKCKLTPGHKTSCDSLDLSSAALPDSSPSKNSSLDAPVVPSTTVFSRRSPSDKDPSLGEREEKDNAGKNQKNQFIVSHSENQERNDSPVPTHDEVVDVKCHSHSPFRNERGKGKIRHHISCIEKLSKTESISVPTSDHRSLIEANQSNSKVSELDTIYCTLPRKSSSFLIHGRQSGSKIMAASLRNGPPPFQIKNNVEDAMGNYMLNKFSPSSPESANECSKVLSDSALEAPEATERMTNVKSSGSTSVRKGPLPFLINRAMSCPSGEPHASTGREGRKKPLTSGMDASELTPRAWERIISPVESDSSVRDCSLTKRQHQKENFQEYTEKEGKMAASRRSVFALSNEDPLPFCSDLSGKERGKTLHKVKTTSTFSVSGDEDNVKCLEVVSIYYTLPRKPSKKFCNLLQQYTQNTNLLIESPQVETETFPNALEKDKQNYSTREQSGTPSCENLKMSVNSDQTLTTENMTAFRLSNRGPLAPTLQEMASVEAAVSLPEEESKAREIFSDNLAKTPLGDSENKKERGKKLQSETLHTSLMLQRKNVSEEKSENCQQSINSSNSGPSSLPALSEVNIGNSQTRRSSWECTGSGRAIPFTGSGKCPQKDHTSTAVGDGSSGSQPREGRGDIGTNCQKMTNKTLSHSESQVFALTPALHKLQLGEETQSDEPNLESLQSEPRELPQRSQEANMTESRKAEDEMQKSAWDQPSLPEGNKNKTNLDDLVKGENRSSVKHRLAAMSKASRKFPAKDVSPRRHVATIFPQSGSRSGFDHLSLGTVECNPLFPEPTPKSAESIGESRLSENGKHVKKSENLLPITVLPNREPSTHVSNQKSNSISQRHQNEFKNVSESPSKHENSKDVTAAQNLVRESGAPSPITFTSLREAEFSDNQRRLSPPFPLEPAQKSRVSSPLASFLQQQRSASSLEWEPEPHLYRSKSLKSINVHGDLLRKSHPPKVRERHFSESTSIDNALSRLTLGNEFSVNNGYSRRFRSFSELPSCDGNESWAYRSGTKTGPRSAISIYRPIDYGIFGKEQQLAFLENVKRSLTQGRLWKPSFLKNPGFLKDDLRNPPNPSESLSSNSPSSQVPEDGLSPSEPLNIYEDDPVDSNCDTDTTTDDEYYLDENDKESEL

SEQ ID NO: 29894 - protein, 1008 aa, Homo sapiens
METCAGPHPLRLFLCRMQLCLALLLGPWRPGTAEEVILLDSKASQAELGWTALPSNGWEEISGVDEHDRPIRTYQVCNVLEPNQDNWLQTGWISRGRGQRIFVELQFTLRDCSSIPGAAGTCKETFNVYYLETEADLGRGRPRLGGSRPRKIDTIAADESFTQGDLGERKMKLNTEVREIGPLSRRGFHLAFQDVGACVALVSVRVYYKQCRATVRGLATFPATAAESAFSTLVEVAGTCVAHSEGEPGSPPRMHCGADGEWLVPVGRCSCSAGFQERGDFCEACPPGFYKVSPRRPLCSPCPEHSRALENASTFCVCQDSYARSPTDPPSASCTRPPSAPRDLQYSLSRSPLVLRLRWLPPADSGGRSDVTYSLLCLRCGREGPAGACEPCGPRVAFLPRQAGLRERAATLLHLRPGARYTVRVAALNGVSGPAAAAGTTYAQVTVSTGPGAPWEEDEIRRDRVEPQSVSLSWREPIPAGAPGANDTEYEIRYYEKGQSEQTYSMVKTGAPTVTVTNLKPATRYVFQIRAASPGPSWEAQSFNPSIEVQTLGEAASGSRDQSPAIVVTVVTISALLVLGSVMSVLAIWRRPCSYGKGGGDAHDEEELYFHFKVPTRRTFLDPQSCGDLLQAVHLFAKELDAKSVTLERSLGGGRFGELCCGCLQLPGRQELLVAVHMLRDSASDSQRLGFLAEALTLGQFDHSHIVRLEGVVTRGSTLMIVTEYMSHGALDGFLRRHEGQLVAGQLMGLLPGLASAMKYLSEMGYVHRGLAARHVLVSSDLVCKISGFGRGPRDRSEAVYTTMSGRSPALWAAPETLQFGHFSSASDVWSFGIIMWEVMAFGERPYWDMSGQDVIKAVEDGFRLPPPRNCPNLLHRLMLDCWQKDPGERPRFSQIHSILSKMVQDPEPPKCALTTCPRPPTPLADRAFSTFPSFGSVGAWLEALDLCRYKDSFAAAGYGSLEAVAEMTAQDLVSLGISLAEHREALLSGISALQARVLQLQGQGVQV

SEQ ID NO: 29895 - protein, 295 aa, Homo sapiens
METCAGPHPLRLFLCRMQLCLALLLGPWRPGTAEEVILLDSKASQAELGWTALPSNGWEEISGVDEHDRPIRTYQVCNVLEPNQDNWLQTGWISRGRGQRIFVELQFTLRDCSSIPGAAGTCKETFNVYYLETEADLGRGRPRLGGSRPRKIDTIAADESFTQGDLGERKMKLNTEVREIGPLSRRGFHLAFQDVGACVALVSVRVYYKQCRATVRGLATFPATAAESAFSTLVEVAGTCVAHSEGEPGSPPRMHCGADGEWLVPVGRCSCSAGFQERGDFCEGIQLAGGRGVGV

SEQ ID NO: 29896 - protein, 892 aa, Homo sapiens
METCAGPHPLRLFLCRMQLCLALLLGPWRPGTAEEVILLDSKASQAELGWTALPSNGWEEISGVDEHDRPIRTYQVCNVLEPNQDNWLQTGWISRGRGQRIFVELQFTLRDCSSIPGAAGTCKETFNVYYLETEADLGRGRPRLGGSRPRKIDTIAADESFTQGDLGERKMKLNTEVREIGPLSRRGFHLAFQDVGACVALVSVRVYYKQCRATVRGLATFPATAAESAFSTLVEVAGTCVAHSEGEPGSPPRMHCGADGEWLVPVGRCSCSAGFQERGDFCEACPPGFYKVSPRRPLCSPCPEHSRALENASTFCVCQDSYARSPTDPPSASCTRPPSAPRDLQYSLSRSPLVLRLRWLPPADSGGRSDVTYSLLCLRCGREGPAGACEPCGPRVAFLPRQAGLRERAATLLHLRPGARYTVRVAALNGVSGPAAAAGTTYAQVTVSTGPGAPWEEDEIRRDRVEPQSVSLSWREPIPAGAPGANDTEYEIRYYEKGQSEQTYSMVKTGAPTVTVTNLKPATRYVFQIRAASPGPSWEAQSFNPSIEVQTLGEAASGSRDQSPAIVVTVVTISALLVLGSVMSVLAIWRRPCSYGKGGGDAHDEEELYFHFKVPTRRTFLDPQSCGDLLQAVHLFAKELDAKSVTLERSLGGGRFGELCCGCLQLPGRQELLVAVHMLRDSASDSQRLGFLAEALTLGQFDHSHIVRLEGVVTRGSTLMIVTEYMSHGALDGFLRRHEGQLVAGQLMGLLPGLASAMKYLSEMGYVHRGLAARHVLVSSDLVCKISGFGRGPRDRSEAVYTTMSGRSPALWAAPETLQFGHFSSASDVWSFGIIMWEVMAFGERPYWDMSGQDVIKAVEDGFRLPPPRNCPNLLHRLMLDCWQKDPGLPPH

SEQ ID NO: 29897 - protein, 760 aa, Homo sapiens
MKLNVDGLLVYFPYDYIYPEQFSYMRELKRTLDAKGHGVLEMPSGTGKTVSLLALIMAYQRAYPLEVTKLIYCSRTVPEIEKVIEELRKLLNFYEKQEGEKLPFLGLALSSRKNLCIHPEVTPLRFGKDVDGKCHSLTASYVRAQYQHDTSLPHCRFYEEFDAHGREVPLPAGIYNLDDLKALGRRQGWCPYFLARYSILHANVVVYSYHYLLDPKIADLVSKELARKAVVVFDEAHNIDNVCIDSMSVNLTRRTLDRCQGNLETLQKTVLRIKETDEQRLRDEYRRLVEGLREASAARETDAHLANPVLPDEVLQEAVPGSIRTAEHFLGFLRRLLEYVKWRLRVQHVVQESPPAFLSGLAQRVCIQRKPLRFCAERLRSLLHTLEITDLADFSPLTLLANFATLVSTYAKGFTIIIEPFDDRTPTIANPILHFSCMDASLAIKPVFERFQSVIITSGTLSPLDIYPKILDFHPVTMATFTMTLARVCLCPMIIGRGNDQVAISSKFETREDIAVIRNYGNLLLEMSAVVPDGIVAFFTSYQYMESTVASWYEQGILENIQRNKLLFIETQDGAETSVALEKYQEACENGRGAILLSVARGKVSEGIDFVHHYGRAVIMFGVPYVYTQSRILKARLEYLRDQFQIRENDFLTFDAMRHAAQCVGRAIRGKTDYGLMVFADKRFARGDKRGKLPRWIQEHLTDANLNLTVDEGVQVAKYFLRQMAQPFHREDQLGLSLLSLEQLESEETLKRIEQIAQQL

SEQ ID NO: 29898 - protein, 405 aa, Homo sapiens
MRELKRTLDAKGHGVLEMPSGTGKTVSLLALIMAYQRAYPLEVTKLIYCSRTVPEIEKVIEELRKLLNFYEKQEGEKLPFLGLALSSRKNLCIHPEVTPLRFGKDVDGKCHSLTASYVRAQYQHDTSLPHCRFYEEFDAHGREVPLPAGIYNLDDLKALGRRQGWCPYFLARYSILHANVVVYSYHYLLDPKIADLVSKELARKAVVVFDEAHNIDNVCIDSMSVNLTRRTLDRCQGNLETLQKTVLRIKETDEQRLRDEYRRLVEGLREASAARETDAHLANPVLPDEVLQEAVPGSIRTAEHFLGFLRRLLEYVKWRLRVQHVVQESPPAFLSGLAQRVCIQRKPLRFCAERLRSLLHTLEITDLADFSPLTLLANFATLVSTYAKGQAQHCGSSRNQKRSHP

SEQ ID NO: 29899 - protein, 283 aa, Homo sapiens
MPGFFCDCWPSLEIRALLYAMGCIQSIGGKARVFREGITVIDVKASIDPVPTSIDESSSVVLRYRTPHFRASAQVVMPPIPKKETWVVGWIQACSHMEFYNQYGEQGMSSWELPDLQEGKIQAISDSDGVNYPWYGNTTETCTIVGPTKRDSKFIISMNDNFYPSVTWAVPVSESNVAKLTNIYRDQSFTTWLVATNTSTNDMIILQTLHWRMQLSIEVNPNRPLGQRARLREPIAQDQPKILSKNEPIPPSALVKPNANDAQVLMWRPKYGQPLVVIPPKHR

SEQ ID NO: 29900 - protein, 433 aa, Homo sapiens
MRGPEPGPQPTMEGDVLDTLEALGYKGPLLEEQALTKAAEGGLSSPEFSELCIWLGSQIKSLCNLEESITSAGRDDLESFQLEISGFLKEMACPYSVLISGDIKDRLKKKEDCLKLLLFLSTELQASQILQNKKHKNSQLDKNSEVYQEVQAMFDTLGIPKSTTSDIPHMLNQVESKVKDILSKVQKNHVGKPLLKMDLNSEQAEQLERINDALSCEYECRRRMLMKRLDVTVQSFGWSDRAKVKTDDIARIYQPKRYALSPKTTITMAHLLAAREDLSKIIRTSSGTSREKTACAINKVLMGRVPDRGGRPNEIEPPPPEMPPWQKRQEGGGGRGGWGGGGGGGGRGGGGGGGGRGGWGGGGGGWGGGGGGGGGWGGGGGGGRGGFQGRGDYGGRGGYGGRGGYGGRGYGDPYGGGGGGGGGGGGGGGYRRY

SEQ ID NO: 29901 - protein, 330 aa, Homo sapiens
MRGPEPGPQPTMEGDVLDTLEALGYKGPLLEEQALTKAAEGGLSSPEFSELCIWLGSQIKSLCNLEESITSAGRDDLESFQLEISGFLKEMACPYSVLISGDIKDRLKKKEDCLKLLLFLSTELQASQILQNKKHKNSQLDKNSEVYQEVQAMFDTLGIPKSTTSDIPHMLNQVESKVKDILSKVQKNHVGKPLLKMDLNSEQAEQLERINDALSCEYECRRRMLMKRLDVTVQSFGWSDRAKVKTDDIARIYQPKRYALSPKTTITMAHLLAAREDLSKIIRTSSGTSREKTACAINKVGVSFSTVENELMISYLMFLQILVYFSFMSW

SEQ ID NO: 29902 - protein, 109 aa, Homo sapiens
MAVVGVSSVSRLLGRSRPQLGRPMSSGAHGEEGSARMWKTLTFFVALPGVAVSMLNVYLKSHHGEHERPEFIAYPHLRIRTKPFPWGDGNHTLFHNPHVNPLPTGYEDE

SEQ ID NO: 29903 - protein, 369 aa, Homo sapiens
MDPCKVNELRAFVKMCKQDPSVLHTEEMRFLREWVESMGGKVPPATQKAKSEENTKEEKPDSKKVEEDLKADEPSTEESDLEIDKEGVIEPDTDAPQEMGDENVEITEEMMDQANDKKVAAIEVLNDGELQKAIDLFTDAIKLNPRLAILYAKRASVFVKLQKPNAAIQDCDRAIEINPDSAQPYKWRGKAHRLLGHWEEAAHDLAFACKLDYDEDASAMLKEVQPRAQKIAEHWRKYERKHEEREIKERIERVKKAQEEQERAQREEEARRQSGAHYGPFPGGFPGGMPGNFPGGMPGMGGDMPGMAGMPGLNEILSDPEALAAMQDPEVMVAFQDVAQNPANMSKYQSNPKVMNLISKLSAKFGGQA

SEQ ID NO: 29904 - protein, 287 aa, Homo sapiens
MELERIVSAALLAFVQTHLPEADLSGLDEVIFSYVLGVLEDLGPSGPSEENFDMEAFTEMMEAYVPGFAHIPRGTIGDMMQKLSGQLSDARNKENLQPQSSGVQGQVPISPEPLQRPEMLKEETRSSAAAAADTQDEATGAEEELLPGVDVLLEVFPTCSVEQAQWVLAKARGDLEEAVQMLVEGKEEGPAAWEGPNQDLPRRLRGPQKDELKSFILQKYMMVDSAEDQKIHRPMAPKEAPKKLIRYIDNQVVSTKGERFKDVRNPEAEEMKATYINLKPARKYRFH

SEQ ID NO: 29905 - protein, 635 aa, Homo sapiens
MARGLPTIASLARLCQKLNRLKPLEDSTMETSLRRCLSTLDLTLLGVGGMVGSGLYVLTGAVAKEVAGPAVLLSFGVAAVASLLAALCYAEFGARVPRTGSAYLFTYVSMGELWAFLIGWNVLLEYIIGGAAVARAWSGYLDSMFSHSIRNFTETHVGSWQVPLLGHYPDFLAAGIILLASAFVSCGARVSSWLNHTFSAISLLVILFIVILGFILAQPHNWSADEGGFAPFGFSGVMAGTASCFYAFVGFDVIAASSEEAQNPRRSVPLAIAISLAIAAGAYILVSTVLTLMVPWHSLDPDSALADAFYQRGYRWAGFIVAAGSICAMNTVLLSLLFSLPRIVYAMAADGLFFQVFAHVHPRTQVPVAGTLAFGLLTAFLALLLDLESLVQFLSLGTLLAYTFVATSIIVLRFQKSSPPSSPGPASPGPLTKQQSSFSDHLQLVGTVHASVPEPGELKPALRPYLGFLDGYSPGAVVTWALGVMLASAITIGCVLVFGNSTLHLPHWGYILLLLLTSVMFLLSLLVLGAHQQQYREDLFQIPMVPLIPALSIVLNICLMLKLSYLTWVRFSIWLLMGLAVYFGYGIRHSKENQRELPGLNSTHYVVFPRGSLEETVQAMQPPSQAPAQDPGHME

SEQ ID NO: 29906 - protein, 81 aa, Homo sapiens
MFSLFIENRYLHLLHALSLVTDVSRIQSHFGTLPRIKDEHRSHQESKYHFGGHVQIRFGSDQDWRQGHQSFLLKTGPCKKR

SEQ ID NO: 29907 - protein, 107 aa, Homo sapiens
MARATLSAAPSNPRLLRVALLLLLLVAASRRAAGAPLATELRCQCLQTLQGIHLKNIQSVKVKSPGPHCAQTEVIATLKNGQKACLNPASPMVKKIIEKMLKNGKSN

SEQ ID NO: 29908 - protein, 913 aa, Homo sapiens
MMSQSSGSGDGNDDEATTSKDGGFSSPSPSAAAAAQEVRSATDGNTSTTPPTSAKKRKLNSSSSSSSNSSNEREDFDSTSSSSSTPPLQPRDSASPSTSSFCLGVSVAASSHVPIQKKLRFEDTLEFVGFDAKMAEESSSSSSSSSPTAATSQQQQLKNKSILISSVASVHHANGLAKSSTTVSSFANSKPGSAKKLVIKNFKDKPKLPENYTDETWQKLKEAVEAIQNSTSIKYNLEELYQAVENLCSYKISANLYKQLRQICEDHIKAQIHQFREDSLDSVLFLKKIDRCWQNHCRQMIMIRSIFLFLDRTYVLQNSMLPSIWDMGLELFRAHIISDQKVQNKTIDGILLLIERERNGEAIDRSLLRSLLSMLSDLQIYQDSFEQRFLEETNRLYAAEGQKLMQEREVPEYLHHVNKRLEEEADRLITYLDQTTQKSLIATVEKQLLGEHLTAILQKGLNNLLDENRIQDLSLLYQLFSRVRGGVQVLLQQWIEYIKAFGSTIVINPEKDKTMVQELLDFKDKVDHIIDICFLKNEKFINAMKEAFETFINKRPNKPAELIAKYVDSKLRAGNKEATDEELEKMLDKIMIIFRFIYGKDVFEAFYKKDLAKRLLVGKSASVDAEKSMLSKLKHECGAAFTSKLEGMFKDMELSKDIMIQFKQYMQNQNVPGNIELTVNILTMGYWPTYVPMEVHLPPEMVKLQEIFKTFYLGKHSGRKLQWQSTLGHCVLKAEFKEGKKELQVSLFQTLVLLMFNEGEEFSLEEIKQATGIEDGELRRTLQSLACGKARVLAKNPKGKDIEDGDKFICNDDFKHKLFRIKINQIQMKETVEEQASTTERVFQDRQYQIDAAIVRIMKMRKTLSHNLLVSEVYNQLKFPVKPADLKKRIESLIDRDYMERDKENPNQYNYIA

SEQ ID NO: 29909 - protein, 895 aa, Homo sapiens
MFPTGFSSPSPSAAAAAQEVRSATDGNTSTTPPTSAKKRKLNSSSSSSSNSSNEREDFDSTSSSSSTPPLQPRDSASPSTSSFCLGVSVAASSHVPIQKKLRFEDTLEFVGFDAKMAEESSSSSSSSSPTAATSQQQQLKNKSILISSVASVHHANGLAKSSTTVSSFANSKPGSAKKLVIKNFKDKPKLPENYTDETWQKLKEAVEAIQNSTSIKYNLEELYQAVENLCSYKISANLYKQLRQICEDHIKAQIHQFREDSLDSVLFLKKIDRCWQNHCRQMIMIRSIFLFLDRTYVLQNSMLPSIWDMGLELFRAHIISDQKVQNKTIDGILLLIERERNGEAIDRSLLRSLLSMLSDLQIYQDSFEQRFLEETNRLYAAEGQKLMQEREVPEYLHHVNKRLEEEADRLITYLDQTTQKSLIATVEKQLLGEHLTAILQKGLNNLLDENRIQDLSLLYQLFSRVRGGVQVLLQQWIEYIKAFGSTIVINPEKDKTMVQELLDFKDKVDHIIDICFLKNEKFINAMKEAFETFINKRPNKPAELIAKYVDSKLRAGNKEATDEELEKMLDKIMIIFRFIYGKDVFEAFYKKDLAKRLLVGKSASVDAEKSMLSKLKHECGAAFTSKLEGMFKDMELSKDIMIQFKQYMQNQNVPGNIELTVNILTMGYWPTYVPMEVHLPPEMVKLQEIFKTFYLGKHSGRKLQWQSTLGHCVLKAEFKEGKKELQVSLFQTLVLLMFNEGEEFSLEEIKQATGIEDGELRRTLQSLACGKARVLAKNPKGKDIEDGDKFICNDDFKHKLFRIKINQIQMKETVEEQASTTERVFQDRQYQIDAAIVRIMKMRKTLSHNLLVSEVYNQLKFPVKPADLKKRIESLIDRDYMERDKENPNQYNYIA

SEQ ID NO: 29910 - protein, 717 aa, Homo sapiens
MIDPDFADKPKLPENYTDETWQKLKEAVEAIQNSTSIKYNLEELYQAVENLCSYKISANLYKQLRQICEDHIKAQIHQFREDSLDSVLFLKKIDRCWQNHCRQMIMIRSIFLFLDRTYVLQNSMLPSIWDMGLELFRAHIISDQKVQNKTIDGILLLIERERNGEAIDRSLLRSLLSMLSDLQIYQDSFEQRFLEETNRLYAAEGQKLMQEREVPEYLHHVNKRLEEEADRLITYLDQTTQKSLIATVEKQLLGEHLTAILQKGLNNLLDENRIQDLSLLYQLFSRVRGGVQVLLQQWIEYIKAFGSTIVINPEKDKTMVQELLDFKDKVDHIIDICFLKNEKFINAMKEAFETFINKRPNKPAELIAKYVDSKLRAGNKEATDEELEKMLDKIMIIFRFIYGKDVFEAFYKKDLAKRLLVGKSASVDAEKSMLSKLKHECGAAFTSKLEGMFKDMELSKDIMIQFKQYMQNQNVPGNIELTVNILTMGYWPTYVPMEVHLPPEMVKLQEIFKTFYLGKHSGRKLQWQSTLGHCVLKAEFKEGKKELQVSLFQTLVLLMFNEGEEFSLEEIKQATGIEDGELRRTLQSLACGKARVLAKNPKGKDIEDGDKFICNDDFKHKLFRIKINQIQMKETVEEQASTTERVFQDRQYQIDAAIVRIMKMRKTLSHNLLVSEVYNQLKFPVKPADLKKRIESLIDRDYMERDKENPNQYNYIA

SEQ ID NO: 29911 - protein, 722 aa, Homo sapiens
MPSPQTDTPGPELQSPKEAEEPQTPAQGSRRTSSRKEPNAHRKDGTRLGLGSLRQAFSRASQRALTQVSKEDTGLFRRSSCSLFRSFRQALNDGPATGHSQATPEVPSGVMNGVSQQASTGAASEELKPEAEGKSVADLITERQLLAAFEQLLRLETLLVAEKASRTFEQDPTAFARRAMDVCLLYDGLAAEIGAIVRETLDSDGVDAAALAELARVVSAEEEAHPSPPDDGDFLRTPRRWRQHWEEAVRRSAQERVRRPGAGWAFGEAEGASGLAQLLAELGGLVRRDLQKVRQEVQPAYAAAGFPAWEVYLRAFHSAVAQRLQELARDARGCEQLYILLDWAANVYGSPDFLGAPGLALPAEPLPPLLAPDVWARLESDYTSFLEAKIASCFDSILQLEQSHWAAAEVPEVLQGLYQAPLSMDVHMLVAEHVKAAGAISAELEATTLRICTRALGLFVPRFEKAFLASEAVSEPHLGAYINACEELRTSLLSRFPGTQEELEKPLVTATCSFQKHLLQGLQRELQPLFRVVCTRDWLTQDWLHPLMDKVVTFAGHLQRVARPRAQETLQEVHRFVVREYLARALRPRERFRGMERMHGSQKMSLDAQAISDTFQGLGSEATWLDQAIQCVAEILGETYKDDIQRHLETLIRSYPDIRRDHILAILALRRLGRQRNQHLLQHTQDLLRAAAGAAGAEAPRGRVLFEEIKVPSAMAVLITCV

SEQ ID NO: 29912 - protein, 647 aa, Homo sapiens
MTVGRPEGAPGGAEGSRQIFPPESFADTEAGEELSGDGLVLPRASKLDEFLSPEEEIDSTSDSTGSIYQNLQELKQKGRWCLLESLFQSDPESDENLSEDEEDLESFFQDKDRGMVQVQCPQALRCGSTRRCSSLNNLPSNIPRPQTQPPSGSRPPSQHRSVSSWASSITVPRPFRMTLREARKKAEWLGSPASFEQERQRAQRQGEEEAECHRQFRAQPVPAHVYLPLYQEIMERSEARRQAGIQKRKELLLSSLKPFSFLEKEEQLKEAARQRDLAATAEAKISKQKATRRIPKSILEPALGDKLQEAELFRKIRIQMRALDMLQMASSPIASSSNRANPQPRTATRTQQEKLGFLHTNFRFQPRVNPVVPDYEGLYKAFQRRAAKRRETQEATRNKPFLLRTANLRHPQRPCDAATTGRRQDSPQPPATPLPRSRSLSGLASLSANTLPVHITDATRKRESAVRSALEKKNKADESIQWLEIHKKKSQAMSKSVTLRAKAMDPHKSLEEVFKAKLKENRNNDRKRAKEYKKELEEMKQRIQTRPYLFEQVAKDLAKKEAEQWYLDTLKQAGLEEDFVRNKGQGTRAVQEKETKIKDFPRFQETTKLSIRDPEQGLEGSLEQPASPRKVLEELSHQSPENLVSLA

SEQ ID NO: 29913 - protein, 710 aa, Homo sapiens
MRGENRPIGKRTLPPRAGWIGGCPGSQPDAKARKGWTLAPHSSRCHRCCHYRCHCRCCLCPAEMTVGRPEGAPGGAEGSRQIFPPESFADTEAGEELSGDGLVLPRASKLDEFLSPEEEIDSTSDSTGSIYQNLQELKQKGRWCLLESLFQSDPESDENLSEDEEDLESFFQDKDRGMVQVQCPQALRCGSTRRCSSLNNLPSNIPRPQTQPPSGSRPPSQHRSVSSWASSITVPRPFRMTLREARKKAEWLGSPASFEQERQRAQRQGEEEAECHRQFRAQPVPAHVYLPLYQEIMERSEARRQAGIQKRKELLLSSLKPFSFLEKEEQLKEAARQRDLAATAEAKISKQKATRRIPKSILEPALGDKLQEAELFRKIRIQMRALDMLQMASSPIASSSNRANPQPRTATRTQQEKLGFLHTNFRFQPRVNPVVPDYEGLYKAFQRRAAKRRETQEATRNKPFLLRTANLRHPQRPCDAATTGRRQDSPQPPATPLPRSRSLSGLASLSANTLPVHITDATRKRESAVRSALEKKNKADESIQWLEIHKKKSQAMSKSVTLRAKAMDPHKSLEEVFKAKLKENRNNDRKRAKEYKKELEEMKQRIQTRPYLFEQVAKDLAKKEAEQWYLDTLKQAGLEEDFVRNKGQGTRAVQEKETKIKDFPRFQETTKLSIRDPEQGLEGSLEQPASPRKVLEELSHQSPENLVSLA

SEQ ID NO: 29914 - protein, 452 aa, Homo sapiens
MLACLQRTQNAPGQHLACPSKSLELRKCEAVASAMHSSRYPSPAELDAYAEKVANSPLSIKIFPTNIRVPQHKHLSRTVNGYDTSGQRYSPYPQHTAGYQGLLAIVKAAVSSSSTAAPAGPAKSVLKSAEGKRTKLSPAAVQVGIAPYPVPSTLGPLAYPKPPEAPAPPPGLPAAATAASVIPLPGRGLPLPPSNLPSIHSLLYQLNQQCQAPGAAPPACQGMAIPHPSPAKHGPVPSFPSMAYSAAAGLPDCRKGTELGQGATQALTLAGAAKPAGYADSGLDYLLWPQKPPPPPPQPLRAYSGSTVASKSPEACGGRAYERASGSPLNCGVGLPTSFTVGQYFAAPWNSVLVTPTSDCYNPAAAVVVTELGPGAARELAGPPADALSGLPSKSVCNTSVLSSSLQSLEYLINDIRPPCIKEQMLGKGYETVAVPRLLDHQHAHIRLPVYR

SEQ ID NO: 29915 - protein, 510 aa, Homo sapiens
MDGFYDQQVPFMVPGKSRSEECRGRPVIDRKRKFLDTDLAHDSEELFQDLSQLQEAWLAEAQVPDDEQFVPDFQSDNLVLHAPPPTKIKRELHSPSSELSSCSHEQALGANYGEKCLYNYCAYDRKPPSGFKPLTPPTTPLSPTHQNPLFPPPQATLPTSGHAPAAGPVQGVGPAPAPHSLPEPGPQQQTFAVPRPPHQPLQMPKMMPENQYPSEQRFQRQLSEPCHPFPPQPGVPGDNRPSYHRQMSEPIVPAAPPPPQGFKQEYHDPLYEHGVPGMPGPPAHGFQSPMGIKQEPRDYCVDSEVPNCQSSYMRGGYFSSSHEGFSYEKDPRLYFDDTCVVPERLEGKVKQEPTMYREGPPYQRRGSLQLWQFLVTLLDDPANAHFIAWTGRGMEFKLIEPEEVARRWGIQKNRPAMNYDKLSRSLRYYYEKGIMQKVAGERYVYKFVCDPDALFSMAFPDNQRPFLKAESECHLSEEDTLPLTHFEDSPAYLLDMDRCSSLPYAEGFAY

SEQ ID NO: 29916 - protein, 552 aa, Homo sapiens
MSERRCPPEHREGVNDTGGSLFPQKLLNAETSQSGIRDAESTMDGFYDQQVPFMVPGKSRSEECRGRPVIDRKRKFLDTDLAHDSEELFQDLSQLQEAWLAEAQVPDDEQFVPDFQSDNLVLHAPPPTKIKRELHSPSSELSSCSHEQALGANYGEKCLYNYCAYDRKPPSGFKPLTPPTTPLSPTHQNPLFPPPQATLPTSGHAPAAGPVQGVGPAPAPHSLPEPGPQQQTFAVPRPPHQPLQMPKMMPENQYPSEQRFQRQLSEPCHPFPPQPGVPGDNRPSYHRQMSEPIVPAAPPPPQGFKQEYHDPLYEHGVPGMPGPPAHGFQSPMGIKQEPRDYCVDSEVPNCQSSYMRGGYFSSSHEGFSYEKDPRLYFDDTCVVPERLEGKVKQEPTMYREGPPYQRRGSLQLWQFLVTLLDDPANAHFIAWTGRGMEFKLIEPEEVARRWGIQKNRPAMNYDKLSRSLRYYYEKGIMQKVAGERYVYKFVCDPDALFSMAFPDNQRPFLKAESECHLSEEDTLPLTHFEDSPAYLLDMDRCSSLPYAEGFAY

SEQ ID NO: 29917 - protein, 166 aa, Homo sapiens
MTAGTVVITGGILATVILLCIIAVLCYCRLQYYCCKKDESEEDEEEPDFAVHSHLPPLHSNRNLVLTNGPALYPTASTSFSQKSPQARALCRSCSHCEPPTFFLQEPPEEEEDVLNGGERVLYKSVSQEDVELPPGGFGGLQALNPNRLSAMREAFARSRSISTDV

SEQ ID NO: 29918 - protein, 321 aa, Homo sapiens
MGEWTILERLLEAAVQQHSTMIGRILLTVVVIFRILIVAIVGETVYDDEQTMFVCNTLQPGCNQACYDRAFPISHIRYWVFQIIMVCTPSLCFITYSVHQSAKQRERRYSTVFLALDRDPPESIGGPGGTGGGGSGGGKREDKKLQNAIVNGVLQNTENTSKETEPDCLEVKELTPHPSGLRTASKSKLRRQEGISRFYIIQVVFRNALEIGFLVGQYFLYGFSVPGLYECNRYPCIKEVECYVSRPTEKTVFLVFMFAVSGICVVLNLAELNHLGWRKIKLAVRGAQAKRKSIYEIRNKDLPRVSVPNFGRTQSSDSAYV

SEQ ID NO: 29919 - protein, 585 aa, Homo sapiens
MSGILKRKFEEVDGSSPCSSVRESDDEVSSSESADSGDSVNPSTSSHFTPSSILKREKRLRTKNVHFSCVTVYYFTRRQGFTSVPSQGGSTLGMSSRHNSVRQYTLGEFAREQERLHREMLREHLREEKLNSLKLKMTKNGTVESEEASTLTLDDISDDDIDLDNTEVDEYFFLQPLPTKKRRALLRASGVKKIDVEEKHELRAIRLSREDCGCDCRVFCDPDTCTCSLAGIKCQVDRMSFPCGCTKEGCSNTAGRIEFNPIRVRTHFLHTIMKLELEKNREQQIPTLNGCHSEISAHSSSMGPVAHSVEYSIADSFEIETEPQAAVLHLQSAEELDCQGEEEEEEEDGSSFCSGVTDSSTQSLAPSESDEEEEEEEEEEEEEDDDDDKGDGFVEGLGTHAEVVPLPSVLCYSDGTAVHESHAKNASFYANSSTLYYQIDSHIPGTPNQISENYSERDTVKNGTLSLVPYTMTPEQFVDYARQAEEAYGASHYPAANPSVIVCCSSSENDSGVPCNSLYPEHRSNHPQVEFHSYLKGPSQEGFVSALNGDSHISEHPAENSLSLAEKSILHEECIKSPVVETVPV

SEQ ID NO: 29920 - protein, 526 aa, Homo sapiens
MRSQGTCDSTAASGILKRKFEEVDGSSPCSSVRESDDEVSSSESADSGDSVNPSTSSHFTPSSILKREKRLRTKNVHFSCVTVYYFTRRQGFTSVPSQGGSTLGMSSRHNSVRQYTLGEFAREQERLHREMLREHLREEKLNSLKLKMTKNGTVESEEASTLTLDDISDDDIDLDNTEVDEYFFLQPLPTKKRRALLRASGVKKIDVEEKHELRAIRLSREDCGCDCRVFCDPDTCTCSLAGIKCQVDRMSFPCGCTKEGCSNTAGRIEFNPIRVRTHFLHTIMKLELEKNREQQIPTLNGCHSEISAHSSSMGPVAHSVEYSIADSFEIETEPQAAVLHLQSAEELDCQGEEEEEEEDGSSFCSGVTDSSTQSLAPSESDEEEEEEEEEEEEEDDDDDKGDGFVEGLGTHAEVVPLPSVLCYSDGTAVHESHAKNASFYANSSTLYYQNDSGVPCNSLYPEHRSNHPQVEFHSYLKGPSQEGFVSALNGDSHISEHPAENSLSLAEKSILHEECIKSPVVETVPV

SEQ ID NO: 29921 - protein, 400 aa, Homo sapiens
MEDGVYEPPDLTPEERMELENIRRRKQELLVEIQRLREELSEAMSEVEGLEANEGSKTLQRNRKMAMGRKKFNMDPKKGIQFLVENELLQNTPEEIARFLYKGEGLNKTAIGDYLGEREELNLAVLHAFVDLHEFTDLNLVQALRQFLWSFRLPGEAQKIDRMMEAFAQRYCLCNPGVFQSTDTCYVLSFAVIMLNTSLHNPNVRDKPGLERFVAMNRGINEGGDLPEELLRNLYDSIRNEPFKIPEDDGNDLTHTFFNPDREGWLLKLGGGRVKTWKRRWFILTDNCLYYFEYTTDKEPRGIIPLENLSIREVDDPRKPNCFELYIPNNKGQLIKACKTEADGRVVEGNHMVYRISAPTQEEKDEWIKSIQAAVSVDPFYEMLAARKKRISVKKKQEQP

SEQ ID NO: 29922 - protein, 399 aa, Homo sapiens
MEDGVYEPPDLTPEERMELENIRRRKQELLVEIQRLREELSEAMSEVEGLEANEGSKTLQRNRKMAMGRKKFNMDPKKGIQFLVENELLQNTPEEIARFLYKGEGLNKTAIGDYLGEREELNLAVLHAFVDLHEFTDLNLVQALRQFLWSFRLPGEAQKIDRMMEAFAQRYCLCNPGVFQSTDTCYVLSFAVIMLNTSLHNPNVRDKPGLERFVAMNRGINEGGDLPEELLRNLYDSIRNEPFKIPEDDGNDLTHTFFNPDREGWLLKLGGRVKTWKRRWFILTDNCLYYFEYTTDKEPRGIIPLENLSIREVDDPRKPNCFELYIPNNKGQLIKACKTEADGRVVEGNHMVYRISAPTQEEKDEWIKSIQAAVSVDPFYEMLAARKKRISVKKKQEQP

SEQ ID NO: 29923 - protein, 275 aa, Homo sapiens
MAVASTFIPGLNPQNPHYIPGYTGHCPLLRFSVGQTYGQVTGQLLRGPPGLAWPPVHRTLLPPIRPPRSPEVPRESLPVRRGQERLSSSMIPGYTGFVPRAQFIFAKNCSQVWAEALSDFTHLHEKQGSEELPKEAKGRKDTEKDQVPEPEGQLEEPTLEVVEQASPYSMDDRDPRKFFMSGFTGYVPCARFLFGSSFPVLTNQALQEFGQKHSPGSAQDPKHLPPLPRTYPQNLGLLPNYGGYVPGYKFQFGHTFGHLTHDALGLSTFQKQLLA

SEQ ID NO: 29924 - protein, 216 aa, Homo sapiens
MAVASTFIPGLNPQNPHYIPGYTGHCPLLRFSVGQTYGQVTGQLLRGPPGLAWPPVHRTLLPPIRPPRSPEVPRESLPVRRGQERLSSSMIPGYTGFVPRAQFIFAKNCSQVWAEALSDFTHLHEKQGSEELPKEAKGRKDTEKDQVPEPEGQLEEPTLEVVEQASPYSMDDRDPRKFFMSGTAGIWAEALTRQCPGPQTSPPTSQNIPSEPGSFT

SEQ ID NO: 29925 - protein, 80 aa, Homo sapiens
MPFQFGTQPRRFPVEGGDSSIELEPGLSSSAACNGKEMSPTRQLRRCPGSHCLTITDVPVTVYATTRKPPAQSSKEMHPK

SEQ ID NO: 29926 - protein, 3396 aa, Homo sapiens
MFINIKSILWMCSTLIVTHALHKVKVGKSPPVRGSLSGKVSLPCHFSTMPTLPPSYNTSEFLRIKWSKIEVDKNGKDLKETTVLVAQNGNIKIGQDYKGRVSVPTHPEAVGDASLTVVKLLASDAGLYRCDVMYGIEDTQDTVSLTVDGVVFHYRAATSRYTLNFEAAQKACLDVGAVIATPEQLFAAYEDGFEQCDAGWLADQTVRYPIRAPRVGCYGDKMGKAGVRTYGFRSPQETYDVYCYVDHLDGDVFHLTVPSKFTFEEAAKECENQDARLATVGELQAAWRNGFDQCDYGWLSDASVRHPVTVARAQCGGGLLGVRTLYRFENQTGFPPPDSRFDAYCFKPKEATTIDLSILAETASPSLSKEPQMVSDRTTPIIPLVDELPVIPTEFPPVGNIVSFEQKATVQPQAITDSLATKLPTPTGSTKKPWDMDDYSPSASGPLGKLDISEIKEEVLQSTTGVSHYATDSWDGVVEDKQTQESVTQIEQIEVGPLVTSMEILKHIPSKEFPVTETPLVTARMILESKTEKKMVSTVSELVTTGHYGFTLGEEDDEDRTLTVGSDESTLIFDQIPEVITVSKTSEDTIHTHLEDLESVSASTTVSPLIMPDNNGSSMDDWEERQTSGRITEEFLGKYLSTTPFPSQHRTEIELFPYSGDKILVEGISTVIYPSLQTEMTHRRERTETLIPEMRTDTYTDEIQEEITKSPFMGKTEEEVFSGMKLSTSLSEPIHVTESSVEMTKSFDFPTLITKLSAEPTEVRDMEEDFTATPGTTKYDENITTVLLAHGTLSVEAATVSKWSWDEDNTTSKPLESTEPSASSKLPPALLTTVGMNGKDKDIPSFTEDGADEFTLIPDSTQKQLEEVTDEDIAAHGKFTIRFQPTTSTGIAEKSTLRDSTTEEKVPPITSTEGQVYATMEGSALGEVEDVDLSKPVSTVPQFAHTSEVEGLAFVSYSSTQEPTTYVDSSHTIPLSVIPKTDWGVLVPSVPSEDEVLGEPSQDILVIDQTRLEATISPETMRTTKITEGTTQEEFPWKEQTAEKPVPALSSTAWTPKEAVTPLDEQEGDGSAYTVSEDELLTGSERVPVLETTPVGKIDHSVSYPPGAVTEHKVKTDEVVTLTPRIGPKVSLSPGPEQKYETEGSSTTGFTSSLSPFSTHITQLMEETTTEKTSLEDIDLGSGLFEKPKATELIEFSTIKVTVPSDITTAFSSVDRLHTTSAFKPSSAITKKPPLIDREPGEETTSDMVIIGESTSHVPPTTLEDIVAKETETDIDREYFTTSSPPATQPTRPPTVEDKEAFGPQALSTPQPPASTKFHPDINVYIIEVRENKTGRMSDLSVIGHPIDSESKEDEPCSEETDPVHDLMAEILPEFPDIIEIDLYHSEENEEEEEECANATDVTTTPSVQYINGKHLVTTVPKDPEAAEARRGQFESVAPSQNFSDSSESDTHPFVIAKTELSTAVQPNESTETTESLEVTWKPETYPETSEHFSGGEPDVFPTVPFHEEFESGTAKKGAESVTERDTEVGHQAHEHTEPVSLFPEESSGEIAIDQESQKIAFARATEVTFGEEVEKSTSVTYTPTIVPSSASAYVSEEEAVTLIGNPWPDDLLSTKESWVEATPRQVVELSGSSSIPITEGSGEAEEDEDTMFTMVTDLSQRNTTDTLITLDTSRIITESFFEVPATTIYPVSEQPSAKVVPTKFVSETDTSEWISSTTVEEKKRKEEEGTTGTASTFEVYSSTQRSDQLILPFELESPNVATSSDSGTRKSFMSLTTPTQSEREMTDSTPVFTETNTLENLGAQTTEHSSIHQPGVQEGLTTLPRSPASVFMEQGSGEAAADPETTTVSSFSLNVEYAIQAEKEVAGTLSPHVETTFSTEPTGLVLSTVMDRVVAENITQTSREIVISERLGEPNYGAEIRGFSTGFPLEEDFSGDFREYSTVSHPIAKEETVMMEGSGDAAFRDTQTSPSTVPTSVHISHISDSEGPSSTMVSTSAFPWEEFTSSAEGSGEQLVTVSSSVVPVLPSAVQKFSGTASSIIDEGLGEVGTVNEIDRRSTILPTAEVEGTKAPVEKEEVKVSGTVSTNFPQTIEPAKLWSRQEVNPVRQEIESETTSEEQIQEEKSFESPQNSPATEQTIFDSQTFTETELKTTDYSVLTTKKTYSDDKEMKEEDTSLVNMSTPDPDANGLESYTTLPEATEKSHFFLATALVTESIPAEHVVTDSPIKKEESTKHFPKGMRPTIQESDTELLFSGLGSGEEVLPTLPTESVNFTEVEQINNTLYPHTSQVESTSSDKIEDFNRMENVAKEVGPLVSQTDIFEGSGSVTSTTLIEILSDTGAEGPTVAPLPFSTDIGHPQNQTVRWAEEIQTSRPQTITEQDSNKNSSTAEINETTTSSTDFLARAYGFEMAKEFVTSAPKPSDLYYEPSGEGSGEVDIVDSFHTSATTQATRQESSTTFVSDGSLEKHPEVPSAKAVTADGFPTVSVMLPLHSEQNKSSPDPTSTLSNTVSYERSTDGSFQDRFREFEDSTLKPNRKKPTENIIIDLDKEDKDLILTITESTILEILPELTSDKNTIIDIDHTKPVYEDILGMQTDIDTEVPSEPHDSNDESNDDSTQVQEIYEAAVNLSLTEETFEGSADVLASYTQATHDESMTYEDRSQLDHMGFHFTTGIPAPSTETELDVLLPTATSLPIPRKSATVIPEIEGIKAEAKALDDMFESSTLSDGQAIADQSEIIPTLGQFERTQEEYEDKKHAGPSFQPEFSSGAEEALVDHTPYLSIATTHLMDQSVTEVPDVMEGSNPPYYTDTTLAVSTFAKLSSQTPSSPLTIYSGSEASGHTEIPQPSALPGIDVGSSVMSPQDSFKEIHVNIEATFKPSSEEYLHITEPPSLSPDTKLEPSEDDGKPELLEEMEASPTELIAVEGTEILQDFQNKTDGQVSGEAIKMFPTIKTPEAGTVITTADEIELEGATQWPHSTSASATYGVEAGVVPWLSPQTSERPTLSSSPEINPETQAALIRGQDSTIAASEQQVAARILDSNDQATVNPVEFNTEVATPPFSLLETSNETDFLIGINEESVEGTAIYLPGPDRCKMNPCLNGGTCYPTETSYVCTCVPGYSGDQCELDFDECHSNPCRNGATCVDGFNTFRCLCLPSYVGALCEQDTETCDYGWHKFQGQCYKYFAHRRTWDAAERECRLQGAHLTSILSHEEQMFVNRVGHDYQWIGLNDKMFEHDFRWTDGSTLQYENWRPNQPDSFFSAGEDCVVIIWHENGQWNDVPCNYHLTYTCKKGTVACGQPPVVENAKTFGKMKPRYEINSLIRYHCKDGFIQRHLPTIRCLGNGRWAIPKITCMNPSAYQRTYSMKYFKNSSSAKDNSINTSKHDHRWSRRWQESRR

SEQ ID NO: 29927 - protein, 2409 aa, Homo sapiens
MFINIKSILWMCSTLIVTHALHKVKVGKSPPVRGSLSGKVSLPCHFSTMPTLPPSYNTSEFLRIKWSKIEVDKNGKDLKETTVLVAQNGNIKIGQDYKGRVSVPTHPEAVGDASLTVVKLLASDAGLYRCDVMYGIEDTQDTVSLTVDGVVFHYRAATSRYTLNFEAAQKACLDVGAVIATPEQLFAAYEDGFEQCDAGWLADQTVRYPIRAPRVGCYGDKMGKAGVRTYGFRSPQETYDVYCYVDHLDGDVFHLTVPSKFTFEEAAKECENQDARLATVGELQAAWRNGFDQCDYGWLSDASVRHPVTVARAQCGGGLLGVRTLYRFENQTGFPPPDSRFDAYCFKRRMSDLSVIGHPIDSESKEDEPCSEETDPVHDLMAEILPEFPDIIEIDLYHSEENEEEEEECANATDVTTTPSVQYINGKHLVTTVPKDPEAAEARRGQFESVAPSQNFSDSSESDTHPFVIAKTELSTAVQPNESTETTESLEVTWKPETYPETSEHFSGGEPDVFPTVPFHEEFESGTAKKGAESVTERDTEVGHQAHEHTEPVSLFPEESSGEIAIDQESQKIAFARATEVTFGEEVEKSTSVTYTPTIVPSSASAYVSEEEAVTLIGNPWPDDLLSTKESWVEATPRQVVELSGSSSIPITEGSGEAEEDEDTMFTMVTDLSQRNTTDTLITLDTSRIITESFFEVPATTIYPVSEQPSAKVVPTKFVSETDTSEWISSTTVEEKKRKEEEGTTGTASTFEVYSSTQRSDQLILPFELESPNVATSSDSGTRKSFMSLTTPTQSEREMTDSTPVFTETNTLENLGAQTTEHSSIHQPGVQEGLTTLPRSPASVFMEQGSGEAAADPETTTVSSFSLNVEYAIQAEKEVAGTLSPHVETTFSTEPTGLVLSTVMDRVVAENITQTSREIVISERLGEPNYGAEIRGFSTGFPLEEDFSGDFREYSTVSHPIAKEETVMMEGSGDAAFRDTQTSPSTVPTSVHISHISDSEGPSSTMVSTSAFPWEEFTSSAEGSGEQLVTVSSSVVPVLPSAVQKFSGTASSIIDEGLGEVGTVNEIDRRSTILPTAEVEGTKAPVEKEEVKVSGTVSTNFPQTIEPAKLWSRQEVNPVRQEIESETTSEEQIQEEKSFESPQNSPATEQTIFDSQTFTETELKTTDYSVLTTKKTYSDDKEMKEEDTSLVNMSTPDPDANGLESYTTLPEATEKSHFFLATALVTESIPAEHVVTDSPIKKEESTKHFPKGMRPTIQESDTELLFSGLGSGEEVLPTLPTESVNFTEVEQINNTLYPHTSQVESTSSDKIEDFNRMENVAKEVGPLVSQTDIFEGSGSVTSTTLIEILSDTGAEGPTVAPLPFSTDIGHPQNQTVRWAEEIQTSRPQTITEQDSNKNSSTAEINETTTSSTDFLARAYGFEMAKEFVTSAPKPSDLYYEPSGEGSGEVDIVDSFHTSATTQATRQESSTTFVSDGSLEKHPEVPSAKAVTADGFPTVSVMLPLHSEQNKSSPDPTSTLSNTVSYERSTDGSFQDRFREFEDSTLKPNRKKPTENIIIDLDKEDKDLILTITESTILEILPELTSDKNTIIDIDHTKPVYEDILGMQTDIDTEVPSEPHDSNDESNDDSTQVQEIYEAAVNLSLTEETFEGSADVLASYTQATHDESMTYEDRSQLDHMGFHFTTGIPAPSTETELDVLLPTATSLPIPRKSATVIPEIEGIKAEAKALDDMFESSTLSDGQAIADQSEIIPTLGQFERTQEEYEDKKHAGPSFQPEFSSGAEEALVDHTPYLSIATTHLMDQSVTEVPDVMEGSNPPYYTDTTLAVSTFAKLSSQTPSSPLTIYSGSEASGHTEIPQPSALPGIDVGSSVMSPQDSFKEIHVNIEATFKPSSEEYLHITEPPSLSPDTKLEPSEDDGKPELLEEMEASPTELIAVEGTEILQDFQNKTDGQVSGEAIKMFPTIKTPEAGTVITTADEIELEGATQWPHSTSASATYGVEAGVVPWLSPQTSERPTLSSSPEINPETQAALIRGQDSTIAASEQQVAARILDSNDQATVNPVEFNTEVATPPFSLLETSNETDFLIGINEESVEGTAIYLPGPDRCKMNPCLNGGTCYPTETSYVCTCVPGYSGDQCELDFDECHSNPCRNGATCVDGFNTFRCLCLPSYVGALCEQDTETCDYGWHKFQGQCYKYFAHRRTWDAAERECRLQGAHLTSILSHEEQMFVNRVGHDYQWIGLNDKMFEHDFRWTDGSTLQYENWRPNQPDSFFSAGEDCVVIIWHENGQWNDVPCNYHLTYTCKKGTVACGQPPVVENAKTFGKMKPRYEINSLIRYHCKDGFIQRHLPTIRCLGNGRWAIPKITCMNPSAYQRTYSMKYFKNSSSAKDNSINTSKHDHRWSRRWQESRR

SEQ ID NO: 29928 - protein, 1642 aa, Homo sapiens
MFINIKSILWMCSTLIVTHALHKVKVGKSPPVRGSLSGKVSLPCHFSTMPTLPPSYNTSEFLRIKWSKIEVDKNGKDLKETTVLVAQNGNIKIGQDYKGRVSVPTHPEAVGDASLTVVKLLASDAGLYRCDVMYGIEDTQDTVSLTVDGVVFHYRAATSRYTLNFEAAQKACLDVGAVIATPEQLFAAYEDGFEQCDAGWLADQTVRYPIRAPRVGCYGDKMGKAGVRTYGFRSPQETYDVYCYVDHLDGDVFHLTVPSKFTFEEAAKECENQDARLATVGELQAAWRNGFDQCDYGWLSDASVRHPVTVARAQCGGGLLGVRTLYRFENQTGFPPPDSRFDAYCFKPKEATTIDLSILAETASPSLSKEPQMVSDRTTPIIPLVDELPVIPTEFPPVGNIVSFEQKATVQPQAITDSLATKLPTPTGSTKKPWDMDDYSPSASGPLGKLDISEIKEEVLQSTTGVSHYATDSWDGVVEDKQTQESVTQIEQIEVGPLVTSMEILKHIPSKEFPVTETPLVTARMILESKTEKKMVSTVSELVTTGHYGFTLGEEDDEDRTLTVGSDESTLIFDQIPEVITVSKTSEDTIHTHLEDLESVSASTTVSPLIMPDNNGSSMDDWEERQTSGRITEEFLGKYLSTTPFPSQHRTEIELFPYSGDKILVEGISTVIYPSLQTEMTHRRERTETLIPEMRTDTYTDEIQEEITKSPFMGKTEEEVFSGMKLSTSLSEPIHVTESSVEMTKSFDFPTLITKLSAEPTEVRDMEEDFTATPGTTKYDENITTVLLAHGTLSVEAATVSKWSWDEDNTTSKPLESTEPSASSKLPPALLTTVGMNGKDKDIPSFTEDGADEFTLIPDSTQKQLEEVTDEDIAAHGKFTIRFQPTTSTGIAEKSTLRDSTTEEKVPPITSTEGQVYATMEGSALGEVEDVDLSKPVSTVPQFAHTSEVEGLAFVSYSSTQEPTTYVDSSHTIPLSVIPKTDWGVLVPSVPSEDEVLGEPSQDILVIDQTRLEATISPETMRTTKITEGTTQEEFPWKEQTAEKPVPALSSTAWTPKEAVTPLDEQEGDGSAYTVSEDELLTGSERVPVLETTPVGKIDHSVSYPPGAVTEHKVKTDEVVTLTPRIGPKVSLSPGPEQKYETEGSSTTGFTSSLSPFSTHITQLMEETTTEKTSLEDIDLGSGLFEKPKATELIEFSTIKVTVPSDITTAFSSVDRLHTTSAFKPSSAITKKPPLIDREPGEETTSDMVIIGESTSHVPPTTLEDIVAKETETDIDREYFTTSSPPATQPTRPPTVEDKEAFGPQALSTPQPPASTKFHPDINVYIIEVRENKTGPDRCKMNPCLNGGTCYPTETSYVCTCVPGYSGDQCELDFDECHSNPCRNGATCVDGFNTFRCLCLPSYVGALCEQDTETCDYGWHKFQGQCYKYFAHRRTWDAAERECRLQGAHLTSILSHEEQMFVNRVGHDYQWIGLNDKMFEHDFRWTDGSTLQYENWRPNQPDSFFSAGEDCVVIIWHENGQWNDVPCNYHLTYTCKKGTVACGQPPVVENAKTFGKMKPRYEINSLIRYHCKDGFIQRHLPTIRCLGNGRWAIPKITCMNPSAYQRTYSMKYFKNSSSAKDNSINTSKHDHRWSRRWQESRR

SEQ ID NO: 29929 - protein, 655 aa, Homo sapiens
MFINIKSILWMCSTLIVTHALHKVKVGKSPPVRGSLSGKVSLPCHFSTMPTLPPSYNTSEFLRIKWSKIEVDKNGKDLKETTVLVAQNGNIKIGQDYKGRVSVPTHPEAVGDASLTVVKLLASDAGLYRCDVMYGIEDTQDTVSLTVDGVVFHYRAATSRYTLNFEAAQKACLDVGAVIATPEQLFAAYEDGFEQCDAGWLADQTVRYPIRAPRVGCYGDKMGKAGVRTYGFRSPQETYDVYCYVDHLDGDVFHLTVPSKFTFEEAAKECENQDARLATVGELQAAWRNGFDQCDYGWLSDASVRHPVTVARAQCGGGLLGVRTLYRFENQTGFPPPDSRFDAYCFKRPDRCKMNPCLNGGTCYPTETSYVCTCVPGYSGDQCELDFDECHSNPCRNGATCVDGFNTFRCLCLPSYVGALCEQDTETCDYGWHKFQGQCYKYFAHRRTWDAAERECRLQGAHLTSILSHEEQMFVNRVGHDYQWIGLNDKMFEHDFRWTDGSTLQYENWRPNQPDSFFSAGEDCVVIIWHENGQWNDVPCNYHLTYTCKKGTVACGQPPVVENAKTFGKMKPRYEINSLIRYHCKDGFIQRHLPTIRCLGNGRWAIPKITCMNPSAYQRTYSMKYFKNSSSAKDNSINTSKHDHRWSRRWQESRR

SEQ ID NO: 29930 - protein, 3370 aa, Homo sapiens
MFINIKSILWMCSTLIVTHALHKVKVGKSPPVRGSLSGKVSLPCHFSTMPTLPPSYNTSEFLRIKWSKIEVDKNGKDLKETTVLVAQNGNIKIGQDYKGRVSVPTHPEAVGDASLTVVKLLASDAGLYRCDVMYGIEDTQDTVSLTVDGVVFHYRAATSRYTLNFEAAQKACLDVGAVIATPEQLFAAYEDGFEQCDAGWLADQTVRYPIRAPRVGCYGDKMGKAGVRTYGFRSPQETYDVYCYVDHLDGDVFHLTVPSKFTFEEAAKECENQDARLATVGELQAAWRNGFDQCDYGWLSDASVRHPVTVARAQCGGGLLGVRTLYRFENQTGFPPPDSRFDAYCFKPKEATTIDLSILAETASPSLSKEPQMVSDRTTPIIPLVDELPVIPTEFPPVGNIVSFEQKATVQPQAITDSLATKLPTPTGSTKKPWDMDDYSPSASGPLGKLDISEIKEEVLQSTTGVSHYATDSWDGVVEDKQTQESVTQIEQIEVGPLVTSMEILKHIPSKEFPVTETPLVTARMILESKTEKKMVSTVSELVTTGHYGFTLGEEDDEDRTLTVGSDESTLIFDQIPEVITVSKTSEDTIHTHLEDLESVSASTTVSPLIMPDNNGSSMDDWEERQTSGRITEEFLGKYLSTTPFPSQHRTEIELFPYSGDKILVEGISTVIYPSLQTEMTHRRERTETLIPEMRTDTYTDEIQEEITKSPFMGKTEEEVFSGMKLSTSLSEPIHVTESSVEMTKSFDFPTLITKLSAEPTEVRDMEEDFTATPGTTKYDENITTVLLAHGTLSVEAATVSKWSWDEDNTTSKPLESTEPSASSKLPPALLTTVGMNGKDKDIPSFTEDGADEFTLIPDSTQKQLEEVTDEDIAAHGKFTIRFQPTTSTGIAEKSTLRDSTTEEKVPPITSTEGQVYATMEGSALGEVEDVDLSKPVSTVPQFAHTSEVEGLAFVSYSSTQEPTTYVDSSHTIPLSVIPKTDWGVLVPSVPSEDEVLGEPSQDILVIDQTRLEATISPETMRTTKITEGTTQEEFPWKEQTAEKPVPALSSTAWTPKEAVTPLDEQEGDGSAYTVSEDELLTGSERVPVLETTPVGKIDHSVSYPPGAVTEHKVKTDEVVTLTPRIGPKVSLSPGPEQKYETEGSSTTGFTSSLSPFSTHITQLMEETTTEKTSLEDIDLGSGLFEKPKATELIEFSTIKVTVPSDITTAFSSVDRLHTTSAFKPSSAITKKPPLIDREPGEETTSDMVIIGESTSHVPPTTLEDIVAKETETDIDREYFTTSSPPATQPTRPPTVEDKEAFGPQALSTPQPPASTKFHPDINVYIIEVRENKTGRMSDLSVIGHPIDSESKEDEPCSEETDPVHDLMAEILPEFPDIIEIDLYHSEENEEEEEECANATDVTTTPSVQYINGKHLVTTVPKDPEAAEARRGQFESVAPSQNFSDSSESDTHPFVIAKTELSTAVQPNESTETTESLEVTWKPETYPETSEHFSGGEPDVFPTVPFHEEFESGTAKKGAESVTERDTEVGHQAHEHTEPVSLFPEESSGEIAIDQESQKIAFARATEVTFGEEVEKSTSVTYTPTIVPSSASAYVSEEEAVTLIGNPWPDDLLSTKESWVEATPRQVVELSGSSSIPITEGSGEAEEDEDTMFTMVTDLSQRNTTDTLITLDTSRIITESFFEVPATTIYPVSEQPSAKVVPTKFVSETDTSEWISSTTVEEKKRKEEEGTTGTASTFEVYSSTQRSDQLILPFELESPNVATSSDSGTRKSFMSLTTPTQSEREMTDSTPVFTETNTLENLGAQTTEHSSIHQPGVQEGLTTLPRSPASVFMEQGSGEAAADPETTTVSSFSLNVEYAIQAEKEVAGTLSPHVETTFSTEPTGLVLSTVMDRVVAENITQTSREIVISERLGEPNYGAEIRGFSTGFPLEEDFSGDFREYSTVSHPIAKEETVMMEGSGDAAFRDTQTSPSTVPTSVHISHISDSEGPSSTMVSTSAFPWEEFTSSAEGSGEQLVTVSSSVVPVLPSAVQKFSGTASSIIDEGLGEVGTVNEIDRRSTILPTAEVEGTKAPVEKEEVKVSGTVSTNFPQTIEPAKLWSRQEVNPVRQEIESETTSEEQIQEEKSFESPQNSPATEQTIFDSQTFTETELKTTDYSVLTTKKTYSDDKEMKEEDTSLVNMSTPDPDANGLESYTTLPEATEKSHFFLATALVTESIPAEHVVTDSPIKKEESTKHFPKGMRPTIQESDTELLFSGLGSGEEVLPTLPTESVNFTEVEQINNTLYPHTSQVESTSSDKIEDFNRMENVAKEVGPLVSQTDIFEGSGSVTSTTLIEILSDTGAEGPTVAPLPFSTDIGHPQNQTVRWAEEIQTSRPQTITEQDSNKNSSTAEINETTTSSTDFLARAYGFEMAKEFVTSAPKPSDLYYEPSGEGSGEVDIVDSFHTSATTQATRQESSTTFVSDGSLEKHPEVPSAKAVTADGFPTVSVMLPLHSEQNKSSPDPTSTLSNTVSYERSTDGSFQDRFREFEDSTLKPNRKKPTENIIIDLDKEDKDLILTITESTILEILPELTSDKNTIIDIDHTKPVYEDILGMQTDIDTEVPSEPHDSNDESNDDSTQVQEIYEAAVNLSLTEETFEGSADVLASYTQATHDESMTYEDRSQLDHMGFHFTTGIPAPSTETELDVLLPTATSLPIPRKSATVIPEIEGIKAEAKALDDMFESSTLSDGQAIADQSEIIPTLGQFERTQEEYEDKKHAGPSFQPEFSSGAEEALVDHTPYLSIATTHLMDQSVTEVPDVMEGSNPPYYTDTTLAVSTFAKLSSQTPSSPLTIYSGSEASGHTEIPQPSALPGIDVGSSVMSPQDSFKEIHVNIEATFKPSSEEYLHITEPPSLSPDTKLEPSEDDGKPELLEEMEASPTELIAVEGTEILQDFQNKTDGQVSGEAIKMFPTIKTPEAGTVITTADEIELEGATQWPHSTSASATYGVEAGVVPWLSPQTSERPTLSSSPEINPETQAALIRGQDSTIAASEQQVAARILDSNDQATVNPVEFNTEVATPPFSLLETSNETDFLIGINEESVEGTAIYLPGPDRCKMNPCLNGGTCYPTETSYVCTCVPGYSGDQCELDFDECHSNPCRNGATCVDGFNTFRCLCLPSYVGALCEQDTETCDYGWHKFQGQCYKYFAHRRTWDAAERECRLQGAHLTSILSHEEQMFVNRVGHDYQWIGLNDKMFEHDFRWTDGSTLQYENWRPNQPDSFFSAGEDCVVIIWHENGQWNDVPCNYHLTYTCKKGTVACGQPPVVENAKTFGKMKPRYEINSLIRYHCKDGFIQRHLPTIRCLGNGRWAIPKITCMNRKWSFRKNGLPCYNNY

SEQ ID NO: 29931 - protein, 262 aa, Homo sapiens
MAAPSGTVSDSESSNSSSDAEELERCREAAMPAWGLEQRPHVAGKPRAGAANSQLSTSQPSLRHKVNEHEQDGNELQTTPEFRAHVAKKLGALLDSFITISEAAKEPAKAKVQKVALEDDGFRLFFTSVPGGREKEESPQPRRKRQPSSSSEDSDEEWRRCREAAVSASDILQESAIHSPGTVEKEAKKKRKLKKKAKKVASVDSAVAATTPTSMATVQKQKSGELNGDQVSLGTKKKKKAKKASETSPFPPAKSATAIPAN

SEQ ID NO: 29932 - protein, 363 aa, Homo sapiens
MAHVLQKPKHSGTHSIVQEFQVPDYVPWQQSKQETKPSTLPPVQQANSLHTSKMKTLTRVQPVFHFKPTTVVTSCQPKNPRELHRRRKLDPGKMHAKIWLMKTSLRSGRAALRELRSRENFLSKLNRELIETIQEMENSTTLHVRALLQQQDTLATIIDILEYSNKKRLQQLKSELQEWEEKKKCKMSYLEQQAEQLNAKIEKTQEEVNFLSTYMDHEYSIKSVQISTLMRQLQQVKDSQQDELDDLGEMRRKVLESLSDKIQKKKKKILSSVVAETQRPYEEALLQKMWESQDFLKCMQRFREIIDQFEENMPVLRAEVEELQAQTREPREVIFEDVLLRRPKCTPDMDVILNIPVEEPLPF

SEQ ID NO: 29933 - protein, 981 aa, Homo sapiens
MLRRPAPALAPAARLLLAGLLCGGGVWAARVNKHKPWLEPTYHGIVTENDNTVLLDPPLIALDKDAPLRFAESFEVTVTKEGEICGFKIHGQNVPFDAVVVDKSTGEGVIRSKEKLDCELQKDYSFTIQAYDCGKGPDGTNVKKSHKATVHIQVNDVNEYAPVFKEKSYKATVIEGKQYDSILRVEAVDADCSPQFSQICSYEIITPDVPFTVDKDGYIKNTEKLNYGKEHQYKLTVTAYDCGKKRATEDVLVKISIKPTCTPGWQGWNNRIEYEPGTGALAVFPNIHLETCDEPVASVQATVELETSHIGKGCDRDTYSEKSLHRLCGAAAGTAELLPSPSGSLNWTMGLPTDNGHDSDQVFEFNGTQAVRIPDGVVSVSPKEPFTISVWMRHGPFGRKKETILCSSDKTDMNRHHYSLYVHGCRLIFLFRQDPSEEKKYRPAEFHWKLNQVCDEEWHHYVLNVEFPSVTLYVDGTSHEPFSVTEDYPLHPSKIETQLVVGACWQEFSGVENDNETEPVTVASAGGDLHMTQFFRGNLAGLTLRSGKLADKKVIDCLYTCKEGLDLQVLEDSGRGVQIQAHPSQLVLTLEGEDLGELDKAMQHISYLNSRQFPTPGIRRLKITSTIKCFNEATCISVPPVDGYVMVLQPEEPKISLSGVHHFARAASEFESSEGVFLFPELRIISTITREVEPEGDGAEDPTVQESLVSEEIVHDLDTCEVTVEGEELNHEQESLEVDMARLQQKGIEVSSSELGMTFTGVDTMASYEEVLHLLRYRNWHARSLLDRKFKLICSELNGRYISNEFKVEVNVIHTANPMEHANHMAAQPQFVHPEHRSFVDLSGHNLANPHPFAVVPSTATVVIVVCVSFLVFMIILGVFRIRAAHRRTMRDQDTGKENEMDWDDSALTITVNPMETYEDQHSSEEEEEEEEEEESEDGEEEDDITSAESESSEEEEGEQGDPQNATRQQQLEWDDSTLSY

SEQ ID NO: 29934 - protein, 971 aa, Homo sapiens
MLRRPAPALAPAARLLLAGLLCGGGVWAARVNKHKPWLEPTYHGIVTENDNTVLLDPPLIALDKDAPLRFAGEICGFKIHGQNVPFDAVVVDKSTGEGVIRSKEKLDCELQKDYSFTIQAYDCGKGPDGTNVKKSHKATVHIQVNDVNEYAPVFKEKSYKATVIEGKQYDSILRVEAVDADCSPQFSQICSYEIITPDVPFTVDKDGYIKNTEKLNYGKEHQYKLTVTAYDCGKKRATEDVLVKISIKPTCTPGWQGWNNRIEYEPGTGALAVFPNIHLETCDEPVASVQATVELETSHIGKGCDRDTYSEKSLHRLCGAAAGTAELLPSPSGSLNWTMGLPTDNGHDSDQVFEFNGTQAVRIPDGVVSVSPKEPFTISVWMRHGPFGRKKETILCSSDKTDMNRHHYSLYVHGCRLIFLFRQDPSEEKKYRPAEFHWKLNQVCDEEWHHYVLNVEFPSVTLYVDGTSHEPFSVTEDYPLHPSKIETQLVVGACWQEFSGVENDNETEPVTVASAGGDLHMTQFFRGNLAGLTLRSGKLADKKVIDCLYTCKEGLDLQVLEDSGRGVQIQAHPSQLVLTLEGEDLGELDKAMQHISYLNSRQFPTPGIRRLKITSTIKCFNEATCISVPPVDGYVMVLQPEEPKISLSGVHHFARAASEFESSEGVFLFPELRIISTITREVEPEGDGAEDPTVQESLVSEEIVHDLDTCEVTVEGEELNHEQESLEVDMARLQQKGIEVSSSELGMTFTGVDTMASYEEVLHLLRYRNWHARSLLDRKFKLICSELNGRYISNEFKVEVNVIHTANPMEHANHMAAQPQFVHPEHRSFVDLSGHNLANPHPFAVVPSTATVVIVVCVSFLVFMIILGVFRIRAAHRRTMRDQDTGKENEMDWDDSALTITVNPMETYEDQHSSEEEEEEEEEEESEDGEEEDDITSAESESSEEEEGEQGDPQNATRQQQLEWDDSTLSY

SEQ ID NO: 29935 - protein, 565 aa, Homo sapiens
MEDSDSAAKQLGLAEAAAVAAAAAVAAAAAAAAGGEAEEPVLSRDEDSEEDADSEAERETPRVTAVAVMAAEPGHMDMGAEALPGPDEAAAAAAFAEVTTVTVANVGAAADNVFTTSVANAASISGHVLSGRTALQIGDSLNTEKATLIVVHTDGSIVETTGLKGPAAPLTPGPQSPPTPLAPGQEKGGTKYNWDPSVYDSELPVRCRNISGTLYKNRLGSGGRGRCIKQGENWYSPTEFEAMAGRASSKDWKRSIRYAGRPLQCLIQDGILNPHAASCTCAACCDDMTLSGPVRLFVPYKRRKKENELPTTPVKKDSPKNITLLPATAATTFTVTPSGQITTSGALTFDRASTVEATAVISESPAQGDVFAGATVQEASVQPPCRASHPEPHYPGYQDSCQIAPFPEAALPTSHPKIVLTSLPALAVPPPTPTKAAPPALVNGLELSEPRSWLYLEEMVNSLLNTAQQLKTLFEQAKHASTYREAATNQAKIHADAERKEQSCVNCGREAMSECTGCHKVNYCSTFCQRKDWKDHQHICGQSAAVTVQADEVHVAESVMEKVTV

SEQ ID NO: 29936 - protein, 551 aa, Homo sapiens
MEDSDSAAKQLGLADAAAAGGEAEEPVLSRDEDSEEDADSEAERETPRVTAVAVMAAEPGHMDMGAEALPGPDEAAAAAAFAEVTTVTVANVGAAADNVFTTSVANAASISGHVLSGRTALQIGDSLNTEKATLIVVHTDGSIVETTGLKGPAAPLTPGPQSPPTPLAPGQEKGGTKYNWDPSVYDSELPVRCRNISGTLYKNRLGSGGRGRCIKQGENWYSPTEFEAMAGRASSKDWKRSIRYAGRPLQCLIQDGILNPHAASCTCAACCDDMTLSGPVRLFVPYKRRKKENELPTTPVKKDSPKNITLLPATAATTFTVTPSGQITTSGALTFDRASTVEATAVISESPAQGDVFAGATVQEASVQPPCRASHPEPHYPGYQDSCQIAPFPEAALPTSHPKIVLTSLPALAVPPPTPTKAAPPALVNGLELSEPRSWLYLEEMVNSLLNTAQQLKTLFEQAKHASTYREAATNQAKIHADAERKEQSCVNCGREAMSECTGCHKVNYCSTFCQRKDWKDHQHICGQSAAVTVQADEVHVAESVMEKVTV

SEQ ID NO: 29937 - protein, 497 aa, Homo sapiens
MAAEPGHMDMGAEALPGPDEAAAAAAFAEVTTVTVANVGAAADNVFTTSVANAASISGHVLSGRTALQIGDSLNTEKATLIVVHTDGSIVETTGLKGPAAPLTPGPQSPPTPLAPGQEKGGTKYNWDPSVYDSELPVRCRNISGTLYKNRLGSGGRGRCIKQGENWYSPTEFEAMAGRASSKDWKRSIRYAGRPLQCLIQDGILNPHAASCTCAACCDDMTLSGPVRLFVPYKRRKKENELPTTPVKKDSPKNITLLPATAATTFTVTPSGQITTSGALTFDRASTVEATAVISESPAQGDVFAGATVQEASVQPPCRASHPEPHYPGYQDSCQIAPFPEAALPTSHPKIVLTSLPALAVPPPTPTKAAPPALVNGLELSEPRSWLYLEEMVNSLLNTAQQLKTLFEQAKHASTYREAATNQAKIHADAERKEQSCVNCGREAMSECTGCHKVNYCSTFCQRKDWKDHQHICGQSAAVTVQADEVHVAESVMEKVTV

SEQ ID NO: 29938 - protein, 490 aa, Homo sapiens
MEDSDSAAKQLGLAEAAAVAAAAAVAAAAAAAAGGEAEEPVLSRDEDSEEDADSEAERETPRVTAVAVMAAEPGHMDMGAEALPGPDEAAAAAAFAEVTTVTVANVGAAADNVFTTSVANAASISGHVLSGRTALQIGDSLNTEKATLIVVHTDGSIVETTGLKGPAAPLTPGPQSPPTPLAPGQEKGGTKYNWDPSVYDSELPVRCRNISGTLYKNRLGSGWDLKPSRCLLHLCCLLRRHDLITVTPSGQITTSGALTFDRASTVEATAVISESPAQGDVFAGATVQEASVQPPCRASHPEPHYPGYQDSCQIAPFPEAALPTSHPKIVLTSLPALAVPPPTPTKAAPPALVNGLELSEPRSWLYLEEMVNSLLNTAQQLKTLFEQAKHASTYREAATNQAKIHADAERKEVIHPPRLPKVLGLQQSCVNCGREAMSECTGCHKVNYCSTFCQRKDWKDHQHICGQSAAVTVQADEVHVAESVMEKVTV

SEQ ID NO: 29939 - protein, 479 aa, Homo sapiens
MATDSWALAVDEQEAAAESLSNLHLKEEKIKPDTNGAVVKTNANAEKTDEEEKEDRAAQSLLNKLIRSNLVDNTNQVEVLQRDPNSPLYSVKSFEELRLKPQLLQGVYAMGFNRPSKIQENALPLMLAEPPQNLIAQSQSGTGKTAAFVLAMLSQVEPANKYPQCLCLSPTYELALQTGKVIEQMGKFYPELKLAYAVRGNKLERGQKISEQIVIGTPGTVLDWCSKLKFIDPKKIKVFVLDEADVMIATQGHQDQSIRIQRMLPRNCQMLLFSATFEDSVWKFAQKVVPDPNVIKLKREEETLDTIKQYYVLCSSRDEKFQALCNLYGAITIAQAMIFCHTRKTASWLAAELSKEGHQVALLSGEMMVEQRAAVIERFREGKEKVLVTTNVCARGIDVEQVSVVINFDLPVDKDGNPDNETYLHRIGRTGRFGKRGLAVNMVDSKHSMNILNRIQEHFNKKIERLDTDDLDEIEKIAN

SEQ ID NO: 29940 - protein, 448 aa, Homo sapiens
MATDSWALAVDEQEAAAESLSNLHLKEEKIKPDTNGAVVKTNANAEKTDEEEKEDRAAQSLLNKLIRSNLVDNTNQVEVLQRDPNSPLYSVKSFEELRLPQNLIAQSQSGTGKTAAFVLAMLSQVEPANKYPQCLCLSPTYELALQTGKVIEQMGKFYPELKLAYAVRGNKLERGQKISEQIVIGTPGTVLDWCSKLKFIDPKKIKVFVLDEADVMIATQGHQDQSIRIQRMLPRNCQMLLFSATFEDSVWKFAQKVVPDPNVIKLKREEETLDTIKQYYVLCSSRDEKFQALCNLYGAITIAQAMIFCHTRKTASWLAAELSKEGHQVALLSGEMMVEQRAAVIERFREGKEKVLVTTNVCARGIDVEQVSVVINFDLPVDKDGNPDNETYLHRIGRTGRFGKRGLAVNMVDSKHSMNILNRIQEHFNKKIERLDTDDLDEIEKIAN

SEQ ID NO: 29941 - protein, 370 aa, Homo sapiens
MGFNRPSKIQENALPLMLAEPPQNLIAQSQSGTGKTAAFVLAMLSQVEPANKYPQCLCLSPTYELALQTGKVIEQMGKFYPELKLAYAVRGNKLERGQKISEQIVIGTPGTVLDWCSKLKFIDPKKIKVFVLDEADVMIATQGHQDQSIRIQRMLPRNCQMLLFSATFEDSVWKFAQKVVPDPNVIKLKREEETLDTIKQYYVLCSSRDEKFQALCNLYGAITIAQAMIFCHTRKTASWLAAELSKEGHQVALLSGEMMVEQRAAVIERFREGKEKVLVTTNVCARGIDVEQVSVVINFDLPVDKDGNPDNETYLHRIGRTGRFGKRGLAVNMVDSKHSMNILNRIQEHFNKKIERLDTDDLDEIEKIAN

SEQ ID NO: 29942 - protein, 453 aa, Homo sapiens
MAGAAGRVQDRALRRFPITLPVGDLSNLHLKEEKIKPDTNGAVVKTNANAEKTDEEEKEDRAAQSLLNKLIRSNLVDNTNQVEVLQRDPNSPLYSVKSFEELRLPQNLIAQSQSGTGKTAAFVLAMLSQVEPANKYPQCLCLSPTYELALQTGKVIEQMGKFYPELKLAYAVRGNKLERGQKISEQIVIGTPGTVLDWCSKLKFIDPKKIKVFVLDEADVMIATQGHQDQSIRIQRMLPRNCQMLLFSATFEDSVWKFAQKVVPDPNVIKLKREEETLDTIKQYYVLCSSRDEKFQALCNLYGAITIAQAMIFCHTRKTASWLAAELSKEGHQVALLSGEMMVEQRAAVIERFREGKEKVLVTTNVCARGIDVEQVSVVINFDLPVDKDGNPDNETYLHRIGRTGRFGKRGLAVNMVDSKHSMNILNRIQEHFNKKIERLDTDDLDEIEKIAN

SEQ ID NO: 29943 - protein, 70 aa, Homo sapiens
MRVLFFVFGVLSLMSTVPPTRSFTSNDECPSEYYHCRLKCNADEHAIRYCADFSICCKLKIIQIDGQKKW

SEQ ID NO: 29944 - protein, 458 aa, Homo sapiens
MELPLGRCDDSRTWDDDSDPESETDPDAQAKAYVARVLSPPKSGLAFSRPSQLSTPAASPSASEPRAASRVSAVSEPGLLSLPPELLLEICSYLDARLVLHVLSRVCHALRDLVSDHVTWRLRALRRVRAPYPVVEEKNFDWPAACIALEQHLSRWAEDGRWVEYFCLAEGHVASVDSVLLLQGGSLCLSGSRDRNVNLWDLRQLGTESNQVLIKTLGTKRNSTHEGWVWSLAAQDHRVCSGSWDSTVKLWDMAADGQQFGEIKASSAVLCLSYLPDILVTGTYDKKVTIYDPRAGPALLKHQQLHSRPVLTLLADDRHIISGSEDHTLVVVDRRANSVLQRLQLDSYLLCMSYQEPQLWAGDNQGLLHVFANRNGCFQLIRSFDVGHSFPITGIQYSVGALYTTSTDKTIRVHVPTDPPRTICTRRHDNGLNRVCAEGNLVVAGSGDLSLEVWRLQA

SEQ ID NO: 29945 - protein, 478 aa, Homo sapiens
MELPLGRCDDSRTWDDDSDPESETDPDAQAKAYVARVLSPPKSGLAFSRPSQLSTPAASPSASEPRAASRVSAVSEPGLLSLPPELLLEICSYLDARLVLHVLSRVCHALRDLVSDHVTWRLRALRRKNFDWPAACIALEQHLSRWAEDGRWVEYFCLAEGHVASVDSVLLLQGGSLCLSGSRDRNVNLWDLRQLGTESNQVLIKTLGTKRNSTHEGWVWSLAAQDHRVCSGSWDSTVKLWDMAADGQQFGEIKASSAVLCLSYLPDILVTGTYDKKVTIYDPRDRMETRDALMGWGGPSRGSDIPPHRPITHEAGPALLKHQQLHSRPVLTLLADDRHIISGSEDHTLVVVDRRANSVLQRLQLDSYLLCMSYQEPQLWAGDNQGLLHVFANRNGCFQLIRSFDVGHSFPITGIQYSVGALYTTSTDKTIRVHVPTDPPRTICTRRHDNGLNRVCAEGNLVVAGSGDLSLEVWRLQA

SEQ ID NO: 29946 - protein, 399 aa, Homo sapiens
MLLTVYCVRRDLSEVTFSLQVDADFELHNFRALCELESGIPAAESQIVYAERPLTDNHRSLASYGLKDGDVVILRQKENADPRPPVQFPNLPRIDFSSIAVPGTSSPRQRQPPGTQQSHSSPGEITSSPQGLDNPALLRDMLLANPHELSLLKERNPPLAEALLSGDLEKFSRVLVEQQQDRARREQERIRLFSADPFDLEAQAKIEEDIRQQNIEENMTIAMEEAPESFGQVVMLYINCKVNGHPVKAFVDSGAQMTIMSQACAERCNIMRLVDRRWAGIAKGVGTQKIIGRVHLAQVQIEGDFLPCSFSILEEQPMDMLLGLDMLKRHQCSIDLKKNVLVIGTTGSQTTFLPEGELPECARLAYGAGREDVRPEEIADQELAEALQKSAEDAERQKP

SEQ ID NO: 29947 - protein, 211 aa, Homo sapiens
MLLTVYCVRRDLSEVTFSLQVDADFELHNFRALCELESGIPAAESQIVYAERPLTDNHRSLASYGLKDGDVVILRQKENADPRPPVQFPNLPRIDFSSIAVPGTSSPRQRQPPGTQQSHSSPGEITSSPQGLDNPALLRDMLLANPHELSLLKERNPPLAEALLSGDLEKFSRVLVEQQQDRARREQERIRLFSADPFDLEAQAKIEEDIR

SEQ ID NO: 29948 - protein, 419 aa, Homo sapiens
MLLTVYCVRRDLSEVTFSLQVDADFELHNFRALCELESGIPAAESQIVYAERPLTDNHRSLASYGLKDGDVVILRQKENADPRPPVQFPNLPRIDFSSIAVPGTSSPRQRQPPGTQQSHSSPGEITSSPQGLDNPALLRDMLLANPHELSLLKERNPPLAEALLSGDLEKFSRVLVEQQQDRARREQERIRLFSADPFDLEAQAKIEEDIRQQNIEENMTIAMEEAPESFGQVVMLYINCKVNGHPVKAFVDSGAQMTIMSQACAERCNIMRLVDRRWAGIAKGVGTQKIIGRVHLAQVQIEGDFLPCSFSILEEQPMDMLLGLDMLKRHQCSIDLKKNVLVIGTTGSQTTFLPEGELPECARLAYGAGREDVRPEEIADQELAEALQKSAEDAGIWDGQTLQYLLLMGKPGKCGLQKG

SEQ ID NO: 29949 - protein, 293 aa, Homo sapiens
MRVLVGGGTGFIGTALTQLLNARGHEVTLVSRKPGPGRITWDELAASGLPSCDAAVNLAGENILNPLRRWNETFQKEVIGSRLETTQLLAKAITKAPQPPKAWVLVTGVAYYQPSLTAEYDEDSPGGDFDFFSNLVTKWEAAARLPGDSTRQVVVRSGVVLGRGGGAMGHMLLPFRLGLGGPIGSGHQFFPWIHIGDLAGILTHALEANHVHGVLNGVAPSSATNAEFAQTLGAALGRRAFIPLPSAVVQAVFGRQRAIMLLEGQKVIPQRTLATGYQYSFPELGAALKEIVA

SEQ ID NO: 29950 - protein, 198 aa, Homo sapiens
MALSPNGEILRAREAYYQPSLTAEYDEDSPGGDFDFFSNLVTKWEAAARLPGDSTRQVVVRSGVVLGRGGGAMGHMLLPFRLGLGGPIGSGHQFFPWIHIGDLAGILTHALEANHVHGVLNGVAPSSATNAEFAQTLGAALGRRAFIPLPSAVVQAVFGRQRAIMLLEGQKVIPQRTLATGYQYSFPELGAALKEIVA

SEQ ID NO: 29951 - protein, 998 aa, Homo sapiens
MNRRRKFLLASVLALQNSSFIYPSCQKCFSRIILVSKRSNCPKCGSTGESGNANYRYKLSLKVAESNKLFVITVFGSCLDTFFGLTATGLHRYIQDPNKIPETLDNDTTQNLLTKAVETCFVGQSFIFGVTNFENQPGQGSDASNFLQQCSDHKRKAKALVACQIVLPDPGIAGFTVIDYFHQLLQTFNFRKLQCDSQAPNNHLLALDHSNSDLSSIYTSDSTSDFFKSCSKDTFSKFWQPSLEFTCIVSQLTDNDDFSASEQSKAFGTLQQNRKSISIAEATGSSSCHDPIQDSWSLVSYMDKKSTAEKLGKELGLQAKELSAVHSSHHEIGVNDSNLFSLEMREPLESSNTKSFHSAVEIKNRSQHELPCFQHHGIDTPTSLQKRSACCPPSLLRLEETASSSQDGDPQIWDDLPFSESLNKFLAVLESEIAVTQADVSSRKHHVDNDIDKFHADHSRLSVTPQRTTGALHTPPIALRSSQVIVKANCSKDDFLFNCKGNLSPSVEKESQPDNKVEAVSVNHNGRDMSEYFLPNPYLSALSSSSKDLETIVTLKKTIRISPHRESDHSSLNNKYLNGCGEISVSEMNEKLTTLCYRKYNDVSDLCKLENKQYCRWSKNQDDSFTICRKLTYPLETLCNSPNRSTNTLKEMPWGHINNNVTQSYSIGYEGSYDASADLFDDIAKEMDIATEITKKSQDILLKWGTSLAESHPSESDFSLRSLSEDFIQPSQKLSLQSLSDSRHSRTCSPTPHFQSDSEYNFENSQDFVPCSQSTPISGFHQTRIHGINRAFKKPVFYSDLDGNYEKIRIFPENDKQQASPSCPKNIKTPSQKIRSPIVSGVSQPDVFNHYPFAECHETDSDEWVPPTTQKIFPSDMLGFQGIGLGKCLAAYHFPDQQELPRKKLKHIRQGTNKGLIKKKLKNMLAAVVTKKKTHKYNCKSSGWISKCPDIQVLAAPQLHPILGPDSCSEVKCCLPFSEKGPPSVCETRSAWSPELFS

SEQ ID NO: 29952 - protein, 178 aa, Homo sapiens
MNRRRKFLLASVLALQNSSFIYPSCQKCFSRIILVSKRSNCPKCGSTGESGNANYRYKLSLKVAESNKLFVITVFGSCLDTFFGLTATGLHRYIQDPNKIPETLDNDTTQNLLTKAVETCFVGQSFIFGVTNFENQPGQGSDASNFLQQCSDHKRKAKALVACQIVLPDPATQDAKTK

SEQ ID NO: 29953 - protein, 629 aa, Homo sapiens
MIRAFSFPVSPERGRLRGWLEGSLAGLCELHWLRERQEYRVQQALRLAQPGMGGAEAEDEEDADEDEDAAAARRAAAALEEQLEALPGLVWDLGQQLGDLSLESGGLEQESGRSSGFYEDPSSTGGPDSPPSTFCGDSGFSGSSSYGRLGPSEPRGIYASERPKSLGDASPSAPEVVGARAAVPRSFSAPYPTAGGSAGPEACSSAERRARAGPFLTPSPLHAVAMRSPRPCGRPPTDSPDAGGAGRPLDGYISALLRRRRRRGAGQPRTSPGGADGGPRRQNSVRQRPPDASPSPGSARPAREPSLERVGGHPTSPAALSRAWASSWESEAAPEPAAPPAAPSPPDSPAEGRLVKAQYIPGAQAATRGLPGRAARRKPPPLTRGRSVEQSPPRERPRAAGRRGRMAEASGRRGSPRARKASRSQSETSLLGRASAVPSGPPKYPTAEREEPRPPRPRRGPAPTLAAQAAGSCRRWRSTAEIDAADGRRVRPRAPAARVPGPGPSPSAPQRRLLYGCAGSDSECSAGRLGPLGRRGPAGGVGGGYGESESSASEGESPAFSSASSDSDGSGGLVWPQQLVAATAASGGGAGAGAPAGPAKVFVKIKASHALKKKILRFRSGSLKVMTTV

SEQ ID NO: 29954 - protein, 145 aa, Homo sapiens
MRAAGTLLAFCCLVLSTTGGPSPDTCSQDLNSRVKPGFPKTIKTNDPGVLQAARYSVEKFNNCTNDMFLFKESRITRALVQIVKGLKYMLEVEIGRTTCKKNQHLRLDDCDFQTNHTLKQTLSCYSEVWVVPWLQHFEVPVLRCH

SEQ ID NO: 29955 - protein, 359 aa, Homo sapiens
MSLQRLLQHSSNGNLADFCAGPAYSSYSTLTGSLTMDDNRRIQMLADTVATLPRGRKQLALTRSSSLSDFSWSQRKLVTVEKQDNETFGFEIQSYRPQNQNACSSEMFTLICKIQEDSPAHCAGLQAGDVLANINGVSTEGFTYKQVVDLIRSSGNLLTIETLNGTMILKRTELEAKLQVLKQTLKQKWVEYRSLQLQEHRLLHGDAANCPSLENMDLDELSLFGPLPGPGPALVDRNRLSSESSCKSWLSSMTMDSEDGYQTCVSEDSSRGAFSRQTSTDDECFIPKEGDDFLRRSSSRRNRSISNTSSGSMSPLWEGNLSSMFGTLPRKSRKGSVRKQLLKFIPGLHRAVEEEESRF

SEQ ID NO: 29956 - protein, 253 aa, Homo sapiens
MFTLICKIQEDSPAHCAGLQAGDVLANINGVSTEGFTYKQVVDLIRSSGNLLTIETLNGTMILKRTELEAKLQVLKQTLKQKWVEYRSLQLQEHRLLHGDAANCPSLENMDLDELSLFGPLPGPGPALVDRNRLSSESSCKSWLSSMTMDSEDGYQTCVSEDSSRGAFSRQTSTDDECFIPKEGDDFLRRSSSRRNRSISNTSSGSMSPLWEGNLSSMFGTLPRKSRKGSVRKQLLKFIPGLHRAVEEEESRF

SEQ ID NO: 29957 - protein, 149 aa, Homo sapiens
MARSNLPLALGLALVAFCLLALPRDARARPQERMVGELRDLSPDDPQVQKAAQAAVASYNMGSNSIYYFRDTHIIKAQSQLVAGIKYFLTMEMGSTDCRKTRVTGDHVDLTTCPLAAGAQQEKLRCDFEVLVVPWQNSSQLLKHNCVQM

SEQ ID NO: 29958 - protein, 113 aa, Homo sapiens
MSASVVSVISRFLEEYLSSTPQRLKLLDAYLLYILLTGALQFGYCLLVGTFPFNSFLSGFISCVGSFILAVCLRIQINPQNKADFQGISPERAFADFLFASTILHLVVMNFVG

SEQ ID NO: 29959 - protein, 599 aa, Homo sapiens
MAVSASPVISATSSGAGVPGGLFRAEPLYSTPREPPRLTPNMINSFVVNNHSNSAGGGGRGNTNTNECRMVDMHGMKVASFLMDGQELICLPQVFDLFLKHLVGGLHTVYTKLKRLDISPVVCTVEQVRILRGLGAIQPGVNRCKLITRKDFETLFTDCTNARRKRQMTRKQAVNSSRPGRPPKRSLGVLQENARLLTHAVPGLLSPGLITPTGITAAAMAEAMKLQKMKLMAMNTLQGNGSQNGTESEPDDLNSNTGGSESSWDKDKMQSPFAAPGPQHGIAHAALAGQPGIGGAPTLNPLQQNHLLTNRLDLPFMMMPHPLLPVSLPPASVAMAMNQMNHLNTIANMAAAAQIHSPLSRAGTSVIKERIPESPSPAPSLEENHRPGSQTSSHTSSSVSSSPSQMDHHLERMEEVPVQIPIMKSPLDKIQLTPGQALPAGFPGPFIFADSLSSVETLLTNIQGLLKVALDNARIQEKQIQQEKKELRLELYREREIRENLERQLAVELQSRTTMQKRLKKEKKTKRKLQEALEFESKRREQVEQALKQATTSDSGLRMLKDTGIPDIEIENNGTPHDSAAMQGGNYYCLEMAQQLYSA

SEQ ID NO: 29960 - protein, 571 aa, Homo sapiens
MAVSASPVISATSSGAGVPGGLFRAEPLYSTPREPPRLTPNMINSFVVNNHSNSAGGGGRGNTNTNECRMVDMHGMKVASFLMDGQELICLPQVFDLFLKHLVGGLHTVYTKLKRLDISPVVCTVEQVRILRGLGAIQPGVNRCKLITRKDFETLFTDCTNASSRPGRPPKRSLGVLQENARLLTHAVPGLLSPGLITPTGITAAAMAEAMKLQKMKLMAMNTLQGNGSQNGTESEPDDLNSNTGGSESSWDKDKMQSPFAAPGPQHGIAHAALAGQPGIGGAPTLNPLQQNHLLTNRLDLPFMMMPHPLLPVSLPPASVAMAMNQMNHLNTIANMAAAAQIHSPLSRAGTSVIKERIPESPSPAPSLEENHRPGSQTSSHTSSSVSSSPSQMDHHLERMEEVPVQIPIMKSPLDKIQLTPGQALPAGFPGPFIFADSLSSVETLLTNIQGLLKVALDNARIQEKQIQQEKKELRLELYREREIRENLERQLAVELQSRTTMQKRLKKEKKTKRKLQEALEFESKRREQVEQALKQATTSDSGLRMLKDTGIPDIEIENNGTPHDSAAMQA

SEQ ID NO: 29961 - protein, 380 aa, Homo sapiens
MAEAMKLQKMKLMAMNTLQGNGSQNGTESEPDDLNSNTGGSESSWDKDKMQSPFAAPGPQHGIAHAALAGQPGIGGAPTLNPLQQNHLLTNRLDLPFMMMPHPLLPVSLPPASVAMAMNQMNHLNTIANMAAAAQIHSPLSRAGTSVIKERIPESPSPAPSLEENHRPGSQTSSHTSSSVSSSPSQMDHHLERMEEVPVQIPIMKSPLDKIQLTPGQALPAGFPGPFIFADSLSSVETLLTNIQGLLKVALDNARIQEKQIQQEKKELRLELYREREIRENLERQLAVELQSRTTMQKRLKKEKKTKRKLQEALEFESKRREQVEQALKQATTSDSGLRMLKDTGIPDIEIENNGTPHDSAAMQGGNYYCLEMAQQLYSA

SEQ ID NO: 29962 - protein, 432 aa, Homo sapiens
MTRKQAVNSSRPGRPPKRSLGVLQENARLLTHAVPGLLSPGLITPTGITAAAMAEAMKLQKMKLMAMNTLQGNGSQNGTESEPDDLNSNTGGSESSWDKDKMQSPFAAPGPQHGIAHAALAGQPGIGGAPTLNPLQQNHLLTNRLDLPFMMMPHPLLPVSLPPASVAMAMNQMNHLNTIANMAAAAQIHSPLSRAGTSVIKERIPESPSPAPSLEENHRPGSQTSSHTSSSVSSSPSQMDHHLERMEEVPVQIPIMKSPLDKIQLTPGQALPAGFPGPFIFADSLSSVETLLTNIQGLLKVALDNARIQEKQIQQEKKELRLELYREREIRENLERQLAVELQSRTTMQKRLKKEKKTKRKLQEALEFESKRREQVEQALKQATTSDSGLRMLKDTGIPDIEIENNGTPHDSAAMQGGNYYCLEMAQQLYSA

SEQ ID NO: 29963 - protein, 224 aa, Homo sapiens
MGIMAASRPLSRFWEWGKNIVCVGRNYADHVREMRSAVLSEPVLFLKPSTAYAPEGSPILMPAYTRNLHHELELGVVMGKRCRAVPEAAAMDYVGGYALCLDMTARDVQDECKKKGLPWTLAKSFTASCPVSAFVPKEKIPDPHKLKLWLKVNGELRQEGETSSMIFSIPYIISYVSKIITLEEGDIILTGTPKGVGPVKENDEIEAGIHGLVSMTFKVEKPEY

SEQ ID NO: 29964 - protein, 226 aa, Homo sapiens
MGIMAASRPLSRFWEWGKNIVCVGRNYADHVREMRSAVLSEPVLFLKPSTAYAPEGSPILMPAYTRNLHHELELGVVMGKRCRAVPEAAAMDYVGGYALCLDMTARDVQDECKKKGLPWTLAKSFTASCPVSAFVPKEKIPDPHKLKLWLKVNGELRQEGETSSMIFSIPYIISYVSKIITLEEGDIILTGTPKGVGPVKENDEIEAGIHGLPKVSSATLPVRLQE

SEQ ID NO: 29965 - protein, 248 aa, Homo sapiens
MGIMAASRPLSRFWEWGKNIVCVGRNYADHVREMRSAVLSEPVLFLKPSTAYAPEGSPILMPAYTRNLHHELELGVVMGKRCRAVPEAAAMDYVGGYALCLDMTARDVQDECKKKGLPWTLAKSFTASCPVSAFVPKEKIPDPHKLKLWLKVNGELRQEGETSSMIFSIPYIISYVSKIITLEEGDIILTGTPKGVGPVKENDEIEAGIHGLRQGLTLSPKLECSSAITAHCSLELPGSSNPPSASRF

SEQ ID NO: 29966 - protein, 1068 aa, Homo sapiens
MRSAAKPWNPAIRAGGHGPDRVRPLPAASSGMKSSKSSTSLAFESRLSRLKRASSEDTLNKPGSTAASGVVRLKKTATAGAISELTESRLRSGTGAFTTTKRTGIPAPREFSVTVSRERSVPRGPSNPRKSVSSPTSSNTPTPTKHLRTPSTKPKQENEGGEKAALESQVRELLAEAKAKDSEINRLRSELKKYKEKRTLNAEGTDALGPNVDGTSVSPGDTEPMIRALEEKNKNFQKELSDLEEENRVLKEKLIYLEHSPNSEGAASHTGDSSCPTSITQESSFGSPTGNQMSSDIDEYKKNIHGNALRTSGSSSSDVTKASLSPDASDFEHITAETPSRPLSSTSNPFKSSKCSTAGSSPNSVSELSLASLTEKIQKMEENHHSTAEELQATLQELSDQQQMVQELTAENEKLVDEKTILETSFHQHRERAEQLSQENEKLMNLLQERVKNEEPTTQEGKIIELEQKCTGILEQGRFEREKLLNIQQQLTCSLRKVEEENQGALEMIKRLKEENEKLNEFLELERHNNNMMAKTLEECRVTLEGLKMENGSLKSHLQGEKQKATEASAVEQTAESCEVQEMLKVARAEKDLLELSCNELRQELLKANGEIKHVSSLLAKVEKDYSYLKEICDHQAEQLSRTSLKLQEKASESDAEIKDMKETIFELEDQVEQHRAVKLHNNQLISELESSVIKLEEQKSDLERQLKTLTKQMKEETEEWRRFQADLQTAVVVANDIKCEAQQELRTVKRKLLEEEEKNARLQKELGDVQGHGRVVTSRAAPPPVDEEPESSEVDAAGRWPGVCVSRTSPTPPESATTVKSLIKSFDLGRPGGAGQNISVHKTPRSPLSGIPVRTAPAAAVSPMQRHSTYSSVRPASRGVTQRLDLPDLPLSDILKGRTETLKPDPHLRKSPSLESLSRPPSLGFGDTRLLSASTRAWKPQSKLSVERKDPLAALAREYGGSKRNALLKWCQKKTQGYANIDITNFSSSWSDGLAFCALLHTYLPAHIPYQELNSQEKKRNLLLAFEAAESVGIKPSLELSEMLYTDRPDWQSVMQYVAQIYKYFET

SEQ ID NO: 29967 - protein, 790 aa, Homo sapiens
MRSAAKPWNPAIRAGGHGPDRVRPLPAASSGMKSSKSSTSLAFESRLSRLKRASSEDTLNKPGSTAASGVVRLKKTATAGAISELTESRLRSGTGAFTTTKRTGIPAPREFSVTVSRERSVPRGPSNPRKSVSSPTSSNTPTPTKHLRTPSTKPKQENEGGEKAALESQVRELLAEAKAKDSEINRLRSELKKYKEKRTLNAEGTDALGPNVDGTSVSPGDTEPMIRALEEKNKNFQKELSDLEEENRVLKEKLIYLEHSPNSEGAASHTGDSSCPTSITQESSFGSPTGNQMSSDIDEYKKNIHGNALRTSGSSSSDVTKASLSPDASDFEHITAETPSRPLSSTSNPFKSSKCSTAGSSPNSVSELSLASLTEKIQKMEENHHSTAEELQATLQELSDQQQMVQELTAENEKLVDEKTILETSFHQHRERAEQLSQENEKLMNLLQERVKNEEPTTQEGKIIELEQKCTGILEQGRFEREKLLNIQQQLTCSLRKVEEENQGALEMIKRLKEENEKLNEFLELERHNNNMMAKTLEECRVTLEGLKMENGSLKSHLQGEKQKATEASAVEQTAESCEVQEMLKVARAEKDLLELSCNELRQELLKANGEIKHVSSLLAKVEKDYSYLKEICDHQAEQLSRTSLKLQEKASESDAEIKDMKETIFELEDQVEQHRAVKLHNNQLISELESSVIKLEEQKSDLERQLKTLTKQMKEETEEWRRFQADLQTAVVVANDIKCEAQQELRTVKRKLLEEEEKNARLQKELGDVQGHGRVVTSRAAPPSLGSVS

SEQ ID NO: 29968 - protein, 709 aa, Homo sapiens
MGNHSGRPEDPEPGAFTTTKRTGIPAPREFSVTVSRERSVPRGPSNPRKSVSSPTSSNTPTPTKHLRTPSTKPKQENEGGEKAALESQVRELLAEAKAKDSEINRLRSELKKYKEKRTLNAEGTDALGPNVDGTSVSPGDTEPMIRALEEKNKNFQKELSDLEEENRVLKEKLIYLEHSPNSEGAASHTGDSSCPTSITQESSFGSPTGNQMSSDIDEYKKNIHGNALRTSGSSSSDVTKASLSPDASDFEHITAETPSRPLSSTSNPFKSSKCSTAGSSPNSVSELSLASLTEKIQKMEENHHSTAEELQATLQELSDQQQMVQELTAENEKLVDEKTILETSFHQHRERAEQLSQENEKLMNLLQERVKNEEPTTQEGKIIELEQKCTGILEQGRFEREKLLNIQQQLTCSLRKVEEENQGALEMIKRLKEENEKLNEFLELERHNNNMMAKTLEECRVTLEGLKMENGSLKSHLQGEKQKATEASAVEQTAESCEVQEMLKVARAEKDLLELSCNELRQELLKANGEIKHVSSLLAKVEKDYSYLKEICDHQAEQLSRTSLKLQEKASESDAEIKDMKETIFELEDQVEQHRAVKLHNNQLISELESSVIKLEEQKSDLERQLKTLTKQMKEETEEWRRFQADLQTAVVVANDIKCEAQQELRTVKRKLLEEEEKNARLQKELGDVQGHGRVVTSRAAPPSLGSVS

SEQ ID NO: 29969 - protein, 987 aa, Homo sapiens
MGNHSGRPEDPEPGAFTTTKRTGIPAPREFSVTVSRERSVPRGPSNPRKSVSSPTSSNTPTPTKHLRTPSTKPKQENEGGEKAALESQVRELLAEAKAKDSEINRLRSELKKYKEKRTLNAEGTDALGPNVDGTSVSPGDTEPMIRALEEKNKNFQKELSDLEEENRVLKEKLIYLEHSPNSEGAASHTGDSSCPTSITQESSFGSPTGNQMSSDIDEYKKNIHGNALRTSGSSSSDVTKASLSPDASDFEHITAETPSRPLSSTSNPFKSSKCSTAGSSPNSVSELSLASLTEKIQKMEENHHSTAEELQATLQELSDQQQMVQELTAENEKLVDEKTILETSFHQHRERAEQLSQENEKLMNLLQERVKNEEPTTQEGKIIELEQKCTGILEQGRFEREKLLNIQQQLTCSLRKVEEENQGALEMIKRLKEENEKLNEFLELERHNNNMMAKTLEECRVTLEGLKMENGSLKSHLQGEKQKATEASAVEQTAESCEVQEMLKVARAEKDLLELSCNELRQELLKANGEIKHVSSLLAKVEKDYSYLKEICDHQAEQLSRTSLKLQEKASESDAEIKDMKETIFELEDQVEQHRAVKLHNNQLISELESSVIKLEEQKSDLERQLKTLTKQMKEETEEWRRFQADLQTAVVVANDIKCEAQQELRTVKRKLLEEEEKNARLQKELGDVQGHGRVVTSRAAPPPVDEEPESSEVDAAGRWPGVCVSRTSPTPPESATTVKSLIKSFDLGRPGGAGQNISVHKTPRSPLSGIPVRTAPAAAVSPMQRHSTYSSVRPASRGVTQRLDLPDLPLSDILKGRTETLKPDPHLRKSPSLESLSRPPSLGFGDTRLLSASTRAWKPQSKLSVERKDPLAALAREYGGSKRNALLKWCQKKTQGYANIDITNFSSSWSDGLAFCALLHTYLPAHIPYQELNSQEKKRNLLLAFEAAESVGIKPSLELSEMLYTDRPDWQSVMQYVAQIYKYFET

SEQ ID NO: 29970 - protein, 703 aa, Homo sapiens
MGNHSGRPEDPEPGAFTTTKRTGIPAPREFSVTVSRERSVPRGPSNPRKSVSSPTSSNTPTPTKHLRTPSTKPKQENEGGEKAALESQVRELLAEAKAKDSEINRLRSELKKYKEKRTLNAEGTDALGPNVDGTSVSPGDTEPMIRALEEKNKNFQKELSDLEEENRVLKEKLIYLEHSPNSEGAASHTGDSSCPTSITQESSFGSPTGNQMSSDIDEYKKNIHGNALRTSGSSSSDVTKASLSPDASDFEHITAETPSRPLSSTSNPFKSSKCSTAGSSPNSVSELSLASLTEKIQKMEENHHSTAEELQATLQELSDQQQMVQELTAENEKLVDEKTILETSFHQHRERAEQLSQENEKLMNLLQERVKNEEPTTQEGKIIELEQKCTGILEQGRFEREKLLNIQQQLTCSLRKVEEENQGALEMIKRLKEENEKLNEFLELERHNNNMMAKTLEECRVTLEGLKMENGSLKSHLQGEKQKATEASAVEQTAESCEVQEMLKVARAEKDLLELSCNELRQELLKANGEIKHVSSLLAKVEKDYSYLKEICDHQAEQLSRTSLKLQEKASESDAEIKDMKETIFELEDQVEQHRAVKLHNNQLISELESSVIKLEEQKSDLERQLKTLTKQMKEETEEWRRFQADLQTAVVVANDIKCEAQQELRTVKRKLLEEEEKNARLQKELGDVQGHGRVVTSRAAPP

SEQ ID NO: 29971 - protein, 325 aa, Homo sapiens
MARPVSDRTPAPLLLGGPAGTPPGGGALLGLRSLLQGTSKPKEPASCLLKEKERKAALPAATTPGPGLETAGPADAPAGAVVGGGSPRGRPGPVPAPGLLAPLLWERTLPFGDVEYVDLDAFLLEHGLPPSPPPPGGPSPEPSPARTPAPSPGPGSCGSASPRSSPGHAPARAALGTASGHRAGLTSRDTPSPVDPDTVEVLMTFEPDPADLALSSIPGHETFDPRRHRFSEEELKPQPIMKKARKIQVPEEQKDEKYWSRRYKNNEAAKRSRDARRLKENQISVRAAFLEKENALLRQEVVAVRQELSHYRAVLSRYQAQHGAL

SEQ ID NO: 29972 - protein, 4753 aa, Homo sapiens
MVPEERRVGLSSDETSSDSLKSWHSICVLDSKEQPLACQQKQRQFVKPVTESEQPTVLELLLAELRTLFSAVLQDSSPAAWRYLHAVLGLLPPYRELLVGHLDLLPFLEQLYCWAPWVQTHLHLDLLGAIVQAFPPDSSLLDSASHADCCPQKRRLHHRPPCPACPFVQAQWSRQQVKEELATWLRPLTLPELQRCLGIVGAQVALEEAVWLDGLSLLPLALAADIPVRYESSDTDNAEVEPVGRKETRSQLDYEVPREKAFQKSSTGFSPETSFLDSQVMTALKMERYLKKIHFLYLNVAPSRYFRPYSLMVVPPDKVNPEHYIFSPFGILHVHPVEGSETMTLGTWHHHCVLWQQLQFIPFFKYCLLRKSFTCWKKNVRLQGLHRLQKFLENHLLLAVPHFGAGLLHISRLLQELHSVSWLPQELDRCYELLDLQTALAEEKHKALRLLHRCLNLCTSILRLVHEDTYHMQQCLQERVQNCDRIRTGQGSIYLQRVQHKQLEQKLKQAEAWWLQLGKFARLVDYMICQSLISVLEEQITSFVANILQAPRQKPFLSSQLVFDDHGQLSHVPCVENMIQTLTGGLQSVKTSALQVVQSADLKTSSDSLYSEEEDEEEDSKDEFLMPKFQGQPSDAVSIFCGPNVGLVWPWKSHPIAGILEVRGCRLRGQYFPHNYKQLEEDLDNNPKIQQALNIQQVLLEGVLCKVQEFCREHHWITGIYEFLQSWGPQKLEDMRGGPIKNYVTLVSRLNVWQARVSSMPIELLTKGGLLLLSCHDVQAEMESKLNSIRKDILAHVQNECWNLSQQLMTELTDFMHIFRTINSDIHAIAQCTQKLNEANEQYVELEERMEYVRALHELIRNHFSLFSAENEALDISVRRQFGESPIPPCPPPPQPHLLHCPLLAPQLLDMWEAFQFEKSQASEFLLSKRHAIMPKLQQLMAAALAELEGLLAKALSGPFMDPTQDQRSTEHQLVSLERQFQNTVSDLSELHHAYAIFTEDETPVPLPICGTRPIVQQQRIWHLYRVISENISEWKCMAFAKFSPAMAQEKTEGWLTEAARMSTTLELHSPVLQHCMRILGEFRSYLPLLTKLGSLHPQSLNCQCLLRALGLGSLQTIELLTLGQLLTYPLLEFADRINQVWQNENERIHAQETIRRLQRYWEARQLRLLNFILHVPYEPPASERSKRQVLRSPQWEVVDKDSGTFILSDYSNLQDSIQESLQVLSKILAIEKSGDLNKIALEWVAIMHGLGALLEVWLTFQQKWIFLNKVLHEMKIQFPNADLNSRFKVMDDQYRTLMRISVADPMVLSLVVPSAERSPYFQGQQLQQLLQAGSVELEGIIMSLESVLYGVCAHFPRLFFLSDSELVALLAARLESCEAQLWVRRCFPHVHAVSFRSCPTGEKNTDDWESSPNTQTQVEALAVLGAGGEEVKLQGPLPLHPDLPKWLASLEKCLRLALVHMLQGCVAARLARGPSLGEALKQLPKQNKLYLQLYVQHWIDLVQAFPWQCVLVAEEVVWRAEMEEALLEWGTLAMVSMHMRKLEVLVNFMRAQRASQGGQSLPSVRQTSLLSALLVMAVTHRDIAQLLEQHQVSDLTDFHWVRQLKYHLGSPHIIPKSPLQSLKTIASSEPSLSPAACWIDVLGRSFLYNYEYLGPRLGPLPSLLPERPALVLLLALEEVACGTVLGPNGVGKRAIVNSLAQALGRQLVMLPCSPQIEAQCLSNYLNGALQGGAWLLLEKVHQLPPGLLSALGQRLGELHHLYAPLYQEASRNTSTIDPTQPQLLGSSFFEKHHVSVRLGYGCLLVLRALSSAVPANLHLLLRPVALALPDLRQVAELTLLGAGMRDAFQMATRLSKFFSLERELVSGPLPCRLPLLKQILEDTIRTLNVTKEEPKCQKPRSLAAIEEAALLRSPLFSILNGLHLHNLRGLLCALFPSASQVLAEPMTYKLMKPLVVEELQQVGLDPSPDILGSLEQLSQALSRASGILLLGPAGSGKTTCWHSLFKIQNRLAAMEDTSTQGCQPVEITHLYPSGLSPQEFLGWLEGSCWHHGIFPKVLRAAGQCNNMGQKRQTEESIGIQHWIICDGASNGAWLDSITCLLSELPQLSLPSGQQIARPPGTFLLMEVADTTGISPTVVGCCALVWCGGEQTWQCILSALMASLPYEYRLQHRTVAELNHMAEVLVPATLRFLTCQGVSSLLQVHGQQAVCAGVAEVTSMARILHSLLDLHLRLKEEKAPGPEDLSYSDPVAQSFRSSKSSFLNRSQVDSDDVPDKCREHLLAVSSFLFALIWGFGAHLPSRFWPIFDTFIRDSISRLSNYPEPPPSALVFDLHVSPEDGTLVPFTGQYLSSHIKGTLGTFHPSIQTERLLYVVDLLLSGGQPVLLAGEAATGKSAFVEVLVEPHHPYIYSPIHPAFSSSHLRLLLSRGIQGQTQASPQPGHHQDSKPSLLFLLEDLHLATSDPEKSCQPVLETLRQAMDGTVYAHSTLELQTLQPTVNFLATVTVPGYCERPLCPRLFRLFTVLALESMTQATLLERHVPIIQAWLERFPSVERERALARGLVRASVEAWEAVCNCFMPSPLHPHYHFSLHSVSHLLSSLQLLPNRTGSRGFVDYPNHQEHLRRVSGLRGTCLTVMMATRNVVRLWLHEAQRTFCDRLDSPRERSYCAKLLLVVAQSVFCCGPGPQHLGKDHQESEEEEEEERVPEVESEGELAQWEDFSNSNSETEEEEEPYGLQVARVSNSRDPSLTPSIGPVSRGMKESISHKIRQEKGTRASNYRLQVRRSFKTWWQKKPQMDLISPLLLPVLLLHPQEKPSDLVFSQELILGPNSETPNLYLERQWEKLEEQLATSAAQLKLSPHLARCHSMAQHVARLVRVLARPRQHGLLLSGALGTGRHTAITLASSICQAHFFHLPSGSEEAILQCLRDASWHAGMLSQPVALLVPSGVDLTTLHRLLALATSGSFPGQYTEADLDRIGEHLPRENLGVKQNIKKEMVLQRFHQQVCSHLHLFFLIGDKQAHKQLPSTLFLRLLQLATASIDRYEPWDQAALAKVAQHHLEGAQSVPLDDGSWKYPDLQASIPSVAKAMALIHLSATHYHEHLCPALPLVTPKTFLDFLDTFLMLQQQTILKIKNKAQRVQNALENLRMLIKEHGTHANLIFDLEQQLKDSGKSLSMFQQQLEQSKLLYKQQLEECRHQENLIENLARQRDALQAQREAFLEQMSKAFLEPLSQLQVADFEEIRSYRAPPESVVRVTDAMCDLFHHETGWASAKQLLCTEDFYQELVFFPKEKITDSELIKLHLILKAPGMDDAALRAVSRPAASLAAWLWAVLHYGLAHCRGLPTDLLLQQVEATLTREQARLGYYQFQAQETLEHNLALAKMVEDAQASHNCVAKTLSQAQCGQYHKWPMKAALLTPMRAWTTQLQKLKGRCMTVFGDTLLCSAAIIYLGPFPPLRRQELLDEWLALCRGFQEALGPDDVAQALKRKQKSVSIPPKNPLLATHSPFSILSLLSSESEQYQWDGNLKPQAKSAHLAGLLLRSPTHYSSCRWPLLLDPSNEALIWLDPLPLEENRSFAPALTEGRGKGLMRNQKRESKTDMKEEDDESEESNEAEDQTKEQKAEERKNEQEKEQEENEEKEEEKTESQGSKPAYETQLPSLPYLSVLSGADPELGSQLQEAAACGLPVLLTNVELGLGCEELQWLLQREQLSPPQVQPGFCLYLSTTLSLCAMEKVLGCELLKGLNVLDLGLNMEILEEQMLHEILCREYPELETRWQDLKIRALDTCKAVEAAEERLLTMLLFQNPKRQKPAKFLRNIVRAQGKLCQLRAHCEELEGQKLQEMVLWAPYRPVVWHGMAMVKALSQLQNLLPLFCMSPENWLAVTKQALDSMKPREINHGEDLASHLLQLRAHLTRQLLGSTVTALGLTQVPLVGALGALALLQATGKASELERLALWPGLAASPSTVHSKPVSDVARPAWLGPKAWHECEMLELLPPFVGLCASLAGHSSAWQAYLSLSSTVLGPAPGPGPEPLSLLQKLILWRVLRPECLAGALADFTTSLLGRPLDENTYAPTMPFKHSQATQPMLILLPPPGHPSATLHPLTVIQKLAAKYQQGQKQLQVIALGSEAWDPVSVVVSTLSQAMYEGHWLVLDNCHLMPHWPKELLQLLLELLGRAKVVADLESEQLLDQPESRNVSTVHRDFRLWLIVPAESSASLPAVLTQHSMPVFWNQSLELGHVLIDSVELAQQVLYMQPPTQALPLLLLHGLLLHRQLYGTRLQAHRGRWSQVTLTQVLQTQDQLWASLSNPRAAMQELAASVFYGGPLGDTEDREALISLTQACLSPSSGSWVQPHTPQSLLATLMPLPELRELDAMAECKAQMHLLPSPPEPRLCGLSEGPQAWLLRRQSRALLSALQRSSPVWVPESRRGAQLAERRLRQRLVQVNRRLESLQDLLTHVIRQDESDAPWSVLGPNARRPLEGVLETEALELSQLVGTLQRDLDCLLQQLKGAPPCPSRRCAAVAHALWTGRLPLPWRPHAPAGPQPPWHWLRQLSRRGQLLVRYLGVGADASSDVPERVFHLSAFRHPRRLLLALRGEAALDQNVPSSNFPGSRGSVSSQLQYKRLEMNSNPLHFRVENGPNPTVPERGLLLIGLQVLHAEWDPIAGALQDSPSSQPSPLPPVSISTQAPGTSDLPAPADLTVYSCPVYMGGPLGTAKLQSRNIVMHLPLPTKLTPNTCVQRRVHVCSPPLS

SEQ ID NO: 29973 - protein, 597 aa, Homo sapiens
MVPEERRVGLSSDETSSDSLKSWHSICVLDSKEQPLACQQKQRQFVKPVTESEQPTVLELLLAELRTLFSAVLQDSSPAAWRYLHAVLGLLPPYRELLVGHLDLLPFLEQLYCWAPWVQTHLHLDLLGAIVQAFPPDSSLLDSASHADCCPQKRRLHHRPPCPACPFVQAQWSRQQVKEELATWLRPLTLPELQRCLGIVGAQVALEEAVWLDGLSLLPLALAADIPVRYESSDTDNAEVEPVGRKETRSQLDYEVPREKAFQKSSTGFSPETSFLDSQVMTALKMERYLKKIHFLYLNVAPSRYFRPYSLMVVPPDKVNPEHYIFSPFGILHVHPVEGSETMTLGTWHHHCVLWQQLQFIPFFKYCLLRKSFTCWKKNVRLQGLHRLQKFLENHLLLAVPHFGAGLLHISRLLQELHSVSWLPQELDRCYELLDLQTALAEEKHKALRLLHRCLNLCTSILRLVHEDTYHMQQCLQERVQNCDRIRTGQGSIYLQRVQHKQLEQKLKQAEAWWLQLGKFARLVDYMICQSLISVLEEQITSFVANILQAPRQKPFLSSQLVFDDHGQLSHVPCVENMIQTLTGGLQSVKTSALQVF

SEQ ID NO: 29974 - protein, 286 aa, Homo sapiens
MVVPPDKVNPEHYIFSPFGILHVHPVEGSETMTLGTWHHHCVLWQQLQFIPFFKYCLLRKSFTCWKKNVRLQGLHRLQKFLENHLLLAVPHFGAGLLHISRLLQELHSVSWLPQELDRCYELLDLQTALAEEKHKALRLLHRCLNLCTSILRLVHEDTYHMQQCLQERVQNCDRIRTGQGSIYLQRVQHKQLEQKLKQAEAWWLQLGKFARLVDYMICQSLISVLEEQITSFVANILQAPRQKPFLSSQLVFDDHGQLSHVPCVENMIQTLTGGLQSVKTSALQVF

SEQ ID NO: 29975 - protein, 381 aa, Homo sapiens
MTVARPSVPAALPLLGELPRLLLLVLLCLPAVWGDCGLPPDVPNAQPALEGRTSFPEDTVITYKCEESFVKIPGEKDSVICLKGSQWSDIEEFCNRSCEVPTRLNSASLKQPYITQNYFPVGTVVEYECRPGYRREPSLSPKLTCLQNLKWSTAVEFCKKKSCPNPGEIRNGQIDVPGGILFGATISFSCNTGYKLFGSTSSFCLISGSSVQWSDPLPECREIYCPAPPQIDNGIIQGERDHYGYRQSVTYACNKGFTMIGEHSIYCTVNNDEGEWSGPPPECRGKSLTSKVPPTVQKPTTVNVPTTEVSPTSQKTTTKTTTPNAQATRSTPVSRTTKHFHETTPNKGSGTTSGTTRLLSGHTCFTLTGLLGTLVTMGLLT

SEQ ID NO: 29976 - protein, 440 aa, Homo sapiens
MTVARPSVPAALPLLGELPRLLLLVLLCLPAVWGDCGLPPDVPNAQPALEGRTSFPEDTVITYKCEESFVKIPGEKDSVICLKGSQWSDIEEFCNRSCEVPTRLNSASLKQPYITQNYFPVGTVVEYECRPGYRREPSLSPKLTCLQNLKWSTAVEFCKKKSCPNPGEIRNGQIDVPGGILFGATISFSCNTGYKLFGSTSSFCLISGSSVQWSDPLPECREIYCPAPPQIDNGIIQGERDHYGYRQSVTYACNKGFTMIGEHSIYCTVNNDEGEWSGPPPECRGKSLTSKVPPTVQKPTTVNVPTTEVSPTSQKTTTKTTTPNAQATRSTPVSRTTKHFHETTPNKGSGTTSGTTRLLSGSRPVTQAGMRWCDRSSLQSRTPGFKRSFHFSLPSSWYYRAHVFHVDRFAWDASNHGLADLAKEELRRKYTQVYRLFLVS

SEQ ID NO: 29977 - protein, 384 aa, Homo sapiens
MTVARPSVPAALPLLGELPRLLLLVLLCLPAVWGDCGLPPDVPNAQPALEGRTSFPEDTVITYKCEESFVKIPGEKDSVICLKGSQWSDIEEFCNRSCEVPTRLNSASLKQPYITQNYFPVGTVVEYECRPGYRREPSLSPKLTCLQNLKWSTAVEFCKKKSCPNPGEIRNGQIDVPGGILFGATISFSCNTGYKLFGSTSSFCLISGSSVQWSDPLPECREIYCPAPPQIDNGIIQGERDHYGYRQSVTYACNKGFTMIGEHSIYCTVNNDEGEWSGPPPECRGKSLTSKVPPTVQKPTTVNVPTTEVSPTSQKTTTKTTTPNAQATRSTPVSRTTKHFHETTPNKGSGTTSGTTRLLSALQVRPFEVSGSSHISSKKMMCIL

SEQ ID NO: 29978 - protein, 364 aa, Homo sapiens
MTVARPSVPAALPLLGELPRLLLLVLLCLPAVWGDCGLPPDVPNAQPALEGRTSFPEDTVITYKCEESFVKIPGEKDSVICLKGSQWSDIEEFCNRSCEVPTRLNSASLKQPYITQNYFPVGTVVEYECRPGYRREPSLSPKLTCLQNLKWSTAVEFCKKKSCPNPGEIRNGQIDVPGGILFGATISFSCNTGYKLFGSTSSFCLISGSSVQWSDPLPECREIYCPAPPQIDNGIIQGERDHYGYRQSVTYACNKGFTMIGEHSIYCTVNNDEGEWSGPPPECRGKSLTSKVPPTVQKPTTVNVPTTEVSPTSQKTTTKTTTPNAQATRSTPVSRTTKHFHETTPNKGSGTTSGTTRLLSVLFM

SEQ ID NO: 29979 - protein, 439 aa, Homo sapiens
MTVARPSVPAALPLLGELPRLLLLVLLCLPAVWGDCGLPPDVPNAQPALEGRTSFPEDTVITYKCEESFVKIPGEKDSVICLKGSQWSDIEEFCNRSCEVPTRLNSASLKQPYITQNYFPVGTVVEYECRPGYRREPSLSPKLTCLQNLKWSTAVEFCKKKSCPNPGEIRNGQIDVPGGILFGATISFSCNTGYKLFGSTSSFCLISGSSVQWSDPLPECREIYCPAPPQIDNGIIQGERDHYGYRQSVTYACNKGFTMIGEHSIYCTVNNDEGEWSGPPPECRGKSLTSKVPPTVQKPTTVNVPTTEVSPTSQKTTTKTTTPNAQATRSTPVSRTTKHFHETTPNKGSGTTSGTTRLLSETVFHRVIQDGLDLLASRSACLGLPKCWDYRREPPHLARAHVFHVDRFAWDASNHGLADLAKEELRRKYTQVYRLFLVS

SEQ ID NO: 29980 - protein, 525 aa, Homo sapiens
MTVARPSVPAALPLLGELPRLLLLVLLCLPAVWGDCGLPPDVPNAQPALEGRTSFPEDTVITYKCEESFVKIPGEKDSVICLKGSQWSDIEEFCNRSCEVPTRLNSASLKQPYITQNYFPVGTVVEYECRPGYRREPSLSPKLTCLQNLKWSTAVEFCKKKSCPNPGEIRNGQIDVPGGILFGATISFSCNTGYKLFGSTSSFCLISGSSVQWSDPLPECREIYCPAPPQIDNGIIQGERDHYGYRQSVTYACNKGFTMIGEHSIYCTVNNDEGEWSGPPPECRGKSLTSKVPPTVQKPTTVNVPTTEVSPTSQKTTTKTTTPNAQGTETPSVLQKHTTENVSATRTPPTPQKPTTVNVPATIVTPTPQKPTTINVPATGVSSTPQRHTIVNVSATGTLPTLQKPTRANDSATKSPAAAQTSFISKTLSTKTPSAAQNPMMTNASATQATLTAQKFTTAKVAFTQSPSAAPTRSTPVSRTTKHFHETTPNKGSGTTSGTTRLLSGHTCFTLTGLLGTLVTMGLLT

SEQ ID NO: 29981 - protein, 551 aa, Homo sapiens
MTVARPSVPAALPLLGELPRLLLLVLLCLPAVWGDCGLPPDVPNAQPALEGRTSFPEDTVITYKCEESFVKIPGEKDSVICLKGSQWSDIEEFCNRSCEVPTRLNSASLKQPYITQNYFPVGTVVEYECRPGYRREPSLSPKLTCLQNLKWSTAVEFCKKKSCPNPGEIRNGQIDVPGGILFGATISFSCNTGYKLFGSTSSFCLISGSSVQWSDPLPECREIYCPAPPQIDNGIIQGERDHYGYRQSVTYACNKGFTMIGEHSIYCTVNNDEGEWSGPPPECRGKSLTSKVPPTVQKPTTVNVPTTEVSPTSQKTTTKTTTPNAQGTETPSVLQKHTTENVSATRTPPTPQKPTTVNVPATIVTPTPQKPTTINVPATGVSSTPQRHTIVNVSATGTLPTLQKPTRANDSATKSPAAAQTSFISKTLSTKTPSAAQNPMMTNASATQATLTAQKFTTAKVAFTQSPSAARKSTNVHSPVTNGLKSTQRFPSAHITATRSTPVSRTTKHFHETTPNKGSGTTSGTTRLLSGHTCFTLTGLLGTLVTMGLLT

SEQ ID NO: 29982 - protein, 351 aa, Homo sapiens
MPSETLWEIAKAEVEKRGINGSEGDGAEIAEKFVFFIGSKNGGKTTIILRCLDRDEPPKPTLALEYTYGRRAKGHNTPKDIAHFWELGGGTSLLDLISIPITGDTLRTFSLVLVLDLSKPNDLWPTMENLLQATKSHVDKVIMKLGKTNAKAVSEMRQKIWNNMPKDHPDHELIDPFPVPLVIIGSKYDVFQDFESEKRKVICKTLRFVAHYYGASLMFTSKSEALLLKIRGVINQLAFGIDKSKSICVDQNKPLFITAGLDSFGQIGSPPVPENDIGKLHAHSPMELWKKVYEKLFPPKSINTLKDIKDPARDPQYAENEVDEMRIQKDLELEQYKRSSSKSWKQIELDS

SEQ ID NO: 29983 - protein, 352 aa, Homo sapiens
MPSETLWEIAKAEVEKRGINGSEGDGAEIAEKFVFFIGSKNGGKTTIILRCLDRDEPPKPTLALEYTYGRRAKGHNTPKDIAHFWELGGGTSLLDLISIPITGDTLRTFSLVLVLDLSKPNDLWPTMENLLQATKSHVDKVIMKLGKTNAKAVSEMRQKIWNNMPKDHPQDHELIDPFPVPLVIIGSKYDVFQDFESEKRKVICKTLRFVAHYYGASLMFTSKSEALLLKIRGVINQLAFGIDKSKSICVDQNKPLFITAGLDSFGQIGSPPVPENDIGKLHAHSPMELWKKVYEKLFPPKSINTLKDIKDPARDPQYAENEVDEMRIQKDLELEQYKRSSSKSWKQIELDS

SEQ ID NO: 29984 - protein, 334 aa, Homo sapiens
MPSETLWEIAKAEVEKRGINGSEGDGAEIAEKFVFFIGSKNGGKTTIILRCLDRDEPPKPTLALEYTYGRRAKGHNTPKDIAHFWELGGGTSLLDLISIPITGDTLRTFSLVLVLDLSKPNDLWPTMENLLQATKSHVDKVIMKLGKTNAKAVSEMRQKIWNNMPKDHPDHELIDPFPVPLVIIGSKYDVFQDFESEKRKVICKTLRFVAHYYGASLMFTSKSEALLLKIRGVINQLAFGIDKSKSICVDQNKPLFITAGLDSFGQIGSPPVPENDIGKLHAHSPMELWKKVYEKLFPPKSINTLKDIKDPARDPQYAENEVDEMRIQKDLVLS

SEQ ID NO: 29985 - protein, 201 aa, Homo sapiens
MPSETLWEIAKAEVEKRGINGSEGDGAEIAEKFVFFIGSKNGGKTTIILRCLDRDEPPKPTLALEYTYGRRAKGHNTPKDIAHFWELGGGTSLLDLISIPITGDTLRTFSLVLVLDLSKPNDLWPTMENLLQATKSHVDKVIMKLGKTNAKAVSEMRQKIWNNMPKDHPVSCCLGLLLESLVPFIVNDNITNNFFRFLCMT

SEQ ID NO: 29986 - protein, 144 aa, Homo sapiens
MPSETLWEIAKAEVEKRGINGSEGDGAEIAEKFVFFIGSKNGGKTTIILRCLDRDEPPKPTLALEYTYGRRAKGHNTPKDIAHFWELGGGTSLLDLISIPITGDTLRSWQLSSLLPVSMNLTTPVPHINEIIHYLSFCYLFHLA

SEQ ID NO: 29987 - protein, 492 aa, Homo sapiens
MAPVGVEKKLLLGPNGPAVAAAGDLTSEEEEGQSLWSSILSEVSTRARSKLPSGKNILVFGEDGSGKTTLMTKLQGAEHGKKGRGLEYLYLSVHDEDRDDHTRCNVWILDGDLYHKGLLKFAVSAESLPETLVIFVADMSRPWTVMESLQKWASVLREHIDKMKIPPEKMRELERKFVKDFQDYMEPEEGCQGSPQRRGPLTSGSDEENVALPLGDNVLTHNLGIPVLVVCTKCDAVSVLEKEHDYRDEHLDFIQSHLRRFCLQYGAALIYTSVKEEKNLDLLYKYIVHKTYGFHFTTPALVVEKDAVFIPAGWDNEKKIAILHENFTTVKPEDAYEDFIVKPPVRKLVHDKELAAEDEQVFLMKQQSLLAKQPATPTRASESPARGPSGSPRTQGRGGPASVPSSSPGTSVKKPDPNIKNNAASEGVLASFFNSLLSKKTGSPGSPGAGGVQSTAKKSGQKTVLSNVQEELDRMTRKPDSMVTNSSTENEA

SEQ ID NO: 29988 - protein, 415 aa, Homo sapiens
MAPVGVEKKLLLGPNGPAVAAAGDLTSEEEEGQSLWSSILSEVSTRARSKLPSGKNILVFGEDGSGKTTLMTKLQGAEHGKKGRGLEYLYLSVHDEDRDVVKDFQDYMEPEEGCQGSPQRRGPLTSGSDEENVALPLGDNVLTHNLGIPVLVVCTKCDAVSVLEKEHDYRDEHLDFIQSHLRRFCLQYGAALIYTSVKEEKNLDLLYKYIVHKTYGFHFTTPALVVEKDAVFIPAGWDNEKKIAILHENFTTVKPEDAYEDFIVKPPVRKLVHDKELAAEDEQVFLMKQQSLLAKQPATPTRASESPARGPSGSPRTQGRGGPASVPSSSPGTSVKKPDPNIKNNAASEGVLASFFNSLLSKKTGSPGSPGAGGVQSTAKKSGQKTVLSNVQEELDRMTRKPDSMVTNSSTENEA

SEQ ID NO: 29989 - protein, 353 aa, Homo sapiens
MQSKRDCELWCERVNPENKAALEAWVRETGIRLVQVNGQRKYGGPPPGWVGSPPPAGSEVFIGRLPQDVYEHQLIPLFQRVGRLYEFRLMMTFSGLNRGFAYARYSSRRGAQAAIATLHNHPLRPSCPLLVCRSTEKCELSVDGLPPNLTRSALLLALQPLGPGLQEARLLPSPGPAPGQIALLKFSSHRAAAMAKKALVEGQSHLCGEQVAVEWLKPDLKQRLRQQLVGPFLRSPQPEGSQLALARDKLGFQGARATLQLLCQRMKLGSPVFLTKCLGIGPAGWHRFWYQVVIPGHPVPFSGLIWVVLTLDGRDGHEVAKDAVSVRLLQALSESGANLLWSAGAEAGTMVKQ

SEQ ID NO: 29990 - protein, 559 aa, Homo sapiens
MFPFGPHSPGGDGSAGAGAEEPTPHEGQAAATGPPSPLHPGADATHPPPPARSPRRPGAPSLSPAPRSGELGLPGAPESSTASAPGEPSPPSPPCRRPGPDCRAKSRGRHGLGAGLGGPGARLFGWLKERSLGRGLFVDPARDNFRTMTSLYGSIHPADSVYLSTRTHGAVFNLEYSPDGSVLTVACEQTEVLLFDPISSKHIKTLSEAHEDCVNNIRFLDNRLFATCSDDTTIALWDLRKLNTKVCTLHGHTSWVKNIEYDTNTRLLVTSGFDGNVIIWDTNRYTEDGCPHKKFFHTRFLMRMRLTPDCSKMLISTSSGYLLILHDLDLTKSLEVGSYPILRARRTTSSSDLTTSSSSSGPRVSGSPCHHSDSNSSEKHMSRASQREGVSPRNSLEVVTPEVLGESDHGNCITSLQLHPKGWATLLRCSSNSDDEECTCVYEFQEGAPVRPVSPRCSLRLTHYIEEANVGRGYIKELCFSPDGRMISSPHGYGIRLLGFDKQCSELVDCLPKEASPLRVIRSLYSHNDVVLTTKFSPTHCQIASGCLSGRVSLYQPKF

SEQ ID NO: 29991 - protein, 522 aa, Homo sapiens
MFPFGPHSPGGDGSAGAGAEEPTPHEGQAAATGPPSPLHPGADATHPPPPARSPRRPGAPSLSPAPRSGELGLPGAPESSTASAPGEPSPPSPPCRRPGPDCRAKSRGRHGLGAGLGGPGARLFGWLKERSLGRGLFVDPARDNFRTMTSLYGSIHPADSVYLSTRTHGAVFNLEYSPDGSVLTVACEQTEVLLFDPISSKHIKTLSEAHEDCVNNIRFLDNRLFATCSDDTTIALWDLRKLNTKVCTLHGHTSWVKNIEYDTNTRLLVTSGFDGNVIIWDTNRYTEDGCPHKKFFHTRFLMRMRLTPDCSKMLISTSSGYLLILHDLDLTKSLEVGSYPILRARRTTSSSGVSPRNSLEVVTPEVLGESDHGNCITSLQLHPKGWATLLRCSSNSDDEECTCVYEFQEGAPVRPVSPRCSLRLTHYIEEANVGRGYIKELCFSPDGRMISSPHGYGIRLLGFDKQCSELVDCLPKEASPLRVIRSLYSHNDVVLTTKFSPTHCQIASGCLSGRVSLYQPKF

SEQ ID NO: 29992 - protein, 310 aa, Homo sapiens
MGILSFLPVLATESDWADCKSPQPWGHMLLWTAVLFLAPVAGTPAAPPKAVLKLEPQWINVLQEDSVTLTCRGTHSPESDSIQWFHNGNLIPTHTQPSYRFKANNNDSGEYTCQTGQTSLSDPVHLTVLSEWLVLQTPHLEFQEGETIVLRCHSWKDKPLVKVTFFQNGKSKKFSRSDPNFSIPQANHSHSGDYHCTGNIGYTLYSSKPVTITVQAPSSSPMGIIVAVVTGIAVAAIVAAVVALIYCRKKRISALPGYPECREMGETLPEKPANPTNPDEADKVGAENTITYSLLMHPDALEEPDDQNRI

SEQ ID NO: 29993 - protein, 291 aa, Homo sapiens
MGILSFLPVLATESDWADCKSPQPWGHMLLWTAVLFLAPVAGTPAAPPKAVLKLEPQWINVLQEDSVTLTCRGTHSPESDSIQWFHNGNLIPTHTQPSYRFKANNNDSGEYTCQTGQTSLSDPVHLTVLSEWLVLQTPHLEFQEGETIVLRCHSWKDKPLVKVTFFQNGKSKKFSRSDPNFSIPQANHSHSGDYHCTGNIGYTLYSSKPVTITVQAPSSSPMGIIVAVVTGIAVAAIVAAVVALIYCRKKRISANPTNPDEADKVGAENTITYSLLMHPDALEEPDDQNRI

SEQ ID NO: 29994 - protein, 303 aa, Homo sapiens
MGILSFLPVLATESDWADCKSPQPWGHMLLWTAVLFLAAPPKAVLKLEPQWINVLQEDSVTLTCRGTHSPESDSIQWFHNGNLIPTHTQPSYRFKANNNDSGEYTCQTGQTSLSDPVHLTVLSEWLVLQTPHLEFQEGETIVLRCHSWKDKPLVKVTFFQNGKSKKFSRSDPNFSIPQANHSHSGDYHCTGNIGYTLYSSKPVTITVQAPSSSPMGIIVAVVTGIAVAAIVAAVVALIYCRKKRISALPGYPECREMGETLPEKPANPTNPDEADKVGAENTITYSLLMHPDALEEPDDQNRI

SEQ ID NO: 29995 - protein, 309 aa, Homo sapiens
MGILSFLPVLATESDWADCKSPQPWGHMLLWTAVLFLAPVAGTPAPPKAVLKLEPQWINVLQEDSVTLTCRGTHSPESDSIQWFHNGNLIPTHTQPSYRFKANNNDSGEYTCQTGQTSLSDPVHLTVLSEWLVLQTPHLEFQEGETIVLRCHSWKDKPLVKVTFFQNGKSKKFSRSDPNFSIPQANHSHSGDYHCTGNIGYTLYSSKPVTITVQAPSSSPMGIIVAVVTGIAVAAIVAAVVALIYCRKKRISALPGYPECREMGETLPEKPANPTNPDEADKVGAENTITYSLLMHPDALEEPDDQNRI

SEQ ID NO: 29996 - protein, 290 aa, Homo sapiens
MGILSFLPVLATESDWADCKSPQPWGHMLLWTAVLFLAPVAGTPAPPKAVLKLEPQWINVLQEDSVTLTCRGTHSPESDSIQWFHNGNLIPTHTQPSYRFKANNNDSGEYTCQTGQTSLSDPVHLTVLSEWLVLQTPHLEFQEGETIVLRCHSWKDKPLVKVTFFQNGKSKKFSRSDPNFSIPQANHSHSGDYHCTGNIGYTLYSSKPVTITVQAPSSSPMGIIVAVVTGIAVAAIVAAVVALIYCRKKRISANPTNPDEADKVGAENTITYSLLMHPDALEEPDDQNRI

SEQ ID NO: 29997 - protein, 323 aa, Homo sapiens
MGILSFLPVLATESDWADCKSPQPWGHMLLWTAVLFLAPVAGTPAAPPKAVLKLEPQWINVLQEDSVTLTCRGTHSPESDSIQWFHNGNLIPTHTQPSYRFKANNNDSGEYTCQTGQTSLSDPVHLTVLSEWLVLQTPHLEFQEGETIVLRCHSWKDKPLVKVTFFQNGKSKKFSRSDPNFSIPQANHSHSGDYHCTGNIGYTLYSSKPVTITVQAPSSSPMGIIVAVVTGIAVAAIVAAVVALIYCRKKRISANSTDPVKAAQFEPPGRQMIAIRKRQPEETNNDYETADGGYMTLNPRAPTDDDKNIYLTLPPNDHVNSNN

SEQ ID NO: 29998 - protein, 276 aa, Homo sapiens
MGILSFLPVLATESDWADCKSPQPWGHMLLWTAVLFLAPVAGTPAAPPKAVLKLEPQWINVLQEDSVTLTCRGTHSPESDSIQWFHNGNLIPTHTQPSYRFKANNNDSGEYTCQTGQTSLSDPVHLTVLSEWLVLQTPHLEFQEGETIVLRCHSWKDKPLVKVTFFQNGKSKKFSRSDPNFSIPQANHSHSGDYHCTGNIGYTLYSSKPVTITVQAPSSSPMGIIVAVVTGIAVAAIVAAVVALIYCRKKRISANSTDPVKAAQFEMLSCSHLDVK

SEQ ID NO: 29999 - protein, 267 aa, Homo sapiens
MGILSFLPVLATESDWADCKSPQPWGHMLLWTAVLFLAPVAGTPAAPPKAVLKLEPQWINVLQEDSVTLTCRGTHSPESDSIQWFHNGNLIPTHTQPSYRFKANNNDSGEYTCQTGQTSLSDPVHLTVLSEWLVLQTPHLEFQEGETIVLRCHSWKDKPLVKVTFFQNGKSKKFSRSDPNFSIPQANHSHSGDYHCTGNIGYTLYSSKPVTITVQAPSSSPMGIIVAVVTGIAVAAIVAAVVALIYCRKKRISATWTSNDCHQKETT

SEQ ID NO: 30000 - protein, 234 aa, Homo sapiens
MGILSFLPVLATESDWADCKSPQPWGHMLLWTAVLFLAPVAGTPAAPPKAVLKLEPQWINVLQEDSVTLTCRGTHSPESDSIQWFHNGNLIPTHTQPSYRFKANNNDSGEYTCQTGQTSLSDPVHLTVLSEWLVLQTPHLEFQEGETIVLRCHSWKDKPLVKVTFFQNGKSKKFSRSDPNFSIPQANHSHSGDYHCTGNIGYTLYSSKPVTITVQGPRLRTAAKQSSLVGAEVP

SEQ ID NO: 30001 - protein, 737 aa, Homo sapiens
MQPRRAQAPGAQLLPALALLLLLLGAGPRGSSLANPVPAAPLSAPGPCAAQPCRNGGVCTSRPEPDPQHPAPAGEPGYSCTCPAGISGANCQLVADPCASNPCHHGNCSSSSSSSSDGYLCICNEGYEGPNCEQALPSLPATGWTESMAPRQLQPVPATQEPDKILPRSQATVTLPTWQPKTGQKVVEMKWDQVEVIPDIACGNASSNSSAGGRLVSFEVPQNTSVKIRQDATASLILLWKVTATGFQQCSLIDGRSVTPLQASGGLVLLEEMLALGNNHFIGFVNDSVTKSIVALRLTLVVKVSTCVPGESHANDLECSGKGKCTTKPSEATFSCTCEEQYVGTFCEEYDACQRKPCQNNASCIDANEKQDGSNFTCVCLPGYTGELCQSKIDYCILDPCRNGATCISSLSGFTCQCPEGYFGSACEEKVDPCASSPCQNNGTCYVDGVHFTCNCSPGFTGPTCAQLIDFCALSPCAHGTCRSVGTSYKCLCDPGYHGLYCEEEYNECLSAPCLNAATCRDLVNGYECVCLAEYKGTHCELYKDPCANVSCLNGATCDSDGLNGTCICAPGFTGEECDIDINECDSNPCHHGGSCLDQPNGYNCHCPHGWVGANCEIHLQWKSGHMAESLTNMPRHSLYIIIGALCVAFILMLIILIVGICRISRIEYQGSSRPAYEEFYNCRSIDSEFSNAIASIRHARFGKKSRPAMYDVSPIAYEDYSPDDKPLVTLIKTKDL

SEQ ID NO: 30002 - protein, 1066 aa, Homo sapiens
MEPGKRRTKDDTWKADDLRKHLWAIQSGGSKEERKHREKKLRKESEMDLPEHKEPRCRDPDQDARSRDRVAEVHTAKESPRGERDRDRQRERRRDAKDREKEKLKEKHREAEKSHSRGKDREKEKDRRARKEELRQTVAHHNLLGQETRDRQLLERAERKGRSVSKVRSEEKDEDSERGDEDRERRYRERKLQYGDSKDNPLKYWLYKEEGERRHRKPREPDRDNKHREKSSTREKREKYSKEKSNSFSDKGEERHKEKRHKEGFHFDDERHQSNVDRKEKSAKDEPRKRESQNGEHRNRGASSKRDGTSSQHAENLVRNHGKDKDSRRKHGHEEGSSVWWKLDQRPGGEETVEIEKEETDLENARADAYTASCEDDFEDYEDDFEVCDGDDDESSNEPESREKLEELPLAQKKEIQEIQRAINAENERIGELSLKLFQKRGRTEFEKEPRTDTNSSPSRASVCGIFVDFASASHRQKSRTQALKQKMRSTKLLRLIDLDFSFTFSLLDLPPVNEYDMYIRNFGKKNTKQAYVQCNEDNVERDIQTEEIETREVWTQHPGESTVVSGGSEQRDTSDAVVMPKIDTPRLCSFLRAACQVMAVLLEEDRLAAEPSWNLRAQDRALYFSDSSSQLNTSLPFLQNRKVSSLHTSRVQRQMVVSVHDLPEKSFVPLLDSKYVLCVWDIWQPSGPQKVLICESQVTCCCLSPLKAFLLFAGTAHGSVVVWDLREDSRLHYSVTLSDGFWTFRTATFSTDGILTSVNHRSPLQAVEPISTSVHKKQSFVLSPFSTQEEMSGLSFHIASLDESGVLNVWVVVELPKADIAGSISDLGLMPGGRVKLVHSALIQLGDSLSHKGNEFWGTTQTLNVKFLPSDPNHFIIGTDMGLISHGTRQDLRVAPKLFKPQQHGIRPVKVNVIDFSPFGEPIFLAGCSDGSIRLHQLSSAFPLLQWDSSTDSHAVTGLQWSPTRPAVFLVQDDTSNIYIWDLLQSDLGPVAKQQVSPNRLVAMAAVGEPEKAGGSFLALVLARASGSIDIQHLKRRWAAPEVDECNRLRLLLQEALWPEGKLHK

SEQ ID NO: 30003 - protein, 154 aa, Homo sapiens
MDAPRLPVRPGVLLPKLVLLFVYADDCLAQCGKDCKSYCCDGTTPYCCSYYAYIGNILSGTAIAGIVFGIVFIMGVIAGIAICICMCMKNHRATRVGILRTTHINTVSSYPGPPPYGHDHEMEYCADLPPPYSPTPQGPAQRSPPPPYPGNARK

SEQ ID NO: 30004 - protein, 155 aa, Homo sapiens
MDAPRLPVRPGVLLPKLVLLFVYADDCLAQCGKDCKSYCCDGTTPYCCSYYAYIGNILSGTAIAGIVFGIVFIMGVIAGIAICICMCMKNHRATRVGILRTTHINTVSSYPAGPPPYGHDHEMEYCADLPPPYSPTPQGPAQRSPPPPYPGNARK

SEQ ID NO: 30005 - protein, 132 aa, Homo sapiens
MDAPRLPVRPGVLLPKLVLLFVYADDCLAQCGKDCKSYCCDGTTPYCCSYYAYIGNILSGTAIAGIVFGIVFIMGVIAGIAICICMCMKNHRATRVGILRTTHINTVSSYPEYELHEAEILVYFVQHSIPSM

SEQ ID NO: 30006 - protein, 112 aa, Homo sapiens
MDAPRLPVRPGVLLPKLVLLFVYADDCLAQCGKDCKSYCCDGTTPYCCSYYAYIGNILSRTTTLRSRPRDGILCRLASSILPHPTGSSTAFSTPSLSWKRKEIIYLPEQNMC

SEQ ID NO: 30007 - protein, 75 aa, Homo sapiens
MDAPRLPVRPGVLLPKLVLLFVYADDCLAQCGKDCKSYCCDGTTPYCCSYYAYIGNILSREFKDHQTFEENIKYE

SEQ ID NO: 30008 - protein, 64 aa, Homo sapiens
MDAPRLPVRPGVLLPKLVLLFVYADDCLAQCGKDCKSYCCDGTTPYCCSYYAYIGNILSCCCPR

SEQ ID NO: 30009 - protein, 254 aa, Homo sapiens
MWQLLLPTALLLLVSAGMRTEDLPKAVVFLEPQWYRVLEKDSVTLKCQGAYSPEDNSTQWFHNESLISSQASSYFIDAATVDDSGEYRCQTNLSTLSDPVQLEVHIGWLLLQAPRWVFKEEDPIHLRCHSWKNTALHKVTYLQNGKGRKYFHHNSDFYIPKATLKDSGSYFCRGLFGSKNVSSETVNITITQGLAVSTISSFFPPGYQVSFCLVMVLLFAVDTGLYFSVKTNIRSSTRDWKDHKFKWRKDPQDK

SEQ ID NO: 30010 - protein, 201 aa, Homo sapiens
MAFYFDQDDAALEHFDRYFLRQSQEKREHAQELMSLQNLRGGRICLHDIRKPEGQGWESGLKAMECTFHLEKNINQSLLELHQLARENGDPQLCDFLENDFLNQQAKTIKELGGYLSNLHKMGAPEAGLAEYLFNKLTLGRSQKHTRAQTGPTATGCLPLLAPPGGTSMFPFQNILFIFLLSVLPLLAIKLSVLKAIKVSS

SEQ ID NO: 30011 - protein, 179 aa, Homo sapiens
MTDLVAVWDVALSDGVHKIEFEHGTTSGKRVVYVDGKEEIRKEWMFKLVGKETFYVGAAKTKATINIDAISGFAYEYTLEINGKSLKKYMEDRSKTTNTWVLHMDGENFRIVLEKDAMDVWCNGKKLETAGEFVDDGTETHFSIGNHDCYIKAVSSGKRKEGIIHTLIVDNREIPEIAS

SEQ ID NO: 30012 - protein, 213 aa, Homo sapiens
MLLPFIRTLPLLCYNHLLVSPDSATLSPPYSLEKMTDLVAVWDVALSDGVHKIEFEHGTTSGKRVVYVDGKEEIRKEWMFKLVGKETFYVGAAKTKATINIDAISGFAYEYTLEINGKSLKKYMEDRSKTTNTWVLHMDGENFRIVLEKDAMDVWCNGKKLETAGEFVDDGTETHFSIGNHDCYIKAVSSGKRKEGIIHTLIVDNREIPEIAS

SEQ ID NO: 30013 - protein, 201 aa, Homo sapiens
MASGDDSPIFEDDESPPYSLEKMTDLVAVWDVALSDGVHKIEFEHGTTSGKRVVYVDGKEEIRKEWMFKLVGKETFYVGAAKTKATINIDAISGFAYEYTLEINGKSLKKYMEDRSKTTNTWVLHMDGENFRIVLEKDAMDVWCNGKKLETAGEFVDDGTETHFSIGNHDCYIKAVSSGKRKEGIIHTLIVDNREIPEIAS

SEQ ID NO: 30014 - protein, 373 aa, Homo sapiens
MASKPEKRVASSVFITLAPPRRDVAVAEEVRQAVCEARRGRPWEAPAPMKTPEAGLAGRPSPWTTPGRAAATVPAAPMQLFNGGCPPPPPVLDGEDVLPDLDLLPPPPPPPPVLLPSEEEAPAPMGASLIADLEQLHLSPPPPPPQAPAEGPSVQPGPLRPMEEELPPPPAEPVEKGASTDICAFCHKTVSPRELAVEAMKRQYHAQCFTCRTCRRQLAGQSFYQKDGRPLCEPCYQDTLERCGKCGEVVRDHIIRALGQAFHPSCFTCVTCARCIGDESFALGSQNEVYCLDDFYRKFAPVCSICENPIIPRDGKDAFKIECMGRNFHENCYRCEDCRILLSVEPTDQGCYPLNNHLFCKPCHVKRSAAGCC

SEQ ID NO: 30015 - protein, 374 aa, Homo sapiens
MASKPEKRVASSVFITLAPPRRDVAVAEEVRQAVCEARRGRPWEAPAPMKTPEAGLAGRPSPWTTPGRAAATVPAAPMQLFNGGCPPPPPVLDGEDVLPDLDLLPPPPPPPPVLLPSEEEAPAPMGASLIADLEQLHLSPPPPPPQAPAEGPSVQPGPLRPMEEELPPPPAEPVEKGASTDICAFCHKTVSPRELAVEAMKRQYHAQCFTCRTCRRQLAGQSFYQKDGRPLCEPCYQDTLERCGKCGEVVRDHIIRALGQAFHPSCFTCVTCARCIGDESFALGSQNEVYCLDDFYRYEKGLCTGWGAGTGRDPSRVKELSLSPGCWARVSCLLVYYKEYYRAGLGAVAHACNPSTLGGRGGWITRSGDRDHPG

SEQ ID NO: 30016 - protein, 276 aa, Homo sapiens
MASKPEKRVASSVFITLAPPRRDVAVAEEVRQAVCEARRGRPWEAPAPMKTPEAGLAGRPSPWTTPGRAAATVPAAPMQLFNGDICAFCHKTVSPRELAVEAMKRQYHAQCFTCRTCRRQLAGQSFYQKDGRPLCEPCYQDTLERCGKCGEVVRDHIIRALGQAFHPSCFTCVTCARCIGDESFALGSQNEVYCLDDFYRKFAPVCSICENPIIPRDGKDAFKIECMGRNFHENCYRCEDCRILLSVEPTDQGCYPLNNHLFCKPCHVKRSAAGCC

SEQ ID NO: 30017 - protein, 866 aa, Homo sapiens
MFSMRIVCLVLSVVGTAWTADSGEGDFLAEGGGVRGPRVVERHQSACKDSDWPFCSDEDWNYKCPSGCRMKGLIDEVNQDFTNRINKLKNSLFEYQKNNKDSHSLTTNIMEILRGDFSSANNRDNTYNRVSEDLRSRIEVLKRKVIEKVQHIQLLQKNVRAQLVDMKRLEVDIDIKIRSCRGSCSRALAREVDLKDYEDQQKQLEQVIAKDLLPSRDRQHLPLIKMKPVPDLVPGNFKSQLQKVPPEWKALTDMPQMRMELERPGGNEITRGGSTSYGTGSETESPRNPSSAGSWNSGSSGPGSTGNRNPGSSGTGGTATWKPGSSGPGSTGSWNSGSSGTGSTGNQNPGSPRPGSTGTWNPGSSERGSAGHWTSESSVSGSTGQWHSESGSFRPDSPGSGNARPNNPDWGTFEEVSGNVSPGTRREYHTEKLVTSKGDKELRTGKEKVTSGSTTTTRRSCSKTVTKTVIGPDGHKEVTKEVVTSEDGSDCPEAMDLGTLSGIGTLDGFRHRHPDEAAFFDTASTGKTFPGFFSPMLGEFVSETESRGSESGIFTNTKESSSHHPGIAEFPSRGKSSSYSKQFTSSTSYNRGDSTFESKSYKMADEAGSEADHEGTHSTKRGHAKSRPVRDCDDVLQTHPSGTQSGIFNIKLPGSSKIFSVYCDQETSLGGWLLIQQRMDGSLNFNRTWQDYKRGFGSLNDEGEGEFWLGNDYLHLLTQRGSVLRVELEDWAGNEAYAEYHFRVGSEAEGYALQVSSYEGTAGDALIEGSVEEGAEYTSHNNMQFSTFDRDADQWEENCAEVYGGGWWYNNCQAANLNGIYYPGGSYDPRNNSPYEIENGVVWVSFRGADYSLRAVRMKIRPLVTQ

SEQ ID NO: 30018 - protein, 644 aa, Homo sapiens
MFSMRIVCLVLSVVGTAWTADSGEGDFLAEGGGVRGPRVVERHQSACKDSDWPFCSDEDWNYKCPSGCRMKGLIDEVNQDFTNRINKLKNSLFEYQKNNKDSHSLTTNIMEILRGDFSSANNRDNTYNRVSEDLRSRIEVLKRKVIEKVQHIQLLQKNVRAQLVDMKRLEVDIDIKIRSCRGSCSRALAREVDLKDYEDQQKQLEQVIAKDLLPSRDRQHLPLIKMKPVPDLVPGNFKSQLQKVPPEWKALTDMPQMRMELERPGGNEITRGGSTSYGTGSETESPRNPSSAGSWNSGSSGPGSTGNRNPGSSGTGGTATWKPGSSGPGSTGSWNSGSSGTGSTGNQNPGSPRPGSTGTWNPGSSERGSAGHWTSESSVSGSTGQWHSESGSFRPDSPGSGNARPNNPDWGTFEEVSGNVSPGTRREYHTEKLVTSKGDKELRTGKEKVTSGSTTTTRRSCSKTVTKTVIGPDGHKEVTKEVVTSEDGSDCPEAMDLGTLSGIGTLDGFRHRHPDEAAFFDTASTGKTFPGFFSPMLGEFVSETESRGSESGIFTNTKESSSHHPGIAEFPSRGKSSSYSKQFTSSTSYNRGDSTFESKSYKMADEAGSEADHEGTHSTKRGHAKSRPVRGIHTSPLGKPSLSP

SEQ ID NO: 30019 - protein, 189 aa, Homo sapiens
MSTVKEAAHRLSKSEMSLYAVLDLKKGASPEDFKKSYSHSALLPHPPFEYHLGRKLALRYHPDKNPGNAQAAEIFKEINAAHAILSDSKKRKIYDQHGSLGIYLYDHFGEEGVRYYFILNSCWFKTLVILCTLLTCCCFCCCCCFCCGALKPPPEQDSGRKYQQNVQSQPPRSGAKCDFRSEENSEDDF

SEQ ID NO: 30020 - protein, 104 aa, Homo sapiens
MSTVKEAAHRLSKSEMSLYAVLDLKKGASPEDFKKSYRHLSSCVLCSLVAVSVVAAVFAVEHLNHHLSRIVGENISRMSRVSLQGQEPNVILEARKIAKMIFKR

SEQ ID NO: 30021 - protein, 348 aa, Homo sapiens
MGKDYYKILGIPSGANEDEIKKAYRKMALKYHPDKNKEPNAEEKFKEIAEAYDVLSDPKKRGLYDQYGEEGLKTGGGTSGGSSGSFHYTFHGDPHATFASFFGGSNPFDIFFASSRSTRPFSGFDPDDMDVDEDEDPFGAFGRFGFNGLSRGPRRAPEPLYPRRKVQDPPVVHELRVSLEEIYHGSTKRMKITRRRLNPDGRTVRTEDKILHIVIKRGWKEGTKITFPKEGDATPDNIPADIVFVLKDKPHAHFRRDGTNVLYSALISLKEALCGCTVNIPTIDGRVIPLPCNDVIKPGTVKRLRGEGLPFPKVPTQRGDLIVEFKVRFPDRLTPQTRQILKQHLPCS

SEQ ID NO: 30022 - protein, 420 aa, Homo sapiens
MFKRTVLSCPPPAAPPLQARGAFRSFPHSWGEDFLASLMFKIQLEPLKLRAWTLNGFVKFRNKETSAGPVAVMGKDYYKILGIPSGANEDEIKKAYRKMALKYHPDKNKEPNAEEKFKEIAEAYDVLSDPKKRGLYDQYGEEGLKTGGGTSGGSSGSFHYTFHGDPHATFASFFGGSNPFDIFFASSRSTRPFSGFDPDDMDVDEDEDPFGAFGRFGFNGLSRGPRRAPEPLYPRRKVQDPPVVHELRVSLEEIYHGSTKRMKITRRRLNPDGRTVRTEDKILHIVIKRGWKEGTKITFPKEGDATPDNIPADIVFVLKDKPHAHFRRDGTNVLYSALISLKEALCGCTVNIPTIDGRVIPLPCNDVIKPGTVKRLRGEGLPFPKVPTQRGDLIVEFKVRFPDRLTPQTRQILKQHLPCS

SEQ ID NO: 30023 - protein, 462 aa, Homo sapiens
MGGAEAEPWGRAPGPAIGGRRAGDSCPGWRRRSRSRGRGQRLSHGPRRRPQLLTAAPPLQARGAFRSFPHSWGEDFLASLMFKIQLEPLKLRAWTLNGFVKFRNKETSAGPVAVMGKDYYKILGIPSGANEDEIKKAYRKMALKYHPDKNKEPNAEEKFKEIAEAYDVLSDPKKRGLYDQYGEEGLKTGGGTSGGSSGSFHYTFHGDPHATFASFFGGSNPFDIFFASSRSTRPFSGFDPDDMDVDEDEDPFGAFGRFGFNGLSRGPRRAPEPLYPRRKVQDPPVVHELRVSLEEIYHGSTKRMKITRRRLNPDGRTVRTEDKILHIVIKRGWKEGTKITFPKEGDATPDNIPADIVFVLKDKPHAHFRRDGTNVLYSALISLKEALCGCTVNIPTIDGRVIPLPCNDVIKPGTVKRLRGEGLPFPKVPTQRGDLIVEFKVRFPDRLTPQTRQILKQHLPCS

SEQ ID NO: 30024 - protein, 340 aa, Homo sapiens
MGKDYYQTLGLARGASDEEIKRAYRRQALRYHPDKNKEPGAEEKFKEIAEAYDVLSDPRKREIFDRYGEEGLKGSGPSGGSGGGANGTSFSYTFHGDPHAMFAEFFGGRNPFDTFFGQRNGEEGMDIDDPFSGFPMGMGGFTNVNFGRSRSAQEPARKKQDPPVTHDLRVSLEEIYSGCTKKMKISHKRLNPDGKSIRNEDKILTIEVKKGWKEGTKITFPKEGDQTSNNIPADIVFVLKDKPHNIFKRDGSDVIYPARISLREALCGCTVNVPTLDGRTIPVVFKDVIRPGMRRKVPGEGLPLPKTPEKRGDLIIEFEVIFPERIPQTSRTVLEQVLPI

SEQ ID NO: 30025 - protein, 240 aa, Homo sapiens
MFAEFFGGRNPFDTFFGQRNGEEGMDIDDPFSGFPMGMGGFTNVNFGRSRSAQEPARKKQDPPVTHDLRVSLEEIYSGCTKKMKISHKRLNPDGKSIRNEDKILTIEVKKGWKEGTKITFPKEGDQTSNNIPADIVFVLKDKPHNIFKRDGSDVIYPARISLREALCGCTVNVPTLDGRTIPVVFKDVIRPGMRRKVPGEGLPLPKTPEKRGDLIIEFEVIFPERIPQTSRTVLEQVLPI

SEQ ID NO: 30026 - protein, 481 aa, Homo sapiens [sequence omitted]

SEQ ID NO: 30027 - protein, 177 aa, Homo sapiens
MDGAVMEGPLFLQSQRFGTKRWRKTWAVLYPASPHGVARLEFFDHKGSSSGGGRGSSRRLDCKVIRLAECVSVAPVTVETPPEPGATAFRLDTAQRSHLLAADAPSSAAWVQTLCRNAFPKGSWTLAPTDNPPKLSALEMLENSLYSPTWEGHVLFRGRPPLPLRPWNLHLPDGTGK

SEQ ID NO: 30028 - protein, 342 aa, Homo sapiens
MLENSLYSPTWEGSQFWVTVQRTEAAERCGLHGSYVLRVEAERLTLLTVGAQSQILEPLLSWPYTLLRRYGRDKVMFSFEAGRRCPSGPGTFTFQTAQGNDIFQAVETAIHRQKAQGKAGQGHDVLRADSHEGEVAEGKLPSPPGPQELLDSPPALYAEPLDSLRIAPCPSQDSLYSDPLDSTSAQAGEGVQRKKPLYWDLYEHAQQQLLKAKLTDPKEDPIYDEPEGLAPVPPQGLYDLPREPKDAWWCQARVKEEGYELPYNPATDDYAVPPPRSTKPLLAPKPQGPAFPEPGTATGSGIKSHNSALYSQVQKSGASGSWDCGLSRVGTDKTGVKSEGST

SEQ ID NO: 30029 - protein, 347 aa, Homo sapiens
MSFVLSRMAACGGTCKNKVTVSKPVWDFLSKETPARLARLREEHRVSILIDGETSDIYVLQLSPQGPPPAPPNGLYLARKALKGLLKEAEKELKKAQRQGELMGCLALGGGGEHPEMHRAGPPPLRAAPLLPPGARGLPPPPPPLPPPLPPRLREEAEEQESTCPICLGEIQNAKTLEKCRHSFCEGCITRALQVKKACPMCGRFYGQLVGNQPQNGRMLVSKDATLLLPSYEKYGTIVIQYVFPPGVQGAEHPNPGVRYPGTTRVAYLPDCPEGNKVLTLFRKAFDQRLTFTIGTSMTTGRPNVITWNDIHHKTSCTGGPQLFGYPDPTYLTRVQEELRAKGITDD

SEQ ID NO: 30030 - protein, 350 aa, Homo sapiens
MPILSSSGSKMAACGGTCKNKVTVSKPVWDFLSKETPARLARLREEHRVSILIDGETSDIYVLQLSPQGPPPAPPNGLYLARKALKGLLKEAEKELKKAQRQGELMGCLALGGGGEHPEMHRAGPPPLRAAPLLPPGARGLPPPPPPLPPPLPPRLREEAEEQESTCPICLGEIQNAKTLEKCRHSFCEGCITRALQVKKACPMCGRFYGQLVGNQPQNGRMLVSKDATLLLPSYEKYGTIVIQYVFPPGVQGAEHPNPGVRYPGTTRVAYLPDCPEGNKVLTLFRKAFDQRLTFTIGTSMTTGRPNVITWNDIHHKTSCTGGPQLFGYPDPTYLTRVQEELRAKGITDD

SEQ ID NO: 30031 - protein, 863 aa, Homo sapiens
MATTGTPTADRGDAAATDDPAARFQVQKHSWDGLRSIIHGSRKYSGLIVNKAPHDFQFVQKTDESGPHSHRLYYLGMPYGSRENSLLYSEIPKKVRKEALLLLSWKQMLDHFQATPHHGVYSREEELLRERKRLGVFGITSYDFHSESGLFLFQASNSLFHCRDGGKNGFMVSPMKPLEIKTQCSGPRMDPKICPADPAFFSFINNSDLWVANIETGEERRLTFCHQGLSNVLDDPKSAGVATFVIQEEFDRFTGYWWCPTASWEGSEGLKTLRILYEEVDESEVEVIHVPSPALEERKTDSYRYPRTGSKNPKIALKLAEFQTDSQGKIVSTQEKELVQPFSSLFPKVEYIARAGWTRDGKYAWAMFLDRPQQWLQLVLLPPALFIPSTENEEQRLASARAVPRNVQPYVVYEEVTNVWINVHDIFYPFPQSEGEDELCFLRANECKTGFCHLYKVTAVLKSQGYDWSEPFSPGEDEFKCPIKEEIALTSGEWEVLARHGSKIWVNEETKLVYFQGTKDTPLEHHLYVVSYEAAGEIVRLTTPGFSHSCSMSQNFDMFVSHYSSVSTPPCVHVYKLSGPDDDPLHKQPRFWASMMEAASCPPDYVPPEIFHFHTRSDVRLYGMIYKPHALQPGKKHPTVLFVYGGPQVQLVNNSFKGIKYLRLNTLASLGYAVVVIDGRGSCQRGLRFEGALKNQMGQVEIEDQVEGLQFVAEKYGFIDLSRVAIHGWSYGGFLSLMGLIHKPQVFKVAIAGAPVTVWMAYDTGYTERYMDVPENNQHGYEAGSVALHVEKLPNEPNRLLILHGFLDENVHFFHTNFLVSQLIRAGKPYQLQIYPNERHSIRCPESGEHYEVTLLHFLQEYL

SEQ ID NO: 30032 - protein, 892 aa, Homo sapiens
MRKVKKLRLDKENTGSWRSFSLNSEGAERMATTGTPTADRGDAAATDDPAARFQVQKHSWDGLRSIIHGSRKYSGLIVNKAPHDFQFVQKTDESGPHSHRLYYLGMPYGSRENSLLYSEIPKKVRKEALLLLSWKQMLDHFQATPHHGVYSREEELLRERKRLGVFGITSYDFHSESGLFLFQASNSLFHCRDGGKNGFMVSPMKPLEIKTQCSGPRMDPKICPADPAFFSFINNSDLWVANIETGEERRLTFCHQGLSNVLDDPKSAGVATFVIQEEFDRFTGYWWCPTASWEGSEGLKTLRILYEEVDESEVEVIHVPSPALEERKTDSYRYPRTGSKNPKIALKLAEFQTDSQGKIVSTQEKELVQPFSSLFPKVEYIARAGWTRDGKYAWAMFLDRPQQWLQLVLLPPALFIPSTENEEQRLASARAVPRNVQPYVVYEEVTNVWINVHDIFYPFPQSEGEDELCFLRANECKTGFCHLYKVTAVLKSQGYDWSEPFSPGEDEFKCPIKEEIALTSGEWEVLARHGSKIWVNEETKLVYFQGTKDTPLEHHLYVVSYEAAGEIVRLTTPGFSHSCSMSQNFDMFVSHYSSVSTPPCVHVYKLSGPDDDPLHKQPRFWASMMEAASCPPDYVPPEIFHFHTRSDVRLYGMIYKPHALQPGKKHPTVLFVYGGPQVQLVNNSFKGIKYLRLNTLASLGYAVVVIDGRGSCQRGLRFEGALKNQMGQVEIEDQVEGLQFVAEKYGFIDLSRVAIHGWSYGGFLSLMGLIHKPQVFKVAIAGAPVTVWMAYDTGYTERYMDVPENNQHGYEAGSVALHVEKLPNEPNRLLILHGFLDENVHFFHTNFLVSQLIRAGKPYQLQIYPNERHSIRCPESGEHYEVTLLHFLQEYL

SEQ ID NO: 30033 - protein, 836 aa, Homo sapiens
MATTGTPTADRGDAAATDDPAARFQVQKHSWDGLRSIIHGSRKYSGLIVNKAPHDFQFVQKTDESGPHSHRLYYLGMPYGSRENSLLYSEIPKKVRKEALLLLSWKQMLDHFQATPHHGVYSREEELLRERKRLGVFGITSYDFHSESGLFLFQASNSLFHCRDGGKNGFMVSPMKPLEIKTQCSGPRMDPKICPADPAFFSFINNSDLWVANIETGEERRLTFCHQGLSNVLDDPKSAGVATFVIQEEFDRFTGYWWCPTASWEGSEGLKTLRILYEEVDESEVEVIHVPSPALEERKTDSYRYPRTGSKNPKIALKLAEFQTDSQGKIVSTQEKELVQPFSSLFPKVEYIARAGWTRDGKYAWAMFLDRPQQWLQLVLLPPALFIPSTENEEQRLASARAVPRNVQPYVVYEEVTNVWINVHDIFYPFPQSEGEDELCFLRANECKTGFCHLYKVTAVLKSQGYDWSEPFSPGEDEFKCPIKEEIALTSGEWEVLARHGSKIWVNEETKLVYFQGTKDTPLEHHLYVVSYEAAGEIVRLTTPGFSHSCSMSQNFDMFVSHYSSVSTPPCVHVYKLSGPDDDPLHKQPRFWASMMEAASCPPDYVPPEIFHFHTRSDVRLYGMIYKPHALQPGKKHPTVLFVYGGPQVQLVNNSFKGIKYLRLNTLASLGYAVVVIDGRGSCQRGLRFEGALKNQMGQVEIEDQVEGLQFVAEKYGFIDLSRVAIHGWSYGGFLSLMGLIHKPQVFKVAIAGAPVTVWMAYDTGYTERYMDVPENNQHGYEAGSVALHVEKLPNEPNRLLILHGFLDENVHFFHTNFLVSQLIRAGKPYQLQEYL

SEQ ID NO: 30034 - protein, 159 aa, Homo sapiens
MDPSQFNPTYIPGSPQMLTEENSRDDSGASQISSETLIKNLSNLTINASSESVSPLSEALLRRESVGAAVLREIEDEWLYSRRGVRTLLSVQREKMARLRYMLLGGVRTHERRPTNKEPKGVKKESRPFKCPCSFCVSNGWDPSENARIGNQDTKPLQP

SEQ ID NO: 30035 - protein, 165 aa, Homo sapiens
MSQATKRKHVVKEVLGEHIVPSDQQQIVRVLRTPGNNLHEVETAQGQRFLVSMPSKYRKNIWIKRGDFLIVDPIEEGEKVKAEISFVLCKDHVRSLQKEGFWPEAFSEVAEKHNNRNRQTQPELPAEPQLSGEESSSEDDSDLFVNTNRRQYHESEEESEEEEAA

SEQ ID NO: 30036 - protein, 367 aa, Homo sapiens
MVTQILGAMESQVGGGPAGPALPNGPLLGTNGATDDSKTNLIVNYLPQNMTQDEFKSLFGSIGDIESCKLVRDKITGQSLGYGFVNYSDPNDADKAINTLNGLKLQTKTIKVSYARPSSASIRDANLYVSGLPKTMSQKEMEQLFSQYGRIITSRILVDQVTGVSRGVGFIRFDKRIEAEEAIKGLNGQKPLGAAEPITVKFANNPSQKTGQALLTHLYQSSARRYAGPLHHQTQRFRLDNLLNMAYGVKSPLSLIARFSPIAIDGMSGLAGVGLSGGAAGAGWCIFVYNLSPEADESVLWQLFGPFGAVTNVKVIRDFTTNKCKGFGFVTMTNYDEAAMAIASLNGYRLGERVLQVSFKTSKQHKA

SEQ ID NO: 30037 - protein, 360 aa, Homo sapiens
MVTQILGAMESQVGGGPAGPALPNGPLLGTNGATDDSKTNLIVNYLPQNMTQDEFKSLFGSIGDIESCKLVRDKITGQSLGYGFVNYSDPNDADKAINTLNGLKLQTKTIKVSYARPSSASIRDANLYVSGLPKTMSQKEMEQLFSQYGRIITSRILVDQVTGVSRGVGFIRFDKRIEAEEAIKGLNGQKPLGAAEPITVKFANNPSQKTGQALLTHLYQSSARRYAGPLHHQTQRFRLDNLLNMAYGVKRFSPIAIDGMSGLAGVGLSGGAAGAGWCIFVYNLSPEADESVLWQLFGPFGAVTNVKVIRDFTTNKCKGFGFVTMTNYDEAAMAIASLNGYRLGERVLQVSFKTSKQHKA

SEQ ID NO: 30038 - protein, 486 aa, Homo sapiens
MQPSGLEGPGTFGRWPLLSLLLLLLLLQPVTCAYTTPGPPRALTTLGAPRAHTMPGTYAPSTTLSSPSTQGLQEQARALMRDFPLVDGHNDLPLVLRQVYQKGLQDVNLRNFSYGQTSLDRLRDGLVGAQFWSAYVPCQTQDRDALRLTLEQIDLIRRMCASYSELELVTSAKALNDTQKLACLIGVEGGHSLDNSLSILRTFYMLGVRYLTLTHTCNTPWAESSAKGVHSFYNNISGLTDFGEKVVAEMNRLGMMVDLSHVSDAVARRALEVSQAPVIFSHSAARGVCNSARNVPDDILQLLKKNGGVVMVSLSMGVIQCNPSANVSTVADHFDHIKAVIGSKFIGIGGDYDGAGKFPQGLEDVSTYPVLIEELLSRGWSEEELQGVLRGNLLRVFRQVEKVQEENKWQSPLEDKFPDEQLSSSCHSDLSRLRQRQSLTSGQELTEIPIHWTAKLPAKWSVSESSPHMAPVLAVVATFPVLILWL

SEQ ID NO: 30039 - protein, 399 aa, Homo sapiens
MQPSGLEGPGTFGRWPLLSLLLLLLLLQPVTCAYTTPGPPRAQFWSAYVPCQTQDRDALRLTLEQIDLIRRMCASYSELELVTSAKALNDTQKLACLIGVEGGHSLDNSLSILRTFYMLGVRYLTLTHTCNTPWAESSAKGVHSFYNNISGLTDFGEKVVAEMNRLGMMVDLSHVSDAVARRALEVSQAPVIFSHSAARGVCNSARNVPDDILQLLKKNGGVVMVSLSMGVIQCNPSANVSTVADHFDHIKAVIGSKFIGIGGDYDGAGKFPQGLEDVSTYPVLIEELLSRGWSEEELQGVLRGNLLRVFRQVEKVQEENKWQSPLEDKFPDEQLSSSCHSDLSRLRQRQSLTSGQELTEIPIHWTAKLPAKWSVSESSPHMAPVLAVVATFPVLILWL

SEQ ID NO: 30040 - protein, 258 aa, Homo sapiens
MQPSGLEGPGTFGRWPLLSLLLLLLLLQPVTCAYTTPGPPRALTTLGAPRAHTMPGTYAPSTTLSSPSTQGLQEQARALMRDFPLVDGHNDLPLVLRQVYQKGLQDVNLRNFSYGQTSLDRLRDGLVGAQFWSAYVPCQTQDRDALRLTLEQIDLIRRMCASYSELELVTSAKALNDTQKLACLIGVEGGHSLDNSLSILRTFYMLGVRYLTLTHTCNTPWAESSAKGVHSFYNNISGLTDFGEMLWHGGPWKCHRHL

SEQ ID NO: 30041 - protein, 663 aa, Homo sapiens
MAITLQPSDLIFEFASNGMDDDIHQLEDPSVFPAVIVEQVPYPDLLHLYSGLELDDVHNGIITDGTLCMTQDQILEGSFLLTDDNEATSHTMSTAEVLLNMESPSDILDEKQIFSTSEMLPDSDPAPAVTLPNYLFPASEPDALNRAGDTSDQEGHSLEEKASREESAKKTGKSKKRIRKTKGNRSTSPVTDPSIPIRKKSKDGKGSTIYLWEFLLALLQDRNTCPKYIKWTQREKGIFKLVDSKAVSKLWGKQKNKPDMNYETMGRALRYYYQRGILAKVEGQRLVYQFKEMPKDLVVIEDEDESSEATAAPPQASTASVASASTTRRTSSRVSSRSAPQGKGSSSWEKPKIQHVGLQPSASLELGPSLDEEIPTTSTMLVSPAEGQVKLTKAVSASSVPSNIHLGVAPVGSGSALTLQTIPLTTVLTNGPPASTTAPTQLVLQSVPAASTFKDTFTLQASFPLNASFQDSQVAAPGAPLILSGLPQLLAGANRPTNPAPPTVTGAGPAGPSSQPPGTVIAAFIRTSGTTAAPRVKEGPLRSSSYVQGMVTGAPMEGLLVPEETLRELLRDQAHLQPLPTQVVSRGSHNPSLLGNQTLSPPSRPTVGLTPVAELELSSGSGSLLMAEPSVTTSGSLLTRSPTPAPFSPFNPTSLIKMEPHDI

SEQ ID NO: 30042 - protein, 1382 aa, Homo sapiens
MPAYFQRPENALKRANEFLEVGKKQPALDVLYDVMKSKKHRTWQKIHEPIMLKYLELCVDLRKSHLAKEGLYQYKNICQQVNIKSLEDVVRAYLKMAEEKTEAAKEESQQMVLDIEDLDNIQTPESVLLSAVSGEDTQDRTDRLLLTPWVKFLWESYRQCLDLLRNNSRVERLYHDIAQQAFKFCLQYTRKAEFRKLCDNLRMHLSQIQRHHNQSTAINLNNPESQSMHLETRLVQLDSAISMELWQEAFKAVEDIHGLFSLSKKPPKPQLMANYYNKVSTVFWKSGNALFHASTLHRLYHLSREMRKNLTQDEMQRMSTRVLLATLSIPITPERTDIARLLDMDGIIVEKQRRLATLLGLQAPPTRIGLINDMVRFNVLQYVVPEVKDLYNWLEVEFNPLKLCERVTKVLNWVREQPEKEPELQQYVPQLQNNTILRLLQQVSQIYQSIEFSRLTSLVPFVDAFQLERAIVDAARHCDLQVRIDHTSRTLSFGSDLNYATREDAPIGPHLQSMPSEQIRNQLTAMSSVLAKALEVIKPAHILQEKEEQHQLAVTAYLKNSRKEHQRILARRQTIEERKERLESLNIQREKEELEQREAELQKVRKAEEERLRQEAKEREKERILQEHEQIKKKTVRERLEQIKKTELGAKAFKDIDIEDLEELDPDFIMAKQVEQLEKEKKELQERLKNQEKKIDYFERAKRLEEIPLIKSAYEEQRIKDMDLWEQQEEERITTMQLEREKALEHKNRMSRMLEDRDLFVMRLKAARQSVYEEKLKQFEERLAEERHNRLEERKRQRKEERRITYYREKEEEEQRRAEEQMLKEREERERAERAKREEELREYQERVKKLEEVERKKRQRELEIEERERRREEERRLGDSSLSRKDSRWGDRDSEGTWRKGPEADSEWRRGPPEKEWRRGEGRDEDRSHRRDEERPRRLGDDEDREPSLRPDDDRVPRRGMDDDRGPRRGPEEDRFSRRGADDDRPSWRNTDDDRPPRRIADEDRGNWRHADDDRPPRRGLDEDRGSWRTADEDRGPRRGMDDDRGPRRGGADDERSSWRNADDDRGPRRGLDDDRGPRRGMDDDRGPRRGMDDDRGPRRGMDDDRGPRRGLDDDRGPWRNADDDRIPRRGAEDDRGPWRNMDDDRLSRRADDDRFPRRGDDSRPGPWRPLVKPGGWREKEKAREESWGPPRESRPSEEREWDREKERDRDNQDREENDKDPERERDRERDVDREDRFRRPRDEGGWRRGPAEESSSWRDSSRRDDRDRDDRRRERDDRRDLRERRDLRDDRDRRGPPLRSEREEVSSWRRADDRKDDRVEERDPPRRVPPPALSRDRERDRDREREGEKEKASWRAEKDRESLRRTKNETDEDGWTTVRR

SEQ ID NO: 30043 - protein, 1348 aa, Homo sapiens
MKSKKHRTWQKIHEPIMLKYLELCVDLRKSHLAKEGLYQYKNICQQVNIKSLEDVVRAYLKMAEEKTEAAKEESQQMVLDIEDLDNIQTPESVLLSAVSGEDTQDRTDRLLLTPWVKFLWESYRQCLDLLRNNSRVERLYHDIAQQAFKFCLQYTRKAEFRKLCDNLRMHLSQIQRHHNQSTAINLNNPESQSMHLETRLVQLDSAISMELWQEAFKAVEDIHGLFSLSKKPPKPQLMANYYNKVSTVFWKSGNALFHASTLHRLYHLSREMRKNLTQDEMQRMSTRVLLATLSIPITPERTDIARLLDMDGIIVEKQRRLATLLGLQAPPTRIGLINDMVRFNVLQYVVPEVKDLYNWLEVEFNPLKLCERVTKVLNWVREQPEKEPELQQYVPQLQNNTILRLLQQVSQIYQSIEFSRLTSLVPFVDAFQLERAIVDAARHCDLQVRIDHTSRTLSFGSDLNYATREDAPIGPHLQSMPSEQIRNQLTAMSSVLAKALEVIKPAHILQEKEEQHQLAVTAYLKNSRKEHQRILARRQTIEERKERLESLNIQREKEELEQREAELQKVRKAEEERLRQEAKEREKERILQEHEQIKKKTVRERLEQIKKTELGAKAFKDIDIEDLEELDPDFIMAKQVEQLEKEKKELQERLKNQEKKIDYFERAKRLEEIPLIKSAYEEQRIKDMDLWEQQEEERITTMQLEREKALEHKNRMSRMLEDRDLFVMRLKAARQSVYEEKLKQFEERLAEERHNRLEERKRQRKEERRITYYREKEEEEQRRAEEQMLKEREERERAERAKREEELREYQERVKKLEEVERKKRQRELEIEERERRREEERRLGDSSLSRKDSRWGDRDSEGTWRKGPEADSEWRRGPPEKEWRRGEGRDEDRSHRRDEERPRRLGDDEDREPSLRPDDDRVPRRGMDDDRGPRRGPEEDRFSRRGADDDRPSWRNTDDDRPPRRIADEDRGNWRHADDDRPPRRGLDEDRGSWRTADEDRGPRRGMDDDRGPRRGGADDERSSWRNADDDRGPRRGLDDDRGPRRGMDDDRGPRRGMDDDRGPRRGMDDDRGPRRGLDDDRGPWRNADDDRIPRRGAEDDRGPWRNMDDDRLSRRADDDRFPRRGDDSRPGPWRPLVKPGGWREKEKAREESWGPPRESRPSEEREWDREKERDRDNQDREENDKDPERERDRERDVDREDRFRRPRDEGGWRRGPAEESSSWRDSSRRDDRDRDDRRRERDDRRDLRERRDLRDDRDRRGPPLRSEREEVSSWRRADDRKDDRVEERDPPRRVPPPALSRDRERDRDREREGEKEKASWRAEKDRESLRRTKNETDEDGWTTVRR

SEQ ID NO: 30044 - protein, 698 aa, Homo sapiens
MHPSEMQRKAPPRRRRHRNRAPLTHKMNKMVTSEQMKLPSTKKAEPPTWAQLKKLTQLATKYLENTKVTQTPESMLLAALMIVSMVVSLPMPAGAAAANYTNWAYVPFPPLIRAVTWMDNPIEVYVNDSVWVHGPIDDRCPAKPEEEGMMINISIGYHYPPICLGRAPGCLMPAVQNWLVEVPTVSPISRFTYNMVSGMSLRPRVNYLQDFSYQRSLKFRPKGKPCPKEIPKESKNTEVLVWEECVANSVVILQNNEFGTIIDWAPRGQFYHNCSGQTQSCPSAQVSPAVDSDLTESLDKHKHKKLQSFYPWEWGEKGISTPRPKIISPVSGPEHPELWRLTVASHHIRIWSGNQTLETRDRKPFYTVDLNSSLTVPLQSCVKPPYMLVVGNIVIKPDSQTITCENCRLLTCIDSTFNWQHRILLVRAREGVWIPVSMDRPWEASPSIHILTEVLKGVLNRSKRFIFTLIAVIMGLIAVTAMAAVAGVALHSFVQSVNFVNDWQKNSTRLWNSQSSIDQKLANQINDLRQTVIWMGDRLMSLEHRFQLQCDWNTSDFCITPQIYNESEHHWDMVRRHLQGREDNLTLDISKLKEQIFEASKAHLNLVPGTEAIAGVADGLANLNPVTWVKTIGSTTIINLILILVCLFCLLLVCRCTQQLRRDSDHRERAMMTMVVLSKRKGGNVGKSKRDQIVTVSV

SEQ ID NO: 30045 - protein, 661 aa, Homo sapiens
MNPSEMQRKAPPRRRRHRNRAPLTHKMNKMVTSEEQMKLPSTKKAEPPTWAQLKKLTQLATKYLENTKVTQTPESMLLAALMIVSMVVSLPMPAGAAAANYTYWAYVPFPPLIRAVTWMDNPIEVYVNDSVWVPGPIDDRCPAKPEEEGMMINISIGYRYPPICLGTAPGCLMPAVQNWLVEVPIVSPISRFTYHMVSGMSLRPRVNYLQDFSYQRSLKFRPKGKPCPKEIPKESKNTEVLVWEECVANSAVILQNNEFGTIIDWAPRGQFYHNCSGQTQSCPSAQVSPAVDSDLTESLDKHKHKKLQSFYPWEWGEKGISTPRPKIVSPVSGPEHPELWRLTVASHHIRIWSGNQTLETRDRKPFYTVDLNSSLTVPLQSCVKPPYMLVVGNIVIKPDSQTITCENCRLLTCIDSTFNWQHRILLVRAREGVWIPVSMDRPWEASPSIHILTEVLKGVLNRSKRFIFTLIAVIMGLIAVTATGAVAGVALHSSVQSVNFVNDWQKNSTRLWNSQSSIDQKLANQINDLRQTVIWMGDRLMSLEHRFQLQCDWNTSDFCITPQIYNESEHHWDMVRRHLQGREDNLTLDISKLKEQIFKASKAHLNLVPGTEAIAGVADGLANLNPVTWVKTIGSTTIINLILILVCLFCLLLVCRCTQQL

SEQ ID NO: 30046 - protein, 213 aa, Homo sapiens
MAPAQRPLLPLLLLLLPLPPPPFARAEDAARANSDRYAVYWNRSNPRFHAGAGDDGGGYTVEVSINDYLDIYCPHYGAPLPPAERMEHYVLYMVNGEGHASCDHRQRGFKRWECNRPAAPGGPLKFSEKFQLFTPFSLGFEFRPGHEYYYISATPPNAVDRPCLRLKVYVRPTNETLYEAPEPIFTSNNSCSSPGGCRLFLSTIPVLWTLLGS

SEQ ID NO: 30047 - protein, 333 aa, Homo sapiens
MAVRRDSVWKYCWGVLMVLCRTAISKSIVLEPIYWNSSNSKFLPGQGLVLYPQIGDKLDIICPKVDSKTVGQYEYYKVYMVDKDQADRCTIKKENTPLLNCAKPDQDIKFTIKFQEFSPNLWGLEFQKNKDYYIISTSNGSLEGLDNQEGGVCQTRAMKILMKVGQDASSAGSTRNKDPTRRPELEAGTNGRSSTTSPFVKPNPGSSTDGNSAGHSGNNILGSEVALFAGIASGCIIFIVIIITLVVLLLKYRRRHRKHSPQHTTTLSLSTLATPKRSGNNNGSEPSDIIIPLRTADSVFCPHYEKVSGDYGHPVYIVQEMPPQSPANIYYKV

SEQ ID NO: 30048 - protein, 399 aa, Homo sapiens
MAETIQEVEDEYKAFCKSFSKESDDPVACIHFTAEGEVTFKSILFVPTFVPRGLFDEYGSKKSDYIKLYVRCVFITDDFRDTMPKNLNFVKGVVDSGGLSLNVSCETLQQHKLLKVIRKKLVHKTLDMIKKIADEKYNDTFWKEFGTNIKLGVIEDHSNRTCLAKLLRFQSSHHPADITSLHQDVERMKEKQDKICLMAGGYEVIYLTEPVVEYCIQALPEFDGKRFQNVAKEGVKFDDSEKTKESHEAVEKEFEPLPNWVKDKAIKDKIEKAMVSQCLTESLCALVASQYGWSGNMERIMKAQAYQTGKGISTNYHASRKKTFEINPRHPLIRDMLRRIKEDEDDKTVLDLAVVEEPDEEPEETAEDKEQDKDKEMDVGTDEEKQETAKESTAEKDEL

SEQ ID NO: 30049 - protein, 803 aa, Homo sapiens
MRALWVLGLCCVLLTFGSVRADDEVDVDGTVEEDLGKSREGSRTDDEVVQREEEAIQLDGLNASQIRELREKSEKFAFQAEVNRMMKLIINSLYKNKEIFLRELISNASDALDKIRLISLTDENALSGNEELTVKIKCDKEKNLLHVTDTGVGMTREELVKNLGTIAKSGTSEFLNKMTEAQEDGQSTSELIGQFGVGFYSAFLVADKVIVTSKHNNDTQHIWESDSNEFSVIADPRGNTLGRGTTITLVLKEEASDYLELDTIKNLVKKYSQFINFPIYVWSSKTETVEEPMEEEEAAKEEKEESDDEAAVEEEEEEKKPKTKKVEKTVWDWELMNDIKPIWQRPSKEVEEDEYKAFYKSFSKESDDPMAYIHFTAEGEVTFKSILFVPTSAPRGLFDEYGSKKSDYIKLYVRRVFITDDFHDMMPKYLNFVKGVVDSDDLPLNVSRETLQQHKLLKVIRKKLVRKTLDMIKKIADDKYNDTFWKEFGTNIKLGVIEDHSNRTRLAKLLRFQSSHHPTDITSLDQYVERMKEKQDKIYFMAGSSRKEAESSPFVERLLKKGYEVIYLTEPVDEYCIQALPEFDGKRFQNVAKEGVKFDESEKTKESREAVEKEFEPLLNWMKDKALKDKIEKAVVSQRLTESPCALVASQYGWSGNMERIMKAQAYQTGKDISTNYYASQKKTFEINPRHPLIRDMLRRIKEDEDDKTVLDLAVVLFETATLRSGYLLPDTKAYGDRIERMLRLSLNIDPDAKVEEEPEEEPEETAEDTTEDTEQDEDEEMDVGTDEEEETAKESTAEKDEL

SEQ ID NO: 30050 - protein, 559 aa, Homo sapiens
MDNQCTVQVRLELGHRAQLRKKPTTEGFTHDWMVFVRGPEQCDIQHFVEKVVFWLHDSFPKPRRVCKEPPYKVEESGYAGFIMPIEVHFKNKEEPRKVCFTYDLFLNLEGNPPVNHLRCEKLTFNNPTTEFRYKLLRAGGVMVMPEGADTVSRPSPDYPMLPTIPLSAFSDPKKTKPSHGSKDANKESSKTSKPHKVTKEHRERPRKDSESKSSSKELEREQAKSSKDTSRKLGEGRLPKEEKAPPPKAAFKEPKMALKETKLESTSPKGGPPPPPPPPPRASSKRPATADSPKPSAKKQKKSSSKGSRSAPGTSPRTSSSSSFSDKKPAKDKSSTRGEKVKAESEPREAKKALEVEESNSEDEASFKSESAQSSPSNSSSSSDSSSDSDFEPSQNHSQGPLRSMVEDLQSEESDEDDSSSGEEAAGKTNPGRDSRLSFSDSESDNSADSSLPSREPPPPQKPPPPNSKVSGRRSPESCSKPEKILKKGTYDKAYTDELVELHRRLMALRERNVLQQIVNLIEETGHFNVTNTTFDFDLFSLDETTVRKLQSCLEAVAT

SEQ ID NO: 30051 - protein, 339 aa, Homo sapiens
MSPSPTALFCLGLCLGRVPAQSGPLPKPSLQALPSSLVPLEKPVTLRCQGPPGVDLYRLEKLSSSRYQDQAVLFIPAMKRSLAGRYRCSYQNGSLWSLPSDQLELVATGVFAKPSLSAQPGPAVSSGGDVTLQCQTRYGFDQFALYKEGDPAPYKNPERWYRASFPIITVTAAHSGTYRCYSFSSRDPYLWSAPSDPLELVVTGTSVTPSRLPTEPPSPVAEFSEATAELTVSFTNEVFTTETSRSITASPKESDSPAGPARQYYTKGNLVRICLGAVILIILAGFLAEDWHSRRKRLRHRGRAVQRPLPPLPPLPLTRKSNGGQDGGRQDVHSRGLCS

SEQ ID NO: 30052 - protein, 321 aa, Homo sapiens
MSPSPTALFCLGLCLGRVPAQSGPLPKPSLQALPSSLVPLEKPVTLRCQGPPGVDLYRLEKLSSSRYQDQAVLFIPAMKRSLAGRYRCSYQNGSLWSLPSDQLELVATGVFAKPSLSAQPGPAVSSGGDVTLQCQTRYGFDQFALYKEGDPAPYKNPERWYRASFPIITVTAAHSGTYRCYSFSSRDPYLWSAPSDPLELVVTEFSEATAELTVSFTNEVFTTETSRSITASPKESDSPAGPARQYYTKGNLVRICLGAVILIILAGFLAEDWHSRRKRLRHRGRAVQRPLPPLPPLPLTRKSNGGQDGGRQDVHSRGLCS

SEQ ID NO: 30053 - protein, 620 aa, Homo sapiens
MSPSPTALFCLGLCLGRVPAQSGPLPKPSLQALPSSLVPLEKPVTLRCQGPPGVDLYRLEKLSSSRYQDQAVLFIPAMKRSLAGRYRCSYQNGSLWSLPSDQLELVATGVFAKPSLSAQPGPAVSSGGDVTLQCQTRYGFDQFALYKEGDPAPYKNPERWYRASFPIITVTAAHSGTYRCYSFSSRDPYLWSAPSDPLELVVTGTSVTPSRLPTEPPSPVAEFSEATAELTVSFTNEVFTTETSRSITASPKESDSPAGESCPPVLHQGQPGPDMPRGCDPNNPGGVSGRGLAQPEEAPAAQGQGCAEAASAPPAPPADPEIKRGSGWRPTGCSQPRVMFMTAEPQARSYPREGSWHGRRLKDWRVWSVEAGGQRLQLWKRGHAASSWCSIREPFGQCLSVCLPLCLRAPSIWDGRNLWRPHPPPCTLWMTWYPGWTTYWPLSSTSLIWAPDGSLRFPALRVDSVPSSVQNPPVLPFGPLCSCLVFPRNSHPHSISHCGLTNLLSSLRTGLAGSLGMSFIFLSVKLARCPLPFTLENKISLCNMVKPHLYQQNKKTQKLARCGGASLYSQQLRGLRWENGLSLGGRGCSELRSHHCTLARVTKPDFVSKNTGMNMSITLI

SEQ ID NO: 30054 - protein, 495 aa, Homo sapiens
MKKRKELNALIGLAGDSRRKKPKKGPSSHRLLRTEPPDSDSESSSEEEEEFGVVGNRSRFAKGDYLRCCKICYPLCGFVILAACVVACVGLVWMQVALKEDLDALKEKFRTMESNQKSSFQEIPKLNEELLSKQKQLEKIESGEMGLNKVWINITEMNKQISLLTSAVNHLKANVKSAADLISLPTTVEGLQKSVASIGNTLNSVHLAVEALQKTVDEHKKTMELLQSDMNQHFLKETPGSNQIIPSPSATSELDNKTHSENLKQDILYLHNSLEEVNSALVGYQRQNDLKLEGMNETVSNLTQRVNLIESDVVAMSKVEKKANLSFSMMGDRSATLKRQSLDQVTNRTDTVKIQSIKKEDSSNSQVSKLREKLQLISALTNKPESNRPPETADEEQVESFTSKPSALPKFSQFLGDPVEKAAQLRPISLPGVSSTEDLQDLFRKTGQDVDGKLTYQEIWTSLGSAMPEPESLRAFDSDGDGRYSFLELRVALGI

SEQ ID NO: 30055 - protein, 553 aa, Homo sapiens
MPLPWSLALPLLLSWVAGGFGNAASARHHGLLASARQPGVCHYGTKLACCYGWRRNSKGVCEATCEPGCKFGECVGPNKCRCFPGYTGKTCSQDVNECGMKPRPCQHRCVNTHGSYKCFCLSGHMLMPDATCVNSRTCAMINCQYSCEDTEEGPQCLCPSSGLRLAPNGRDCLDIDECASGKVICPYNRRCVNTFGSYYCKCHIGFELQYISGRYDCIDINECTMDSHTCSHHANCFNTQGSFKCKCKQGYKGNGLRCSAIPENSVKEVLRAPGTIKDRIKKLLAHKNSMKKKAKIKNVTPEPTRTPTPKVNLQPFNYEEIVSRGGNSHGGKKGNEEKMKEGLEDEKREEKALKNDIEERSLRGDVFFPKVNEAGEFGLILVQRKALTSKLEHKDLNISVDCSFNHGICDWKQDREDDFDWNPADRDNAIGFYMAVPALAGHKKDIGRLKLLLPDLQPQSNFCLLFDYRLAGDKVGKLRVFVKNSNNALAWEKTTSEDEKWKTGKIQLYQGTDATKSIIFEAERGKGKTGEIAVDGVLLVSGLCPDSLLSVDD

SEQ ID NO: 30056 - protein, 554 aa, Homo sapiens
MPLPWSLALPLLLSWVAGGFGNAASARHHGLLASARQPGVCHYGTKLACCYGWRRNSKGVCEATCEPGCKFGECVGPNKCRCFPGYTGKTCSQDVNECGMKPRPCQHRCVNTHGSYKCFCLSGHMLMPDATCVNSRTCAMINCQYSCEDTEEGPQCLCPSSGLRLAPNGRDCLDIDECASGKVICPYNRRCVNTFGSYYCKCHIGFELQYISGRYDCIDINECTMDSHTCSHHANCFNTQGSFKCKCKQGYKGNGLRCSAIPENSVKEVLRAPGTIKDRIKKLLAHKNSMKKKAKIKNVTPEPTRTPTPKVNLQPFNYEEIVSRGGNSHGGKKGNEEKMKEGLEDEKREEKALKNDIEERSLRGDVFFPKVNEAGEFGLILVQRKALTSKLEHKADLNISVDCSFNHGICDWKQDREDDFDWNPADRDNAIGFYMAVPALAGHKKDIGRLKLLLPDLQPQSNFCLLFDYRLAGDKVGKLRVFVKNSNNALAWEKTTSEDEKWKTGKIQLYQGTDATKSIIFEAERGKGKTGEIAVDGVLLVSGLCPDSLLSVDD

SEQ ID NO: 30057 - protein, 1503 aa, Homo sapiens
MNESASQEELRPAQENRKEDKERKWNLTEVKELHETLQSVPDVPVKEDTNSVVEKAMDEIKSQELNLEGQRKISPGSIKDSKTEASGNIAIRKSAKVIFALDETELKSKPEHTWKKNLFERMEARAQAMQQKIIDKENLKKELEKKAEKKLPRDNLAKEWFNTDSMTLNNTAYLLDKLLPTLVPGVENMLTQVEKKKVLTEADTPSKFDPINYLGEYLIRNNPNYIKDPGMSGYQRLMKEVTEDLKIYVPDTICNRVSKMKENVKQNRKQRESIDKIIVKVANTRKQALQEQFDEWILDPKGMIPKSVIQNVLQEFFQNPDFKLGSHCKQLDITDSTEPRLNKMEFTEYISSHIKDLKSEMFEELLKHLCHSADEFREVIKADMRRQMFAELFLHCDHGKVGFLDRQRTLALLELFYDHSSQMLRSLLRNPRQWPFIEFEEINLTELWGDMDNQKHIYEGFDKVLLEMNTLLSANHASKTQSKLLESPDQPKLNEQRTSTPSPNPPEQQRGVTAEQGPQRISIEEQQQGKKPTAEQELYIESVIEPGTHTESTLEQGSSRRLLTEQETHRESTTEQGQHKGSIEGQGPRRVSVSEQGSSRESVAEQGSRRESIAEQDRHKGSVAEQGSRRMSAAEQGSLRESVIEEPYQKSEQGPYGEIISEEQEDIGSTSQSRKDSILKSTKYGEPITSEYIEVPLQEKRSWEQTYEEEIFLSSELQEEVPTLSRKDHFPETTKKEVQKDKPCEPKSQKIEGKSWSGEFFTCNWKMKYVTFEDEEQANLIYGNSRFTDLHSIIRNIQSCKEVKGRTAFNGVSFNLLQFVQLLETFVGEDAPLSVSETLTSFFKEGYVETEQEKMNALEQFSQNAFQVRQRLLLEAIFQKWDSDGSGFLDLKEVDELLYTYKEGMEKESMKKAKLHIQFPKPHPGHEVRLSSKQFQNYIELVVSELRGNEDQVLESVVEFLMNALERSHIESLRNSARRKWLHQIQCAAETSGVSLEPVYSETFKALMQDAEAHGNKKISAHISLLEENLLLPEKGNVLLRNVACTLDDAQFVLNRVLYRDMKGISFTVVDEGKPIHVPQVQYHGNIFFWNQSRNKHDYNGSFLALPLQDAYMRIFGVLAVDTLRDPHEINIFLPHEIRFYQGVANVFSTAYHYVHSREHILHIVITGIGWLYDVTSSITSITTYFVEPSPAQDSDYVLRNMMVTGQLGLTEIHKNPPTIHRKSCIFRDFLFKCTDSSEVVLASACGETHIVVPLRERTGEALGVLDFNIGQNRMLLCQEYKDLQKMMKVVQVACYEILGEFSGEIKKKYILEIENVREVQRAGILFFRIMLLELQESIQLLNSMEFVSLLLYDHTLVTEPNSPQDSKSMELEANVKLVRDILKAVILFFHPELEFSSDFGSWDKCKFYVNKYLVNNICAFDPTAKHVEVNVQLIDEYIRDHSRTEVWKFGNVVIEHLYHWIHICSALMKITKQLNSGITPPLPSKTDNYMYAKMPGEGLQEK

SEQ ID NO: 30058 - protein, 926 aa, Homo sapiens
MNESASQEELRPAQENRKEDKERKWNLTEVKELHETLQSVPDVPVKEDTNSVVEKAMDEIKSQELNLEGQRKISPGSIKDSKTEASGNIAIRKSAKVIFALDETELKSKPEHTWKKNLFERMEARAQAMQQKIIDKENLKKELEKKAEKKLPRDNLAKEWFNTDSMTLNNTAYLLDKLLPTLVPGVENMLTQVEKKKVLTEADTPSKFDPINYLGEYLIRNNPNYIKDPGMSGYQRLMKEVTEDLKIYVPDTICNRVSKMKENVKQNRKQRESIDKIIVKVANTRKQALQEQFDEWILDPKGMIPKSVIQNVLQEFFQNPDFKLGSHCKQLDITDSTEPRLNKMEFTEYISSHIKDLKSEMFEELLKHLCHSADEFREVIKADMRRQMFAELFLHCDHGKVGFLDRQRTLALLELFYDHSSQMLRSLLRNPRQWPFIEFEEINLTELWGDMDNQKHIYEGFDKVLLEMNTLLSANHASKTQSKLLESPDQPKLNEQRTSTPSPNPPEQQRGVTAEQGPQRISIEEQQQGKKPTAEQELYIESVIEPGTHTESTLEQGSSRRLLTEQETHRESTTEQGQHKGSIEGQGPRRVSVSEQGSSRESVAEQGSRRESIAEQDRHKGSVAEQGSRRMSAAEQGSLRESVIEEPYQKSEQGPYGEIISEEQEDIGSTSQSRKDSILKSTKYGEPITSEYIEVPLQEKRSWEQTYEEEIFLSSELQEEVPTLSRKDHFPETTKKEVQKDKPCEPKSQKIEGKSWSGEFFTCNWKMKYVTFEDEEQANLIYGNSRFTDLHSIIRNIQSCKEVKGRTAFNGVSFNLLQFVQLLETFVGEDAPLSVSETLTSFFKEGYVETEQEKMNALEQFSQNAFQVRQRLLLEAIFQKWDSDGSGFLDLKEVDELLYTYKEGMEKESMKKGLTLSPGWSAVAQL

SEQ ID NO: 30059 - protein, 1379 aa, Homo sapiens
MNESASQEELRPAQENRKEDKERKWNLTEVKELHETLQSVPDVPVKEDTNSVVEKAMDEIKSQELNLEGQRKISPGSIKDSKTEASGNIAIRKSAKVIFALDETELKSKPEHTWKKNLFERMEARAQAMQQKIIDKENLKKELEKKAEKKLPRDNLAKEWFNTDSMTLNNTAYLLDKLLPTLVPGVENMLTQVEKKKVLTEADTPSKFDPINYLGEYLIRNNPNYIKDPGMSGYQRLMKEVTEDLKIYVPDTICNRVSKMKENVKQNRKQRESIDKIIVKVANTRKQALQEQFDEWILDPKGMIPKSVIQNVLQEFFQNPDFKLGSHCKQLDITDSTEPRLNKMEFTEYISSHIKDLKSEMFEELLKHLCHSADEFREVIKADMRRQMFAELFLHCDHGKVGFLDRQRTLALLELFYDHSSQMLRSLLRNPRQWPFIEFEEINLTELWGDMDNQKHIYEGFDKVLLEMNTLLSANHASKTQSKLLESPDQPKLNEQRTSTPSPNPPEQQRGVTAEQGPQRISIEEQQQGKKPTAEQELYIESVIEPGTHTESTLEQGSSRRLLTEQETHRESTTEQGQHKGSIEGQGPRRVSVSEQGSSRESVAEQGSRRESIAEQDRHKGSVAEQGSRRMSAAEQGSLRESVIEEPYQKSEQGPYGEIISEEQEDIGSTSQSRKDSILKSTKYGEPITSEYIEVPLQEKRSWEQTYEEEIFLSSELQEEVPTLSRKDHFPETTKKEVQKDKPCEPKSQKIEGKSWSGEFFTCNWKMKYVTFEDEEQANLIYGNSRFTAKLHIQFPKPHPGHEVRLSSKQFQNYIELVVSELRGNEDQVLESVVEFLMNALERSHIESLRNSARRKWLHQIQCAAETSGVSLEPVYSETFKALMQDAEAHGNKKISAHISLLEENLLLPEKGNVLLRNVACTLDDAQFVLNRVLYRDMKGISFTVVDEGKPIHVPQVQYHGNIFFWNQSRNKHDYNGSFLALPLQDAYMRIFGVLAVDTLRDPHEINIFLPHEIRFYQGVANVFSTAYHYVHSREHILHIVITGIGWLYDVTSSITSITTYFVEPSPAQDSDYVLRNMMVTGQLGLTEIHKNPPTIHRKSCIFRDFLFKCTDSSEVVLASACGETHIVVPLRERTGEALGVLDFNIGQNRMLLCQEYKDLQKMMKVVQVACYEILGEFSGEIKKKYILEIENVREVQRAGILFFRIMLLELQESIQLLNSMEFVSLLLYDHTLVTEPNSPQDSKSMELEANVKLVRDILKAVILFFHPELEFSSDFGSWDKCKFYVNKYLVNNICAFDPTAKHVEVNVQLIDEYIRDHSRTEVWKFGNVVIEHLYHWIHICSALMKITKQLNSGITPPLPSKTDNYMYAKMPGEGLQEK

SEQ ID NO: 30060 - protein, 975 aa, Homo sapiens
MNESASQEELRPAQENRKEDKERKWNLTEVKELHETLQSVPDVPVKEDTNSVVEKAMDEIKSQELNLEGQRKISPGSIKDSKTEASGNIAIRKSAKVIFALDETELKSKPEHTWKKNLFERMEARAQAMQQKIIDKENLKKELEKKAEKKLPRDNLAKEWFNTDSMTLNNTAYLLDKLLPTLVPGVENMLTQVEKKKVLTEADTPSKFDPINYLGEYLIRNNPNYIKDPGMSGYQRLMKEVTEDLKIYVPDTICNRVSKMKENVKQNRKQRESIDKIIVKVANTRKQALQEQFDEWILDPKGMIPKSVIQNVLQEFFQNPDFKLGSHCKQLDITDSTEPRLNKMEFTEYISSHIKDLKSEMFEELLKHLCHSADEFREVIKADMRRQMFAELFLHCDHGKVGFLDRQRTLALLELFYDHSSQMLRSLLRNPRQWPFIEFEEINLTELWGDMDNQKHIYEGFDKVLLEMNTLLSANHASKTQSKLLESPDQPKLNEQRTSTPSPNPPEQQRGVTAEQGPQRISIEEQQQGKKPTAEQELYIESVIEPGTHTESTLEQGSSRRLLTEQETHRESTTEQGQHKGSIEGQGPRRVSVSEQGSSRESVAEQGSRRESIAEQDRHKGSVAEQGSRRMSAAEQGSLRESVIEEPYQKSEQGPYGEIISEEQEDIGSTSQSRKDSILKSTKYGEPITSEYIEVPLQEKRSWEQTYEEEIFLSSELQEEVPTLSRKDHFPETTKKEVQKDKPCEPKSQKIEGKSWSGEFFTCNWKMKYVTFEDEEQANLIYGNSRFTDLHSIIRNIQSCKEVKGRTAFNGVSFNLLQFVQLLETFVGEDAPLSVSETLTSFFKEGYVETEQEKMNALEQFSQNAFQVRQRLLLEAIFQKWDSDGSGFLDLKEVDELLYTYKEGMEKESMKKDHSRTEVWKFGNVVIEHLYHWIHICSALMKITKQLNSGITPPLPSKTDNYMYAKMPGEGLQEK

SEQ ID NO: 30061 - protein, 856 aa, Homo sapiens
MDEIKSQELNLEGQRKISPGSIKDSKTEASGNIAIRKSAKVIFALDETELKSKPEHTWKKNLFERMEARAQAMQQKIIDKENLKKELEKKAEKKLPRDNLAKEWFNTDSMTLNNTAYLLDKLLPTLVPGVENMLTQVEKKKVLTEADTPSKFDPINYLGEYLIRNNPNYIKDPGMSGYQRLMKEVTEDLKIYVPDTICNRVSKMKENVKQNRKQRESIDKIIVKVANTRKQALQEQFDEWILDPKGMIPKSVIQNVLQEFFQNPDFKLGSHCKQLDITDSTEPRLNKMEFTEYISSHIKDLKSEMFEELLKHLCHSADEFREVIKADMRRQMFAELFLHCDHGKVGFLDRQRTLALLELFYDHSSQMLRSLLRNPRQWPFIEFEEINLTELWGDMDNQKHIYEGFDKVLLEMNTLLSANHASKTQSKLLESPDQPKLNEQRTSTPSPNPPEQQRGVTAEQGPQRISIEEQQQGKKPTAEQELYIESVIEPGTHTESTLEQGSSRRLLTEQETHRESTTEQGQHKGSIEGQGPRRVSVSEQGSSRESVAEQGSRRESIAEQDRHKGSVAEQGSRRMSAAEQGSLRESVIEEPYQKSEQGPYGEIISEEQEDIGSTSQSRKDSILKSTKYGEPITSEYIEVPLQEKRSWEQTYEEEIFLSSELQEEVPTLSRKDHFPETTKKEVQKDKPCEPKSQKIEGKSWSGEFFTCNWKMKYVTFEDEEQANLIYGNSRFTDLHSIIRNIQSCKEVKGRTAFNGVSFNLLQFVQLLETFVGEDAPLSVSETLTSFFKEGYVETEQEKMNALEQVSLCRQAGVQWRNCSSLQPPTPGLKRSSHHRLLSNWDYRERRKFFPLETKFP

SEQ ID NO: 30062 - protein, 569 aa, Homo sapiens
MEFTEYISSHIKDLKSEMFEELLKHLCHSADEFREVIKADMRRQMFAELFLHCDHGKVGFLDRQRTLALLELFYDHSSQMLRSLLRNPRQWPFIEFEEINLTELWGDMDNQKHIYEGFDKVLLEMNTLLSANHASKTQSKLLESPDQPKLNEQRTSTPSPNPPEQQRGVTAEQGPQRISIEEQQQGKKPTAEQELYIESVIEPGTHTESTLEQGSSRRLLTEQETHRESTTEQGQHKGSIEGQGPRRVSVSEQGSSRESVAEQGSRRESIAEQDRHKGSVAEQGSRRMSAAEQGSLRESVIEEPYQKSEQGPYGEIISEEQEDIGSTSQSRKDSILKSTKYGEPITSEYIEVPLQEKRSWEQTYEEEIFLSSELQEEVPTLSRKDHFPETTKKEVQKDKPCEPKSQKIEGKSWSGEFFTCNWKMKYVTFEDEEQANLIYGNSRFTDLHSIIRNIQSCKEVKGRTAFNGVSFNLLQFVQLLETFVGEDAPLSVSETLTSFFKEGYVETEQEKMNALEQVSLCRQAGVQWRNCSSLQPPTPGLKRSSHHRLLSNWDYRERRKFFPLETKFP

SEQ ID NO: 30063 - protein, 782 aa, Homo sapiens
MGKRDRADRDKKKSRKRHYEDEEDDEEDAPGNDPQEAVPSAAGKQVDESGTKVDEYGAKDYRLQMPLKDDHTSRPLWVAPDGHIFLEAFSPVYKYAQDFLVAIAEPVCRPTHVHEYKLTAYSLYAAVSVGLQTSDITEYLRKLSKTGVPDGIMQFIKLCTVSYGKVKLVLKHNRYFVESCHPDVIQHLLQDPVIRECRLRNSEGEATELITETFTSKSAISKTAESSGGPSTSRVTDPQGKSDIPMDLFDFYEQMDKDEEEEEETQTVSFEVKQEMIEELQKRCIHLEYPLLAEYDFRNDSVNPDINIDLKPTAVLRPYQEKSLRKMFGNGRARSGVIVLPCGAGKSLVGVTAACTVRKRCLVLGNSAVSVEQWKAQFKMWSTIDDSQICRFTSDAKDKPIGCSVAISTYSMLGHTTKRSWEAERVMEWLKTQEWGLMILDEVHTIPAKMFRRVLTIVQAHCKLGLTATLVREDDKIVDLNFLIGPKLYEANWMELQNNGYIAKVQCAEVWCPMSPEFYREYVAIKTKKRILLYTMNPNKFRACQFLIKFHERRNDKIIVFADNVFALKEYAIRLNKPYIYGPTSQGERMQILQNFKHNPKINTIFISKVGDTSFDLPEANVLIQISSHGGSRRQEAQRLGRVLRAKKGMVAEEYNAFFYSLVSQDTQEMAYSTKRQRFLVDQGYSFKVITKLAGMEEEDLAFSTKEEQQQLLQKVLAATDLDAEEEVVAGEFGSRSSQASRRFGTMSSMSGADDTVYMEYHSSRSKAPSKHVHPLFKRFRK

SEQ ID NO: 30064 - protein, 615 aa, Homo sapiens
MRALLLLGFLLVSLESTLSIPPWEAPKEHKYKAEEHTVVLTVTGEPCHFPFQYHRQLYHKCTHKGRPGPQPWCATTPNFDQDQRWGYCLEPKKVKDHCSKHSPCQKGGTCVNMPSGPHCLCPQHLTGNHCQKEKCFEPQLLRFFHKNEIWYRTEQAAVARCQCKGPDAHCQRLASQACRTNPCLHGGRCLEVEGHRLCHCPVGYTGAFCDVDTKASCYDGRGLSYRGLARTTLSGAPCQPWASEATYRNVTAEQARNWGLGGHAFCRNPDNDIRPWCFVLNRDRLSWEYCDLAQCQTPTQAAPPTPVSPRLHVPLMPAQPAPPKPQPTTRTPPQSQTPGALPAKREQPPSLTRNGPLSCGQRLRKSLSSMTRVVGGLVALRGAHPYIAALYWGHSFCAGSLIAPCWVLTAAHCLQDRPAPEDLTVVLGQERRNHSCEPCQTLAVRSYRLHEAFSPVSYQHDLALLRLQEDADGSCALLSPYVQPVCLPSGAARPSETTLCQVAGWGHQFEGAEEYASFLQEAQVPFLSLERCSAPDVHGSSILPGMLCAGFLEGGTDACQGDSGGPLVCEDQAAERRLTLQGIISWGSGCGDRNKPGVYTDVAYYLAWIREHTVS

SEQ ID NO: 30065 - protein, 422 aa, Homo sapiens
MVMVLSESLSTRGADSIACGTFSRELHTPKKMSQGPTLFSCGIMENDRWRDLDRKCPLQIDQPSTSIWECLPEKDSSLWHREAVTACAVTSLIKDLSISDHNGNPSAPPSKRQCRSLSFSDEMSSCRTSWRPLGSKVWTPVEKRRCYSGGSVQRYSNGFSTMQRSSSFSLPSRANVLSSPCDQAGLHHRFGGQPCQGVPGSAPCGQAGDTWSPDLHPVGGGRLDLQRSLSCSHEQFSFVEYCPPSANSTPASTPELARRSSGLSRSRSQPCVLNDKKVGVKRRRPEEVQEQRPSLDLAKMAQNCQTFSSLSCLSAGTEDCGPQSPFARHVSNTRAWTALLSASGPGGRTPAGTPVPEPLPPSFDDHLACQEDLSCEESDSCALDEDCGRRAEPAAAWRDRGAPGNSLCSLDGELDIEQIEKN

SEQ ID NO: 30066 - protein, 305 aa, Homo sapiens
MVMVLSESLSTRGADSIACGTFSRELHTPKKMSQGPTLFSCGIMENDRWRDLDRKCPLQIDQPSTSIWECLPEKDSSLWHREAVTACAVTSLIKDLSISDHNGNPSAPPSKRQCRSLSFSDEMSSCRTSWRPLGSKVWTPVEKRRCYSGGSVQRYSNGFSTMQRSSSFSLPSRANVLSSPCDQAGLHHRFGGQPCQGVPGSAPCGQAGDTWSPDLHPVGGGRLDLQRSLSCSHEQFSFVEYCPPSANSTPASTPELARRSSGLSRSRSQPCVLNDKKVGVKRRRPEEVQEQRPSLDLAKMAQIAP

SEQ ID NO: 30067 - protein, 406 aa, Homo sapiens
MESLRGYTHSDIGYRSLAVGEDIEEVNDEKLTVTSLMARGGEDEENTRSKPEYGTEAENNVGTEGSVPSDDQDREGGGGHEPEQQQEEPPLTKPEQQQEEPPLLELKQEQEEPPQTTVEGPQPAEGPQTAEGPQPPERKRRRRTAFTQFQLQELENFFDESQYPDVVARERLAARLNLTEDRVQVWFQNRRAKWKRNQRVLMLRNTATADLAHPLDMFLGGAYYAAPALDPALCVHLVPQLPRPPVLPVPPMPPRPPMVPMPPRPPIAPMPPMAPVPPGSRMAPVPPGPRMAPVPPWPPMAPVPPWPPMAPVPTGPPMAPVPPGPPMARVPPGPPMARVPPGPPMAPLPPGPPMAPLPPGPPMAPLPPGPPMAPLPPRSHVPHTGLAPVHITWAPVINSYYACPFF

SEQ ID NO: 30068 - protein, 132 aa, Homo sapiens
MGPRVLQPPLLLLLLALLLAALPCGAEEASPLRPAQVTLSPPPAVTNGSQPGAPHNSTHTRPPGASGSALTRSFYVILGFCGLTALYFLIRAFRLKKPQRRRYGLLANTEDPTEMASLDSDEETVFESRNLR

SEQ ID NO: 30069 - protein, 360 aa, Homo sapiens
MPELVVTALLAPSRLSLKLLRAFMWSLVFSVALVAAAVYGCIALTHVLCRPRRGCCGRRRSASPACLSDPSLGEHGFLNLKSSGLRLHYVSAGRGNGPLMLFLHGFPENWFSWRYQLREFQSRFHVVAVDLRGYGPSDAPRDVDCYTIDLLLVDIKDVILGLGYSKCILVAHDWGALLAWHFSIYYPSLVERMVVVSGAPMSVYQDYSLHHISQFFRSHYMFLFQLPWLPEKLLSMSDFQILKTTLTHRKTGIPCLTPSELEAFLYNFSQPGGLTGPLNYYRNLFRNFPLEPQELTTPTLLLWGEKDTYLELGLVEAIGSRFVPGRLEAHILPGIGHWIPQSNPQEMHQYMWAFLQDLLD

SEQ ID NO: 30070 - protein, 823 aa, Homo sapiens
MAFSQVQCLDDNHVNWRSSESKPEFFYSEEQRLALEALVARGRDAFYEVLKRENIRDFLSELELKRILETIEVYDPGSEDPRGTGPSQGPEDNGVGDGEEASGADGVPIEAEPLPSLEYWPQKSDRSIPQLDLGWPDTIAYRGVTRASVYMQPPIDGQAHIKEVVRKMISQAQKVIAVVMDMFTDVDIFKDLLDAGFKRKVAVYIIVDESNVKYFLHMCERACMHLGHLKNLRVRSSGGTEFFTRSATKFKGALAQKFMFVDGDRAVCGSYSFTWSAARTDRNVISVLSGQVVEMFDRQFQELYLMSHSVSLKGIPMEKEPEPEPIVLPSVVPLVPAGTVAKKLVNPKYALVKAKSVDEIAKISSEKQEAKKPLGLKGPALAEHPGELPELLPPIHPGLLHLERANMFEYLPTWVEPDPEPGSDILGYINIIDPNIWNPQPSQMNRIKIRDTSQASAQHQLWKQSQDSRPRPEPCPPPEPSAPQDGVPAENGLPQGDPEPLPPVPKPRTVPVADVLARDSSDIGWVLELPKEEAPQNGTDHRLPRMAGPGHAPLQRQLSVTQDDPESLGVGLPNGLDGVEEEDDDDYVTLSDQDSHSGSSGRGPGPRRPSVASSVSEEYFEVREHSVPLRRRHSEQVANGPTPPPRRQLSAPHITRGTFVGPQGGSPWAQSRGREEADALKRMQAQRSTDKEAQGQQFHHHRVPASGTRDKDGFPGPPRYRSAADSVQSSTRNAGPAMAGPHHWQAKGGQVPRLLPDPGSPRLAQNARPMTDGRATEEHPSPFGIPYSKLSQSKHLKARTGGSQWASSDSKRRAQAPRDRKDP

SEQ ID NO: 30071 - protein, 477 aa, Homo sapiens
MGARGLGGGSRVMCLTSAPSLCCSFTWSAARTDRNVISVLSGQVVEMFDRQFQELYLMSHSVSLKGIPMEKEPEPEPIVLPSVVPLVPAGTVAKKLVNPKYALVKAKSVDEIAKISSEKQEAKKPLGLKGPALAEHPGELPELLPPIHPGLLHLERANMFEYLPTWVEPDPEPGSDILGYINIIDPNIWNPQPSQMNRIKIRDTSQASAQHQLWKQSQDSRPRPEPCPPPEPSAPQDGVPAENGLPQGDPEPLPPVPKPRTVPVADVLARDSSDIGWVLELPKEEAPQNGTDHRLPRMAGPGHAPLQRQLSVTQDDPESLGVGLPNGLDGVEEEDDDDYVTLSDQDSHSGSSGRGPGPRRPSVASSVSEEYFEVREHSVPLRRRHSEQVANGPTPPPRRQLSAPHITRGTFVGPQGGSPWAQSRGREEADALKRMQAQRSTDKEAQVGQGPCTPGVTSPSLPATQELELLSSGLPCP

SEQ ID NO: 30072 - protein, 1179 aa, Homo sapiens
MARRSQSSSQGDNPLAPGYLPPHYKEYYRLAVDALAEGGSEAYSRFLATEGAPDFLCPEELEHVSRHLRPPQYVTREPPEGSLLDVDMDGSSGTYWPVNSDQAVPELDLGWPLTFGFQGTEVTTLVQPPPPDSPSIKDEARRMIRSAQQVVAVVMDMFTDVDLLSEVLEAAARRVPVYILLDEMNAQHFLDMADKCRVNLQHVDFLRVRTVAGPTYYCRTGKSFKGHVKEKFLLVDCAVVMSGSYSFMWSFEKIHRSLAHVFQGELVSSFDEEFRILFAQSEPLVPSAAALARMDAYALAPYAGAGPLVGVPGVGAPTPFSFPKRAHLLFPPPREEGLGFPSFLDPDRHFLSAFRREEPPRMPGGALEPHAGLRPLSRRLEAEAGPAGELAGARGFFQARHLEMDAFKRHSFATEGAGAVENFAAARQVSRQTFLSHGDDFRFQTSHFHRDQLYQQQYQWDPQLTPARPQGLFEKLRGGRAGFADPDDFTLGAGPRFPELGPDGHQRLDYVPSSASREVRHGSDPAFAPGPRGLEPSGAPRPNLTQRFPCQAAARPGPDPAPEAEPERRGGPEGRAGLRRWRLASYLSGCHGEDGGDDGLPAPMEAEAYEDDVLAPGGRAPAGDLLPSAFRVPAAFPTKVPVPGPGSGGNGPEREGPEEPGLAKQDSFRSRLNPLVQRSSRLRSSLIFSTSQAEGAAGAAAATEKVQLLHKEQTVSETLGPGGEAVRSAASTKVAELLEKYKGPARDPGGGAGAITVASHSKAVVSQAWREEVAAPGAVGGERRSLESCLLDLRDSFAQQLHQEAERQPGAASLTAAQLLDTLGRSGSDRLPSRFLSAQSHSTSPQGLDSPLPLEGSGAHQVLHNESKGSPTSAYPERKGSPTPGFSTRRGSPTTGFIEQKGSPTSAYPERRGSPVPPVPERRSSPVPPVPERRGSLTLTISGESPKAGPAEEGPSGPMEVLRKGSLRLRQLLSPKGERRMEDEGGFPVPQENGQPESPRRLSLGQGDSTEAATEERGPRARLSSATANALYSSNLRDDTKAILEQISAHGQKHRAVPAPSPGPTHNSPELGRPPAAGVLAPDMSDKDKCSAIFRSDSLGTQGRLSRTLPASAEERDRLLRRMESMRKEKRVYSRFEVFCKKEEASSPGAGEGPAEEGTRDSKVGKFVPKILGTFKSKK

SEQ ID NO: 30073 - protein, 541 aa, Homo sapiens
MPGLRRDRLLTLLLLGALLSADLYFHLWPQVQRQLRPRERPRGCPCTGRASSLARDSAAAASDPGTIVHNFSRTEPRTEPAGGSHSGSSSKLQALFAHPLYNVPEEPPLLGAEDSLLASQEALRYYRRKVARWNRRHKMYREQMNLTSLDPPLQLRLEASWVQFHLGINRHGLYSRSSPVVSKLLQDMRHFPTISADYSQDEKALLGACDCTQIVKPSGVHLKLVLRFSDFGKAMFKPMRQQRDEETPVDFFYFIDFQRHNAEIAAFHLDRILDFRRVPPTVGRIVNVTKEILEVTKNEILQSVFFVSPASNVCFFAKCPYMCKTEYAVCGNPHLLEGSLSAFLPSLNLAPRLSVPNPWIRSYTLAGKEEWEVNPLYCDTVKQIYPYNNSQRLLNVIDMAIFDFLIGNMDRHHYEMFTKFGDDGFLIHLDNARGFGRHSHDEISILSPLSQCCMIKKKTLLHLQLLAQADYRLSDVMRESLLEDQLSPVLTEPHLLALDRRLQTILRTVEGCIVAHGQQSVIVDGPVEQLAPDSGQANLTS

SEQ ID NO: 30074 - protein, 625 aa, Homo sapiens
MLNMWKVRELVDKATNVVMNYSEIESKVREATNDDPWGPSGQLMGEIAKATFMYEQFPELMNMLWSRMLKDNKKNWRRVYKSLLLLAYLIRNGSERVVTSAREHIYDLRSLENYHFVDEHGKDQGINIRQKVKELVEFAQDDDRLREERKKAKKNKDKYVGVSSDSVGGFRYSERYDPEPKSKWDEEWDKNKSAFPFSDKLGELSDKIGSTIDDTISKFRRKDREDSPERCSDSDEEKKARRGRSPKGEFKDEEETVTTKHIHITQATETTTTRHKRTANPSKTIDLGAAAHYTGDKASPDQNASTHTPQSSVKTSVPSSKSSGDLVDLFDGTSQSTGGSADLFGGFADFGSAAASGSFPSQVTATSGNGDFGDWSAFNQAPSGPVASSGEFFGSASQPAVELVSGSQSALGPPPAASNSSDLFDLMGSSQATMTSSQSMNFSMMSTNTVGLGLPMSRSQNTDMVQKSVSKTLPSTWSDPSVNISLDNLLPGMQPSKPQQPSLNTMIQQQNMQQPMNVMTQSFGAVNLSSPSNMLPVRPQTNALIGGPMPMSMPNVMTGTMGMAPLGNTPMMNQSMMGMNMNIGMSAAGMGLTGTMGMGMPNIAMTSGTVQPKQDAFANFANFSK

SEQ ID NO: 30075 - protein, 625 aa, Homo sapiens
MNYSEIESKVREATNDDPWGPSGQLMGEIAKATFMYEQFPELMNMLWSRMLKDNKKNWRRVYKSLLLLAYLIRNGSERVVTSAREHIYDLRSLENYHFVDEHGKDQGINIRQKVKELVEFAQDDDRLREERKKAKKNKDKYVGVSSDSVGGFRYSERYDPEPKSKWDEEWDKNKSAFPFSDKLGELSDKIGSTIDDTISKFRRKDREDSPERCSDSDEEKKARRGRSPKGEFKDEEETVTTKHIHITQATETTTTRHKRTANPSKTIDLGAAAHYTGDKASPDQNASTHTPQSSVKTSVPSSKSSGDLVDLFDGTSQSTGGSADLFGGFADFGSAAASGSFPSQVTATSGNGDFGDWSAFNQAPSGPVASSGEFFGSASQPAVELVSGSQSALGPPPAASNSSDLFDLMGSSQATMTSSQSMNFSMMSTNTVGLGLPMSRSQPLQNVSTVLQKPNPLYNQNTDMVQKSVSKTLPSTWSDPSVNISLDNLLPGMQPSKPQQPSLNTMIQQQNMQQPMNVMTQSFGAVNLSSPSNMLPVRPQTNALIGGPMPMSMPNVMTGTMGMAPLGNTPMMNQSMMGMNMNIGMSAAGMGLTGTMGMGMPNIAMTSGTVQPKQDAFANFANFSK

SEQ ID NO: 30076 - protein, 643 aa, Homo sapiens
MLNMWKVRELVDKATNVVMNYSEIESKVREATNDDPWGPSGQLMGEIAKATFMYEQFPELMNMLWSRMLKDNKKNWRRVYKSLLLLAYLIRNGSERVVTSAREHIYDLRSLENYHFVDEHGKDQGINIRQKVKELVEFAQDDDRLREERKKAKKNKDKYVGVSSDSVGGFRYSERYDPEPKSKWDEEWDKNKSAFPFSDKLGELSDKIGSTIDDTISKFRRKDREDSPERCSDSDEEKKARRGRSPKGEFKDEEETVTTKHIHITQATETTTTRHKRTANPSKTIDLGAAAHYTGDKASPDQNASTHTPQSSVKTSVPSSKSSGDLVDLFDGTSQSTGGSADLFGGFADFGSAAASGSFPSQVTATSGNGDFGDWSAFNQAPSGPVASSGEFFGSASQPAVELVSGSQSALGPPPAASNSSDLFDLMGSSQATMTSSQSMNFSMMSTNTVGLGLPMSRSQPLQNVSTVLQKPNPLYNQNTDMVQKSVSKTLPSTWSDPSVNISLDNLLPGMQPSKPQQPSLNTMIQQQNMQQPMNVMTQSFGAVNLSSPSNMLPVRPQTNALIGGPMPMSMPNVMTGTMGMAPLGNTPMMNQSMMGMNMNIGMSAAGMGLTGTMGMGMPNIAMTSGTVQPKQDAFANFANFSK

SEQ ID NO: 30077 - protein, 105 aa, Homo sapiens
MAKMFDLRTKIMIGIGSSLLVAAMVLLSVVFCLYFKVAKALKAAKDPDAVAVKNHNPDKVCWATNSQAKATTMESCPSLQCCEGCRMHASSDSLPPCCCDINEGL

SEQ ID NO: 30078 - protein, 59 aa, Homo sapiens; identical to SEQ ID NO: 22878

SEQ ID NO: 30079 - protein, 992 aa, Homo sapiens
MARGGAACKSDARLLLGRDALRPAPALLAPAVLLGAALGLGLGLWLGCRAGRQRTRHQKDDTQNLLKNLESNAQTPSETGSPSRRRKREVQMSKDKEAVDECEPPSNSNITAFALKAKVIYPINQKFRPLADGSSNPSLHENLKQAVLPHQPVEASPSSSLGSLSQGEKDDCSSSSSVHSATSDDRFLSRTFLRVNAFPEVLACESVDVDLCIYSLHLKDLLHLDTALRQEKHMMFIQIFKMCLLDLLPKKKSDDELYQKILSKQEKDLEELEKGLQVKLSNTEMSGAGDSEYITLADVEKKEREYSEQLIDNMEAFWKQMANIQHFLVDQFKCSSSKARQLMMTLTERMIAAEGLLCDSQELQALDALERTMGRAHMAKVIEFLKLQVQEETRCRLAAISHGLELLAGEGKLSGRQKEELLTQQHKAFWQEAERFSREFVQRGKDLVTASLAHQVEGTAKLTLAQEEEQRSFLAEAQPTADPEKFLEAFHEVLERQRLMQCDLEEEENVRATEAVVALCQELYFSTVDTFQKFVDALFLQTLPGMTGLPPEECDYLRQEVQENAAWQLGKSNRFRRQQWKLFQELLEQDQQVWMEECALSSVLQTHLREDHEGTIRGVLGRLGGLTEESTRCVLQGHDLLLRSALRRLALRGNALATLTQMRLSGKKHLLQELREQRALEQGSSQCLDEHQWQLLRALEARVLEEASRLEEEAQQTRLQLQQRLLAEAQEVGQLLQQHMECAIGQALLVHARNAATKSRAKDRDDFKRTLMEAAVESVYVTSAGVSRLVQAYYQQIGRIMEDHEERKLQHLKTLQGERMENYKLRKKQELSNPSSGSRTAGGAHETSQAVHQRMLSQQKRFLAQFPVHQQMRLHAQQQQAGVMDLLEAQLETQLQEAEQNFISELAALARVPLAESKLLPAKRGLLEKPLRTKRKKPLPQERGDLGVPNNEDLASGDQTSGSLSSKRLSQQESEAGDSGNSKKMLKRRSNL

SEQ ID NO: 30080 - protein, 530 aa, Homo sapiens
MLGTDRCVVEEWLSEFKALPDTQITSYAATLHRKKTLVPALYKVIQDSNNELLEPVCHQLFELYRSSEVRLKRFTLQFLPELMWVYLRLTVSRDRQSNGCIEALLLGIYNLEIADKDGNNKVLSFTIPSLSKPSIYHEPSTIGSMALTEGALCQHDLIRVVYSDLHPQRETFTAQNRFEVLSFLMLCYNSAIVYMPASSYQSLCRMGSRVCVSGFPRQHEKHWKELCGRIVLDPEFMVQLLTGVYYAMYNGQWDLGQEVLDDIIYRAQLELFSQPLLVANAMKNSLPFDAPDSTQEGQKVLKVEVTPTVPRISRTAITTASIRRHRWRREGAEGVNGGEESVNLNDADEGFSSGASLSSQPIGTKPSSSSQRGSLRKVATGRSAKDKETASAIKSSESPRDSVVRKQYVQQPTDLSVDSVELTPMKKHLSLPAGQVVPKINSLSLIRTASASSSKSFDYVNGSQASTSIGVGTEGGTNLAANNANRYSTVSLQEDRLGQAGEGKELLSPGAPLTKQSRSPSFNMQLISQV

SEQ ID NO: 30081 - protein, 1118 aa, Homo sapiens
MGVQGFQDYIEKHCPSAVVPVELQKLARGSLVGGGRQRPPQTPLRLLVDADNCLHRLYGGFYTDWVSGGQWNHMLGYLAALAKACFGGNIELFVFFNGALEKARLHEWVKRQGNERQTAQQIVSHVQNKGTPPPKVWFLPPVCMAHCIRLALIRFHVKVAQSIEDHHQEVIGFCRENGFHGLVAYDSDYALCNIPYYFSAHALKLSRNGKSLTTSQYLMHEVAKQLDLNPNRFPIFAALLGNHILPDEDLASFHWSLLGPEHPLASLKVRAHQLVLPPCDVVIKAVADYVRNIQDTSDLDAIAKDVFQHSQSRTDDKVIRFKRAIGYYSATSKPMSFHPPHYLAARPGPFGMPGMVPPHVPPQMLNIPQTSLQAKPVAPQVPSPGGAPGQGPYPYSLSEPAPLTLDTSGKNLTEQNSYSNIPHEGKHTPLYERSSPINPAQSGSPNHVDSAYFPGSSTSSSSDNDEGSGGATNHISGNKIGWEKTGSHSEPQARGDPGDQTKAEGSSTASSGSQLAEGKGSQMGTVQPIPCLLSMPTRNHMDITTPPLPPVAPEVLRVAEHRHKKGLMYPYIFHVLTKGEIKIAVSIEDEANKDLPPAALLYRPVRQYVYGVLFSLAESRKKTERLAFRKNRLPPEFSPVIIKEWAAYKGKSPQTPELVEALAFREWTCPNLKRLWLGKAVEDKNRRMRAFLACMRSDTPAMLNPANVPTHLMVLCCVLRYMVQWPGARILRRQELDAFLAQALSPKLYEPDQLQELKIENLDPRGIQLSALFMSGVDMALFANDACGQPIPWEHCCPWMYFDGKLFQSKLLKASREKTPLIDLCDGQADQAAKVEKMRQSVLEGLSFSRQSHTLPFPPPPALPFYPASAYPRHFGPVPPSQGRGRGFAGVCGFGGPYGETVATGPYRAFRVAAASGHCGAFSGSDSSRTSKSQGGVQPIPSQGGKLEIAGTVVGHWAGSRRGRGGRGPFPLQVVSVGGPARGRPRGVISTPVIRTFGRGGRYYGRGYKNQAAIQGRPPYAASAEEVAKELKSKSGESKSSAMSSDGSLAENGVMAEEKPAPQMNGSTGDARAPSHSESALNNDSKTCNTNPHLNALSTDSACRREAALEAAVLNKEE

SEQ ID NO: 30082 - protein, 628 aa, Homo sapiens
MGVQGFQDYIEKHCPSAVVPVELQKLARGSLVGGGRQRPPQTPLRLLVDADNCLHRLYGGFYTDWVSGGQWNHMLGYLAALAKACFGGNIELFVFFNGALEKARLHEWVKRQGNERQTAQQIVSHVQNKGTPPPKVWFLPPVCMAHCIRLALIRFHVKVAQSIEDHHQEVIGFCRENGFHGLVAYDSDYALCNIPYYFSAHALKLSRNGKSLTTSQYLMHEVAKQLDLNPNRFPIFAALLGNHILPDEDLASFHWSLLGPEHPLASLKVRAHQLVLPPCDVVIKAVADYVRNIQDTSDLDAIAKDVFQHSQSRTDDKVIRFKRAIGYYSATSKPMSFHPPHYLAARPGPFGMPGMVPPHVPPQMLNIPQTSLQAKPVAPQVPSPGGAPGQGPYPYSLSEPAPLTLDTSGKNLTEQNSYSNIPHEGKHTPLYERSSPINPAQSGSPNHVDSAYFPGSSTSSSSDNDEGSGGATNHISGNKIGWEKTGSHSEPQARGDPGDQTKAEGSSTASSGSQLAEGKGSQMGTVQPIPCLLSMPTRNHMDITTPPLPPVAPEVLRVAEHRHKKGLMYPYIFHVLTKVLSKGPWSGFCYLMSGHSYGCFVLLSFFEPFFCLTNLLETKFTFPFLNIE

SEQ ID NO: 30083 - protein, 1072 aa, Homo sapiens
MGVQGFQDYIEKHCPSAVVPVELQKLARGSLVGGGRQRPPQTPLRLLVDADNCLHRLYGGFYTDWVSGGQWNHMLGYLAALAKACFGGNIELFVFFNGALEKARLHEWVKRQGNERQTAQQIVSHVQNKGTPPPKVWFLPPVCMAHCIRLALIRFHVKVAQSIEDHHQEVIGFCRENGFHGLVAYDSDYALCNIPYYFSAHALKLSRNGKSLTTSQYLMHEVAKQLDLNPNRFPIFAALLGNHILPDEDLASFHWSLLGPEHPLASLKVRAHQLVLPPCDVVIKAVADYVRNIQDTSDLDAIAKDVFQHSQSRTDDKVIRFKRAIGYYSATSKPMSFHPPHYLAARPGPFGMPGMVPPHVPPQMLNIPQTSLQAKPVAPQVPSPGGAPGQGPYPYSLSEPAPLTLDTSGKNLTEQNSYSNIPHEGKHTPLYERSSPINPAQSGSPNHVDSAYFPGSSTSSSSDNDEGSGGATNHISGNKIGWEKTGSHSEPQARGDPGDQTKAEGSSTASSGSQLAEGKGSQMGTVQPIPCLLSMPTRNHMDITTPPLPPVAPEVLRVAEHRHKKGLMYPYIFHVLTKGEIKIAVSIEDEANKDLPPAALLYRPVRQYVYGVLFSLAESRKKTERLAFRKNRLPPEFSPVIIKEWAAYKGKSPQTPELVEALAFREWTCPNLKRLWLGKAVEDKNRRMRAFLACMRSDTPAMLNPANVPTHLMVLCCVLRYMVQWPGARILRRQELDAFLAQALSPKLYEPDQLQELKIENLDPRGIQLSALFMSGVDMALFANDACGQPIPWEHCCPWMYFDGKLFQSKLLKASREKTPLIDLCDGQADQAAKVEKMRQSVLEGLSFSRQSHTLPFPPPPALPFYPASAYPRHFGPVPPSQGRGRGFAGVQPIPSQGGKLEIAGTVVGHWAGSRRGRGGRGPFPLQVVSVGGPARGRPRGVISTPVIRTFGRGGRYYGRGYKNQAAIQGRPPYAASAEEVAKELKSKSGESKSSAMSSDGSLAENGVMAEEKPAPQMNGSTGDARAPSHSESALNNDSKTCNTNPHLNALSTDSACRREAALEAAVLNKEE

SEQ ID NO: 30084 - protein, 651 aa, Homo sapiens
MGVQGFQDYIEKHCPSAVVPVELQKLARGSLVGGGRQRPPQTPLRLLVDADNCLHRLYGGFYTDWVSGGQWNHMLGYLAALAKACFGGNIELFVFFNGALEKARLHEWVKRQGNERQTAQQIVSHVQNKGTPPPKVWFLPPVCMAHCIRLALIRFHVKVAQSIEDHHQEVIGFCRENGFHGLVAYDSDYALCNIPYYFSAHALKLSRNGKSLTTSQYLMHEVAKQLDLNPNRFPIFAALLGNHILPDEDLASFHWSLLGPEHPLASLKVRAHQLVLPPCDVVIKAVADYVRNIQDTSDLDAIAKDVFQHSQSRTDDKVIRFKRAIGYYSATSKPMSFHPPHYLAARPGPFGMPGMVPPHVPPQMLNIPQTSLQAKPVAPQVPSPGGAPGQGPYPYSLSEPAPLTLDTSGKNLTEQNSYSNIPHEGKHTPLYERSSPINPAQSGSPNHVDSAYFPGSSTSSSSDNDEGSGGATNHISGNKIGWEKTGSHSEPQARGDPGDQTKAEGSSTASSGSQLAEGKGSQMGTVQPIPCLLSMPTRNHMDITTPPLPPVAPEVLRVAEHRHKKGLMYPYIFHVLTKGEIKIAVSIEDEANKDLPPAALLYRPVRQYVYGVLFSLAESRKKTERLAFRKNRLPPECMYCNNPLFVFLGTS

SEQ ID NO: 30085 - protein, 1146 aa, Homo sapiens
MGVQGFQDYIEKHCPSAVVPVELQKLARGSLVGGGRQRPPQTPLRLLVDADNCLHRLYGGFYTDWVSGGQWNHMLGYLAALAKACFGGNIELFVFFNGALEKARLHEWVKRQGNERQTAQQIVSHVQNKGTPPPKVWFLPPVCMAHCIRLALIRFHVKVAQSIEDHHQEVIGFCRENGFHGLVAYDSDYALCNIPYYFSAHALKLSRNGKSLTTSQYLMHEVAKQLDLNPNRFPIFAALLGNHILPDEDLASFHWSLLGPEHPLASLKVRAHQLVLPPCDVVIKAVADYVRNIQDTSDLDAIAKDVFQHSQSRTDDKVIRFKRAIGYYSATSKPMSFHPPHYLAARPGPFGMPGMVPPHVPPQMLNIPQTSLQAKPVAPQVPSPGGAPGQGPYPYSLSEPAPLTLDTSGKNLTEQNSYSNIPHEGKHTPLYERSSPINPAQSGSPNHVDSAYFPGSSTSSSSDNDEGSGGATKPFQLYLQKNFVFHKENSIVLCSRILRHGHISGNKIGWEKTGSHSEPQARGDPGDQTKAEGSSTASSGSQLAEGKGSQMGTVQPIPCLLSMPTRNHMDITTPPLPPVAPEVLRVAEHRHKKGLMYPYIFHVLTKGEIKIAVSIEDEANKDLPPAALLYRPVRQYVYGVLFSLAESRKKTERLAFRKNRLPPEFSPVIIKEWAAYKGKSPQTPELVEALAFREWTCPNLKRLWLGKAVEDKNRRMRAFLACMRSDTPAMLNPANVPTHLMVLCCVLRYMVQWPGARILRRQELDAFLAQALSPKLYEPDQLQELKIENLDPRGIQLSALFMSGVDMALFANDACGQPIPWEHCCPWMYFDGKLFQSKLLKASREKTPLIDLCDGQADQAAKVEKMRQSVLEGLSFSRQSHTLPFPPPPALPFYPASAYPRHFGPVPPSQGRGRGFAGVCGFGGPYGETVATGPYRAFRVAAASGHCGAFSGSDSSRTSKSQGGVQPIPSQGGKLEIAGTVVGHWAGSRRGRGGRGPFPLQVVSVGGPARGRPRGVISTPVIRTFGRGGRYYGRGYKNQAAIQGRPPYAASAEEVAKELKSKSGESKSSAMSSDGSLAENGVMAEEKPAPQMNGSTGDARAPSHSESALNNDSKTCNTNPHLNALSTDSACRREAALEAAVLNKEE

SEQ ID NO: 30086 - protein, 1515 aa, Homo sapiens
MTEVQAMVEFSVELNKFYNVDLFQRGFYQIRASMKIPSRIPHRVEASLLHATGMTLAFPASVHDSLICSKTFQILYKNEEVVLNDVMIFKVKMLLDERKIEETLEEMNFLLSLDLHFTDGDYSADDLNALQLISSRTLKLHFSPHRGLHHHVNVMFDYFHLSVVSVTVHASLVALHQPLISFPRPVKTTWLNRNAPAQNKDSVIPTLESVVFGINYTKQLSPDGCSFIIADSFLHHAYRFHYTLCATLLLAFKGLHSYFITVTEEIPSCQKLELEEMDVEARLTELCEEVKKIENPDELAELINMNLAQLCSLLMALWGQFLEVITLHEELRILLAQEHHTLRVRRFSEAFFCFEHPREAAIAYQELHAQSHLQMCTAIKNTSFCSSLPPLPIECSELDGDLNSLPIIFEDRYLDSVTEDLDAPWMGIQNLQRSESSKMDKYETEESSVAGLSSPELKVRPAGASSIWYTEGEKQLTKSLKGKNEESNKSKVKVTKLMKTMKSENTKKLIKQNSKDSVVLVGYKCLKSTASNDLIKCFEGNPSHSQKEGLDPTICGYNFDPKTYMRQTSQKEASCLPTNTERTEQKSPDIENVQPDQFDPLNSGNLNLCANLSISGKLDISQDDSEITQMEHNLASRRSSDDCHDHQTTPSLGVRTIEIKPSNKDPFSGENITVKLGPWTELRQEEILVDNLLPNFESLESNGKSKSIEITFEKEALQEAKCLSIGESLTKLRSNLPAPSTKEYHVVVSGDTIKLPDISATYASSRFSDSGVESEPSSFATHPNTDLVFETVQGQGPCNSERLFPQLLMKPDYNVKFSLGNHCTESTSAISEIQSSLTSINSLPSDDELSPDENSKKSVVPECHLNDSKTVLNLGTTDLPKCDDTKKSSITLQQQSVVFSGNLDNETVAIHSLNSSIKDPLQFVFSDEETSSDVKSSCSSKPNLDTMCKGFQSPDKSNNSTGTAITLNSKLICLGTPCVISGSISSNTDVSEDRTMKKNSDVLNLTQMYSEIPTVESETHLGTSDPFSASTDIVKQGLVENYFGSQSSTDISDTCAVSYSNALSPQKETSEKEISNLQQEQDKEDEEEEQDQQMVQNGYYEETDYSALDGTINAHYTSRDELMEERLTKSEKINSDYLRDGINMPTVCTSGCLSFPSAPRESPCNVKYSSKSKFDAITKQPSSTSYNFTSSISWYESSPKPQIQAFLQAKEELKLLKLPGFMYSEVPLLASSVPYFSVEEEDGSEDGVHLIVCVHGLDGNSADLRLVKTYIELGLPGGRIDFLMSERNQNDTFADFDSMTDRLLDEIIQYIQIYSLTVSKISFIGHSLGNLIIRSVLTRPRFKYYLNKLHTFLSLSGPHLGTLYNSSALVNTGLWFMQKWKKSGSLLQLTCRDHSDPRQTFLYKLSNKAGLHYFKNVVLVGSLQDRYVPYHSARIEMCKTALKDKQSGQIYSEMIHNLLRPVLQSKDCNLVRYNVINALPNTADSLIGRAAHIAVLDSEIFLEKFFLVAALKYFQ

SEQ ID NO: 30087 - protein, 1319 aa, Homo sapiens
MTEVQAMVEFSVELNKFYNVDLFQRGFYQIRASMKIPSRIPHRVEASLLHATGMTLAFPASVHDSLICSKTFQILYKNEEVVLNDVMIFKVKMLLDERKIEETLEEMNFLLSLDLHFTDGDYSADDLNALQLISSRTLKLHFSPHRGLHHHVNVMFDYFHLSVVSVTVHASLVALHQPLISFPRPVKTTWLNRNAPAQNKDSVIPTLESVVFGINYTKQLSPDGCSFIIADSFLHHAYRFHYTLCATLLLAFKGLHSYFITVTEEIPSCQKLELEEMDVEARLTELCEEVKKIENPDELAELINMNLAQLCSLLMALWGQFLEVITLHEELRILLAQEHHTLRVRRFSEAFFCFEHPREAAIAYQELHAQSHLQMCTAIKNTSFCSSLPPLPIECSELDGDLNSLPIIFEDRYLDSVTEGKLDISQDDSEITQMEHNLASRRSSDDCHDHQTTPSLGVRTIEIKPSNKDPFSGENITVKLGPWTELRQEEILVDNLLPNFESLESNGKSKSIEITFEKEALQEAKCLSIGESLTKLRSNLPAPSTKEYHVVVSGDTIKLPDISATYASSRFSDSGVESEPSSFATHPNTDLVFETVQGQGPCNSERLFPQLLMKPDYNVKFSLGNHCTESTSAISEIQSSLTSINSLPSDDELSPDENSKKSVVPECHLNDSKTVLNLGTTDLPKCDDTKKSSITLQQQSVVFSGNLDNETVAIHSLNSSIKDPLQFVFSDEETSSDVKSSCSSKPNLDTMCKGFQSPDKSNNSTGTAITLNSKLICLGTPCVISGSISSNTDVSEDRTMKKNSDVLNLTQMYSEIPTVESETHLGTSDPFSASTDIVKQGLVENYFGSQSSTDISDTCAVSYSNALSPQKETSEKEISNLQQEQDKEDEEEEQDQQMVQNGYYEETDYSALDGTINAHYTSRDELMEERLTKSEKINSDYLRDGINMPTVCTSGCLSFPSAPRESPCNVKYSSKSKFDAITKQPSSTSYNFTSSISWYESSPKPQIQAFLQAKEELKLLKLPGFMYSEVPLLASSVPYFSVEEEDGSEDGVHLIVCVHGLDGNSADLRLVKTYIELGLPGGRIDFLMSERNQNDTFADFDSMTDRLLDEIIQYIQIYSLTVSKISFIGHSLGNLIIRSVLTRPRFKYYLNKLHTFLSLSGPHLGTLYNSSALVNTGLWFMQKWKKSGSLLQLTCRDHSDPRQTFLYKLSNKAGLHYFKNVVLVGSLQDRYVPYHSARIEMCKTALKDKQSGQIYSEMIHNLLRPVLQSKDCNLVRYNVINALPNTADSLIGRAAHIAVLDSEIFLEKFFLVAALKYFQ

SEQ ID NO: 30088 - protein, 1302 aa, Homo sapiens
MTEVQAMVEFSVELNKFYNVDLFQRGKTFQILYKNEEVVLNDVMIFKVKMLLDERKIEETLEEMNFLLSLDLHFTDGDYSADDLNALQLISSRTLKLHFSPHRGLHHHVNVMFDYFHLSVVSVTVHASLVALHQPLISFPRPVKTTWLNRNAPAQNKDSVIPTLESVVFGINYTKQLSPDGCSFIIADSFLHHAYRFHYTLCATLLLAFKGLHSYFITVTEEIPSCQKLELAKANMQLLYERLLRRKQLRTQKDNHLEEMDVEARLTELCEEVKKIENPDELAELINMNLAQLCSLLMALWGQFLEVITLHEELRILLAQEHHTLRVRRFSEAFFCFEHPREAAIAYQELHAQSHLQMCTAIKNTSFCSSLPPLPIECSELDGDLNSLPIIFEDRYLDSVTEGKLDISQDDSEITQMEHNLASRRSSDDCHDHQTTPSLGVRTIEIKPSNKDPFSGENITVKLGPWTELRQEEILVDNLLPNFESLESNGKSKSIEITFEKEALQEAKCLSIGESLTKLRSNLPAPSTKEYHVVVSGDTIKLPDISATYASSRFSDSGVESEPSSFATHPNTDLVFETVQGQGPCNSERLFPQLLMKPDYNVKFSLGNHCTESTSAISEIQSSLTSINSLPSDDELSPDENSKKSVVPECHLNDSKTVLNLGTTDLPKCDDTKKSSITLQQQSVVFSGNLDNETVAIHSLNSSIKDPLQFVFSDEETSSDVKSSCSSKPNLDTMCKGFQSPDKSNNSTGTAITLNSKLICLGTPCVISGSISSNTDVSEDRTMKKNSDVLNLTQMYSEIPTVESETHLGTSDPFSASTDIVKQGLVENYFGSQSSTDISDTCAVSYSNALSPQKETSEKEISNLQQEQDKEDEEEEQDQQMVQNGYYEETDYSALDGTINAHYTSRDELMEERLTKSEKINSDYLRDGINMPTVCTSGCLSFPSAPRESPCNVKYSSKSKFDAITKQPSSTSYNFTSSISWYESSPKPQIQAFLQAKEELKLLKLPGFMYSEVPLLASSVPYFSVEEEDGSEDGVHLIVCVHGLDGNSADLRLVKTYIELGLPGGRIDFLMSERNQNDTFADFDSMTDRLLDEIIQYIQIYSLTVSKISFIGHSLGNLIIRSVLTRPRFKYYLNKLHTFLSLSGPHLGTLYNSSALVNTGLWFMQKWKKSGSLLQLTCRDHSDPRQTFLYKLSNKAGLHYFKNVVLVGSLQDRYVPYHSARIEMCKTALKDKQSGQIYSEMIHNLLRPVLQSKDCNLVRYNVINALPNTADSLIGRAAHIAVLDSEIFLEKFFLVAALKYFQ

SEQ ID NO: 30089 - protein, 1469 aa, Homo sapiens
MTEVQAMVEFSVELNKFYNVDLFQRGFYQIRASMKIPSRIPHRVEASLLHATGMTLAFPASVHDSLICSKTFQILYKNEEVVLNDVMIFKVKMLLDERKIEETLEEMNFLLSLDLHFTDGDYSADDLNALQLISSRTLKLHFSPHRGLHHHVNVMFDYFHLSVVSVTVHASLVALHQPLISFPRPVKTTWLNRNAPAQNKDSVIPTLESVVFGINYTKQLSPDGCSFIIADSFLHHAYRFHYTLCATLLLAFKGLHSYFITVTEEIPSCQKLELEEMDVEARLTELCEEVKKIENPDELAELINMNLAQLCSLLMALWGQFLEVITLHEELRILLAQEHHTLRVRRFSEAFFCFEHPREAAIAYQELHAQSHLQMCTAIKNTSFCSSLPPLPIECSELDGDLNSLPIIFEDRYLDSVTEDLDAPWMGIQNLQRSESSKMDKYETEESSVAGLSSPELKVRPAGASSIWYTEGEKQLTKSLKGKNEESNKSKVKVTKLMKTMKSENTKKLIKQNSKDSVVLVGYKCLKSTASNDLIKCFEGNPSHSQKEGLDPTICGYNFDPKTYMRQTSQKEASCLPTNTERTEQKSPDIENVQPDQFDPLNSGNLNLCANLSISGKLDISQDDSEITQMEHNLASRRSSDDCHDHQTTPSLGVRTIEIKPSNKDPFSGENITVKLGPWTELRQEEILVDNLLPNFESLESNGKSKSIEITFEKEALQEAKCLSIGESLTKLRSNLPAPSTKEYHVVVSGDTIKLPDISATYASSRFSDSGVESEPSSFATHPNTDLVFETVQGQGPCNSERLFPQLLMKPDYNVKFSLGNHCTESTSAISEIQSSLTSINSLPSDDELSPDENSKKSVVPECHLNDSKTVLNLGTTDLPKCDDTKKSSITLQQQSVVFSGNLDNETVAIHSLNSSIKDPLQFVFSDEETSSDVKSSCSSKPNLDTMCKGFQSPDKSNNSTGTAITLNSKLICLGTPCVISGSISSNTDVSEDRTMKKNSDVLNLTQMYSEIPTVESETHLGTSDPFSASTDIVKQGLVENYFGSQSSTDISDTCAVSYSNALSPQKETSEKEISNLQQEQDKEDEEEEQDQQMVQNGYYEETDYSALDGTINAHYTSRDELMEERLTKSEKINSDYLRDGINMPTVCTSGCLSFPSAPRESPCNVKYSSKSKFDAITKQPSSTSYNFTSSISWYESSPKPQIQAFLQAKEELKLLKLPGFMYSEVPLLASSVPYFSVEEEDGSEDGVHLIVCVHGLDGNSADLRLVKTYIELGLPGGRIDFLMSERNQNDTFADFDSMTDRLLDEIIQYIQIYSLTVSKISFIGHSLGNLIIRSVLTRPRFKYYLNKLHTFLSLSGPHLGTLYNSSALVNTGLWFMQKWKKSGSLLQLTCRDHSDPRQTFLYKLSNKAGLHYFKNVVLVGSLQDRYVPYHSARIEMCKTALKDKQSGNGIKLFQRVIGINELFPKFFL

SEQ ID NO: 30090 - protein, 338 aa, Homo sapiens
MLSPTFVLWDVGYPLYTYGSICIIALIIWQVKKSCQKLSLVPNRSCCRCHRRVQQKSGDRTSRARRTSQEEAEKLWKLLFLMKSQGWLPQEGSVRRILCADPCCQICNVMALEIKQLLAGENNQISLTSLGPSQGSSCLEALSTSSVSFKHSQDLGSPKSKELSLASVTPTLSQLMDQKSLTQSAARSAGADSVQDSWADHFQRGQRSQVPAVSQVMGSLSSNFEKPGIPLSQQERTKNNSKFVLENQEAPEVGLDNKMKLFLHWINPEMKDRRHEESILLSKAETVTQDRTKNIEKSPTVTKDHVWGATTQKTTEDPEAQPPSTEEEGLIFCDAPSA

SEQ ID NO: 30091 - protein, 342 aa, Homo sapiens
MDLWNWDEASPQEVPPGNKLAGLEGAKLGFCFPDLALQGDTPTATAETCWKGTSSSLASFPQLDWGSALLHPEVPWGAEPDSQALPWSGDWTDMACTAWDSWSGASQTLGPAPLGPGPIPAAGSEGAAGQNCVPVAGEATSWSRAQAAGSNTSWDCSVGPDGDTYWGSGLGGEPRTDCTISWGGPAGPDCTTSWNPGLHAGGTTSLKRYQSSALTVCSEPSPQSDRASLARCPKTNHRGPIQLWQFLLELLHDGARSSCIRWTGNSREFQLCDPKEVARLWGERKRKPGMNYEKLSRGLRYYYRRDIVRKSGGRKYTYRFGGRVPSLAYPDCAGGGRGAETQ

SEQ ID NO: 30092 - protein, 370 aa, Homo sapiens
MDLWNWDEASPQEVPPGNKLAGLGRLPRLPQRVWGGCPGGASADPNPLSPAEGAKLGFCFPDLALQGDTPTATAETCWKGTSSSLASFPQLDWGSALLHPEVPWGAEPDSQALPWSGDWTDMACTAWDSWSGASQTLGPAPLGPGPIPAAGSEGAAGQNCVPVAGEATSWSRAQAAGSNTSWDCSVGPDGDTYWGSGLGGEPRTDCTISWGGPAGPDCTTSWNPGLHAGGTTSLKRYQSSALTVCSEPSPQSDRASLARCPKTNHRGPIQLWQFLLELLHDGARSSCIRWTGNSREFQLCDPKEVARLWGERKRKPGMNYEKLSRGLRYYYRRDIVRKSGGRKYTYRFGGRVPSLAYPDCAGGGRGAETQ

SEQ ID NO: 30093 - protein, 538 aa, Homo sapiens
MRHVQAEPSPSSEPEAGPSQPPVRQGALQGGLLMGYSPAGGATSPGVYQVSIFSPPAGTSEPHRALKRQAPSTEGPRELKRGPGLGAREGLPPEEPSTVGLLGPEGPGLGLGVASQHFSHRGLCVVEQRSSVTSSWTSGAWSPPCPPSNASCNTLHTRDWASPDPGGQGSLGESPGPAPPGQLHTLDTDLHSLAQIGGKSPVAGVGNGGSLWPRESPGTANGHSPEHTPPGPGPPGPCPTKRRLLPAGEAPDVSSEEEGPAPRRRRGSLGHPTAANSSDAKATPFWSHLLPGPKEPVLDPTDCGPMGRRLKGARRLKLSPLRSLRKGPGLLSPPSASPVPTPAVSRTLLGNFEESLLRGRFAPSGHIEGFTAEIGASGSYCPQHVTLPVTVTFFDVSEQNAPAPFLGIVDLNPLGRKGYSVPKVGTVQVTLFNPNQTVVKMFLVTFDFSDMPAAHMTFLRHRLFLVPVGEEGNANPTHRLLCYLLHLRFRSSRSGRLSLHGDIRLLFSRRSLELDTGLPYELQAVTEAPHNPRYSPLP

SEQ ID NO: 30094 - protein, 442 aa, Homo sapiens
MRHVQAEPSPSSEPEAGPSQPPVRQGALQGGLLMGYSPAGGATSPGVYQVSIFSPPAGTSEPHRALKRQAPSTEGPRELKRGPGLGAREGLPPEEPSTVGLLGPEGPGLGLGVASQHFSHRGLCVVEQRSSVTSSWTSGAWSPPCPPSNASCNTLHTRDWASPDPGGQGSLGESPGPAPPGQLHTLDTDLHSLAQIGGKSPVAGVGNGGSLWPRESPGTANGHSPEHTPPGPGPPGPCPTKRRLLPAGEAPDVSSEEEGPAPRRRRGSLGHPTAANSSDAKATPFWSHLLPGPKEPVLDPTDCGPMGRRLKGARRLKLSPLRSLRKGPGLLSPPSASPVPTPAVSRTLLGNFEESLLRGRFAPSGHIEGFTAEIGASGSYCPQHVTLPVTVTFFDVSEQNAPAPFLGIVDLNPLGRKGYSVPKVGTVQVTLFNPNPFTSPTL

SEQ ID NO: 30095 - protein, 233 aa, Homo sapiens
MGRRLKGARRLKLSPLRSLRKGPGLLSPPSASPVPTPAVSRTLLGNFEESLLRGRFAPSGHIEGFTAEIGASGSYCPQHVTLPVTVTFFDVSEQNAPAPFLGIVDLNPLGRKGYSVPKVGTVQVTLFNPNQTVVKMFLVTFDFSDMPAAHMTFLRHRLFLVPVGEEGNANPTHRLLCYLLHLRFRSSRSGRLSLHGDIRLLFSRRSLELDTGLPYELQAVTEAPHNPRYSPLP

SEQ ID NO: 30096 - protein, 172 aa, Homo sapiens
MSSLVKEDLEKKLFKPLSQNLYEFIEIEFSVQDRYYLCVSVTKKEEVKIVMVKHYRIGLDEKYEVTKKWSLNDLQMIDGKEADTDNPFFDLHFKKVYSLEAYSCASKYAFARTVNKLNHAYLKKDLQIVNFDSTYINDDSIWSSNNKDCLVLMRICFYAFNLVCLSLCPLPL

SEQ ID NO: 30097 - protein, 238 aa, Homo sapiens
MLTTLLPILLLSGWAFCSQDASDGLQRLHMLQISYFRDPYHVWYQGNASLGGHLTHVLEGPDTNTTIIQLQPLQEPESWARTQSGLQSYLLQFHGLVRLVHQERTLAFPLTIRCFLGCELPPEGSRAHVFFEVAVNGSSFVSFRPERALWQADTQVTSGVVTFTLQQLNAYNRTRYELREFLEDTCVQYVQKHISAENTKGSQTSRSYTSLVLGVLVGSFIIAGVAVGIFLCTGGRRC

SEQ ID NO: 30098 - protein, 433 aa, Homo sapiens
MSSDDRHLGSSCGSFIKTEPSSPSSGIDALSHHSPSGSSDASGGFGLALGTHANGLDSPPMFAGAGLGGTPCRKSYEDCASGIMEDSAIKCEYMLNAIPKRLCLVCGDIASGYHYGVASCEACKAFFKRTIQGNIEYSCPATNECEITKRRRKSCQACRFMKCLKVGMLKEGVRLDRVRGGRQKYKRRLDSESSPYLSLQISPPAKKPLTKIVSYLLVAEPDKLYAMPPPGMPEGDIKALTTLCDLADRELVVIIGWAKHIPGFSSLSLGDQMSLLQSAWMEILILGIVYRSLPYDDKLVYAEDYIMDEEHSRLAGLLELYRAILQLVRRYKKLKVEKEEFVTLKALALANSDSMYIEDLEAVQKLQDLLHEALQDYELSQRHEEPWRTGKLLLTLPLLRQTAAKAVQHFYSVKLQGKVPMHKLFLEMLEAKV

SEQ ID NO: 30099 - protein, 508 aa, Homo sapiens
MSSDDRHLGSSCGSFIKTEPSSPSSGIDALSHHSPSGSSDASGGFGLALGTHANGLDSPPMFAGAGLGGTPCRKSYEDCASGIMEDSAIKCEYMLNAIPKRLCLVCGDIASGYHYGVASCEACKAFFKRTIQGNIEYSCPATNECEITKRRRKSCQACRFMKCLKVGMLKEGVRLDRVRGGRQKYKRRLDSESSPYLSLQISPPAKKPLTKIVSYLLVAEPDKLYAMPPPGMPEGDIKALTTLCDLADRELVVIIGWAKHIPGFSSLSLGDQMSLLQSAWMEILILGIVYRSLPYDDKLVYAEDYIMDEEHSRLAGLLELYRAILQLVRRYKKLKVEKEEFVTLKALALANSDSMYIEDLEAVQKLQDLLHEALQDYELSQRHEEPWRTGKLLLTLPLLRQTAAKAVQHFYSVKLQGKVPMHKLFLEMLEAKVGQEQLRGSPKDERMSSHDGKCPFQSAAFTSRDQSNSPGIPNPRPSSPTPLNERGRQISPSTRTPGGQGKHLWLTM

SEQ ID NO: 30100 - protein, 500 aa, Homo sapiens
MSSDDRHLGSSCGSFIKTEPSSPSSGIDALSHHSPSGSSDASGGFGLALGTHANGLDSPPMFAGAGLGGTPCRKSYEDCASGIMEDSAIKCEYMLNAIPKRLCLVCGDIASGYHYGVASCEACKAFFKRTIQGNIEYSCPATNECEITKRRRKSCQACRFMKCLKVGMLKEGVRLDRVRGGRQKYKRRLDSESSPYLSLQISPPAKKPLTKIVSYLLVAEPDKLYAMPPPGMPEGDIKALTTLCDLADRELVVIIGWAKHIPGFSSLSLGDQMSLLQSAWMEILILGIVYRSLPYDDKLVYAEDYIMDEEHSRLAGLLELYRAILQLVRRYKKLKVEKEEFVTLKALALANSDSMYIEDLEAVQKLQDLLHEALQDYELSQRHEEPWRTGKLLLTLPLLRQTAAKAVQHFYSVKLQGKVPMHKLFLEMLEAKAWARADSLQEWRPLEQVPSPLHRATKRQHVHFLTPLPPPPSVAWVGTAQAGYHLEVFLPQRAGWPRAA

SEQ ID NO: 30101 - protein, 1061 aa, Homo sapiens
MPNEGIPHSSQTQEQDCLQSQPVSNNEEMAIKQESGGDGEVEEYLSFRSVGDGLSTSAVGCASAAPRRGPALLHIDRHQIQAVEPSAQALELQGLGVDVYDQDVLEQGVLQQVDNAIHEASRASQLVDVEKEYRSVLDDLTSCTTSLRQINKIIEQLSPQAATSRDINRKLDSVKRQKYNKEQQLKKITAKQKHLQAILGGAEVKIELDHASLEEDAEPGPSSLGSMLMPVQETAWEELIRTGQMTPFGTQIPQKQEKKPRKIMLNEASGFEKYLADQAKLSFERKKQGCNKRAARKAPAPVTPPAPVQNKNKPNKKARVLSKKEERLKKHIKKLQKRALQFQGKVGLPKARRPWESDMRPEAEGDSEGEESEYFPTEEEEEEEDDEVEGAEADLSGDGTDYELKPLPKGGKRQKKVPVQEIDDDFFPSSGEEAEAASVGEGGGGGRKVGRYRDDGDEDYYKQRLSPKMPRTLSLHEITDLLETDDSIEASAIVIQPPENATAPVSDEESGDEEGGTINNLPGSLLHTAAYLIQDGSDAESDSDDPSYAPKDDSPDEVPSTFTVQQPPPSRRRKMTKILCKWKKADLTVQPVAGRVTAPPNDFFTVMRTPTEILELFLDDEVIELIVKYSNLYACSKGVHLGLTSSEFKCFLGIIFLSGYVSVPRRRMFWEQRTDVHNVLVSAAMRRDRFETIFSNLHVADNANLDPVDKFSKLRPLISKLNERCMKFVPNETYFSFDEFMVPYFGRHGCKQFIRGKPIRFGYKFWCGATCLGYICWFQPYQGKNPNTKHEEYGVGASLVLQFSEALTEAHPGQYHFVFNNFFTSIALLDKLSSMGHQATGTVRKDHIDRVPLESDVALKKKERGTFDYRIDGKGNIVCRWNDNSVVTVASSGAGIHPLCLVSRYSQKLKKKIQVQQPNMIKVYNQFMGGVDRADENIDKYRASIRGKKWYSSPLLFCFELVLQNAWQLHKTYDEKPVDFLEFRRRVVCHYLETHGHPPEPGQKGRPQKRNIDSRYDGINHVIVKQGKQTRCAECHKNTTFRCEKCDVALHVKCSVEYHTE

SEQ ID NO: 30102 - protein, 840 aa, Homo sapiens
MMSIQEKSKENSSKVTKKSDDKNSETEIQDSQKNLAKKSGPKETIKSQAKSSSESKINQPELETRMSTRSSKAASNDKATKSINKNTVTVRGYSQESTKKKLSQKKLVHENPKANEQLNRRSQRLQQLTEVSRRSLRSREIQGQVQAVKQSLPPTKKEQCSSTQSKSNKTSQKHVKRKVLEVKSDSKEDENLVINEVINSPKGKKRKVEHQTACACSSQCTQGSEKCPQKTTRRDETKPVPVTSEVKRSKMATSVVPKKNEMKKSVHTQVNTNTTLPKSPQPSVPEQSDNELEQAGKSKRGSILQLCEEIAGEIESDNVEVKKESSQMESVKEEKPTEIKLEETSVERQILHQKETNQDVQCNRFFPSRKTKPVKCILNGINSSAKKNSNWTKIKLSKFNSVQHNKLDSQVSPKLGLLRTSFSPPALEMHHPVTQSTFLGTKLHDRNITCQQEKMKEINSEEVKINDITVEINKTTERAPENCHLANEIKPSDPPLDNQMKHSFDSASNKNFSQCLESKLENSPVENVTAASTLLSQAKIDTGENKFPGSAPQQHSILSNQTSKSSDNRETPRNHSLPKCNSHLEITIPKDLKLKEAEKTDEKQLIIDAGQKRFGAVSCNVCGMLYTASNPEDETQHLLFHNQFISAVKYVGWKKERILAEYPDGRIIMVLPEDPKYALKKVDEIREMVDNDLGFQQAPLMCYSRTKTLLFISNDKKVVGCLIAEHIQWGYRVIEEKLPVIRSEEEKVRFERQKAWCCSTLPEPAICGISRIWVFSMMRRKKIASRMIECLRSNFIYGSYLSKEEIAFSDPTPDGKLFATQYCGTGQFLVYNFINGQNST

SEQ ID NO: 30103 - protein, 701 aa, Homo sapiens
MMSIQEKSKENSSKVTKKSDDKNSETEIQDSQKNLAKKSGPKETIKSQAKSSSESKINQPELETRMSTRSSKAASNDKATKSINKNTVTVRGYSQESTKKKLSQKKLVHENPKANEQLNRRSQRLQQLTEVSRRSLRSREIQGQVQAVKQSLPPTKKEQCSSTQSKSNKTSQKHVKRKVLEVKSDSKEDENLVINEVINSPKGKKRKVEHQTACACSSQCTQGSEKCPQKTTRRDETKPVPVTSEVKRSKMATSVVPKKNEMKKSVHTQVNTNTTLPKSPQPSVPEQSDNELEQAGKSKRGSILQLCEEIAGEIESDNVEVKKESSQMESVKEEKPTEIKLEETSVERQILHQKETNQDVQCNRFFPSRKTKPVKCILNGINSSAKKNSNWTKIKLSKFNSVQHNKLDSQVSPKLGLLRTSFSPPALEMHHPVTQSTFLGTKLHDRNITCQQEKMKEINSEEVKINDITVEINKTTERAPENCHLANEIKPSDPPLDNQMKHSFDSASNKNFSQCLESKLENSPVENVTAASTLLSQAKIDTGENKFPGSAPQQHSILSNQTSKSSDNRETPRNHSLPKCNSHLEITIPKDLKLKEAEKTDEKQLIIDAGQKRFGAVSCNVCGMLYTASNPEDETQHLLFHNQFISAVKYVVLLINHHECGSEEEFITSLFLSMFNFRYTQRSFSFPIRFLEGLEERKNSG

SEQ ID NO: 30104 - protein, 846 aa, Homo sapiens
MGIQGLLQFIKEASEPIHVRKYKGQVVAVDTYCWLHKGAIACAEKLAKGEPTDRYVGFCMKFVNMLLSHGIKPILVFDGCTLPSKKEVERSRRERRQANLLKGKQLLREGKVSEARECFTRSINITHAMAHKVIKAARSQGVDCLVAPYEADAQLAYLNKAGIVQAIITEDSDLLAFGCKKVILKMDQFGNGLEIDQARLGMCRQLGDVFTEEKFRYMCILSGCDYLSSLRGIGLAKACKVLRLANNPDIVKVIKKIGHYLKMNITVPEDYINGFIRANNTFLYQLVFDPIKRKLIPLNAYEDDVDPETLSYAGQYVDDSIALQIALGNKDINTFEQIDDYNPDTAMPAHSRSHSWDDKTCQKSANVSSIWHRNYSPRPESGTVSDAPQLKENPSTVGVERVISTKGLNLPRKSSIVKRPRSAELSEDDLLSQYSLSFTKKTKKNSSEGNKSLSFSEVFVPDLVNGPTNKKSVSTPPRTRNKFATFLQRKNEESGAVVVPGTRSRFFCSSDSTDCVSNKVSIQPLDETAVTDKENNLHESEYGDQEGKRLVDTDVARNSSDDIPNNHIPGDHIPDKATVFTDEESYSFESSKFTRTISPPTLGTLRSCFSWSGGLGDFSRTPSPSPSTALQQFRRKSDSPTSLPENNMSDVSQLKSEESSDDESHPLREEACSSQSQESGEFSLQSSNASKLSQCSSKDSDSEESDCNIKLLDSQSDQTSKLRLSHFSKKDTPLRNKVPGLYKSSSADSLSTTKIKPLGPARASGLSKKPASIQKRKHHNAENKPGLQIKLNELWKNFGFKKDSEKLPPCKKPLSPVRDNIQLTPEAEEDIFNKPECGRVQRAIFQ

SEQ ID NO: 30105 - protein, 803 aa, Homo sapiens
MGIQGLLQFIKEASEPIHVRKYKGQVVAVDTYCWLHKGAIACAEKLAKGEPTDRYVGFCMKFVNMLLSHGIKPILVFDGCTLPSKKEVERSRRERRQANLLKGKQLLREGKVSEARECFTRSINITHAMAHKVIKAARSQGVDCLVAPYEADAQLAYLNKAGIVQAIITEDSDLLAFGCKKVILKMDQFGNGLEIDQARLGMCRQLGDVFTEEKFRYMCILSGCDYLSSLRGIGLAKACKVLRLANNPDIVKVIKKIGHYLKMNITVPEDYINGFIRANNTFLYQLVFDPIKRKLIPLNAYEDDVDPETLSYAGQYVDDSIALQIALGNKDINTFEQIDDYNPDTAMPAHSRSHSWDDKTCQKSANVSSIWHRNYSPRPESGTVSDAPQLKENPSTVGVERVISTKGLNLPRKSSIVKRPRSAELSEDDLLSQYSLSFTKKTKKNSSEGNKSLSFSEVFVPDLVNGPTNKKSVSTPPRTRNKFATFLQRKNEESGAVVVPGTRSRFFCSSDSTDCVSNKVSIQPLDETAVTDKENNLHESEYGDQEGKRLVDTDVARNSSDDIPNNHIPGDHIPDKATVFTDEESYSFESSKFTRTISPPTLGTLRSCFSWSGGLGDFSRTPSPSPSTALQQFRRKSDSPTSLPENNMSDVSQLKSEESSDDESHPLREEACSSQSQESGEFSLQSSNASKLSQCSSKDSDSEESDCNIKLLDSQSDQTSKLRLSHFSKKDTPLRNKVPGLYKSSSADSLSTTKIKPLGPARASGLSKKPASIQKRKHHNAENKPGLQIKLNELWKNFGFKKF

SEQ ID NO: 30106 - protein, 555 aa, Homo sapiens
MLLFLSVPQPRPPGARTRAGAARVARWRRLRLQQLRRLRGLLRVLRGRPGAGSRRRGRMALCGQAAGAASLPSELIVHIFSFLPAPDRLRASASCSHWRECLFYPALWPQLRICLRVSPAEQPRLEFLMRKCGWFVRELRVEFAAENYLSGGGPGDGGGADTGTGGEEVEALQLSARWLEVLRTYLELVLCVLVSIRNNRNLQKFSLFGDISVLQQQGSLSNTYLSKVDPDGKKIKQIQQLFEEILSNSRQLKWLSCGFMLEIVTPTSLSSLSNAVANTMEHLSLLDNNIPGNSTLITAVELERFVNLHSLALDFCDFTAEMARVLTDSNHVPLQRLSLLVHNVSVMHKSLDNMPNDEHWKALSRKSTSFRVYIMAFDIKSEDMLKILKPSIPLERIHFDSYITCVSGAIVDLISRQYDKFLTHFILMNDVIDTSGFPDLSDNRNEDPLVLLAWRCTKLSLLAIHGYTVWAHNLIAIARLRGSDLKVLEVTEESIDFDQGELADQDVDPVHNLIEQVSLGLGQPWHAVMDIESLSVFTEPNRHFYREMQSFSEDI

SEQ ID NO: 30107 - protein, 89 aa, Homo sapiens; identical to SEQ ID NO: 21365

SEQ ID NO: 30108 - protein, 581 aa, Homo sapiens
MDIIKGNLDGISKPASNSRIRPGSRSSNASLEVLSTEPGSFKVDTASNLNSGKEDHSESSNTENRRTSNDDKQESCSEKIKLAEEGSDEDLDLVQHQIISECSDEPKLKELDSQLQDAIQKMKKLDKILAKKQRREKEIKKQGLEMRIKLWEEIKSAKYSEAWQSKEEMENTKKFLSLTAVSEETVGPSHEEEDTFSSVFHTQIPPEEYEMQMQKLNKDFTCDVERNESLIKSGKKPFSNTEKIELRGKHNQDFIKRNIELAKESRNPVVMVDREKKRLVELLKDLDEKDSGLSSSEGDQSGWVVPVKGYELAVTQHQQLAEIDIKLQELSAASPTISSFSPRLENRNNQKPDRDGERNMEVTPGEKILRNTKEQRDLHNRLREIDEKLKMMKENVLESTSCLSEEQLKCLLDECILKQKSIIKLSSERKKEDIEDVTPVFPQLSRSIISKLLNESETKVQKTEVEDADMLESEECEASKGYYLTKALTGHNMSEALVTEAENMKCLQFSKDVIISDTKDYFMSKTLGIGRLKRPSFLDDPLYGISVSLSSEDQHLKLSSPENTIADEQETKDAAEECKEP

SEQ ID NO: 30109 - protein, 140 aa, Homo sapiens
MIDQLQGTWKSISCENSEDYMKELGIGRASRKLGRLAKPTVTISTDGDVITIKTKSIFKNNEISFKLGEEFEEITPGGHKTKSKVTLDKESLIQVQDWDGKETTITRKLVDGKMVVESTVNSVICTRTYEKVSSNSVSNS

SEQ ID NO: 30110 - protein, 622 aa, Homo sapiens
MSRQTTSVGSSCLDLWREKNDRLVRQAKVAQNSGLTLRRQQLAQDALEGLRGLLHSLQGLPAAVPVLPLELTVTCNFIILRASLAQGFTEDQAQDIQRSLERVLETQEQQGPRLEQGLRELWDSVLRASCLLPELLSALHRLVGLQAALWLSADRLGDLALLLETLNGSQSGASKDLLLLLKTWSPPAEELDAPLTLQDAQGLKDVLLTAFAYRQGLQELITGNPDKALSSLHEAASGLCPRPVLVQVYTALGSCHRKMGNPQRALLYLVAALKEGSAWGPPLLEASRLYQQLGDTTAELESLELLVEALNVPCSSKAPQFLIEVELLLPPPDLASPLHCGTQSQTKHILASRCLQTGRAGDAAEHYLDLLALLLDSSEPRFSPPPSPPGPCMPEVFLEAAVALIQAGRAQDALTLCEELLSRTSSLLPKMSRLWEDARKGTKELPYCPLWVSATHLLQGQAWVQLGAQKVAISEFSRCLELLFRATPEEKEQGAAFNCEQGCKSDAALQQLRAAALISRGLEWVASGQDTKALQDFLLSVQMCPGNRDTYFHLLQTLKRLDRRDEATALWWRLEAQTKGSHEDALWSLPLYLESYLSWIRPSDRDAFLEEFRTSLPKSCDL

SEQ ID NO: 30111 - protein, 323 aa, Homo sapiens
MAEKFDCHYCRDPLQGKKYVQKDGHHCCLKCFDKFCANTCVECRKPIGADSKEVHYKNRFWHDTCFRCAKCLHPLANETFVAKDNKILCNKCTTREDSPKCKGCFKAIVAGDQNVEYKGTVWHKDCFTCSNCKQVIGTGSFFPKGEDFYCVTCHETKFAKHCVKCNKAITSGGITYQDQPWHADCFVCVTCSKKLAGQRFTAVEDQYYCVDCYKNFVAKKCAGCKNPITGKRTVSRVSHPVSKARKPPVCHGKRLPLTLFPSANLRGRHPGGERTCPSWVVVLYRKNRSLAAPRGPGLVKAPVWWPMKDNPGTTTASTAKNAP

SEQ ID NO: 30112 - protein, 280 aa, Homo sapiens
MAEKFDCHYCRDPLQGKKYVQKDGHHCCLKCFDKFCANTCVECRKPIGADSKEVHYKNRFWHDTCFRCAKCLHPLANETFVAKDNKILCNKCTTREDSPKCKGCFKAIVAGDQNVEYKGTVWHKDCFTCSNCKQVIGTGSFFPKGEDFYCVTCHETKFAKHCVKCNKAITSGGITYQDQPWHADCFVCVTCSKKLAGQRFTAVEDQYYCVDCYKNFVAKKCAGCKNPITGFGKGSSVVAYEGQSWHDYCFHCKKCSVNLANKRFVFHQEQVYCPDCAKKL

SEQ ID NO: 30113 - protein, 194 aa, Homo sapiens
MAEKFDCHYCRDPLQGKKYVQKDGHHCCLKCFDKFCANTCVECRKPIGADSKEVHYKNRFWHDTCFRCAKCLHPLANETFVAKDNKILCNKCTTREDSPKCKGCFKAIVAGDQNVEYKGTVWHKDCFTCSNCKQVIGTGSFFPKGEDFYCVTCHETKFAKHCVKCNKGLVKAPVWWPMKDNPGTTTASTAKNAP

SEQ ID NO: 30114 - protein, 309 aa, Homo sapiens
MTFYVASLALELIWMLSSPAGPSSYKVGTMAEKFDCHYCRDPLQGKKYVQKDGHHCCLKCFDKFCANTCVECRKPIGADSKEVHYKNRFWHDTCFRCAKCLHPLANETFVAKDNKILCNKCTTREDSPKCKGCFKAIVAGDQNVEYKGTVWHKDCFTCSNCKQVIGTGSFFPKGEDFYCVTCHETKFAKHCVKCNKAITSGGITYQDQPWHADCFVCVTCSKKLAGQRFTAVEDQYYCVDCYKNFVAKKCAGCKNPITGFGKGSSVVAYEGQSWHDYCFHCKKCSVNLANKRFVFHQEQVYCPDCAKKL

SEQ ID NO: 30115 - protein, 296 aa, Homo sapiens
MASHRHSGPSSYKVGTMAEKFDCHYCRDPLQGKKYVQKDGHHCCLKCFDKFCANTCVECRKPIGADSKEVHYKNRFWHDTCFRCAKCLHPLANETFVAKDNKILCNKCTTREDSPKCKGCFKAIVAGDQNVEYKGTVWHKDCFTCSNCKQVIGTGSFFPKGEDFYCVTCHETKFAKHCVKCNKAITSGGITYQDQPWHADCFVCVTCSKKLAGQRFTAVEDQYYCVDCYKNFVAKKCAGCKNPITGFGKGSSVVAYEGQSWHDYCFHCKKCSVNLANKRFVFHQEQVYCPDCAKKL

SEQ ID NO: 30116 - protein, 419 aa, Homo sapiens
MSCAGRAGPARLAALALLTCSLWPARADNASQEYYTALINVTVQEPGRGAPLTFRIDRGRYGLDSPKAEVRGQVLAPLPLHGVADHLGCDPQTRFFVPPNIKQWIALLQRGNCTFKEKISRAAFHNAVAVVIYNNKSKEEPVTMTHPGTGDIIAVMITELRGKDILSYLEKNISVQMTIAVGTRMPPKNFSRGSLVFVSISFIVLMIISSAWLIFYFIQKIRYTNARDRNQRRLGDAAKKAISKLTTRTVKKGDKETDPDFDHCAVCIESYKQNDVVRILPCKHVFHKSCVDPWLSEHCTCPMCKLNILKALGIVPNLPCTDNVAFDMERLTRTQAVNRRSALGDLAGDNSLGLEPLRTSGISPLPQDGELTPRTGEINIAVTKEWFIIASFGLLSALTLCYMIIRATASLNANEVEWF

SEQ ID NO: 30117 - protein, 384 aa, Homo sapiens
MSCAGRAGPARLAALALLTCSLWPARADNASQEYYTALINVTVQEPGRGAPLTFRIDRGRYGLDSPKAEVRGQVLAPLPLHGVADHLGCDPQTRFFVPPNIKQWIALLQRGNCTFKEKISRAAFHNAVAVVIYNNKSKEEPVTMTHPGTGDIIAVMITELRGKDILSYLEKNISVQMTIAVGTRMPPKNFSRGSLVFVSISFIVLMIISSAWLIFYFIQKIRYTNARDRNQRRLGDAAKKAISKLTTRTVKKGDKETDPDFDHCAVCIESYKQNDVVRILPCKHVFHKSCVDPWLSEHCTCPMCKLNILKALGIVPNLPCTDNVAFDMERLTRTQAVNRRSALGDLAGDNSLGLEPLRTSGISPLPQDGELTPRTGEINIAVTR

SEQ ID NO: 30118 - protein, 559 aa, Homo sapiens
MAASKKAVLGPLVGAVDQGTSSTRFLVFNSKTAELLSHHQVEIKQEFPREGWVEQDPKEILHSVYECIEKTCEKLGQLNIDISNIKAIGVSNQRETTVVWDKITGEPLYNAVVWLDLRTQSTVESLSKRIPGNNNFVKSKTGLPLSTYFSAVKLRWLLDNVRKVQKAVEEKRALFGTIDSWLIWSLTGGVNGGVHCTDVTNASRTMLFNIHSLEWDKQLCEFFGIPMEILPNVRSSSEIYGLMKISHSVKAGALEGVPISGCLGDQSAALVGQMCFQIGQAKNTYGTGCFLLCNTGHKCVFSDHGLLTTVAYKLGRDKPVYYALEGSVAIAGAVIRWLRDNLGIIKTSEEIEKLAKEVGTSYGCYFVPAFSGLYAPYWEPSARGIICGLTQFTNKCHIAFAALEAVCFQTREILDAMNRDCGIPLSHLQVDGGMTSNKILMQLQADILYIPVVKPSMPETTALGAAMAAGAAEGVGVWSLEPEDLSAVTMERFEPQINAEESEIRYSTWKKAVMKSMGWVTTQSPESGDPSIFCSLPLGFFIVSSMVMLIGARYISGIP

SEQ ID NO: 30119 - protein, 524 aa, Homo sapiens
MAASKKAVLGPLVGAVDQGTSSTRFLVFNSKTAELLSHHQVEIKQEFPREGWVEQDPKEILHSVYECIEKTCEKLGQLNIDISNIKAIGVSNQRETTVVWDKITGEPLYNAVVWLDLRTQSTVESLSKRIPGNNNFVKSKTGLPLSTYFSAVKLRWLLDNVRKVQKAVEEKRALFGTIDSWLIWSLTGGVNGGVHCTDVTNASRTMLFNIHSLEWDKQLCEFFGIPMEILPNVRSSSEIYGLMKAGALEGVPISGCLGDQSAALVGQMCFQIGQAKNTYGTGCFLLCNTGHKCVFSDHGLLTTVAYKLGRDKPVYYALEGSVAIAGAVIRWLRDNLGIIKTSEEIEKLAKEVGTSYGCYFVPAFSGLYAPYWEPSARGIICGLTQFTNKCHIAFAALEAVCFQTREILDAMNRDCGIPLSHLQVDGGMTSNKILMQLQADILYIPVVKPSMPETTALGAAMAAGAAEGVGVWSLEPEDLSAVTMERFEPQINAEESEIRYSTWKKAVMKSMGWVTTQSPESGIP

SEQ ID NO: 30120 - protein, 553 aa, Homo sapiens
MAASKKAVLGPLVGAVDQGTSSTRFLVFNSKTAELLSHHQVEIKQEFPREGWVEQDPKEILHSVYECIEKTCEKLGQLNIDISNIKAIGVSNQRETTVVWDKITGEPLYNAVVWLDLRTQSTVESLSKRIPGNNNFVKSKTGLPLSTYFSAVKLRWLLDNVRKVQKAVEEKRALFGTIDSWLIWSLTGGVNGGVHCTDVTNASRTMLFNIHSLEWDKQLCEFFGIPMEILPNVRSSSEIYGLMKAGALEGVPISGCLGDQSAALVGQMCFQIGQAKNTYGTGCFLLCNTGHKCVFSDHGLLTTVAYKLGRDKPVYYALEGSVAIAGAVIRWLRDNLGIIKTSEEIEKLAKEVGTSYGCYFVPAFSGLYAPYWEPSARGIICGLTQFTNKCHIAFAALEAVCFQTREILDAMNRDCGIPLSHLQVDGGMTSNKILMQLQADILYIPVVKPSMPETTALGAAMAAGAAEGVGVWSLEPEDLSAVTMERFEPQINAEESEIRYSTWKKAVMKSMGWVTTQSPESGDPSIFCSLPLGFFIVSSMVMLIGARYISGIP

SEQ ID NO: 30121 - protein, 530 aa, Homo sapiens
MAASKKAVLGPLVGAVDQGTSSTRFLVFNSKTAELLSHHQVEIKQEFPREGWVEQDPKEILHSVYECIEKTCEKLGQLNIDISNIKAIGVSNQRETTVVWDKITGEPLYNAVVWLDLRTQSTVESLSKRIPGNNNFVKSKTGLPLSTYFSAVKLRWLLDNVRKVQKAVEEKRALFGTIDSWLIWSLTGGVNGGVHCTDVTNASRTMLFNIHSLEWDKQLCEFFGIPMEILPNVRSSSEIYGLMKISHSVKAGALEGVPISGCLGDQSAALVGQMCFQIGQAKNTYGTGCFLLCNTGHKCVFSDHGLLTTVAYKLGRDKPVYYALEGSVAIAGAVIRWLRDNLGIIKTSEEIEKLAKEVGTSYGCYFVPAFSGLYAPYWEPSARGIICGLTQFTNKCHIAFAALEAVCFQTREILDAMNRDCGIPLSHLQVDGGMTSNKILMQLQADILYIPVVKPSMPETTALGAAMAAGAAEGVGVWSLEPEDLSAVTMERFEPQINAEESEIRYSTWKKAVMKSMGWVTTQSPESGIP

SEQ ID NO: 30122 - protein, 331 aa, Homo sapiens; identical to SEQ ID NO: 203

SEQ ID NO: 30123 - protein, 359 aa, Homo sapiens
MTLESMMACCLSDEVKESKRINAEIEKQLRRDKRDARRELKLLLLGTGESGKSTFIKQMRIIHGAGYSEEDKRGFTKLVYQNIFTAMQAMIRAMETLKILYKYEQNKANALLIREVDVEKVTTFEHQYVSAIKTLWEDPGIQECYDRRREYQLSDSAKYYLTDVDRIATLGYLPTQQDVLRVRVPTTGIIEYPFDLENIIFRMVDVGGQRSERRKWIHCFENVTSIMFLVALSEYDQVLVESDNENRMEESKALFRTIITYPWFQNSSVILFLNKKDLLEDKILYSHLVDYFPEFDGPQRDAQAAREFILKMFVDLNPDSDKIIYSHFTCATDTENIRFVFAAVKDTILQLNLKEYNLV

SEQ ID NO: 30124 - protein, 556 aa, Homo sapiens
MRRFVYCKVVLATSLMWVLVDVFLLLYFSECNKCDDKKERSLLPALRAVISRNQEGPGEMGKAVLIPKDDQEKMKELFKINQFNLMASDLIALNRSLPDVRLEGCKTKVYPDELPNTSVVIVFHNEAWSTLLRTVYSVINRSPHYLLSEVILVDDASERDFLKLTLENYVKNLEVPVKIIRMEERSGLIRARLRGAAASKGQVITFLDAHCECTLGWLEPLLARIKEDRKTVVCPIIDVISDDTFEYMAGSDMTYGGFNWKLNFRWYPVPQREMDRRKGDRTLPVRTPTMAGGLFSIDRNYFEEIGTYDAGMDIWGGENLEMSFRIWQCGGSLEIVTCSHVGHVFRKATPYTFPGGTGHVINKNNRRLAEVWMDEFKDFFYIISPGVVKVDYGDVSVRKTLRENLKCKPFSWYLENIYPDSQIPRRYYSLGEIRNVETNQCLDNMGRKENEKVGIFNCHGMGGNQVFSYTADKEIRTDDLCLDVSRLNGPVIMLKCHHMRGNQLWEYDAERLTLRHVNSNQCLDEPSEEDKMVPTMQDCSGSRSQQWLLRNMTLGT

SEQ ID NO: 30125 - protein, 486 aa, Homo sapiens
MRRFVYCKVVLATSLMWVLVDVFLLLYFSECNKCDDKKERSLLPALRAVISRNQEGPGEMGKAVLIPKDDQEKMKELFKINQFNLMASDLIALNRSLPDVRLEGCKTKVYPDELPNTSVVIVFHNEAWSTLLRTVYSVINRSPHYLLSEVILVDDASERDFLKLTLENYVKNLEVPVKIIRMEERSGLIRARLRGAAASKGQVITFLDAHCECTLGWLEPLLARIKEDRKTVVCPIIDVISDDTFEYMAGSDMTYGGFNWKLNFRWYPVPQREMDRRKGDRTLPVRTPTMAGGLFSIDRNYFEEIGTYDAGMDIWGGENLEMSFRIWQCGGSLEIVTCSHVGHVFRKATPYTFPGGTGHVINKNNRRLAEVWMDEFKDFFYIISPGVVKVDYGDVSVRKTLRENLKCKPFSWYLENIYPDSQIPRRYYSLGEIRNVETNQCLDNMGRKENEKVGIFNCHGMGGNQTQWTCNHVKMPPYERKSVMGI

SEQ ID NO: 30126 - protein, 561 aa, Homo sapiens
MRRFVYCKVVLATSLMWVLVDVFLLLYFSECNKCDDKKERSLLPALRAVISRNQEGPGEMGKAVLIPKDDQEKMKELFKINQFNLMASDLIALNRSLPDVRLEGCKTKVYPDELPNTSVVIVFHNEAWSTLLRTVYSVINRSPHYLLSEVILVDDASERDFLKLTLENYVKNLEVPVKIIRMEERSGLIRARLRGAAASKGQVITFLDAHCECTLGWLEPLLARIKEDRKTVVCPIIDVISDDTFEYMAGSDMTYGGFNWKLNFRWYPVPQREMDRRKGDRTLPVRTPTMAGGLFSIDRNYFEEIGTYDAGMDIWGGENLEMSFRIWQCGGSLEIVTCSHVGHVFRKATPYTFPGGTGHVINKNNRRLAEVWMDEFKDFFYIISPGVVKVDYGDVSVRKTLRENLKCKPFSWYLENIYPDSQIPRRYYSLGEIRNVETNQCLDNMGRKENEKVGIFNCHGMGGNQVFSYTADKEIRTDDLCLDVSRLNGPVIMLKCHHMRGNQLWEYDAESCLSVNKVADGSQHPTVETCNDSTLQKWLLRNYTRMEIFRNIFGNSTDYIL

SEQ ID NO: 30127 - protein, 515 aa, Homo sapiens
MGHNGSWISPNASEPHNASGAEAAGVNRSALGEFGEAQLYRQFTTTVQVVIFIGSLLGNFMVLWSTCRTTVFKSVTNRFIKNLACSGICASLVCVPFDIILSTSPHCCWWIYTMLFCKVVKFLHKVFCSVTILSFPAIALDRYYSVLYPLERKISDAKSRELVMYIWAHAVVASVPVFAVTNVADIYATSTCTEVWSNSLGHLVYVLVYNITTVIVPVVVVFLFLILIRRALSASQKKKVIIAALRTPQNTISIPYASQREAELHATLLSMVMVFILCSVPYATLVVYQTVLNVPDTSVFLLLTAVWLPKVSLLANPVLFLTVNKSVRKCLIGTLVQLHHRYSRRNVVSTGSGMAEASLEPSIRSGSQLLEMFHIGQQQIFKPTEDEEESEAKYIGSADFQAKEIFSTCLEGEQGPQFAPSAPPLSTVDSVSQVAPAAPVEPETFPDKYSLQFGFGPFELPPQWLSETRNSKKRLLPPLGNTPEELIQTKVPKVGRVERKMSRNNKVSIFPKVDS

SEQ ID NO: 30128 - protein, 470 aa, Homo sapiens
MPAPLLLISRTLGNFMVLWSTCRTTVFKSVTNRFIKNLACSGICASLVCVPFDIILSTSPHCCWWIYTMLFCKVVKFLHKVFCSVTILSFPAIALDRYYSVLYPLERKISDAKSRELVMYIWAHAVVASVPVFAVTNVADIYATSTCTEVWSNSLGHLVYVLVYNITTVIVPVVVVFLFLILIRRALSASQKKKVIIAALRTPQNTISIPYASQREAELHATLLSMVMVFILCSVPYATLVVYQTVLNVPDTSVFLLLTAVWLPKVSLLANPVLFLTVNKSVRKCLIGTLVQLHHRYSRRNVVSTGSGMAEASLEPSIRSGSQLLEMFHIGQQQIFKPTEDEEESEAKYIGSADFQAKEIFSTCLEGEQGPQFAPSAPPLSTVDSVSQVAPAAPVEPETFPDKYSLQFGFGPFELPPQWLSETRNSKKRLLPPLGNTPEELIQTKVPKVGRVERKMSRNNKVSIFPKVDS

SEQ ID NO: 30129 - protein, 514 aa, Homo sapiens
MGHNGSWISPNASEPHNASGAEAAGVNRSALGEFGEAQLYRQFTTTVQVVIFIGSLLEFGNMEVTRKLDKSRLPGIKFIKNLACSGICASLVCVPFDIILSTSPHCCWWIYTMLFCKVVKFLHKVFCSVTILSFPAIALDRYYSVLYPLERKISDAKSRELVMYIWAHAVVASVPVFAVTNVADIYATSTCTEVWSNSLGHLVYVLVYNITTVIVPVVVVFLFLILIRRALSASQKKKVIIAALRTPQNTISIPYASQREAELHATLLSMVMVFILCSVPYATLVVYQTVLNVPDTSVFLLLTAVWLPKVSLLANPVLFLTVNKSVRKCLIGTLVQLHHRYSRRNVVSTGSGMAEASLEPSIRSGSQLLEMFHIGQQQIFKPTEDEEESEAKYIGSADFQAKEIFSTCLEGEQGPQFAPSAPPLSTVDSVSQVAPAAPVEPETFPDKYSLQFGFGPFELPPQWLSETRNSKKRLLPPLGNTPEELIQTKVPKVGRVERKMSRNNKVSIFPKVDS

SEQ ID NO: 30130 - protein, 94 aa, Homo sapiens
MAAFPHKIIFFLVCSTLTHVAFSGIFNKRDFTRWPKPRCKMYIPLDPDYNADCPNVTAPVCASNGHTFQNECFFCVEQREFHYRIKFEKYGKCD

SEQ ID NO: 30131 - protein, 54 aa, Homo sapiens
MYIPLDPDYNADCPNVTAPVCASNGHTFQNECFFCVEQREFHYRIKFEKYGKCD

SEQ ID NO: 30132 - protein, 616 aa, Homo sapiens
MPFTLHLRSRLPSAIRSLILQKKPNIRNTSSMAGELRPASLVVLPRSLAPAFERFCQVNTGPLPLLGQSEPEKWMLPPQGAISETRMGHPQFWKYEFGACTGSLASLEQYSEQLKDMVAFFLGCSFSLEEALEKAGLPRRDPAGHSQTTVPCVTHAGFCCPLVVTMRPIPKDKLEGLVRACCSLGGEQGQPVHMGDPELLGIKELSKPAYGDAMVCPPGEVPVFWPSPLTSLGAVSSCETPLAFASIPGCTVMTDLKDAKAPPGCLTPERIPEVHHISQDPLHYSIASVSASQKIRELESMIGIDPGNRGIGHLLCKDELLKASLSLSHARSVLITTGFPTHFNHEPPEETDGPPGAVALVAFLQALEKEVAIIVDQRAWNLHQKIVEDAVEQGVLKTQIPILTYQGGSVEAAQAFLCKNGDPQTPRFDHLVAIERAGRAADGNYYNARKMNIKHLVDPIDDLFLAAKKIPGISSTGVGDGGNELGMGKVKEAVRRHIRHGDVIACDVEADFAVIAGVSNWGGYALACALYILYSCAVHSQYLRKAVGPSRAPGDQAWTQALPSVIKEEKMLGILVQHKVRSGVSGIVGMEVDGLPFHNTHAEMIQKLVDVTTAQV

SEQ ID NO: 30133 - protein, 621 aa, Homo sapiens
MPFTLHLRSRLPSAIRSLILQKKPNIRNTSSMAGELRPASLVVLPRSLAPAFERFCQVNTGPLPLLGQSEPEKWMLPPQGAISETRMGHPQFWKYEFGACTGSLASLEQYSEQLKDMVAFFLGCSFSLEEALEKAGLPRRDPAGHSQAGAYKTTVPCVTHAGFCCPLVVTMRPIPKDKLEGLVRACCSLGGEQGQPVHMGDPELLGIKELSKPAYGDAMVCPPGEVPVFWPSPLTSLGAVSSCETPLAFASIPGCTVMTDLKDAKAPPGCLTPERIPEVHHISQDPLHYSIASVSASQKIRELESMIGIDPGNRGIGHLLCKDELLKASLSLSHARSVLITTGFPTHFNHEPPEETDGPPGAVALVAFLQALEKEVAIIVDQRAWNLHQKIVEDAVEQGVLKTQIPILTYQGGSVEAAQAFLCKNGDPQTPRFDHLVAIERAGRAADGNYYNARKMNIKHLVDPIDDLFLAAKKIPGISSTGVGDGGNELGMGKVKEAVRRHIRHGDVIACDVEADFAVIAGVSNWGGYALACALYILYSCAVHSQYLRKAVGPSRAPGDQAWTQALPSVIKEEKMLGILVQHKVRSGVSGIVGMEVDGLPFHNTHAEMIQKLVDVTTAQV

SEQ ID NO: 30134 - protein, 581 aa, Homo sapiens
MPFTLHLRSRLPSAIRSLILQKKPNIRNTSSMAGELRPASLVVLPRSLAPAFERFCQVNTGPLPLLGQSEPEKWMLPPQGAISETRMGHPQFWKYEFGACTGSLASLEQYSEQLKDMVAFFLGCSFSLEEALEKAGLPRRDPAGHSQAGAYKTTVPCVTHAGFCCPLVVTMRPIPKDKLEGLVRACCSLGGEQGQPVHMGDPELLGIKELSKPAYGDAMVCPPGEVPVFWPSPLTSLGAVSSCETPLAFASIPGCTVMTDLKDAKAPPGCLTPERIPEVHHISQDPLHYSIASVSASQKIRELESMIGIDPGNRGIGHLLCKDELLKASLSLSHARSVLITTGFPTHFNHEPPEETDGPPGAVALVAFLQALEKEVAIIVDQRAWNLHQKIVEDAVEQGVLKTQIPILTYQGGSVEAAQAFLCKNGDPQTPRFDHLVAIERAGRAADGNYYNARKMNIKHLVDPIDDLFLAAKKIPGISSTGVSNWGGYALACALYILYSCAVHSQYLRKAVGPSRAPGDQAWTQALPSVIKEEKMLGILVQHKVRSGVSGIVGMEVDGLPFHNTHAEMIQKLVDVTTAQV

SEQ ID NO: 30135 - protein, 579 aa, Homo sapiens
MPFTLHLRSRLPSAIRSLILQKKPNIRNTSSMAGELRPASLVVLPRSLAPAFERFCQVNTGPLPLLGQSEPEKWMLPPQGAISETRMGHPQFWKYEFGACTGSLASLEQYSEQLKDMVAFFLGCSFSLEEALEKAGLPRRDPAGHSQAGAYKTTVPCVTHAGFCCPLVVTMRPIPKDKLEGLVRACCSLGGEQGQPVHMGDPELLGIKELSKPAYGDAMVCPPGEVPVFWPSPLTSLGAVSSCETPLAFASIPGCTVMTDLKDAKAPPGCLTPERIPEVHHISQDPLHYSIASVSASQKIRELESMIGIDPGNRGIGHLLCKDELLKASLSLSHARSVLITTGFPTHFNHEPPEETDGPPGAVALVAFLQALEKEVAIIVDQRAWNLHQKIVEDAVEQGVLKTQIPILTYQGGSVEAAQAFLCKNGDPQTPRFDHLVAIERAGRAADGNYYNARKMNIKHLVDPIDDLFLAAKKIPGISSTGVGDGGNELGMGKVKEAVRRHIRHGDVIACDVEADFAVIAGVSNWGGYALACALYILYSCAVHSQYLRKAVGPSRAPGDQAWTQALPSVIKESKGRKL

SEQ ID NO: 30136 - protein, 564 aa, Homo sapiens
MPFTLHLRSRLPSAIRSLILQKKPNIRNTSSMAGELRPASLVVLPRSLAPAFERFCQVNTGPLPLLGQSEPEKWMLPPQGAISETRMGHPQFWKYEFGACTGSLASLEQYSEQLKDMVAFFLGCSFSLEEALEKAGLPRRDPAGHSQTTVPCVTHAGFCCPLVVTMRPIPKDKLEGLVRACCSLGELLGIKELSKPAYGDAMVCPPGEVPVFWPSPLTSLGAVSSCETPLAFASIPGCTVMTDLKDAKAPPGCLTPERIPEVHHISQDPLHYSIASVSASQKIRELESMIGIDPGNRGIGHLLCKDELLKASLSLSHARSVLITTGFPTHFNHEPPEETDGPPGAVALVAFLQALEKEVAIIVDQRAWNLHQKIVEDAVEQGVLKTQIPILTYQGGSVEAAQAFLCKNGDPQTPRFDHLVAIERAGRAADGNYYNARKMNIKHLVDPIDDLFLAAKKIPGISSTGVSNWGGYALACALYILYSCAVHSQYLRKAVGPSRAPGDQAWTQALPSVIKEEKMLGILVQHKVRSGVSGIVGMEVDGLPFHNTHAEMIQKLVDVTTAQV

SEQ ID NO: 30137 - protein, 159 aa, Homo sapiens
MPFTLHLRSRLPSAIRSLILQKKPNIRNTSSMAGELRPASLVVLPRSLAPAFERFCQVNTGPLPLLGQSEPEKWMLPPQGAISETSLRDLHSAWHRTSLMTVAQERAALPTVLTPSPITWRLSWLRSLRSWRKSSPGEIPLALPSVHSIAQARNPPVQD

SEQ ID NO: 30138 - protein, 361 aa, Homo sapiens [sequence omitted]

SEQ ID NO: 30139 - protein, 407 aa, Homo sapiens
MDGLPGRALGAACLLLLAAGWLGPEAWGSPTPPPTPAAPPPPPPPGSPGGSQDTCTSCGGFRRPEELGRVDGDFLEAVKRHILSRLQMRGRPNITHAVPKAAMVTALRKLHAGKVREDGRVEIPHLDGHASPGADGQERVSEIISFAETDGLASSRVRLYFFISNEGNQNLFVVQASLWLYLKLLPYVLEKGSRRKVRVKVYFQEQGHGDRWNMVEKRVDLKRSGWHTFPLTEAIQALFERGERRLNLDVQCDSCQELAVVPVFVDPGEESHRPFVVVQARLGDSRHRIRKRGLECDGRTNLCCRQQFFIDFRLIGWNDWIIAPTGYYGNYCEGSCPAYLAGVPGSASSFHTAVVNQYRMRGLNPGTVNSCCIPTKLSTMSMLYFDDEYNIVKRDVPNMIVEECGCA

SEQ ID NO: 30140 - protein, 684 aa, Homo sapiens
MEENLISMREDHSFHVRYRMEASCLELALEGERLCKSGDCRAGVSFFEAAVQVGTEDLKTLSAIYSQLGNAYFYLHDYAKALEYHHHDLTLARTIGDQLGEAKASGNLGNTLKVLGNFDEAIVCCQRHLDISRELNDKVGEARALYNLGNVYHAKGKSFGCPGPQDVGEFPEEVRDALQAAVDFYEENLSLVTALGDRAAQGRAFGNLGNTHYLLGNFRDAVIAHEQRLLIAKEFGDKAAERRAYSNLGNAYIFLGEFETASEYYKKTLLLARQLKDRAVEAQSCYSLGNTYTLLQDYEKAIDYHLKHLAIAQELNDRIGEGRACWSLGNAYTALGNHDQAMHFAEKHLEISREVGDKSGELTARLNLSDLQMVLGLSYSTNNSIMSENTEIDSSLNGVRPKLGRRHSMENMELMKLTPEKVQNWNSEILAKQKPLIAKPSAKLLFVNRLKGKKYKTNSSTKVLQDASNSIDHRIPNSQRKISADTIGDEGFFDLLSRFQSNRMDDQRCCLQEKNCHTASTTTSSTPPKMMLKTSSVPVVSPNTDEFLDLLASSQSRRLDDQRASFSNLPGLRLTQNSQSVLSHLMTNDNKEADEDFFDILVKCQGSRLDDQRCAPPPATTKGPTVPDEDFFSLILRSQGKRMDEQRVLLQRDQNRDTDFGLKDFLQNNALLEFKNSGKKSADH

SEQ ID NO: 30141 - protein, 206 aa, Homo sapiens
MGSGPRGALSLLLLLLAPPSRPAAGCPAPCSCAGTLVDCGRRGLTWASLPTAFPVDTTELVLTGNNLTALPPGLLDALPALRTAHLGANPWRCDCRLVPLRAWLAGRPERAPYRDLRCVAPPALRGRLLPYLAEDELRAACAPGPLCWGALAAQLALLGLGLLHALLLVLLLCRLRRLRARARARAAARLSLTDPLVAERAGTDES

SEQ ID NO: 30142 - protein, 411 aa, Homo sapiens
MIPSRHTMLRFLPVVNAASCPGDRRTMLVNVAAGVRVLRVPLRAGGSGSLSGLRPPAIVCYLPLQRASAASGLFLARPQHCGRCGRGRGGAALSLGSPAYASRCRVSRAAVFSPWAPVSLESGRAPGCSLGRPGLRGALVVWLQLGETWVRLRGDFQPACGVVRVERLAGYRDAGHQGLDGAGPAVWVLRDVAQVPADRSAYCGASLAGPRGALSLLLLLLAPPSRPAAGCPAPCSCAGTLVDCGRRGLTWASLPTAFPVDTTELVLTGNNLTALPPGLLDALPALRTAHLGANPWRCDCRLVPLRAWLAGRPERAPYRDLRCVAPPALRGRLLPYLAEDELRAACAPGPLCWGALAAQLALLGLGLLHALLLVLLLCRLRRLRARARARAAARLSLTDPLVAERAGTDES

SEQ ID NO: 30143 - protein, 285 aa, Homo sapiens
MRSARSTALNRGEQRAVRYYSHMKLNMAEEEDYMSDSFINVQEDIRPGLPMLRQIREARRKEEKQQEANLKNRQKSLKEEEQERRDIGLKNALGCENKGFALLQKMGYKSGQALGKSGGGIVEPIPLNIKTGKSGIGHEASLKRKAEEKLESYRKKIHMKNQAEEKAAEQFRMRLKNKQDEMKLEGDLRRSQRACQQLDVQKNIQVPREAWYWLRLEEETEEDEEEKEQDEDEYKSEDLSVLEKLQILTSYLREEHLYCIWCGTAYEDKEDLSSNCPGPTSADHD

SEQ ID NO: 30144 - protein, 156 aa, Homo sapiens
MSRKSGIGHEASLKRKAEEKLESYRKKIHMKNQAEEKAAEQFRMRLKNKQDEMKLEGDLRRSQRACQQLDVQKNIQVPREAWYWLRLEEETEEDEEEKEQDEDEYKSEDLSVLEKLQILTSYLREEHLYCIWCGTAYEDKEDLSSNCPGPTSADHD

SEQ ID NO: 30145 - protein, 693 aa, Homo sapiens
MWPQPYLPPHPMMLEESRQNKLAAAKKKLKEYQQRKSPGIPAGAKTKKKKTDSSPETTTSGGGHSPGDSQYQELAVALESSSVTINQLNENIESLKQQKKQVEHQLEEAKKTNNEIHKAQMEQLETINILTLEKADLKTTLYHTKRAARHFEEESKDLAGRLQYSLQRIQELERALSAVSTQQQEEDRSSSCREAVLQRRLQQTIKERALLNAHVTQVTESLKQVQLERDEYAKHIKGERARWQERMWKMSVEARTLKEEKKRDIHRIQELERSLSELKNQMAEPPSLAPPAVTSVVEQLQDEAKHLRQEVEGLEGKLQSQVENNQALSLLSKEQKQRLQEQEEMLREQEAQRVREQERLCEQNERLREQQKTLQEQGERLRKQEQRLRKQEERLRKEEERLQKQEKRLWDQEERLWKKEERLQKQEERLALSQNHKLDKQLAEPQCSFEDLNNEKKSALQLEQQVKELQEKLDEEHLEAASQRNQQLETQLSLVALPGEGDGGQHLDSEEEEAPRPTPNIPEDLESREATSSFMDLPKEKADGTEQVERRELGFVQPSGVTDGMRESFTVYESQGAVPNTRHQEMEDVIRLAQKEEEMKVKLLELQELVLPLVGNHEGHGKFLIAAQNPADEPTPGAPAPQELGAAGEQDDFYEVSLDNNVEPAPGAAREGSPHDNPPVQQIVQLSPVMQDT

SEQ ID NO: 30146 - protein, 693 aa, Homo sapiens
MWPQPYLPPHPMMLEESRQNKLAAAKKKLKEYQQRKSPGIPAGAKTKKKKTDSSPETTTSGGGHSPGDSQYQELAVALESSSVTINQLNENIESLKQQKKQVEHQLEEAKKTNNEIHKAQMEQLETINILTLEKADLKTTLYHTKRAARHFEEESKDLAGRLQYSLQHIQELERALCAVSTQQQEEDRSSSCREAVLQRRLQQTIKERALLNAHVTQVTESLKQVQLERDEYAKHIKGERARWQERMWKMSVEARTLKEEKKRDIHRIQELERSLSELKNQMAEPPSLAPPAVTSVVEQLQDEAKHLRQEVEGLEGKLQSQVENNQALSLLSKEQKQRLQEQEEMLREQEAQRVREQERLCEQNERLREQQKTLQEQGERLRKQEQRLRKQEERLRKEEERLQKQEKRLWDQEERLWKKEERLQKQEERLALSQNHKLDKQLAEPQCSFEDLNNEKKSALQLEQQVKELQEKLDEEHLEAASQRNQQLETQLSLVALPGEGDGGQHLDSEEEEAPRPTPNIPEDLESREATSSFMDLPKEKADGTEQVERRELGFVQPSGVTDGMRESFTVYESQGAVPNTRHQEMEDVIRLAQKEEEMKVKLLELQELVLPLVGNHEGHGKFLIAAQNPADEPTPGAPAPQELGAAGEQDVFYEVSLDNNVEPAPGVAREGSPHNNPTVQQIVQLSPVMQDT

SEQ ID NO: 30147 - protein, 597 aa, Homo sapiens
MAEETRQSKLAAAKRKLKEYWQRNSPGVPAGAKRNRKTNGSIHETATSGGCHSPGDSSSTSSSLHAPQSPCQELAVVPDSRSVKVSQLKNTIKSLKQQKKQVEHQLEEEKKANNEKQKAERGLEVQIQRLNIQKGKLNTDLYHTKRSLRYFEEESKDLAVRLQHSLQRKGELERALSAVTATQKKKAERFSSRSKARMEWKLEQSMREQALLKAQLTQLKESLKEVQLERDEYAEHLKGERARWQQRMRKMSQEVCSLKKEKKHDKYRVETLERSLSKLKHQMAEPLPPEPPAVPSEVELQHLRKELERVAGALQAQVEYNQRISLLNEGQKERLREQEERLQEQQERLREQEERLQQLAEPQNSFKELNNENKSVLQLEQQVKELQEKLGKRLAHPVASAQKEPEAAVPAPGPGGESSGFMDHLEEKADLSELVEKEELGFFQYYRERCHQKVYHPITKPGGSAKDAAPGGGHHQAGPGQGGDEGEAAGAAGDGVAAGGDYKGHSKFLVTAQNPAHEPSPGAPAPQELGAAHKHGDLCEVSLTDSVEPVQGETREGSPHDKPTAQPIVQDHQEHPGLGSNCCVPFFCWAWPPRRRR

SEQ ID NO: 30148 - protein, 403 aa, Homo sapiens
MFVASERKMRAHQVLTFLLLFVITSVASENASTSRGCGLDLLPQYVSLCDLDAIWGIVVEAVAGAGALITLLLMLILLVRLPFIKEKEKKSPVGLHFLFLLGTLGLFGLTFAFIIQEDETICSVRRFLWGVLFALCFSCLLSQAWRVRRLVRHGTGPAGWQLVGLALCLMLVQVIIAVEWLVLTVLRDTRPACAYEPMDFVMALIYDMVLLVVTLGLALFTLCGKFKRWKLNGAFLLITAFLSVLIWVAWMTMYLFGNVKLQQGDAWNDPTLAITLAASGWVFVIFHAIPEIHCTLLPALQENTPNYFDTSQPRMRETAFEEDVQLPRAYMENKAFSMDEHNAALRTAGFPNGSLGKRPSGSLGKRPSAPFRSNVYQPTEMAVVLNGGTIPTAPPSHTGRHLW

SEQ ID NO: 30149 - protein, 404 aa, Homo sapiens
MFVASERKMRAHQVLTFLLLFVITSVASENASTSRGCGLDLLPQYVSLCDLDAIWGIVVEAVAGAGALITLLLMLILLVRLPFIKEKEKKSPVGLHFLFLLGTLGLFGLTFAFIIQEDETICSVRRFLWGVLFALCFSCLLSQAWRVRRLVRHGTGPAGWQLVGLALCLMLVQVIIAVEWLVLTVLRDTRPACAYEPMDFVMALIYDMVLLVVTLGLALFTLCGKFKRWKLNGAFLLITAFLSVLIWVAWMTMYLFGNVKLQQGDAWNDPTLAITLAASGWVFVIFHAIPEIHCTLLPALQENTPNYFDTSQPRMRETAFEEDVQLPRAYMENKAFSMDEHNAALRTAGFPNGSLGKRPSGSLGKRPSAPFRSNVYQPTEMAVVLNGGTEMVTHPRSLESFGAF

SEQ ID NO: 30150 - protein, 430 aa, Homo sapiens
MEWKLEQSMREQALLKAQLTQLKESLKEVQLERDEYAEHLKGERARWQQRMRKMSQEVCSLKKEKKHDKYRVEKLERSLSKLKHQMAEPLPPEPPAVPSEVELQHLRKELERVAGELQAQVEYNQRISLLNEGQKERLREQEERLQEQQERLPEQEERLQQLAEPQNSFKELNNENKSVLQLEQQVKELQEKLGKERLEAASQQKQQLTAQLSLMALPGEGDGGGHLDSEGEEAPRPIPSIPQDLESREAMSGFMDHLEEKADLSELVEKEELGFFQYYRERCHQKVYHPITKPGGSAKDAAPGGGHHQAGPGQGGDEGEAAGAAGDGVAAGGDYKGHSKFLVTAQNPAHEPSPGAPAPQELGAAHKHGDLCEVSLTDSVEPVQGEAREGSPHDNPTAQPIVQDHQEHPGLGSNCCVPFFCWAWLPRRRR

SEQ ID NO: 30151 - protein, 283 aa, Homo sapiens
MEWKLEQSMREQALLKAQLTQLKESLKEVQLERDEYAEHLKGERARWQQRMRKMSQEVCSLKKEKKHDKYRVEKLERSLSKLKHQMAEPLPPEPPAVPSEVELQHLRKELERVAGELQAQVEKEELGFFQYYRERCHQKVYHPITKPGGSAKDAAPGGGHHQAGPGQGGDEGEAAGAAGDGVAAGGDYKGHSKFLVTAQNPAHEPSPGAPAPQELGAAHKHGDLCEVSLTDSVEPVQGEAREGSPHDNPTAQPIVQDHQEHPGLGSNCCVPFFCWAWLPRRRR

SEQ ID NO: 30152 - protein, 434 aa, Homo sapiens
MEWKLEQSMREQALLKAQLTQLKESLKEVQLERDEYAEHLKGERARWQQRMRKMSQEVCSLKKEKKHDKYRVEKLERSLSKLKHQMAEPLPPEPPAVPSEVELQHLRKELERVAGELQAQVEYNQRISLLNEGQKERLREQEERLQEQQERLPEQEERLQQLAEPQNSFKELNNENKSVLQLEQQVKELQEKLGKVKETERLEAASQQKQQLTAQLSLMALPGEGDGGGHLDSEGEEAPRPIPSIPQDLESREAMSGFMDHLEEKADLSELVEKEELGFFQYYRERCHQKVYHPITKPGGSAKDAAPGGGHHQAGPGQGGDEGEAAGAAGDGVAAGGDYKGHSKFLVTAQNPAHEPSPGAPAPQELGAAHKHGDLCEVSLTDSVEPVQGEAREGSPHDNPTAQPIVQDHQEHPGLGSNCCVPFFCWAWLPRRRR

SEQ ID NO: 30153 - protein, 931 aa, Homo sapiens
MAARDSDSEEDLVSYGTGLEPLEEGERPKKPIPLQDQTVRDEKGRYKRFHGAFSGGFSAGYFNTVGSKEGWTPSTFVSSRQNRADKSVLGPEDFMDEEDLSEFGIAPKAIVTTDDFASKTKDRIREKARQLAAATAPIPGATLLDDLITPAKLSVGFELLRKMGWKEGQGVGPRVKRRPRRQKPDPGVKIYGCALPPGSSEGSEGEDDDYLPDNVTFAPKDVTPVDFTPKDNVHGLAYKGLDPHQALFGTSGEHFNLFSGGSERAGDLGEIGLNKGRKLGISGQAFGVGALEEEDDDIYATETLSKYDTVLKDEEPGDGLYGWTAPRQYKNQKESEKDLRYVGKILDGFSLASKPLSSKKIYPPPELPRDYRPVHYFRPMVAATSENSHLLQVLSESAGKATPDPGTHSKHQLNASKRAELLGETPIQGSATSVLEFLSQKDKERIKEMKQATDLKAAQLKARSLAQNAQSSRAQLSPAAAAGHCSWNMALGGGTATLKASNFKPFAKDPEKQKRYDEFLVHMKQGQKDALERCLDPSMTEWERGRERDEFARAALLYASSHSTLSSRFTHAKEEDDSDQVEVPRDQENDVGDKQSAVKMKMFGKLTRDTFEWHPDKLLCKRFNVPDPYPDSTLVGLPRVKRDKYSVFNFLTLPETASLPTTQASSEKVSQHRGPDKSRKPSRWDTSKHEKKEDSISEFLSLARSKAEPPKQQSSPLVNKEEEHAPELSANQTVNKDVDAQAEGEGSRPSMDLFRAIFASSSDEKSSSSEDEQGDSEDDQAGSGEANFQSSQDTDLGETSSVAHALVPAPQEPPPSFPIQKMQIDEREEFGPRLPPVFCPNARQTLEVPQKEKHKKNKDKHKAKKEHRRKKEKKKKHRKHKHKGKQKNKKPEKSSSSESSDSSDSQSDEETADVSPQELLRRLKSLPLRRQ

SEQ ID NO: 30154 - protein, 84 aa, Homo sapiens
MALSVLRLALLLLAVTFAASLIPQFGLFSKYRTPNCSQYRLPGCPRHFNPVCGSDMSTYANECTLCMKIREGGHNIKIIRNGPC

SEQ ID NO: 30155 - protein, 632 aa, Homo sapiens
MAEETQHNKLAAAKKKLKEYWQKNSPRVPAGANRNRKTNGSVPEKATSGGCQPPGDSATGFHREGPTSSATLKDLESPCQERAVVLDSRSVEISQLKNTIKSLKQQKKQVEHQLEEEKKANNKKQKAKRVLEVQIQTLNIQKGKLNTDLYHMKRSLRYFEEKSKDLAVCLQHSLQRKGELESVLSNVMATQKKKANQLSSRSKARTEWKLEQSMREEALLKVQLTQLKESFQQVQLERDECAEHLKGERARWQQRMRKMSQEICTLKKEKQQDMRRVEKLERSLSKLKNQMAEPLPPEPPAVPSEVELQHLRKELERVAGELQAQVKKNQRISLLNQRQEERIQEQEERLRKQEERIQEQHKSLQQLAKPQSVFEEPNNENKNALQLEQQVKELQEKLGEEHLEAASQQNQQLTAQLSLMALPGEGHGGEHLDSEGEEAPRPMPSVPEDPESREAMSSFMDHLEEKADLSELVKKKELCFIHHWRDRCHQKTHHLLSEPGGRAKDAALGGGHHQAGAQGGDEGEAAGAAADGIAAYSNYNNGHRKFLAAAHNSADEPGPGAPAPQELGAADKHGDLCEVSLTSSAQGEAREDPLLDKPTAQPIVQDHQEHPGLGSNCCVPLLCWAWLPRRRR

SEQ ID NO: 30156 - protein, 579 aa, Homo sapiens
MSALRPLLLLLLPLCPGPGPGPGSEAKVTRSCAETRQVLGARGYSLNLIPPALISGEHLRVCPQEYTCCSSETEQRLIRETEATFRGLVEDSGSFLVHTLAARHRKFDEFFLEMLSVAQHSLTQLFSHSYGRLYAQHALIFNGLFSRLRDFYGESGEGLDDTLADFWAQLLERVFPLLHPQYSFPPDYLLCLSRLASSTDGSLQPFGDSPRRLRLQITRTLVAARAFVQGLETGRNVVSEALKVPVSEGCSQALMRLIGCPLCRGVPSLMPCQGFCLNVVRGCLSSRGLEPDWGNYLDGLLILADKLQGPFSFELTAESIGVKISEGLMYLQENSAKVSAQVFQECGPPDPVPARNRRAPPPREEAGRLWSMVTEEERPTTAAGTNLHRLVWELRERLARMRGFWARLSLTVCGDSRMAADASLEAAPCWTGAGRGRYLPPVVGGSPAEQVNNPELKVDASGPDVPTRRRRLQLRAATARMKTAALGHDLDGQDADEDASGSGGGQQYADDWMAGAVAPPARPPRPPYPPRRDGSGGKGGGGSARYNQGRSRSGGASIGFHTQTILILSLSALALLGPR

SEQ ID NO: 30157 - protein, 631 aa, Homo sapiens
MLPVDGEERKSEGSDTEGDRTSPCAVSSATLKDLEVGGSGRRCSDPAGQPSNLLPQRGLGAPLPAETAHTQPSPNDRSLYLSPKSSSASSSLHARQSPCQEQAAVLNSRSIKISRLNDTIKSLKQQKKQVEHQLEEEKKANNEKQKAERELEGQIQRLNTEKKKLNTDLYHMKHSLRYFEEESKDLAGRLQRSSQRIGELEWSLCAVAATQKKKPDGFSSRSKALLKRQLEQSIREQILLKGHVTQLKESLKEVQLERDQYAEQIKGERAQWQQRMRKMSQEVCTLKEEKKHDTHRVEELERSLSRLKNQMAEPLPPDAPAVSSEVELQDLRKELERVAGELQAQVENNQCISLLNRGQKERLREQEERLQEQQERLREREKRLQQLAEPQSDLEELKHENKSALQLEQQVKELQEKLGQVMETLTSAEKEPEAAVPASGTGGESSGLMDLLEEKADLREHVEKLELGFIQYRRERCHQKVHRLLTEPGDSAKDASPGGGHHQAGPGQGGEEGEAAGAAGDGVAACGSYSEGHGKFLAAARNPAAEPSPGAPAPQELGAADKHGDLCEASLTNSVEPAQGEAREGSSQDNPTAQPVVQLLGEMQDHQEHPGLGSNCCVPCFCWAWLPRRRR

SEQ ID NO: 30158 - protein, 603 aa, Homo sapiens
MAEETGQSKLAAAKKKFKEYWQRNRPGVPAAAKRNTKANGSSPETAASGGCHSSEASSSASSSLHARQSPCQEQAAVLNSRSIKISRLNDTIKSLKQQKKQVEHQLEEEKKANNEKQKAERELEGQIQRLNTEKKKLNTDLYHMKHSLRYFEEESKDLAGRLQRSSQRIGELEWSLCAVAATQKKKPDGFSSRSKALLKRQLEQSIREQILLKGHVTQLKESLKEVQLERDQYAEQIKGERAQWQQRMRKMSQEVCTLKEEKKHDTHRVEELERSLSRLKNQMAEPLPPDAPAVSSEVELQDLRKELERVAGELQAQVENNQCISLLNRGQKERLREQEERLQEQQERLREREKRLQQLAEPQSDLEELKHENKSALQLEQQVKELQEKLGQVMETLTSAEKEPEAAVPASGTGGESSGLMDLLEEKADLREHVEKLELGFIQYRRERCHQKVHRLLTEPGDSAKDASPGGGHHQAGPGQGGEEGEAAGAAGDGVAACGSYSEGHGKFLAAARNPAAEPSPGAPAPQELGAADKHGDLCEASLTNSVEPAQGEAREGSSQDNPTAQPVVQLLGEMQDHQEHPGLGSNCCVPCFCWAWLPRRRR

SEQ ID NO: 30159 - protein, 160 aa, Homo sapiens
MLRHLPSRLPVKMWGRTLEKQSWRDSSQTPPPCLIRRLDHIVMTVKSIKDTTMFYSKILGMEVMTFKEDRKALCFGDQKFNLHEVGKEFEPKAAHPVPGSLDICLITEVPLEEMIQHLKACDVPIEEGPVPRTGAKGPIMSIYFRDPDRNLIEVSNYISS

SEQ ID NO: 30160 - protein, 446 aa, Homo sapiens
MNVTPEVKSRGMKFAEEQLLKHGWTQGKGLGRKENGITQALRVTLKQDTHGVGHDPAKEFTNHWWNELFNKTAANLVVETGQDGVQIRSLSKETTRYNHPKPNLLYQKFVKMATLTSGGEKPNKDLESCSDDDNQGSKSPKILTDEMLLQACEGRTAHKAARLGITMKAKLARLEAQEQAFLARLKGQDPGAPQLQSESKPPKKKKKKRRQKEEEEATASERNDADEKHPEHAEQNIRKSKKKKRRHQEGKVSDEREGTTKGNEKEDAAGTSGLGELNSREQTNQSLRKGKKKKRWHHEEEKMGVLEEGGKGKEAAGSVRTEEVESRAYADPCSRRKKRQQQEEEDLNLEDRGEETVLGGGTREAESRACSDGRSRKSKKKRQQHQEEEDILDVRDEKDGGAREAESRAHTGSSSRGKRKRQQHPKKERAGVSTVQKAKKKQKKRD

SEQ ID NO: 30161 - protein, 139 aa, Homo sapiens
MDGLKVGHDPAKEFTNHWWNELFNKTAANLVVETGQDGVQIRSLSKETTRYNHPKPNLLYQKFVKVLEAVGNRVHPFSLPWFPWGLNSCLVCLINSQNFPNIVGSCDQPCCCLLRLPRPSAGIEIFRFRGSCHLLREQQ

SEQ ID NO: 30162 - protein, 451 aa, Homo sapiens
MFPRSGPSNDEVKSRGMKFAEEQLLKHGWTQGKGLGRKENGITQALRVTLKQDTHGVGHDPAKEFTNHWWNELFNKTAANLVVETGQDGVQIRSLSKETTRYNHPKPNLLYQKFVKMATLTSGGEKPNKDLESCSDDDNQGSKSPKILTDEMLLQACEGRTAHKAARLGITMKAKLARLEAQEQAFLARLKGQDPGAPQLQSESKPPKKKKKKRRQKEEEEATASERNDADEKHPEHAEQNIRKSKKKKRRHQEGKVSDEREGTTKGNEKEDAAGTSGLGELNSREQTNQSLRKGKKKKRWHHEEEKMGVLEEGGKGKEAAGSVRTEEVESRAYADPCSRRKKRQQQEEEDLNLEDRGEETVLGGGTREAESRACSDGRSRKSKKKRQQHQEEEDILDVRDEKDGGAREAESRAHTGSSSRGKRKRQQHPKKERAGVSTVQKAKKKQKKRD

SEQ ID NO: 30163 - protein, 632 aa, Homo sapiens
MAEETQHNKLAAAKKKLKEYWQKNRPRVPAGVNRNRKTNGSIPETATSGGCQPPGDSATGFHREGPTSSATLKDLESPCQERAVVLDSTSVKISRLKNTIKSLKQQKKQVEHQLEEEKKANNERQKAERELEVQIQTLIIQKEELNTDLYHMERSLRYFEEESKDLAVRLQHSLQCKGELESALSAVIATEKKKANQLSSCSKAHTEWELEQSLQDQALLKAQLTQLKESFQQLQLERDECAEHIEGERARWHQRMSKMSQEICTLKKEKQQDMRRVEELERSLSKLKNQMAEPLPPEPPAVPSEVELQHLRKELERVAGELQSQVKNNQHISLLNRRQEERIREQEERLRKQEERLQEQHEKLRQLAKPQSVFEELNNENKSTLQLEQQVKELQEKLGEEHLEAASQQNQQLTAQLSLMALPGEGHGGEHLDSEGEEAPQPMPSVPEDLESREAMSSFMDHLKEKADLSELVKKQELRFIQYWQERCHQKIHHLLSEPGGRAKDAALGGGHHQAGAQGGDEGEAAGAAADGIAAYSNYNNGHRKFLAAAHNSADEPGPGAPAPQELGAADKHGDLREVTLTSSAQGEAREDPLLDKPTAQPIVQDHQEHPGLGSNCCVPLFCWAWLPRRRR

SEQ ID NO: 30164 - protein, 351 aa, Homo sapiens
MAAAPLKVCIVGSGNWGSAVAKIIGNNVKKLQKFASTVKMWVFEETVNGRKLTDIINNDHENVKYLPGHKLPENVVAMSNLSEAVQDADLLVFVIPHQFIHRICDEITGRVPKKALGITLIKGIDEGPEGLKLISDIIREKMGIDISVLMGANIANEVAAEKFCETTIGSKVMENGLLFKELLQTPNFRITVVDDADTVELCGALKNIVAVGAGFCDGLRCGDNTKAAVIRLGLMEMIAFARIFCKGQVSTATFLESCGVADLITTCYGGRNRRVAEAFARTGKTIEELEKEMLNGQKLQGPQTSAEVYRILKQKGLLDKFPLFTAVYQICYESRPVQEMLSCLQSHPEHT

SEQ ID NO: 30165 - protein, 596 aa, Homo sapiens
MAGNCGARGALSAHTLLFDLPPALLGELCAVLDSCDGALGWRGLAERLSSSWLDVRHIEKYVDQGKSGTRELLWSWAQKNKTIGDLLQVLQEMGHRRAIHLITNYGAVLSPSEKSYQEGGFPNILFKETANVTVDNVLIPEHNEKGILLKSSISFQNIIEGTRNFHKDFLIGEGEIFEVYRVEIQNLTYAVKLFKQEKKMQCKKHWKRFLSELEVLLLFHHPNILELAAYFTETEKFCLIYPYMRNGTLFDRLQCVGDTAPLPWHIRIGILIGISKAIHYLHNVQPCSVICGSISSANILLDDQFQPKLTDFAMAHFRSHLEHQSCTINMTSSSSKHLWYMPEEYIRQGKLSIKTDVYSFGIVIMEVLTGCRVVLDDPKHIQLRDLLRELMEKRGLDSCLSFLDKKVPPCPRNFSAKLFCLAGRCAATRAKLRPSMDEVLNTLESTQASLYFAEDPPTSLKSFRCPSPLFLENVPSIPVEDDESQNNNLLPSDEGLRIDRMTQKTPFECSQSEVMFLSLDKKPESKRNEEACNMPSSSCEESWFPKYIVPSQDLRPYKVNIDPSSEAPGHSCRSRPVESSCSSKFSWDEYEQYKKE

SEQ ID NO: 30166 - protein, 535 aa, Homo sapiens
MAGNCGARGALSAHTLLFDLPPALLGELCAVLDSCDGALGWRGLGAVLSPSEKSYQEGGFPNILFKETANVTVDNVLIPEHNEKGILLKSSISFQNIIEGTRNFHKDFLIGEGEIFEVYRVEIQNLTYAVKLFKQEKKMQCKKHWKRFLSELEVLLLFHHPNILELAAYFTETEKFCLIYPYMRNGTLFDRLQCVGDTAPLPWHIRIGILIGISKAIHYLHNVQPCSVICGSISSANILLDDQFQPKLTDFAMAHFRSHLEHQSCTINMTSSSSKHLWYMPEEYIRQGKLSIKTDVYSFGIVIMEVLTGCRVVLDDPKHIQLRDLLRELMEKRGLDSCLSFLDKKVPPCPRNFSAKLFCLAGRCAATRAKLRPSMDEVLNTLESTQASLYFAEDPPTSLKSFRCPSPLFLENVPSIPVEDDESQNNNLLPSDEGLRIDRMTQKTPFECSQSEVMFLSLDKKPESKRNEEACNMPSSSCEESWFPKYIVPSQDLRPYKVNIDPSSEAPGHSCRSRPVESSCSSKFSWDEYEQYKKE

SEQ ID NO: 30167 - protein, 166 aa, Homo sapiens
MLRGVLGKTFRLVGYTIQYGCIAHCAFEYVGGVVMCSGPSMEPTIQNSDIVFAENLSRHFYGIQRGDIVIAKSPSDPKSNICKRVIGLEGDKILTTSPSDFFKSHSYVPMGHVWLEGDNLQNSTDSRCYGPIPYGLIRGRIFFKIWPLSDFGFLRASPNGHRFSDD

SEQ ID NO: 30168 - protein, 375 aa, Homo sapiens
MDVTSQARGVGLEMYPGTAQPAAPNTTSPELNLSHPLLGTALANGTGELSEHQQYVIGLFLSCLYTIFLFPIGFVGNILILVVNISFREKMTIPDLYFINLAVADLILVADSLIEVFNLHERYYDIAVLCTFMSLFLQVNMYSSVFFLTWMSFDRYIALARAMRCSLFRTKHHARLSCGLIWMASVSATLVPFTAVHLQHTDEACFCFADVREVQWLEVTLGFIVPFAIIGLCYSLIVRVLVRAHRHRGLRPRRQKALRMILAVVLVFFVCWLPENVFISVHLLQRTQPGAAPCKQSFRHAHPLTGHIVNLAAFSNSCLNPLIYSFLGETFRDKLRLYIEQKTNLPALNRFCHAALKAVIPDSTEQSDVRFSSAV

SEQ ID NO: 30169 - protein, 190 aa, Homo sapiens
  MOD_RES (40)..(40): Selenocysteine
MAFIAKSFYDLSAISLDGEKVDFNTFRGRAVLIENVASLXGTTTRDFTQLNELQCRFPRRLVVLGFPCNQFGHQENCQNEEILNSLKYVRPGGGYQPTFTLVQKCEVNGQNEHPVFAYLKDKLPYPYDDPFSLMTDPKLIIWSPVRRSDVAWNFEKFLIGPEGEPFRRYSRTFPTINIEPDIKRLLKVAI

SEQ ID NO: 30170 - protein, 963 aa, Homo sapiens
MDAPKAGYAFEYLIETLNDSSHKKFFDVSKLGTKYDVLPYSIRVLLEAAVRNCDGFLMKKEDVMNILDWKTKQSNVEVPFFPARVLLQDFTGIPAMVDFAAMREAVKTLGGDPEKVHPACPTDLTVDHSLQIDFSKCAIQNAPNPGGGDLQKAGKLSPLKVQPKKLPCRGQTTCRGSCDSGELGRNSGTFSSQIENTPILCPFHLQPVPEPETVLKNQEVEFGRNRERLQFFKWSSRVFKNVAVIPPGTGMAHQINLEYLSRVVFEEKDLLFPDSVVGTDSHITMVNGLGILGWGVGGIETEAVMLGLPVSLTLPEVVGCELTGSSNPFVTSIDVVLGITKHLRQVGVAGKFVEFFGSGVSQLSIVDRTTIANMCPEYGAILSFFPVDNVTLKHLEHTGFSKAKLESMETYLKAVKLFRNDQNSSGEPEYSQVIQINLNSIVPSVSGPKRPQDRVAVTDMKSDFQACLNEKVGFKGFQIAAEKQKDIVSIHYEGSEYKLSHGSVVIAAVISCTNNCNPSVMLAAGLLAKKAVEAGLRVKPYIRTSLSPGSGMVTHYLSSSGVLPYLSKLGFEIVGYGCSICVGNTAPLSDAVLNAVKQGDLVTCGILSGNKNFEGRLCDCVRANYLASPPLVVAYAIAGTVNIDFQTEPLGTDPTGKNIYLHDIWPSREEVHRVEEEHVILSMFKALKDKIEMGNKRWNSLEAPDSVLFPWDLKSTYIRCPSFFDKLTKEPIALQAIENAHVLLYLGDSVTTDHISPAGSIARNSAAAKYLTNRGLTPREFNSYGARRGNDAVMTRGTFANIKLFNKFIGKPAPKTIHFPSGQTLDVFEAAELYQKEGIPLIILAGKKYGSGNSRDWAAKGPYLLGVKAVLAESYEKIHKDHLIGIGIAPLQFLPGENADSLGLSGRETFSLTFPEELSPGITLNIQTSTGKVFSVIASFEDDVEITLYKHGGLLNFVARKFS

SEQ ID NO: 30171 - protein, 343 aa, Homo sapiens
MDAPKAGYAFEYLIETLNDSSHKKFFDVSKLGTKYDVLPYSIRVLLEAAVRNCDGFLMKKEDVMNILDWKTKQSNVEVPFFPARVLLQDFTGIPAMVDFAAMREAVKTLGGDPEKVHPACPTDLTVDHSLQIDFSKCAIQNAPNPGGGDLQKAGKLSPLKVQPKKLPCRGQTTCRGSCDSGELGRNSGTFSSQIENTPILCPFHLQPVPEPETVLKNQEVEFGRNRERLQFFKWSSRVFKNVAVIPPGTGMAHQINLEYLSRVVFEEKDLLFPDSVVGTDSHITMVNGLGILGWGVGGIETEAVMLGLPVSLTLPEVVGCELTGSSNPFVTSIDVVLGITKVS

SEQ ID NO: 30172 - protein, 175 aa, Homo sapiens
MAQSQGWVKRYIKAFCKGFFVAVPVAVTFLDRVACVARVEGASMQPSLNPGGSQSSDVVLLNHWKVRNFEVHRGDIVSLVSPKNPEQKIIKRVIALEGDIVRTIGHKNRYVKVPRGHIWVEGDHHGHSFDSNSFGPVSLGLLHAHATHILWPPERWQKLESVLPPERLPVQREEE

SEQ ID NO: 30173 - protein, 110 aa, Homo sapiens
MAQSQGWVKRYIKAFCKGFFVAVPVAVTFLDRVACVARVEGASMQPSLNPGGSQSSDVVLLNHWKVRNFEVHRGDIVSLVSPKNPEQKIIKRVIALEGDIVRDGRKLKRI

SEQ ID NO: 30174 - protein, 1556 aa, Homo sapiens
MASELGARDDGGCTELAKPLYLQYLERALRLDHFLRQTSAIFNRNISSDDSEDGLDDSNPLLPQSGDPLIQVKEEPPNSLLGETSGAGSSGMLNTYSLNGVLQSESKCDKGNLYNFSKLKKSRKWLKSILLSDESSEADSQSEDDDEEELNLSREELHNMLRLHKYKKLHQNKYSKDKELQQYQYYSAGLLSTYDPFYEQQRHLLGPKKKKFKEEKKLKAKLKKVKKKRRRDEELSSEESPRRHHHQTKVFAKFSHDAPPPGTKKKHLSIEQLNARRRKVWLSIVKKELPKANKQKASARNLFLTNSRKLAHQCMKEVRRAALQAQKNCKETLPRARRLTKEMLLYWKKYEKVEKEHRKRAEKEALEQRKLDEEMREAKRQQRKLNFLITQTELYAHFMSRKRDMGHDGIQEEILRKLEDSSTQRQIDIGGGVVVNITQEDYDSNHFKAQALKNAENAYHIHQARTRSFDEDAKESRAAALRAANKSGTGFGESYSLANPSIRAGEDIPQPTIFNGKLKGYQLKGMNWLANLYEQGINGILADEMGLGKTVQSIALLAHLAERENIWGPFLIISPASTLNNWHQEFTRFVPKFKVLPYWGNPHDRKVIRRFWSQKTLYTQDAPFHVVITSYQLVVQDVKYFQRVKWQYMVLDEAQALKSSSSVRWKILLQFQCRNRLLLTGTPIQNTMAELWALLHFIMPTLFDSHEEFNEWFSKDIESHAENKSAIDENQLSRLHMILKPFMLRRIKKDVENELSDKIEILMYCQLTSRQKLLYQALKNKISIEDLLQSSMGSTQQAQNTTSSLMNLVMQFRKVCNHPELFERQETWSPFHISLKPYHISKFIYRHGQIRVFNHSRDRWLRVLSPFAPDYIQRSLFHRKGINEESCFSFLRFIDISPAEMANLMLQGLLARWLALFLSLKASYRLHQLRSWGAPEGESHQRYLRNKDFLLGVNFPLSFPNLCSCPLLKSLVFSSHCKAVSGYSDQVVHQRRSATSSLRRCLLTELPSFLCVASPRVTAVPLDSYCNDRSAEYERRVLKEGGSLAAKQCLLNGAPELAADWLNRRSQFFPEPAGGLWSIRPQNGWSFIRIPGKESLITDSGKLYALDVLLTRLKSQGHRVLIYSQMTRMIDLLEEYMVYRKHTYMRLDGSSKISERRDMVADFQNRNDIFVFLLSTRAGGLGINLTAADTVIFYDSDWNPTVDQQAMDRAHRLGQTKQVTVYRLICKGTIEERILQRAKEKSEIQRMVISGGNFKPDTLKPKEVVSLLLDDEELEKKLRLRQEEKRQQEETNRVKERKRKREKYAEKKKKEDELDGKRRKEGVNLVIPFVPSADNSNLSADGDDSFISVDSAMPSPFSEISISSELHTGSIPLDESSSDMLVIVDDPASSAPQSRATNSPASITGSVSDTVNGISIQEMPAAGRGHSARSRGRPKGSGSTAKGAGKGRSRKSTAGSAAAMAGAKAGAAAASAAAYAAYGYNVSKGISASSPLQTSLVRPAGLADFGPSSASSPLSSPLSKGNNVPGNPKNLHMTSSLAPDSLVRKQGKGTNPSGGR

SEQ ID NO: 30175 - protein, 555 aa, Homo sapiens
MNVDAEASMAVISLLFLAVMYVVHHPLMVSDRMDLDTLARSRQLEKRMSEEMRLLEMEFEERKRAAEQRQKAENFWTGDTSSDQLVLGKKDMGWPFQADGQEGPLGWMLGNLWNTGLFCLFLVFELLRQNMQHEPAFDSSSEEEEEEVRVVPVTSYNWLTDFPSQEALDSFYKHYVQNAIRDLPCTCEFVESFVDDLIEACRVLSRQEAHPQLEDCLGIGAAFEKWGTLHETQKFDILVPIVPPQGTMFVLEMRDPALGRRCGCVLVESECVCKREKLLGDVLCLVHHHRDPSAVLGKCSSSIKAALCTGFHLDVCKTVQWFRNMMGNAWALVAHKYDFKLSLPPSTTSCKLRLDYRSGRFLSIHLVLGVQREDTLVYLVSQAPDQEQLTSVDWPESFVACEHLFLKLVGRFAPENTCHLKCLQIILSLRQHQSLPHGASRPILTSYHFKTALMHLLLRLPLTDWAHNMLSQRLQDILWFLGRGLQQRSLHHFLIGNNFLPLTIPIPKTFRNAEPVNLFQHLVLNPKAHSQAVEEFQNLLTQVKTLPHAPLAAAP

SEQ ID NO: 30176 - protein, 563 aa, Homo sapiens
MTTDSYSPTSPDAEASMAVISLLFLAVMYVVHHPLMVSDRMDLDTLARSRQLEKRMSEEMRLLEMEFEERKRAAEQRQKAENFWTGDTSSDQLVLGKKDMGWPFQADGQEGPLGWMLGNLWNTGLFCLFLVFELLRQNMQHEPAFDSSSEEEEEEVRVVPVTSYNWLTDFPSQEALDSFYKHYVQNAIRDLPCTCEFVESFVDDLIEACRVLSRQEAHPQLEDCLGIGAAFEKWGTLHETQKFDILVPIVPPQGTMFVLEMRDPALGRRCGCVLVESECVCKREKLLGDVLCLVHHHRDPSAVLGKCSSSIKAALCTGFHLDVCKTVQWFRNMMGNAWALVAHKYDFKLSLPPSTTSCKLRLDYRSGRFLSIHLVLGVQREDTLVYLVSQAPDQEQLTSVDWPESFVACEHLFLKLVGRFAPENTCHLKCLQIILSLRQHQSLPHGASRPILTSYHFKTALMHLLLRLPLTDWAHNMLSQRLQDILWFLGRGLQQRSLHHFLIGNNFLPLTIPIPKTFRNAEPVNLFQHLVLNPKAHSQAVEEFQNLLTQVKTLPHAPLAAAP

SEQ ID NO: 30177 - protein, 547 aa, Homo sapiens
MAVISLLFLAVMYVVHHPLMVSDRMDLDTLARSRQLEKRMSEEMRLLEMEFEERKRAAEQRQKAENFWTGDTSSDQLVLGKKDMGWPFQADGQEGPLGWMLGNLWNTGLFCLFLVFELLRQNMQHEPAFDSSSEEEEEEVRVVPVTSYNWLTDFPSQEALDSFYKHYVQNAIRDLPCTCEFVESFVDDLIEACRVLSRQEAHPQLEDCLGIGAAFEKWGTLHETQKFDILVPIVPPQGTMFVLEMRDPALGRRCGCVLVESECVCKREKLLGDVLCLVHHHRDPSAVLGKCSSSIKAALCTGFHLDVCKTVQWFRNMMGNAWALVAHKYDFKLSLPPSTTSCKLRLDYRSGRFLSIHLVLGVQREDTLVYLVSQAPDQEQLTSVDWPESFVACEHLFLKLVGRFAPENTCHLKCLQIILSLRQHQSLPHGASRPILTSYHFKTALMHLLLRLPLTDWAHNMLSQRLQDILWFLGRGLQQRSLHHFLIGNNFLPLTIPIPKTFRNAEPVNLFQHLVLNPKAHSQAVEEFQNLLTQVKTLPHAPLAAAP

SEQ ID NO: 30178 - protein, 291 aa, Homo sapiens
MLRREARLRREYLYRKAREEAQRSAQERKERLRRALEENRLIPTELRREALALQGSLEFDDAGGEGVTSHVDDEYRWAGVEDPKVMITTSRDPSSRLKMFAKELKLVFPGAQRMNRGRHEVGALVRACKANGVTDLLVVHEHRGTPVGLIVSHLPFGPTAYFTLCNVVMRHDIPDLGTMSEAKPHLITHGFSSRLGKRVSDILRYLFPVPKDDSHRVITFANQDDYISFRHHVYKKTDHRNVELTEVGPRFELKLYMIRLGTLEQEATADVEWRWHPYTNTARKRVFLSTE

SEQ ID NO: 30179 - protein, 394 aa, Homo sapiens
MFCPLKLILLPVLLDYSLGLNDLNVSPPELTVHVGDSALMGCVFQSTEDKCIFKIDWTLSPGEHAKDEYVLYYYSNLSVPIGRFQNRVHLMGDILCNDGSLLLQDVQEADQGTYICEIRLKGESQVFKKAVVLHVLPEEPKELMVHVGGLIQMGCVFQSTEVKHVTKVEWIFSGRRAKEEIVFRYYHKLRMSVEYSQSWGHFQNRVNLVGDIFRNDGSIMLQGVRESDGGNYTCSIHLGNLVFKKTIVLHVSPEEPRTLVTPAALRPLVLGGNQLVIIVGIVCATILLLPVLILIVKKTCGNKSSVNSTVLVKNTKKTNPEIKEKPCHFERCEGEKHIYSPIIVREVIEEEEPSEKSEATYMTMHPVWPSLRSDRNNSLEKKSGGGMPKTQQAF

SEQ ID NO: 30180 - protein, 384 aa, Homo sapiens
MVSGDYSLGLNDLNVSPPELTVHVGDSALMGCVFQSTEDKCIFKIDWTLSPGEHAKDEYVLYYYSNLSVPIGRFQNRVHLMGDILCNDGSLLLQDVQEADQGTYICEIRLKGESQVFKKAVVLHVLPEEPKELMVHVGGLIQMGCVFQSTEVKHVTKVEWIFSGRRAKEEIVFRYYHKLRMSVEYSQSWGHFQNRVNLVGDIFRNDGSIMLQGVRESDGGNYTCSIHLGNLVFKKTIVLHVSPEEPRTLVTPAALRPLVLGGNQLVIIVGIVCATILLLPVLILIVKKTCGNKSSVNSTVLVKNTKKTNPEIKEKPCHFERCEGEKHIYSPIIVREVIEEEEPSEKSEATYMTMHPVWPSLRSDRNNSLEKKSGGGMPKTQQAF

SEQ ID NO: 30181 - protein, 259 aa, Homo sapiens
MFCPLKLILLPVLLDYSLGLNDLNVSPPELTVHVGDSALMGCVFQSTEDKCIFKIDWTLSPGEHAKDEYVLYYYSNLSVPIGRFQNRVHLMGDILCNDGSLLLQDVQEADQGTYICEIRLKGESQVFKKAVVLHVLPEEPKELMVHVGGLIQMGCVFQSTEVKHVTKVEWIFSGRRAKEEIVFRYYHKLRMSVEYSQSWGHFQNRVNLVGDIFRNDGSIMLQGVRESDGGNYTCSIHLGNLVFKKTIVLHVSPEEPRSI

SEQ ID NO: 30182 - protein, 355 aa, Homo sapiens
MGCVFQSTEDKCIFKIDWTLSPGEHAKDEYVLYYYSNLSVPIGRFQNRVHLMGDILCNDGSLLLQDVQEADQGTYICEIRLKGESQVFKKAVVLHVLPEEPKELMVHVGGLIQMGCVFQSTEVKHVTKVEWIFSGRRAKEEIVFRYYHKLRMSVEYSQSWGHFQNRVNLVGDIFRNDGSIMLQGVRESDGGNYTCSIHLGNLVFKKTIVLHVSPEEPRTLVTPAALRPLVLGGNQLVIIVGIVCATILLLPVLILIVKKTCGNKSSVNSTVLVKNTKKTNPEIKEKPCHFERCEGEKHIYSPIIVREVIEEEEPSEKSEATYMTMHPVWPSLRSDRNNSLEKKSGGGMPKTQQAF

SEQ ID NO: 30183 - protein, 498 aa, Homo sapiens
MNQSIPVAPTPPRRVRLKPWLVAQVNSCQYPGLQWVNGEKKLFCIPWRHATRHGPSQDGDNTIFKAWAKETGKYTEGVDEADPAKWKANLRCALNKSRDFRLIYDGPRDMPPQPYKIYEVCSNGPAPTDSQPPEDYSFGAGEEEEEEEELQRMLPSLSLTEDVKWPPTLQPPTLRPPTLQPPTLQPPVVLGPPAPDPSPLAPPPGNPAGFRELLSEVLEPGPLPASLPPAGEQLLPDLLISPHMLPLTDLEIKFQYRGRPPRALTISNPHGCRLFYSQLEATQEQVELFGPISLEQVRFPSPEDIPSDKQRFYTNQLLDVLDRGLILQLQGQDLYAIRLCQCKVFWSGPCASAHDSCPNPIQREVKTKLFSLEHFLNELILFQKGQTNTPPPFEIFFCFGEEWPDRKPREKKLITVQVVPVAARLLLEMFSGELSWSADSIRLQISNPDLKDRMVEQFKELHHIWQSQQRLQPVAQAPPGAGLGVGQGPWPMHPAGMQ

SEQ ID NO: 30184 - protein, 514 aa, Homo sapiens
MNQSIPVAPTPPRRVRLKPWLVAQVNSCQYPGLQWVNGEKKLFCIPWRHATRHGPSQDGDNTIFKAWAKETGKYTEGVDEADPAKWKANLRCALNKSRDFRLIYDGPRDMPPQPYKIYEVCSNGPAPTDSQPPEDYSFGAGEEEEEEEELQRMLPSLSLTDAVQSGPHMTPYSLLKEDVKWPPTLQPPTLRPPTLQPPTLQPPVVLGPPAPDPSPLAPPPGNPAGFRELLSEVLEPGPLPASLPPAGEQLLPDLLISPHMLPLTDLEIKFQYRGRPPRALTISNPHGCRLFYSQLEATQEQVELFGPISLEQVRFPSPEDIPSDKQRFYTNQLLDVLDRGLILQLQGQDLYAIRLCQCKVFWSGPCASAHDSCPNPIQREVKTKLFSLEHFLNELILFQKGQTNTPPPFEIFFCFGEEWPDRKPREKKLITVQVVPVAARLLLEMFSGELSWSADSIRLQISNPDLKDRMVEQFKELHHIWQSQQRLQPVAQAPPGAGLGVGQGPWPMHPAGMQ

SEQ ID NO: 30185 - protein, 504 aa, Homo sapiens
MNQSIPVAPTPPRRVRLKPWLVAQVNSCQYPGLQWVNGEKKLFCIPWRHATRHGPSQDGDNTIFKAWAKETGKYTEGVDEADPAKWKANLRCALNKSRDFRLIYDGPRDMPPQPYKIYEVCSNGPAPTDSQPPEDYSFGAGEEEEEEEELQRMLPSLSLTDAVQSGPHMTPYSLLKEDVKWPPTLQPPTLQPPVVLGPPAPDPSPLAPPPGNPAGFRELLSEVLEPGPLPASLPPAGEQLLPDLLISPHMLPLTDLEIKFQYRGRPPRALTISNPHGCRLFYSQLEATQEQVELFGPISLEQVRFPSPEDIPSDKQRFYTNQLLDVLDRGLILQLQGQDLYAIRLCQCKVFWSGPCASAHDSCPNPIQREVKTKLFSLEHFLNELILFQKGQTNTPPPFEIFFCFGEEWPDRKPREKKLITVQVVPVAARLLLEMFSGELSWSADSIRLQISNPDLKDRMVEQFKELHHIWQSQQRLQPVAQAPPGAGLGVGQGPWPMHPAGMQ

SEQ ID NO: 30186 - protein, 488 aa, Homo sapiens
MNQSIPVAPTPPRRVRLKPWLVAQVNSCQYPGLQWVNGEKKLFCIPWRHATRHGPSQDGDNTIFKAWAKETGKYTEGVDEADPAKWKANLRCALNKSRDFRLIYDGPRDMPPQPYKIYEVCSNGPAPTDSQPPEDYSFGAGEEEEEEEELQRMLPSLSLTEDVKWPPTLQPPTLQPPVVLGPPAPDPSPLAPPPGNPAGFRELLSEVLEPGPLPASLPPAGEQLLPDLLISPHMLPLTDLEIKFQYRGRPPRALTISNPHGCRLFYSQLEATQEQVELFGPISLEQVRFPSPEDIPSDKQRFYTNQLLDVLDRGLILQLQGQDLYAIRLCQCKVFWSGPCASAHDSCPNPIQREVKTKLFSLEHFLNELILFQKGQTNTPPPFEIFFCFGEEWPDRKPREKKLITVQVVPVAARLLLEMFSGELSWSADSIRLQISNPDLKDRMVEQFKELHHIWQSQQRLQPVAQAPPGAGLGVGQGPWPMHPAGMQ

SEQ ID NO: 30187 - protein, 412 aa, Homo sapiens
MNQSIPVAPTPPRRVRLKPWLVAQVNSCQYPGLQWVNGEKKLFCIPWRHATRHGPSQDGDNTIFKAWAKETGKYTEGVDEADPAKWKANLRCALNKSRDFRLIYDGPRDMPPQPYKIYEVCSNGPAPTDSQPPEDYSFGAGEEEEEEEELQRMLPSLSLTVTDLEIKFQYRGRPPRALTISNPHGCRLFYSQLEATQEQVELFGPISLEQVRFPSPEDIPSDKQRFYTNQLLDVLDRGLILQLQGQDLYAIRLCQCKVFWSGPCASAHDSCPNPIQREVKTKLFSLEHFLNELILFQKGQTNTPPPFEIFFCFGEEWPDRKPREKKLITVQVVPVAARLLLEMFSGELSWSADSIRLQISNPDLKDRMVEQFKELHHIWQSQQRLQPVAQAPPGAGLGVGQGPWPMHPAGMQ

SEQ ID NO: 30188 - protein, 147 aa, Homo sapiens
MNQSIPVAPTPPRRVRLKPWLVAQVNSCQYPGLQWVNGEKKLFCIPWRHATRHGPSQDGDNTIFKAWAKETGKYTEGVDEADPAKWKANLRCALNKSRDFRLIYDGPRDMPPQPYKIYETPSPLRITLLVQERRRKKRKSCRGCCQA

SEQ ID NO: 30189 - protein, 245 aa, Homo sapiens
MCAEVGPALCRGMERNSLGCCEAPKKLSLSFSIEAILKRPARRSDMDRPEGPGEEGPGEAAASGSGLEKPPKDQPQEGRKSKRRVRTTFTTEQLHELEKIFHFTHYPDVHIRSQLAARINLPEARVQIWFQNQRAKWRKQEKIGNLGAPQQLSEASVALPTNLDVAGPTWTSTALRRLAPPTSCCPSAQDQLASAWFPAWITLLPAHPWETQPVPGLPIHQTCIPVLCILPPPHPKWGSICATST

SEQ ID NO: 30190 - protein, 399 aa, Homo sapiens
MSDILRELLCVSEKAANIARACRQQEALFQLLIEEKKEGEKNKKFAVDFKTLADVLVQEVIKQNMENKFPGLEKNIFGEESNEFTNDWGEKITLRLCSTEEETAELLSKVLNGNKVASEALARVVHQDVAFTDPTLDSTEINVPQDILGIWVDPIDSTYQYIKGSADIKSNQGIFPCGLQCVTILIGVYDIQTGVPLMGVINQPFVSRDPNTLRWKGQCYWGLSYMGTNMHSLQLTISRRNGSETHTGNTGSEAAFSPSFSAVISTSEKETIKAALSRVCGDRIFGAAGAGYKSLCVVQGLVDIYIFSEDTTFKWDSCAAHAILRAMGGGIVDLKECLERNPETGLDLPQLVYHVENEGAAGVDRWANKGGLIAYRSRKRLETFLSLLVQNLAPAETHT

SEQ ID NO: 30191 - protein, 975 aa, Homo sapiens
MDLNSASTVVLQVLTQATSQDTAVLKPAEEQLKQWETQPGFYSVLLNIFTNHTLDINVRWLAVLYFKHGIDRYWRRVAPHALSEEEKTTLRAGLITNFNEPINQIATQIAVLIAKVARLDCPRQWPELIPTLIESVKVQDDLRQHRALLTFYHVTKTLASKRLAADRKLFYDLASGIYNFACSLWNHHTDTFLQEVSSGNEAAILSSLERTLLSLKVLRKLTVNGFVEPHKNMEVMGFLHGIFERLKQFLECSRSIGTDNVCRDRLEKTIILFTKVLLDFLDQHPFSFTPLIQRSLEFSVSYVFTEVGEGVTFERFIVQCMNLIKMIVKNYAYKPSKNFEDSSPETLEAHKIKMAFFTYPTLTEICRRLVSHYFLLTEEELTMWEEDPEGFTVEETGGDSWKYSLRPCTEVLFIDIFHEYNQTLTPVLLEMMQTLQGPTNVEDMNALLIKDAVYNAVGLAAYELFDSVDFDQWFKNQLLPELQVIHNRYKPLRRRVIWLIGQWISVKFKSDLRPMLYEAICNLLQDQDLVVRIETATTLKLTVDDFEFRTDQFLPYLETMFTLLFQLLQQVTECDTKMHVLHVLSCVIERVNMQIRPYVGCLVQYLPLLWKQSEEHNMLRCAILTTLIHLVQGLGADSKNLYPFLLPVIQLSTDVSQPPHVYLLEDGLELWLVTLENSPCITPELLRIFQNMSPLLELSSENLRTCFKIINGYIFLSSTEFLQTYAVGLCQSFCELLKEITTEGQVQVLKVVENALKVNPILGPQMFQPILPYVFKGIIEGERYPVVMSTYLGVMGRVLLQNTSFFSSLLNEMAHKFNQEMDQLLGNMIEMWVDRMDNITQPERRKLSALALLSLLPSDNSVIQDKFCGIINISVEGLHDVMTEDPETGTYKDCMLMSHLEEPKVTEDEEPPTEQDKRKKMLALKDPVHTVSLQQFIYEKLKAQQEMLGEQGFQSLMETVDTEIVTQLQEFLQGF

SEQ ID NO: 30192 - protein, 1015 aa, Homo sapiens
MVQPIIHLGYVVYSLLYLGYKPVQHVTALNTVSSCHKMVSMDLNSASTVVLQVLTQATSQDTAVLKPAEEQLKQWETQPGFYSVLLNIFTNHTLDINVRWLAVLYFKHGIDRYWRRVAPHALSEEEKTTLRAGLITNFNEPINQIATQIAVLIAKVARLDCPRQWPELIPTLIESVKVQDDLRQHRALLTFYHVTKTLASKRLAADRKLFYDLASGIYNFACSLWNHHTDTFLQEVSSGNEAAILSSLERTLLSLKVLRKLTVNGFVEPHKNMEVMGFLHGIFERLKQFLECSRSIGTDNVCRDRLEKTIILFTKVLLDFLDQHPFSFTPLIQRSLEFSVSYVFTEVGEGVTFERFIVQCMNLIKMIVKNYAYKPSKNFEDSSPETLEAHKIKMAFFTYPTLTEICRRLVSHYFLLTEEELTMWEEDPEGFTVEETGGDSWKYSLRPCTEVLFIDIFHEYNQTLTPVLLEMMQTLQGPTNVEDMNALLIKDAVYNAVGLAAYELFDSVDFDQWFKNQLLPELQVIHNRYKPLRRRVIWLIGQWISVKFKSDLRPMLYEAICNLLQDQDLVVRIETATTLKLTVDDFEFRTDQFLPYLETMFTLLFQLLQQVTECDTKMHVLHVLSCVIERVNMQIRPYVGCLVQYLPLLWKQSEEHNMLRCAILTTLIHLVQGLGADSKNLYPFLLPVIQLSTDVSQPPHVYLLEDGLELWLVTLENSPCITPELLRIFQNMSPLLELSSENLRTCFKIINGYIFLSSTEFLQTYAVGLCQSFCELLKEITTEGQVQVLKVVENALKVNPILGPQMFQPILPYVFKGIIEGERYPVVMSTYLGVMGRVLLQNTSFFSSLLNEMAHKFNQEMDQLLGNMIEMWVDRMDNITQPERRKLSALALLSLLPSDNSVIQDKFCGIINISVEGLHDVMTEDPETGTYKDCMLMSHLEEPKVTEDEEPPTEQDKRKKMLALKDPVHTVSLQQFIYEKLKAQQEMLGEQGFQSLMETVDTEIVTQLQEFLQGF

SEQ ID NO: 30193 - protein, 1039 aa, Homo sapiens
MARALCPLQALWLLEWVLLLLGPCAAPPAWALNLDPVQLTFYAGPNGSQFGFSLDFHKDSHGRVAIVVGAPRTLGPSQEETGGVFLCPWRAEGGQCPSLLFDLRDETRNVGSQTLQTFKARQGLGASVVSWSDVIVACAPWQHWNVLEKTEEAEKTPVGSCFLAQPESGRRAEYSPCRGNTLSRIYVENDFSWDKRYCEAGFSSVVTQAGELVLGAPGGYYFLGLLAQAPVADIFSSYRPGILLWHVSSQSLSFDSSNPEYFDGYWGYSVAVGEFDGDLNTTEYVVGAPTWSWTLGAVEILDSYYQRLHRLRGEQMASYFGHSVAVTDVNGDGRHDLLVGAPLYMESRADRKLAEVGRVYLFLQPRGPHALGAPSLLLTGTQLYGRFGSAIAPLGDLDRDGYNDIAVAAPYGGPSGRGQVLVFLGQSEGLRSRPSQVLDSPFPTGSAFGFSLRGAVDIDDNGYPDLIVGAYGANQVAVYRAQPVVKASVQLLVQDSLNPAVKSCVLPQTKTPVSCFNIQMCVGATGHNIPQKLSLNAELQLDRQKPRQGRRVLLLGSQQAGTTLNLDLGGKHSPICHTTMAFLRDEADFRDKLSPIVLSLNVSLPPTEAGMAPAVVLHGDTHVQEQTRIVLDCGEDDVCVPQLQLTASVTGSPLLVGADNVLELQMDAANEGEGAYEAELAVHLPQGAHYMRALSNVEGFERLICNQKKENETRVVLCELGNPMKKNAQIGIAMLVSVGNLEEAGESVSFQLQIRSKNSQNPNSKIVLLDVPVRAEAQVELRGNSFPASLVVAAEEGEREQNSLDSWGPKVEHTYELHNNGPGTVNGLHLSIHLPGQSQPSDLLYILDIQPQGGLQCFPQPPVNPLKVDWGLPIPSPSPIHPAHHKRDRRQIFLPEPEQPSRLQDPVLVSCDSAPCTVVQCDLQEMARGQRAMVTVLAFLWLPSLYQRPLDQFVLQSHAWFNVSSLPYAVPPLSLPRGEAQVWTQLLRALEERAIPIWWVLVGVLGGLLLLTILVLAMWKVGFFKRNRPPLEEDDEEGE

SEQ ID NO: 30194 - protein, 1005 aa, Homo sapiens
MARALCPLQALWLLEWVLLLLGPCAAPPAWALNLDPVQLTFYAGPNGSQFGFSLDFHKDSHGRVAIVVGAPRTLGPSQEETGGVFLCPWRAEGGQCPSLLFDLRDETRNVGSQTLQTFKARQGLGASVVSWSDVIVACAPWQHWNVLEKTEEAEKTPVGSCFLAQPESGRRAEYSPCRGNTLSRIYVENDFSWDKRYCEAGFSSVVTQAGELVLGAPGGYYFLGLLAQAPVADIFSSYRPGILLWHVSSQSLSFDSSNPEYFDGYWGYSVAVGEFDGDLNTTEYVVGAPTWSWTLGAVEILDSYYQRLHRLRGEQMASYFGHSVAVTDVNGDGRHDLLVGAPLYMESRADRKLAEVGRVYLFLQPRGPHALGAPSLLLTGTQLYGRFGSAIAPLGDLDRDGYNDIAVAAPYGGPSGRGQVLVFLGQSEGLRSRPSQVLDSPFPTGSAFGFSLRGAVDIDDNGYPDLIVGAYGANQVAVYRAQPVVKASVQLLVQDSLNPAVKSCVLPQTKTPVSCFNIQMCVGATGHNIPQKLSLNAELQLDRQKPRQGRRVLLLGSQQAGTTLNLDLGGKHSPICHTTMAFLRDEADFRDKLSPIVLSLNVSLPPTEAGMAPAVVLHGDTHVQEQTRIVLDCGEDDVCVPQLQLTASVTGSPLLVGADNVLELQMDAANEGEGAYEAELAVHLPQGAHYMRALSNVEGFERLICNQKKENETRVVLCELGNPMKKNAQIGIAMLVSVGNLEEAGESVSFQLQIRSKNSQNPNSKIVLLDVPVRAEAQVELRGNSFPASLVVAAEEGEREQNSLDSWGPKVEHTYELHNNGPGTVNGLHLSIHLPGQSQPSDLLYILDIQPQGGLQCFPQPPVNPLKVDWGLPIPSPSPIHPAHHKRDRRQIFLPEPEQPSRLQDPVLVSCDSAPCTVVQCDLQEMARGQRAMVTVLAFLWLPSLYQVWTQLLRALEERAIPIWWVLVGVLGGLLLLTILVLAMWKVGFFKRNRPPLEEDDEEGE

SEQ ID NO: 30195 - protein, 953 aa, Homo sapiens
MARALCPLQALWLLEWVLLLLGPCAAPPAWALNLDPVQLTFYAGPNGSQFGFSLDFHKDSHGRVAIVVGAPRTLGPSQEETGGVFLCPWRAEGGQCPSLLFDLRDETRNVGSQTLQTFKARQGLGASVVSWSDVIVACAPWQHWNVLEKTEEAEKTPVGSCFLAQPESGRRAEYSPCRGNTLSRIYVENDFSWDKRYCEAGFSSVVTQAGELVLGAPGGYYFLGLLAQAPVADIFSSYRPGILLWHVSSQSLSFDSSNPEYFDGYWGYSVAVGEFDGDLNTTEYVVGAPTWSWTLGAVEILDSYYQRLHRLRGEQMASYFGHSVAVTDVNGDGRHDLLVGAPLYMESRADRKLAEVGRVYLFLQPRGPHALGAPSLLLTGTQLYGRFGSAIAPLGDLDRDGYNDIAVAAPYGGPSGRGQVLVFLGQSEGLRSRPSQVLDSPFPTGSAFGFSLRGAVDIDDNGYPDLIVGAYGANQVAVYRAQPVVKASVQLLVQDSLNPAVKSCVLPQTKTPVSCFNIQMCVGATGHNIPQKLSLNAELQLDRQKPRQGRRVLLLGSQQAGTTLNLDLGGKHSPICHTTMAFLRDEADFRDKLSPIVLSLNVSLPPTEAGMAPAVVLHGDTHVQEQTRIVLDCGEDDVCVPQLQLTASVTGSPLLVGADNVLELQMDAANEGEGAYEAELAVHLPQGAHYMRALSNVEGFERLICNQKKENETRVVLCELGNPMKKNAQIGIAMLVSVGNLEEAGESVSFQLQIRSKNSQNPNSKIVLLDVPVRAEAQVELRGNSFPASLVVAAEEGEREQNSLDSWGPKVEHTYELHNNGPGTVNGLHLSIHLPGQSQPSDLLYILDIQPQGGLQCFPQPPVNPLKVDWGLPIPSPSPIHPAHHKRDRRQIFLPEPEQPSRLQDPVLVVSRLSGLWPGLPGTHGAEGMGGGRGVRVCCGPLWATLGPWEHFK

SEQ ID NO: 30196 - protein, 205 aa, Homo sapiens
MAASTASQRPLKGILKDNTSTTSSMVASAEHPRGSVHEQLSKKSQKWDEMNILATYRPADKDYGLMKIDEPSTPYHSTMGDDEDACSDTETTEAMATDSLAKNLAAAEGLEPKYQVQEQESSGEEDSDLSPEEREKKRQFEMRRTLHYNEGLNIKLARQLISKDLHDDDKVEEMLETAHGESMNTEESNQGSTASDQQQNKSRSS

SEQ ID NO: 30197 - protein, 205 aa, Homo sapiens
MAASTASHRPIKGILKNKTSTTSSMVASAEQPRGNVDEELSKKSQKWDEMNILATYHPADKDYGLMKIDEPSTPYHSMMGDDEDACSDTEATEAMAPDILARKLAAAEGLEPKYRIQEQESSGEEDSDLSPEEREKKRQFEMKRKLHYNEGLNIKLARQLISKDLHDDDEDEEMLETADGESMNTEESNQGSTPSDQQQNKLRSS

SEQ ID NO: 30198 - protein, 461 aa, Homo sapiens
MTLPGGPTGMARPGGARPCSPGLERAPRRSVGELRLLFEARCAAVAAAAAAGEPRARGAKRRGGQVPNGLPRAPPAPVIPQLTVTAEEPDVPPTSPGPPERERDCLPAAGSSHLQQPRRLSTSSVSSTGSSSLLEDSEDDLLSDSESRSRGNVQLEAGEDVGQKNHWQKIRTMVNLPVISPFKKRYAWVQLAGHTGSFKAAGTSGLILKRCSEPERYCLARLMADALRGCVPAFHGVVERDGESYLQLQDLLDGFDGPCVLDCKMGVRTYLEEELTKARERPKLRKDMYKKMLAVDPEAPTEEEHAQRAVTKPRYMQWREGISSSTTLGFRIEGIKKADGSCSTDFKTTRSREQVLRVFEEFVQGDEEVLRRYLNRLQQIRDTLEVSEFFRRHEVIGSSLLFVHDHCHRAGVWLIDFGKTTPLPDGQILDHRRPWEEGNREDGYLLGLDNLIGILASLAER

SEQ ID NO: 30199 - protein, 304 aa, Homo sapiens
  MOD_RES (170)..(170): Selenocysteine
MPRQATSRLVVGEGEGSQGASGPAATMLRSLLLHSLRLCAQTASCLVLFPRFLGTAFMLWLLDFLCIRKHFLGRRRRGQPEPEVELNSEGEEVPPDDPPICVSDDNRLCTLASLKAVWHGQKLDFFKQAHEGGPAPNSEVVLPDGFQSQHILDYAQGNRPLVLNFGSCTXPPFMARMSAFQRLVTKYQRDVDFLIIYIEEAHPSDGWVTTDSPYIIPQHRSLEDRVSAARVLQQGAPGCALVLDTMANSSSSAYGAYFERLYVIQSGTIMYQGGRGPDGYQVSELRTWLERYDEQLHGARPRRV

SEQ ID NO: 30200 - protein, 1049 aa, Homo sapiens
MGSRTPESPLHAVQLRWGPRRRPPLLPLLLLLLPPPPRVGGFNLDAEAPAVLSGPPGSFFGFSVEFYRPGTDGVSVLVGAPKANTSQPGVLQGGAVYLCPWGASPTQCTPIEFDSKGSRLLESSLSSSEGEEPVEYKSLQWFGATVRAHGSSILACAPLYSWRTEKEPLSDPVGTCYLSTDNFTRILEYAPCRSDFSWAAGQGYCQGGFSAEFTKTGRVVLGGPGSYFWQGQILSATQEQIAESYYPEYLINLVQGQLQTRQASSIYDDSYLGYSVAVGEFSGDDTEDFVAGVPKGNLTYGYVTILNGSDIRSLYNFSGEQMASYFGYAVAATDVNGDGLDDLLVGAPLLMDRTPDGRPQEVGRVYVYLQHPAGIEPTPTLTLTGHDEFGRFGSSLTPLGDLDQDGYNDVAIGAPFGGETQQGVVFVFPGGPGGLGSKPSQVLQPLWAASHTPDFFGSALRGGRDLDGNGYPDLIVGSFGVDKAVVYRGRPIVSASASLTIFPAMFNPEERSCSLEGNPVACINLSFCLNASGKHVADSIGFTVELQLDWQKQKGGVRRALFLASRQATLTQTLLIQNGAREDCREMKIYLRNESEFRDKLSPIHIALNFSLDPQAPVDSHGLRPALHYQSKSRIEDKAQILLDCGEDNICVPDLQLEVFGEQNHVYLGDKNALNLTFHAQNVGEGGAYEAELRVTAPPEAEYSGLVRHPGNFSSLSCDYFAVNQSRLLVCDLGNPMKAGASLWGGLRFTVPHLRDTKKTIQFDFQILSKNLNNSQSDVVSFRLSVEAQAQVTLNGVSKPEAVLFPVSDWHPRDQPQKEEDLGPAVHHVYELINQGPSSISQGVLELSCPQALEGQQLLYVTRVTGLNCTTNHPINPKGLELDPEGSLHHQQKREAPSRSSASSGPQILKCPEAECFRLRCELGPLHQQESQSLQLHFRVWAKTFLQREHQPFSLQCEAVYKALKMPYRILPRQLPQKERQVATAVQWTKAEGSYGVPLWIIILAILFGLLLLGLLIYILYKLGFFKRSLPYGTAMEKAQLKPPATSDA

SEQ ID NO: 30201 - protein, 556 aa, Homo sapiens
MASKPAAGKSRGEKRKRVVLTLKEKIDICTRLEKGESRKALMQEYNVGMSTLYDIRAHKAQLLRFFASSDSNKALEQRRTLHTPKLEHLDRVLYEWFLGKRSEGVPVSGPMLIEKAKDFYEQMQLTEPCVFSGGWLWRFKARHGIKKLDASSEKQSADHQAAEQFCAFFRSLAAEHGLSAEQVYNADETGLFWRCLPNPTPEGGAVPGPKQGKDRLTVLMCANATGSHRLKPLAIGKCSGPRAFKGIQHLPVAYKAQGNAWVDKEIFSDWFHHIFVPSVREHFRTIGLPEDSKAVLLLDSSRAHPQEAELVSSNVFTIFLPASVASLVQPMEQGIRRDFMRNFINPPVPLQGPHARYNMNDAIFSVACAWNAVPSHVFRRAWRKLWPSVAFAEGSSSEEELEAECFPVKPHNKSFAHILELVKEGSSCPGQLRQRQAASWGVAGREAEGGRPPAATSPAEVVWSSEKTPKADQDGRGDPGEGEEVAWEQAAVAFDAVLRFAERQPCFSAQEVGQLRALRAVFRSQQQETVGLEDVVVTSPEELAIPKCCLEASTET

SEQ ID NO: 30202 - protein, 568 aa, Homo sapiens
MASKPAAGKSRGEKRKRVVLTLKEKIDICTRLEKGESRKALMQEYNVGMSTLYDIRAHKAQLLRFFASSDSNKALEQRRTLHTPKLEHLDRVLYEWFLGKRSEGVPVSGPMLIEKAKDFYEQMQLTEPCVFSGGWLWRFKARHGIKKLDASSEKQSADHQAAEQFCAFFRSLAAEHGLSAEQVYNADETGLFWRCLPNPTPEGGAVPGPKQGKDRLTVLMCANATGSHRLKPLAIGKCSGPRAFKGIQHLPVAYKAQGNAWVDKEIFSDWFHHIFVPSVREHFRTIGLPEDSKAVLLLDSSRAHPQEAELVSSNVFTIFLPASVASLVQPMEQGIRRDFMRNFINPPVPLQGPHARYNMNDAIFSVACAWNAVPSHVFRRAWRKLWPSVAFAEGSSSEEELEAECFPVKPHNKSFAHILELVKEGSSCPGQLRQRQAASWGVAGREAEGGRPPAATSPAEVVWSSEKTPKADQDGRGDPGEGEEVAWEQAAVAFDAVLRFAERQPCFSAQEVGQLRALRAVFRSQQQVRRRRGALGAVVKVEALQEGPGGCGATAQSPLPCSSTAGDN

SEQ ID NO: 30203 - protein, 360 aa, Homo sapiens
MDPEETSVYLDYYYATSPNSDIRETHSHVPYTSVFLPVFYTAVFLTGVLGNLVLMGALHFKPGSRRLIDIFIINLAASDFIFLVTLPLWVDKEASLGLWRTGSFLCKGSSYMISVNMHCSVLLLTCMSVDRYLAIVWPVVSRKFRRTDCAYVVCASIWFISCLLGLPTLLSRELTLIDDKPYCAEKKATPIKLIWSLVALIFTFFVPLLSIVTCYCCIARKLCAHYQQSGKHNKKLKKSIKIIFIVVAAFLVSWLPFNTFKFLAIVSGLRQEHYLPSAILQLGMEVSGPLAFANSCVNPFIYYIFDSYIRRAIVHCLCPCLKNYDFGSSTETSDSHLTKALSTFIHAEDFARRRKRSVSL

SEQ ID NO: 30204 - protein, 308 aa, Homo sapiens
MVVGRGLLGRRSLAALGAACARRGLGPALLGVFCHTDLRKNLTVDEGTMKVEVLPALTDNYMYLVIDDETKEAAIVDPVQPQKVVDAARKHGVKLTTVLTTHHHWDHAGGNEKLVKLESGLKVYGGDDRIGALTHKITHLSTLQVGSLNVKCLATPCHTSGHICYFVSKPGGSEPPAVFTGDTLFVAGCGKFYEGTADEMCKALLEVLGRLPPDTRVYCGHEYTINNLKFARHVEPGNAAIREKLAWAKEKYSIGEPTVPSTLAEEFTYNPFMRVREKTVQQHAGETDPVTTMRAVRREKDQFKMPRD

SEQ ID NO: 30205 - protein, 260 aa, Homo sapiens [sequence omitted]

SEQ ID NO: 30206 - protein, 236 aa, Homo sapiens
MVVGRGLLGRRSLAALGAACARRGLGPALLGVFCHTDLRKNLTVDEGTMKVEVLPALTDNYMYLVIDDETKEAAIVDPVQPQKVVDAARKHGVKLTTVLTTHHHWDHAGGNEKLVKLESGLKVYGGDDRIGALTHKITHLSTLQVTPCLWLAAGSSMKGLRMRCVKLCWRSWAGSPRTQESTVATSTPSTTSSLHATWSPAMPPSGRSWPGPRRSTASGSPQCHPPWQRSLPTTPS

SEQ ID NO: 30207 - protein, 433 aa, Homo sapiens
MCFSPILEINMQSESNITVRDDIDDINTNMYQPLSYPLSFQVSLTGFLMLEIVLGLGSNLTVLVLYCMKSNLINSVSNIITMNLHVLDVIICVGCIPLTIVILLLSLESNTALICCFHEACVSFASVSTAINVFAITLDRYDISVKPANRILTMGRAVMLMISIWIFSFFSFLIPFIEVNFFSLQSGNTWENKTLLCVSTNEYYTELGMYYHLLVQIPIFFFTVVVMLITYTKILQALNIRIGTRFSTGQKKKARKKKTISLTTQHEATDMSQSSGGRNVVFGVRTSVSVIIALRRAVKRHRERRERQKRVFRMSLLIISTFLLCWTPISVLNTTILCLGPSDLLVKLRLCFLVMAYGTTIFHPLLYAFTRQKFQKVLKSKMKKRVVSIVEADPLPNNAVIHNSWIDPKRNKKITFEDSEIREKCLVPQVVTD

SEQ ID NO: 30208 - protein, 142 aa, Homo sapiens
MSESLVVCDVAEDLVEKLRKFRFRKETNNAAIIMKIDKDKRLVVLDEELEGISPDELKDELPERQPRFIVYSYKYQHDDGRVSYPLCFIFSSPVGCKPEQQMMYAGSKNKLVQTAELTKVFEIRNTEDLTEEWLREKLGFFH

SEQ ID NO: 30209 - protein, 448 aa, Homo sapiens
MTSSCCVTNNLQASLKSCPRPASVCSSGVNCRPELCLGYVCQPMACLPSVCLPTTFRPASCLSKTYLSSSCQAASGISGSMGPGSWYSEGAFNGNEKETMQFLNDRLASYLTRVRQLEQENAELESRIQEASHSQVLTMTPDYQSHFRTIEELQQKILCTKAENARMVVNIDNAKLAADDFRAKYEAELAMRQLVEADINGLRRILDDLTLCKADLEAQVESLKEELMCLKKNHEEEVGSLRCQLGDRLNIEVDAAPPVDLTRVLEEMRCQYEAMVEANRRDVEEWFNMQMEELNQQVATSSEQLQNYQSDIIDLRRTVNTLEIELQAQHSLRDSLENTLTESEARYSSQLAQMQCMITNVEAQLAEIRADLERQNQEYQVLLDVRARLEGEINTYRSLLENEDCKLPCNPCSTPSCTTCVPSPCVPRTVCVPRTVGMPCSPCPQGRY

SEQ ID NO: 30210 - protein, 319 aa, Homo sapiens
MPFPNCSAPSTVVATAVGVLLGLECGLGLLGNAVALWTFLFRVRVWKPYAVYLLNLALADLLLAACLPFLAAFYLSLQAWHLGRVGCWALHFLLDLSRSVGMAFLAAVALDRYLRVVHPRLKVNLLSPQAALGVSGLVWLLMVALTCPGLLISEAAQNSTRCHSFYSRADGSFSIIWQEALSCLQFVLPFGLIVFCNAGIIRALQKRLREPEKQPKLQRAQALVTLVVVLFALCFLPCFLARVLMHIFQNLGSCRALCAVAHTSDVTGSLTYLHSVLNPVVYCFSSPTFRSSYRRVFHTLRGKGQAAEPPDFNPRDSYS

SEQ ID NO: 30211 - protein, 453 aa, Homo sapiens
MASPSLPGSDCSQIIDHSHVPEFEVATWIKITLILVYLIIFVMGLLGNSATIRVTQVLQKKGYLQKEVTDHMVSLACSDILVFLIGMPMEFYSIIWNPLTTSSYTLSCKLHTFLFEACSYATLLHVLTLSFERYIAICHPFRYKAVSGPCQVKLLIGFVWVTSALVALPLLFAMGTEYPLVNVPSHRGLTCNRSSTRHHEQPETSNMSICTNLSSRWTVFQSSIFGAFVVYLVVLLSVAFMCWNMMQVLMKSQKGSLAGGTRPPQLRKSESEESRTARRQTIIFLRLIVVTLAVCWMPNQIRRIMAAAKPKHDWTRSYFRAYMILLPFSETFFYLSSVINPLLYTVSSQQFRRVFVQVLCCRLSLQHANHEKRLRVHAHSTTDSARFVQRPLLFASRRQSSARRTEKIFLSTFQSEAEPQSKSQSLSLESLEPNSGAKPANSAAENGFQEHEV

SEQ ID NO: 30212 - protein, 346 aa, Homo sapiens
MDTGPDQSYFSGNHWFVFSVYLLTFLVGLPLNLLALVVFVGKLRCRPVAVDVLLLNLTASDLLLLLFLPFRMVEAANGMHWPLPFILCPLSGFIFFTTIYLTALFLAAVSIERFLSVAHPLWYKTRPRLGQAGLVSVACWLLASAHCSVVYVIEFSGDISHSQGTNGTCYLEFWKDQLAILLPVRLEMAVVLFVVPLIITSYCYSRLVWILGRGGSHRRQRRVAGLVAATLLNFLVCFGPYNVSHVVGYICGESPVWRIYVTLLSTLNSCVDPFVYYFSSSGFQADFHELLRRLCGLWGQWQQESSMELKEQKGGEEQRADRPAERKTSEHSQGCGTGGQVACAEN

SEQ ID NO: 30213 - protein, 361 aa, Homo sapiens
MNESRWTEWRILNMSSGIVNVSERHSCPLGFGHYSVVDVCIFETVVIVLLTFLIIAGNLTVIFVFHCAPLLHHYTTSYFIQTMAYADLFVGVSCLVPTLSLLHYSTGVHESLTCQVFGYIISVLKSVSMACLACISVDRYLAITKPLSYNQLVTPCRLRICIILIWIYSCLIFLPSFFGWGKPGYHGDIFEWCATSWLTSAYFTGFIVCLLYAPAAFVVCFTYFHIFKICRQHTKEINDRRARFPSHEVDSSRETGHSPDRRYAMVLFRITSVFYMLWLPYIIYFLLESSRVLDNPTLSFLTTWLAISNSFCNCVIYSLSNSVFRLGLRRLSETMCTSCMCVKDQEAQEPKPRKRANSCSI

SEQ ID NO: 30214 - protein, 462 aa, Homo sapiens
MAATVNLELDPIFLKALGFLHSKSKDSAEKLKALLDESLARGIDSSYRPSQKDVEPPKISSTKNISIKQEPKISSSLPSGNNNGKVLTTEKVKKEAEKRPADKMKSDITEGVDIPKKPRLEKPETQSSPITVQSSKDLPMADLSSFEETSADDFAMEMGLACVVCRQMMVASGNQLVECQECHNLYHRDCHKPQVTDKEANDPRLVWYCARCTRQMKRMAQKTQKPPQKPAPAVVSVTPAVKDPLVKKPETKLKQETTFLAFKRTEVKTSTVISGNSSSASVSSSVTSGLTGWAAFAAKTSSAGPSTAKLSSTTQNNTGKPATSSANQKPVGLTGLATSSKGGIGSKIGSNNSTTPTVPLKPPPPLTLGKTGLSRSVSCDNVSKVGLPSPSSLVPGSSSQLSGNGNSGTSGPSGSTTSKTTSESSSSPSASLKGPTSQESQLNAMKRLQMVKKKAAQKKLKK

SEQ ID NO: 30215 - protein, 1257 aa, Homo sapiens
MASCSFTRDQATRRLRGAAAAAAAALAAVVTTPLLSSGTPTALIGTGSSCPGAMWLSTATGSRSDSESEEEDLPVGEEVCKRGYLRKQKHGHRRYFVLKLETADAPARLEYYENARKFRHSVRAAAAAAAAAASGAAIPPLIPPRRVITLYQCFSVSQRADARYRHLIALFTQDEYFAMVAENESEQESWYLLLSRLILESKRRRCGTLGAQPDGEPAALAAAAAAEPPFYKDVWQVIVKPRGLGHRKELSGVFRLCLTDEEVVFVRLNTEVASVVVQLLSIRRCGHSEQYFFLEVGRSTVIGPGELWMQVDDCVVAQNMHELFLEKMRALCADEYRARCRSYSISIGAHLLTLLSARRHLGLVPLEPGGWLRRSRFEQFCHLRAIGDGEDEMLFTRRFVTPSEPVAHSRRGRLHLPRGRRSRRAVSVPASFFRRLAPSPARPRHPAEAPNNGARLSSEVSGSGSGNFGEEGNPQGKEDQEGSGGDYMPMNNWGSGNGRGSGGGQGSNGQGSSSHSSGGNQCSGEGQGSRGGQGSNGQGSGGNQCSRDGQGTAGGHGSGGGQRPGGGHGSGGGQGPGDGHGSGGGKNSGGGKGSGSGKGSDGDGERGKSLKKRSYFGKLTQSKQQQMPPPPPPPPPPPPAGGTGGKGKSGGRFRLYFCVDRGATKECKEAKEVKDAEIPEGAARGPHRARAFDEDEDDPYVPMRPGVATPLVSSSDYMPMAPQNVSASKKRHSRSPFEDSRGYMMMFPRVSPPPAPSPPKAPDTNKEDDSKDNDSESDYMFMAPGAGAIPKNPRNPQGGSSSKSWSSYFSLPNPFRSSPLGQNDNSEYVPMLPGKFLGRGLDKEVSYNWDPKDAASKPSGEGSFSKPGDGGSPSKPSDHEPPKNKAKRPNRLSFITKGYKIKPKPQKPTHEQREADSSSDYVNMDFTKRESNTPAPSTQGLPDSWGIIAEPRQSAFSNYVNVEFGVPFPNPANDLSDLLRAIPRANPLSLDSARWPLPPLPLSATGSNAIEEEGDYIEVIFNSAMTPAMALADSAIRYDAETGRIYVVDPFSECCMDISLSPSRCSEPPPVARLLQEEEQERRRPQSRSQSFFAAARAAVSAFPTDSLERDLSPSSAPAVASAAEPTLALSQVVAAASALAAAPGIGAAAAAAGFDSASARWFQPVANAADAEAVRGAQDVAGGSNPGAHNPSANLARGDNQAGGAAAAAAAPEPPPRSRRVPRPPEREDSDNDDDTHVRMDFARRDNQFDSPKRGR

SEQ ID NO: 30216 - protein, 362 aa, Homo sapiens
MGNHTWEGCHVDSRVDHLFPPSLYIFVIGVGLPTNCLALWAAYRQVQQRNELGVYLMNLSIADLLYICTLPLWVDYFLHHDNWIHGPGSCKLFGFIFYTNIYISIAFLCCISVDRYLAVAHPLRFARLRRVKTAVAVSSVVWATELGANSAPLFHDELFRDRYNHTFCFEKFPMEGWVAWMNLYRVFVGFLFPWALMLLSYRGILRAVRGSVSTERQEKAKIKRLALSLIAIVLVCFAPYHVLLLSRSAIYLGRPWDCGFEERVFSAYHSSLAFTSLNCVADPILYCLVNEGARSDVAKALHNLLRFLASDKPQEMANASLTLETPLTSKRNSTAKAMTGSWAATPPSQGDQVQLKMLPPAQ

SEQ ID NO: 30217 - protein, 138 aa, Homo sapiens
MEAWESSQPLLRCEIPCPLPGTDRDGSVSLPGEAASCDLDTLEPEHGNRRVSGNPISVCWAYKVTKVKCWSVRERGGRHIGGPRSTLKHPAHHGMGKNLATSLPTAASLGLGKGQLLVSIRFMDTTKKRGQSETFNIC

SEQ ID NO: 30218 - protein, 1152 aa, Homo sapiens
MALRVLLLTALTLCHGFNLDTENAMTFQENARGFGQSVVQLQGSRVVVGAPQEIVAANQRGSLYQCDYSTGSCEPIRLQVPVEAVNMSLGLSLAATTSPPQLLACGPTVHQTCSENTYVKGLCFLFGSNLRQQPQKFPEALRGCPQEDSDIAFLIDGSGSIIPHDFRRMKEFVSTVMEQLKKSKTLFSLMQYSEEFRIHFTFKEFQNNPNPRSLVKPITQLLGRTHTATGIRKVVRELFNITNGARKNAFKILVVITDGEKFGDPLGYEDVIPEADREGVIRYVIGVGDAFRSEKSRQELNTIASKPPRDHVFQVNNFEALKTIQNQLREKIFAIEGTQTGSSSSFEHEMSQEGFSAAITSNGPLLSTVGSYDWAGGVFLYTSKEKSTFINMTRVDSDMNDAYLGYAAAIILRNRVQSLVLGAPRYQHIGLVAMFRQNTGMWESNANVKGTQIGAYFGASLCSVDVDSNGSTDLVLIGAPHYYEQTRGGQVSVCPLPRGRARWQCDAVLYGEQGQPWGRFGAALTVLGDVNGDKLTDVAIGAPGEEDNRGAVYLFHGTSGSGISPSHSQRIAGSKLSPRLQYFGQSLSGGQDLTMDGLVDLTVGAQGHVLLLRSQPVLRVKAIMEFNPREVARNVFECNDQVVKGKEAGEVRVCLHVQKSTRDRLREGQIQSVVTYDLALDSGRPHSRAVFNETKNSTRRQTQVLGLTQTCETLKLQLPNCIEDPVSPIVLRLNFSLVGTPLSAFGNLRPVLAEDAQRLFTALFPFEKNCGNDNICQDDLSITFSFMSLDCLVVGGPREFNVTVTVRNDGEDSYRTQVTFFFPLDLSYRKVSTLQNQRSQRSWRLACESASSTEVSGALKSTSCSINHPIFPENSEVTFNITFDVDSKASLGNKLLLKANVTSENNMPRTNKTEFQLELPVKYAVYMVVTSHGVSTKYLNFTASENTSRVMQHQYQVSNLGQRSLPISLVFLVPVRLNQTVIWDRPQVTFSENLSSTCHTKERLPSHSDFLAELRKAPVVNCSIAVCQRIQCDIPFFGIQEEFNATLKGNLSFDWYIKTSHNHLLIVSTAEILFNDSVFTLLPGQGAFVRSQTETKVEPFEVPNPLPLIVGSSVGGLLLLALITAALYKLGFFKRQYKDMMSEGGPPGAEPQ

SEQ ID NO: 30219 - protein, 1153 aa, Homo sapiens
MALRVLLLTALTLCHGFNLDTENAMTFQENARGFGQSVVQLQGSRVVVGAPQEIVAANQRGSLYQCDYSTGSCEPIRLQVPVEAVNMSLGLSLAATTSPPQLLACGPTVHQTCSENTYVKGLCFLFGSNLRQQPQKFPEALRGCPQEDSDIAFLIDGSGSIIPHDFRRMKEFVSTVMEQLKKSKTLFSLMQYSEEFRIHFTFKEFQNNPNPRSLVKPITQLLGRTHTATGIRKVVRELFNITNGARKNAFKILVVITDGEKFGDPLGYEDVIPEADREGVIRYVIGVGDAFRSEKSRQELNTIASKPPRDHVFQVNNFEALKTIQNQLREKIFAIEGTQTGSSSSFEHEMSQEGFSAAITSNGPLLSTVGSYDWAGGVFLYTSKEKSTFINMTRVDSDMNDAYLGYAAAIILRNRVQSLVLGAPRYQHIGLVAMFRQNTGMWESNANVKGTQIGAYFGASLCSVDVDSNGSTDLVLIGAPHYYEQTRGGQVSVCPLPRGQRARWQCDAVLYGEQGQPWGRFGAALTVLGDVNGDKLTDVAIGAPGEEDNRGAVYLFHGTSGSGISPSHSQRIAGSKLSPRLQYFGQSLSGGQDLTMDGLVDLTVGAQGHVLLLRSQPVLRVKAIMEFNPREVARNVFECNDQVVKGKEAGEVRVCLHVQKSTRDRLREGQIQSVVTYDLALDSGRPHSRAVFNETKNSTRRQTQVLGLTQTCETLKLQLPNCIEDPVSPIVLRLNFSLVGTPLSAFGNLRPVLAEDAQRLFTALFPFEKNCGNDNICQDDLSITFSFMSLDCLVVGGPREFNVTVTVRNDGEDSYRTQVTFFFPLDLSYRKVSTLQNQRSQRSWRLACESASSTEVSGALKSTSCSINHPIFPENSEVTFNITFDVDSKASLGNKLLLKANVTSENNMPRTNKTEFQLELPVKYAVYMVVTSHGVSTKYLNFTASENTSRVMQHQYQVSNLGQRSLPISLVFLVPVRLNQTVIWDRPQVTFSENLSSTCHTKERLPSHSDFLAELRKAPVVNCSIAVCQRIQCDIPFFGIQEEFNATLKGNLSFDWYIKTSHNHLLIVSTAEILFNDSVFTLLPGQGAFVRSQTETKVEPFEVPNPLPLIVGSSVGGLLLLALITAALYKLGFFKRQYKDMMSEGGPPGAEPQ

SEQ ID NO: 30220 - protein, 254 aa, Homo sapiens
MAAVAATAAAKGNGGGGGRAGAGDASGTRKKKGPGPLATAYLVIYNVVMTAGWLVIAVGLVRAYLAKGSYHSLYYSIEKPLKFFQTGALLEILHCAIGIVPSSVVLTSFQVMSRVFLIWAVTHSVKEVQSEDSVLLFVIAWTITEIIRYSFYTFSLLNHLPYLIKWARYTLFIVLYPMGVSGELLTIYAALPFVRQAGLYSISLPNKYNFSFDYYAFLILIMISYIPIFPQLYFHMIHQRRKILSHTEEHKKFE

SEQ ID NO: 30221 - protein, 413 aa, Homo sapiens
MKGALGSPVAAAGAAMQESFGCVVANRFHQLLDDESDPFDILREAERRRQQQLQRKRRDEAAAAAGAGPRGGRSPAGASGHRAGAGGRRESQKERKSLPAPVAQRPDSPGGGLQAPGQKRTPRRGEQQGWNDSRGPEGMLERAERRSYREYRPYETERQADFTAEKFPDEKPGDRFDRDRPLRGRGGPRGGMRGRGRGGPGNRVFDAFDQRGKREFERYGGNDKIAVRTEDNMGGCGVRTWGSGKDTSDVEPTAPMEEPTVVEESQGTPEEESPAKVPELEVEEETQVQEMTLDEWKNLQEQTRPKPEFNIRKPESTVPSKAVVIHKSKYRDDMVKDDYEDDSHVFRKPANDITSQLEINFGNLPRPGRGARGGTRGGRGRIRRAENYGPRAEVVMQDVAPNPDDPEDFPALS

SEQ ID NO: 30222 - protein, 308 aa, Homo sapiens
MKGALGSPVAAAGAAMQESFGCVVANRFHQLLDDESDPFDILREAERRRQQQLQRKRRDEAAAAAGAGPRGGRSPAGASGHRAGAGGRRESQKERKSLPAPVAQRPDSPGGGLQAPGQKRTPRRGEQQGWNDSRGPEGMLERAERRSYREYRPYETERQADFTAEKFPDEKVPELEVEEETQVQEMTLDEWKNLQEQTRPKPEFNIRKPESTVPSKAVVIHKSKYRDDMVKDDYEDDSHVFRKPANDITSQLEINFGNLPRPGRGARGGTRGGRGRIRRAENYGPRAEVVMQDVAPNPDDPEDFPALS

SEQ ID NO: 30223 - protein, 126 aa, Homo sapiens
MPDPAKSAPAPKKGSKKAVTKAQKKDGKKRKRSRKESYSVYVYKVLKQVHPDTGISSKAMGIMNSFVNDIFERIAGEASRLAHYNKRSTITSREIQTAVRLLLPGELAKHAVSEGTKAVTKYTSSK

SEQ ID NO: 30224 - protein, 644 aa, Homo sapiens
MSRQFSSRSGYRSGGGFSSGSAGIINYQRRTTSSSTRRSGGGGGRFSSCGGGGGSFGAGGGFGSRSLVNLGGSKSISISVARGGGRGSGFGGGYGGGGFGGGGFGGGGFGGGGIGGGGFGGFGSGGGGFGGGGFGGGGYGGGYGPVCPPGGIQEVTINQSLLQPLNVEIDPEIQKVKSREREQIKSLNNQFASFIDKVRFLEQQNQVLQTKWELLQQVDTSTRTHNLEPYFESFINNLRRRVDQLKSDQSRLDSELKNMQDMVEDYRNKYEDEINKRTNAENEFVTIKKDVDGAYMTKVDLQAKLDNLQQEIDFLTALYQAELSQMQTQISETNVILSMDNNRSLDLDSIIAEVKAQYEDIAQKSKAEAESLYQSKYEELQITAGRHGDSVRNSKIEISELNRVIQRLRSEIDNVKKQISNLQQSISDAEQRGENALKDAKNKLNDLEDALQQAKEDLARLLRDYQELMNTKLALDLEIATYRTLLEGEESRMSGECAPNVSVSVSTSHTTISGGGSRGGGGGGYGSGGSSYGSGGGSYGSGGGGGGGRGSYGSGGSSYGSGGGSYGSGGGGGGHGSYGSGSSSGGYRGGSGGGGGGSSGGRGSGGGSSGGSIGGRGSSSGGVKSSGGSSSVKFVSTTYSGVTR

SEQ ID NO: 30225 - protein, 514 aa, Homo sapiens
MVWEVKTNQMPNAVQKLLLVMDKRASGMNDSLELLQCNENLPSSPGYNSCDEHMELDDLPELQAVQSDPTQSGMYQLSSDVSHQEYPRSSWNQNTSDIPETTYRENEVDWLTELANIATSPQSPLMQCSFYNRSSPVHIIATSKSLHSYARPPPVSSSSKSEPAFPHHHWKEETPVRHERANSESESGIFCMSSLSDDDDLGWCNSWPSTVWHCFLKGTRLCFHKGSNKEWQDVEDFARAEGCDNEEDLQMGIHKGYGSDGLKLLSHEESVSFGESVLKLTFDPGTVEDGLLTVECKLDHPFYVKNKGWSSFYPSLTVVQHGIPCCEVHIGDVCLPPGHPDAINFDDSGVFDTFKSYDFTPMDSSAVYVLSSMARQRRASLSCGGPGGQDFARSGFSKNCGSPGSSQLSSNSLYAKAVKNHSSGTVSATSPNKCKRPMNAFMLFAKKYRVEYTQMYPGKDNRAISVILGDRWKKMKNEERRMYTLEAKALAEEQKRLNPDCWKRKRTNSGSQQH

SEQ ID NO: 30226 - protein, 462 aa, Homo sapiens
MVWEVKTNQMPNAVQKLLLVMDKRASGMNDSLELLQCNENLPSSPGYNSCDEHMELDDLPELQAVQSDPTQSGMYQLSSDVSHQEYPRSSWNQNTSDIPETTYRENEVDWLTELANIATSPQSPLMQCSFYNRSSPVHIIATSKSLHSYARPPPVSSSSKSEPAFPHHHWKEETPVRHERANSESESGIFCMSSLSDDDDLGWCNSWPSTVWHCFLKGTRLCFHKGSNKEWQDVEDFARAEGCDNEEDLQMGIHKGYGSDGLKLLSHEESVSFGESVLKLTFDPGTVEDGLLTVECKLDHPFYVKNKGWSSFYPSLTVVQHGIPCCEVHIGDVCLPPGHPDAINFDDSGVFDTFKSYDFTPMDSSAVYVLSSMARQRRASLSCGGPGGQDFARSGFSKNCGSPGSSQLSSNSLYAKAVKNHSSGTVSATSPNKCKRPMNAFMLFAKKYRVEYTQMYPGKDNR

SEQ ID NO: 30227 - protein, 514 aa, Homo sapiens
MVWEVKTNQMPNAVQKLLLVMDKRASGMNDSLELLQCNENLPSSPGYNSCDEHMELDDLPELQAVQSDPTQSGMYQLSSDVSHQEYPRSSWNQNTSDIPETTYRENEVDWLTELANIATSPQSPLMQCSFYNRSSPVHIIATSKSLHSYARPPPVSSSSKSEPAFPHHHWKEETPVRHERANSESESGIFCMSSLSDDDDLGWCNSWPSTVWHCFLKGTRLCFHKGSNKEWQDVEDFARAEGCDNEEDLQMGIHKGYGSDGLKLLSHEESVSFGESVLKLTFDPGTVEDGLLTVECKLDHPFYVKNKGWSSFYPSLTVVQHGIPCCEVHIGDVCLPPGHPDAINFDDSGVFDTFKSYDFTPMDSSAVYVLSSMARQRRASLSCGGPGGQDFARSGFSKNCGSPGSSQLSSNSLYAKAVKNHSSGTVSATSPNKCKRPMNAFMLFAKKYRVEYTQMYPGKDNRAISVILGDRWKKMKNEERRMYTLEAKALAEEQKRLNPDCWKRKRTNSVCFNK

SEQ ID NO: 30228 - protein, 290 aa, Homo sapiens
MKVKVIPVLEDNYMYLVIEELTREAVAVDVAVPKRLLEIVGREGVSLTAVLTTHHHWDHARGNPELARLRPGLAVLGADERIFSLTRRLAHGEELRFGAIHVRCLLTPGHTAGHMSYFLWEDDCPDPPALFSGDALSVAGCGSCLEGSAQQMYQSLAELGTLPPETKVFCGHEHTLSNLEFAQKVEPCNDHVRAKLSWAKARPLSRRGKRVGGEGTGFGVGGALRQGLMVTGACGHSRRGMRMTCPLCRRLWARSASTTPSCGWREYGCCPGASTVTWTLRKASGDCVLG

SEQ ID NO: 30229 - protein, 282 aa, Homo sapiens
MKVKVIPVLEDNYMYLVIEELTREAVAVDVAVPKRLLEIVGREGVSLTAVLTTHHHWDHARGNPELARLRPGLAVLGADERIFSLTRRLAHGEELRFGAIHVRCLLTPGHTAGHMSYFLWEDDCPDPPALFSGDALSVAGCGSCLEGSAQQMYQSLAELGTLPPETKVFCGHEHTLSNLEFAQKVEPCNDHVRAKLSWAKKRDEDDVPTVPSTLGEERLYNPFLRVAEEPVRKFTGKAVPADVLEALCKERARFEQAGEPRQPQARALLALQWGLLSAAPHD

SEQ ID NO: 30230 - protein, 202 aa, Homo sapiens
MKVKVIPVLEDNYMYLVIEELTREAVAVDVAVPKRLLEIVGREGVSLTAVLTTHHHWDHARGNPELARLRPGLAVLGADERIFSLTRRLAHGEELRFGAIHVRCLLTPGHTAGHMSYFLWEDDCPDPPALFSGTRSAERAHPASRRPRPICSDPPSPARRRAVGGRLRLVPGGQRPADVPEPGRAGYPAPRDEGVLRPRAHA

SEQ ID NO: 30231 - protein, 203 aa, Homo sapiens
MKVKVIPVLEDNYMYLVIEELTREAVAVDVAVPKRLLEIVGREGVSLTAVLTTHHHWDHARGNPELARLRPGLAVLGADERIFSLTRRLAHGEELRVSARSREGRGGRPGSTRPHRSACSSAAVRGHPRALPPDARPHRRPHELLPVGGRLPGPTRPVLGRRAVGGRLRLVPGGQRPADVPEPGRAGYPAPRDEGVLRPRAHA

SEQ ID NO: 30232 - protein, 693 aa, Homo sapiens
MALCNGDSKLENAGGDLKDGHHHYEGAVVILDAGAQYGKVIDRRVRELFVQSEIFPLETPAFAIKEQGFRAIIISGGPNSVYAEDAPWFDPAIFTIGKPVLGICYGMQMMNKVFGGTVHKKSVREDGVFNISVDNTCSLFRGLQKEEVVLLTHGDSVDKVADGFKVVARSGNIVAGIANESKKLYGAQFHPEVGLTENGKVILKNFLYDIAGCSGTFTVQNRELECIREIKERVGTSKVLVLLSGGVDSTVCTALLNRALNQEQVIAVHIDNGFMRKRESQSVEEALKKLGIQVKVINAAHSFYNGTTTLPISDEDRTPRKRISKTLNMTTSPEEKRKIIGDTFVKIANEVIGEMNLKPEEVFLAQGTLRPDLIESASLVASGKAELIKTHHNDTELIRKLREEGKVIEPLKDFHKDEVRILGRELGLPEELVSRHPFPGPGLAIRVICAEEPYICKDFPETNNILKIVADFSASVKKPHTLLQRVKACTTEEDQEKLMQITSLHSLNAFLLPIKTVGVQGDCRSYSYVCGISSKDEPDWESLIFLARLIPRMCHNVNRVVYIFGPPVKEPPTDVTPTFLTTGVLSTLRQADFEAHNILRESGYAGKISQMPVILTPLHFDRDPLQKQPSCQRSVVIRTFITSDFMTGIPATPGNEIPVEVVLKMVTEIKKIPGISRIMYDLTSKPPGTTEWE

SEQ ID NO: 30233 - protein, 594 aa, Homo sapiens
MALCNGDSKMMNKVFGGTVHKKSVREDGVFNISVDNTCSLFRGLQKEEVVLLTHGDSVDKVADGFKVVARSGNIVAGIANESKKLYGAQFHPEVGLTENGKVILKNFLYDIAGCSGTFTVQNRELECIREIKERVGTSKVLVLLSGGVDSTVCTALLNRALNQEQVIAVHIDNGFMRKRESQSVEEALKKLGIQVKVINAAHSFYNGTTTLPISDEDRTPRKRISKTLNMTTSPEEKRKIIGDTFVKIANEVIGEMNLKPEEVFLAQGTLRPDLIESASLVASGKAELIKTHHNDTELIRKLREEGKVIEPLKDFHKDEVRILGRELGLPEELVSRHPFPGPGLAIRVICAEEPYICKDFPETNNILKIVADFSASVKKPHTLLQRVKACTTEEDQEKLMQITSLHSLNAFLLPIKTVGVQGDCRSYSYVCGISSKDEPDWESLIFLARLIPRMCHNVNRVVYIFGPPVKEPPTDVTPTFLTTGVLSTLRQADFEAHNILRESGYAGKISQMPVILTPLHFDRDPLQKQPSCQRSVVIRTFITSDFMTGIPATPGNEIPVEVVLKMVTEIKKIPGISRIMYDLTSKPPGTTEWE

SEQ ID NO: 30234 - protein, 370 aa, Homo sapiens
MLPRLICINDYEQHAKSVLPKSIYDYYRSGANDEETLADNIAAFSRWKLYPRMLRNVAETDLSTSVLGQRVSMPICVGATAMQRMAHVDGELATVRACQSLGTGMMLSSWATSSIEEVAEAGPEALRWLQLYIYKDREVTKKLVRQAEKMGYKAIFVTVDTPYLGNRLDDVRNRFKLPPQLRMKNFETSTLSFSPEENFGDDSGLAAYVAKAIDPSISWEDIKWLRRLTSLPIVAKGILRGDDAREAVKHGLNGILVSNHGARQLDGVPATIDVLPEIVEAVEGKVEVFLDGGVRKGTDVLKALALGAKAVFVGRPIVWGLAFQGEKGVQDVLEILKEEFRLAMALSGCQNVKVIDKTLVRKNPLAVSKI

SEQ ID NO: 30235 - protein, 136 aa, Homo sapiens
MARTKQTARKATAWQAPRKPLATKAAGKRAPPTGGIKKPHRYKPGTLALREIRKYQKSTQLLLRKLPFQRLVREIAQAISPDLRFQSAAIGALQEASEAYLVQLFEDTNLCAIHARRVTIMPRDMQLARRLRREGP

SEQ ID NO: 30236 - protein, 633 aa, Homo sapiens
MKAIKKSLTEEEYLYLDFSHQTEGCIFPLHTSVTLFLLSYCDCKIFKICLVVTKEVSRDSSLLRDDLIQDVEIQIISRQELPPIVQNCCLPAVVERSDNFCRAGLAVVLRHIIQKSYEADPLKKELLELLGFKKTCLKACAEVSQWTRLCELTIPLAIENFLRESSDQPPTIPVEILQLEKKLSEPVRVHNDDKLRRQKLKQQKADGVGPPLTKGKAKSKVHTQETSEGLDSSSKSLELKVAFSKLTVQEEPATTNREPSHIRKAKASDLPPLEHVFAEGLYFTLADIVLLPCIHHFLVIISRKFSEKLVEFPLLASWYQRIQEVPGVKTAASKCGIQFLHLPKLLTTSTEQHPNLCEVPGVEEQSDPLFIGGPRPTMAKLMEKGIEVMFSPHPCPTWTLDWNVLPAAVSPKEGKMSSDRALRKQQQLNNLVYVVTNQAKPGDRIVDFCSGGGHVGIVLAHMLPSCQVTLIENKELSLIRAKKRSDELGLSNIWFIQANMEYFTGMFNIGVALHACGVATDMVIEHCIKTRASFVTCPCCYGFIQNTSKFNFPKSEQFKKTLSYKEHMILCRFADQTAVQLPPQRRLIGKQCMCLVDLDRARAAEECGYSVQVISMEPESCSPKNNMIVGVPI

SEQ ID NO: 30237 - protein, 546 aa, Homo sapiens
MKAIKKSLTEEEYLYLDFSHQTEGCIFPLHTSVTLFLLSYCDCKIFKICLVVTKEVSQWTRLCELTIPLAIENFLRESSDQPPTIPVEILQLEKKLSEPVRVHNDDKLRRQKLKQQKADGVGPPLTKGKAKSKVHTQETSEGLDSSSKSLELKVAFSKLTVQEEPATTNREPSHIRKAKASDLPPLEHVFAEGLYFTLADIVLLPCIHHFLVIISRKFSEKLVEFPLLASWYQRIQEVPGVKTAASKCGIQFLHLPKLLTTSTEQHPNLCEVPGVEEQSDPLFIGGPRPTMAKLMEKGIEVMFSPHPCPTWTLDWNVLPAAVSPKEGKMSSDRALRKQQQLNNLVYVVTNQAKPGDRIVDFCSGGGHVGIVLAHMLPSCQVTLIENKELSLIRAKKRSDELGLSNIWFIQANMEYFTGMFNIGVALHACGVATDMVIEHCIKTRASFVTCPCCYGFIQNTSKFNFPKSEQFKKTLSYKEHMILCRFADQTAVQLPPQRRLIGKQCMCLVDLDRARAAEECGYSVQVISMEPESCSPKNNMIVGVPI

SEQ ID NO: 30238 - protein, 364 aa, Homo sapiens
MHPQVVILSLILHLADSVAGSVKVGGEAGPSVTLPCHYSGAVTSMCWNRGSCSLFTCQNGIVWTNGTHVTYRKDTRYKLLGDLSRRDVSLTIENTAVSDSGVYCCRVEHRGWFNDMKITVSLEIVPPKVTTTPIVTTVPTVTTVRTSTTVPTTTTVPMTTVPTTTVPTTMSIPTTTTVLTTMTVSTTTSVPTTTSIPTTTSVPVTTTVSTFVPPMPLPRQNHEPVATSPSSPQPAETHPTTLQGAIRREPTSSPLYSYTTDGNDTVTESSDGLWNNNQTQLFLEHSLLTANTTKGIYAGVCISVLVLLALLGVIIAKKYFFKKEVQQLSVSFSSLQIKALQNAVEKEVQAEDNIYIENSLYATD

SEQ ID NO: 30239 - protein, 244 aa, Homo sapiens
MGLELFLDLVSQPSRAVYIFAKKNGIPLELRTVDLVKGQHKSKEFLQINSLGKLPTLKDGDFILTESSAILIYLSCKYQTPDHWYPSDLQARARVHEYLGWHADCIRGTFGIPLWVQVLGPLIGVQVPKEKVERNRTAMDQALQWLEDKFLGDRPFLAGQQVTLADLMALEELMQPVALGYELFEGRPRLAAWRGRVEAFLGAELCQEAHSIILSILEQAAKKTLPTPSPEAYQAMLLRIARIP

SEQ ID NO: 30240 - protein, 797 aa, Homo sapiens
MGTLGKAREAPRKPSHGCRAASKARLEAKPANSPFPSHPSLAHITQFRMMVSLGHLAKGASLDDLIDSCIQSFDADGNLCRSNQLLQVMLTMHRIVISSAELLQKVITLYKDALAKNSPGLCLKICYFVRYWITEFWVMFKMDASLTDTMEEFQELVKAKGEELHCRLIDTTQINARDWSRKLTQRIKSNTSKKRKVSLLFDHLEPEELSEHLTYLEFKSFRRISFSDYQNYLVNSCVKENPTMERSIALCNGISQWVQLMVLSRPTPQLRAEVFIKFIQVAQKLHQLQNFNTLMAVIGGLCHSSISRLKETSSHVPHEINKVLGEMTELLSSSRNYDNYRRAYGECTDFKIPILGVHLKDLISLYEAMPDYLEDGKVNVHKLLALYNHISELVQLQEVAPPLEANKDLVHLLTLSLDLYYTEDEIYELSYAREPRNHRAPPLTPSKPPVVVDWASGVSPKPDPKTISKHVQRMVDSVFKNYDHDQDGYISQEEFEKIAASFPFSFCVMDKDREGLISRDEITAYFMRASSIYSKLGLGFPHNFQETTYLKPTFCDNCAGFLWGVIKQGYRCKDCGMNCHKQCKDLVVFECKKRAKNPVAPTENNTSVGPVSNLCSLGAKDLLHAPEEGPFTFPNGEAVEHGEESKDRTIMLMGVSSQKISLRLKRAVAHKATQTESQPWIGSEGPSGPFVLSSPRKTAQDTLYVLPSPTSPCPSPVLVRKRAFVKWENKDSLIKSKEELRHLRLPTYQELEQEINTLKADNDALKIQLKYAQKKIESLQLEKSNHVLAQMEQGDCS

SEQ ID NO: 30241 - protein, 762 aa, Homo sapiens
MGTLGKAREAPRKPSHGCRAASKARLEAKPANSPFPSHPSLAHITQFRMMVSLGHLAKGASLDDLIDSCIQSFDADGNLCRSNQLLQVMLTMHRIVISSAELLQKVITLYKDALAKNSPGLCLKICYFVRYWITEFWVMFKMDASLTDTMEEFQELVKAKGEELHCRLIDTTQINARDWSRKLTQRIKSNTSKKRKVSLLFDHLEPEELSEHLTYLEFKSFRRISFSDYQNYLVNSCVKENPTMERSIALCNGISQWVQLMVLSRPTPQLRAEVFIKFIQVAQKLHQLQNFNTLMAVIGGLCHSSISRLKETSSHVPHEINKVLGEMTELLSSSRNYDNYRRAYGECTDFKIPILGVHLKDLISLYEAMPDYLEDGKVNVHKLLALYNHISELVQLQEVAPPLEANKDLVHLLTLSLDLYYTEDEIYELSYAREPRNHRAPSVFKNYDHDQDGYISQEEFEKIAASFPFSFCVMDKDREGLISRDEITAYFMRASSIYSKLGLGFPHNFQETTYLKPTFCDNCAGFLWGVIKQGYRCKDCGMNCHKQCKDLVVFECKKRAKNPVAPTENNTSVGPVSNLCSLGAKDLLHAPEEGPFTFPNGEAVEHGEESKDRTIMLMGVSSQKISLRLKRAVAHKATQTESQPWIGSEGPSGPFVLSSPRKTAQDTLYVLPSPTSPCPSPVLVRKRAFVKWENKDSLIKSKEELRHLRLPTYQELEQEINTLKADNDALKIQLKYAQKKIESLQLEKSNHVLAQMEQGDCS

SEQ ID NO: 30242 - protein, 597 aa, Homo sapiens
MGTLGKAREAPRKPSHGCRAASKARLEAKPANSPFPSHPSLAHITQFRMMVSLGHLAKGASLDDLIDSCIQSFDADGNLCRSNQLLQVMLTMHRIVISSAELLQKVITLYKDALAKNSPGLCLKICYFVRYWITEFWVMFKMDASLTDTMEEFQELVKAKGEELHCRLIDTTQINARDWSRKLTQRIKSNTSKKRKVSLLFDHLEPEELSEHLTYLEFKSFRRISFSDYQNYLVNSCVKENPTMERSIALCNGISQWVQLMVLSRPTPQLRAEVFIKFIQVAQKLHQLQNFNTLMAVIGGLCHSSISRLKETSSHVPHEINKVLGEMTELLSSSRNYDNYRRAYGECTDFKIPILGVHLKDLISLYEAMPDYLEDGKVNVHKLLALYNHISELVQLQEVAPPLEANKDLVHLLTLSLDLYYTEDEIYELSYAREPRNHRAPSVFKNYDHDQDGYISQEEFEKIAASFPFSFCVMDKDREGLISRDEITAYFMRASSIYSKLGLGFPHNFQETTYLKPTFCDNCAGFLWGVIKQGYRCKDCGMNCHKQCKDLVVFECKKRAKNPVAPTENNTSVGPVSNLCSLGAKDLLHGNKYSESR

SEQ ID NO: 30243 - protein, 481 aa, Homo sapiens
MGTLGKAREAPRKPSHGCRAASKARLEAKPANSPFPSHPSLAHITQFRMMVSLGHLAKGASLDDLIDSCIQSFDADGNLCRSNQLLQVMLTMHRIVISSAELLQKVITLYKDALAKNSPGLCLKICYFVRYWITEFWVMFKMDASLTDTMEEFQELVKAKGEELHCRLIDTTQINARDWSRKLTQRIKSNTSKKRKVSLLFDHLEPEELSEHLTYLEFKSFRRISFSDYQNYLVNSCVKENPTMERSIALCNGISQWVQLMVLSRPTPQLRAEVFIKFIQVAQKLHQLQNFNTLMAVIGGLCHSSISRLKETSSHVPHEINKVLGEMTELLSSSRNYDNYRRAYGECTDFKIPILGVHLKDLISLYEAMPDYLEDGKVNVHKLLALYNHISELVQLQEVAPPLEANKDLVHLLTLSLDLYYTEDEIYELSYAREPRNHRAPSVFKNYDHDQDGYISQEEFEKIAASFPFSFCVMDKDSSGE

SEQ ID NO: 30244 - protein, 546 aa, Homo sapiens
MGTLGKAREAPRKPSHGCRAASKARLEAKPANSPFPSHPSLAHITQFRMMVSLGHLAKGASLDDLIDSCIQSFDADGNLCRSNQLLQVMLTMHRIVISSAELLQKVITLYKDALAKNSPGLCLKICYFVRYWITEFWVMFKMDASLTDTMEEFQELVKAKGEELHCRLIDTTQINARDWSRKLTQRIKSNTSKKRKVSLLFDHLEPEELSEHLTYLEFKSFRRISFSDYQNYLVNSCVKENPTMERSIALCNGISQWVQLMVLSRPTPQLRAEVFIKFIQVAQKLHQLQNFNTLMAVIGGLCHSSISRLKETSSHVPHEINKVLGEMTELLSSSRNYDNYRRAYGECTDFKIPILGVHLKDLISLYEAMPDYLEDGKVNVHKLLALYNHISELVQLQEVAPPLEANKDLVHLLTLSLDLYYTEDEIYELSYAREPRNHRAPSVFKNYDHDQDGYISQEEFEKIAASFPFSFCVMDKDREGLISRDEITAYFMRASSIYSKLGLGFPHNFQETTYLKPTFCDNCAGFLWGVIKQGYRCKGNKYSESR

SEQ ID NO: 30245 - protein, 1949 aa, Homo sapiens
MGNSYAGQLKTTRFEEVLHNSIEASLRSNNLVPRPIFSQLYLEAEQQLAALEGGSRVDNEEEEEEGEGGLETNGPPNPFQLHPLPEGCCTTDGFCQAGKDLRLVSISNEPMDVPAGFLLVGVKSPSLPDHLLVCAVDKRFLPDDNGHNALLGFSGNCVGCGKKGFCYFTEFSNHINLKLTTQPKKQKHLKYYLVRNAQGTLTKGPLICWKGSEFRSRQIPASTCSSSLFPALESTAAFPSEPVPGTNPSILMGAQQAGPASDHPSLNAAMGPAVFNGKDSPKCQQLAKNNLLALPRPSALGILSNSGPPKKRHKGWSPESPSAPDGGCPQGGGNRAKYESAGMSCVPQVGLVGPASVTFPVVASGEPVSVPDNLLKICKAKPVIFKGHGNFPYLCGNLNDVVVSPLLYTCYQNSQSVSRAYEQYGASAIQPISEEMQLLLTVYYLVQLAADQVPLMEDLEQIFLRSWRESHLTEIRQYQQAPPQPFPPAPSAAAPVTSAQLPWLASLAASSCNDSVHVIECAYSLAEGLSEMFRLLVEGKLAKTNYVVIICACRSAAIDSCIAVTGKYQARILSESLLTPAEYQKEVNYELVTGKVDSLGAFFSTLCPEGDIDILLDKFHQENQGHISSSLAASSVTKAASLDVSGTPVCTSYNLEPHSIRPFQLAVAQKLLSHVCSIADSSTQNLDLGSFEKVDFLICIPPSEVTYQQTLLHVWHSGVLLELGLKKEHMTKQRVEQYVLKLDTEAQTKFKAFLQNSFQNPHTLFVLIHDHAHWDLVSSTVHNLYSQSDPSVGLVDRLLNCREVKEAPNIVTLHVTSFPYALQTQHTLISPYNEIHWPASCSNGVDLYHENKKYFGLSEFIESTLSGHSLPLLRYDSSFEAMVTALGKRFPRLHSAVIRTFVLVQHYAAALMAVSGLPQMKNYTSVETLEITQNLLNSPKQCPCGHGLMVLLRVPCSPLAVVAYERLAHVRARLALEEHFEIILGSPSSGVTVGKHFVKQLRMWQKIEDVEWRPQTYLELEGLPCILIFSGMDPHGESLPRSLRYCDLRLINSSCLVRTALEQELGLAAYFVSNEVPLEKGARNEALESDAEKLSSTDNEDEELGTEGSTSEKRSPMKRERSRSHDSASSSLSSKASGSALGGESSAQPTALPQGEHARSPQPRGPAEEGRAPGEKQRPRASQGPPSAISRHSPGPTPQPDCSLRTGQRSVQVSVTSSCSQLSSSSGSSSSSVAPAAGTWVLQASQCSLTKACRQPPIVFLPKLVYDMVVSTDSSGLPKAASLLPSPSVMWASSFRPLLSKTMTSTEQSLYYRQWTVPRPSHMDYGNRAEGRVDGFHPRRLLLSGPPQIGKTGAYLQFLSVLSRMLVRLTEVDVYDEEEININLREESDWHYLQLSDPWPDLELFKKLPFDYIIHDPKYEDASLICSHYQGIKSEDRGMSRKPEDLYVRRQTARMRLSKYAAYNTYHHCEQCHQYMGFHPRYQLYESTLHAFAFSYSMLGEEIQLHFIIPKSKEHHFVFSQPGGQLESMRLPLVTDKSHEYIKSPTFTPTTGRHEHGLFNLYHAMDGASHLHVLVVKEYEMAIYKKYWPNHIMLVLPSIFNSAGVGAAHFLIKELSYHNLELERNRQEELGIKPQDIWPFIVISDDSCVMWNVVDVNSAGERSREFSWSERNVSLKHIMQHIEAAPDIMHYALLGLRKWSSKTRASEVQEPFSRCHVHNFIILNVDLTQNVQYNQNRFLCDDVDFNLRVHSAGLLLCRFNRFSVMKKQIVVGGHRSFHITSKVSDNSAAVVPAQYICAPDSKHTFLAAPAQLLLEKFLQHHSHLFFPLSLKNHDHPVLSVDCYLNLGSQISVCYVSSRPHSLNISCSDLLFSGLLLYLCDSFVGASFLKKFHFLKGATLCVICQDRSSLRQTVVRLELEDEWQFRLRDEFQTANAREDRPLFFLTGRHI

SEQ ID NO: 30246 - protein, 457 aa, Homo sapiens
MGNSYAGQLKTTRFEEVLHNSIEASLRSNNLVPRPIFSQLYLEAEQQLAALEGGSRVDNEEEEEEGEGGLETNGPPNPFQLHPLPEGCCTTDGFCQAGKDLRLVSISNEPMDVPAGFLLVGVKSPSLPDHLLVCAVDKRFLPDDNGHNALLGFSGNCVGCGKKGFCYFTEFSNHINLKLTTQPKKQKHLKYYLVRNAQGTLTKGPLICWKGSEFRSRQIPASTCSSSLFPALESTAAFPSEPVPGTNPSILMGAQQAGPASDHPSLNAAMGPAVFNGKDSPKCQQLAKNNLLALPRPSALGILSNSGPPKKRHKGWSPESPSAPDGGCPQGGGNRAKYESAGMSCVPQVGLVGPASVTFPVVASGEPVSVPDNLLKICKAKPVIFKGHGNFPYLCGNLNDVVVSPLLYTCYQNSQSVSRAYEQYGASAIQPISEEMQLLLTVYYLVQLAHQIRNPDV

SEQ ID NO: 30247 - protein, 409 aa, Homo sapiens
MGNSYAGQLKTTRFEEVLHNSIEASLRSNNLVPRPIFSQLYLEAEQQLAALEGGSRVDNEEEEEEGEGGLETNGPPNPFQLHPLPEGCCTTDGFCQAGKDLRLVSISNEPMDVPAGFLLVGVKSPSLPDHLLVCAVDKRFLPDDNGHNALLGFSGNCVGCGKKGFCYFTEFSNHINLKLTTQPKKQKHLKYYLVRNAQGTLTKGPLICWKGSEFRSRQIPASTCSSSLFPALESTAAFPSEPVPGTNPSILMGAQQAGPASDHPSLNAAMGPAVFNGKDSPKCQQLAKNNLLALPRPSALGILSNSGPPKKRHKGWSPESPSAPDGGCPQGGGNRAKYESAGMSCVPQVGLVGPASVTFPVVASGEPVSVPDNLLKICKAKPVIFKVFVNGATQMVALGPAEPASPRSL

SEQ ID NO: 30248 - protein, 947 aa, Homo sapiens
MWQKIEDVEWRPQTYLELEGLPCILIFSGMDPHGESLPRSLRYCDLRLINSSCLVRTALEQELGLAAYFVSNEVPLEKGARNEALESDAEKLSSTDNEDEELGTEGSTSEKRSPMKRERSRSHDSASSSLSSKASGSALGGESSAQPTALPQGEHARSPQPRGPAEEGRAPGEKQRPRASQGPPSAISRHSPGPTPQPDCSLRTGQRSVQVSVTSSCSQLSSSSGSSSSSVAPAAGTWVLQASQCSLTKACRQPPIVFLPKLVYDMVVSTDSSGLPKAASLLPSPSVMWASSFRPLLSKTMTSTEQSLYYRQWTVPRPSHMDYGNRAEGRVDGFHPRRLLLSGPPQIGKTGAYLQFLSVLSRMLVRLTEVDVYDEEEININLREESDWHYLQLSDPWPDLELFKKLPFDYIIHDPKYEDASLICSHYQGIKSEDRGMSRKPEDLYVRRQTARMRLSKYAAYNTYHHCEQCHQYMGFHPRYQLYESTLHAFAFSYSMLGEEIQLHFIIPKSKEHHFVFSQPGGQLESMRLPLVTDKSHEYIKSPTFTPTTGRHEHGLFNLYHAMDGASHLHVLVVKEYEMAIYKKYWPNHIMLVLPSIFNSAGVGAAHFLIKELSYHNLELERNRQEELGIKPQDIWPFIVISDDSCVMWNVVDVNSAGERSREFSWSERNVSLKHIMQHIEAAPDIMHYALLGLRKWSSKTRASEVQEPFSRCHVHNFIILNVDLTQNVQYNQNRFLCDDVDFNLRVHSAGLLLCRFNRFSVMKKQIVVGGHRSFHITSKVSDNSAAVVPAQYICAPDSKHTFLAAPAQLLLEKFLQHHSHLFFPLSLKNHDHPVLSVDCYLNLGSQISVCYVSSRPHSLNISCSDLLFSGLLLYLCDSFVGASFLKKFHFLKGATLCVICQDRSSLRQTVVRLELEDEWQFRLRDEFQTANAREDRPLFFLTGRHI

SEQ ID NO: 30249 - protein, 520 aa, Homo sapiens
MEFHNGGHVSGIGGFLVSLTSRMKPHTLAVTPALIFAITVATIGSFQFGYNTGVINAPETIIKEFINKTLTDKANAPPSEVLLTNLWSLSVAIFSVGGMIGSFSVGLFVNRFGRRNSMLIVNLLAATGGCLMGLCKIAESVEMLILGRLVIGLFCGLCTGFVPMYIGEISPTALRGAFGTLNQLGIVIGILVAQIFGLELILGSEELWPVLLGFTILPAILQSAALPCCPESPRFLLINRKKEENATRILQRLWGTQDVSQDIQEMKDESARMSQEKQVTVLELFRVSSYRQPIIISIVLQLSQQLSGINAVFYYSTGIFKDAGVQQPIYATISAGVVNTIFTLLSLFLVERAGRRTLHMIGLGGMAFCSTLMTVSLLLKNHYNGMSFVCIGAILVFVACFEIGPGPIPWFIVAELFSQGPRPAAMAVAGCSNWTSNFLVGLLFPSAAYYLGAYVFIIFTGFLITFLAFTFFKVPETRGRTFEDITRAFEGQAHGADRSGKDGVMGMNSIEPAKETTTNV

SEQ ID NO: 30250 - protein, 497 aa, Homo sapiens
MDNRQNVTPALIFAITVATIGSFQFGYNTGVINAPETIIKEFINKTLTDKANAPPSEVLLTNLWSLSVAIFSVGGMIGSFSVGLFVNRFGRRNSMLIVNLLAATGGCLMGLCKIAESVEMLILGRLVIGLFCGLCTGFVPMYIGEISPTALRGAFGTLNQLGIVIGILVAQIFGLELILGSEELWPVLLGFTILPAILQSAALPCCPESPRFLLINRKKEENATRILQRLWGTQDVSQDIQEMKDESARMSQEKQVTVLELFRVSSYRQPIIISIVLQLSQQLSGINAVFYYSTGIFKDAGVQQPIYATISAGVVNTIFTLLSLFLVERAGRRTLHMIGLGGMAFCSTLMTVSLLLKNHYNGMSFVCIGAILVFVACFEIGPGPIPWFIVAELFSQGPRPAAMAVAGCSNWTSNFLVGLLFPSAAYYLGAYVFIIFTGFLITFLAFTFFKVPETRGRTFEDITRAFEGQAHGADRSGKDGVMGMNSIEPAKETTTNV

SEQ ID NO: 30251 - protein, 161 aa, Homo sapiens
MIGLGGMAFCSTLMTVSLLLKNHYNGMSFVCIGAILVFVACFEIGPGPIPWFIVAELFSQGPRPAAMAVAGCSNWTSNFLVGLLFPSAAYYLGAYVFIIFTGFLITFLAFTFFKVPETRGRTFEDITRAFEGQAHGADRSGKDGVMGMNSIEPAKETTTNV

SEQ ID NO: 30252 - protein, 411 aa, Homo sapiens
MLLRRRNSMLIVNLLAATGGCLMGLCKIAESVEMLILGRLVIGLFCGLCTGFVPMYIGEISPTALRGAFGTLNQLGIVIGILVAQIFGLELILGSEELWPVLLGFTILPAILQSAALPCCPESPRFLLINRKKEENATRILQRLWGTQDVSQDIQEMKDESARMSQEKQVTVLELFRVSSYRQPIIISIVLQLSQQLSGINAVFYYSTGIFKDAGVQQPIYATISAGVVNTIFTLLSLFLVERAGRRTLHMIGLGGMAFCSTLMTVSLLLKNHYNGMSFVCIGAILVFVACFEIGPGPIPWFIVAELFSQGPRPAAMAVAGCSNWTSNFLVGLLFPSAAYYLGAYVFIIFTGFLITFLAFTFFKVPETRGRTFEDITRAFEGQAHGADRSGKDGVMGMNSIEPAKETTTNV

SEQ ID NO: 30253 - protein, 535 aa, Homo sapiens
MQRLQLLRVEVLLGVKQGDEMRHFFFSSQTSTLEKSQNGGVGEEVTPALIFAITVATIGSFQFGYNTGVINAPETIIKEFINKTLTDKANAPPSEVLLTNLWSLSVAIFSVGGMIGSFSVGLFVNRFGRRNSMLIVNLLAATGGCLMGLCKIAESVEMLILGRLVIGLFCGLCTGFVPMYIGEISPTALRGAFGTLNQLGIVIGILVAQIFGLELILGSEELWPVLLGFTILPAILQSAALPCCPESPRFLLINRKKEENATRILQRLWGTQDVSQDIQEMKDESARMSQEKQVTVLELFRVSSYRQPIIISIVLQLSQQLSGINAVFYYSTGIFKDAGVQQPIYATISAGVVNTIFTLLSLFLVERAGRRTLHMIGLGGMAFCSTLMTVSLLLKNHYNGMSFVCIGAILVFVACFEIGPGPIPWFIVAELFSQGPRPAAMAVAGCSNWTSNFLVGLLFPSAAYYLGAYVFIIFTGFLITFLAFTFFKVPETRGRTFEDITRAFEGQAHGADRSGKDGVMGMNSIEPAKETTTNV

SEQ ID NO: 30254 - protein, 147 aa, Homo sapiens
MVHLTPEEKTAVNALWGKVNVDAVGGEALGRLLVVYPWTQRFFESFGDLSSPDAVMGNPKVKAHGKKVLGAFSDGLAHLDNLKGTFSQLSELHCDKLHVDPENFRLLGNVLVCVLARNFGKEFTPQMQAAYQKVVAGVANALAHKYH

SEQ ID NO: 30255 - protein, 949 aa, Homo sapiens
MAQVAVSTLPVEEESSSETRMVVTFLVSALESMCKELAKSKAEVACIAVYETDVFVVGTERGCAFVNARTDFQKDFAKYCVAEGLCEVKPPCPVNGMQVHSGETEILRKAVEDYFCFCYGKALGTTVMVPVPYEKMLRDQSAVVVQGLPEGVAFQHPENYDLATLKWILENKAGISFIINRPFLGPESQLGGPGMVTDAERSIVSPSESCGPINVKTEPMEDSGISLKAEAVSVKKESEDPNYYQYNMQGSHPSSTSNEVIEMELPMEDSTPLVPSEEPNEDPEAEVKIEGNTNSSSVTNSAAGVEDLNIVQVTVPDNEKERLSSIEKIKQLREQVNDLFSRKFGEAIGVDFPVKVPYRKITFNPGCVVIDGMPPGVVFKAPGYLEISSMRRILEAAEFIKFTVIRPLPGLELSNVGKRKIDQEGRVFQEKWERAYFFVEVQNIPTCLICKQSMSVSKEYNLRRHYQTNHSKHYDQYTERMRDEKLHELKKGLRKYLLGSSDTECPEQKQVFANPSPTQKSPVQPVEDLAGNLWEKLREKIRSFVAYSIAIDEITDINNTTQLAIFIRGVDENFDVSEELLDTVPMTGTKSGNEIFLRVEKSLKKFCINWSRLVSVASTGTPAMVDANNGLVTKLKSRVATFCKGAELKSICCIIHPESLCAQKLKMDHVMDVVVKSVNWICSRGLNHSEFTTLLYELDSQYGSLLYYTEIKWLSRGLVLKRFFESLEEIDSFMSSRGKPLPQLSSIDWIRDLAFLVDMTMHLNALNISLQGHSQIVTQMYDLIRAFLAKLCLWETHLTRNNLAHFPTLKLVSRNESDGLNYIPKIAELKTEFQKRLSDFKLYESELTLFSSPFSTKIDSVHEELQMEVIDLQCNTVLKTKYDKVGIPEFYKYLWGSYPKYKHHCAKILSMFGSTYICEQLFSIMKLSKTKYCSQLKDSQWDSVLHIAT

SEQ ID NO: 30256 - protein, 226 aa, Homo sapiens
MAQVAVSTLPVEEESSSETRMVVTFLVSALESMCKELAKSKAEVACIAVYETDVFVVGTERGCAFVNARTDFQKDFAKYCVAEGLCEVKPPCPVNGMQVHSGETEILRKAVEDYFCFCYGKALGTTVMVPVPYEKMLRDQSAVVVQGLPEGVAFQHPENYDLATLKWILENKAGISFIINRPFLGPESQLGGPGMVTDAERSIVSPSERHFTESRSCLSQERIRRS

SEQ ID NO: 30257 - protein, 209 aa, Homo sapiens
MEPLAAYPLKCSGPRAKVFAVLLSIVLCTVTLFLLQLKFLKPKINSFYAFEVKDAKGRTVSLEKYKGKVSLVVNVASDCQLTDRNYLGLKELHKEFGPSHFSVLAFPCNQFGESEPRPSKEVESFARKNYGVTFPIFHKIKILGSEGEPAFRFLVDSSKKEPRWNFWKYLVNPEGQVVKFWKPEEPIEVIRPDIAALVRQVIIKKKEDL

SEQ ID NO: 30258 - protein, 222 aa, Homo sapiens
MAEKPKLHYFNARGRMESTRWLLAAAGVEFEEKFIKSAEDLDKLRNDGYLMFQQVPMVEIDGMKLVQTRAILNYIASKYNLYGKDIKERALIDMYIEGIADLGEMILLLPVCPPEEKDAKLALIKEKIKNRYFPAFEKVLKSHGQDYLVGNKLSRADIHLVELLYYVEELDSSLISSFPLLKALKTRISNLPTVKKFLQPGSPRKPPMDEKSLEEARKIFRF

SEQ ID NO: 30259 - protein, 264 aa, Homo sapiens
MPRSFLVDSLVLREAGEKKAPEGSPPPLFPYAVPPPHALHGLSPGACHARKAGLLCVCPLCVTASQLHGPPGPPALPLLKASFPPFGSQYCHAPLGRQHSAVSPGVAHGPAAAAAAAALYQTSYPLPDPRQFHCISVDSSSNQLPSSKRMRTAFTSTQLLELEREFASNMYLSRLRRIEIATYLNLSEKQVKIWFQNRRVKHKKEGKGSNHRGGGGGGAGGGGSAPQGCKCASLSSAKCSEDDDELPMSPSSSGKDDRDLTVTP

SEQ ID NO: 30260 - protein, 676 aa, Homo sapiens [sequence omitted]

SEQ ID NO: 30261 - protein, 549 aa, Homo sapiens
MDFLIVLVCLIFSVLSTIEQYAALATGTLFWMEIVLVVFFGTEYVVRLWSAGCRSKYVGLWGRLRFARKPISIIDLIVVVASMVVLCVGSKGQVFATSAIRGIRFLQILRMLHVDRQGGTWRLLGSVVFIHRQELITTLYIGFLGLIFSSYFVYLAEKDAVNESGRVEFGSYADALWWGVVTVTTIGYGDKVPQTWVGKTIASCFSVFAISFFALPAGILGSGFALKVQQKQRQKHFNRQIPAAASLIQTAWRCYAAENPDSSTWKIYIRKAPRSHTLLSPSPKPKKSVVVKKKKFKLDKDNGVTPGEKMLTVPHITCDPPEERRLDHFSVDGYDSSVRKSPTLLEVSMPHFMRTNSFAEDLDLEGETLLTPITHISQLREHHRATIKVIRRMQYFVAKKKFQQARKPYDVRDVIEQYSQGHLNLMVRIKELQRRLDQSIGKPSLFISVSEKSKDRGSNTIGARLNRVEDKVTQLDQRLALITDMLHQLLSLHGGSTPGSGGPPREGGAHITQPCGSGGSVDPELFLPSNTLPTYEQLTVPRRGPDEGS

SEQ ID NO: 30262 - protein, 192 aa, Homo sapiens
MGKGCKVVVCGLLSVGKTAILEQLLYGNHTIGMEDCETMEDVYMASVETDRGVKEQLHLYDTRGLQEGVELPKHYFSFADGFVLVYSVNNLESFQRVELLKKEIDKFKDKKEVAIVVLGNKIDLSEQRQVDAEVAQQWAKSEKVRLWEVTVTDRKTLIEPFTLLASKLSQPQSKSSFPLPGRKNKGNSNSEN

SEQ ID NO: 30263 - protein, 1568 aa, Homo sapiens
MAGVGAAALSLLLHLGALALAAGAEGGAVPREPPGQQTTAHSSVLAGNSQEQWHPLREWLGRLEAAVMELREQNKDLQTRVRQLESCECHPASPQCWGLGRAWPEGARWEPDACTACVCQDGAAHCGPQAHLPHCRGCSQNGQTYGNGETFSPDACTTCRCLTGAVQCQGPSCSELNCLESCTPPGECCPICRPGCDYEGQLYEEGVTFLSSSNPCLQCTCLRSRVRCMALKCPPSPCPEPVLRPGHCCPTCQGCTEGGSHWEHGQEWTTPGDPCRICRCLEGHIQCRQRECASLCPYPARPLPGTCCPVCDGCFLNGREHRSGEPVGSGDPCSHCRCANGSVQCEPLPCPPVPCRHPGKIPGQCCPVCDGCEYQGHQYQSQETFRLQERGLCVRCSCQAGEVSCEEQECPVTPCALPASGRQLCPACELDGEEFAEGVQWEPDGRPCTACVCQDGVPKCGAVLCPPAPCQHPTQPPGACCPSCDSCTYHSQVYANGQNFTDADSPCHACHCQDGTVTCSLVDCPPTTCARPQSGPGQCCPRCPDCILEEEVFVDGESFSHPRDPCQECRCQEGHAHCQPRPCPRAPCAHPLPGTCCPNDCSGCAFGGKEYPSGADFPHPSDPCRLCRCLSGNVQCLARRCVPLPCPEPVLLPGECCPQCPAAPAPAGCPRPGAAHARHQEYFSPPGDPCRRCLCLDGSVSCQRLPCPPAPCAHPRQGPCCPSCDGCLYQGKEFASGERFPSPTAACHLCLCWEGSVSCEPKACAPALCPFPARGDCCPDCDGCEYLGESYLSNQEFPDPREPCNLCTCLGGFVTCGRRPCEPPGCSHPLIPSGHCCPTCQGCRYHGVTTASGETLPDPLDPTCSLCTCQEGSMRCQKKPCPPALCPHPSPGPCFCPVCHSCLSQGREHQDGEEFEGPAGSCEWCRCQAGQVSCVRLQCPPLPCKLQVTERGSCCPRCRGCLAHGEEHPEGSRWVPPDSACSSCVCHEGVVTCARIQCISSCAQPRQGPHDCCPQCSDCEHEGRKYEPGESFQPGADPCEVCICEPQPEGPPSLRCHRRQCPSLVGCPPSQLLPPGPQHCCPTCAEALSNCSEGLLGSELAPPDPCYTCQCQDLTWLCIHQACPELSCPLSERHTPPGSCCPVCRAPTQSCVHQGREVASGERWTVDTCTSCSCMAGTVRCQSQRCSPLSCGPDKAPALSPGSCCPRCLPRPASCMAFGDPHYRTFDGRLLHFQGSCSYVLAKDCHSGDFSVHVTNDDRGRSGVAWTQEVAVLLGDMAVRLLQDGAVTVDGHPVALPFLQEPLLYVELRGHTVILHAQPGLQVLWDGQSQVEVSVPGSYQGRTCGLCGNFNGFAQDDLQGPEGLLLPSEAAFGNSWQVSEGLWPGRPCSAGREVDPCRAAGYRARREANARCGVLKSSPFSRCHAVVPPEPFFAACVYDLCACGPGSSADACLCDALEAYASHCRQAGVTPTWRGPTLCVVGCPLERGFVFDECGPPCPRTCFNQHIPLGELAAHCVRPCVPGCQCPAGLVEHEAHCIPPEACPQVLLTGDQPLGARPSPSREPQETP

SEQ ID NO: 30264 - protein, 294 aa, Homo sapiens
MAGTVRCQSQRCSPLSCGPDKAPALSPGSCCPRCLPRPASCMAFGDPHYRTFDGRLLHFQGSCSYVLAKDCHSGDFSVHVTNDDRGRSGVAWTQEVAVLLGDMAVRLLQDGAVTVDGHPVALPFLQEPLLYVELRGHTVILHAQPGLQVLWDGQSQVEVSVPGSYQGRTCGLCGNFNGFAQDDLQGPEGLLLPSEAAFGNSWQVQEGRGYPPGLELPPVLLQMEWSRRAQEQLLWDLELLTGVELGLFWPPQAQFFGPRGQAQQAWSQCCQPGGSTGGDPEQPILKASCDGSRL

SEQ ID NO: 30265 - protein, 814 aa, Homo sapiens
MAGVGAAALSLLLHLGALALAAGAEGGAVPREPPGQQTTAHSSVLAGNSQEQWHPLREWLGRLEAAVMELREQNKDLQTRVRQLESCECHPASPQCWGLGRAWPEGARWEPDACTACVCQDGAAHCGPQAHLPHCRGCSQNGQTYGNGETFSPDACTTCRCLEGTITCNQKPCPRGPCPEPGACCPHCKPGCDYEGQLYEEGVTFLSSSNPCLQCTCLRSRVRCMALKCPPSPCPEPVLRPGHCCPTCQGCTEGGSHWEHGQEWTTPGDPCRICRCLEGHIQCRQRECASLCPYPARPLPGTCCPVCDGCFLNGREHRSGEPVGSGDPCSHCRCANGSVQCEPLPCPPVPCRHPGKIPGQCCPVCDGCEYQGHQYQSQETFRLQERGLCVRCSCQAGEVSCEEQECPVTPCALPASGRQLCPACELDGEEFAEGVQWEPDGRPCTACVCQDGVPKCGAVLCPPAPCQHPTQPPGACCPSCDSCTYHSQVYANGQNFTDADSPCHACHCQDGTVTCSLVDCPPTTCARPQSGPGQCCPRCPDCILEEEVFVDGESFSHPRDPCQECRCQEGHAHCQPRPCPRAPCAHPLPGTCCPNDCSGCAFGGKEYPSGADFPHPSDPCRLCRCLSGNVQCLARRCVPLPCPEPVLLPGECCPQCPAAPAPAGCPRPGAAHARHQEYFSPPGDPCRRCLCLDGSVSCQRLPCPPAPCAHPRQGPCCPSCDGCLYQGKEFASGERFPSPTAACHLCLCWEGSVSCEPKACAPALCPFPARGDCCPDCDGEGHGIGSCRGGMRETRGLGQNNLYCPRVDLKYLLQ

SEQ ID NO: 30266 - protein, 499 aa, Homo sapiens
MTVATGDPADEAAALPGHPQDTYDPEADHECCERVVINISGLRFETQLKTLAQFPETLLGDPKKRMRYFDPLRNEYFFDRNRPSFDAILYYYQSGGRLRRPVNVPLDIFSEEIRFYELGEEAMEMFREDEGYIKEEERPLPENEFQRQVWLLFEYPESSGPARIIAIVSVMVILISIVSFCLETLPIFRDENEDMHGSGVTFHTYSNSTIGYQQSTSFTDPFFIVETLCIIWFSFEFLVRFFACPSKAGFFTNIMNIIDIVAIIPYFITLGTELAEKPEDAQQGQQAMSLAILRVIRLVRVFRIFKLSRHSKGLQILGQTLKASMRELGLLIFFLFIGVILFSSAVYFAEADERESQFPSIPDAFWWAVVSMTTVGYGDMVPTTIGGKIVGSLCAIAGVLTIALPVPVIVSNFNYFYHRETEGEEQAQYLQVTSCPKIPSSPDLKKSRSASTISKSDYMEIQEGVNNSNEDFREENLKTANCTLANTNYVNITKMLTDV

SEQ ID NO: 30267 - protein, 356 aa, Homo sapiens
MTVATGDPADEAAALPGHPQDTYDPEADHECCERVVINISGLRFETQLKTLAQFPETLLGDPKKRMRYFDPLRNEYFFDRNRPSFDAILYYYQSGGRLRRPVNVPLDIFSEEIRFYELGEEAMEMFREDEGYIKEEERPLPENEFQRQVWLLFEYPESSGPARIIAIVSVMVILISIVSFCLETLPIFRDENEDMHGSGVTFHTYSNSTIGYQQSTSFTDPFFIVETLCIIWFSFEFLVRFFACPSKAGFFTNIMNIIDIVAIIPYFITLGTELAEKPEDAQQGQQAMSLAILRVIRLERRPLQSQKSKRGRQHLNTSHDCTLGINLVAGMTVQWTRASGPDDRQTPAVTTLHRMY

SEQ ID NO: 30268 - protein, 1103 aa, Homo sapiens
MAGASVKVAVRVRPFNARETSQDAKCVVSMQGNTTSIINPKQSKDAPKSFTFDYSYWSHTSTEDPQFASQQQVYRDIGEEMLLHAFEGYNVCIFAYGQTGAGKSYTMMGRQEPGQQGIVPQLCEDLFSRVSENQSAQLSYSVEVSYMEIYCERVRDLLNPKSRGSLRVREHPILGPYVQDLSKLAVTSYADIADLMDCGNKARTVAATNMNETSSRSHAVFTIVFTQRCHDQLTGLDSEKVSKISLVDLAGSERADSSGARGMRLKEGANINKSLTTLGKVISALADMQSKKRKSDFIPYRDSVLTWLLKENLGGNSRTAMIAALSPADINYEETLSTLRYADRTKQIRCNAIINEDPNARLIRELQEEVARLRELLMAQGLSASALEGLKTEEGSVRGALPAVSSPPAPVSPSSPTTHNGELEPSFSPNTESQIGPEEAMERLQETEKIIAELNETWEEKLRKTEALRMEREALLAEMGVAVREDGGTVGVFSPKKTPHLVNLNEDPLMSECLLYHIKDGVTRVGQVDMDIKLTGQFIREQHCLFRSIPQPDGEVVVTLEPCEGAETYVNGKLVTEPLVLKSGNRIVMGKNHVFRFNHPEQARLERERGVPPPPGPPSEPVDWNFAQKELLEQQGIDIKLEMEKRLQDLENQYRKEKEEADLLLEQQRLYADSDSGDDSDKRSCEESWRLISSLREQLPPTTVQTIVKRCGLPSSGKRRAPRRVYQIPQRRRLQGKDPRWATMADLKMQAVKEICYEVALADFRHGRAEIEALAALKMRELCRTYGKPDGPGDAWRAVARDVWDTVGEEEGGGAGSGGGSEEGARGAEVEDLRAHIDKLTGILQEVKLQNSSKDRELQALRDRMLRMERVIPLAQDHEDENEEGGEVPWAPPEGSEAAEEAAPSDRMPSARPPSPPLSSWERVSRLMEEDPAFRRGRLRWLKQEQLRLQGLQGSGGRGGGLRRPPARFVPPHDCKLRFPFKSNPQHRESWPGMGSGEAPTPLQPPEEVTPHPATPARRPPSPRRSHHPRRNSLDGGGRSRGAGSAQPEPQHFQPKKHNSYPQPPQPYPAQRPPGPRYPPYTTPPRMRRQRSAPDLKESGAAV

SEQ ID NO: 30269 - protein, 68 aa, Homo sapiens
MGRKWSGPTAEHQLPMPPPGVRLDSWKGVASGCSPSKASQEARGKEKCPTLNGQPQWSALFTLPPQRE

SEQ ID NO: 30270 - protein, 575 aa, Homo sapiens
MDERLSLLRSPPPPSARHRAHPPQRPASSGGAHTLVNHGYAEPAAGRELPPDMTVVPGDHLLEPEVADGGGAPPQGGCGGGGCDRYEPLPPSLPAAGEQDCCGERVVINISGLRFETQLKTLCQFPETLLGDPKRRMRYFDPLRNEYFFDRNRPSFDAILYYYQSGGRIRRPVNVPIDIFSEEIRFYQLGEEAMEKFREDEGFLREEERPLPRRDFQRQVWLLFEYPESSGPARGIAIVSVLVILISIVIFCLETLPEFRDEKDYPASTSQDSFEAAGNSTSGSRAGASSFSDPFFVVETLCIIWFSFELLVRFFACPSKATFSRNIMNLIDIVAIIPYFITLGTELAERQGNGQQAMSLAILRVIRLVRVFRIFKLSRHSKGLQILGQTLKASMRELGLLIFFLFIGVILFSSAVYFAEADDPTSGFSSIPDAFWWAVVTMTTVGYGDMHPVTIGGKIVGSLCAIAGVLTIALPVPVIVSNFNYFYHRETEGEEQSQYMHVGSCQHLSSSAEELRKARSNSTLSKSEYMVIEEGGMNHSAFPQTPFKTGNSTATCTTNNNPNSCVNIKKIFTDV

SEQ ID NO: 30271 - protein, 623 aa, Homo sapiens
MSTQDERQINTEYAVSLLEQLKLFYEQQLFTDIVLIVEGTEFPCHKMVLATCSSYFRAMFMSGLSESKQTHVHLRNVDAATLQIIITYAYTGNLAMNDSTVEQLYETACFLQVEDVLQRCREYLIKKINAENCVRLLSFADLFSCEELKQSAKRMVEHKFTAVYHQDAFMQLSHDLLIDILSSDNLNVEKEETVREAAMLWLEYNTESRSQYLSSVLSQIRIDALSEVTQRAWFQGLPPNDKSVVVQGLYKSMPKFFKPRLGMTKEEMMIFIEASSENPCSLYSSVCYSPQAEKVYKLCSPPADLHKVGTVVTPDNDIYIAGGQVPLKNTKTNHSKTSKLQTAFRTVNCFYWFDAQQNTWFPKTPMLFVRIKPSLVCCEGYIYAIGGDSVGGELNRRTVERYDTEKDEWTMVSPLPCAWQWSAAVVVHDCIYVMTLNLMYCYFPRSDSWVEMAMRQTSRSFASAAAFGDKIFYIGGLHIATNSGIRLPSGTVDGSSVTVEIYDVNKNEWKMAANIPAKRYSDPCVRAVVISNSLCVFMRETHLNERAKYVTYQYDLELDRWSLRQHISERVLWDLGRDFRCTVGKLYPSCLEESPWKPPTYLFSTDGTEEFELDGEMVALPPV

SEQ ID NO: 30272 - protein, 381 aa, Homo sapiens
MASPPACPSEEDESLKGCELYVQLHGIQQVLKDCIVHLCISKPERPMKFLREHFEKLEKEENRQILARQKSNSQSDSHDEEVSPTPPNPVVKARRRRGGVSAEVYTEEDAVSYVRKVIPKDYKTMTALAKAISKNVLFAHLDDNERSDIFDAMFPVTHIAGETVIQQGNEGDNFYVVDQGEVDVYVNGEWVTNISEGGSFGELALIYGTPRAATVKAKTDLKLWGIDRDSYRRILMGSTLRKRKMYEEFLSKVSILESLEKWERLTVADALEPVQFEDGEKIVVQGEPGDDFYIITEGTASVLQRRSPNEEYVEVGRLGPSDYFGEIALLLNRPRAATVVARGPLKCVKLDRPRFERVLGPCSEILKRNIQRYNSFISLTV

SEQ ID NO: 30273 - protein, 960 aa, Homo sapiens
MKSARAKTPRKPTVKKGSQTNLKDPVGVYCRVRPLGFPDQECCIEVINNTTVQLHTPEGYRLNRNGDYKETQYSFKQVFGTHTTQKELFDVVANPLVNDLIHGKNGLLFTYGVTGSGKTHTMTGSPGEGGLLPRCLDMIFNSIGSFQAKRYVFKSNDRNSMDIQCEVDALLERQKREAMPNPKTSSSKRQVDPEFADMITVQEFCKAEEVDEDSVYGVFVSYIEIYNNYIYDLLEEVPFDPIKPKPPQSKLLREDKNHNMYVAGCTEVEVKSTEEAFEVFWRGQKKRRIANTHLNRESSRSHSVFNIKLVQAPLDADGDNVLQEKEQITISQLSLVDLAGSERTNRTRAEGNRLREAGNINQSLMTLRTCMDVLRENQMYGTNKMVPYRDSKLTHLFKNYFDGEGKVRMIVCVNPKAEDYEENLQVMRFAEVTQEVEVARPVDKAICGLTPGRRYRNQPRGPVGNEPLVTDVVLQSFPPLPSCEILDINDEQTLPRLIEALEKRHNLRQMMIDEFNKQSNAFKALLQEFDNAVLSKENHMQGKLNEKEKMISGQKLEIERLEKKNKTLEYKIEILEKTTTIYEEDKRNLQQELETQNQKLQRQFSDKRRLEARLQGMVTETTMKWEKECERRVAAKQLEMQNKLWVKDEKLKQLKAIVTEPKTEKPERPSRERDREKVTQRSVSPSPVPLSSNYIAQISNGQQLMSQPQLHRRSNSCSSISVASCISEWEQKIPTYNTPLKVTSIARRRQQEPGQSKTCIVSDRRRGMYWTEGREVVPTFRNEIEIEEDHCGRLLFQPDQNAPPIRLRHRRSRSAGDRWVDHKPASNMQTETVMQPHVPHAITVSVANEKALAKCEKYMLTHQELASDGEIETKLIKGDIYKTRGGGQSVQFTDIETLKQESPNGSRKRRSSTVAPAQPDGAESEWTDVETRCSVAVEMRAGSQLGPGYQHHAQPKRKKP

SEQ ID NO: 30274 - protein, 856 aa, Homo sapiens
MKSARAKTPRKPTVKKGSQTNLKDPVGVYCRVRPLGFPDQECCIEVINNTTVQLHTPEGYRLNRNGDYKETQYSFKQVFGTHTTQKELFDVVANPLVNDLIHGKNGLLFTYGVTGSGKTHTMTGSPGEGGLLPRCLDMIFNSIGSFQAKRYVFKSNDRNSMDIQCEVDALLERQKREAMPNPKTSSSKRQVDPEFADMITVQEFCKAEEVDEDSVYGVFVSYIEIYNNYIYDLLEEVPFDPIKPKPPQSKLLREDKNHNMYVAGCTEVEVKSTEEAFEVFWRGQKKRRIANTHLNRESSRSHSVFNIKLVQAPLDADGDNVLQEKEQITISQLSLVDLAGSERTNRTRAEGNRLREAGNINQSLMTLRTCMDVLRENQMYGTNKMVPYRDSKLTHLFKNYFDGEGKVRMIVCVNPKAEDYEENLQVMRFAEVTQEVEVARPVDKAICGLTPGRRYRNQPRGPVGNEPLVTDVVLQSFPPLPSCEILDINDEQTLPRLIEALEKRHNLRQMMIDEFNKQSNAFKALLQEFDNAVLSKENHMQGKLNEKEKMISGQKLEIERLEKKNKTLEYKIEILEKTTTIYEEDKRNLQQELETQNQKLQRQFSDKRRLEARLQGMVTETTMKWEKECERRVAAKQLEMQNKLWVKDEKLKQLKAIVTEPKTEKPERPSRERDREKVTQRSVSPSPVPLLFQPDQNAPPIRLRHRRSRSAGDRWVDHKPASNMQTETVMQPHVPHAITVSVANEKALAKCEKYMLTHQELASDGEIETKLIKGDIYKTRGGGQSVQFTDIETLKQESPNGSRKRRSSTVAPAQPDGAESEWTDVETRCSVAVEMRAGSQLGPGYQHHAQPKRKKP

SEQ ID NO: 30275 - protein, 673 aa, Homo sapiens
MITVQEFCKAEEVDEDSVYGVFVSYIEIYNNYIYDLLEEVPFDPIKPKWNSCSTPMRNTDFVPPQSKLLREDKNHNMYVAGCTEVEVKSTEEAFEVFWRGQKKRRIANTHLNRESSRSHSVFNIKLVQAPLDADGDNVLQEKEQITISQLSLVDLAGSERTNRTRAEGNRLREAGNINQSLMTLRTCMDVLRENQMYGTNKMVPYRDSKLTHLFKNYFDGEGKVRMIVCVNPKAEDYEENLQVMRFAEVTQEVEVARPVDKAICGLTPGRRYRNQPRGPVGNEPLVTDVVLQSFPPLPSCEILDINDEQTLPRLIEALEKRHNLRQMMIDEFNKQSNAFKALLQEFDNAVLSKENHMQGKLNEKEKMISGQKLEIERLEKKNKTLEYKIEILEKTTTIYEEDKRNLQQELETQNQKLQRQFSDKRRLEARLQGMVTETTMKWEKECERRVAAKQLEMQNKLWVKDEKLKQLKAIVTEPKTEKPERPSRERDREKVTQRSVSPSPVPLLFQPDQNAPPIRLRHRRSRSAGDRWVDHKPASNMQTETVMQPHVPHAITVSVANEKALAKCEKYMLTHQELASDGEIETKLIKGDIYKTRGGGQSVQFTDIETLKQESPNGSRKRRSSTVAPAQPDGAESEWTDVETRCSVAVEMRAGSQLGPGYQHHAQPKRKKP

SEQ ID NO: 30276 - protein, 612 aa, Homo sapiens
MELAMDNSYAFNQRSTCNGIPSEKKNNFLVSEDHGQKILSVLQNFREQNVFYDFKIIMKDEIIPCHRCVLAACSDFFRAMFEVNMKERDDGSVTITNLSSKAVKAFLDYAYTGKTKITDDNVEMFFQLSSFLQVSFLSKACSDFLIKSINLVNCLQLLSISDSYGSTSLFDHALHFVQHHFSLLFKSSDFLEMNFGVLQKCLESDELNVPEEEMVLKVVLSWTKHNLESRQKYLPHLIEKVRLHQLSEETLQDCLFNEESLLKSTNCFDIIMDAIKCVQGSGGLFPDARPSTTEKYIFIHKTEENGENQYTFCYNIKSDSWKILPQSHLIDLPGSSLSSYGEKIFLTGGCKGKCCRTVRLHIAESYHDATDQTWCYCPVKNDFFLVSTMKTPRTMHTSVMALDRLFVIGGKTRGSRDIKSLLDVESYNPLSKEWISVSPLPRGIYYPEASTCQNVIYVLGSEVEITDAFNPSLDCFFKYNATTDQWSELVAEFGQFFHATLIKAVPVNCTLYICDLSTYKVYSFCPDTCVWKGEGSFECAGFNAGAIGIEDKIYILGGDYAPDEITDEVQVYHSNRSEWEEVSPMPRALTEFYCQVIQFNKYRDPWFSNLCA

SEQ ID NO: 30277 - protein, 518 aa, Homo sapiens
MESPEEPGASMDENYFVNYTFKDRSHSGRVAQGIMKLCLEEELFADVTISVEGREFQLHRLVLSAQSCFFRSMFTSNLKEAHNRVIVLQDVSESVFQLLVDYIYHGTVKLRAEELQEIYEVSDMYQLTSLFEECSRFLARTVQVGNCLQVMWLADRHSDPELYTAAKHCAKTHLAQLQNTEEFLHLPHRLLTDIISDGVPCSQNPTEAIEAWINFNKEEREAFAESLRTSLKEIGENVHIYLIGKESSRTHSLAVSLHCAEDDSISVSGQNSLCHQITAACKHGGDLYVVGGSIPRRMWKCNNATVDWEWCAPLPRDRLQHTLVSVPGKDAIYSLGGKTLQDTLSNAVIYYRVGDNVWTETTQLEVAVSGAAGANLNGIIYLLGGEENDLDFFTKPSRLIQCFDTETDKCHVKPYVLPFAGRMHAAVHKDLVFIVAEGDSLVCYNPLLDSFTRLCLPEAWSSAPSLWKIASCNGSIYVFRDRYKKGDANTYKLDPATSAVTVTRGIKVLLTNLQFVLA

SEQ ID NO: 30278 - protein, 534 aa, Homo sapiens
MKGGNADSWQREKLASMESPEEPGASMDENYFVNYTFKDRSHSGRVAQGIMKLCLEEELFADVTISVEGREFQLHRLVLSAQSCFFRSMFTSNLKEAHNRVIVLQDVSESVFQLLVDYIYHGTVKLRAEELQEIYEVSDMYQLTSLFEECSRFLARTVQVGNCLQVMWLADRHSDPELYTAAKHCAKTHLAQLQNTEEFLHLPHRLLTDIISDGVPCSQNPTEAIEAWINFNKEEREAFAESLRTSLKEIGENVHIYLIGKESSRTHSLAVSLHCAEDDSISVSGQNSLCHQITAACKHGGDLYVVGGSIPRRMWKCNNATVDWEWCAPLPRDRLQHTLVSVPGKDAIYSLGGKTLQDTLSNAVIYYRVGDNVWTETTQLEVAVSGAAGANLNGIIYLLGGEENDLDFFTKPSRLIQCFDTETDKCHVKPYVLPFAGRMHAAVHKDLVFIVAEGDSLVCYNPLLDSFTRLCLPEAWSSAPSLWKIASCNGSIYVFRDRYKKGDANTYKLDPATSAVTVTRGIKVLLTNLQFVLA

SEQ ID NO: 30279 - protein, 1368 aa, Homo sapiens
MASWLYECLCEAELAQYYSHFTALGLQKIDELAKITMKDYSKLGVHDMNDRKRLFQLIKIIKIMQEEDKAVSIPERHLQTSSLRIKSQELRSGPRRQLNFDSPADNKDRNASNDGFEMCSLSDFSANEQKSTYLKVLEHMLPDDSQYHTKTGILNATAGDSYVQTEISTSLFSPNYLSAILGDCDIPIIQRISHVSGYNYGIPHSCIRQNTSEKQNPWTEMEKIRVCVRKRPLGMREVRRGEINIITVEDKETLLVHEKKEAVDLTQYILQHVFYFDEVFGEACTNQDVYMKTTHPLIQHIFNGGNATCFAYGQTGAGKTYTMIGTHENPGLYALAAKDIFRQLEVSQPRKHLFVWISFYEIYCGQLYDLLNRRKRLFAREDSKHMVQIVGLQELQVDSVELLLEVILKGSKERSTGATGVNADSSRSHAVIQIQIKDSAKRTFGRISFIDLAGSERAADARDSDRQTKMEGAEINQSLLALKECIRALDQEHTHTPFRQSKLTQVLKDSFIGNAKTCMIANISPSHVATEHTLNTLRYADRVKELKKGIKCCTSVTSRNRTSGNSSPKRIQSSPGALSEDKCSPKKVKLGFQQSLTVAAPGSTRGKVHPLTSHPPNIPFTSAPKVSGKRGGSRGSPSQEWVIHASPVKGTVRSGHVAKKKPEESAPLCSEKNRMGNKTVLGWESRASGPGEGLVRGKLSTKCKKVQTVQPVQKQLVSRVELSFGNAHHRAEYSQDSQRGTPARPASEAWTNIPPHQKEREEHLRFYHQQFQQPPLLQQKLKYQPLKRSLRQYRPPEGQLTNETPPLFHSYSENHDGAQVEELDDSDFSEDSFSHISSQRATKQRNTLENSEDSFFLHQTWGQGPEKQVAERQQSLFSSPRTGDKKDLTKSWVDSRDPINHRRAALDHSCSPSKGPVDWSRENSTSSGPSPRDSLAEKPYCSQVDFIYRQERGGGSSFDLRKDASQSEVSGENEGNLPSPEEDGFTISLSHVAVPGSPDQRDTVTTPLREVSADGPIQVTSTVKNGHAVPGEDPRGQLGTHAEYASGLMSPLTMSLLENPDNEGSPPSEQLVQDGATHSLVAESTGGPVVSHTVPSGDQEAALPVSSATRHLWLSSSPPDNKPGGDLPALSPSPIRQHPADKLPSREADLGEACQSRETVLFSHEHMGSEQYDADAEETGLDGSWGFPGKPFTTIHMGVPHSGPTLTPRTGSSDVADQLWAQERKHPTRLGWQEFGLSTDPIKLPCNSENVTWLKPRPISRCLARPSSPLVPSCSPKTAGTLRQPTLEQAQQVVIRAHQEQLDEMAELGFKEETLMSQLASNDFEDFVTQLDEIMVLKSKCIQSLRSQLQLYLTCHGPTAAPEGTVPS

SEQ ID NO: 30280 - protein, 1234 aa, Homo sapiens
MASWLYECLCEAELAQYYSHFTALGLQKIDELAKITMKDYSKLGVHDMNDRKRLFQLIKIIKIMQEEDKAVSIPERHLQTSSLRIKSQELRSGPRRQLNFDSPADNKDRNASNDGFEMCSLSDFSANEQKSTYLKVLEHMLPDDSQYHTKTGILNATAGDSYVQTEISTSLFSPNYLSAILGDCDIPIIQRISHVSGYNYGIPHSCIRQNTSEKQNPWTEMEKIRVCVRKRPLGMREVRRGEINIITVEDKETLLVHEKKEAVDLTQYILQVILKGSKERSTGATGVNADSSRSHAVIQIQIKDSAKRTFGRISFIDLAGSERAADARDSDRQTKMEGAEINQSLLALKECIRALDQEHTHTPFRQSKLTQVLKDSFIGNAKTCMIANISPSHVATEHTLNTLRYADRVKELKKGIKCCTSVTSRNRTSGNSSPKRIQSSPGALSEDKCSPKKVKLGFQQSLTVAAPGSTRGKVHPLTSHPPNIPFTSAPKVSGKRGGSRGSPSQEWVIHASPVKGTVRSGHVAKKKPEESAPLCSEKNRMGNKTVLGWESRASGPGEGLVRGKLSTKCKKVQTVQPVQKQLVSRVELSFGNAHHRAEYSQDSQRGTPARPASEAWTNIPPHQKEREEHLRFYHQQFQQPPLLQQKLKYQPLKRSLRQYRPPEGQLTNETPPLFHSYSENHDGAQVEELDDSDFSEDSFSHISSQRATKQRNTLENSEDSFFLHQTWGQGPEKQVAERQQSLFSSPRTGDKKDLTKSWVDSRDPINHRRAALDHSCSPSKGPVDWSRENSTSSGPSPRDSLAEKPYCSQVDFIYRQERGGGSSFDLRKDASQSEVSGENEGNLPSPEEDGFTISLSHVAVPGSPDQRDTVTTPLREVSADGPIQVTSTVKNGHAVPGEDPRGQLGTHAEYASGLMSPLTMSLLENPDNEGSPPSEQLVQDGATHSLVAESTGGPVVSHTVPSGDQEAALPVSSATRHLWLSSSPPDNKPGGDLPALSPSPIRQHPADKLPSREADLGEACQSRETVLFSHEHMGSEQYDADAEETGLDGSWGFPGKPFTTIHMGVPHSGPTLTPRTGSSDVADQLWAQERKHPTRLGWQEFGLSTDPIKLPCNSENVTWLKPRPISRCLARPSSPLVPSCSPKTAGTLRQPTLEQAQQVVIRAHQEQLDEMAELGFKEETLMSQLASNDFEDFVTQLDEIMVLKSKCIQSLRSQLQLYLTCHGPTAAPEGTVPS

SEQ ID NO: 30281 - protein, 208 aa, Homo sapiens
MASWLYECLCEAELAQYYSHFTALGLQKIDELAKITMKDYSKLGVHDMNDRKRLFQLIKIIKIMQEEDKAVSIPERHLQTSSLRIKSQELRSGPRRQLNFDSPADNKDRNASNDGFEMCSLSDFSANEQKSTYLKVLEHMLPDDSQYHTKTGILNATAGDSYVQTEISTSLFSPNYLSAILGDCDIPIIQRISHVSGYNYGIPHSCIR

SEQ ID NO: 30282 - protein, 1158 aa, Homo sapiens
MASWLYECLCEAELAQYYSHFTALGLQKIDELAKITMKDYSKLGVHDMNDRKRLFQLIKIIKIMQEEDKAVSIPERHLQTSSLRIKSQELRSGPRRQLNFDSPADNKDRNASNDGFEMCSLSDFSANEQKSTYLKVLEHMLPDDSQYHTKTGILNATAGDSYVQTEISTSLFSPNYLSAILGDCDIPIIQRISHVSGYNYGIPHSCIRQNTSEKQNPWTEMEKIRVCVRKRPLGMREVRRGEINIITVEDKETLLVHEKKEAVDLTQYILQHVFYFDEVFGEACTNQDVYMKTTHPLIQHIFNGGNATCFAYGQTGAGKTYTMIGTHENPGLYALAAKDIFRQLEVSQPRKHLFVWISFYEIYCGQLYDLLNRRKRLFAREDSKHMVQIVGLQELQVDSVELLLEVILKGSKERSTGATGVNADSSRSHAVIQIQIKDSAKRTFGRISFIDLAGSERAADARDSDRQTKMEGAEINQSLLALKECIRALDQEHTHTPFRQSKLTQVLKDSFIGNAKTCMIANISPSHVATEHTLNTLRYADRVKELKKGIKCCTSVTSRNRTSGNSSPKRIQSSPGALSEDKCSPKKVKLGFQQSLTVAAPGSTRGKVHPLTSHPPNIPFTSAPKVSGKRGGSRGSPSQEWVIHASPVKGTVRSGHVAKKKPEESAPLCSEKNRMGNKTVLGWESRASGPGEGLVRGKLSTKCKKVQTVQPVQKQLVSRVELSFGNAHHRAEYSQDSQRGTPARPASEAWTNIPPHQKEREEHLRFYHQQFQQPPLLQQKLKYQPLKRSLRQYRPPEGQLTNETPPLFHSYSENHDGAQVEELDDSDFSEDSFSHISSQRATKQRNTLENSEDSFFLHQTWGQGPEKQVAERQQSLFSSPRTGDKKDLTKSWVDSRDPINHRRAALDHSCSPSKGPVDWSRENSTSSGPSPRDSLAEKPYCSQVDFIYRQERGGGSSFDLRKDASQSEVSGENEGNLPSPEEDGFTISLSHVAVPGSPDQRDTVTTPLREVSADGPIQVTSTVKNGHAVPGEDPRGQLGTHAEYASGLMSPLTMSLLENPDNEGSPPSEQLVQDGATHSLVAESTGGPVVSHTVPSGDQEAALPVSSATRHLWLSSSPPDNKPGGDLPALGPGEKTSYKAWLAGVWFVHRPHQVALQQ

SEQ ID NO: 30283 - protein, 404 aa, Homo sapiens
MSHIQIPPGLTELLQGYTVEVLRQQPPDLVEFAVEYFTRLREARAPASVLPAATPRQSLGHPPPEPGPDRVADAKGDSESEEDEDLEVPVPSRFNRRVSVCAETYNPDEEEEDTDPRVIHPKTDEQRCRLQEACKDILLFKNLDQEQLSQVLDAMFERIVKADEHVIDQGDDGDNFYVIERGTYDILVTKDNQTRSVGQYDNRGSFGELALMYNTPRAATIVATSEGSLWGLDRVTFRRIIVKNNAKKRKMFESFIESVPLLKSLEVSERMKIVDVIGEKIYKDGERIITQGEKADSFYIIESGEVSILIRSRTKSNKDGGNQEVEIARCHKGQYFGELALVTNKPRAASAYAVGDVKCLVMDVQAFERLLGPCMDIMKRNISHYEEQLVKMFGSSVDLGNLGQ

SEQ ID NO: 30284 - protein, 382 aa, Homo sapiens
MSHIQIPPGLTELLQGYTVEVLRQQPPDLVEFAVEYFTRLREARAPASVLPAATPRQSLGHPPPEPGPDRVADAKGDSESEEDEDLEVPVPSRFNRRVSVCAETYNPDEEEEDTDPRVIHPKTDEQRCRLQEACKDILLFKNLDQEQLSQVLDAMFERIVKADEHVIDQGDDGDNFYVIERGTYDILVTKDNQTRSVGQYDNRGSFGELALMYNTPRAATIVATSEGSLWGLDRVTFRRIIVKNNAKKRKMFESFIESVPLLKSLEVSERMKIVDVIGEKIYKDGERIITQTKSNKDGGNQEVEIARCHKGQYFGELALVTNKPRAASAYAVGDVKCLVMDVQAFERLLGPCMDIMKRNISHYEEQLVKMFGSSVDLGNLGQ

SEQ ID NO: 30285 - protein, 674 aa, Homo sapiens
MQSREDAPRSRRLASPRGGKRPKKIHKPTVSAFFTGPEELKDTAHSAALLAQLKSFYDARLLCDVTIEVVTPGSGPGTGRLFPCNRNVLAAACPYFKSMFTGGMYESQQASVTMHDVDAESFEVLVDYCYTGRVSLSEANVERLYAASDMLQLEYVREACASFLARRLDLTNCTAILKFADAFGHRKLRSQAQSYIAQNFKQLSHMGSIREETLADLTLAQLLAVLRLDSLDVESEQTVCHVAVQWLEAAPKERGPSAAEVFKCVRWMHFTEEDQDYLEGLLTKPIVKKYCLDVIEGALQMRYGDLLYKSLVPVPNSSSSSSSSNSLVSAAENPPQRLGMCAKEMVIFFGHPRDPFLCCDPYSGDLYKVPSPLTCLAHTRTVTTLAVCISPDHDIYLAAQPRTDLWVYKPAQNSWQQLADRLLCREGMDVAYLNGYIYILGGRDPITGVKLKEVECYNVKRNQWALVAPLPHSFLSFDLMVIRDYLYALNSKRMFCYDPSHNMWLKCVSLKRNDFQEACVFNEEIYCICDIPVMKVYNPVRAEWRQMNNIPLVSETNNYRIIKHGQKLLLITSRTPQWKKNRVTVYEYDIRGDQWINIGTTLGLLQFDSNFFCLSARVYPSCLEPGQSFLTEEEEIPSESSTEWDLGGFSEPDSESGSSSSLSDDDFWVRVAPQ

SEQ ID NO: 30286 - protein, 384 aa, Homo sapiens
MTWTSGQLQREKQARPGSGAVLAFPDDKDLRVYGPAESQSAVFGDVCPLLTSLLDGYNVCVMAYGQTGSGKSYTMLGRHSDDGPVLPLDPQSDLGIIPRVAEELFRLILENTSRSPKVEVSIVEVYNNDIFDLLAKDSIAAVSGVKREVVTAKDGRTEVALLASEAVGSASKLMELVHGGLQLRAKHPTLVHADSSRSHLIITVTLTTASCSDSTADQACSATLPREQTEAGRAGRSRRASQGALAPQLVPGNPAGHAEQVQARLQLVDSAGSECVGVSGVTGLALREMACISRSLAALAGVLGALLEHRGHAPYRNSRLTHLLQDCLGGDAKLLVILCISPSQRHLAQTLQGLGFGIRARQVQRGPARKKPPSSQTEGKRRPD

SEQ ID NO: 30287 - protein, 332 aa, Homo sapiens
MTWTSGQLQREKQARPGSGAVLAFPDDKDLRVYGPAESQSAVFGDVCPLLTSLLDGYNVCVMAYGQTGSGKSYTMLGRHSDDGPVLPLDPQSDLGIIPRVAEELFRLILENTSRSPKVEVSIVEVYNNDIFDLLAKDSIAAVSGVKREVVTAKDGRTEVALLASEAVGSASKLMELVHGGLQLRAKHPTLVHADSSRSHLIITVTLTTASCSDSTADQACSATLPREQTEAGRAGRSRRASQGALAPQLVPGNPAGHAEQVQARLQLVDSAGSECVGGDAKLLVILCISPSQRHLAQTLQGLGFGIRARQVQRGPARKKPPSSQTEGKRRPD

SEQ ID NO: 30288 - protein, 684 aa, Homo sapiens
MQSREDVPRSRRLASPRGGRRPKRISKPSVSAFFTGPEELKDTAHSAALLAQLKSFYDARLLCDVTIEVVTPGSGPGTGRLFSCNRNVLAAACPYFKSMFTGGMYESQQASVTMHDVDAESFEVLVDYCYTGRVSLSEANVQRLYAASDMLQLEYVREACASFLARRLDLTNCTAILKFADAFDHHKLRSQAQSYIAHNFKQLSRMGSIREETLADLTLAQLLAVLRLDSLDIESERTVCHVAVQWLEAAAKERGPSAAEVFKCVRWMHFTEEDQDYLEGLLTKPIVKKYCLDVIEGALQMRYGDLLYKSLVPVPNSSSSSSSSNSLVSAAENPPQRLGMCAKEMVIFFGHPRDPFLCYDPYSGDIYTMPSPLTSFAHTKTVTSSAVCVSPDHDIYLAAQPRKDLWVYKPAQNSWQQLADRLLCREGMDVAYLNGYIYILGGRDPITGVKLKEVECYSVQRNQWALVAPVPHSFYSFELIVVQNYLYAVNSKRMLCYDPSHNMWLNCASLKRSDFQEACVFNDEIYCICDIPVMKVYNPARGEWRRISNIPLDSETHNYQIVNHDQKLLLITSTTPQWKKNRVTVYEYDTREDQWINIGTMLGLLQFDSGFICLCARVYPSCLEPGQSFITEEDDARSESSTEWDLDGFSELDSESGSSSSFSDDEVWVQVAPQRNAQDQQGSL

SEQ ID NO: 30289 - protein, 1401 aa, Homo sapiens
MEEIPVKVAVRIRPLLCKEALHNHQVCVRVIPNSQQVIIGRDRVFTFDFVFGKNSTQDEVYNTCIKPLVLSLIEGYNATVFAYGQTGSGKTYTIGGGHIASVVEGQKGIIPRAIQEIFQSISEHPSIDFNVKVSYIEVYKEDLRDLLELETSMKDLHIREDEKGNTVIVGAKECHVESAGEVMSLLEMGNAARHTGTTQMNEHSSRSHAIFTISICQVHKNMEAAEDGSWYSPRHIVSKFHFVDLAGSERVTKTGNTGERFKESIQINSGLLALGNVISALGDPRRKSSHIPYRDAKITRLLKDSLGGSAKTVMITCVSPSSSNFDESLNSLKYANRARNIRNKPTVNFSPESDRIDEMEFEIKLLREALQSQQAGVSQTTQINREGSPDTNRIHSLEEQVAQLQGECLGYQCCVEEAFTFLVDLKDTVRLNEKQQHKLQEWFNMIQEVRKAVLTSFRGIGGTASLEEGPQHVTVLQLKRELKKCQCVLAADEVVFNQKELEVKELKNQVQMMVQENKGHAVSLKEAQKVNRLQNEKIIEQQLLVDQLSEELTKLNLSVTSSAKENCGDGPDARIPERRPYTVPFDTHLGHYIYIPSRQDSRKVHTSPPMYSLDRIFAGFRTRSQMLLGHIEEQDKVLHCQFSDNSDDEESEGQEKSGTRCRSRSWIQKPDSVCSLVELSDTQDETQKSDLENEDLKIDCLQESQELNLQKLKNSERILTEAKQKMRELTINIKMKEDLIKELIKTGNDAKSVSKQYSLKVTKLEHDAEQAKVELIETQKQLQELENKDLSDVAMKVKLQKEFRKKMDAAKLRVQVLQKKQQDSKKLASLSIQNEKRANELEQSVDHMKYQKIQLQRKLREENEKRKQLDAVIKRDQQKIKEIQLKTGQEEGLKPKAEDLDACNLKRRKGSFGSIDHLQKLDEQKKWLDEEVEKVLNQRQELEELEADLKKREAIVSKKEALLQEKSHLENKKLRSSQALNTDSLKISTRLNLLEQELSEKNVQLQTSTAEEKTKISEQVEVLQKEKDQLQKRRHNVDEKLKNGRVLSPEEEHVLFQLEEGIEALEAAIEYRNESIQNRQKSLRASFHNLSRGEANVLEKLACLSPVEIRTILFRYFNKVVNLREAERKQQLYNEEMKMKVLERDNMVRELESALDHLKLQCDRRLTLQQKEHEQKMQLLLHHFKEQDGEGIMETFKTYEDKIQQLEKDLYFYKKTSRDHKKKLKELVGEAIRRQLAPSEYQEAGDGVLKPEGGGMLSEELKWASRPESMKLSGREREMDSSASSLRTQPNPQKLWEDIPELPPIHSSLAPPSGHMLGNENKTETDDNQFTKSHSRLSSQIQVVGNVGRLHGVTPVKLCRKELRQISALELSLRRSSLGVGIGSMAADSIEVSRKPRDLKT

SEQ ID NO: 30290 - protein, 1335 aa, Homo sapiens
MEEIPVKVAVRIRPLLCKEALHNHQVCVRVIPNSQQVIIGRDRVFTFDFVFGKNSTQDEVYNTCIKPLVLSLIEGYNATVFAYGQTGSGKTYTIGGGHIASVVEGQKGIIPRAIQEIFQSISEHPSIDFNVKVSYIEVYKEDLRDLLELETSMKDLHIREDEKGNTVIVGAKECHVESAGEVMSLLEMGNAARHTGTTQMNEHSSRSHAIFTISICQVHKNMEAAEDGSWYSPRHIVSKFHFVDLAGSERVTKTGNTGERFKESIQINSGLLALGNVISALGDPRRKSSHIPYRDAKITRLLKDSLGGSAKTVMITCVSPSSSNFDESLNSLKYANRARNIRNKPTVNFSPESDRIDEMEFEIKLLREALQSQQAGVSQTTQINREGSPDTNRIHSLEEQVAQLQGECLGYQCCVEEAFTFLVDLKDTVRLNEKQQHKLQEWFNMIQEVRKAVLTSFRGIGGTASLEEGPQHVTVLQLKRELKKCQCVLAADEVVFNQKELEVKELKNQVQMMVQENKGHAVSLKEAQKVNRLQNEKIIEQQLLVDQLSEELTKLNLSVTSSAKENCGDGPDARIPERRPYTVPFDTHLGHYIYIPSRQDSRKVHTSPPMYSLDRIFAGFRTRSQMLLGHIEEQDKVLHCQFSDNSDDEESEGQEKSGTRCRSRSWIQKPDSVCSLVELSDTQDETQKSDLENEDLKIDCLQESQELNLQKLKNSERILTEAKQKMRELTINIKMKEDLIKELIKTGNDAKSVSKQYSLKVTKLEHDAEQAKVELIETQKQLQELENKDLSDVAMKVKLQKEFRKKMDAAKLRVQEIQLKTGQEEGLKPKAEDLDACNLKRRKGSFGSIDHLQKLDEQKKWLDEEVEKVLNQRQELEELEADLKKREAIVSKKEALLQEKSHLENKKLRSSQALNTDSLKISTRLNLLEQELSEKNVQLQTSTAEEKTKISEQVEVLQKEKDQLQKRRHNVDEKLKNGRVLSPEEEHVLFQLEEGIEALEAAIEYRNESIQNRQKSLRASFHNLSRGEANVLEKLACLSPVEIRTILFRYFNKVVNLREAERKQQLYNEEMKMKVLERDNMVRELESALDHLKLQCDRRLTLQQKEHEQKMQLLLHHFKEQDGEGIMETFKTYEDKIQQLEKDLYFYKKTSRDHKKKLKELVGEAIRRQLAPSEYQEAGDGVLKPEGGGMLSEELKWASRPESMKLSGREREMDSSASSLRTQPNPQKLWEDIPELPPIHSSLAPPSGHMLGNENKTETDDNQFTKSHSRLSSQIQVVGNVGRLHGVTPVKLCRKELRQISALELSLRRSSLGVGIGSMAADSIEVSRKPRDLKT

SEQ ID NO: 30291 - protein, 1304 aa, Homo sapiens
MEEIPVKVAVRIRPLLCKEALHNHQVCVRVIPNSQQVIIGRDRVFTFDFVFGKNSTQDEVYNTCIKPLVLSLIEGYNATVFAYGQTGSGKTYTIGGGHIASVVEGQKGIIPRAIQEIFQSISEHPSIDFNVKVSYIEVYKEDLRDLLELETSMKDLHIREDEKGNTVIVGAKECHVESAGEVMSLLEMGNAARHTGTTQMNEHSSRSHAIFTISICQVHKNMEAAEDGSWYSPRHIVSKFHFVDLAGSERVTKTGNTGERFKESIQINSGLLALGNVISALGDPRRKSSHIPYRDAKITRLLKDSLGGSAKTVMITCVSPSSSNFDESLNSLKYANRARNIRNKPTVNFSPESDRIDEMEFEIKLLREALQSQQAGVSQTTQINREGSPDTNRIHSLEEQVAQLQGECLGYQCCVEEAFTFLVDLKDTVRLNEKQQHKLQEWFNMIQEVRKAVLTSFRGIGGTASLEEGPQHVTVLQLKRELKKCQCVLAADEVVFNQKELEVKELKNQVQMMVQENKGHAVSLKEAQKVNRLQNEKIIEQQLLVDQLSEELTKLNLSVTSSAKENCGDGPDARIPERRPYTVPFDTHLGHYIYIPSRQDSRKVHTSPPMYSLDRIFAGFRTRSQMLLGHIEEQDKVLHCQFSDNSDDEESEGQEKSGTRCRSRSWIQKPDSVCSLVELSDTQDETQKSDLENEDLKIDCLQESQELNLQKLKNSERILTEAKQKMRELTINIKMKEDLIKELIKTGNDAKSVSKQYSLKVTKLEHDAEQAKVELIETQKQLQELENKDLSDVAMKVKLQKEFRKKMDAAKLRVQVLQKKQQDSKKLASLSIQNEKRANELEQSVDHMKYQKIQLQRKLREENEKRKQLDAVIKRDQQKIKALNTDSLKISTRLNLLEQELSEKNVQLQTSTAEEKTKISEQVEVLQKEKDQLQKRRHNVDEKLKNGRVLSPEEEHVLFQLEEGIEALEAAIEYRNESIQNRQKSLRASFHNLSRGEANVLEKLACLSPVEIRTILFRYFNKVVNLREAERKQQLYNEEMKMKVLERDNMVRELESALDHLKLQCDRRLTLQQKEHEQKMQLLLHHFKEQDGEGIMETFKTYEDKIQQLEKDLYFYKKTSRDHKKKLKELVGEAIRRQLAPSEYQEAGDGVLKPEGGGMLSEELKWASRPESMKLSGREREMDSSASSLRTQPNPQKLWEDIPELPPIHSSLAPPSGHMLGNENKTETDDNQFTKSHSRLSSQIQVVGNVGRLHGVTPVKLCRKELRQISALELSLRRSSLGVGIGSMAADSIEVSRKPRDLKT

SEQ ID NO: 30292 - protein, 286 aa, Homo sapiens
MYSLDRIFAGFRTRSQMLLGHIEEQDKVLHCQFSDNSDDEESEGQEKSGTRCRSRSWIQKPDSVCSLVELSDTQDETQKSDLENEDLKIDCLQESQELNLQKLKNSERILTEAKQKMRELTINIKMKEDLIKELIKTGNDAKSVSKQYSLKVTKLEHDAEQAKVELIETQKQLQELENKDLSDVAMKVKLQKEFRKKMDAAKLRVQVLQKKQQDSKKLASLSIQNEKRANELEQSVDHMKYQKIQLQRKLREENEKRKQLDAVIKRDQQKIKVILSYIPAKYNMKC

SEQ ID NO: 30293 - protein, 613 aa, Homo sapiens
MEIALVPLENGGAMTVRGGDEARAGCGQATGGELQCPPTAGLSDGPKEPAPKGRGAQRDADSGVRPLPPLPDPGVRPLPPLPEELPRPRRPPPEDEEEEGDPGLGTVEDQALGTASLHHQRVHINISGLRFETQLGTLAQFPNTLLGDPAKRLRYFDPLRNEYFFDRNRPSFDGILYYYQSGGRLRRPVNVSLDVFADEIRFYQLGDEAMERFREDEGFIKEEEKPLPRNEFQRQVWLIFEYPESSGSARAIAIVSVLVILISIITFCLETLPEFRDERELLRHPPAPHQPPAPAPGANGSGVMAPPSGPTVAPLLPRTLADPFFIVETTCVIWFTFELLVRFFACPSKAGFSRNIMNIIDVVAIFPYFITLGTELAEQQPGGGGGGQNGQQAMSLAILRVIRLVRVFRIFKLSRHSKGLQILGKTLQASMRELGLLIFFLFIGVILFSSAVYFAEADNQGTHFSSIPDAFWWAVVTMTTVGYGDMRPITVGGKIVGSLCAIAGVLTIALPVPVIVSNFNYFYHRETDHEEPAVLKEEQGTQSQGPGLDRGVQRKVSGSRGSFCKAGGTLENADSARRGSCPLEKCNVKAKSNVDLRRSLYALCLDTSRETDL

SEQ ID NO: 30294 - protein, 404 aa, Homo sapiens
MERFREDEGFIKEEEKPLPRNEFQRQVWLIFEYPESSGSARAIAIVSVLVILISIITFCLETLPEFRDERELLRHPPAPHQPPAPAPGANGSGVMAPPSGPTVAPLLPRTLADPFFIVETTCVIWFTFELLVRFFACPSKAGFSRNIMNIIDVVAIFPYFITLGTELAEQQPGGGGGGQNGQQAMSLAILRVIRLVRVFRIFKLSRHSKGLQILGKTLQASMRELGLLIFFLFIGVILFSSAVYFAEADNQGTHFSSIPDAFWWAVVTMTTVGYGDMRPITVGGKIVGSLCAIAGVLTIALPVPVIVSNFNYFYHRETDHEEPAVLKEEQGTQSQGPGLDRGVQRKVSGSRGSFCKAGGTLENADSARRGSCPLEKCNVKAKSNVDLRRSLYALCLDTSRETDL

SEQ ID NO: 30295 - protein, 601 aa, Homo sapiens
MAASADLSKSSPTPNGIPSSDPASDAMDPFHACSILKQLKTMYDEGQLTDIVVEVDHGKTFSCHRNVLAAISPYFRSMFTSGLTESTQKEVRIVGVEAESMDLVLNYAYTSRVILTEANVQALFTAASIFQIPSIQDQCAKYMISHLDPQNSIGVFIFADHYGHQELGDRSKEYIRKKFLCVTKEQEFLQLTKDQLISILDSDDLNVDREEHVYESIIRWFEHEQNEREVHLPEIFAKCIRFPLMEDTFIEKIPPQFAQAIAKSCVEKGPSNTNGCTQRLGMTASEMIICFDAAHKHSGKKQTVPCLDIVTGRVFKLCKPPNDLREVGILVSPDNDIYIAGGYRPSSSEVSIDHKAENDFWMYDHSTNRWLSKPSLLRARIGCKLVYCCGKMYAIGGRVYEGDGRNSLKSVECYDSRENCWTTVCAMPVAMEFHNAVEYKEKIYVLQGEFFLFYEPQKDYWGFLTPMTVPRIQGLAAVYKDSIYYIAGTCGNHQRMFTVEAYDIELNKWTRKKDFPCDQSINPYLKLVLFQNKLHLFVRATQVTVEEHVFRTSRKNSLYQYDDIADQWMKVYETPDRLWDLGRHFECAVAKLYPQCLQKVL

SEQ ID NO: 30296 - protein, 159 aa, Homo sapiens
MAASAGEFFLFYEPQKDYWGFLTPMTVPRIQGLAAVYKDSIYYIAGTCGNHQRMFTVEAYDIELNKWTRKKDFPCDQSINPYLKLVLFQNKLHLFVRATQVTVEEHVFRTSRKNSLYQYDDIADQWMKVYETPDRLWDLGRHFECAVAKLYPQCLQKVL

SEQ ID NO: 30297 - protein, 852 aa, Homo sapiens
MLSGKKAAAAAAAAAAAATGTEAGPGTAGGSENGSEVAAQPAGLSGPAEVGPGAVGERTPRKKEPPRASPPGGLAEPPGSAGPQAGPTVVPGSATPMETGIAETPEGRRTSRRKRAKVEYREMDESLANLSEDEYYSEEERNAKAEKEKKLPPPPPQAPPEEENESEPEEPSGVEGAAFQSRLPHDRMTSQEAACFPDIISGPQQTQKVFLFIRNRTLQLWLDNPKIQLTFEATLQQLEAPYNSDTVLVHRVHSYLERHGLINFGIYKRIKPLPTKKTGKVIIIGSGVSGLAAARQLQSFGMDVTLLEARDRVGGRVATFRKGNYVADLGAMVVTGLGGNPMAVVSKQVNMELAKIKQKCPLYEANGQAVPKEKDEMVEQEFNRLLEATSYLSHQLDFNVLNNKPVSLGQALEVVIQLQEKHVKDEQIEHWKKIVKTQEELKELLNKMVNLKEKIKELHQQYKEASEVKPPRDITAEFLVKSKHRDLTALCKEYDELAETQGKLEEKLQELEANPPSDVYLSSRDRQILDWHFANLEFANATPLSTLSLKHWDQDDDFEFTGSHLTVRNGYSCVPVALAEGLDIKLNTAVRQVRYTASGCEVIAVNTRSTSQTFIYKCDAVLCTLPLGVLKQQPPAVQFVPPLPEWKTSAVQRMGFGNLNKVVLCFDRVFWDPSVNLFGHVGSTTASRGELFLFWNLYKAPILLALVAGEAAGIMENISDDVIVGRCLAILKGIFGSSAVPQPKETVVSRWRADPWARGSYSYVAAGSSGNDYDLMAQPITPGPSIPGAPQPIPRLFFAGEHTIRNYPATVHGALLSGLREAGRIADQFLGAMYTLPRQATPGVPAQQSPSM

SEQ ID NO: 30298 - protein, 876 aa, Homo sapiens
MLSGKKAAAAAAAAAAAATGTEAGPGTAGGSENGSEVAAQPAGLSGPAEVGPGAVGERTPRKKEPPRASPPGGLAEPPGSAGPQAGPTVVPGSATPMETGIAETPEGRRTSRRKRAKVEYREMDESLANLSEDEYYSEEERNAKAEKEKKLPPPPPQAPPEEENESEPEEPSGQAGGLQDDSSGGYGDGQASGVEGAAFQSRLPHDRMTSQEAACFPDIISGPQQTQKVFLFIRNRTLQLWLDNPKIQLTFEATLQQLEAPYNSDTVLVHRVHSYLERHGLINFGIYKRIKPLPTKKTGKVIIIGSGVSGLAAARQLQSFGMDVTLLEARDRVGGRVATFRKGNYVADLGAMVVTGLGGNPMAVVSKQVNMELAKIKQKCPLYEANGQADTVKVPKEKDEMVEQEFNRLLEATSYLSHQLDFNVLNNKPVSLGQALEVVIQLQEKHVKDEQIEHWKKIVKTQEELKELLNKMVNLKEKIKELHQQYKEASEVKPPRDITAEFLVKSKHRDLTALCKEYDELAETQGKLEEKLQELEANPPSDVYLSSRDRQILDWHFANLEFANATPLSTLSLKHWDQDDDFEFTGSHLTVRNGYSCVPVALAEGLDIKLNTAVRQVRYTASGCEVIAVNTRSTSQTFIYKCDAVLCTLPLGVLKQQPPAVQFVPPLPEWKTSAVQRMGFGNLNKVVLCFDRVFWDPSVNLFGHVGSTTASRGELFLFWNLYKAPILLALVAGEAAGIMENISDDVIVGRCLAILKGIFGSSAVPQPKETVVSRWRADPWARGSYSYVAAGSSGNDYDLMAQPITPGPSIPGAPQPIPRLFFAGEHTIRNYPATVHGALLSGLREAGRIADQFLGAMYTLPRQATPGVPAQQSPSM

SEQ ID NO: 30299 - protein, 418 aa, Homo sapiens
MSIEIPAGLTELLQGFTVEVLRHQPADLLEFALQHFTRLQQENERKGTARFGHEGRTWGDLGAAAGGGTPSKGVNFAEEPMQSDSEDGEEEEAAPADAGAFNAPVINRFTRRASVCAEAYNPDEEEDDAESRIIHPKTDDQRNRLQEACKDILLFKNLDPEQMSQVLDAMFEKLVKDGEHVIDQGDDGDNFYVIDRGTFDIYVKCDGVGRCVGNYDNRGSFGELALMYNTPRAATITATSPGALWGLDRVTFRRIIVKNNAKKRKMYESFIESLPFLKSLEFSERLKVVDVIGTKVYNDGEQIIAQGDSADSFFIVESGEVKITMKRKGKSEVEENGAVEIARCSRGQYFGELALVTNKPRAASAHAIGTVKCLAMDVQAFERLLGPCMEIMKRNIATYEEQLVALFGTNMDIVEPTA

SEQ ID NO: 30300 - protein, 967 aa, Homo sapiens
MPTQSVDSVKAVRVRPFSQREKNSGSKCVISMHSRTTTTTQDPKNPEHVKTFTFDLAYWSHNGFQRDKDGVLISADPSRKFAGQRDVFHDLGRGILDSAWQGYNATLLAYGQTGSGKSYSMIGFGCKQGIIPTVCEELFRAIENQGRNQEHQVMFSMLEIYKEIIRDLLSRTKKPGGLRIREDQQLGFYVEGLKSVPCENYAQIERLMEQGTKIRTTASTNMNASSSRSHLVITIQFKQVFLDRDLTKQSSINLVDLARSERQKSSGSEGDRLREGSCVNLSLTNLGSVISVLADAAMGKKVLHIPYRDSVLTKLLQSALGGNSRTALVAAVSPADICYEETLSTLRYAERERKIRNRAVANTWTLMRKSRAENSKLLPMMTFPHLLNLSEDPQLTRVLKYFIQAGTQPAPCPRPALSPPHPALRISDKHASFTNADGKVTVTPHSKCKVAVNGVPITTRTKLQHLDRLILGSNSTYLYVGFPSEWGSEDLSRFDYDFFQLERAAAEGASADKLGAADGGDGKAGPSVLAAFQDYIKLMPLVSEANQMSEEPKKGLNMELKVKNLASSDSRGYDLQKEVLVKVTHHGSHEVWIWSKAKFINRKFLMQELYQRFLDGDHGPVARDDDPFWDPVEVVRLGSAHIWLQSLAYCMKLEEQVEFLNCDGLEEAVLHTCIAPCSPTGQTHGEEDVVIDPLELLGKRMDFQIHIVRCLGVNWMKEDAKRGTQIGYRIYDLPNTIYTKPVWKSVNPQIEETVQFAALTASQEFLNYLRTNALIVDLWGLQEGCTELSCSQLGLMVTGEGHILVDTKKISTVKDISQAASNQIPELYLKLLKLEQETEPLRNINRALREENVLLKASLAKTASGQAPKPSNTLKISGMTAQLPSAGEMSQMCTQQAGSDRELAKALKVFYQSMNTARGQLFRLRRHQPPEVDQMLRPFIHQRSQMFKDLGDLRESSLWTLKMTLLL

SEQ ID NO: 30301 - protein, 623 aa, Homo sapiens
MEHAVAPCVLYPGTEPGAAGESESEGAASPAQTPCSLGASLCFSSGEESPPQSLASAAEGAATSPPSSGGPRVVERQWEAGSAGAASPEELASPEERACPEEPAAPSPEPRVWLEDPASPEEPGEPAPVPPGFGAVYGEPDLVLEVSGRRLRAHKAVLAARSDYFRARASRDVLRVQGVSLTALRLLLADAYSGRMAGVRPDNVAEVVAGARRLQLPGAAQRATDAVGPQLSLANCYEVLSAAKRQRLNELRDAAYCFMSDHYLEVLREPAVFGRLSGAERDLLLRRRLRAGRAHLLAAALGPAGERAGSRPQSPSGDADARGDAAVYCFHAAAGEWRELTRLPEGAPARGCGLCVLYNYLFVAGGVAPAGPDGRARPSDQVFCYNPATDSWSAVRPLRQARSQLRLLALDGHLYAVGGECLLSVERYDPRADRWAPVAPLPRGAFAVAHEATTCHGEIYVSGGSLFYRLLKYDPRRDEWQECPCSSSRERSADMVALDGFIYRFDLSGSRGEAQAAGPSGVSVSRYHCLAKQWSPCVAPLRLPGGPTGLQPFRCAALDGAIYCVSRAGTWRFQPAREGEAGGDAGQGGGFEALGAPLDVRGVLIPFALSLPEKPPRGEQGAP

SEQ ID NO: 30302 - protein, 822 aa, Homo sapiens
MATPRGRTKKKASFDHSPDSLPLRSSGRQAKKKATETTDEDEDGGSEKKYRKCEKAGCTATCPVCFASASERCAKNGYTSRWYHLSCGEHFCNECFDHYYRSHKDGYDKYTTWKKIWTSNGKTEPSPKAFMADQQLPYWVQCTKPECRKWRQLTKEIQLTPQIAKTYRCGMKPNTAIKPETSDHCSLPEDLRVLEVSNHWWYSMLILPPLLKDSVAAPLLSAYYPDCVGMSPSCTSTNRAAATGNASPGKLEHSKAALSVHVPGMNRYFQPFYQPNECGKALCVRPDVMELDELYEFPEYSRDPTMYLALRNLILALWYTNCKEALTPQKCIPHIIVRGLVRIRCVQEVERILYFMTRKGLINTGVLSVGADQYLLPKDYHNKSVIIIGAGPAGLAAARQLHNFGIKVTVLEAKDRIGGRVWDDKSFKGVTVGRGAQIVNGCINNPVALMCEQLGISMHKFGERCDLIQEGGRITDPTIDKRMDFHFNALLDVVSEWRKDKTQLQDVPLGEKIEEIYKAFIKESGIQFSELEGQVLQFHLSNLEYACGSNLHQVSARSWDHNEFFAQFAGDHTLLTPGYSVIIEKLAEGLDIQLKSPVQCIDYSGDEVQVTTTDGTGYSAQKVLVTVPLALLQKGAIQFNPPLSEKKMKAINSLGAGIIEKIALQFPYRFWDSKVQGADFFGHVPPSASKRGLFAVFYDMDPQKKHSVLMSVIAGEAVASVRTLDDKQVLQQCMATLRELFKEQEVPDPTKYFVTRWSTDPWIQMAYSFVKTGGSGEAYDIIAEDIQGTVFFAGEATNRHFPQTVTGAYLSGVREASKIAAF

SEQ ID NO: 30303 - protein, 590 aa, Homo sapiens
MATPRGRTKKKASFDHSPDSLPLRSSGRQAKKKATETTDEDEDGGSEKKYRKCEKAGCTATCPVCFASASERCAKNGYTSRWYHLSCGEHFCNECFDHYYRSHKDGYDKYTTWKKIWTSNGKTEPSPKAFMADQQLPYWVQCTKPECRKWRQLTKEIQLTPQIAKTYRCGMKPNTAIKPETSDHCSLPEDLEALTPQKCIPHIIVRGLVRIRCVQEVERILYFMTRKGLINTGVLSVGADQYLLPKDYHNKSVIIIGAGPAGLAAARQLHNFGIKVTVLEAKDRIGGRVWDDKSFKGVTVGRGAQIVNGCINNPVALMCEQVSARSWDHNEFFAQFAGDHTLLTPGYSVIIEKLAEGLDIQLKSPVQCIDYSGDEVQVTTTDGTGYSAQKVLVTVPLALLQKGAIQFNPPLSEKKMKAINSLGAGIIEKIALQFPYRFWDSKVQGADFFGHVPPSASKRGLFAVFYDMDPQKKHSVLMSVIAGEAVASVRTLDDKQVLQQCMATLRELFKEQEVPDPTKYFVTRWSTDPWIQMAYSFVKTGGSGEAYDIIAEDIQGTVFFAGEATNRHFPQTVTGAYLSGVREASKIAAF

SEQ ID NO: 30304 - protein, 175 aa, Homo sapiens
MKAINSLGAGIIEKIALQFPYRFWDSKVQGADFFGHVPPSASKRGLFAVFYDMDPQKKHSVLMSVIAGEAVASVRTLDDKQVLQQCMATLRELFKEQEVPDPTKYFVTRWSTDPWIQMAYSFVKTGGSGEAYDIIAEDIQGTVFFAGEATNRHFPQTVTGAYLSGVREASKIAAF

SEQ ID NO: 30305 - protein, 623 aa, Homo sapiens
MECKIEGKEKYQHSLNLLNKIQNMKELAEMIDVVLTAEGEKFPCHRLVLAAFSPYFKAMFTCGLLECNQREVILYDITAESVSVLLNYMYNAALEINNANVQTVAMAAYFMQMEEVFSVCQKYMMDHMDASNCLGIYYFAKQIGAEDLSDRSKKYLYQHFAEVSLHEEILEIEVHQFLTLIKSDDLNISREESILDLVLRWVNHNKELRTVHLVELLKQVRLELVNPSFLRQALRRNTMLLCDADCVDIIQNAFKAIKTPQQHSLNLRYGMETTSLLLCIGNNSSGIRSRHRSYGDASFCYDPVSRKTYFISSPKYGEGLGTVCTGVVMENNTIIVAGEASASKLSRQKNKNVEIYRYHDRGNQFWEKLCTAEFRELYALGSIHNDLYVIGGQMKIKNQYLITNCVDKYSVERDNWKRVSPLPLQLACHAVVTVNNKLYVIGGWTPQMDLPDEEPDRLSNKLLQYDPSQDQWSVRAPMKYSKYRFSTAVVNSEIYVLGGIGCVGQDKGQVRKCLDVVEIYNPDGDFWREGPPMPSPLLSLRTNSTNAGAVDGKLYVCGGFHGADRHEVISKEILELDPWENQWNVVAINVLMHDSYDVCLVARMNPRDLIPPPSDLVEEGNEH

SEQ ID NO: 30306 - protein, 198 aa, Homo sapiens
MIEETSFGKSYAQLNFENSMLWMDLPDEEPDRLSNKLLQYDPSQDQWSVRAPMKYSKYRFSTAVVNSEIYVLGGIGCVGQDKGQVRKCLDVVEIYNPDGDFWREGPPMPSPLLSLRTNSTNAGAVDGKLYVCGGFHGADRHEVISKEILELDPWENQWNVVAINVLMHDSYDVCLVARMNPRDLIPPPSDLVEEGNEH

SEQ ID NO: 30307 - protein, 529 aa, Homo sapiens
MRSEKSLTLAAPGEVRGPEGEQQDAGDFPEAGGGGGCCSSERLVINISGLRFETQLRTLSLFPDTLLGDPGRRVRFFDPLRNEYFFDRNRPSFDAILYYYQSGGRLRRPVNVPLDIFLEEIRFYQLGDEALAAFREDEGCLPEGGEDEKPLPSQPFQRQVWLLFEYPESSGPARGIAIVSVLVILISIVIFCLETLPQFRVDGRGGNNGGVSRVSPVSRGSQEEEEDEDDSYTFHHGITPGEMGTGGSSSLSTLGGSFFTDPFFLVETLCIVWFTFELLVRFSACPSKPAFFRNIMNIIDLVAIFPYFITLGTELVQQQEQQPASGGGGQNGQQAMSLAILRVIRLVRVFRIFKLSRHSKGLQILGKTLQASMRELGLLIFFLFIGVILFSSAVYFAEADDDDSLFPSIPDAFWWAVVTMTTVGYGDMYPMTVGGKIVGSLCAIAGVLTIALPVPVIVSNFNYFYHRETEQEEQGQYTHVTCGQPAPDLRATDNGLGKPDFPEANRERRPSYLPTPHRAYAEKRMLTEV

SEQ ID NO: 30308 - protein, 706 aa, Homo sapiens
MATANFGKIQIGIYVEIKRSDGRIHQAMVTSLNEDNESVTVEWIENGDTKGKEIDLESIFSLNPDLVPDEEIEPSPETPPPPASSAKVNKIVKNRRTVASIKNDPPSRDNRVVGSARARPSQFPEQSSSAQQNGSVSDISPVQAAKKEFGPPSRRKSNCVKEVEKLQEKREKRRLQQQELREKRAQDVDATNPNYEIMCMIRDFRGSLDYRPLTTADPIDEHRICVCVRKRPLNKKETQMKDLDVITIPSKDVVMVHEPKQKVDLTRYLENQTFRFDYAFDDSAPNEMVYRFTARPLVETIFERGMATCFAYGQTGSGKTHTMGGDFSGKNQDCSKGIYALAARDVFLMLKKPNYKKLELQVYATFFEIYSGKVFDLLNRKTKLRVLEDGKQQVQVVGLQEREVKCVEDVLKLIDIGNSCRTSGQTSANAHSSRSHAVFQIILRRKGKLHGKFSLIDLAGNERGADTSSADRQTRLEGAEINKSLLALKECIRALGRNKPHTPFRASKLTQVLRDSFIGENSRTCMIATISPGMASCENTLNTLRYANRVKELTVDPTAAGDVRPIMHHPPNQIDDLETQWGVGSSPQRDDLKLLCEQNEEEVSPQLFTFHEAVSQMVEMEEQVVEDHRAVFQESIRWLEDEKALLEMTEEVDYDVDSYATQLEAILEQKIDILTELRDKVKSFRAALQEEEQASKQINPKRPRAL

SEQ ID NO: 30309 - protein, 679 aa, Homo sapiens
MVTSLNEDNESVTVEWIENGDTKGKEIDLESIFSLNPDLVPDEEIEPSPETPPPPASSAKVNKIVKNRRTVASIKNDPPSRDNRVVGSARARPSQFPEQSSSAQQNGSVSDISPVQAAKKEFGPPSRRKSNCVKEVEKLQEKREKRRLQQQELREKRAQDVDATNPNYEIMCMIRDFRGSLDYRPLTTADPIDEHRICVCVRKRPLNKKETQMKDLDVITIPSKDVVMVHEPKQKVDLTRYLENQTFRFDYAFDDSAPNEMVYRFTARPLVETIFERGMATCFAYGQTGSGKTHTMGGDFSGKNQDCSKGIYALAARDVFLMLKKPNYKKLELQVYATFFEIYSGKVFDLLNRKTKLRVLEDGKQQVQVVGLQEREVKCVEDVLKLIDIGNSCRTSGQTSANAHSSRSHAVFQIILRRKGKLHGKFSLIDLAGNERGADTSSADRQTRLEGAEINKSLLALKECIRALGRNKPHTPFRASKLTQVLRDSFIGENSRTCMIATISPGMASCENTLNTLRYANRVKELTVDPTAAGDVRPIMHHPPNQIDDLETQWGVGSSPQRDDLKLLCEQNEEEVSPQLFTFHEAVSQMVEMEEQVVEDHRAVFQESIRWLEDEKALLEMTEEVDYDVDSYATQLEAILEQKIDILTELRDKVKSFRAALQEEEQASKQINPKRPRAL

SEQ ID NO: 30310 - protein, 660 aa, Homo sapiens
MVTSLNEDNESVTVEWIENGDTKGKEIDLESIFSLNPDLVPDEEIEPSPETPPPPASSAKVNKIVKNRRTVASIKNDPPSRDNRVVGSARARPSQFPEQSSSAQQNARRKSNCVKEVEKLQEKREKRRLQQQELREKRAQDVDATNPNYEIMCMIRDFRGSLDYRPLTTADPIDEHRICVCVRKRPLNKKETQMKDLDVITIPSKDVVMVHEPKQKVDLTRYLENQTFRFDYAFDDSAPNEMVYRFTARPLVETIFERGMATCFAYGQTGSGKTHTMGGDFSGKNQDCSKGIYALAARDVFLMLKKPNYKKLELQVYATFFEIYSGKVFDLLNRKTKLRVLEDGKQQVQVVGLQEREVKCVEDVLKLIDIGNSCRTSGQTSANAHSSRSHAVFQIILRRKGKLHGKFSLIDLAGNERGADTSSADRQTRLEGAEINKSLLALKECIRALGRNKPHTPFRASKLTQVLRDSFIGENSRTCMIATISPGMASCENTLNTLRYANRVKELTVDPTAAGDVRPIMHHPPNQIDDLETQWGVGSSPQRDDLKLLCEQNEEEVSPQLFTFHEAVSQMVEMEEQVVEDHRAVFQESIRWLEDEKALLEMTEEVDYDVDSYATQLEAILEQKIDILTELRDKVKSFRAALQEEEQASKQINPKRPRAL

SEQ ID NO: 30311 - protein, 744 aa, Homo sapiens
MATANFGKIQIGIYVEIKRSDGRIHQAMVTSLNEDNESVTVEWIENGDTKGKEIDLESIFSLNPDLVPDEEIEPSPETPPPPASSAKVNKIVKNRRTVASIKNDPPSRDNRVVGSARARPSQFPEQSSSAQQNGSVSDISPVQAAKKEFGPPSRRKSNCVKEVEKLQEKREKRRLQQQELREKRAQDVDATNPNYEIMCMIRDFRGSLDYRPLTTADPIDEHRICVCVRKRPLNKKETQMKDLDVITIPSKDVVMVHEPKQKVDLTRYLENQTFRFDYAFDDSAPNEMVYRFTARPLVETIFERGMATCFAYGQTGSGKTHTMGGDFSGKNQDCSKGIYALAARDVFLMLKKPNYKKLELQVYATFFEIYSGKVFDLLNRKTKLRVLEDGKQQVQVVGLQEREVKCVEDVLKLIDIGNSCRTSGQTSANAHSSRSHAVFQIILRRKGKLHGKFSLIDLAGNERGADTSSADRQTRLEGAEINKSLLALKECIRALGRNKPHTPFRASKLTQVLRDSFIGENSRTCMIATISPGMASCENTLNTLRYANRVKEFGISPSDIPFSQGSGSRPDLSPSYEYDDFSPSVTRVKELTVDPTAAGDVRPIMHHPPNQIDDLETQWGVGSSPQRDDLKLLCEQNEEEVSPQLFTFHEAVSQMVEMEEQVVEDHRAVFQESIRWLEDEKALLEMTEEVDYDVDSYATQLEAILEQKIDILTELRDKVKSFRAALQEEEQASKQINPKRPRAL

SEQ ID NO: 30312 - protein, 686 aa, Homo sapiens
MGRIHQAMVTSLNEDNESVTVEWIENGDTKGKEIDLESIFSLNPDLVPDEEIEPSPETPPPPASSAKVNKIVKNRRTVASIKNDPPSRDNRVVGSARARPSQFPEQSSSAQQNGSVSDISPVQAAKKEFGPPSRRKSNCVKEVEKLQEKREKRRLQQQELREKRAQDVDATNPNYEIMCMIRDFRGSLDYRPLTTADPIDEHRICVCVRKRPLNKKETQMKDLDVITIPSKDVVMVHEPKQKVDLTRYLENQTFRFDYAFDDSAPNEMVYRFTARPLVETIFERGMATCFAYGQTGSGKTHTMGGDFSGKNQDCSKGIYALAARDVFLMLKKPNYKKLELQVYATFFEIYSGKVFDLLNRKTKLRVLEDGKQQVQVVGLQEREVKCVEDVLKLIDIGNSCRTSGQTSANAHSSRSHAVFQIILRRKGKLHGKFSLIDLAGNERGADTSSADRQTRLEGAEINKSLLALKECIRALGRNKPHTPFRASKLTQVLRDSFIGENSRTCMIATISPGMASCENTLNTLRYANRVKELTVDPTAAGDVRPIMHHPPNQIDDLETQWGVGSSPQRDDLKLLCEQNEEEVSPQLFTFHEAVSQMVEMEEQVVEDHRAVFQESIRWLEDEKALLEMTEEVDYDVDSYATQLEAILEQKIDILTELRDKVKSFRAALQEEEQASKQINPKRPRAL

SEQ ID NO: 30313 - protein, 458 aa, Homo sapiens
MARGPQTLVQVWVGGQLFQADRALLVEHCGFFRGLFRSGMRETRAAEVRLGVLSAGGFRATLQVLRGDRPALAAEDELLQAVECAAFLQAPALARFLEHNLTSDNCALLCDAAAAFGLRDVFHSAALFICDGERELAAELALPEARAYVAALRPSSYAAVSTHTPAPGFLEDASRTLCYLDEEEDAWRTLAALPLEASTLLAGVATLGNKLYIVGGVRGASKEVVELGFCYDPDGGTWHEFPSPHQPRYDTALAGFDGRLYAIGGEFQRTPISSVERYDPAAGCWSFVADLPQPAAGVPCAQACGRLFVCLWRPADTTAVVEYAVRTDAWLPVAELRRPQSYGHCMVAHRDSLYVVRNGPSDDFLHCAIDCLNLATGQWTALPGQFVNSKGALFTAVVRGDTVYTVNRMFTLLYAIEGGTWRLLREKAGFPRPGSLQTFLLRLPPGAPGPVTSTTAEL

SEQ ID NO: 30314 - protein, 456 aa, Homo sapiens
MEPRCPPPCGCCERLVLNVAGLRFETRARTLGRFPDTLLGDPARRGRFYDDARREYFFDRHRPSFDAVLYYYQSGGRLRRPAHVPLDVFLEEVAFYGLGAAALARLREDEGCPVPPERPLPRRAFARQLWLLFEFPESSQAARVLAVVSVLVILVSIVVFCLETLPDFRDDRDGTGLAAAAAAGPFPAPLNGSSQMPGNPPRLPFNDPFFVVETLCICWFSFELLVRLLVCPSKAIFFKNVMNLIDFVAILPYFVALGTELARQRGVGQQAMSLAILRVIRLVRVFRIFKLSRHSKGLQILGQTLRASMRELGLLIFFLFIGVVLFSSAVYFAEVDRVDSHFTSIPESFWWAVVTMTTVGYGDMAPVTVGGKIVGSLCAIAGVLTISLPVPVIVSNFSYFYHRETEGEEAGMFSHVDMQPCGPLEGKANGGLVDGEVPELPPPLWAPPGKHLVTEV

SEQ ID NO: 30315 - protein, 1162 aa, Homo sapiens
MEPEEERIRYSQRLRGTMRRRYEDDGISDDEIEGKRTFDLEEKLHTNKYNANFVTFMEGKDFNVEYIQRGGLRDPLIFKNSDGLGIKMPDPDFTVNDVKMCVGSRRMVDVMDVNTQKGIEMTMAQWTRYYETPEEEREKLYNVISLEFSHTRLENMVQRPSTVDFIDWVDNMWPRHLKESQTESTNAILEMQYPKVQKYCLMSVRGCYTDFHVDFGGTSVWYHIHQGGKVFWLIPPTAHNLELYENWLLSGKQGDIFLGDRVSDCQRIELKQGYTFVIPSGWIHAVYTPTDTLVFGGNFLHSFNIPMQLKIYNIEDRTRVPNKFRYPFYYEMCWYVLERYVYCITNRSHLTKEFQKESLSMDLELNGLESGNGDEEAVDREPRRLSSRRSVLTSPVANGVNLDYDGLGKTCRSLPSLKKTLAGDSSSDCSRGSHNGQVWDPQCAPRKDRQVHLTHFELEGLRCLVDKLESLPLHKKCVPTGIEDEDALIADVKILLEELANSDPKLALTGVPIVQWPKRDKLKFPTRPKVRVPTIPITKPHTMKPAPRLTPVRPAAASPIVSGARRRRVRCRKCKACVQGECGVCHYCRDMKKFGGPGRMKQSCVLRQCLAPRLPHSVTCSLCGEVDQNEETQDFEKKLMECCICNEIVHPGCLQMDGEGLLNEELPNCWECPKCYQEDSSEKAQKRKMEESDEEAVQAKVLRPLRSCDEPLTPPPHSPTSMLQLIHDPVSPRGMVTRSSPGAGPSDHHSASRDERFKRRQLLRLQATERTMVREKENNPSGKKELSEVEKAKIRGSYLTVTLQRPTKELHGTSIVPKLQAITASSANLRHSPRVLVQHCPARTPQRGDEEGLGGEEEEEEEEEEEDDSAEEGGAARLNGRGSWAQDGDESWMQREVWMSVFRYLSRRELCECMRVCKTWYKWCCDKRLWTKIDLSRCKAIVPQALSGIIKRQPVSLDLSWTNISKKQLTWLVNRLPGLKDLLLAGCSWSAVSALSTSSCPLLRTLDLRWAVGIKDPQIRDLLTPPADKPGQDNRSKLRNMTDFRLAGLDITDATLRLIIRHMPLLSRLDLSHCSHLTDQSSNLLTAVGSSTRYSLTELNMAGCNKLTDQTLIYLRRIANVTLIDLRGCKQITRKACEHFISDLSINSLYCLSDEKLIQKIS

SEQ ID NO: 30316 - protein, 856 aa, Homo sapiens
MQLKIYNIEDRTRVPNKFRYPFYYEMCWYVLERYVYCITNRSHLTKEFQKESLSMDLELNGLESGNGDEEAVDREPRRLSSRRSVLTSPVANGVNLDYDGLGKTCRSLPSLKKTLAGDSSSDCSRGSHNGQVWDPQCAPRKDRQVHLTHFELEGLRCLVDKLESLPLHKKCVPTGIEDEDALIADVKILLEELANSDPKLALTGVPIVQWPKRDKLKFPTRPKVRVPTIPITKPHTMKPAPRLTPVRPAAASPIVSGARRRRVRCRKCKACVQGECGVCHYCRDMKKFGGPGRMKQSCVLRQCLAPRLPHSVTCSLCGEVDQNEETQDFEKKLMECCICNEIVHPGCLQMDGEGLLNEELPNCWECPKCYQEDSSEKAQKRKMEESDEEAVQAKVLRPLRSCDEPLTPPPHSPTSMLQLIHDPVSPRGMVTRSSPGAGPSDHHSASRDERFKRRQLLRLQATERTMVREKENNPSGKKELSEVEKAKIRGSYLTVTLQRPTKELHGTSIVPKLQAITASSANLRHSPRVLVQHCPARTPQRGDEEGLGGEEEEEEEEEEEDDSAEEGGAARLNGRGSWAQDGDESWMQREVWMSVFRYLSRRELCECMRVCKTWYKWCCDKRLWTKIDLSRCKAIVPQALSGIIKRQPVSLDLSWTNISKKQLTWLVNRLPGLKDLLLAGCSWSAVSALSTSSCPLLRTLDLRWAVGIKDPQIRDLLTPPADKPGQDNRSKLRNMTDFRLAGLDITDATLRLIIRHMPLLSRLDLSHCSHLTDQSSNLLTAVGSSTRYSLTELNMAGCNKLTDQTLIYLRRIANVTLIDLRGCKQITRKACEHFISDLSINSLYCLSDEKLIQKIS

SEQ ID NO: 30317 - protein, 620 aa, Homo sapiens
MKPAPRLTPVRPAAASPIVSGARRRRVRCRKCKACVQGECGVCHYCRDMKKFGGPGRMKQSCVLRQCLAPRLPHSVTCSLCGEVDQNEETQDFEKKLMECCICNEIVHPGCLQMDGEGLLNEELPNCWECPKCYQEDSSEKAQKRKMEESDEEAVQAKVLRPLRSCDEPLTPPPHSPTSMLQLIHDPVSPRGMVTRSSPGAGPSDHHSASRDERFKRRQLLRLQATERTMVREKENNPSGKKELSEVEKAKIRGSYLTVTLQRPTKELHGTSIVPKLQAITASSANLRHSPRVLVQHCPARTPQRGDEEGLGGEEEEEEEEEEEDDSAEEGGAARLNGRGSWAQDGDESWMQREVWMSVFRYLSRRELCECMRVCKTWYKWCCDKRLWTKIDLSRCKAIVPQALSGIIKRQPVSLDLSWTNISKKQLTWLVNRLPGLKDLLLAGCSWSAVSALSTSSCPLLRTLDLRWAVGIKDPQIRDLLTPPADKPGQDNRSKLRNMTDFRLAGLDITDATLRLIIRHMPLLSRLDLSHCSHLTDQSSNLLTAVGSSTRYSLTELNMAGCNKLTDQTLIYLRRIANVTLIDLRGCKQITRKACEHFISDLSINSLYCLSDEKLIQKIS

SEQ ID NO: 30318 - protein, 723 aa, Homo sapiens
MCSGRFQNIQVNPDFPRGRISNSFRRTSSTENKTKTLGKLHQEPRQLQSDGKRKILLEELANSDPKLALTGVPIVQWPKRDKLKFPTRPKVRVPTIPITKPHTMKPAPRLTPVRPAAASPIVSGARRRRVRCRKCKACVQGECGVCHYCRDMKKFGGPGRMKQSCVLRQCLAPRLPHSVTCSLCGEVDQNEETQDFEKKLMECCICNEIVHPGCLQMDGEGLLNEELPNCWECPKCYQEDSSEKAQKRKMEESDEEAVQAKVLRPLRSCDEPLTPPPHSPTSMLQLIHDPVSPRGMVTRSSPGAGPSDHHSASRDERFKRRQLLRLQATERTMVREKENNPSGKKELSEVEKAKIRGSYLTVTLQRPTKELHGTSIVPKLQAITASSANLRHSPRVLVQHCPARTPQRGDEEGLGGEEEEEEEEEEEDDSAEEGGAARLNGRGSWAQDGDESWMQREVWMSVFRYLSRRELCECMRVCKTWYKWCCDKRLWTKIDLSRCKAIVPQALSGIIKRQPVSLDLSWTNISKKQLTWLVNRLPGLKDLLLAGCSWSAVSALSTSSCPLLRTLDLRWAVGIKDPQIRDLLTPPADKPGQDNRSKLRNMTDFRLAGLDITDATLRLIIRHMPLLSRLDLSHCSHLTDQSSNLLTAVGSSTRYSLTELNMAGCNKLTDQTLIYLRRIANVTLIDLRGCKQITRKACEHFISDLSINSLYCLSDEKLIQKIS

SEQ ID NO: 30319 - protein, 782 aa, Homo sapiens
MEPEEERIRYSQRLRGTMRRRYEDDGISDDEIEGKRTFDLEEKLHTNKYNANFVTFMEGKDFNVEYIQRGGLRDPLIFKNSDGLGIKMPDPDFTVNDVKMCVGSRRMVDVMDVNTQKGIEMTMAQWTRYYETPEEEREKLYNVISLEFSHTRLENMVQRPSTVDFIDWVDNMWPRHLKESQTESTNAILEMQYPKVQKYCLMSVRGCYTDFHVDFGGTSVWYHIHQGGKVFWLIPPTAHNLELYENWLLSGKQGDIFLGDRVSDCQRIELKQGYTFVIPSGWIHAVYTPTDTLVFGGNFLHSFNIPMQLKIYNIEDRTRVPNKFRYPFYYEMCWYVLERYVYCITNRSHLTKEFQKESLSMDLELNGLESGNGDEEAVDREPRRLSSRRSVLTSPVANGVNLDYDGLGKTCRSLPSLKKTLAGDSSSDCSRGSHNGQVWDPQCAPRKDRQVHLTHFELEGLRCLVDKLESLPLHKKCVPTGIEDEDALIADVKILLEELANSDPKLALTGVPIVQWPKRDKLKFPTRPKVRVPTIPITKPHTMKPAPRLTPVRPAAASPIVSGARRRRVRCRKCKACVQGECGVCHYCRDMKKFGGPGRMKQSCVLRQCLAPRLPHSVTCSLCGEVDQNEETQDFEKKLMECCICNEIVHPGCLQMDGEGLLNEELPNCWECPKCYQEDSSEKAQKRKMEESDEEAVQAKVLRPLRSCDEPLTPPPHSPTSMLQLIHDPVSPRGMVTRSSPGAGPSDHHSASRDERFKRRQLLRLQATERTMVLRQETLDKN

SEQ ID NO: 30320 - protein, 673 aa, Homo sapiens
MASQFCLPESPCLSPLKPLKPHFGDIQEGIYVAIQRSDKRIHLAVVTEINRENYWVTVEWVEKAVKKGKKIDLETILLLNPALDSAEHPMPPPPLSPLALAPSSAIRDQRTATKWVAMIPQKNQTASGDSLDVRVPSKPCLMKQKKSPCLWEIQKLQEQREKRRRLQQEIRARRALDVNTRNPNYEIMHMIEEYRRHLDSSKISVLEPPQEHRICVCVRKRPLNQRETTLKDLDIITVPSDNVVMVHESKQKVDLTRYLQNQTFCFDHAFDDKASNELVYQFTAQPLVESIFRKGMATCFAYGQTGSGKTYTMGGDFSGTAQDCSKGIYALVAQDVFLLLRNSTYEKLDLKVYGTFFEIYGGKVYDLLNWKKKLQVLEDGNQQIQVVGLQEKEVCCVEEVLNLVEIGNSCRTSRQTPVNAHSSRSHAVFQIILKSGRIMHGKFSLVDLAGNERGADTTKASRKRQLEGAEINKSLLALKECILALGQNKPHTPFRASKLTLVLRDSFIGQNSSTCMIATISPGMTSCENTLNTLRYANRVKKLNVDVRPYHRGHYPIGHEAPRMLKSHIGNSEMSLQRDEFIKIPYVQSEEQKEIEEVETLPTLLGKDTTISGKGSSQWLENIQERAGGVHHDIDFCIARSLSILEQKIDALTEIQKKLKLLLADLHVKSKVE

SEQ ID NO: 30321 - protein, 1336 aa, Homo sapiens
MAGPQMGGSAEDHPPRKRHAAEKQKKKTVIYTKCFEFESATQRPIDRQRYDENEDLSDVEEIVSVRGFSLEEKLRSQLYQGDFVHAMEGKDFNYEYVQREALRVPLIFREKDGLGIKMPDPDFTVRDVKLLVGSRRLVDVMDVNTQKGTEMSMSQFVRYYETPEAQRDKLYNVISLEFSHTKLEHLVKRPTVVDLVDWVDNMWPQHLKEKQTEATNAIAEMKYPKVKKYCLMSVKGCFTDFHIDFGGTSVWYHVFRGGKIFWLIPPTLHNLALYEEWVLSGKQSDIFLGDRVERCQRIELKQGYTFFIPSGWIHAVYTPVDSLVFGGNILHSFNVPMQLRIYEIEDRTRVQPKFRYPFYYEMCWYVLERYVYCVTQRSHLTQEYQRESMLIDAPRKPSIDGFSSDSWLEMEEEACDQQPQEEEEKDEEGEGRDRAPKPPTDGSTSPTSTPSEDQEALGKKPKAPALRFLKRTLSNESEESVKSTTLAVDYPKTPTGSPATEVSAKWTHLTEFELKGLKALVEKLESLPENKKCVPEGIEDPQALLEGVKNVLKEHADDDPSLAITGVPVVTWPKKTPKNRAVGRPKGKLGPASAVKLAANRTTAGARRRRTRCRKCEACLRTECGECHFCKDMKKFGGPGRMKQSCIMRQCIAPVLPHTAVCLVCGEAGKEDTVEEEEGKFNLMLMECSICNEIIHPGCLKIKESEGVVNDELPNCWECPKCNHAGKTGKQKRGPGFKYASNLPGSLLKEQKMNRDNKEGQEPAKRRSECEEAPRRRSDEHSKKVPPDGLLRRKSDDVHLRKKRKYEKPQELSGRKRASSLQTSPGSSSHLSPRPPLGSSLSPWWRSSLTYFQQQLKPGKEDKLFRKKRRSWKNAEDRMALANKPLRRFKQEPEDELPEAPPKTRESDHSRSSSPTAGPSTEGAEGPEEKKKVKMRRKRRLPNKELSRELSKELNHEIQRTENSLANENQQPIKSEPESEGEEPKRPPGICERPHRFSKGLNGTPRELRHQLGPSLRSPPRVISRPPPSVSPPKCIQMERHVIRPPPISPPPDSLPLDDGAAHVMHREVWMAVFSYLSHQDLCVCMRVCRTWNRWCCDKRLWTRIDLNHCKSITPLMLSGIIRRQPVSLDLSWTNISKKQLSWLINRLPGLRDLVLSGCSWIAVSALCSSSCPLLRTLDVQWVEGLKDAQMRDLLSPPTDNRPGQMDNRSKLRNIVELRLAGLDITDASLRLIIRHMPLLSKLHLSYCNHVTDQSINLLTAVGTTTRDSLTEINLSDCNKVTDQCLSFFKRCGNICHIDLRYCKQVTKEGCEQFIAEMSVSVQFGQVEEKLLQKLS

SEQ ID NO: 30322 - protein, 1306 aa, Homo sapiens
MAGPQMGGSAEDHPPRKRHAAEKQKKKTVIYTKCFEFESATQRPIDRQRYDENEDLSDVEEIVSVRGFSLEEKLRSQLYQGDFVHAMEGKDFNYEYVQREALRVPLIFREKDGLGIKMPDPDFTVRDVKLLVGSRRLVDVMDVNTQKGTEMSMSQFVRYYETPEAQRDKLYNVISLEFSHTKLEHLVKRPTVVDLVDWVDNMWPQHLKEKQTEATNAIAEMKYPKVKKYCLMSVKGCFTDFHIDFGGTSVWYHVFRGGKIFWLIPPTLHNLALYEEWVLSGKQSDIFLGDRVERCQRIELKQGYTFFIPSGWIHAVYTPVDSLVFGGNILHSFNVPMQLRIYEIEDRTRVQPKFRYPFYYEMCWYVLERYVYCVTQRSHLTQEYQRESMLIDAPRKPSIDGFSSDSWLEMEEEACDQQPQEEEEKDEEGEGRDRAPKPPTDGSTSPTSTPSEDQEALGKKPKAPALRFLKRTLSNESEESVKSTTLAVDYPKTPTGSPATEVSAKWTHLTEFELKGLKALVEKLESLPENKKCVPEGIEDPQALLEGVKNVLKEHADDDPSLAITGVPVVTWPKKTPKNRAVGRPKGKLGPASAVKLAANRTTAGARRRRTRCRKCEACLRTECGECHFCKDMKKFGGPGRMKQSCIMRQCIAPVLPHTAVCLVCGEAGKEDTVEEEEGKFNLMLMECSICNEIIHPGCLKIKESEGVVNDELPNCWECPKCNHAGKTGKAYKQKRGPGFKYASNLPGSLLKEQKMNRDNKEGQEPAKRRSECEEAPRRRSDEHSKKVPPDGLLRRKSDDVHLRKKRKYEKPQELSGRKRASSLQTSPGSSSHLSPRPPLGSSLSPWWRSSLTYFQQQLKPGKEDKLFRKKRRSWKNAEDRMALANKPLRRFKQEPEDELPEAPPKTRESDHSRSSSPTAGPSTEGAEGPEEKKKVKMRRKRRLPNKELSRELSKELNHEIQRTENSLANENQQPIKSEPESEGEEPKRPPGICERPHRFSKGLNGTPRELRHQLGPSLRSPPRVISRPPPSVSPPKCIQMERHVIRPPPISPPPDSLPLDDGAAHVMHREVWMAVFSYLSHQDLCVCMRVCRTWNRWCCDKRLWTRIDLNHCKSITPLMLSGIIRRQPVSLDLSWTNISKKQLSWLINRLPGLRDLVLSGCSWIAVSALCSSSCPLLRTLDVQWVEGLKDAQMRDLLSPPTDNRPGQMDNRSKLRNIVELRLAGLDITDASLRLIIRHMPLLSKLHLSYCNHVTDQSINLLTAVGTTTRDSLTEINLSASLLGRVFGLQFWGICEPQARKNAGWA

SEQ ID NO: 30323 - protein, 1326 aa, Homo sapiens
MAGPQMGGSAEDHPPRKRHAAEKQKKKTVIYTKCFEFESATQRPIDRQRYDENEDLSDVEEIVSVRGFSLEEKLRSQLYQGDFVHAMEGKDFNYEYVQREALRVPLIFREKDGLGIKMPDPDFTVRDVKLLVGSRRLVDVMDVNTQKGTEMSMSQFVRYYETPEAQRDKLYNVISLEFSHTKLEHLVKRPTVVDLVDWVDNMWPQHLKEKQTEATNAIAEMKYPKVKKYCLMSVKGCFTDFHIDFGGTSVWYHVFRGGKIFWLIPPTLHNLALYEEWVLSGKQSDIFLGDRVERCQRIELKQGYTFFIPSGWIHAVYTPVDSLVFGGNILHSFNVPMQLRIYEIEDRTRVQPKFRYPFYYEMCWYVLERYVYCVTQRSHLTQEYQRESMLIDAPRKPSIDGFSSDSWLEMEEEACDQQPQEEEEKDEEGEGRDRAPKPPTDGSTSPTSTPSEDQEALGKKPKAPALRFLKRTLSNESEESVKSTTLAVDYPKTPTGSPATEVSAKWTHLTEFELKGLKALVEKLESLPENKKCVPEGIEDPQALLEGVKNVLKEHADDDPSLAITGVPVVTWPKKTPKNRAVGRPKGKLGPASAVKLAANRTTAGARRRRTRCRKCEACLRTECGECHFCKDMKKFGGPGRMKQSCIMRQCIAPVLPHTAVCLVCGEAGKEDTVEEEEGKFNLMLMECSICNEIIHPGCLKIKESEGVVNDELPNCWECPKCNHAGKTGKQKRGPGFKYASNLPGSLLKEQKMNRDNKEGQEPAKRRSECEEAPRRRSDEHSKKVPPDGLLRRKSDDVHLRKKRKYEKPQELSGRKRASSLQTSPGSSSHLSPRPPLGSSLSPWWRSSLTYFQQQQRRSWKNAEDRMALANKPLRRFKQEPEDELPEAPPKTRESDHSRSSSPTAGPSTEGAEGPEEKKKVKMRRKRRLPNKELSRELSKELNHEIQRTENSLANENQQPIKSEPESEGEEPKRPPGICERPHRFSKGLNGTPRELRHQLGPSLRSPPRVISRPPPSVSPPKCIQMERHVIRPPPISPPPDSLPLDDGAAHVMHREVWMAVFSYLSHQDLCVCMRVCRTWNRWCCDKRLWTRIDLNHCKSITPLMLSGIIRRQPVSLDLSWTNISKKQLSWLINRLPGLRDLVLSGCSWIAVSALCSSSCPLLRTLDVQWVEGLKDAQMRDLLSPPTDNRPGPGQMDNRSKLRNIVELRLAGLDITDASLRLIIRHMPLLSKLHLSYCNHVTDQSINLLTAVGTTTRDSLTEINLSDCNKVTDQCLSFFKRCGNICHIDLRYCKQVTKEGCEQFIAEMSVSVQFGQVEEKLLQKLS

SEQ ID NO: 30324 - protein, 1265 aa, Homo sapiens
MEAEKDSGRRLRPIDRQRYDENEDLSDVEEIVSVRGFSLEEKLRSQLYQGDFVHAMEGKDFNYEYVQREALRVPLIFREKDGLGIKMPDPDFTVRDVKLLVGSRRLVDVMDVNTQKGTEMSMSQFVRYYETPEAQRDKLYNVISLEFSHTKLEHLVKRPTVVDLVDWVDNMWPQHLKEKQTEATNAIAEMKYPKVKKYCLMSVKGCFTDFHIDFGGTSVWYHVFRGGKIFWLIPPTLHNLALYEEWVLSGKQSDIFLGDRVERCQRIELKQGYTFFIPSGWIHAVYTPVDSLVFGGNILHSFNVPMQLRIYEIEDRTRVQPKFRYPFYYEMCWYVLERYVYCVTQRSHLTQEYQRESMLIDAPRKPSIDGFSSDSWLEMEEEACDQQPQEEEEKDEEGEGRDRAPKPPTDGSTSPTSTPSEDQEALGKKPKAPALRFLKRTLSNESEESVKSTTLAVDYPKTPTGSPATEVSAKWTHLTEFELKGLKALVEKLESLPENKKCVPEGIEDPQALLEGVKNVLKEHADDDPSLAITGVPVVTWPKKTPKNRAVGRPKGKLGPASAVKLAANRTTAGARRRRTRCRKCEACLRTECGECHFCKDMKKFGGPGRMKQSCIMRQCIAPVLPHTAVCLVCGEAGKEDTVEEEEGKFNLMLMECSICNEIIHPGCLKIKESEGVVNDELPNCWECPKCNHAGKTGKQKRGPGFKYASNLPGSLLKEQKMNRDNKEGQEPAKRRSECEEAPRRRSDEHSKKVPPDGLLRRKSDDVHLRKKRKYEKPQELSGRKRLKPGKEDKLFRKKRRSWKNAEDRMALANKPLRRFKQEPEDELPEAPPKTRESDHSRSSSPTAGPSTEGAEGPEEKKKVKMRRKRRLPNKELSRELSKELNHEIQRTENSLANENQQPIKSEPESEGEEPKRPPGICERPHRFSKGLNGTPRELRHQLGPSLRSPPRVISRPPPSVSPPKCIQMERHVIRPPPISPPPDSLPLDDGAAHVMHREVWMAVFSYLSHQDLCVCMRVCRTWNRWCCDKRLWTRIDLNHCKSITPLMLSGIIRRQPVSLDLSWTNISKKQLSWLINRLPGLRDLVLSGCSWIAVSALCSSSCPLLRTLDVQWVEGLKDAQMRDLLSPPTDNRPGQMDNRSKLRNIVELRLAGLDITDASLRLIIRHMPLLSKLHLSYCNHVTDQSINLLTAVGTTTRDSLTEINLSDCNKVTDQCLSFFKRCGNICHIDLRYCKQVTKEGCEQFIAEMSSFQGRSCSTTRLGDE

SEQ ID NO: 30325 - protein, 559 aa, Homo sapiens
MPDPDFTVRDVKLLVGSRRLVDVMDVNTQKGTEMSMSQFVRYYETPEAQRDKLYNVISLEFSHTKLEHLVKRPTVVDLVDWVDNMWPQHLKEKQTEATNAIAEMKYPKVKKYCLMSVKGCFTDFHIDFGGTSVWYHVFRGGKIFWLIPPTLHNLALYEEWVLSGKQSDIFLGDRVERCQRIELKQGYTFFIPSGWIHAVYTPVDSLVFGGNILHSFNVPMQLRIYEIEDRTRVQPKFRYPFYYEMCWYVLERYVYCVTQRSHLTQEYQRESMLIDAPRKPSIDGFSSDSWLEMEEEACDQQPQEEEEKDEEGEGRDRAPKPPTDGSTSPTSTPSEDQEALGKKPKAPALRFLKRTLSNESEESVKSTTLAVDYPKTPTGSPATEVSAKWTHLTEFELKGLKALVEKLESLPENKKCVPEGIEDPQALLEGVKNVLKEHADDDPSLAITGVPVVTWPKKTPKNRAVGRPKGKLGPASAVKLAANRTTAGARRRRTRCRKCEACLRTECGECHFCKDMKKFGGPGRMKQSCIMRQCIATAIRSLISACPSSNAVETSVILT

SEQ ID NO: 30326 - protein, 725 aa, Homo sapiens
MAMDSSLQARLFPGLAIKIQRSNGLIHSANVRTVNLEKSCVSVEWAEGGATKGKEIDFDDVAAINPELLQLLPLHPKDNLPLQENVTIQKQKRRSVNSKIPAPKESLRSRSTRMSTVSELRITAQENDMEVELPAAANSRKQFSVPPAPTRPSCPAVAEIPLRMVSEEMEEQVHSIRGSSSANPVNSVRRKSCLVKEVEKMKNKREEKKAQNSEMRMKRAQEYDSSFPNWEFARMIKEFRATLECHPLTMTDPIEEHRICVCVRKRPLNKQELAKKEIDVISIPSKCLLLVHEPKLKVDLTKYLENQAFCFDFAFDETASNEVVYRFTARPLVQTIFEGGKATCFAYGQTGSGKTHTMGGDLSGKAQNASKGIYAMASRDVFLLKNQPCYRKLGLEVYVTFFEIYNGKLFDLLNKKAKLRVLEDGKQQVQVVGLQEHLVNSADDVIKMIDMGSACRTSGQTFANSNSSRSHACFQIILRAKGRMHGKFSLVDLAGNERGADTSSADRQTRMEGAEINKSLLALKECIRALGQNKAHTPFRESKLTQVLRDSFIGENSRTCMIATISPGISSCEYTLNTLRYADRVKELSPHSGPSGEQLIQMETEEMEACSNGALIPGNLSKEEEELSSQMSSFNEAMTQIRELEEKAMEELKEIIQQGPDWLELSEMTEQPDYDLETFVNKAESALAQQAKHFSALRDVIKALRLAMQLEEQASRQISSKKRPQ

SEQ ID NO: 30327 - protein, 671 aa, Homo sapiens
MIDFDDVAAINPELLQLLPLHPKDNLPLQENVTIQKQKRRSVNSKIPAPKESLRSRSTRMSTVSELRITAQENDMEVELPAAANSRKQFSVPPAPTRPSCPAVAEIPLRMVSEEMEEQVHSIRGSSSANPVNSVRRKSCLVKEVEKMKNKREEKKAQNSEMRMKRAQEYDSSFPNWEFARMIKEFRATLECHPLTMTDPIEEHRICVCVRKRPLNKQELAKKEIDVISIPSKCLLLVHEPKLKVDLTKYLENQAFCFDFAFDETASNEVVYRFTARPLVQTIFEGGKATCFAYGQTGSGKTHTMGGDLSGKAQNASKGIYAMASRDVFLLKNQPCYRKLGLEVYVTFFEIYNGKLFDLLNKKAKLRVLEDGKQQVQVVGLQEHLVNSADDVIKMIDMGSACRTSGQTFANSNSSRSHACFQIILRAKGRMHGKFSLVDLAGNERGADTSSADRQTRMEGAEINKSLLALKECIRALGQNKAHTPFRESKLTQVLRDSFIGENSRTCMIATISPGISSCEYTLNTLRYADRVKELSPHSGPSGEQLIQMETEEMEACSNGALIPGNLSKEEEELSSQMSSFNEAMTQIRELEEKAMEELKEIIQQGPDWLELSEMTEQPDYDLETFVNKAESALAQQAKHFSALRDVIKALRLAMQLEEQASRQISSKKRPQ

SEQ ID NO: 30328 - protein, 858 aa, Homo sapiens [sequence omitted]

SEQ ID NO: 30329 - protein, 1321 aa, Homo sapiens
MVLTLGESWPVLVGRRFLSLSAADGSDGSHDSWDVERVAEWPWLSGTIRAVSHTDVTKKDLKVCVEFDGESWRKRRWIEVYSLLRRAFLVEHNLVLAERKSPEISERIVQWPAITYKPLLDKAGLGSITSVRFLGDQQRVFLSKDLLKPIQDVNSLRLSLTDNQIVSKEFQALIVKHLDESHLLKGDKNLVGSEVKIYSLDPSTQWFSATVINGNPASKTLQVNCEEIPALKIVDPSLIHVEVVHDNLVTCGNSARIGAVKRKSSENNGTLVSKQAKSCSEASPSMCPVQSVPTTVFKEILLGCTAATPPSKDPRQQSTPQAANSPPNLGAKIPQGCHKQSLPEEISSCLNTKSEALRTKPDVCKAGLLSKSSQIGTGDLKILTEPKGSCTQPKTNTDQENRLESVPQALTGLPKECLPTKASSKAELEIANPPELQKHLEHAPSPSDVSNAPEVKAGVNSDSPNNCSGKKVEPSALACRSQNLKESSVKVDNESCCSRSNNKIQNAPSRKSVLTDPAKLKKLQQSGEAFVQDDSCVNIVAQLPKCRECRLDSLRKDKEQQKDSPVFCRFFHFRRLQFNKHGVLRVEGFLTPNKYDNEAIGLWLPLTKNVVGIDLDTAKYILANIGDHFCQMVISEKEAMSTIEPHRQVAWKRAVKGVREMCDVCDTTIFNLHWVCPRCGFGVCVDCYRMKRKNCQQGAAYKTFSWLKCVKSQIHEPENLMPTQIIPGKALYDVGDIVHSVRAKWGIKANCPCSNRQFKLFSKPASKEDLKQTSLAGEKPTLGAVLQQNPSVLEPAAVGGEAASKPAGSMKPACPASTSPLNWLADLTSGNVNKENKEKQPTMPILKNEIKCLPPLPPLSKSSTVLHTFNSTILTPVSNNNSGFLRNLLNSSTGKTENGLKNTPKILDDIFASLVQNKTTSDLSKRPQGLTIKPSILGFDTPHYWLCDNRLLCLQDPNNKSNWNVFRECWKQGQPVMVSGVHHKLNSELWKPESFRKEFGEQEVDLVNCRTNEIITGATVGDFWDGFEDVPNRLKNEKEPMVLKLKDWPPGEDFRDMMPSRFDDLMANIPLPEYTRRDGKLNLASRLPNYFVRPDLGPKMYNAYGLITPEDRKYGTTNLHLDVSDAANVMVYVGIPKGQCEQEEEVLKTIQDGDSDELTIKRFIEGKEKPGALWHIYAAKDTEKIREFLKKVSEEQGQENPADHDPIHDQSWYLDRSLRKRLHQEYGVQGWAIVQFLGDVVFIPAGAPHQVHNLYSCIKVAEDFVSPEHVKHCFWLTQEFRYLSQTHTNHEDKLQVKNVIYHAVKDAVAMLKASESSFGKP

SEQ ID NO: 30330 - protein, 699 aa, Homo sapiens
MPINKSEKPESCDNVKVVVRCRPLNEREKSMCYKQAVSVDEMRGTITVHKTDSSNEPPKTFTFDTVFGPESKQLDVYNLTARPIIDSVLEGYNGTIFAYGQTGTGKTFTMEGVRAIPELRGIIPNSFAHIFGHIAKAEGDTRFLVRVSYLEIYNEEVRDLLGKDQTQRLEVKERPDVGVYIKDLSAYVVNNADDMDRIMTLGHKNRSVGATNMNEHSSRSHAIFTITIECSEKGIDGNMHVRMGKLHLVDLAGSERQAKTGATGQRLKEATKINLSLSTLGNVISALVDGKSTHVPYRNSKLTRLLQDSLGGNSKTMMCANIGPADYNYDETISTLRYANRAKNIKNKARINEDPKDALLRQFQKEIEELKKKLEEGEEISGSDISGSEEDDDEEGEVGEDGEKRKKRRGKKKVSPDKMIEMQAKIDEERKALETKLDMEEEERNKARAELEKREKDLLKAQQEHQSLLEKLSALEKKVIVGGVDLLAKAEEQEKLLEESNMELEERRKRAEQLRRELEEKEQERLDIEEKYTSLQEEAQGKTKKLKKVWTMLMAAKSEMADLQQEHQREIEGLLENIRQLSRELRLQMLIIDNFIPRDYQEMIENYVHWNEDIGEWQLKCVAYTGNNMRKQTPVPDKKEKDPFEVDLSHVYLAYTEESLRQSLMKLERPRTSKGKARPKTGRRKRSAKPETVIDSLLQ

SEQ ID NO: 30331 - protein, 118 aa, Homo sapiens
MESVALYSFQATESDELAFNKGDTLKILNMEDDQNWYKAELRGVEGFIPKNYIRVKPHPWYSGRISRQLAEEILMKRNHLGAFLIRESESSPGEFSVSVNNRAQRGPCLGPKSHSRLG

SEQ ID NO: 30332 - protein, 116 aa, Homo sapiens
MESVALYSFQATESDELAFNKGDTLKILNMEDDQNWYKAELRGVEGFIPKNYIRVKPHPWYSGRISRQLAEEILMKRNHLGAFLIRESESSPGEFSVSVKAQRGPCLGPKSHSRLG

SEQ ID NO: 30333 - protein, 1761 aa, Homo sapiens
MADAAASPVGKRLLLLFADTAASASASAPAAAAASGDPGPALRTRAWRAGTVRAMSGAVPQDLAIFVEFDGCNWKQHSWVKVHAEEVIVLLLEGSLVWAPREDPVLLQGIRVSIAQWPALTFTPLVDKLGLGSVVPVEYLLDRELRFLSDANGLHLFQMGTDSQNQILLEHAALRETVNALISDQKLQEIFSRGPYSVQGHRVKIYQPEGEEGWLYGVVSHQDSITRLMEVSVTESGEIKSVDPRLIHVMLMDNSAPQSEGGTLKAVKSSKGKKKRESIEGKDGRRRKSASDSGCDPASKKLKGDRGEVDSNGSDGGEASRGPWKGGNASGEPGLDQRAKQPPSTFVPQINRNIRFATYTKENGRTLVVQDEPVGGDTPASFTPYSTATGQTPLAPEVGGAENKEAGKTLEQVGQGIVASAAVVTTASSTPNTVRISDTGLAAGTVPEKQKGSRSQASGENSRNSILASSGFGAPLPSSSQPLTFGSGRSQSNGVLATENKPLGFSFGCSSAQEAQKDTDLSKNLFFQCMSQTLPTSNYFTTVSESLADDSSSRDSFKQSLESLSSGLCKGRSVLGTDTKPGSKAGSSVDRKVPAESMPTLTPAFPRSLLNARTPENHENLFLQPPKLSREEPSNPFLAFVEKVEHSPFSSFASQASGSSSSATTVTSKVAPSWPESHSSADSASLAKKKPLFITTDSSKLVSGVLGSALTSGGPSLSAMGNGRSSSPTSSLTQPIEMPTLSSSPTEERPTVGPGQQDNPLLKTFSNVFGRHSGGFLSSPADFSQENKAPFEAVKRFSLDERSLACRQDSDSSTNSDLSDLSDSEEQLQAKTGLKGIPEHLMGKLGPNGERSAELLLGKSKGKQAPKGRPRTAPLKVGQSVLKDVSKVKKLKQSGEPFLQDGSCINVAPHLHKCRECRLERYRKFKEQEQDDSTVACRFFHFRRLIFTRKGVLRVEGFLSPQQSDPDAMNLWIPSSSLAEGIDLETSKYILANVGDQFCQLVMSEKEAMMMVEPHQKVAWKRAVRGVREMCDVCETTLFNIHWVCRKCGFGVCLDCYRLRKSRPRSETEEMGDEEVFSWLKCAKGQSHEPENLMPTQIIPGTALYNIGDMVHAARGKWGIKANCPCISRQNKSVLRPAVTNGMSQLPSINPSASSGNETTFSGGGGPAPVTTPEPDHVPKADSTDIRSEEPLKTDSSASNSNSELKAIRPPCPDTAPPSSALHWLADLATQKAKEETKEAGSLRSVLNKESHSPFGLDSFNSTAKVSPLTPKLFNSLLLGPTASNNKTEGSSLRDLLHSGPGKLPQTPLDTGIPFPPVFSTSSAGVKSKASLPNFLDHIIASVVENKKTSDASKRACNLTDTQKEVKEMVMGLNVLDPHTSHSWLCDGRLLCLHDPSNKNNWKIFRECWKQGQPVLVSGVHKKLKSELWKPEAFSQEFGDQDVDLVNCRNCAIISDVKVRDFWDGFEIICKRLRSEDGQPMVLKLKDWPPGEDFRDMMPTRFEDLMENLPLPEYTKRDGRLNLASRLPSYFVRPDLGPKMYNAYGLITAEDRRVGTTNLHLDVSDAVNVMVYVGIPIGEGAHDEEVLKTIDEGDADEVTKQRIHDGKEKPGALWHIYAAKDAEKIRELLRKVGEEQGQENPPDHDPIHDQSWYLDQTLRKRLYEEYGVQGWAIVQFLGDAVFIPAGAPHQVHNLYSCIKVAEDFVSPEHVKHCFRLTQEFRHLSNTHTNHEDKLQVKNIIYHAVKDAVGTLKAHESKLARS

SEQ ID NO: 30334 - protein, 1417 aa, Homo sapiens
MGAMEINRNIRFATYTKENGRTLVVQDEPVGGDTPASFTPYSTATGQTPLAPEVGGAENKEAGKTLEQVGQGIVASAAVVTTASSTPNTVRISDTGLAAGTVPEKQKGSRSQASGENSRNSILASSGFGAPLPSSSQPLTFGSGRSQSNGVLATENKPLGFSFGCSSAQEAQKDTDLSKNLFFQCMSQTLPTSNYFTTVSESLADDSSSRDSFKQSLESLSSGLCKGRSVLGTDTKPGSKAGSSVDRKVPAESMPTLTPAFPRSLLNARTPENHENLFLQPPKLSREEPSNPFLAFVEKVEHSPFSSFASQASGSSSSATTVTSKVAPSWPESHSSADSASLAKKKPLFITTDSSKLVSGVLGSALTSGGPSLSAMGNGRSSSPTSSLTQPIEMPTLSSSPTEERPTVGPGQQDNPLLKTFSNVFGRHSGGFLSSPADFSQENKAPFEAVKRFSLDERSLACRQDSDSSTNSDLSDLSDSEEQLQAKTGLKGIPEHLMGKLGPNGERSAELLLGKSKGKQAPKGRPRTAPLKVGQSVLKDVSKVKKLKQSGEPFLQDGSCINVAPHLHKCRECRLERYRKFKEQEQDDSTVACRFFHFRRLIFTRKGVLRVEGFLSPQQSDPDAMNLWIPSSSLAEGIDLETSKYILANVGDQFCQLVMSEKEAMMMVEPHQKVAWKRAVRGVREMCDVCETTLFNIHWVCRKCGFGVCLDCYRLRKSRPRSETEEMGDEEVFSWLKCAKGQSHEPENLMPTQIIPGTALYNIGDMVHAARGKWGIKANCPCISRQNKSVLRPAVTNGMSQLPSINPSASSGNETTFSGGGGPAPVTTPEPDHVPKADSTDIRSEEPLKTDSSASNSNSELKAIRPPCPDTAPPSSALHWLADLATQKAKEETKEAGSLRSVLNKESHSPFGLDSFNSTAKVSPLTPKLFNSLLLGPTASNNKTEGSSLRDLLHSGPGKLPQTPLDTGIPFPPVFSTSSAGVKSKASLPNFLDHIIASVVENKKTSDASKRACNLTDTQKEVKEMVMGLNVLDPHTSHSWLCDGRLLCLHDPSNKNNWKIFRECWKQGQPVLVSGVHKKLKSELWKPEAFSQEFGDQDVDLVNCRNCAIISDVKVRDFWDGFEIICKRLRSEDGQPMVLKLKDWPPGEDFRDMMPTRFEDLMENLPLPEYTKRDGRLNLASRLPSYFVRPDLGPKMYNAYGLITAEDRRVGTTNLHLDVSDAVNVMVYVGIPIGEGAHDEEVLKTIDEGDADEVTKQRIHDGKEKPGALWHIYAAKDAEKIRELLRKVGEEQGQENPPDHDPIHDQSWYLDQTLRKRLYEEYGVQGWAIVQFLGDAVFIPAGAPHQVHNLYSCIKVAEDFVSPEHVKHCFRLTQEFRHLSNTHTNHEDKLQVKNIIYHAVKDAVGTLKAHESKLARS

SEQ ID NO: 30335 - protein, 759 aa, Homo sapiens
MSEKEAMMMVEPHQKVAWKRAVRGVREMCDVCETTLFNIHWVCRKCGFGVCLDCYRLRKSRPRSETEEMGDEEVFSWLKCAKGQSHEPENLMPTQIIPGTALYNIGDMVHAARGKWGIKANCPCISRQNKSVLRPAVTNGMSQLPSINPSASSGNETTFSGGGGPAPVTTPEPDHVPKADSTDIRSEEPLKTDSSASNSNSELKAIRPPCPDTAPPSSALHWLADLATQKAKEETKEAGSLRSVLNKESHSPFGLDSFNSTAKVSPLTPKLFNSLLLGPTASNNKTEGSSLRDLLHSGPGKLPQTPLDTGIPFPPVFSTSSAGVKSKASLPNFLDHIIASVVENKKTSDASKRACNLTDTQKEVKEMVMGLNVLDPHTSHSWLCDGRLLCLHDPSNKNNWKIFRECWKQGQPVLVSGVHKKLKSELWKPEAFSQEFGDQDVDLVNCRNCAIISDVKVRDFWDGFEIICKRLRSEDGQPMVLKLKDWPPGEDFRDMMPTRFEDLMENLPLPEYTKRDGRLNLASRLPSYFVRPDLGPKMYNAYGLITAEDRRVGTTNLHLDVSDAVNVMVYVGIPIGEGAHDEEVLKTIDEGDADEVTKQRIHDGKEKPGALWHIYAAKDAEKIRELLRKVGEEQGQENPPDHDPIHDQSWYLDQTLRKRLYEEYGVQGWAIVQFLGDAVFIPAGAPHQVHNLYSCIKVAEDFVSPEHVKHCFRLTQEFRHLSNTHTNHEDKLQVKNIIYHAVKDAVGTLKAHESKLARS

SEQ ID NO: 30336 - protein, 217 aa, Homo sapiens
MESVALYSFQATESDELAFNKGDTLKILNMEDDQNWYKAELRGVEGFIPKNYIRVKPHPWYSGRISRQLAEEILMKRNHLGAFLIRESESSPGEFSVSVNYGDQVQHFKVLREASGKYFLWEEKFNSLNELVDFYRTTTIAKKRQIFLRDEEPLLKSPGACFAQAQFDFSAQDPSQLSFRRGDIIEVLERPDPHWWRGRSCGRVGFFPRSYVQPVHL

SEQ ID NO: 30337 - protein, 351 aa, Homo sapiens
MGNAAAAKKGSEQESVKEFLAKAKEDFLKKWESPAQNTAHLDQFERIKTLGTGSFGRVMLVKHKETGNHYAMKILDKQKVVKLKQIEHTLNEKRILQAVNFPFLVKLEFSFKDNSNLYMVMEYVPGGEMFSHLRRIGRFSEPHARFYAAQIVLTFEYLHSLDLIYRDLKPENLLIDQQGYIQVTDFGFAKRVKGRTWTLCGTPEYLAPEIILSKGYNKAVDWWALGVLIYEMAAGYPPFFADQPIQIYEKIVSGKVRFPSHFSSDLKDLLRNLLQVDLTKRFGNLKNGVNDIKNHKWFATTDWIAIYQRKVEAPFIPKFKGPGDTSNFDDYEEEEIRVSINEKCGKEFSEF

SEQ ID NO: 30338 - protein, 343 aa, Homo sapiens
MASNSSDVKEFLAKAKEDFLKKWESPAQNTAHLDQFERIKTLGTGSFGRVMLVKHKETGNHYAMKILDKQKVVKLKQIEHTLNEKRILQAVNFPFLVKLEFSFKDNSNLYMVMEYVPGGEMFSHLRRIGRFSEPHARFYAAQIVLTFEYLHSLDLIYRDLKPENLLIDQQGYIQVTDFGFAKRVKGRTWTLCGTPEYLAPEIILSKGYNKAVDWWALGVLIYEMAAGYPPFFADQPIQIYEKIVSGKVRFPSHFSSDLKDLLRNLLQVDLTKRFGNLKNGVNDIKNHKWFATTDWIAIYQRKVEAPFIPKFKGPGDTSNFDDYEEEEIRVSINEKCGKEFSEF

SEQ ID NO: 30339 - protein, 384 aa, Homo sapiens
MALNDCFLLNLEVDHFMHCNISSHSADLPVNDDWSHPGILYVIPAVYGVIILIGLIGNITLIKIFCTVKSMRNVPNLFISSLALGDLLLLITCAPVDASRYLADRWLFGRIGCKLIPFIQLTSVGVSVFTLTALSADRYKAIVRPMDIQASHALMKICLKAAFIWIISMLLAIPEAVFSDLHPFHEESTNQTFISCAPYPHSNELHPKIHSMASFLVFYVIPLSIISVYYYFIAKNLIQSAYNLPVEGNIHVKKQIESRKRLAKTVLVFVGLFAFCWLPNHVIYLYRSYHYSEVDTSMLHFVTSICARLLAFTNSCVNPFALYLLSKSFRKQFNTQLLCCQPGLIIRSHSTGRSTTCMTSLKSTNPSVATFSLINGNICHERYV

SEQ ID NO: 30340 - protein, 647 aa, Homo sapiens
MAAGLATWLPFARAAAVGWLPLAQQPLPPAPGVKASRGDEVLVVNVSGRRFETWKNTLDRYPDTLLGSSEKEFFYDADSGEYFFDRDPDMFRHVLNFYRTGRLHCPRQECIQAFDEELAFYGLVPELVGDCCLEEYRDRKKENAERLAEDEEAEQAGDGPALPAGSSLRQRLWRAFENPHTSTAALVFYYVTGFFIAVSVIANVVETIPCRGSARRSSREQPCGERFPQAFFCMDTACVLIFTGEYLLRLFAAPSRCRFLRSVMSLIDVVAILPYYIGLLVPKNDDVSGAFVTLRVFRVFRIFKFSRHSQGLRILGYTLKSCASELGFLLFSLTMAIIIFATVMFYAEKGTNKTNFTSIPAAFWYTIVTMTTLGYGDMVPSTIAGKIFGSICSLSGVLVIALPVPVIVSNFSRIYHQNQRADKRRAQQKVRLARIRLAKSGTTNAFLQYKQNGGLEDSGSGEEQALCVRNRSAFEQQHHHLLHCLEKTTCHEFTDELTFSEALGAVSPGGRTSRSTSVSSQPVGPGSLLSSCCPRRAKRRAIRLANSTASVSRGSMQELDMLAGLRRSHAPQSRSSLNAKPHDSLDLNCDSRDFVAAIISIPTPPANTPDESQPSSPGGGGRAGSTLRNSSLGTPCLFPETVKISSL

SEQ ID NO: 30341 - protein, 270 aa, Homo sapiens
MVPSTIAGKIFGSICSLSGVLVIALPVPVIVSNFSRIYHQNQRADKRRAQQKVRLARIRLAKSGTTNAFLQYKQNGGLEDSGSGEEQALCVRNRSAFEQQHHHLLHCLEKTTCHEFTDELTFSEALGAVSPGGRTSRSTSVSSQPVGPGSLLSSCCPRRAKRRAIRLANSTASVSRGSMQELDMLAGLRRSHAPQSRSSLNAKPHDSLDLNCDSRDFVAAIISIPTPPANTPDESQPSSPGGGGRAGSTLRNSSLGTPCLFPETVKISSL

SEQ ID NO: 30342 - protein, 814 aa, Homo sapiens
MVKQTIQIFARVKPPVRKHQQGIYSIDEDEKLIPSLEIILPRDLADGFVNNKRESYKFKFQRIFDQDANQETVFENIAKPVAGSVLAGYNGTIFAYGQTGSGKTFTITGGAERYSDRGIIPRTLSYIFEQLQKDSSKIYTTHISYLEIYNECGYDLLDPRHEASSLEDLPKVTILEDPDQNIHLKNLTLHQATTEEEALNLLFLGDTNRMIAETPMNQASTRSHCIFTIHLSSKEPGSATVRHAKLHLVDLAGSERVAKTGVGGHLLTEAKYINLSLHYLEQVIIALSEKHRSHIPYRNSMMTSVLRDSLGGNCMTTMIATLSLEKRNLDESISTCRFAQRVALIKNEAVLNEEINPRLVIKRLQKEIQELKDELAMVTGEQRTEALTEAELLQLEKLITSFLEDQDSDSRLEVGADMRKVHHCFHHLKKLLNDKKILENNTVSSESKDQDCQEPLKEEEYRKLRDILKQRDNEINILVNMLKKEKKKAQEALHLAGMDRREFRQSQSPPFRLGNPEEGQRMRLSSAPSQAQDFSILGKRSSLLHKKIGMREEMSLGCQEAFEIFKRDHADSVTIDDNKQILKQRFSEAKALGESINEARSKIGHLKEEITQRHIQQVALGISENMAVPLMPDQQEEKLRSQLEEEKRRYKTMFTRLKALKVEIEHLQLLMDKAKVKLQKEFEVWWAEEATNLQVNSPAVNSLDHTKPFLQTSDSQHEWSQLLSNKSSGGWEVQDQGTGRFDVCDVNARKILPSPCPSPHSQKQSSTSTPLEDSIPKRPVSSIPLTGDSQTDSDIIAFIKARQSILQKQCLGSN

SEQ ID NO: 30343 - protein, 265 aa, Homo sapiens
MREEMSLGCQEAFEIFKRDHADSVTIDDNKQILKQRFSEAKALGESINEARSKIGHLKEEITQRHIQQVALGISENMAVPLMPDQQEEKLRSQLEEEKRRYKTMFTRLKALKVEIEHLQLLMDKAKVKLQKEFEVWWAEEATNLQVNSPAVNSLDHTKPFLQTSDSQHEWSQLLSNKSSGGWEVQDQGTGRFDVCDVNARKILPSPCPSPHSQKQSSTSTPLEDSIPKRPVSSIPLTGDSQTDSDIIAFIKARQSILQKQCLGSN

SEQ ID NO: 30344 - protein, 797 aa, Homo sapiens
MVKQTIQIFARVKPPVRKHQQGIYSIDEDEKLIPSLEIILPRDLADGFVNNKRESYKFKFQRIFDQDANQETVFENIAKPVAGSVLAGYNGTIFAYGQTGSGKTFTITGGAERYSDRGIIPRTLSYIFEQLQKDSSKIYTTHISYLEIYNECGYDLLDPRHEASSLEDLPKVTILEDPDQNIHLKNLTLHQATTEEEALNLLFLGDTNRMIAETPMNQASTRSHCIFTIHLSSKEPGSATVRHAKLHLVDLAGSERVAKTGVGGHLLTEAKYINLSLHYLEQVIIALSEKHRSHIPYRNSMMTSVLRDSLGGNCMTTMIATLSLEKRNLDESISTCRFAQRVALIKNEAVLNEEINPRLVIKRLQKEIQELKDELAMVTGEQRTEALTEAELLQLEKLITSFLEDQDSDSRLEVGADMRKVHHCFHHLKKLLNDKKILENNTVSSESKDQDCQEPLKEEEYRKLRDILKQRDNEINILVNMLKKEKKKAQEALHLAGMDRREFRQSQSPPFRLGNPEEGQRMRLSSAPSQAQDFSILGKRSSLLHKKIGMREEMSLGCQEAFEIFKRDHADSVTIDDNKQILKQRFSEAKALGESINEARSKIGHLKEEITQRHIQQVALGISENMAVPLMPDQQEEKLRSQLEEEKRRYKTMFTRLKALKVEIEHLQLLMDKAKVKLQKEFEVWWAEEATNLQVNSPAVNSLDHTKPFLQTSDSQHEWSQLLSNKSDVNARKILPSPCPSPHSQKQSSTSTPLEDSIPKRPVSSIPLTGDSQTDSDIIAFIKARQSILQKQCLGSN

SEQ ID NO: 30345 - protein, 171 aa, Homo sapiens
MREEMSLGCQEAFEIFKRDHADSVTIDDNKQILKQRFSEAKALGESINEARSKIGHLKEEITQRHIQQVALGISENMAVPLMPDQQEEKLRSQLEEEKRRYKTMFTRLKALKVEIEHLQLLMDKAKVKLQKEFEVWWAEEATNLQVNSPAVNSLDHTKSKIKALADSMSVM

SEQ ID NO: 30346 - protein, 178 aa, Homo sapiens
MDRPGPGSARPGRTVHVWGYRVEWKVRNGRKLQPSEWAGRGDLGGFKRRWKDTRATVGTTFRRRSRVSLVGELSKFPLPSDSSGGKSSSSFARGALAWCRQRNPNPSCAAAETGARTSLPKERCRGWRLGNWLHKHPHPNTCPRLPACWLPPILTERGERVPKLVPLLACYPKSKPKD

SEQ ID NO: 30347 - protein, 724 aa, Homo sapiens
MLRTSTPNLCGGLHCRAPWLSSGILCLCLIFLLGQVGLLQGHPQCLDYGPPFQPPLHLEFCSDYESFGCCDQHKDRRIAARYWDIMEYFDLKRHELCGDYIKDILCQECSPYAAHLYDAENTQTPLRNLPGLCSDYCSAFHSNCHSAISLLTNDRGLQESHGRDGTRFCHLLDLPDKDYCFPNVLRNDYLNRHLGMVAQDPQGCLQLCLSEVANGLRNPVSMVHAGDGTHRFFVAEQVGVVWVYLPDGSRLEQPFLDLKNIVLTTPWIGDERGFLGLAFHPKFRHNRKFYIYYSCLDKKKVEKIRISEMKVSRADPNKADLKSERVILEIEEPASNHNGGQLLFGLDGYMYIFTGDGGQAGDPFGLFGNAQNKSSLLGKVLRIDVNRAGSHGKRYRVPSDNPFVSEPGAHPAIYAYGIRNMWRCAVDRGDPITRQGRGRIFCGDVGQNRFEEVDLILKGGNYGWRAKEGFACYDKKLCHNASLDDVLPIYAYGHAVGKSVTGGYVYRGCESPNLNGLYIFGDFMSGRLMALQEDRKNKKWKKQDLCLGSTTSCAFPGLISTHSKFIISFAEDEAGELYFLATSYPSAYAPRGSIYKFVDPSRRAPPGKCKYKPVPVRTKSKRIPFRPLAKTVLDLLKEQSEKAARKSSSATLASGPAQGLSEKGSSKKLASPTSSKNTLRGPGTKKKARVGPHVRQGKRRKSLKSHSGRMRPSAEQKRAGRSLP

SEQ ID NO: 30348 - protein, 51 aa, Homo sapiens
MKFFVFALILALMLSMTGADSHAKRHHGYKRKFHEKHHSHRGYRSNYLYDN

SEQ ID NO: 30349 - protein, 556 aa, Homo sapiens
MAREKEMQEFTRSFFRGRPDLSTLTHSIVRRRYLAHSGRSHLEPEEKQALKRLVEEELLKMQVDEAASREDKLDLTKKGKRPPTPCSDPERKRFRFNSESESGSEASSPDYFGPPAKNGVAAEVSPAKEENPRRASKAVEESSDEERQRDLPAQRGEESSEEEEKGYKGKTRKKPVVKKQAPGKASVSRKQAREESEESEAEPVQRTAKKVEGNKGTKSLKESEQESEEEILAQKKEQREEEVEEEEKEEDEEKGDWKPRTRSNGRRKSAREERSCKQKSQAKRLLGDSDSEEEQKEAASSGDDSGRDREPPVQRKSEDRTQLKGGKRLSGSSEDEEDSGKGEPTAKGSRKMARLGSTSGEESDLEREVSDSEAGGGPQGERKNRSSKKSSRKGRTRSSSSSSDGSPEAKGGKAGSGRRGEDHPAVMRLKRYIRACGAHRNYKKLLGSCCSHKERLSILRAELEALGMKGTPSLGKCRALKEQREEAAEVASLDVANIISGSGRPRRRTAWNPLGEAAPPGELYRRTLDSDEERPRPAPPDWSHMRGIISSDGESN

SEQ ID NO: 30350 - protein, 243 aa, Homo sapiens
MAREKEMQEFTRSFFRGRPDLSTLTHSIVRRRYLAHSGRSHLEPEEKQALKRLVEEELLKMQVDEAASREDKLDLTKKGKRPPTPCSDPERKRFRFNSESAGSGRRGEDHPAVMRLKRYIRACGAHRNYKKLLGSCCSHKERLSILRAELEALGMKGTPSLGKCRALKEQREEAAEVASLDVANIISGSGRPRRRTAWNPLGEAAPPGELYRRTLDSDEERPRPAPPDWSHMRGIISSDGESN

SEQ ID NO: 30351 - protein, 175 aa, Homo sapiens
MAREKEMQEFTRSFFRGRPDLSTLTHSIVRRRYLAHSGRSHLEPEEKQALKRLVEEELLKMQVDEAASREDKLDLTKKGKRPPTPCSDPERKRFRFNSESGWLRSPWRGPPGCDEAEALHSGLWCPSKLQEAVGLLLLTQGAPEYPPGRTGSARHEGYPFPREVSGPEGAEGGGS

SEQ ID NO: 30352 - protein, 838 aa, Homo sapiens
MPAERPAGSGGSEAPAMVEQLDTAVITPAMLEEEEQLEAAGLERERKMLEKARMSWDRESTEIRYRRLQHLLEKSNIYSKFLLTKMEQQQLEEQKKKEKLERKKESLKVKKGKNSIDASEEKPVMRKKRGREDESYNISEVMSKEEILSVAKKNKKENEDENSSSTNLCVEDLQKNKDSNSIIKDRLSETVRQNTKFFFDPVRKCNGQPVPFQQPKHFTGGVMRWYQVEGMEWLRMLWENGINGILADEMGLGKTVQCIATIALMIQRGVPGPFLVCGPLSTLPNWMAEFKRFTPDIPTMLYHGTQEERQKLVRNIYKRKGTLQIHPVVITSFEIAMRDRNALQHCYWKYLIVDEGHRIKNMKCRLIRELKRFNADNKLLLTGTPLQNNLSELWSLLNFLLPDVFDDLKSFESWFDITSLSETAEDIIAKEREQNVLHMLHQILTPFLLRRLKSDVALEVPPKREVVVYAPLSKKQEIFYTAIVNRTIANMFGSSEKETIELSPTGRPKRRTRKSINYSKIDDFPNELEKLISQIQPEVDRERAVVEVNIPVESEVNLKLQNIMMLLRKCCNHPYLIEYPIDPVTQEFKIDEELVTNSGKFLILDRMLPELKKRGHKVLLFSQMTSMLDILMDYCHLRDFNFSRLDGSMSYSEREKNMHSFNTDPEVFIFLVSTRAGGLGINLTAADTVIIYDSDWNPQSDLQAQDRCHRIGQTKPVVVYRLVTANTIDQKIVERAAAKRKLEKLIIHKNHFKGGQSGLNLSKNFLDPKELMELLKSRDYEREIKGSREKVISDKDLELLLDRSDLIDQMNASGPIKEKMGIFKILENSEDSSPECLF

SEQ ID NO: 30353 - protein, 822 aa, Homo sapiens
MVEQLDTAVITPAMLEEEEQLEAAGLERERKMLEKARMSWDRESTEIRYRRLQHLLEKSNIYSKFLLTKMEQQQLEEQKKKEKLERKKESLKVKKGKNSIDASEEKPVMRKKRGREDESYNISEVMSKEEILSVAKKNKKENEDENSSSTNLCVEDLQKNKDSNSIIKDRLSETVRQNTKFFFDPVRKCNGQPVPFQQPKHFTGGVMRWYQVEGMEWLRMLWENGINGILADEMGLGKTVQCIATIALMIQRGVPGPFLVCGPLSTLPNWMAEFKRFTPDIPTMLYHGTQEERQKLVRNIYKRKGTLQIHPVVITSFEIAMRDRNALQHCYWKYLIVDEGHRIKNMKCRLIRELKRFNADNKLLLTGTPLQNNLSELWSLLNFLLPDVFDDLKSFESWFDITSLSETAEDIIAKEREQNVLHMLHQILTPFLLRRLKSDVALEVPPKREVVVYAPLSKKQEIFYTAIVNRTIANMFGSSEKETIELSPTGRPKRRTRKSINYSKIDDFPNELEKLISQIQPEVDRERAVVEVNIPVESEVNLKLQNIMMLLRKCCNHPYLIEYPIDPVTQEFKIDEELVTNSGKFLILDRMLPELKKRGHKVLLFSQMTSMLDILMDYCHLRDFNFSRLDGSMSYSEREKNMHSFNTDPEVFIFLVSTRAGGLGINLTAADTVIIYDSDWNPQSDLQAQDRCHRIGQTKPVVVYRLVTANTIDQKIVERAAAKRKLEKLIIHKNHFKGGQSGLNLSKNFLDPKELMELLKSRDYEREIKGSREKVISDKDLELLLDRSDLIDQMNASGPIKEKMGIFKILENSEDSSPECLF

SEQ ID NO: 30354 - protein, 806 aa, Homo sapiens
MPAERPAGSGGSEAPAMVEQLDTAVITPAMLEEEEQLEAAGLERERKMLEKARMSWDRESTEIRYRRLQHLLEKSNIYSKFLLTKMEQQQLEEQKKKEKLERKKESLKVKKGKNSIDASEEKPVMRKKRGREDESYNISEVMSKEEILSVAKKNKKENEDENSSSTNLCVEDLQKNKDSNSIIKDRLSETVRQNTKFFFDPVRKCNGQPVPFQQPKHFTGGVMRWYQVEGMEWLRMLWENGINGILADEMGLGKTVQCIATIALMIQRGVPGPFLVCGPLSTLPNWMAEFKRFTPDIPTMLYHGTQEERQKLHCYWKYLIVDEGHRIKNMKCRLIRELKRFNADNKLLLTGTPLQNNLSELWSLLNFLLPDVFDDLKSFESWFDITSLSETAEDIIAKEREQNVLHMLHQILTPFLLRRLKSDVALEVPPKREVVVYAPLSKKQEIFYTAIVNRTIANMFGSSEKETIELSPTGRPKRRTRKSINYSKIDDFPNELEKLISQIQPEVDRERAVVEVNIPVESEVNLKLQNIMMLLRKCCNHPYLIEYPIDPVTQEFKIDEELVTNSGKFLILDRMLPELKKRGHKVLLFSQMTSMLDILMDYCHLRDFNFSRLDGSMSYSEREKNMHSFNTDPEVFIFLVSTRAGGLGINLTAADTVIIYDSDWNPQSDLQAQDRCHRIGQTKPVVVYRLVTANTIDQKIVERAAAKRKLEKLIIHKNHFKGGQSGLNLSKNFLDPKELMELLKSRDYEREIKGSREKVISDKDLELLLDRSDLIDQMNASGPIKEKMGIFKILENSEDSSPECLF

SEQ ID NO: 30355 - protein, 782 aa, Homo sapiens
MPAERPAGSGGSEAPAMVEQLDTAVITPAMLEEEEQLEAAGLERERKMLEKARMSWDRESTEIRYRRLQHLLEKSNIYSKFLLTKMEQQQLEEQKKKEKLERKKESLKVKKGKNSIDASEEKPVMRKKRGREDESYNISEVMSKEEILSVAKKNKKENEDENSSSTNLCVEDLQKNKDSNSIIKDRLSETVRQNTKFFFDPVRKCNGQPVPFQQPKHFTGGVMRWYQVEGMEWLRMLWENGINGILADEMGLGKTVQCIATIALMIQRGVPGPFLVCGPLSTLPNWMAEFKRFTPDIPTMLYHGTQEERQKLVRNIYKRKGTLQIHPVVITSFEIAMRDRNALQHCYWKYLIVDEGHRIKNMKCRLIRELKRFNADNKLLLTGTPLQNNLSELWSLLNFLLPDVFDDLKSFESWFDITSLSETAEDIIAKEREQNVLHMLHQILTPFLLRRLKSDVALEVPPKREVVVYAPLSKKQEIFYTAIVNRTIANMFGSSEKETIELSPTGRPKRRTRKSINYSKIDDFPNELEKLISQIQPEVDRERAVVEVNIPVESEVNLKLQNIMMLLRKCCNHPYLIEYPIDPVTQEFKIDEELVTNSGKFLILDRMLPELKKRGHKVLLFSQMTSMLDILMDYCHLRDFNFSRLDGSMSYSEREKNMHSFNTDPEVFIFLVSTRAGGLGINLTAADTVIIYDSDWNPQSDLQAQDRCHRIGQTKPVVVYRLVTANTIDQKIVERAAAKRKLEKLIIHKNHFKGGQSGLNLSKNFLDPKELMELLKSRDYER

SEQ ID NO: 30356 - protein, 740 aa, Homo sapiens
MPAERPAGSGGSEAPAMVEQLDTAVITPAMLEEEEQLEAAGLERERKMLEKARMSWDRESTEIRYRRLQHLLEKSNIYSKFLLTKMEQQQLEEQKKKEKLERKKESLKVKKGKNSIDASEEKPVMRKKRGREDESYNISEVMSKEEILSVAKKNKKENEDENSSSTNLCVEDLQKNKDSNSIIKDRLSETVRQNTKFFFDPVRKCNGQPVPFQQPKHFTGGVMRWYQVEGMEWLRMLWENGINGILADEMGLGKTVQCIATIALMIQRGVPGPFLVCGPLSTLPNWMAEFKRFTPDIPTMLYHGTQEERQKLVRNIYKRKGTLQIHPVVITSFEIAMRDRNALQILTPFLLRRLKSDVALEVPPKREVVVYAPLSKKQEIFYTAIVNRTIANMFGSSEKETIELSPTGRPKRRTRKSINYSKIDDFPNELEKLISQIQPEVDRERAVVEVNIPVESEVNLKLQNIMMLLRKCCNHPYLIEYPIDPVTQEFKIDEELVTNSGKFLILDRMLPELKKRGHKVLLFSQMTSMLDILMDYCHLRDFNFSRLDGSMSYSEREKNMHSFNTDPEVFIFLVSTRAGGLGINLTAADTVIIYDSDWNPQSDLQAQDRCHRIGQTKPVVVYRLVTANTIDQKIVERAAAKRKLEKLIIHKNHFKGGQSGLNLSKNFLDPKELMELLKSRDYEREIKGSREKVISDKDLELLLDRSDLIDQMNASGPIKEKMGIFKILENSEDSSPECLF

SEQ ID NO: 30357 - protein, 708 aa, Homo sapiens
MPAERPAGSGGSEAPAMVEQLDTAVITPAMLEEEEQLEAAGLERERKMLEKARMSWDRESTEIRYRRLQHLLEKSNIYSKFLLTKMEQQQLEEQKKKEKLERKKESLKVKKGKNSIDASEEKPVMRKKRGREDESYNISEVMSKEEILSVAKKNKKENEDENSSSTNLCVEDLQKNKDSNSIIKDRLSETVRQNTKFFFDPVRKCNGQPVPFQQPKHFTGGVMRWYQVEGMEWLRMLWENGINGILADEMGLGKTVQCIATIALMIQRGVPGPFLVCGPLSTLPNWMAEFKRFTPDIPTMLYHGTQEERQKLILTPFLLRRLKSDVALEVPPKREVVVYAPLSKKQEIFYTAIVNRTIANMFGSSEKETIELSPTGRPKRRTRKSINYSKIDDFPNELEKLISQIQPEVDRERAVVEVNIPVESEVNLKLQNIMMLLRKCCNHPYLIEYPIDPVTQEFKIDEELVTNSGKFLILDRMLPELKKRGHKVLLFSQMTSMLDILMDYCHLRDFNFSRLDGSMSYSEREKNMHSFNTDPEVFIFLVSTRAGGLGINLTAADTVIIYDSDWNPQSDLQAQDRCHRIGQTKPVVVYRLVTANTIDQKIVERAAAKRKLEKLIIHKNHFKGGQSGLNLSKNFLDPKELMELLKSRDYEREIKGSREKVISDKDLELLLDRSDLIDQMNASGPIKEKMGIFKILENSEDSSPECLF

SEQ ID NO: 30358 - protein, 345 aa, Homo sapiens
MPAERPAGSGGSEAPAMVEQLDTAVITPAMLEEEEQLEAAGLERERKMLEKARMSWDRESTEIRYRRLQHLLEKSNIYSKFLLTKMEQQQLEEQKKKEKLERKKESLKVKKGKNSIDASEEKPVMRKKRGREDESYNISEVMSKEEILSVAKKNKKENEDENSSSTNLCVEDLQKNKDSNSIIKDRLSETVRQNTKFFFDPVRKCNGQPVPFQQPKHFTGGVMRWYQVEGMEWLRMLWENGINGILADEMGLGKTVQCIATIALMIQRGVPGPFLVCGPLSTLPNWMAEFKRFTPDIPTMLYHGTQEERQKLVRNIYKRKGTLQIHPVVITSFEIAMRDRNALQL

SEQ ID NO: 30359 - protein, 315 aa, Homo sapiens
MPAERPAGSGGSEAPAMVEQLDTAVITPAMLEEEEQLEAAGLERERKMLEKARMSWDRESTEIRYRRLQHLLEKSNIYSKFLLTKMEQQQLEEQKKKEKLERKKESLKVKKGKNSIDASEEKPVMRKKRGREDESYNISEVMSKEEILSVAKKNKKENEDENSSSTNLCVEDLQKNKDSNSIIKDRLSETVRQNTKFFFDPVRKCNGQPVPFQQPKHFTGGVMRWYQVEGMEWLRMLWENGINGILADEMGLGKTVQCIATIALMIQRGVPGPFLVCGPLSTLPNWMAEFKRFTPDIPTMLYHGTQEERQKLIYL

SEQ ID NO: 30360 - protein, 129 aa, Homo sapiens
MPAERPAGSGGSEAPAMVEQLDTAVITPAMLEEEEQLEAAGLERERKMLEKARMSWDRESTEIRYRRLQHLLEKSNIYSKFLLTKMEQQQLEEQKKKEKLERKKESLKVKKGKNSIDASEEKPGNFVCG

SEQ ID NO: 30361 - protein, 4834 aa, Homo sapiens
MPSESFCLAAQARLDSKWLKTDIQLAFTRDGLCGLWNEMVKDGEIVYTGTESTQNGELPPRKDDSVEPSGTKKEDLNDKEKKDEEETPAPIYRAKSILDSWVWGKQPDVNELKECLSVLVKEQQALAVQSATTTLSALRLKQRLVILERYFIALNRTVFQENVKVKWKSSGISLPPVDKKSSRPAGKGVEGLARVGSRAALSFAFAFLRRAWRSGEDADLCSELLQESLDALRALPEASLFDESTVSSVWLEVVERATRFLRSVVTGDVHGTPATKGPGSIPLQDQHLALAILLELAVQRGTLSQMLSAILLLLQLWDSGAQETDNERSAQGTSAPLLPLLQRFQSIICRKDAPHSEGDMHLLSGPLSPNESFLRYLTLPQDNELAIDLRQTAVVVMAHLDRLATPCMPPLCSSPTSHKGSLQEVIGWGLIGWKYYANVIGPIQCEGLANLGVTQIACAEKRFLILSRNGRVYTQAYNSDTLAPQLVQGLASRNIVKIAAHSDGHHYLALAATGEVYSWGCGDGGRLGHGDTVPLEEPKVISAFSGKQAGKHVVHIACGSTYSAAITAEGELYTWGRGNYGRLGHGSSEDEAIPMLVAGLKGLKVIDVACGSGDAQTLAVTENGQVWSWGDGDYGKLGRGGSDGCKTPKLIEKLQDLDVVKVRCGSQFSIALTKDGQVYSWGKGDNQRLGHGTEEHVRYPKLLEGLQGKKVIDVAAGSTHCLALTEDSEVHSWGSNDQCQHFDTLRVTKPEPAALPGLDTKHIVGIACGPAQSFAWSSCSEWSIGLRVPFVVDICSMTFEQLDLLLRQVSEGMDGSADWPPPQEKECVAVATLNLLRLQLHAAISHQVDPEFLGLGLGSILLNSLKQTVVTLASSAGVLSTVQSAAQAVLQSGWSVLLPTAEERARALSALLPCAVSGNEVNISPGRRFMIDLLVGSLMADGGLESALHAAITAEIQDIEAKKEAQKEKEIDEQEANASTFHRSRTPLDKDLINTGICESSGKQCLPLVQLIQQLLRNIASQTVARLKDVARRISSCLDFEQHSRERSASLDLLLRFQRLLISKLYPGESIGQTSDISSPELMGVGSLLKKYTALLCTHIGDILPVAASIASTSWRHFAEVAYIVEGDFTGVLLPELVVSIVLLLSKNAGLMQEAGAVPLLGGLLEHLDRFNHLAPGKERDDHEELAWPGIMESFFTGQNCRNNEEVTLIRKADLENHNKDGGFWTVIDGKVYDIKDFQTQSLTGNSILAQFAGEDPVVALEAALQFEDTRESMHAFCVGQYLEPDQEIVTIPDLGSLSSPLIDTERNLGLLLGLHASYLAMSTPLSPVEIECAKWLQSSIFSGGLQTSQIHYSYNEEKDEDHCSSPGGTPASKSRLCSHRRALGDHSQAFLQAIADNNIQDHNVKDFLCQIERYCRQCHLTTPIMFPPEHPVEEVGRLLLCCLLKHEDLGHVALSLVHAGALGIEQVKHRTLPKSVVDVCRVVYQAKCSLIKTHQEQGRSYKEVCAPVIERLRFLFNELRPAVCNDLSIMSKFKLLSSLPRWRRIAQKIIRERRKKRVPKKPESTDDEEKIGNEESDLEEACILPHSPINVDKRPIAIKSPKDKWQPLLSTVTGVHKYKWLKQNVQGLYPQSPLLSTIAEFALKEEPVDVEKMRKCLLKQLERAEVRLEGIDTILKLASKNFLLPSVQYAMFCGWQRLIPEGIDIGEPLTDCLKDVDLIPPFNRMLLEVTFGKLYAWAVQNIRNVLMDASAKFKELGIQPVPLQTITNENPSGPSLGTIPQARFLLVMLSMLTLQHGANNLDLLLNSGMLALTQTALRLIGPSCDNVEEDMNASAQGASATVLEETRKETAPVQLPVSGPELAAMMKIGTRVMRGVDWKWGDQDGPPPGLGRVIGELGEDGWIRVQWDTGSTNSYRMGKEGKYDLKLAELPAAAQPSAEDSDTEDDSEAEQTERNIHPTAMMFTSTINLLQTLCLSAGVHAEIMQSEATKTLCGLLRMLVESGTTDKTSSPNRLVYREQHRSWCTLGFVRSIALTPQVCGALSSPQWITLLMKVVEGHAPFTATSLQRQILAVHLLQAVLPSWDKTERARDMKCLVEKLFDFLGSLLTTCSSDVPLLRESTLRRRRVRPQASLTATHSSTLAEEVVALLRTLHSLTQWNGLINKYINSQLRSITHSFVGRPSEGAQLEDYFPDSENPEVGGLMAVLAVIGGIDGRLRLGGQVMHDEFGEGTVTRITPKGKITVQFSDMRTCRVCPLNQLKPLPAVAFNVNNLPFTEPMLSVWAQLVNLAGSKLEKHKIKKSTKQAFAGQVDLDLLRCQQLKLYILKAGRALLSHQDKLRQILSQPAVQETGTVHTDDGAVVSPDLGDMSPEGPQPPMILLQQLLASATQPSPVKAIFDKQELEAAALAVCQCLAVESTHPSSPGFEDCSSSEATTPVAVQHIRPARVKRRKQSPVPALPIVVQLMEMGFSRRNIEFALKSLTGASGNASSLPGVEALVGWLLDHSDIQVTELSDADTVSDEYSDEEVVEDVDDAAYSMSTGAVVTESQTYKKRADFLSNDDYAVYVRENIQVGMMVRCCRAYEEVCEGDVGKVIKLDRDGLHDLNVQCDWQQKGGTYWVRYIHVELIGYPPPSSSSHIKIGDKVRVKASVTTPKYKWGSVTHQSVGVVKAFSANGKDIIVDFPQQSHWTGLLSEMELVPSIHPGVTCDGCQMFPINGSRFKCRNCDDFDFCETCFKTKKHNTRHTFGRINEPGQSAVFCGRSGKQLKRCHSSQPGMLLDSWSRMVKSLNVSSSVNQASRLIDGSEPCWQSSGSQGKHWIRLEIFPDVLVHRLKMIVDPADSSYMPSLVVVSGGNSLNNLIELKTININPSDTTVPLLNDCTEYHRYIEIAIKQCRSSGIDCKIHGLILLGRIRAEEEDLAAVPFLASDNEEEEDEKGNSGSLIRKKAAGLESAATIRTKVFVWGLNDKDQLGGLKGSKIKVPSFSETLSALNVVQVAGGSKSLFAVTVEGKVYACGEATNGRLGLGISSGTVPIPRQITALSSYVVKKVAVHSGGRHATALTVDGKVFSWGEGDDGKLGHFSRMNCDKPRLIEALKTKRIRDIACGSSHSAALTSSGELYTWGLGEYGRLGHGDNTTQLKPKMVKVLLGHRVIQVACGSRDAQTLALTDEGLVFSWGDGDFGKLGRGGSEGCNIPQNIERLNGQGVCQIECGAQFSLALTKSGVVWTWGKGDYFRLGHGSDVHVRKPQVVEGLRGKKIVHVAVGALHCLAVTDSGQVYAWGDNDHGQQGNGTTTVNRKPTLVQGLEGQKITRVACGSSHSVAWTTVDVATPSVHEPVLFQTARDPLGASYLGVPSDADSSAASNKISGASNSKPNRPSLAKILLSLDGNLAKQQALSHILTALQIMYARDAVVGALMPAAMIAPVECPSFSSAAPSDASAMASPMNGEECMLAVDIEDRLSPNPWQEKREIVSSEDAVTPSAVTPSAPSASARPFIPVTDDLGAASIIAETMTKTKEDVESQNKAAGPEPQALDEFTSLLIADDTRVVVDLLKLSVCSRAGDRGRDVLSAVLSGMGTAYPQVADMLLELCVTELEDVATDSQSGRLSSQPVVVESSHPYTDDTSTSGTVKIPGAEGLRVEFDRQCSTERRHDPLTVMDGVNRIVSVRSGREWSDWSSELRIPGDELKWKFISDGSVNGWGWRFTVYPIMPAAGPKELLSDRCVLSCPSMDLVTCLLDFRLNLASNRSIVPRLAASLAACAQLSALAASHRMWALQRLRKLLTTEFGQSININRLLGENDGETRALSFTGSALAALVKGLPEALQRQFEYEDPIVRGGKQLLHSPFFKVLVALACDLELDTLPCCAETHKWAWFRRYCMASRVAVALDKRTPLPRLFLDEVAKKIRELMADSENMDVLHESHDIFKREQDEQLVQWMNRRPDDWTLSAGGSGTIYGWGHNHRGQLGGIEGAKVKVPTPCEALATLRPVQLIGGEQTLFAVTADGKLYATGYGAGGRLGIGGTESVSTPTLLESIQHVFIKKVAVNSGGKHCLALSSEGEVYSWGEAEDGKLGHGNRSPCDRPRVIESLRGIEVVDVAAGGAHSACVTAAGDLYTWGKGRYGRLGHSDSEDQLKPKLVEALQGHRVVDIACGSGDAQTLCLTDDDTVWSWGDGDYGKLGRGGSDGCKVPMKIDSLTGLGVVKVECGSQFSVALTKSGAVYTWGKGDYHRLGHGSDDHVRRPRQVQGLQGKKVIAIATGSLHCVCCTEDGEVYTWGDNDEGQLGDGTTNAIQRPRLVAALQGKKVNRVACGSAHTLAWSTSKPASAGKLPAQVPMEYNHLQEIPIIALRNRLLLLHHLSELFCPCIPMFDLEGSLDETGLGPSVGFDTLRGILISQGKEAAFRKVVQATMVRDRQHGPVVELNRIQVKRSRSKGGLAGPDGTKSVFGQMCAKMSSFGPDSLLLPHRVWKVKFVGESVDDCGGGYSESIAEICEELQNGLTPLLIVTPNGRDESGANRDCYLLSPAARAPVHSSMFRFLGVLLGIAIRTGSPLSLNLAEPVWKQLAGMSLTIADLSEVDKDFIPGLMYIRDNEATSEEFEAMSLPFTVPSASGQDIQLSSKHTHITLDNRAEYVRLAINYRLHEFDEQVAAVREGMARVVPVPLLSLFTGYELETMVCGSPDIPLHLLKSVATYKGIEPSASLIQWFWEVMESFSNTERSLFLRFVWGRTRLPRTIADFRGRDFVIQVLDKYNPPDHFLPESYTCFFLLKLPRYSCKQVLEEKLKYAIHFCKSIDTDDYARIALTGEPAADDSSDDSDNEDVDSFASDSTQDYLTGH

SEQ ID NO: 30362 - protein, 1022 aa, Homo sapiens
MYFCWGADSRELQRRRTAGSPGAELLQAASGERHSLLLLTNHRVLSCGDNSRGQLGRRGAQRGELPEPIQALETLIVDLVSCGKEHSLAVCHKGRVFAWGAGSEGQLGIGEFKEISFTPKKIMTLNDIKIIQVSCGHYHSLALSKDSQVFSWGKNSHGQLGLGKEFPSQASPQRVRSLEGIPLAQVAAGGAHSFALSLCGTSFGWGSNSAGQLALSGRNVPVQSNKPLSVGALKNLGVVYISCGDAHTAVLTQDGKVFTFGDNRSGQLGYSPTPEKRGPQLVERIDGLVSQIDCGSYHTLAYVHTTGQVVSFGHGPSDTSKPTHPEALTENFDISCLISAEDFVDVQVKHIFAGTYANFVTTHQDTSSTRAPGKTLPEISRISQSMAEKWIAVKRRSTEHEMAKSEIRMIFSSPACLTASFLKKRGTGETTSIDVDLEMARDTFKKLTKKEWISSMITTCLEDDLLRALPCHSPHQEALSVFLLLPECPVMHDSKNWKNLVVPFAKAVCEMSKQSLQVLKKCWAFLQESSLNPLIQMLKAAIISQLLHQTKTEQDHCNVKALLGMMKELHKVNKANCRLPENTFNINELSNLLNFYIDRGRQLFRDNHLIPAETPSPVIFSDFPFIFNSLSKIKLLQADSHIKMQMSEKKAYMLMHETILQKKDEFPPSPRFILRVRRSRLVKDALRQLSQAEATDFCKVLVVEFINEICPESGGVSSEFFHCMFEEMTKPEYGMFMYPEMGSCMWFPAKPKPEKKRYFLFGMLCGLSLFNLNVANLPFPLALYKKLLDQKPSLEDLKELSPRLGKSLQEVLDDAADDIGDALCIRFSIHWDQNDVDLIPNGISIPVDQTNKRDYVSKYIDYIFNVSVKAVYEEFQRGFYRVCEKEILRHFYPEELMTAIIGNTDYDWKQFEQNSKYEQGYQKSHPTIQLFWKAFHKLTLDEKKKFLFFLTGRDRLHARGIQKMEIVFRCPETFSERDHPTSITCHNILSLPKYSTMERMEEALQVAINNNRGFVSPMLTQS

SEQ ID NO: 30363 - protein, 986 aa, Homo sapiens
MYFCWGADSRELQRRRTAGSPGAELLQAASGERHSLLLLTNHRVLSCGDNSRGQLGRRGAQRGELPEPIQALETLIVDLVSCGKEHSLAVCHKGRVFAWGAGSEGQLGIGEFKEISFTPKKIMTLNDIKIIQVSCGHYHSLALSKDSQVFSWGKNSHGQLGLGKEFPSQASPQRVRSLEGIPLAQVAAGGAHSFALSLCGTSFGWGSNSAGQLALSGRNVPVQSNKPLSVGALKNLGVVYISCGDAHTAVLTQDGKVFTFGDNRSGQLGYSPTPEKRGPQLVERIDGLVSQIDCGSYHTLAYVHTTGQVVSFGHGPSDTSKPTHPEALTENFDISCLISAEDFVDVQVKHIFAGTYANFVTTHQDTSSTRAPGKTLPEISRISQSMAEKWIAVKRRSTEHEMAKSEIRMIFSSPACLTASFLKKRGTGETTSIDVDLEMARDTFKKLTKKEWISSMITTCLEDDLLRALPCHSPHQEALSVFLLLPECPVMHDSKNWKNLVVPFAKAVCEMSKQSLQVLKKCWAFLQESSLNPLIQMLKAAIISQLLHQTKTEQDHCNVKALLGMMKELHKVNKANCRLPENTFNINELSNLLNFYIDRGRQLFRDNHLMSEKKAYMLMHETILQKKDEFPPSPRFILRVRRSRLVKDALRQLSQAEATDFCKVLVVEFINEICPESGGVSSEFFHCMFEEMTKPEYGMFMYPEMGSCMWFPAKPKPEKKRYFLFGMLCGLSLFNLNVANLPFPLALYKKLLDQKPSLEDLKELSPRLGKSLQEVLDDAADDIGDALCIRFSIHWDQNDVDLIPNGISIPVDQTNKRDYVSKYIDYIFNVSVKAVYEEFQRGFYRVCEKEILRHFYPEELMTAIIGNTDYDWKQFEQNSKYEQGYQKSHPTIQLFWKAFHKLTLDEKKKFLFFLTGRDRLHARGIQKMEIVFRCPETFSERDHPTSITCHNILSLPKYSTMERMEEALQVAINNNRGFVSPMLTQS

SEQ ID NO: 30364 - protein, 306 aa, Homo sapiens
MYFCWGADSRELQRRRTAGSPGAELLQAASGERHSLLLLTNHRVLSCGDNSRGQLGRRGAQRGELPEPIQALETLIVDLVSCGKEHSLAVCHKGRVFAWGAGSEGQLGIGEFKEISFTPKKIMTLNDIKIIQVSCGHYHSLALSKDSQVFSWGKNSHGQLGLGKEFPSQASPQRVRSLEGIPLAQVAAGGAHSFALSLCGTSFGWGSNSAGQLALSGRNVPVQSNKPLSVGALKNLGVVYISCGDAHTAVLTQDGKVFTFGDNRSGQLGYSPTPEKRGPQLVERIDGLVSQIDCGRNSKHGFMTFF

SEQ ID NO: 30365 - protein, 1057 aa, Homo sapiens
MLCWGNASFGQLGLGGIDEEIVLEPRKSDFFINKRVRDVGCGLRHTVFVLDDGTVYTCGCNDLGQLGHEKSRKKPEQVVALDAQNIVAVSCGEAHTLALNDKGQVYAWGLDSDGQLGLVGSEECIRVPRNIKSLSDIQIVQVACGYYHSLALSKASEVFCWGQNKYGQLGLGTDCKKQTSPQLLKSLLGIPFMQVAAGGAHSFVLTLSGAIFGWGRNKFGQLGLNDENDRYVPNLLKSLRSQKIVYICCGEDHTAALTKEGGVFTFGAGGYGQLGHNSTSHEINPRKVFELMGSIVTEIACGRQHTSAFVPSSGRIYSFGLGGNGQLGTGSTSNRKSPFTVKGNWYPYNGQCLPDIDSEEYFCVKRIFSGGDQSFSHYSSPQNCGPPDDFRCPNPTKQIWTVNEALIQKWLSYPSGRFPVEIANEIDGTFSSSGCLNGSFLAVSNDDHYRTGTRFSGVDMNAARLLFHKLIQPDHPQISQQVAASLEKNLIPKLTSSLPDVEALRFYLTLPECPLMSDSNNFTTIAIPFGTALVNLEKAPLKVLENWWSVLEPPLFLKIVELFKEVVVHLLKLYKIGIPPSERRIFNSFLHTALKVLEILHRVNEKMGQIIQYDKFYIHEVQELIDIRNDYINWVQQQAYGMDVNHGLTELADIPVTICTYPFVFDAQAKTTLLQTDAVLQMQMAIDQAHRQNVSSLFLPVIESVNPCLILVVRRENIVGDAMEVLRKTKNIDYKKPLKVIFVGEDAVDAGGVRKEFFLLIMRELLDPKYGMFRYYEDSRLIWFSDKTFEDSDLFHLIGVICGLAIYNCTIVDLHFPLALYKKLLKKKPSLDDLKELMPDVGRSMQQLLDYPEDDIEETFCLNFTITVENFGATEVKELVLNGADTAVNKQNRQEFVDAYVDYIFNKSVASLFDAFHAGFHKVCGGKVLLLFQPNELQAMVIGNTNYDWKELEKNTEYKGEYWAEHPTIKIFWEVFHELPLEKKKQFLLFLTGSDRIPILGMKSLKLVIQSTGGGEEYLPVSHTCFNLLDLPKYTEKETLRSKLIQAIDHNEGFSLI

SEQ ID NO: 30366 - protein, 1049 aa, Homo sapiens
MLCWGNASFGQLGLGGIDEEIVLEPRKSDFFINKRVRDVGCGLRHTVFVLDDGTVYTCGCNDLGQLGHEKSRKKPEQVVALDAQNIVAVSCGEAHTLALNDKGQVYAWGLDSDGQLGLVGSEECIRVPRNIKSLSDIQIVQVACGYYHSLALSKASEVFCWGQNKYGQLGLGTDCKKQTSPQLLKSLLGIPFMQVAAGGAHSFVLTLSGAIFGWGRNKFGQLGLNDENDRYVPNLLKSLRSQKIVYICCGEDHTAALTKEGGVFTFGAGGYGQLGHNSTSHEINPRKVFELMGSIVTEIACGRQHTSAFVPSSGRIYSFGLGGNGQLGTGSTSNRKSPFTVKGNWYPYNGQCLPDIDSEEYFCVKRIFSGGDQSFSHYSSPQNCGPPDDFRCPNPTKQIWTVNEALIQKWLSYPSGRFPVEIANEIDGTFSSSGCLNGSFLAVSNDDHYRTGTRFSGVDMNAARLLFHKLIQPDHPQISQQVAASLEKNLIPKLTSSLPDVEALRFYLTLPECPLMSDSNNFTTIAIPFGTALVNLEKAPLKVLENWWSVLEPPLFLKIVELFKEVVVHLLKLYKIGIPPSERRIFNSFLHTALKVLEILHRVNEKMGQIIQYDKFYIHEVQELIDIRNDYINWVQQQAYGMLADIPVTICTYPFVFDAQAKTTLLQTDAVLQMQMAIDQAHRQNVSSLFLPVIESVNPCLILVVRRENIVGDAMEVLRKTKNIDYKKPLKVIFVGEDAVDAGGVRKEFFLLIMRELLDPKYGMFRYYEDSRLIWFSDKTFEDSDLFHLIGVICGLAIYNCTIVDLHFPLALYKKLLKKKPSLDDLKELMPDVGRSMQQLLDYPEDDIEETFCLNFTITVENFGATEVKELVLNGADTAVNKQNRQEFVDAYVDYIFNKSVASLFDAFHAGFHKVCGGKVLLLFQPNELQAMVIGNTNYDWKELEKNTEYKGEYWAEHPTIKIFWEVFHELPLEKKKQFLLFLTGSDRIPILGMKSLKLVIQSTGGGEEYLPVSHTCFNLLDLPKYTEKETLRSKLIQAIDHNEGFSLI

SEQ ID NO: 30367 - protein, 979 aa, Homo sapiens
MLCWGNASFGQLGLGGIDEEIVLEPRKSDFFINKRVRDVGCGLRHTVFVLDDGTVYTCGCNDLGQLGHEKSRKKPEQVVALDAQNIVAVSCGEAHTLALNDKGQVYAWGLDSDGQLGLVGSEECIRVPRNIKSLSDIQIVQVACGYYHSLALSKASEVFCWGQNKYGQLGLGTDCKKQTSPQLLKSLLGIPFMQVAAGGAHSFVLTLSGAIFGWGRNKFGQLGLNDENDRYVPNLLKSLRSQKIVYICCGEDHTAALTKEGGVFTFGAGGYGQLGHNSTSHEINPRKVFELMGSIVTEIACGRQHTSAFVPSSGRIYSFGLGGNGQLGTGSTSNRKSPFTVKGNWYPYNGQCLPDIDSEEYFCVKRIFSGGDQSFSHYSSPQNCGPPDDFRCPNPTKQIWTVNEALIQKWLSYPSGRFPVEIANEIDGTFSSSGCLNGSFLAVSNDDHYRTGTRFSGVDMNAARLLFHKLIQPDHPQISQQVAASLEKNLIPKLTSSLPDVEALRFYLTLPECPLMSDSNNFTTIAIPFGTALVNLEKAPLKVLENWWSVLEPPLFLKIVELFKEVVVHLLKLYKIGIPPSERRIFNSFLHTALKVLEILHRVNEKMGQIIQYDKFYIHEVQELIDIRNDYINWVQQQAYGMDVNHGLTELADIPVTICTYPFVFDAQAKTTLLQTDAVLQMQMAIDQAHRQNVSSLFLPVIESVNPCLILVVRRENIVGDAMEVLRKTKNIDYKKPLKVIFVGEDAVDAGGVRKEFFLLIMRELLDPKYGMFRYYEDSRLIWFSDKITVENFGATEVKELVLNGADTAVNKQNRQEFVDAYVDYIFNKSVASLFDAFHAGFHKVCGGKVLLLFQPNELQAMVIGNTNYDWKELEKNTEYKGEYWAEHPTIKIFWEVFHELPLEKKKQFLLFLTGSDRIPILGMKSLKLVIQSTGGGEEYLPVSHTCFNLLDLPKYTEKETLRSKLIQAIDHNEGFSLI

SEQ ID NO: 30368 - protein, 110 aa, Homo sapiens
MLCWGNASFGQLGLGGIDEEIVLEPRKSDFFINKRVRDVGCGLRHTVFVLDDGTVYTCGCNDLGQLGHEKSRKKPEFRSCFPGRSAMAPSRLTATSASQVQAILLPQPPE

SEQ ID NO: 30369 - protein, 117 aa, Homo sapiens
MLCWGNASFGQLGLGGIDEEIVLEPRKSDFFINKRVRDVGCGLRHTVFVLDDGTVYTCGCNDLGQLGHEKSRKKPEILKVCQISRLYRLLVVTIIHLHFLKQVKSSVGDRINMANWV

SEQ ID NO: 30370 - protein, 947 aa, Homo sapiens
MCVDSLVRICSGLSYGRIRNIKSLSDIQIVQVACGYYHSLALSKASEVFCWGQNKYGQLGLGTDCKKQTSPQLLKSLLGIPFMQVAAGGAHSFVLTLSGAIFGWGRNKFGQLGLNDENDRYVPNLLKSLRSQKIVYICCGEDHTAALTKEGGVFTFGAGGYGQLGHNSTSHEINPRKVFELMGSIVTEIACGRQHTSAFVPSSGRIYSFGLGGNGQLGTGSTSNRKSPFTVKGNWYPYNGQCLPDIDSEEYFCVKRIFSGGDQSFSHYSSPQNCGPPDDFRCPNPTKQIWTVNEALIQKWLSYPSGRFPVEIANEIDGTFSSSGCLNGSFLAVSNDDHYRTGTRFSGVDMNAARLLFHKLIQPDHPQISQQVAASLEKNLIPKLTSSLPDVEALRFYLTLPECPLMSDSNNFTTIAIPFGTALVNLEKAPLKVLENWWSVLEPPLFLKIVELFKEVVVHLLKLYKIGIPPSERRIFNSFLHTALKVLEILHRVNEKMGQIIQYDKFYIHEVQELIDIRNDYINWVQQQAYGMDVNHGLTELADIPVTICTYPFVFDAQAKTTLLQTDAVLQMQMAIDQAHRQNVSSLFLPVIESVNPCLILVVRRENIVGDAMEVLRKTKNIDYKKPLKVIFVGEDAVDAGGVRKEFFLLIMRELLDPKYGMFRYYEDSRLIWFSDKTFEDSDLFHLIGVICGLAIYNCTIVDLHFPLALYKKLLKKKPSLDDLKELMPDVGRSMQQLLDYPEDDIEETFCLNFTITVENFGATEVKELVLNGADTAVNKQNRQEFVDAYVDYIFNKSVASLFDAFHAGFHKVCGGKVLLLFQPNELQAMVIGNTNYDWKELEKNTEYKGEYWAEHPTIKIFWEVFHELPLEKKKQFLLFLTGSDRIPILGMKSLKLVIQSTGGGEEYLPVSHTCFNLLDLPKYTEKETLRSKLIQAIDHNEGFSLI

SEQ ID NO: 30371 - protein, 493 aa, Homo sapiens
MLPRWELALYLLASLGFHFYSFYEVYKVSREHEEELDQEFELETDTLFGGLKKDATDFEWSFWMEWGKQWLVWLLLGHMVVSQMATLLARKHRPWILMLYGMWACWCVLGTPGVAMVLLHTTISFCVAQFRSQLLTWLCSLLLLSTLRLQGVEEVKRRWYKTENEYYLLQFTLTVRCLYYTSFSLELCWQQLPAASTSYSFPWMLAYVFYYPVLHNGPILSFSEFIKQMQQQEHDSLKASLCVLALGLGRLLCWWWLAELMAHLMYMHAIYSSIPLLETVSCWTLGGLALAQVLFFYVKYLVLFGVPALLMRLDGLTPPALPRCVSTMFSFTGMWRYFDVGLHNFLIRYVYIPVGGSQHGLLGTLFSTAMTFAFVSYWHGGYDYLWCWAALNWLGVTVENGVRRLVETPCIQDSLARYFSPQARRRFHAALASCSTSMLILSNLVFLGGNEVGKTYWNRIFIQGWPWVTLSVLGFLYCYSHVGIAWAQTYATD

SEQ ID NO: 30372 - protein, 453 aa, Homo sapiens
MLPRWELALYLLASLGFHFYSFYEVYKVSREHEEELDQEFELETDTLFGGLKKDATDFEWSFWMEWGKQWLVWLLLGHMVVSQMATLLARKRRWYKTENEYYLLQFTLTVRCLYYTSFSLELCWQQLPAASTSYSFPWMLAYVFYYPVLHNGPILSFSEFIKQMQQQEHDSLKASLCVLALGLGRLLCWWWLAELMAHLMYMHAIYSSIPLLETVSCWTLGGLALAQVLFFYVKYLVLFGVPALLMRLDGLTPPALPRCVSTMFSFTGMWRYFDVGLHNFLIRYVYIPVGGSQHGLLGTLFSTAMTFAFVSYWHGGYDYLWCWAALNWLGVTVENGVRRLVETPCIQDSLARYFSPQARRRFHAALASCSTSMLILSNLVFLGGNEVGKTYWNRIFIQGGLFLFFLLNPCWETAFQGFPVFLHFLQTEVLATFVPNYFSWNICIENTSELSSY

SEQ ID NO: 30373 - protein, 518 aa, Homo sapiens
MLPRWELALYLLASLGFHFYSFYEVYKVSREHEEELDQEFELETDTLFGGLKKDATDFEWSFWMEWGKQWLVWLLLGHMVVSQMATLLARKHRPWILMLYGMWACWCVLGTPGVAMVLLHTTISFCVAQFRSQLLTWLCSLLLLSTLRLQGVEEVKRRWYKTENEYYLLQFTLTVRCLYYTSFSLELCWQQLPAASTSYSFPWMLAYVFYYPVLHNGPILSFSEFIKQMQQQEHDSLKASLCVLALGLGRLLCWWWLAELMAHLMYMHAIYSSIPLLETVSCWTLGGLALAQVLFFYVKYLVLFGVPALLMRLDGLTPPALPRCVSTMFSFTGMWRYFDVGLHNFLIRYVYIPVGGSQHGLLGTLFSTAMTFAFVSYWHGGYDYLWCWAALNWLGVTVENGVRRLVETPCIQDSLARYFSPQARRRFHAALASCSTSMLILSNLVFLGGNEVGKTYWNRIFIQGGLFLFFLLNPCWETAFQGFPVFLHFLQTEVLATFVPNYFSWNICIENTSELSSY

SEQ ID NO: 30374 - protein, 82 aa, Homo sapiens
MTFAFVSYWHGGYDYLWCWAALNWLGVTVENGVRRLVETPCIQDSLVSRILAPVLGDSGTRQIRFIRDGAIRFPAPTMGPFY

SEQ ID NO: 30375 - protein, 428 aa, Homo sapiens
MLPRWELALYLLASLGFHFYSFYEVYKVSREHEEELDQEFELETDTLFGGLKKDATDFEWSFWMEWGKQWLVWLLLGHMVVSQMATLLARKRRWYKTENEYYLLQFTLTVRCLYYTSFSLELCWQQLPAASTSYSFPWMLAYVFYYPVLHNGPILSFSEFIKQMQQQEHDSLKASLCVLALGLGRLLCWWWLAELMAHLMYMHAIYSSIPLLETVSCWTLGGLALAQVLFFYVKYLVLFGVPALLMRLDGLTPPALPRCVSTMFSFTGMWRYFDVGLHNFLIRYVYIPVGGSQHGLLGTLFSTAMTFAFVSYWHGGYDYLWCWAALNWLGVTVENGVRRLVETPCIQDSLARYFSPQARRRFHAALASCSTSMLILSNLVFLGGNEVGKTYWNRIFIQGWPWVTLSVLGFLYCYSHVGIAWAQTYATD

SEQ ID NO: 30376 - protein, 356 aa, Homo sapiens
MLPRWELALYLLASLGFHFYSFYEVYKVSREHEEELDQEFELETDTLFGGLKKDATDFEWSFWMEWGKQWLVWLLLGHMVVSQMATLLARKMQQQEHDSLKASLCVLALGLGRLLCWWWLAELMAHLMYMHAIYSSIPLLETVSCWTLGGLALAQVLFFYVKYLVLFGVPALLMRLDGLTPPALPRCVSTMFSFTGMWRYFDVGLHNFLIRYVYIPVGGSQHGLLGTLFSTAMTFAFVSYWHGGYDYLWCWAALNWLGVTVENGVRRLVETPCIQDSLARYFSPQARRRFHAALASCSTSMLILSNLVFLGGNEVGKTYWNRIFIQGWPWVTLSVLGFLYCYSHVGIAWAQTYATD

SEQ ID NO: 30377 - protein, 494 aa, Homo sapiens
MSLGLGSAERGVLGTRGARERCRRRRPGQPGEHEEELDQEFELETDTLFGGLKKDATDFEWSFWMEWGKQWLVWLLLGHMVVSQMATLLARKHRPWILMLYGMWACWCVLGTPGVAMVLLHTTISFCVAQFRSQLLTWLCSLLLLSTLRLQGVEEVKRRWYKTENEYYLLQFTLTVRCLYYTSFSLELCWQQLPAASTSYSFPWMLAYVFYYPVLHNGPILSFSEFIKQMQQQEHDSLKASLCVLALGLGRLLCWWWLAELMAHLMYMHAIYSSIPLLETVSCWTLGGLALAQVLFFYVKYLVLFGVPALLMRLDGLTPPALPRCVSTMFSFTGMWRYFDVGLHNFLIRYVYIPVGGSQHGLLGTLFSTAMTFAFVSYWHGGYDYLWCWAALNWLGVTVENGVRRLVETPCIQDSLARYFSPQARRRFHAALASCSTSMLILSNLVFLGGNEVGKTYWNRIFIQGWPWVTLSVLGFLYCYSHVGIAWAQTYATD

SEQ ID NO: 30378 - protein, 114 aa, Homo sapiens
MFGACYKQPLKPSGSEPPAEECRMTPRHAGCDVTEMQRILSQPTFTEHLLRAVCTKLANMYSTSTDCREHCRRGMKAKQLKAEAGRSCQRKGVPIQTPREHSWISCKKEFEANP

SEQ ID NO: 30379 - protein, 121 aa, Homo sapiens
MFGACYKQPLKPSGSEPPAEECRMTPRHAGCDVTEMQRILSQPTFTEHLLRAVCLVNGKGSLSRPQESILGSLARKNLRRIHRVSLVMCVRPLSPSKAIISPVTCMYTSRWPEASEESQKK

SEQ ID NO: 30380 - protein, 76 aa, Homo sapiens
MFGACYKQPLKPSGSEPPAEECRMTPRHAGCDVTEMQRILSQPTFTEHLLRAVLSTERGPYPDPKRAFLDLLQERI

SEQ ID NO: 30381 - protein, 529 aa, Homo sapiens
MTSSRLWFSLLLAAAFAGRATALWPWPQNFQTSDQRYVLYPNNFQFQYDVSSAAQPGCSVLDEAFQRYRDLLFGSGSWPRPYLTGKRHTLEKNVLVVSVVTPGCNQLPTLESVENYTLTINDDQCLLLSETVWGALRGLETFSQLVWKSAEGTFFINKTEIEDFPRFPHRGLLLDTSRHYLPLSSILDTLDVMAYNKLNVFHWHLVDDPSFPYESFTFPELMRKGSYNPVTHIYTAQDVKEVIEYARLRGIRVLAEFDTPGHTLSWGPGIPGLLTPCYSGSEPSGTFGPVNPSLNNTYEFMSTFFLEVSSVFPDFYLHLGGDEVDFTCWKSNPEIQDFMRKKGFGEDFKQLESFYIQTLLDIVSSYGKGYVVWQEVFDNKVKIQPDTIIQVWREDIPVNYMKELELVTKAGFRALLSAPWYLNRISYGPDWKDFYIVEPLAFEGTPEQKALVIGGEACMWGEYVDNTNLVPRLWPRAGAVAERLWSNKLTSDLTFAYERLSHFRCELLRRGVQAQPLNVGFCEQEFEQT

SEQ ID NO: 30382 - protein, 168 aa, Homo sapiens
MAYNKLNVFHWHLVDDPSFPYESFTFPELMRKGSYNPVTHIYTAQDVKEVIEYARLRGIRVLAEFDTPGHTLSWGPGIPGLLTPCYSGSEPSGTFGPVNPSLNNTYEFMSTFFLEVSSVFPDFYLHLGGDEVDFTCWKSNPEIQDFMRKKGFGEDFKQLESFYIQTYP

SEQ ID NO: 30383 - protein, 120 aa, Homo sapiens; identical to SEQ ID NO: 26656

SEQ ID NO: 30384 - protein, 671 aa, Homo sapiens
MPHAFKPGDLVFAKMKGYPHWPARIDDIADGAVKPPPNKYPIFFFGTHETAFLGPKDLFPYDKCKDKYGKPNKRKGFNEGLWEIQNNPHASYSAPPPVSSSDSEAPEANPADGSDADEDDEDRGVMAVTAVTATAASDRMESDSDSDKSSDNSGLKRKTPALKMSVSKRARKASSDLDQASVSPSEEENSESSSESEKTSDQDFTPEKKAAVRAPRRGPLGGRKKKKAPSASDSDSKADSDGAKPEPVAMARSASSSSSSSSSSDSDVSVKKPPRGRKPAEKPLPKPRGRKPKPERPPSSSSSDSDSDEVDRISEWKRRDEARRRELEARRRREQEEELRRLREQEKEEKERRRERADRGEAERGSGGSSGDELREDDEPVKKRGRKGRGRGPPSSSDSEPEAELEREAKKSAKKPQSSSTEPARKPGQKEKRVRPEEKQQAKPVKVERTRKRSEGFSMDRKVEKKKEPSVEEKLQKLHSEIKFALKVDSPDVKRCLNALEELGTLQVTSQILQKNTDVVATLKKIRRYKANKDVMEKAAEVYTRLKSRVLGPKIEAVQKVNKAGMEKEKAEEKLAGEELAGEEAPQEKAEDKPSTDLSAPVNGEATSQKGESAEDKEHEEGRDSEEGPRCGSSEDLHDSVREGPDLDRPGSDRQERERARGDSEALDEES

SEQ ID NO: 30385 - protein, 670 aa, Homo sapiens
MPHAFKPGDLVFAKMKGYPHWPARIDDIADGAVKPPPNKYPIFFFGTHETAFLGPKDLFPYDKCKDKYGKPNKRKGFNEGLWEIQNNPHASYSAPPPVSSSDSEAPEANPADGSDADEDDEDRGVMAVTAVTATAASDRMESDSDSDKSSDNSGLKRKTPALKMSVSKRARKASSDLDQASVSPSEEENSESSSESEKTSDQDFTPEKKAAVRAPRRGPLGGRKKKKAPSASDSDSKADSDGAKPEPVAMARSASSSSSSSSSSDSDVSVKKPPRGRKPAEKPLPKPRGRKPKPERPPSSSSSDSDSDEVDRISEWKRRDEARRRELEARRRREQEEELRRLREQEKEEKERRRERADRGEAERGSGGSSGDELREDDEPVKKRGRKGRGRGPPSSSDSEPEAELEREAKKSAKKPQSSSTEPARKPGQKEKRVRPEEKQQAKPVKVERTRKRSEGFSMDRKVEKKKEPSVEEKLQKLHSEIKFALKVDSPDVKRCLNALEELGTLQVTSQILQKNTDVVATLKKIRRYKANKDVMEKAAEVYTRLKSRVLGPKIEAVQKVNKAGMEKEKAEEKLAGEELAGEEAPQEKAEDKPSTDLSAPVNGEATSQKGESAEDKEHEEGRDSEEGPRCGSSEDLHDVREGPDLDRPGSDRQERERARGDSEALDEES

SEQ ID NO: 30386 - protein, 676 aa, Homo sapiens
MPHAFKPGDLVFAKMKGYPHWPARIDDIADGAVKPPPNKYPIFFFGTHETAFLGPKDLFPYDKCKDKYGKPNKRKGFNEGLWEIQNNPHASYSAPPPVSSSDSEAPEANPADGSDADEDDEDRGVMAVTAVTATAASDRMESDSDSDKSSDNSGLKRKTPALKMSVSKRARKASSDLDQASVSPSEEENSESSSESEKTSDQDFTPEKKAAVRAPRRGPLGGRKKKKAPSASDSDSKADSDGAKPEPVAMARSASSSSSSSSSSDSDVSVKKPPRGRKPAEKPLPKPRGRKPKPERPPSSSSSDSDSDEVDRISEWKRRDEARRRELEARRRREQEEELRRLREQEKEEKERRRERADRGEAERGSGGSSGDELREDDEPVKKRGRKGRGRGPPSSSDSEPEAELEREAKKSAKKPQSSSTEPARKPGQKEKRVRPEEKQQAKPVKVERTRKRSEGFSMDRKVEKKKEPSVEEKLQKLHSEIKFALKVDSPDVKRCLNALEELGTLQVTSQILQKNTDVVATLKKIRRYKANKDVMEKAAEVYTRLKSRVLGPKIEAVQKVNKAGMEKEKAEEKLAGEELAGEELAGEEAPQEKAEDKPSTDLSAPVNGEATSQKGESAEDKEHEEGRDSEEGPRCGSSEDLHDSVREGPDLDRPGSDRQERERARGDSEALDEES

SEQ ID NO: 30387 - protein, 675 aa, Homo sapiens
MPHAFKPGDLVFAKMKGYPHWPARIDDIADGAVKPPPNKYPIFFFGTHETAFLGPKDLFPYDKCKDKYGKPNKRKGFNEGLWEIQNNPHASYSAPPPVSSSDSEAPEANPADGSDADEDDEDRGVMAVTAVTATAASDRMESDSDSDKSSDNSGLKRKTPALKMSVSKRARKASSDLDQASVSPSEEENSESSSESEKTSDQDFTPEKKAAVRAPRRGPLGGRKKKKAPSASDSDSKADSDGAKPEPVAMARSASSSSSSSSSSDSDVSVKKPPRGRKPAEKPLPKPRGRKPKPERPPSSSSSDSDSDEVDRISEWKRRDEARRRELEARRRREQEEELRRLREQEKEEKERRRERADRGEAERGSGGSSGDELREDDEPVKKRGRKGRGRGPPSSSDSEPEAELEREAKKSAKKPQSSSTEPARKPGQKEKRVRPEEKQQAKPVKVERTRKRSEGFSMDRKVEKKKEPSVEEKLQKLHSEIKFALKVDSPDVKRCLNALEELGTLQVTSQILQKNTDVVATLKKIRRYKANKDVMEKAAEVYTRLKSRVLGPKIEAVQKVNKAGMEKEKAEEKLAGEELAGEELAGEEAPQEKAEDKPSTDLSAPVNGEATSQKGESAEDKEHEEGRDSEEGPRCGSSEDLHDVREGPDLDRPGSDRQERERARGDSEALDEES

SEQ ID NO: 30388 - protein, 328 aa, Homo sapiens
MKRPKEPSGSDGESDGPIDVGQEGQLSQMARPLSTPSSSQMQARKKHRGIIEKRRRDRINSSLSELRRLVPTAFEKQGSSKLEKAEVLQMTVDHLKMLHATGGTGFFDARALAVDFRSIGFRECLTEVIRYLGVLEGPSSRADPVRIRLLSHLNSYAAEMEPSPTPTGPLAFPAWPWSFFHSCPGLPALSNQLAILGRVPSPVLPGVSSPAYPIPALRTAPLRRATGIILPARRNVLPSRGASSTRRARPLERPATPVPVAPSSRAARSSHIAPLLQSSSPTPPGPTGSAAYVAVPTPNSSSPGPAGRPAGAMLYHSWVSEITEIGAF

SEQ ID NO: 30389 - protein, 3075 aa, Homo sapiens
MRGGVLLVLLLCVAAQCRQRGLFPAILNLASNAHISTNATCGEKGPEMFCKLVEHVPGRPVRNPQCRICDGNSANPRERHPISHAIDGTNNWWQSPSIQNGREYHWVTITLDLRQVFQVAYVIIKAANAPRPGNWILERSLDGTTFSPWQYYAVSDSECLSRYNITPRRGPPTYRADDEVICTSYYSRLVPLEHGEIHTSLINGRPSADDLSPKLLEFTSARYIRLRLQRIRTLNADLMTLSHREPKELDPIVTRRYYYSIKDISVGGMCICYGHASSCPWDETTKKLQCQCEHNTCGESCNRCCPGYHQQPWRPGTVSSGNTCEACNCHNKAKDCYYDESVAKQKKSLNTAGQFRGGGVCINCLQNTMGINCETCIDGYYRPHKVSPYEDEPCRPCNCDPVGSLSSVCIKDDLHSDLHNGKQPGQCPCKEGYTGEKCDRCQLGYKDYPTCVSCGCNPVGSASDEPCTGPCVCKENVEGKACDRCKPGFYNLKEKNPRGCSECFCFGVSDVCSSLSWPVGQVNSMSGWLVTDLISPRKIPSQQDALGGRHQVSINNTAVMQRLAPKYYWAAPEAYLGNKLTAFGGFLKYTVSYDIPVETVDSNLMSHADVIIKGNGLTLSTQAEGLSLQPYEEYLNVVRLVPENFQDFHSKRQIDRDQLMTVLANVTHLLIRANYNSAKMALYRLESVSLDIASSNAIDLVVAADVEHCECPQGYTGTSCESCLSGYYRVDGILFGGICQPCECHGHAAECNVHGVCIACAHNTTGVHCEQCLPGFYGEPSRGTPGDCQPCACPLTIASNNFSPTCHLNDGDEVVCDWCAPGYSGAWCERCADGYYGNPTVPGESCVPCDCSGNVDPSEAGHCDSVTGECLKCLGNTDGAHCERCADGFYGDAVTAKNCRACECHVKGSHSAVCHLETGLCDCKPNVTGQQCDQCLHGYYGLDSGHGCRPCNCSVAGSVSDGCTDEGQCHCVPGVAGKRCDRCAHGFYAYQDGSCTPCDCPHTQNTCDPETGECVCPPHTQGVKCEECEDGHWGYDAEVGCQACNCSLVGSTHHRCDVVTGHCQCKSKFGGRACDQCSLGYRDFPDCVPCDCDLRGTSGDACNLEQGLCGCVEETGACPCKENVFGPQCNECREGTFALRADNPLGCSPCFCSGLSHLCSELEDYVRTPVTLGSDQPLLRVVSQSNLRGTTEGVYYQAPDFLLDAATVRQHIRAEPFYWRLPQQFQGDQLMAYGGKLKYSVAFYSLDGVGTSNFEPQVLIKGGRIRKQVIYMDAPAPENGVRQEQEVAMRENFWKYFNSVSEKPVTREDFMSVLSDIEYILIKASYGQGLQQSRISDISMEVGRKAEKLHPEEEVASLLENCVCPPGTVGFSCQDCAPGYHRGKLPAGSDRGPRPLVAPCVPCSCNNHSDTCDPNTGKCLNCGDNTAGDHCDVCTSGYYGKVTGSASDCALCACPHSPPASFSPTCVLEGDHDFRCDACLLGYEGKHCERCSSSYYGNPQTPGGSCQKCDCNPHGSVHGDCDRTSGQCVCRLGASGLRCDECEPRHILMETDCVSCDDECVGVLLNDLDEIGDAVLSLNLTGIIPVPYGILSNLENTTKYLQESLLKENMQKDLGKIKLEGVAEETDNLQKKLTRMLASTQKVNRATERIFKESQDLAIAIERLQMSITEIMEKTTLNQTLDEDFLLPNSTLQNMQQNGTSLLEIMQIRDFTQLHQNATLELKAAEDLLSQIQENYQKPLEELEVLKEAASHVLSKHNNELKAAEALVREAEAKMQESNHLLLMVNANLREFSDKKLHVQEEQNLTSELIVQGRGLIDAAAAQTDAVQDALEHLEDHQDKLLLWSAKIRHHIDDLVMHMSQRNAVDLVYRAEDHAAEFQRLADVLYSGLENIRNVSLNATSAAYVHYNIQSLIEESEELARDAHRTVTETSLLSESLVSNGKAAVQRSSRFLKEGNNLSRKLPGIALELSELRNKTNRFQENAVEITRQTNESLLILRAIPKGIRDKGAKTKELATSASQSAVSTLRDVAGLSQELLNTSASLSRVNTTLRETHQLLQDSTMATLLAGRKVKDVEIQANLLFDRLKPLKMLEENLSRNLSEIKLLISQARKQAASIKVAVSADRDCIRAYQPQISSTNYNTLTLNVKTQEPDNLLFYLGSSTASDFLAVEMRRGRVAFLWDLGSGSTRLEFPDFPIDDNRWHSIHVARFGNIGSLSVKEMSSNQKSPTKTSKSPGTANVLDVNNSTLMFVGGLGGQIKKSPAVKVTHFKGCLGEAFLNGKSIGLWNYIEREGKCRGCFGSSQNEDPSFHFDGSGYSVVEKSLPATVTQIIMLFNTFSPNGLLLYLGSYGTKDFLSIELFRGRVKVMTDLGSGPITLLTDRRYNNGTWYKIAFQRNRKQGVLAVIDAYNTSNKETKQGETPGASSDLNRLDKDPIYVGGLPRSRVVRRGVTTKSFVGCIKNLEISRSTFDLLRNSYGVRKGCLLEPIRSVSFLKGGYIELPPKSLSPESEWLVTFATTNSSGIILAALGGDVEKRGDREEAHVPFFSVMLIGGNIEVHVNPGDGTGLRKALLHAPTGTCSDGQAHSISLVRNRRIITVQLDENNPVEMKLGTLVESRTINVSNLYVGGIPEGEGTSLLTMRRSFHGCIKNLIFNLELLDFNSAVGHEQVDLDTCWLSERPKLAPDAEDSKLLPEPRAFPEQCVVDAALEYVPGAHQFGLTQNSHFILPFNQSAVRKKLSVELSIRTFASSGLIYYMAHQNQADYAVLQLHGGRLHFMFDLGKGRTKVSHPALLSDGKWHTVKTDYVKRKGFITVDGRESPMVTVVGDGTMLDVEGLFYLGGLPSQYQARKIGNITHSIPACIGDVTVNSKQLDKDSPVSAFTVNRCYAVAQEGTYFDGSGYAALVKEGYKVQSDVNITLEFRTSSQNGVLLGISTAKVDAIGLELVDGKVLFHVNNGAGRITAAYEPKTATVLCDGKWHTLQANKSKHRITLIVDGNAVGAESPHTQSTSVDTNNPIYVGGYPAGVKQKCLRSQTSFRGCLRKLALIKSPQVQSFDFSRAFELHGVFLHSCPGTES

SEQ ID NO: 30390 - protein, 556 aa, Homo sapiens
MELCGLGLPRPPMLLALLLATLLAAMLALLTQVALVVQVAEAARAPSVSAKPGPALWPLPLSVKMTPNLLHLAPENFYISHSPNSTAGPSCTLLEEAFRRYHGYIFGFYKWHHEPAEFQAKTQVQQLLVSITLQSECDAFPNISSDESYTLLVKEPVAVLKANRVWGALRGLETFSQLVYQDSYGTFTINESTIIDSPRFSHRGILIDTSRHYLPVKIILKTLDAMAFNKFNVLHWHIVDDQSFPYQSITFPELSNKGSYSLSHVYTPNDVRMVIEYARLRGIRVLPEFDTPGHTLSWGKGQKDLLTPCYSRQNKLDSFGPINPTLNTTYSFLTTFFKEISEVFPDQFIHLGGDEVEFKCWESNPKIQDFMRQKGFGTDFKKLESFYIQKVLDIIATINKGSIVWQEVFDDKAKLAPGTIVEVWKDSAYPEELSRVTASGFPVILSAPWYLDLISYGQDWRKYYKVEPLDFGGTQKQKQLFIGGEACLWGEYVDATNLTPRLWPRASAVGERLWSSKDVRDMDDAYDRLTRHRCRMVERGIAAQPLYAGYCNHENM

SEQ ID NO: 30391 - protein, 747 aa, Homo sapiens
MEVKRLKVTELRSELQRRGLDSRGLKVDLAQRLQEALDAEMLEDEAGGGGAGPGGACKAEPRPVAASGGGPGGDEEEDEEEEEEDEEALLEDEDEEPPPAQALGQAAQPPPEPPEAAAMEAAAEPDASEKPAEATAGSGGVNGGEEQGLGKREEDEPEERSGDETPGSEVPGDKAAEEQGDDQDSEKSKPAGSDGERRGVKRQRDEKDEHGRAYYEFREEAYHSRSKSPLPPEEEAKDEEEDQTLVNLDTYTSDLHFQVSKDRYGGQPLFSEKFPTLWSGARSTYGVTKGKVCFEAKVTQNLPMKEGCTEVSLLRVGWSVDFSRPQLGEDEFSYGFDGRGLKAENGQFEEFGQTFGENDVIGCFANFETEEVELSFSKNGEDLGVAFWISKDSLADRALLPHVLCKNCVVELNFGQKEEPFFPPPEEFVFIHAVPVEERVRTAVPPKTIEECEVILMVGLPGSGKTQWALKYAKENPEKRYNVLGAETVLNQMRMKGLEEPEMDPKSRDLLVQQASQCLSKLVQIASRTKRNFILDQCNVYNSGQRRKLLLFKTFSRKVVVVVPNEEDWKKRLELRKEVEGDDVPESIMLEMKANFSLPEKCDYMDEVTYGELEKEEAQPIVTKYKEEARKLLPPSEKRTNRRNNRNKRNRQNRSRGQGYVGGQRRGYDNRAYGQQYWGQPGNRGGYRNFYDRYRGDYDRFYGRDYEYNRYRDYYRQYNRDWQSYYYHHPQDRDRYYRNYYGYQGYR

SEQ ID NO: 30392 - protein, 471 aa, Homo sapiens
MAREMTILGSAVLTLLLAGYLAQQYLPLPTPKVIGIDLGTTYCSVGVFFPGTGKVKVIPDENGHISIPSMVSFTDNDVYVGYESVELADSNPQNTIYDAKRFIGKIFTAEELEAEIGRYPFKVLNKNGMVEFSVTSNETITVSPEYVGSRLLLKLKEMAEAYLGMPVANAVISVPAEFDLKQRNSTIEAANLAGLKILRVINEPTAAAMAYGLHKADVFHVLVIDLGGGTLDVSLLNKQGGMFLTRAMSGNNKLGGQDFNQRLLQYLYKQIYQTYGFVPSRKEEIHRLRQAVEMVKLNLTLHQSAQLSVLLTVEEQDRKEPHSSDTELPKDKLSSADDHRVNSGFGRGLSDKKSGESQVLFETEISRKLFDTLNEDLFQKILVPIQQVLKEGHLEKTEIDEVVLVGGSTRIPRIRQVIQEFFGKDPNTSVDPDLAVVTGVAIQAGIDGGSWPLQVSALEIPNKHLQKTNFN

SEQ ID NO: 30393 - protein, 115 aa, Homo sapiens
MLGLLGSTALVGWITGAAVAVLLLLLLLATCLFHGRQDCDVERNRTAAGGNRVRRAQPWPFRRRGHLGIFHHHRHPGHVSHVPNVGLHHHHHPRHTPHHLHHHHHPHRHHPRHAR

SEQ ID NO: 30394 - protein, 674 aa, Homo sapiens
MPSYTVTVATGSQWFAGTDDYIYLSLVGSAGCSEKHLLDKPFYNDFERGAVDSYDVTVDEELGEIQLVRIEKRKYWLNDDWYLKYITLKTPHGDYIEFPCYRWITGDVEVVLRDGRAKLARDDQIHILKQHRRKELETRQKQYRWMEWNPGFPLSIDAKCHKDLPRDIQFDSEKGVDFVLNYSKAMENLFINRFMHMFQSSWNDFADFEKIFVKISNTISERVMNHWQEDLMFGYQFLNGCNPVLIRRCTELPEKLPVTTEMVECSLERQLSLEQEVQQGNIFIVDFELLDGIDANKTDPCTLQFLAAPICLLYKNLANKIVPIAIQLNQIPGDENPIFLPSDAKYDWLLAKIWVRSSDFHVHQTITHLLRTHLVSEVFGIAMYRQLPAVHPIFKLLVAHVRFTIAINTKAREQLICECGLFDKANATGGGGHVQMVQRAMKDLTYASLCFPEAIKARGMESKEDIPYYFYRDDGLLVWEAIRTFTAEVVDIYYEGDQVVEEDPELQDFVNDVYVYGMRGRKSSGFPKSVKSREQLSEYLTVVIFTASAQHAAVNFGQYDWCSWIPNAPPTMRAPPPTAKGVVTIEQIVDTLPDRGRSCWHLGAVWALSQFQENELFLGMYPEEHFIEKPVKEAMARFRKNLEAIVSVIAERNKKKQLPYYYLSPDRIPNSVAI

SEQ ID NO: 30395 - protein, 617 aa, Homo sapiens
MPSYTVTVATGSQWFAGTDDYIYLSLVGSAGCSEKHLLDKPFYNDFERGAVDSYDVTVDEELGEIQLVRIEKRKYWLNDDWYLKYITLKTPHGDYIEFPCYRWITGDVEVVLRDGRAKLARDDQIHILKQHRRKELETRQKQYRWMEWNPGFPLSIDAKCHKDLPRDIQFDSEKGVDFVLNYSKAMENLFINRFMHMFQSSWNDFADFEKIFVKISNTISERVMNHWQEDLMFGYQFLNGCNPVLIRRCTELPEKLPVTTEMVECSLERQLSLEQEVQQGNIFIVDFELLDGIDANKTDPCTLQFLAAPICLLYKNLANKIVPIAIQLNQIPGDENPIFLPSDAKYDWLLAKIWVRSSDFHVHQTITHLLRTHLVSEVFGIAMYRQLPAVHPIFKLLVAHVRFTIAINTKAREQLICECGLFDKANATGGGGHVQMVQRAMKDLTYASLCFPEAIKARGMESKEDIPYYFYRDDGLLVWEAIRTFTAEVVDIYYEGDQVVEEDPELQDFVNDVYVYGMRGRKSSGFPKSVKSREQLSEYLTVVIFTASAQHAAVNFGQLFLGMYPEEHFIEKPVKEAMARFRKNLEAIVSVIAERNKKKQLPYYYLSPDRIPNSVAI

SEQ ID NO: 30396 - protein, 642 aa, Homo sapiens
MPSYTVTVATGSQWFAGTDDYIYLSLVGSAGCSEKHLLDKPFYNDFERGAVDSYDVTVDEELGEIQLVRIEKRKYWLNDDWYLKYITLKTPHGDYIEFPCYRWITGDVEVVLRDGRAKLARDDQIHILKQHRRKELETRQKQYRWMEWNPGFPLSIDAKCHKDLPRDIQFDSEKGVDFVLNYSKAMENLFINRFMHMFQSSWNDFADFEKIFVKISNTISERVMNHWQEDLMFGYQFLNGCNPVLIRRCTELPEKLPVTTEMVECSLERQLSLEQEVQQGNIFIVDFELLDGIDANKTDPCTLQFLAAPICLLYKNLANKIVPIAIQLNQIPGDENPIFLPSDAKYDWLLAKIWVRSSDFHVHQTITHLLRTHLVSEVFGIAMYRQLPAVHPIFKLLVAHVRFTIAINTKAREQLICECGLFDKARGMESKEDIPYYFYRDDGLLVWEAIRTFTAEVVDIYYEGDQVVEEDPELQDFVNDVYVYGMRGRKSSGFPKSVKSREQLSEYLTVVIFTASAQHAAVNFGQYDWCSWIPNAPPTMRAPPPTAKGVVTIEQIVDTLPDRGRSCWHLGAVWALSQFQENELFLGMYPEEHFIEKPVKEAMARFRKNLEAIVSVIAERNKKKQLPYYYLSPDRIPNSVAI

SEQ ID NO: 30397 - protein, 533 aa, Homo sapiens
MPSYTVTVATGSQWFAGTDDYIYLSLVGSAGCSEKHLLDKPFYNDFERGAVDSYDVTVDEELGEIQLVRIEKRKYWLNDDWYLKYITLKTPHGDYIEFPCYRWITGDVEVVLRDGRAKLARDDQIHILKQHRRKELETRQKQYRWMEWNPGFPLSIDAKCHKDLPRDIQFDSEKGVDFVLNYSKAMENLFINRFMHMFQSSWNDFADFEKIFVKISNTISERVMNHWQEDLMFGYQFLNGCNPVLIRRCTELPEKLPVTTEMVECSLERQLSLEQEVQQGNIFIVDFELLDGIDANKTDPCTLQFLAAPICLLYKNLANKIVPIAIQLNQIPGDENPIFLPSDAKYDWLLAKIWVRSSDFHVHQTITHLLRTHLVSEVFGIAMYRQLPAVHPIFKLLVAHVRFTIAINTKAREQLICECGLFDKVHGRGGRHLLRGRPGGGGGPGAAGLRERCLRVRHAGPQVLRLPQVGQEPGAAVGVPDRGDLHRLRPARRGQLRPAVPGHVPRRAFYREACEGSHGPIPQEPRGHCQRDC
